United States Patent Application Publication US 2016/0331844 A1 - sequence listing, part 3

SEQ ID NO: 6355 - RNA, 720 nt, Artificial Sequence; identical to SEQ ID NO: 6195
  derived and/or modified sequence opt1 from Purine_Nucleoside_Phosphorylase_deoD__Escherichia_coli__ABV08767

SEQ ID NO: 6356 - RNA, 720 nt, Artificial Sequence; identical to SEQ ID NO: 6196
  derived and/or modified sequence opt2 from Purine_Nucleoside_Phosphorylase_deoD__Escherichia_coli__ABV08767

SEQ ID NO: 6357 - RNA, 720 nt, Artificial Sequence; identical to SEQ ID NO: 6197
  derived and/or modified sequence opt3 from Purine_Nucleoside_Phosphorylase_deoD__Escherichia_coli__ABV08767

SEQ ID NO: 6358 - RNA, 720 nt, Artificial Sequence; identical to SEQ ID NO: 6198
  derived and/or modified sequence opt4 from Purine_Nucleoside_Phosphorylase_deoD__Escherichia_coli__ABV08767

SEQ ID NO: 6359 - RNA, 720 nt, Artificial Sequence; identical to SEQ ID NO: 6199
  derived and/or modified sequence opt5 from Purine_Nucleoside_Phosphorylase_deoD__Escherichia_coli__ABV08767

SEQ ID NO: 6360 - RNA, 720 nt, Artificial Sequence
  derived and/or modified sequence opt6 from Purine_Nucleoside_Phosphorylase_deoD__Escherichia_coli__ABV08767
auggcaacaccacauauaaaugcagaaaugggagacuuugcagacguaguacuaaugccaggagacccacuuagagcaaaauacauagcagaaacauuucuagaagacgcuagagaaguaaauaacguaagaggaauguuaggauuuacaggaacauauaaaggaagaaaaauaucaguaaugggacauggaaugggaauaccaucauguagcauauauacaaaagaacuaauaacagacuuuggaguaaaaaaaauaauaagaguaggaucuugcggggcaguacuaccacacguaaaauuaagagauguaguaauaggaaugggagcauguacagauucaaaaguaaauagaauacgauuuaaagaucacgauuucgcagcaauagcagacuuugauaugguaagaaaugcaguagacgcggcaaaagcuuuaggaauagacgcaagaguaggaaauuuauuuagugcagacuuauucuauagcccagauggagaaauguucgauguaauggaaaaauauggaauauuaggcguggaaauggaagcagcaggaauauauggaguagcagcagaauuuggagcaaaagcauuaacaauauguacaguaagcgaccauauacgaacacacgaacaaacaacagcagccgaaagacaaacaacauuuaaugauaugauaaaaauagcauuagaaagcguacuauuaggagauaaagaauaa

SEQ ID NO: 6361 - protein, 239 aa, Artificial Sequence; identical to SEQ ID NO: 6201
  Purine_Nucleoside_Phosphorylase_deoD__Escherichia_coli__B1IS35

SEQ ID NO: 6362 - RNA, 720 nt, Artificial Sequence
  Purine_Nucleoside_Phosphorylase_deoD__Escherichia_coli__ACA79283
auggcuaccccacacauuaaugcagaaaugggcgauuucgcugacguaguuuugaugccaggcgacccgcugcgugcgaaguauauugcugaaacuuuccuugaagaugcccgugaagugaacaacguucgcgguaugcugggcuucaccgguacuuacaaaggccgcaaaauuuccguaaugggucacgguauggguaucccguccugcuccaucuacaccaaagaacugaucaccgauuucggcguaaagaaaauuauccgcguaggcuccuguggcgcuguucugccgcacguaaaacugcgcgacgucguuaucgguaugggugccugcaccgauuccaaaguuaaccguauccguuuuaaagaccaugacuuugccgcuaucgcugacuuugacauggugcguaacgcgguagacgcggcuaaagcacugggcguugaugcucgcguugguaaccuguucuccgcugaccuguucuacucuccggacggcgaaauguucgacgugauggaaaaauacggcauccucggcguggaaauggaagcggcugguaucuacggcgucgcugcagaauuuggcgcgaaagcccugaccaucugcaccgugucugaccacauccgcacucacgagcagaccacugccgcugagcgucagaccaccuucaacgacaugaucaaaaucgcacuggaauccguucugcugggcgauaaagaguaa

SEQ ID NO: 6363 - RNA, 720 nt, Artificial Sequence; identical to SEQ ID NO: 6203
  derived and/or modified sequence opt1 from Purine_Nucleoside_Phosphorylase_deoD__Escherichia_coli__ACA79283

SEQ ID NO: 6364 - RNA, 720 nt, Artificial Sequence; identical to SEQ ID NO: 6204
  derived and/or modified sequence opt2 from Purine_Nucleoside_Phosphorylase_deoD__Escherichia_coli__ACA79283

SEQ ID NO: 6365 - RNA, 720 nt, Artificial Sequence; identical to SEQ ID NO: 6205
  derived and/or modified sequence opt3 from Purine_Nucleoside_Phosphorylase_deoD__Escherichia_coli__ACA79283

SEQ ID NO: 6366 - RNA, 720 nt, Artificial Sequence; identical to SEQ ID NO: 6206
  derived and/or modified sequence opt4 from Purine_Nucleoside_Phosphorylase_deoD__Escherichia_coli__ACA79283

SEQ ID NO: 6367 - RNA, 720 nt, Artificial Sequence; identical to SEQ ID NO: 6207
  derived and/or modified sequence opt5 from Purine_Nucleoside_Phosphorylase_deoD__Escherichia_coli__ACA79283

SEQ ID NO: 6368 - RNA, 720 nt, Artificial Sequence
  derived and/or modified sequence opt6 from Purine_Nucleoside_Phosphorylase_deoD__Escherichia_coli__ACA79283
auggcaacaccacauauaaaugcagaaaugggagacuuugcagauguaguacuaaugccaggagacccacuaagagcaaaauacauugcagaaaccuuuuuagaagacgcaagagaaguaaauaacguaagaggaauguuaggauuuacaggaacauauaaaggaagaaaaauaaguguaaugggacauggaaugggaauaccaaguuguucgauauauacaaaagaauuaauaacagacuuuggcguaaaaaaaauaauaagaguaggaagcugcggagcaguacuaccacacguaaaauuaagagauguaguaauaggaaugggagccuguacagauagcaaaguaaauagaauuagauuuaaagaucacgauuuugcggcaauagccgauuuugauaugguaagaaaugcaguagacgcagcaaaagcauuaggaguggacgcaagaguaggaaaucuauuuagugcagacuuauuuuauagcccagacggggaaauguucgauguaauggaaaaauacggaauauuaggaguagaaauggaagcagcaggaauauauggaguggcagcggaauuuggagcaaaagcacuaacaauauguacaguaagcgaucacauaagaacacacgaacaaacaacagcagccgaaagacaaacaacguucaaugacaugauaaaaauagcacuagaaaguguauuauuaggagauaaagaauaa

SEQ ID NO: 6369 - protein, 239 aa, Artificial Sequence; identical to SEQ ID NO: 6193
  Purine_Nucleoside_Phosphorylase_deoD__Escherichia_coli__B1LEI9

SEQ ID NO: 6370 - RNA, 720 nt, Artificial Sequence
  Purine_Nucleoside_Phosphorylase_deoD__Escherichia_coli__ACB16204
auggcuaccccacacauuaaugcagaaaugggcgauuucgcugacguaguuuugaugccaggcgacccgcugcgugcgaaguauauugcugaaacuuuccuugaagaugcccgugaagugaacaacguucgcgguaugcugggcuucaccgguacuuacaaaggccgcaaaauuuccguaauggggcacgguauggguaucccguccugcuccaucuacaccaaagaacugaucaccgauuucggcgugaagaaaauuauccgcguaggcuccuguggcgcuguucugccgcacguaaaacugcgcgacgucguuaucgguaugggugccugcaccgauuccaaaguuaaccguauccguuuuaaagaccaugacuuugccgcuaucgcugacuuugacauggugcguaacgcgguagaugcagcuaaagcacugggcauugaugcucgcguugguaaccuguucuccgcugaccuguuuuacucuccggacggcgaaauguucgacgugauggaaaaauacggcauccucggcguggaaauggaagcagcugguaucuacggcgucgcugcagaauuuggcgcgaaagcccugaccaucugcaccgugucugaccacauccgcacucacgagcagaccacugccgcugagcgucagaccaccuucaacgacaugaucaaaaucgcacuggaauccguucuguugggcgauaaagaguaa

SEQ ID NO: 6371 - RNA, 720 nt, Artificial Sequence; identical to SEQ ID NO: 6195
  derived and/or modified sequence opt1 from Purine_Nucleoside_Phosphorylase_deoD__Escherichia_coli__ACB16204

SEQ ID NO: 6372 - RNA, 720 nt, Artificial Sequence; identical to SEQ ID NO: 6196
  derived and/or modified sequence opt2 from Purine_Nucleoside_Phosphorylase_deoD__Escherichia_coli__ACB16204

SEQ ID NO: 6373 - RNA, 720 nt, Artificial Sequence; identical to SEQ ID NO: 6197
  derived and/or modified sequence opt3 from Purine_Nucleoside_Phosphorylase_deoD__Escherichia_coli__ACB16204

SEQ ID NO: 6374 - RNA, 720 nt, Artificial Sequence; identical to SEQ ID NO: 6198
  derived and/or modified sequence opt4 from Purine_Nucleoside_Phosphorylase_deoD__Escherichia_coli__ACB16204

SEQ ID NO: 6375 - RNA, 720 nt, Artificial Sequence; identical to SEQ ID NO: 6199
  derived and/or modified sequence opt5 from Purine_Nucleoside_Phosphorylase_deoD__Escherichia_coli__ACB16204

SEQ ID NO: 6376 - RNA, 720 nt, Artificial Sequence
  derived and/or modified sequence opt6 from Purine_Nucleoside_Phosphorylase_deoD__Escherichia_coli__ACB16204
auggcaacaccacauauaaaugcagaaaugggagacuuugcagauguaguacuaaugccaggagacccacuaagagcaaaauacauagcagaaacauuucuagaagacgcaagagaaguaaauaacguaagaggaauguuaggauuuacaggaacauauaaaggaagaaaaauaaguguaaugggacauggcaugggaauaccaucauguucaauuuauacaaaagaauuaauaacagacuuuggaguaaaaaaaaucauaagaguaggaucaugcggagcaguacuaccacacguaaaauuaagagaugucguaauuggaaugggagcaugcacagauaguaaaguaaauagaauaagauucaaagaucaugauuucgcagcaauagcagauuucgauaugguaagaaaugcaguagacgcagcaaaagcacuaggaauagacgcaagaguagguaaucuauuuagcgcagacuuauucuauaguccagacggagaaauguucgauguaauggaaaaauacggaauauuaggaguagaaauggaagcagcaggaauauauggcguagcagcagaauuuggcgcaaaagcacuaacgauauguaccguaagcgaucauauaagaacgcacgaacagacaacagcggcagagagacaaacaacauucaaugacaugauaaaaauagcacuagaaaguguacuauuaggagauaaagaauaa

SEQ ID NO: 6377 - protein, 239 aa, Artificial Sequence; identical to SEQ ID NO: 6193
  Purine_Nucleoside_Phosphorylase_deoD__Escherichia_coli__B1XFJ4

SEQ ID NO: 6378 - RNA, 720 nt, Artificial Sequence; identical to SEQ ID NO: 6338
  Purine_Nucleoside_Phosphorylase_deoD__Escherichia_coli__ACB05312

SEQ ID NO: 6379 - RNA, 720 nt, Artificial Sequence; identical to SEQ ID NO: 6195
  derived and/or modified sequence opt1 from Purine_Nucleoside_Phosphorylase_deoD__Escherichia_coli__ACB05312

SEQ ID NO: 6380 - RNA, 720 nt, Artificial Sequence; identical to SEQ ID NO: 6196
  derived and/or modified sequence opt2 from Purine_Nucleoside_Phosphorylase_deoD__Escherichia_coli__ACB05312

SEQ ID NO: 6381 - RNA, 720 nt, Artificial Sequence; identical to SEQ ID NO: 6197
  derived and/or modified sequence opt3 from Purine_Nucleoside_Phosphorylase_deoD__Escherichia_coli__ACB05312

SEQ ID NO: 6382 - RNA, 720 nt, Artificial Sequence; identical to SEQ ID NO: 6198
  derived and/or modified sequence opt4 from Purine_Nucleoside_Phosphorylase_deoD__Escherichia_coli__ACB05312

SEQ ID NO: 6383 - RNA, 720 nt, Artificial Sequence; identical to SEQ ID NO: 6199
  derived and/or modified sequence opt5 from Purine_Nucleoside_Phosphorylase_deoD__Escherichia_coli__ACB05312

SEQ ID NO: 6384 - RNA, 720 nt, Artificial Sequence
  derived and/or modified sequence opt6 from Purine_Nucleoside_Phosphorylase_deoD__Escherichia_coli__ACB05312
auggcaacaccacauauaaaugcagaaaugggagacuuugcagauguaguacuaaugccaggagacccauuaagagcaaaauacauagcagaaacauuucuagaagacgcaagagaaguaaauaacguaagaggaauguuaggauuuacaggaacguauaaaggaagaaaaaucucaguaaugggacauggaaugggaauaccaucauguaguauauauaccaaagaauuaauaacagacuuuggaguaaaaaaaauaauaagaguaggaucaugcggagcaguacuaccacacguaaaauuaagagauguaguaauaggaaugggagcauguacagauagcaaaguaaauagaauuagauuuaaagaucacgacuucgcagcaauagcagauuucgauaugguaagaaaugcaguagaugcggcaaaagcauuaggaauagacgcaagaguaggaaauuuauuuagugcggacuuauuuuauagcccagauggagaaauguucgauguaauggaaaaauacggaauacuaggaguagaaauggaagcagcaggaauauacggaguagcagcggaauuuggagcaaaagcauuaacaaucuguacaguaagcgaucacauaagaacacacgaacaaacaacagcagcagaaagacaaacaacguucaaugacaugauaaaaauagcacuagaaaguguacuauuaggcgauaaagaauaa

SEQ ID NO: 6385 - protein, 239 aa, Artificial Sequence; identical to SEQ ID NO: 6201
  Purine_Nucleoside_Phosphorylase_deoD__Escherichia_coli__B3HEI4

SEQ ID NO: 6386 - RNA, 720 nt, Artificial Sequence; identical to SEQ ID NO: 6218
  Purine_Nucleoside_Phosphorylase_deoD__Escherichia_coli__AIF62240

SEQ ID NO: 6387 - RNA, 720 nt, Artificial Sequence; identical to SEQ ID NO: 6203
  derived and/or modified sequence opt1 from Purine_Nucleoside_Phosphorylase_deoD__Escherichia_coli__AIF62240

SEQ ID NO: 6388 - RNA, 720 nt, Artificial Sequence; identical to SEQ ID NO: 6204
  derived and/or modified sequence opt2 from Purine_Nucleoside_Phosphorylase_deoD__Escherichia_coli__AIF62240

SEQ ID NO: 6389 - RNA, 720 nt, Artificial Sequence; identical to SEQ ID NO: 6205
  derived and/or modified sequence opt3 from Purine_Nucleoside_Phosphorylase_deoD__Escherichia_coli__AIF62240

SEQ ID NO: 6390 - RNA, 720 nt, Artificial Sequence; identical to SEQ ID NO: 6206
  derived and/or modified sequence opt4 from Purine_Nucleoside_Phosphorylase_deoD__Escherichia_coli__AIF62240

SEQ ID NO: 6391 - RNA, 720 nt, Artificial Sequence; identical to SEQ ID NO: 6207
  derived and/or modified sequence opt5 from Purine_Nucleoside_Phosphorylase_deoD__Escherichia_coli__AIF62240

SEQ ID NO: 6392 - RNA, 720 nt, Artificial Sequence
  derived and/or modified sequence opt6 from Purine_Nucleoside_Phosphorylase_deoD__Escherichia_coli__AIF62240
auggcaacaccacauauaaaugcagaaaugggagacuuugcagauguaguauuaaugccaggagacccacuaagagcaaaauacauagcagaaacauuucuagaagacgcaagagaaguaaauaauguaagaggaauguuaggauuuacaggaacauauaaagggagaaaaauaaguguaaugggccauggaaugggaauaccaucaugcucaauauauacaaaagaauuaauaacagacuucggaguaaaaaagauaauaagaguaggaucaugcggagcaguacuaccacacgugaaauuaagagauguaguaauaggaaugggugcauguacagacagcaaaguaaauagaauaagauuuaaagaucacgauuucgcagcaauagccgauuucgauaugguaagaaaugcaguagacgcagcaaaagcauuaggaguagacgcaagaguaggaaaucuauuuagcgcagacuuauucuauagcccagacggagaaauguuugauguaauggaaaaauacggaauauuaggaguagaaauggaagcagcaggaauauauggaguagcagcagaauuuggagcaaaagcacuaacaaucuguacaguaagcgaucacauaagaacacacgaacaaacaacagcagcagaaagacaaacaacauucaaugacaugauaaaaauagcauuagaaagcguauuauuaggagauaaagaauaa

SEQ ID NO: 6393 - protein, 239 aa, Artificial Sequence; identical to SEQ ID NO: 6193
  Purine_Nucleoside_Phosphorylase_deoD__Escherichia_coli__B5Z4R6

SEQ ID NO: 6394 - RNA, 720 nt, Artificial Sequence; identical to SEQ ID NO: 6258
  Purine_Nucleoside_Phosphorylase_deoD__Escherichia_coli__ACI39330

SEQ ID NO: 6395 - RNA, 720 nt, Artificial Sequence; identical to SEQ ID NO: 6195
  derived and/or modified sequence opt1 from Purine_Nucleoside_Phosphorylase_deoD__Escherichia_coli__ACI39330

SEQ ID NO: 6396 - RNA, 720 nt, Artificial Sequence; identical to SEQ ID NO: 6196
  derived and/or modified sequence opt2 from Purine_Nucleoside_Phosphorylase_deoD__Escherichia_coli__ACI39330

SEQ ID NO: 6397 - RNA, 720 nt, Artificial Sequence; identical to SEQ ID NO: 6197
  derived and/or modified sequence opt3 from Purine_Nucleoside_Phosphorylase_deoD__Escherichia_coli__ACI39330

SEQ ID NO: 6398 - RNA, 720 nt, Artificial Sequence; identical to SEQ ID NO: 6198
  derived and/or modified sequence opt4 from Purine_Nucleoside_Phosphorylase_deoD__Escherichia_coli__ACI39330

SEQ ID NO: 6399 - RNA, 720 nt, Artificial Sequence; identical to SEQ ID NO: 6199
  derived and/or modified sequence opt5 from Purine_Nucleoside_Phosphorylase_deoD__Escherichia_coli__ACI39330

SEQ ID NO: 6400 - RNA, 720 nt, Artificial Sequence
  derived and/or modified sequence opt6 from Purine_Nucleoside_Phosphorylase_deoD__Escherichia_coli__ACI39330
auggcaacaccacauauaaaugcugaaaugggagacuucgcagauguaguacuaaugccaggagacccacuaagagcaaaauauauagcagaaacauuucuagaagacgcaagagaaguaaauaacguaagagggauguuaggauuuacaggaacauauaaaggaagaaaaauaucaguaaugggacauggaaugggaauaccaagcugcucaaucuauacaaaggaacuaauaacagacuuuggagugaaaaaaauaauaagaguaggaaguugcggagcaguauuaccacacguaaaauuaagagauguaguaauaggaaugggagcauguacagauagcaaaguaaauagaauaagauuuaaagaucacgauuucgcagcaauagcagauuuugauaugguaagaaaugccguagacgcagcaaaagcauuggggauagacgcaagaguaggaaaucuauuuagcgcagacuuauucuauagcccagacggggaaauguucgauguaauggaaaaauacggaauauuaggaguagaaauggaagcagcaggaauauauggaguagcagcagaauuuggagcaaaagcauuaacaauauguacaguaagcgaucacauaagaacacaugaacaaacaacagcagcagaaagacaaacaacauucaaugacaugauaaaaauagcacuagaaagcguauuauuaggcgauaaagaauaa

SEQ ID NO: 6401 - protein, 239 aa, Artificial Sequence; identical to SEQ ID NO: 6193
  Purine_Nucleoside_Phosphorylase_deoD__Escherichia_coli__B6I6N1

SEQ ID NO: 6402 - RNA, 720 nt, Artificial Sequence; identical to SEQ ID NO: 6234
  Purine_Nucleoside_Phosphorylase_deoD__Escherichia_coli__BAG80183

SEQ ID NO: 6403 - RNA, 720 nt, Artificial Sequence; identical to SEQ ID NO: 6195
  derived and/or modified sequence opt1 from Purine_Nucleoside_Phosphorylase_deoD__Escherichia_coli__BAG80183

SEQ ID NO: 6404 - RNA, 720 nt, Artificial Sequence; identical to SEQ ID NO: 6196
  derived and/or modified sequence opt2 from Purine_Nucleoside_Phosphorylase_deoD__Escherichia_coli__BAG80183

SEQ ID NO: 6405 - RNA, 720 nt, Artificial Sequence; identical to SEQ ID NO: 6197
  derived and/or modified sequence opt3 from Purine_Nucleoside_Phosphorylase_deoD__Escherichia_coli__BAG80183

SEQ ID NO: 6406 - RNA, 720 nt, Artificial Sequence; identical to SEQ ID NO: 6198
  derived and/or modified sequence opt4 from Purine_Nucleoside_Phosphorylase_deoD__Escherichia_coli__BAG80183

SEQ ID NO: 6407 - RNA, 720 nt, Artificial Sequence; identical to SEQ ID NO: 6199
  derived and/or modified sequence opt5 from Purine_Nucleoside_Phosphorylase_deoD__Escherichia_coli__BAG80183

SEQ ID NO: 6408 - RNA, 720 nt, Artificial Sequence
  derived and/or modified sequence opt6 from Purine_Nucleoside_Phosphorylase_deoD__Escherichia_coli__BAG80183
auggcaacaccacauaucaaugcagaaaugggagacuuugcagauguaguauuaaugccaggagacccacuaagagcaaaauacauagcagaaacauuucuagaagacgcaagagaaguaaauaacguaagaggaauguuaggauuuacaggaacauauaaaggaagaaaaauaucaguuaugggacauggaaugggaauaccaucaugcagcauauauacaaaagaacugauaacagacuuuggaguaaaaaaaauaauaagaguaggaucaugcggagcaguacuaccacacguaaaauuaagagauguaguaauaggaaugggagcauguacagauagcaaaguaaauagaauaagauuuaaagaccacgauuucgcagcaauagcagauuuugauaugguaagaaaugcaguugacgcagcaaaagcauuaggaauagacgcaagaguuggaaaucuauuuagcgcagacuuauucuauagcccagacggggaaauguucgauguaauggaaaaauacggaauauuaggaguagaaauggaagcagcagggauauauggaguagcagcagaauuuggagcaaaagcauuaacaauauguacaguaagugaucacauaagaacgcacgaacaaacaacagcagcagaaagacaaacaacauucaaugacaugauaaaaauagcauuagaaagcguacuauuaggcgauaaagaauaa

SEQ ID NO: 6409 - protein, 239 aa, Artificial Sequence; identical to SEQ ID NO: 6193
  Purine_Nucleoside_Phosphorylase_deoD__Escherichia_coli__B7LEN0

SEQ ID NO: 6410 - RNA, 720 nt, Artificial Sequence; identical to SEQ ID NO: 6234
  Purine_Nucleoside_Phosphorylase_deoD__Escherichia_coli__CAV02186

SEQ ID NO: 6411 - RNA, 720 nt, Artificial Sequence; identical to SEQ ID NO: 6195
  derived and/or modified sequence opt1 from Purine_Nucleoside_Phosphorylase_deoD__Escherichia_coli__CAV02186

SEQ ID NO: 6412 - RNA, 720 nt, Artificial Sequence; identical to SEQ ID NO: 6196
  derived and/or modified sequence opt2 from Purine_Nucleoside_Phosphorylase_deoD__Escherichia_coli__CAV02186

SEQ ID NO: 6413 - RNA, 720 nt, Artificial Sequence; identical to SEQ ID NO: 6197
  derived and/or modified sequence opt3 from Purine_Nucleoside_Phosphorylase_deoD__Escherichia_coli__CAV02186

SEQ ID NO: 6414 - RNA, 720 nt, Artificial Sequence; identical to SEQ ID NO: 6198
  derived and/or modified sequence opt4 from Purine_Nucleoside_Phosphorylase_deoD__Escherichia_coli__CAV02186

SEQ ID NO: 6415 - RNA, 720 nt, Artificial Sequence; identical to SEQ ID NO: 6199
  derived and/or modified sequence opt5 from Purine_Nucleoside_Phosphorylase_deoD__Escherichia_coli__CAV02186

SEQ ID NO: 6416 - RNA, 720 nt, Artificial Sequence
  derived and/or modified sequence opt6 from Purine_Nucleoside_Phosphorylase_deoD__Escherichia_coli__CAV02186
auggcaacaccacauauaaaugcagaaaugggagacuuugcagauguaguacuaaugccaggagacccacuaagagcaaaauacauagcagaaacuuuuuuagaagacgcaagagaaguaaauaacguaagaggaaugcuaggauuuacaggaacauauaaaggacgaaaaauaagugucaugggacauggaaugggaauaccaucaugcucaauauauacaaaagaauuaauaacagacuuuggaguaaaaaaaauaauaagaguaggaucaugcggagcaguacuaccacacguaaaauuaagagaugucguaauaggaaugggagcauguacagauagcaaaguaaauagaauaagauuuaaagaucacgauuucgcagcaauagccgauuucgauaugguaagaaaugcaguagacgcagcaaaagcacuaggaauagacgcgagaguaggaaaucuauuuagcgcagacuuauuuuauagcccggacggagaaauguucgauguaauggaaaaauacggaauauuaggaguagaaauggaagcagcagggauauauggaguagcagcagaauuuggagcaaaagcauuaacaauauguacaguaucagaucacauaagaacacacgaacaaacaacagcagcagagagacaaacaacauucaaugacaugauaaaaauagcauuagaaagcguacuacuaggcgauaaagaauaa

SEQ ID NO: 6417 - protein, 239 aa, Artificial Sequence; identical to SEQ ID NO: 6193
  Purine_Nucleoside_Phosphorylase_deoD__Escherichia_coli__B7LXU6

SEQ ID NO: 6418 - RNA, 720 nt, Artificial Sequence; identical to SEQ ID NO: 6234
  Purine_Nucleoside_Phosphorylase_deoD__Escherichia_coli__CAR01347

SEQ ID NO: 6419 - RNA, 720 nt, Artificial Sequence; identical to SEQ ID NO: 6195
  derived and/or modified sequence opt1 from Purine_Nucleoside_Phosphorylase_deoD__Escherichia_coli__CAR01347

SEQ ID NO: 6420 - RNA, 720 nt, Artificial Sequence; identical to SEQ ID NO: 6196
  derived and/or modified sequence opt2 from Purine_Nucleoside_Phosphorylase_deoD__Escherichia_coli__CAR01347

SEQ ID NO: 6421 - RNA, 720 nt, Artificial Sequence; identical to SEQ ID NO: 6197
  derived and/or modified sequence opt3 from Purine_Nucleoside_Phosphorylase_deoD__Escherichia_coli__CAR01347

SEQ ID NO: 6422 - RNA, 720 nt, Artificial Sequence; identical to SEQ ID NO: 6198
  derived and/or modified sequence opt4 from Purine_Nucleoside_Phosphorylase_deoD__Escherichia_coli__CAR01347

SEQ ID NO: 6423 - RNA, 720 nt, Artificial Sequence; identical to SEQ ID NO: 6199
  derived and/or modified sequence opt5 from Purine_Nucleoside_Phosphorylase_deoD__Escherichia_coli__CAR01347

SEQ ID NO: 6424 - RNA, 720 nt, Artificial Sequence
  derived and/or modified sequence opt6 from Purine_Nucleoside_Phosphorylase_deoD__Escherichia_coli__CAR01347
auggcaacaccacauauaaaugcagaaaugggagauuuugcagauguaguauuaaugccaggagacccauuaagagcaaaauacauagcagaaacauuucuagaagacgcaagagaaguaaauaacguaagaggaaugcuaggauuuaccggaacauauaaagggagaaaaauaucaguaaugggacauggaaugggaauaccaagcugcaguauauauacaaaagaauuaauaacagauuuuggaguaaaaaaaauaauaagaguaggaaguuguggagcaguauuaccacauguaaaauuaagagauguaguaauaggaaugggagcauguacagauagcaaaguaaauagaauaagauuuaaagaucacgauuucgcugcaauagcagauuucgauaugguacggaaugcaguggacgcagcaaaagcauuaggaauagacgcgagaguaggaaaucuauuuagugcagaccuauucuauagcccagacggagaaauguucgacguaauggaaaaauauggaauauuaggaguagaaauggaagcagcaggaauauauggaguagcagcggaauuuggagcaaaagcauuaacgauauguacaguaagugaucacauaagaacacacgaacaaacaacagcagcagaaagacaaacaacauucaaugacaugauaaaaauagcauuagaaagcguacuauuaggagauaaagaauaa

SEQ ID NO: 6425 - protein, 239 aa, Artificial Sequence; identical to SEQ ID NO: 6193
  Purine_Nucleoside_Phosphorylase_deoD__Escherichia_coli__B7MNJ1

SEQ ID NO: 6426 - RNA, 720 nt, Artificial Sequence; identical to SEQ ID NO: 6338
  Purine_Nucleoside_Phosphorylase_deoD__Escherichia_coli__CAR06204

SEQ ID NO: 6427 - RNA, 720 nt, Artificial Sequence; identical to SEQ ID NO: 6195
  derived and/or modified sequence opt1 from Purine_Nucleoside_Phosphorylase_deoD__Escherichia_coli__CAR06204

SEQ ID NO: 6428 - RNA, 720 nt, Artificial Sequence; identical to SEQ ID NO: 6196
  derived and/or modified sequence opt2 from Purine_Nucleoside_Phosphorylase_deoD__Escherichia_coli__CAR06204

SEQ ID NO: 6429 - RNA, 720 nt, Artificial Sequence; identical to SEQ ID NO: 6197
  derived and/or modified sequence opt3 from Purine_Nucleoside_Phosphorylase_deoD__Escherichia_coli__CAR06204

SEQ ID NO: 6430 - RNA, 720 nt, Artificial Sequence; identical to SEQ ID NO: 6198
  derived and/or modified sequence opt4 from Purine_Nucleoside_Phosphorylase_deoD__Escherichia_coli__CAR06204

SEQ ID NO: 6431 - RNA, 720 nt, Artificial Sequence; identical to SEQ ID NO: 6199
  derived and/or modified sequence opt5 from Purine_Nucleoside_Phosphorylase_deoD__Escherichia_coli__CAR06204

SEQ ID NO: 6432 - RNA, 720 nt, Artificial Sequence
  derived and/or modified sequence opt6 from Purine_Nucleoside_Phosphorylase_deoD__Escherichia_coli__CAR06204
auggcaacaccacauauaaaugcagaaaugggagacuuugcagauguagugcuaaugcccggagacccacuaagggcaaaauacauagcagaaacauuuuuagaagacgcaagagaaguaaauaacguaagaggaauguuaggauuuacaggaacauauaaaggaagaaaaauaaguguaaugggacauggaaugggaauaccaaguugcucaauauauaccaaagaauuaauaacagauuuuggaguuaaaaaaauaauaagaguaggaaguugcggagcaguacuaccacacguaaaauuaagagauguaguaauaggaaugggagcauguacagauagcaaaguaaauagaauaagauuuaaagaucacgauuucgcggcaauagcagauuuugauaugguacgaaaugccguagacgcagccaaagcacuaggaauugacgcaagaguuggaaauuuauuuagugcagacuuauuuuauaguccagacggagaaauguucgaugugauggaaaaauacggaauauuaggaguggaaauggaagcagcaggaauauauggaguagcagcagaauuuggagcaaaagcauuaacaauauguacaguaagcgaucacauaagaacacacgaacaaacuacagcagcagaaagacaaacaacauucaaugacaugauaaaaauagcacuagaaagcgugcuauuaggagacaaagaauaa

SEQ ID NO: 6433 - protein, 239 aa, Artificial Sequence; identical to SEQ ID NO: 6201
  Purine_Nucleoside_Phosphorylase_deoD__Escherichia_coli__B7N2V8

SEQ ID NO: 6434 - RNA, 720 nt, Artificial Sequence; identical to SEQ ID NO: 6282
  Purine_Nucleoside_Phosphorylase_deoD__Escherichia_coli__CAV18213

SEQ ID NO: 6435 - RNA, 720 nt, Artificial Sequence; identical to SEQ ID NO: 6203
  derived and/or modified sequence opt1 from Purine_Nucleoside_Phosphorylase_deoD__Escherichia_coli__CAV18213

SEQ ID NO: 6436 - RNA, 720 nt, Artificial Sequence; identical to SEQ ID NO: 6204
  derived and/or modified sequence opt2 from Purine_Nucleoside_Phosphorylase_deoD__Escherichia_coli__CAV18213

SEQ ID NO: 6437 - RNA, 720 nt, Artificial Sequence; identical to SEQ ID NO: 6205
  derived and/or modified sequence opt3 from Purine_Nucleoside_Phosphorylase_deoD__Escherichia_coli__CAV18213

SEQ ID NO: 6438 - RNA, 720 nt, Artificial Sequence; identical to SEQ ID NO: 6206
  derived and/or modified sequence opt4 from Purine_Nucleoside_Phosphorylase_deoD__Escherichia_coli__CAV18213

SEQ ID NO: 6439 - RNA, 720 nt, Artificial Sequence; identical to SEQ ID NO: 6207
  derived and/or modified sequence opt5 from Purine_Nucleoside_Phosphorylase_deoD__Escherichia_coli__CAV18213

SEQ ID NO: 6440 - RNA, 720 nt, Artificial Sequence
  derived and/or modified sequence opt6 from Purine_Nucleoside_Phosphorylase_deoD__Escherichia_coli__CAV18213
auggccacaccacauaucaaugcagaaaugggagacuucgcagauguaguguuaaugccaggagauccacuacgagcaaaauacauagcagaaacauuucuagaagaugcaagagaaguaaauaacguaagaggaauguuaggcuuuacaggaacauauaaaggaagaaaaauaucaguaaugggacauggaaugggaauaccaucaugcaguauauauacaaaagaauuaauaacagacuuuggaguaaaaaaaauaauaagaguaggaucaugcggagcaguauuaccacacguaaaauuaagagauguaguaauaggaaugggagcauguacagauagcaaaguaaauagaauaagauuuaaagaucacgauuucgcagcaauagcagauuucgauaugguaagaaaugcaguagacgcagcaaaagcauuaggaguagacgcaagaguaggaaaucuauuuucagcagacuuauuuuauagcccagacggagaaauguucgauguaauggaaaaauacgggauccuaggaguagaaauggaagcagcaggaauauauggaguagcagcagaauuuggagcaaaagcacuaacaauauguacaguaagcgaucacauaagaacacaugagcaaacaacagcagcagaaagacaaacaacauuuaaugacaugauaaaaauagcccuagaaaguguacuauuaggagauaaagaauaa

SEQ ID NO: 6441 - protein, 239 aa, Artificial Sequence; identical to SEQ ID NO: 6193
  Purine_Nucleoside_Phosphorylase_deoD__Escherichia_coli__B7NH52

SEQ ID NO: 6442 - RNA, 720 nt, Artificial Sequence
  Purine_Nucleoside_Phosphorylase_deoD__Escherichia_coli__CAR16117
auggcuaccccacacauuaaugcagaaaugggcgauuucgcugacguaguuuugaugccaggcgacccgcugcgugcgaaguauauugcugaaacuuuccuugaagaugcccgugaagugaacaacguucgcgguaugcugggcuucaccgguacuuacaaaggccgcaaaauuuccguaaugggucacgguauggguaucccguccugcuccaucuacaccaaagaacugaucaccgauuucggcgugaagaaaauuauccgcguaggcuccuguggcgcuguucugccacacguaaaacugcgcgacgucguuaucgguaugggugccugcaccgauuccaaaguuaaccgcauccguuuuaaagaccaugacuuugccgcuaucgcugacuuugacauggugcguaacgcaguagaugcagcuaaagcacugggcauugaugcucgcguugguaaccuguucuccgcugaccuguucuacucuccggacggcgaaauguucgacgugauggaaaaauacggcauccucggcguggaaauggaagcggcugguaucuacggcgucgcugcagaauuuggcgcgaaagcccugaccaucugcaccgugucugaccacauccguacucacgagcagaccacugccgcugagcgucagaccaccuucaacgacaugaucaaaaucgcacuggaauccguucugcugggcgauaaagaguaa

SEQ ID NO: 6443 - RNA, 720 nt, Artificial Sequence; identical to SEQ ID NO: 6195
  derived and/or modified sequence opt1 from Purine_Nucleoside_Phosphorylase_deoD__Escherichia_coli__CAR16117

SEQ ID NO: 6444 - RNA, 720 nt, Artificial Sequence; identical to SEQ ID NO: 6196
  derived and/or modified sequence opt2 from Purine_Nucleoside_Phosphorylase_deoD__Escherichia_coli__CAR16117

SEQ ID NO: 6445 - RNA, 720 nt, Artificial Sequence; identical to SEQ ID NO: 6197
  derived and/or modified sequence opt3 from Purine_Nucleoside_Phosphorylase_deoD__Escherichia_coli__CAR16117

SEQ ID NO: 6446 - RNA, 720 nt, Artificial Sequence; identical to SEQ ID NO: 6198
  derived and/or modified sequence opt4 from Purine_Nucleoside_Phosphorylase_deoD__Escherichia_coli__CAR16117

SEQ ID NO: 6447 - RNA, 720 nt, Artificial Sequence; identical to SEQ ID NO: 6199
  derived and/or modified sequence opt5 from Purine_Nucleoside_Phosphorylase_deoD__Escherichia_coli__CAR16117

SEQ ID NO: 6448 - RNA, 720 nt, Artificial Sequence
  derived and/or modified sequence opt6 from Purine_Nucleoside_Phosphorylase_deoD__Escherichia_coli__CAR16117
auggcaacaccacauauaaaugcagaaaugggagacuuugcagauguaguacuaaugccaggagacccauuaagagcaaaauacauagcagaaacauuccuagaagacgcaagagaaguaaauaacguaagaggaauguuaggguuuacaggaacauauaaaggaagaaaaauaucaguaaugggacauggaaugggaauaccaaguuguucaauauauacaaaagaauuaauaacagacuuuggaguaaaaaaaauaauaagagugggaaguugcggagcaguacuaccgcacguaaaauuaagagauguaguaauaggaaugggagcauguacagauucaaaaguaaauagaauaagauuuaaagaucacgauuucgcagcaauagcagauuucgauaugguaagaaaugcaguggacgcagcaaaagcauuaggaauagacgcaagaguaggaaaucuauuuagugcagacuuauucuauucaccagacggagaaauguucgauguaauggaaaaauauggaauauuaggaguagaaauggaagcagcaggaauauacggaguagcagcagaauuuggagcaaaagcacuaacuauauguacuguaagugaucacauaagaacacacgaacaaacaacagcagcagaaagacaaacaacauucaacgacaugauaaaaauagcacuagaaaguguacuauuaggagauaaagaauaa

SEQ ID NO: 6449 - protein, 239 aa, Artificial Sequence; identical to SEQ ID NO: 6201
  Purine_Nucleoside_Phosphorylase_deoD__Escherichia_coli__B7NW64

SEQ ID NO: 6450 - RNA, 720 nt, Artificial Sequence; identical to SEQ ID NO: 6226
  Purine_Nucleoside_Phosphorylase_deoD__Escherichia_coli__CAR21012

SEQ ID NO: 6451 - RNA, 720 nt, Artificial Sequence; identical to SEQ ID NO: 6203
  derived and/or modified sequence opt1 from Purine_Nucleoside_Phosphorylase_deoD__Escherichia_coli__CAR21012

SEQ ID NO: 6452 - RNA, 720 nt, Artificial Sequence; identical to SEQ ID NO: 6204
  derived and/or modified sequence opt2 from Purine_Nucleoside_Phosphorylase_deoD__Escherichia_coli__CAR21012

SEQ ID NO: 6453 - RNA, 720 nt, Artificial Sequence; identical to SEQ ID NO: 6205
  derived and/or modified sequence opt3 from Purine_Nucleoside_Phosphorylase_deoD__Escherichia_coli__CAR21012

SEQ ID NO: 6454 - RNA, 720 nt, Artificial Sequence; identical to SEQ ID NO: 6206
  derived and/or modified sequence opt4 from Purine_Nucleoside_Phosphorylase_deoD__Escherichia_coli__CAR21012

SEQ ID NO: 6455 - RNA, 720 nt, Artificial Sequence; identical to SEQ ID NO: 6207
  derived and/or modified sequence opt5 from Purine_Nucleoside_Phosphorylase_deoD__Escherichia_coli__CAR21012

SEQ ID NO: 6456 - RNA, 720 nt, Artificial Sequence
  derived and/or modified sequence opt6 from Purine_Nucleoside_Phosphorylase_deoD__Escherichia_coli__CAR21012
auggcaacaccacauauaaaugcagaaaugggugacuuugcagaugucguacuaaugccaggagacccauuaagagccaaauacauugcagaaacauucuuagaagacgcaagagaaguaaauaacguaagaggaauguugggauuuacaggaacauauaaaggaagaaaaauaucaguaaugggacauggaaugggcauaccaucaugcucaauauauacaaaagaauuaauaacagacuuuggaguaaaaaaaauaauaagaguaggaucaugcggagcaguauuaccacacguaaaauuaagagauguaguaaucggaaugggagccuguacagauagcaaaguaaauagaauaagauuuaaagaucaugauuucgcggcaauagcagauuucgauaugguacgaaaugcaguagacgcagcaaaagcauugggaguagacgcaagaguaggaaaccuauuuucagcagauuuauuuuauagcccagauggagaaauguucgauguaauggaaaaauacggaauauuaggaguagaaauggaagcagcagguauauauggaguagcagcagaauuuggagcaaaagcacuaacaauauguacaguaagcgaucacauaaggacacacgaacaaacaacagcagcagaaaggcaaacuacauuuaaugacaugauaaaaauagcacuagaaagcguauuauugggcgauaaagaauaa

SEQ ID NO: 6457 - protein, 239 aa, Artificial Sequence; identical to SEQ ID NO: 6201
  Purine_Nucleoside_Phosphorylase_deoD__Escherichia_coli__B7UR12

SEQ ID NO: 6458 - RNA, 720 nt, Artificial Sequence
  Purine_Nucleoside_Phosphorylase_deoD__Escherichia_coli__CAS12230
auggcuacuccacacauuaaugcagaaaugggcgauuuugcugacguaguuuugaugccaggcgacccgcugcgugcgaaguauauugcugaaacuuuccuugaagaugcccgugaagugaacaacguucgcgguaugcugggcuucacugguacuuacaaaggccgcaaaauuuccguaaugggccacgguauggguaucccguccugcuccaucuacaccaaagaacugaucacugauuucggcgugaagaaaauuauccgcguggguuccuguggcgcuguucugccgcacguaaaacugcgcgacgucguuaucgguaugggggccugcaccgauuccaaaguuaaccgcauccguuuuaaagaccaugacuuugccgcuaucgcugacuucgacauggugcguaacgcgguagacgcggcaaaagcacugggcguugaugcucgcguugguaaccuguucuccgcugaccuguucuacucuccggacggcgaaauguucgacgugauggaaaaauacggcauccucggcguggaaauggaagcggcugguaucuacggcgucgcugcagaauuuggcgcgaaagcccugaccaucugcaccgugucugaccacauccgcacucacgagcagaccacugccgcugagcgucagaccaccuucaacgacaugaucaaaaucgcgcuggaauccguucuacugggcgauaaagaguaa

SEQ ID NO: 6459 - RNA, 720 nt, Artificial Sequence; identical to SEQ ID NO: 6203
  derived and/or modified sequence opt1 from Purine_Nucleoside_Phosphorylase_deoD__Escherichia_coli__CAS12230

SEQ ID NO: 6460 - RNA, 720 nt, Artificial Sequence; identical to SEQ ID NO: 6204
  derived and/or modified sequence opt2 from Purine_Nucleoside_Phosphorylase_deoD__Escherichia_coli__CAS12230

SEQ ID NO: 6461 - RNA, 720 nt, Artificial Sequence; identical to SEQ ID NO: 6205
  derived and/or modified sequence opt3 from Purine_Nucleoside_Phosphorylase_deoD__Escherichia_coli__CAS12230

SEQ ID NO: 6462 - RNA, 720 nt, Artificial Sequence; identical to SEQ ID NO: 6206
  derived and/or modified sequence opt4 from Purine_Nucleoside_Phosphorylase_deoD__Escherichia_coli__CAS12230

SEQ ID NO: 6463 - RNA, 720 nt, Artificial Sequence; identical to SEQ ID NO: 6207
  derived and/or modified sequence opt5 from Purine_Nucleoside_Phosphorylase_deoD__Escherichia_coli__CAS12230

SEQ ID NO: 6464 - RNA, 720 nt, Artificial Sequence
  derived and/or modified sequence opt6 from Purine_Nucleoside_Phosphorylase_deoD__Escherichia_coli__CAS12230
auggcaacaccacauauaaacgcagaaaugggagacuuugcagauguaguacuaaugccaggagacccacucagagcaaaauacauagcagagaccuuucuggaagacgcaagagaaguaaauaauguaagaggaauguuaggauuuacaggaacauauaaaggaagaaaaauaucagucaugggacauggaaugggaauaccaucaugcucaauauauaccaaagaauuaauaacagacuuuggaguaaaaaaaauaauaagaguaggaucgugcggagcaguauuaccacacguaaaauuaagagauguaguaauaggaaugggagcauguacagauagcaaaguaaaucgaauaagauuuaaagaucacgauuuugcagcaauagcagauuucgauaugguaagaaaugcaguagacgcagcaaaagcauuaggaguagacgcaagaguaggaaaucuauucagcgcugacuuauucuauagcccagacggagaaauguucgauguaauggaaaaauacggaauauuaggaguggaaauggaagcugcaggaauauauggaguagcagcagaauuuggcgcaaaagcacuaacaauauguacaguaagcgaucacauacgaacacacgaacaaacaacagcagcagaaagacaaacaacauucaaugacaugauaaaaauagcauuagaaaguguacuauuaggagauaaagaauaa

SEQ ID NO: 6465 - protein, 239 aa, Artificial Sequence; identical to SEQ ID NO: 6193
  Purine_Nucleoside_Phosphorylase_deoD__Escherichia_coli__C3SE47

SEQ ID NO: 6466 - RNA, 720 nt, Artificial Sequence; identical to SEQ ID NO: 6258
  Purine_Nucleoside_Phosphorylase_deoD__Escherichia_coli__ACI72751

SEQ ID NO: 6467 - RNA, 720 nt, Artificial Sequence; identical to SEQ ID NO: 6195
  derived and/or modified sequence opt1 from Purine_Nucleoside_Phosphorylase_deoD__Escherichia_coli__ACI72751

SEQ ID NO: 6468 - RNA, 720 nt, Artificial Sequence; identical to SEQ ID NO: 6196
  derived and/or modified sequence opt2 from Purine_Nucleoside_Phosphorylase_deoD__Escherichia_coli__ACI72751

SEQ ID NO: 6469 - RNA, 720 nt, Artificial Sequence; identical to SEQ ID NO: 6197
  derived and/or modified sequence opt3 from Purine_Nucleoside_Phosphorylase_deoD__Escherichia_coli__ACI72751

SEQ ID NO: 6470 - RNA, 720 nt, Artificial Sequence; identical to SEQ ID NO: 6198
  derived and/or modified sequence opt4 from Purine_Nucleoside_Phosphorylase_deoD__Escherichia_coli__ACI72751

SEQ ID NO: 6471 - RNA, 720 nt, Artificial Sequence; identical to SEQ ID NO: 6199
  derived and/or modified sequence opt5 from Purine_Nucleoside_Phosphorylase_deoD__Escherichia_coli__ACI72751

SEQ ID NO: 6472 - RNA, 720 nt, Artificial Sequence
  derived and/or modified sequence opt6 from Purine_Nucleoside_Phosphorylase_deoD__Escherichia_coli__ACI72751
auggcaacaccacauauaaaugcagaaaugggagacuucgcggacguaguacuaaugccaggagacccacuaagagcaaaauacauagcagaaacauuuuuagaagacgcaagagaaguaaauaacgugagaggaauguuaggauuuacaggaacauauaaaggaagaaaaauaaguguaaugggacauggaauggguauaccaucaugcaguauauauacaaaagaauuaauaacagacuuuggaguaaaaaaaauaauaagaguaggaaguugcggagcaguacuaccacacguaaaauuaagagauguaguaauaggaaugggggcauguacagauagcaaaguaaauagaauaagauuuaaagaucacgauuucgcagcaauagcagauuucgauaugguacgaaaugcaguagacgcagcaaaggcauuaggaauagacgcaagaguaggaaaccuauuuagcgcagacuuauucuacaguccagacggagaaauguucgauguaauggaaaaauacggaauauuaggaguagaaauggaagcagcaggaauauauggaguagcagcagaauuuggagcuaaagcacuaacaauaugcacagugagugaucacauaagaacacacgaacaaacaacagcagcagaaagacaaacaacauucaaugacaugauaaaaauagcacuagaaaguguacuauuaggagauaaagaauaa

SEQ ID NO: 6473 - protein, 239 aa, Artificial Sequence; identical to SEQ ID NO: 6193
  Purine_Nucleoside_Phosphorylase_deoD__Escherichia_coli__C4ZT66

SEQ ID NO: 6474 - RNA, 720 nt, Artificial Sequence; identical to SEQ ID NO: 6338
  Purine_Nucleoside_Phosphorylase_deoD__Escherichia_coli__ACR65334

SEQ ID NO: 6475 - RNA, 720 nt, Artificial Sequence; identical to SEQ ID NO: 6195
  derived and/or modified sequence opt1 from Purine_Nucleoside_Phosphorylase_deoD__Escherichia_coli__ACR65334

SEQ ID NO: 6476 - RNA, 720 nt, Artificial Sequence; identical to SEQ ID NO: 6196
  derived and/or modified sequence opt2 from Purine_Nucleoside_Phosphorylase_deoD__Escherichia_coli__ACR65334

SEQ ID NO: 6477 - RNA, 720 nt, Artificial Sequence; identical to SEQ ID NO: 6197
  derived and/or modified sequence opt3 from Purine_Nucleoside_Phosphorylase_deoD__Escherichia_coli__ACR65334

SEQ ID NO: 6478 - RNA, 720 nt, Artificial Sequence; identical to SEQ ID NO: 6198
  derived and/or modified sequence opt4 from Purine_Nucleoside_Phosphorylase_deoD__Escherichia_coli__ACR65334

SEQ ID NO: 6479 - RNA, 720 nt, Artificial Sequence; identical to SEQ ID NO: 6199
  derived and/or modified sequence opt5 from Purine_Nucleoside_Phosphorylase_deoD__Escherichia_coli__ACR65334

SEQ ID NO: 6480 - RNA, 720 nt, Artificial Sequence
  derived and/or modified sequence opt6 from Purine_Nucleoside_Phosphorylase_deoD__Escherichia_coli__ACR65334
auggcaacaccacauauaaaugcggaaaugggagauuuugcagacguaguauuaaugccaggugacccacuaagagcaaaauacauagcagaaacauuuuuagaagaugcaagagaaguaaauaacguaaggggaauguuaggauuuacaggaacauauaaaggaagaaaaauaucaguaaugggacauggaaugggaauaccauccugcucaauauauacaaaagaauuaauaacagacuucggaguaaaaaaaauaauaagaguaggcaguuguggagcuguauuaccacacguaaaacuaagagauguaguaauaggaaugggagcauguacagauagcaaaguaaauagaauaagauuuaaagaucacgauuucgcagcaauagcagauuucgauaugguaagaaaugcaguugacgcagccaaagccuuaggaauagaugcaagaguaggaaacuuauucagcgcagaucuauucuauagcccagacggagaaauguucgauguaauggaaaaauacggaauauuaggaguagaaauggaagcagccggaauauauggaguagcagcagaauuuggagcaaaagcacugacaauauguacaguaucagaucacauacgaacacaugaacaaacaacagcagcagaaagacaaacaacauucaaugacaugauaaaaauagcacuagaaagcguacuauuaggagauaaagaauaa

SEQ ID NO: 6481 - protein, 239 aa, Artificial Sequence; identical to SEQ ID NO: 6201
  Purine_Nucleoside_Phosphorylase_deoD__Escherichia_coli__C8TQD7

SEQ ID NO: 6482 - RNA, 720 nt, Artificial Sequence
  Purine_Nucleoside_Phosphorylase_deoD__Escherichia_coli__BAI28709
auggcuaccccacacauuaaugcagaaaugggcgauuucgcugacguaguuuugaugccaggcgacccgcugcgugcaaaguauauugcugaaacuuuccuugaagaugcccgugaagugaacaacguucgcgguaugcugggcuucaccgguacuuacaaaggccgcaaaauuuccguaaugggucacgguauggguaucccguccugcuccaucuacaccaaagaacugaucaccgauuucggcgugaagaaaauuauccgcguggguuccuguggcgcaguucugccgcacguaaaacugcgcgacgucguuaucgguaugggugccugcaccgauuccaaaguuaaccgcauccguuuuaaagaucaugacuuugccgcuaucgcugacuuugacauggugcguaacgcgguagacgcggcuaaagcacugggcguugaugcucgcguggguaaccuguucuccgcugaccuguucuacucuccggacggcgaaauguucgacgugauggaaaaauacggcauccucggcguggaaauggaagcggcugguaucuacggcguggcugcagaguuuggcgcgaaagcccugaccaucugcaccgugucugaccacauccgcacucacgagcagaccacugccgcugagcgucagaccaccuucaacgacaugaucaaaaucgcacuggaauccguucugcugggcgauaaagaguaa

SEQ ID NO: 6483 - RNA, 720 nt, Artificial Sequence; identical to SEQ ID NO: 6203
  derived and/or modified sequence opt1 from Purine_Nucleoside_Phosphorylase_deoD__Escherichia_coli__BAI28709

SEQ ID NO: 6484 - RNA, 720 nt, Artificial Sequence; identical to SEQ ID NO: 6204
  derived and/or modified sequence opt2 from Purine_Nucleoside_Phosphorylase_deoD__Escherichia_coli__BAI28709

SEQ ID NO: 6485 - RNA, 720 nt, Artificial Sequence; identical to SEQ ID NO: 6205
  derived and/or modified sequence opt3 from Purine_Nucleoside_Phosphorylase_deoD__Escherichia_coli__BAI28709

SEQ ID NO: 6486 - RNA, 720 nt, Artificial Sequence; identical to SEQ ID NO: 6206
  derived and/or modified sequence opt4 from Purine_Nucleoside_Phosphorylase_deoD__Escherichia_coli__BAI28709

SEQ ID NO: 6487 - RNA, 720 nt, Artificial Sequence; identical to SEQ ID NO: 6207
  derived and/or modified sequence opt5 from Purine_Nucleoside_Phosphorylase_deoD__Escherichia_coli__BAI28709

SEQ ID NO: 6488 - RNA, 720 nt, Artificial Sequence
  derived and/or modified sequence opt6 from Purine_Nucleoside_Phosphorylase_deoD__Escherichia_coli__BAI28709
auggcaacgccacauauaaaugcagaaaugggagacuuugcagauguaguuuuaaugccaggagacccacuaagagcaaaauacauagcagaaacauuuuuagaagacgcaagagaaguaaauaacguaagaggaauguuaggauuuacagggacauauaaagguagaaaaauaucaguaaugggacauggaaugggaauaccaucaugcucaauauauacaaaagaauuaauaacugacuuuggaguaaaaaaaauaauaagaguaggaucaugcggagcaguacuaccacacguaaaauuaagagauguaguaauaggaaugggagcauguacagauagcaaaguaaauagaauaagauuuaaagaucacgauuuugcagcaauagcagauuucgauaugguaagaaaugcaguagacgcagcaaaagcauugggaguagacgcaagaguaggaaaucuauuuagugcagacuuauucuauagcccggacggagaaauguucgauguaauggaaaaauacggaauauuaggcguagaaauggaagcagcaggaauauauggaguagccgcagaauuuggagcaaaagcauuaacaauauguacaguaagcgaucacauaagaacacacgagcaaacaacagcggcagaaagacaaacaacauucaaugacaugauaaaaauagcacuagaaagcguacuauuaggagauaaagaauaa

SEQ ID NO: 6489 - protein, 239 aa, Artificial Sequence; identical to SEQ ID NO: 6193
  Purine_Nucleoside_Phosphorylase_deoD__Escherichia_coli__C8U157

SEQ ID NO: 6490 - RNA, 720 nt, Artificial Sequence; identical to SEQ ID NO: 6234
  Purine_Nucleoside_Phosphorylase_deoD__Escherichia_coli__BAI33919

SEQ ID NO: 6491 - RNA, 720 nt, Artificial Sequence; identical to SEQ ID NO: 6195
  derived and/or modified sequence opt1 from Purine_Nucleoside_Phosphorylase_deoD__Escherichia_coli__BAI33919

SEQ ID NO: 6492 - RNA, 720 nt, Artificial Sequence; identical to SEQ ID NO: 6196
  derived and/or modified sequence opt2 from Purine_Nucleoside_Phosphorylase_deoD__Escherichia_coli__BAI33919

SEQ ID NO: 6493 - RNA, 720 nt, Artificial Sequence; identical to SEQ ID NO: 6197
  derived and/or modified sequence opt3 from Purine_Nucleoside_Phosphorylase_deoD__Escherichia_coli__BAI33919

SEQ ID NO: 6494 - RNA, 720 nt, Artificial Sequence; identical to SEQ ID NO: 6198
  derived and/or modified sequence opt4 from Purine_Nucleoside_Phosphorylase_deoD__Escherichia_coli__BAI33919

SEQ ID NO: 6495 - RNA, 720 nt, Artificial Sequence; identical to SEQ ID NO: 6199
  derived and/or modified sequence opt5 from Purine_Nucleoside_Phosphorylase_deoD__Escherichia_coli__BAI33919

SEQ ID NO: 6496 - RNA, 720 nt, Artificial Sequence
  derived and/or modified sequence opt6 from Purine_Nucleoside_Phosphorylase_deoD__Escherichia_coli__BAI33919
auggcaacaccacauauaaaugccgaaaugggagacuuugcagauguaguauuaaugccaggggacccauuaagagcaaaauacauagcagaaacauuucuagaagacgcaagagaaguaaauaacguaagaggaauguuaggauuuacaggaacauacaaaggaagaaaaauaucaguaaugggacauggaaugggaauacccucaugcaguauauauacaaaagaauuaaucacagacuuuggaguaaaaaaaauaauaagaguaggaucaugcggagcaguacuaccacacguaaaauuaagagauguaguaauaggaaugggagcauguacagauaguaaaguaaacagaauacgauuuaaagaucaugauuucgcagcaauagcagauuucgauaugguaagaaaugcaguagacgcagcaaaagcauuaggcauagacgcaagaguaggaaaucuuuuuagcgcagacuuauucuauaguccagacggagaaauguucgauguaauggaaaaauacggaauauuaggaguagaaauggaagcagcaggaauauauggaguagcagcagaauuuggagcaaaagcauuaacaauauguacaguaagcgaucauauaagaacacacgaacaaacaacagcagcagaaagacaaacaacauucaaugacaugauaaaaaucgcacuagaaagcguauuauuaggagauaaagaauaa

SEQ ID NO: 6497 - protein, 239 aa, Artificial Sequence; identical to SEQ ID NO: 6193
  Purine_Nucleoside_Phosphorylase_deoD__Escherichia_coli__C8UN92

SEQ ID NO: 6498 - RNA, 720 nt, Artificial Sequence
  Purine_Nucleoside_Phosphorylase_deoD__Escherichia_coli__BAI38958
auggcuaccccacacauuaaugcagaaaugggcgauuucgcugacguaguuuugaugccaggcgacccgcugcgugcgaaguauauugcugaaacuuuccuugaagaugcccgugaagugaacaacguucgcgguaugcugggcuucaccgguacuuacaaaggccgcaaaauuuccguaaugggucacgguauggguaucccguccugcuccaucuacaccaaagaacugaucaccgauuucggcgugaagaaaauuauccgcguggguuccuguggcgcaguucugccgcacguaaaacugcgcgacgucguuaucgguaugggugccugcaccgauuccaaaguuaaccgcauccguuuuaaagaucaugacuuugccgcuaucgcugacuuugacaugguacguaacgcgguagacgcggcuaaagcacugggcauugaugcucgcguugguaaccuguucuccgcugaccuguucuacucuccggacggcgaaauguucgacgugauggaaaaauacggcauccucggcguggaaauggaagcagcugguaucuacggcgucgcugcagaauuuggcgcgaaagcccugaccaucugcaccgugucugaccacauccgcacucacgagcagaccacugccgcugagcgucagaccaccuucaacgacaugaucaaaaucgcacuggaauccguucugcugggcgauaaagaguaa

SEQ ID NO: 6499 - RNA, 720 nt, Artificial Sequence; identical to SEQ ID NO: 6195
  derived and/or modified sequence opt1 from Purine_Nucleoside_Phosphorylase_deoD__Escherichia_coli__BAI38958

SEQ ID NO: 6500 - RNA, 720 nt, Artificial Sequence; identical to SEQ ID NO: 6196
  derived and/or modified sequence opt2 from Purine_Nucleoside_Phosphorylase_deoD__Escherichia_coli__BAI38958

SEQ ID NO: 6501 - RNA, 720 nt, Artificial Sequence; identical to SEQ ID NO: 6197
  derived and/or modified sequence opt3 from Purine_Nucleoside_Phosphorylase_deoD__Escherichia_coli__BAI38958

SEQ ID NO: 6502 - RNA, 720 nt, Artificial Sequence; identical to SEQ ID NO: 6198
  derived and/or modified sequence opt4 from Purine_Nucleoside_Phosphorylase_deoD__Escherichia_coli__BAI38958

SEQ ID NO: 6503 - RNA, 720 nt, Artificial Sequence; identical to SEQ ID NO: 6199
  derived and/or modified sequence opt5 from Purine_Nucleoside_Phosphorylase_deoD__Escherichia_coli__BAI38958

SEQ ID NO: 6504 - RNA, 720 nt, Artificial Sequence
  derived and/or modified sequence opt6 from Purine_Nucleoside_Phosphorylase_deoD__Escherichia_coli__BAI38958
auggcaacaccacauauaaaugcagaaaugggugacuuugcagauguaguauuaaugccaggagauccgcuaagagcaaaauacauagcagaaacauuuuuagaagacgcaagagaaguaaauaacguaagaggaaugcuaggauuuacaggaaccuauaaaggaagaaaaaucucaguaaugggacauggaaugggaauaccaucaugcucaauauauacaaaagaauuaauaacagacuuuggaguaaaaaaaauaauaagaguaggaucauguggagcaguauuaccacauguaaaauuaagagauguagugauaggaaugggagcauguacagauucaaaagucaauagaauaagauuuaaagaucacgauuucgcagcaauagccgauuucgauauggugcgaaaugcaguagacgcagcaaaagcauuaggaauagacgcaagaguaggaaaucuauuuagugcagacuuauucuauagcccagacggagaaauguucgauguaauggaaaaauacggaauacuaggaguagaaauggaagcagcaggaauauauggaguagcagcagaauuuggagcaaaagcacuaacaauauguacaguaagcgaucacauaagaacacacgaacaaacaacagcagcugaaagacaaacaacauucaaugacaugauaaaaauagcauuagaaagugugcuacuaggagauaaagaauaa

SEQ ID NO: 6505 - protein, 239 aa, Artificial Sequence; identical to SEQ ID NO: 6201
  Purine_Nucleoside_Phosphorylase_deoD__Escherichia_coli__D3GY24

SEQ ID NO: 6506 - RNA, 720 nt, Artificial Sequence; identical to SEQ ID NO: 6202
  Purine_Nucleoside_Phosphorylase_deoD__Escherichia_coli__CBG37702

SEQ ID NO: 6507 - RNA, 720 nt, Artificial Sequence; identical to SEQ ID NO: 6203
  derived and/or modified sequence opt1 from Purine_Nucleoside_Phosphorylase_deoD__Escherichia_coli__CBG37702

SEQ ID NO: 6508 - RNA, 720 nt, Artificial Sequence; identical to SEQ ID NO: 6204
  derived and/or modified sequence opt2 from Purine_Nucleoside_Phosphorylase_deoD__Escherichia_coli__CBG37702

SEQ ID NO: 6509 - RNA, 720 nt, Artificial Sequence; identical to SEQ ID NO: 6205
  derived and/or modified sequence opt3 from Purine_Nucleoside_Phosphorylase_deoD__Escherichia_coli__CBG37702

SEQ ID NO: 6510 - RNA, 720 nt, Artificial Sequence; identical to SEQ ID NO: 6206
  derived and/or modified sequence opt4 from Purine_Nucleoside_Phosphorylase_deoD__Escherichia_coli__CBG37702

SEQ ID NO: 6511 - RNA, 720 nt, Artificial Sequence; identical to SEQ ID NO: 6207
  derived and/or modified sequence opt5 from Purine_Nucleoside_Phosphorylase_deoD__Escherichia_coli__CBG37702

SEQ ID NO: 6512 - RNA, 720 nt, Artificial Sequence
  derived and/or modified sequence opt6 from Purine_Nucleoside_Phosphorylase_deoD__Escherichia_coli__CBG37702
auggcaacaccacauaucaaugcagaaaugggagacuuugcagauguaguacuaaugccaggagacccacuaagagcaaaauacauagcagaaacauuucuagaagacgcaagagaaguaaauaacguaagaggaauguuaggauuuacaggaacauauaaaggaagaaaaauaaguguaaugggacauggaaugggaauaccaaguugcucaauauauacaaaagaauuaauaacagacuuuggaguaaaaaaaauaauaagaguaggaucaugcggagcaguauuaccacacguaaaauugagagauguaguaauaggaaugggagcauguacagauagcaaaguaaauagaauaagauuuaaagaucaugauuucgcagcaauagcagauuucgacaugguaagaaaugcaguagacgcagcaaaagcauuaggaguagaugcaagaguaggaaaucuauuuagcgcggacuuauucuauaguccagacggagaaauguucgauguaauggaaaaauauggaauacugggaguagaaauggaagcagcaggaauauauggaguagcagcagaauuuggagcgaaagcacuaacaauauguaccguaagugaucauauaagaacacacgaacaaacaacagcagcagaaagacaaacaacauucaaugacaugauaaaaauagcacuagaaagcguauuauuaggagauaaagaauaa

SEQ ID NO: 6513 - protein, 239 aa, Artificial Sequence; identical to SEQ ID NO: 6193
  Purine_Nucleoside_Phosphorylase_deoD__Escherichia_coli__D3QNE6

SEQ ID NO: 6514 - RNA, 720 nt, Artificial Sequence; identical to SEQ ID NO: 6258
  Purine_Nucleoside_Phosphorylase_deoD__Escherichia_coli__ADD59655

SEQ ID NO: 6515 - RNA, 720 nt, Artificial Sequence; identical to SEQ ID NO: 6195
  derived and/or modified sequence opt1 from Purine_Nucleoside_Phosphorylase_deoD__Escherichia_coli__ADD59655

SEQ ID NO: 6516 - RNA, 720 nt, Artificial Sequence; identical to SEQ ID NO: 6196
  derived and/or modified sequence opt2 from Purine_Nucleoside_Phosphorylase_deoD__Escherichia_coli__ADD59655

SEQ ID NO: 6517 - RNA, 720 nt, Artificial Sequence; identical to SEQ ID NO: 6197
  derived and/or modified sequence opt3 from Purine_Nucleoside_Phosphorylase_deoD__Escherichia_coli__ADD59655

SEQ ID NO: 6518 - RNA, 720 nt, Artificial Sequence; identical to SEQ ID NO: 6198
  derived and/or modified sequence opt4 from Purine_Nucleoside_Phosphorylase_deoD__Escherichia_coli__ADD59655

SEQ ID NO: 6519 - RNA, 720 nt, Artificial Sequence; identical to SEQ ID NO: 6199
  derived and/or modified sequence opt5 from Purine_Nucleoside_Phosphorylase_deoD__Escherichia_coli__ADD59655

SEQ ID NO: 6520 - RNA, 720 nt, Artificial Sequence
  derived and/or modified sequence opt6 from Purine_Nucleoside_Phosphorylase_deoD__Escherichia_coli__ADD59655
auggcaacaccucauauaaaugcagaaaugggagacuuugcagauguaguacuaaugccaggagacccauuaagagcaaaauacauagcagaaacauuucuagaagacgcaagagaaguaaauaauguaagaggaauguuaggauuuacaggaacauauaaaggaagaaaaauaucaguaaugggacauggaaugggaauaccaucaugcucaauauauaccaaagaauuaauaacagacuuuggaguaaaaaaaauaauaagaguaggaucaugcggggcaguauuaccacacguaaaauuaagagauguaguaauaggaaugggagcauguacagauagcaaaguaaauagaauaagauuuaaagaucacgauuucgcagcaauagcagauuucgauaugguaagaaaugccguagacgcagcaaaagcauuaggaauagacgcaagaguaggaaaucuauuuagcgcagauuuauucuauaguccagauggagaaauguucgauguaauggaaaaauacggaauauuaggaguagagauggaagcagcaggaauauauggaguagcagcagaauuuggagcaaaagcacuaacaauauguacagugagugaucacauaagaacacaugaacaaacaacagcggcagaaagacaaacaacauucaaugacaugauaaaaauagcgcuagaaaguguauuauuaggagauaaagaauaa

SEQ ID NO: 6521 - protein, 239 aa, Artificial Sequence; identical to SEQ ID NO: 6193
  Purine_Nucleoside_Phosphorylase_deoD__Escherichia_coli__D6I4N2

SEQ ID NO: 6522 - RNA, 720 nt, Artificial Sequence; identical to SEQ ID NO: 6234
  Purine_Nucleoside_Phosphorylase_deoD__Escherichia_coli__EFE60543

SEQ ID NO: 6523 - RNA, 720 nt, Artificial Sequence; identical to SEQ ID NO: 6195
  derived and/or modified sequence opt1 from Purine_Nucleoside_Phosphorylase_deoD__Escherichia_coli__EFE60543

SEQ ID NO: 6524 - RNA, 720 nt, Artificial Sequence; identical to SEQ ID NO: 6196
  derived and/or modified sequence opt2 from Purine_Nucleoside_Phosphorylase_deoD__Escherichia_coli__EFE60543

SEQ ID NO: 6525 - RNA, 720 nt, Artificial Sequence; identical to SEQ ID NO: 6197
  derived and/or modified sequence opt3 from Purine_Nucleoside_Phosphorylase_deoD__Escherichia_coli__EFE60543

SEQ ID NO: 6526 - RNA, 720 nt, Artificial Sequence; identical to SEQ ID NO: 6198
  derived and/or modified sequence opt4 from Purine_Nucleoside_Phosphorylase_deoD__Escherichia_coli__EFE60543

SEQ ID NO: 6527 - RNA, 720 nt, Artificial Sequence; identical to SEQ ID NO: 6199
  derived and/or modified sequence opt5 from Purine_Nucleoside_Phosphorylase_deoD__Escherichia_coli__EFE60543

SEQ ID NO: 6528 - RNA, 720 nt, Artificial Sequence
  derived and/or modified sequence opt6 from Purine_Nucleoside_Phosphorylase_deoD__Escherichia_coli__EFE60543
auggcaacaccacauauaaaugcagaaaugggagacuuugcagauguaguauuaaugccaggagacccacuaagagcaaaauauauagcagaaacauuucuagaagacgcaagagaaguaaauaacguaagaggaaugcuagguuuuacaggaacauauaaaggaagaaaaauaaguguaauggggcauggaaugggaauaccaucaugcaguauauauacuaaagaacuaauaacagacuuuggagugaaaaaaauaauaagaguaggaaguugcggagcaguacuaccacacguaaaauuaagagauguaguaauaggaaugggagcauguacagauaguaaaguaaauagaauaagauuuaaagaucacgauuucgcagcaauagcagauuucgauaugguaagaaaugcaguagacgcagcaaaagcacuaggaauagaugcaagaguaggaaaucuauuuagcgcagaccuauucuauaguccugacggugaaauguucgauguaauggaaaaauacggaauauuagggguagaaauggaagcagcaggaauauauggaguagcagcagaauuuggggcaaaagcauuaacaauauguacaguaagugaucacauaagaacacacgaacaaacaaccgcagcagaaagacaaacaacauucaaugacaugauaaaaauagcacuagaaaguguacuacuaggagauaaagaguaa

SEQ ID NO: 6529 - protein, 239 aa, Artificial Sequence; identical to SEQ ID NO: 6201
  Purine_Nucleoside_Phosphorylase_deoD__Escherichia_coli__D6IHU2

SEQ ID NO: 6530 - RNA, 720 nt, Artificial Sequence
  Purine_Nucleoside_Phosphorylase_deoD__Escherichia_coli__EFF03573
auggcuaccccacacauuaaugcagaaaugggcgauuucgcugacguaguuuugaugccaggcgacccgcugcgugcgaaguauauugcugaaacuuuccuugaagaugcccgugaagugaacaacguucgcgguaugcugggcuucaccgguacuuacaaaggccgcaaaauuuccguaaugggucacgguauggguaucccguccugcuccaucuacaccaaagaacugaucaccgauuucggcgugaagaaaauuauccgcguggguuccuguggcgcaguucugccgcacguaaaacugcgcgacgucguuaucgguaugggugccugcaccgauuccaaaguuaaccgcauccguuuuaaagaucaugacuuugccgcuaucgcugacuuugacauggugcguaacgcgguagacgcggcuaaagcacugggcguugaugcucgcguggguaaccuguucuccgcugaccuguucuacucuccggacggcgaaauguucgacgugauggaaaaauacggcauccucggcguggaaauggaagcggcugguaucuacggcgucgcugcagaauuuggcgcgaaagcccugaccaucugcaccguaucugaucacauccgcacucacgagcagaccacugccgcugagcgucagaccaccuucaacgacaugaucaaaaucgcacuggaauccguucugcugggcgauaaagaguaa

SEQ ID NO: 6531 - RNA, 720 nt, Artificial Sequence; identical to SEQ ID NO: 6203
  derived and/or modified sequence opt1 from Purine_Nucleoside_Phosphorylase_deoD__Escherichia_coli__EFF03573

SEQ ID NO: 6532 - RNA, 720 nt, Artificial Sequence; identical to SEQ ID NO: 6204
  derived and/or modified sequence opt2 from Purine_Nucleoside_Phosphorylase_deoD__Escherichia_coli__EFF03573

SEQ ID NO: 6533 - RNA, 720 nt, Artificial Sequence; identical to SEQ ID NO: 6205
  derived and/or modified sequence opt3 from Purine_Nucleoside_Phosphorylase_deoD__Escherichia_coli__EFF03573

SEQ ID NO: 6534 - RNA, 720 nt, Artificial Sequence; identical to SEQ ID NO: 6206
  derived and/or modified sequence opt4 from Purine_Nucleoside_Phosphorylase_deoD__Escherichia_coli__EFF03573

SEQ ID NO: 6535 - RNA, 720 nt, Artificial Sequence; identical to SEQ ID NO: 6207
  derived and/or modified sequence opt5 from Purine_Nucleoside_Phosphorylase_deoD__Escherichia_coli__EFF03573

SEQ ID NO: 6536 - RNA, 720 nt, Artificial Sequence
  derived and/or modified sequence opt6 from Purine_Nucleoside_Phosphorylase_deoD__Escherichia_coli__EFF03573
auggcaacaccacauauaaaugcagaaaugggagacuuugcagauguaguacuaaugccaggagauccacuaagagcaaaauacauagcagaaacauuucuagaagacgcaagagaaguaaauaauguaagaggaauguuaggcuucacaggaacauauaaaggaaggaaaauaagcguaaugggacauggcaugggaauaccaucauguucaauauauacaaaagaauuaauaacagacuuuggaguaaaaaaaauaauaagaguaggcucaugcggagcaguacuaccucauguaaaauuaagggauguaguaauaggaaugggagccuguacagauagcaaaguaaaucgaauaagauuuaaagaucacgauuucgcagcaauagcagauuucgauaugguaagaaaugcaguagacgcagcaaaagcauuaggaguagacgcaagaguaggaaauuuauuuagcgcagauuuauuuuauaguccagacggagaaauguucgauguaauggaaaaauacgggauauuaggaguagaaauggaagcagcaggaauauauggaguagcagcagaauuuggagcaaaagcacuaacaauauguacaguaagcgaucauauaagaacacaugaacaaacaacagcagccgaaagacaaacaacauucaaugacaugauaaaaaucgcacuagaaagcguauuauuaggagauaaagaauaa

SEQ ID NO: 6537 - protein, 239 aa, Artificial Sequence; identical to SEQ ID NO: 6201
  Purine_Nucleoside_Phosphorylase_deoD__Escherichia_coli__D6J6A4

SEQ ID NO: 6538 - RNA, 720 nt, Artificial Sequence
  Purine_Nucleoside_Phosphorylase_deoD__Escherichia_coli__EFF14801
auggcuaccccacacauuaaugcagaaaugggcgauuucgcugacguaguuuugaugccaggcgacccgcugcgugcgaaguauauugcugaaacuuuccuugaagaugcccgugaagugaacaacguucgcgguaugcugggcuucaccgguacuuacaaaggccgcaaaauuuccguaaugggucacgguauggguaucccguccugcuccaucuacaccaaagaacugaucaccgauuucggcgugaagaaaauuauccgcguaggcucuuguggcgcuguucugccacacguaaaacugcgcgacguaguuaucgguaugggugccugcaccgauuccaaaguuaaccgcauccguuuuaaagaccaugacuuugccgcuaucgcugacuuugacauggugcguaacgcgguagaugcggcuaaagcacugggcguugaugcucgcguugguaaccuguucuccgcugaccuguucuacucuccggacggcgaaauguucgacgugauggaaaaauacggcauccucggcguggaaauggaagcggcugguaucuacggcguggcugcagaguuuggcgcgaaagcccugaccaucugcaccgugucugaccacauccgcacucacgagcagaccacugccgcugagcgucagaccaccuucaacgacaugaucaaaaucgcacuggaauccguucugcugggcgauaaagaguaa

SEQ ID NO: 6539 - RNA, 720 nt, Artificial Sequence; identical to SEQ ID NO: 6203
  derived and/or modified sequence opt1 from Purine_Nucleoside_Phosphorylase_deoD__Escherichia_coli__EFF14801

SEQ ID NO: 6540 - RNA, 720 nt, Artificial Sequence; identical to SEQ ID NO: 6204
  derived and/or modified sequence opt2 from Purine_Nucleoside_Phosphorylase_deoD__Escherichia_coli__EFF14801

SEQ ID NO: 6541 - RNA, 720 nt, Artificial Sequence; identical to SEQ ID NO: 6205
  derived and/or modified sequence opt3 from Purine_Nucleoside_Phosphorylase_deoD__Escherichia_coli__EFF14801

SEQ ID NO: 6542 - RNA, 720 nt, Artificial Sequence; identical to SEQ ID NO: 6206
  derived and/or modified sequence opt4 from Purine_Nucleoside_Phosphorylase_deoD__Escherichia_coli__EFF14801

SEQ ID NO: 6543 - RNA, 720 nt, Artificial Sequence; identical to SEQ ID NO: 6207
  derived and/or modified sequence opt5 from Purine_Nucleoside_Phosphorylase_deoD__Escherichia_coli__EFF14801

SEQ ID NO: 6544 - RNA, 720 nt, Artificial Sequence
  derived and/or modified sequence opt6 from Purine_Nucleoside_Phosphorylase_deoD__Escherichia_coli__EFF14801
auggcgacaccacauauaaacgcagaaaugggagacuuugcagauguaguacuaaugccaggggacccauuaagagcaaaauacauagccgaaacauuuuuagaagacgcaagagaaguaaauaacguaagaggaauguuaggauuuacaggaacauauaaaggaagaaaaauaaguguaaugggacauggaaugggaauacccucaugcucaauauauacaaaagaauuaauaacagacuuuggaguaaaaaagauaauaagaguaggaucaugcggagccguauuaccacacguaaaauuaagagauguaguaauaggaaugggagcauguacagauagcaaaguaaauagaauaagauuuaaagaucacgauuucgcagcaauagcagauuucgauaugguaagaaaugcaguagaugcagcaaaagcacuaggaguagacgcaagaguaggaaaucuauuuagcgcagacuuauucuauaguccagauggagaaauguuugauguaauggaaaaauacggaauauuaggaguagaaauggaagcagcagggauauauggaguggcagcagaauucggagcaaaagcacuaacaauauguacagugucagaucauauaagaacacacgaacaaacaacagcagcagaaagacaaacaacauucaaugacaugauaaaaauagcacuagaaagcguacuauuaggagauaaagaauaa

SEQ ID NO: 6545 - protein, 239 aa, Artificial Sequence; identical to SEQ ID NO: 6193
  Purine_Nucleoside_Phosphorylase_deoD__Escherichia_coli__E0J437

SEQ ID NO: 6546 - RNA, 720 nt, Artificial Sequence
  Purine_Nucleoside_Phosphorylase_deoD__Escherichia_coli__AFH14259
auggcuaccccacacauuaaugcagaaaugggcgauuucgcugacguaguuuugaugccaggcgacccgcugcgugcgaaguauauugcugaaacuuuccuugaagaugcccgugaagugaacaacguucgcgguaugcugggcuucaccgguacuuacaaaggccgcaaaauuuccguaaugggucacgguauggguaucccguccugcuccaucuacaccaaagaacugaucaccgauuucggcgugaagaaaauuauccgcguggguuccuguggcgcaguucugccgcacguaaaacugcgcgacgucguuaucgguaugggugccugcaccgauuccaaaguuaaccgcauccguuuuaaagaucaugacuuugccgcuaucgcugacuuugacauggugcguaacgcgguagacgcggcuaaagcacugggcauugaugcucgcguugguaaccuguucuccgcugaccuguucuacucuccggacggcgaaauguucgacgugauggaaaaauacggcauccucggcguggaaauggaagcagcugguaucuacggcgucgcugcagaauuuggcgcgaaagcccugaccaucugcaccgugucugaccacauccgcacucacgagcagaccacugccgcugagcgucagaccaccuucaacgacaugaucaaaaucgcacuggaauccguucugcugggcgauaaagaguaa

SEQ ID NO: 6547 - RNA, 720 nt, Artificial Sequence; identical to SEQ ID NO: 6195
  derived and/or modified sequence opt1 from Purine_Nucleoside_Phosphorylase_deoD__Escherichia_coli__AFH14259

SEQ ID NO: 6548 - RNA, 720 nt, Artificial Sequence; identical to SEQ ID NO: 6196
  derived and/or modified sequence opt2 from Purine_Nucleoside_Phosphorylase_deoD__Escherichia_coli__AFH14259

SEQ ID NO: 6549 - RNA, 720 nt, Artificial Sequence; identical to SEQ ID NO: 6197
  derived and/or modified sequence opt3 from Purine_Nucleoside_Phosphorylase_deoD__Escherichia_coli__AFH14259

SEQ ID NO: 6550 - RNA, 720 nt, Artificial Sequence; identical to SEQ ID NO: 6198
  derived and/or modified sequence opt4 from Purine_Nucleoside_Phosphorylase_deoD__Escherichia_coli__AFH14259

SEQ ID NO: 6551 - RNA, 720 nt, Artificial Sequence; identical to SEQ ID NO: 6199
  derived and/or modified sequence opt5 from Purine_Nucleoside_Phosphorylase_deoD__Escherichia_coli__AFH14259

SEQ ID NO: 6552 - RNA, 720 nt, Artificial Sequence
  derived and/or modified sequence opt6 from Purine_Nucleoside_Phosphorylase_deoD__Escherichia_coli__AFH14259
auggcaacaccacauauaaaugcagaaaugggagacuuugcagacguaguauuaaugccaggagacccauuaagagcaaaauacauagcagaaacauuucuagaagaugcaagagaaguaaauaacguaagaggaauguuaggcuuuacaggaacauauaaaggaagaaaaauaucaguaaugggacauggaaugggaauaccaagcugcucaauauauacaaaagaacugauaacagacuuuggaguaaaaaaaauaauaagagugggaucaugcggagcaguacuaccacacguaaaauuaagagauguaguaauaggaaugggagcauguaccgauaguaaaguaaauagaauaagauuuaaagaucacgauuucgcagcaauagcagauuuugauaugguaagaaaugcaguggacgcagcaaaagcauuaggaauagaugcaagagugggaaaucucuuuagugcggaccuauucuauagcccagacggagaaauguucgauguaauggaaaaauacgggauauuaggaguagaaauggaagcagcaggaauauauggaguagccgcagaauuuggcgcaaaagcauuaacaauauguacaguaagcgaucacauaagaacacacgaacaaacaacagcagcagaaagacaaacaacauucaaugauaugauaaaaauagcacuagaaaguguacuauuaggagauaaagaauaa

SEQ ID NO: 6553 - protein, 239 aa, Artificial Sequence; identical to SEQ ID NO: 6201
  Purine_Nucleoside_Phosphorylase_deoD__Escherichia_coli__E2QLE4

SEQ ID NO: 6554 - RNA, 720 nt, Artificial Sequence
  Purine_Nucleoside_Phosphorylase_deoD__Escherichia_coli__AJO86506
auggcuacuccacacauuaaugcagaaaugggcgauuuugcugacguaguuuugaugccaggcgacccgcugcgugcgaaguauauugcugaaacuuuccuugaagaugcccgugaagugaacaacguucgcgguaugcugggcuucacugguacuuacaaaggccgcaaaauuuccguaaugggccacgguauggguaucccguccugcuccaucuacaccaaagaacugaucacugauuucggcgugaagaaaauuauccgcguggguuccuguggcgcuguucugccgcacguaaaacugcgcgacgucguuaucgguaugggugccugcaccgauuccaaaguuaaccgcauccguuuuaaagaccaugacuuugccgcuaucgcugacuucgacauggugcguaacgcgguagacgcggcaaaagcacugggcguugaugcucgcguugguaaccuguucuccgcugaccuguucuacucuccggacggcgaaauguucgacgugauggaaaaauacggcauccucggcguggaaauggaagcggcggguaucuacggcgucgcugcagaauuuggcgcgaaagcccugaccaucugcaccgugucugaccacauccgcacucacgagcagaccacugccgcugagcgucagaccaccuucaacgacaugaucaaaaucgcgcuggaauccguucugcugggcgauaaagaguaa

SEQ ID NO: 6555 - RNA, 720 nt, Artificial Sequence; identical to SEQ ID NO: 6203
  derived and/or modified sequence opt1 from Purine_Nucleoside_Phosphorylase_deoD__Escherichia_coli__AJO86506

SEQ ID NO: 6556 - RNA, 720 nt, Artificial Sequence; identical to SEQ ID NO: 6204
  derived and/or modified sequence opt2 from Purine_Nucleoside_Phosphorylase_deoD__Escherichia_coli__AJO86506

SEQ ID NO: 6557 - RNA, 720 nt, Artificial Sequence; identical to SEQ ID NO: 6205
  derived and/or modified sequence opt3 from Purine_Nucleoside_Phosphorylase_deoD__Escherichia_coli__AJO86506

SEQ ID NO: 6558 - RNA, 720 nt, Artificial Sequence; identical to SEQ ID NO: 6206
  derived and/or modified sequence opt4 from Purine_Nucleoside_Phosphorylase_deoD__Escherichia_coli__AJO86506

SEQ ID NO: 6559 - RNA, 720 nt, Artificial Sequence; identical to SEQ ID NO: 6207
  derived and/or modified sequence opt5 from Purine_Nucleoside_Phosphorylase_deoD__Escherichia_coli__AJO86506

SEQ ID NO: 6560 - RNA, 720 nt, Artificial Sequence
  derived and/or modified sequence opt6 from Purine_Nucleoside_Phosphorylase_deoD__Escherichia_coli__AJO86506
auggcaacaccacauauaaaugcagaaaugggagacuucgcagauguaguacuaaugccaggagacccacuaagagcaaaauauauagcagaaacauuucuagaagacgcaagagaaguaaacaacguaagagguauguuaggauuuacaggaacauauaaaggaagaaaaauaaguguaaugggacauggaaugggaauaccaucauguaguauauauacaaaagaauuaauaacagacuuuggaguaaaaaaaauaauaagaguaggaucaugcggagccguacuaccacacguaaaacuaagagauguaguaauaggaaugggagccuguacagauagcaaaguaaauagaauaagauuuaaagaucaugauuucgcagcaauagcagauuucgacaugguaagaaaugcaguagacgcagcaaaagcauuaggaguagacgcgagaguaggaaauuuauuuagcgcagacuuauucuauucaccagacggagaaauguucgauguaauggaaaaauauggaauauuaggaguagaaauggaagcagcaggaauauauggaguagcagcagaauuuggagcaaaagcacuaacaauauguacaguaagcgaucacauaagaacacacgaacaaacaacagcagcagaaagacaaacaacauucaaugacaugauaaaaauagcacuagaaagcguacuauuaggagauaaagaauaa

SEQ ID NO: 6561 - protein, 239 aa, Artificial Sequence; identical to SEQ ID NO: 6193
  Purine_Nucleoside_Phosphorylase_deoD__Escherichia_coli__E3PFG7

SEQ ID NO: 6562 - RNA, 720 nt, Artificial Sequence
  Purine_Nucleoside_Phosphorylase_deoD__Escherichia_coli__CBJ04246
auggcuaccccacacauuaaugcagaaaugggcgauuucgcugacguaguuuugaugccaggcgacccgcugcgugcgaaguauauugcugaaacuuuccuugaagaugcccgugaagugaacaacguucgcgguaugcugggcuucaccgguacuuacaaaggccgcaaaauuuccguaaugggucacgguauggguaucccguccugcuccaucuacaccaaagaacugaucaccgauuucggcgugaagaaaauuauccgcguggguuccuguggcgcaguucugccgcacguaaaacuacgcgacgucguuaucgguaugggugccugcaccgauuccaaaguuaaccgcauccguuuuaaagaucaugacuuugccgcuaucgcugacuuugacauggugcguaacgcgguagacgcggcuaaagcacugggcauugaugcucgcguugguaaccuguucuccgcugaccuguucuacucuccggacggcgaaauguucgacgugauggaaaaauacggcauccucggcguggaaauggaagcggcugguaucuacggcgucgcugcagaauuuggcgcgaaagcccugaccaucuguaccgugucugaccacauccgcacucacgagcagaccacugccgcugagcgucagaccaccuucaacgacaugaucaaaaucgcacuggaauccguucugcugggcgauaaagaguaa

SEQ ID NO: 6563 - RNA, 720 nt, Artificial Sequence; identical to SEQ ID NO: 6195
  derived and/or modified sequence opt1 from Purine_Nucleoside_Phosphorylase_deoD__Escherichia_coli__CBJ04246

SEQ ID NO: 6564 - RNA, 720 nt, Artificial Sequence; identical to SEQ ID NO: 6196
  derived and/or modified sequence opt2 from Purine_Nucleoside_Phosphorylase_deoD__Escherichia_coli__CBJ04246

SEQ ID NO: 6565 - RNA, 720 nt, Artificial Sequence; identical to SEQ ID NO: 6197
  derived and/or modified sequence opt3 from Purine_Nucleoside_Phosphorylase_deoD__Escherichia_coli__CBJ04246

SEQ ID NO: 6566 - RNA, 720 nt, Artificial Sequence; identical to SEQ ID NO: 6198
  derived and/or modified sequence opt4 from Purine_Nucleoside_Phosphorylase_deoD__Escherichia_coli__CBJ04246

SEQ ID NO: 6567 - RNA, 720 nt, Artificial Sequence; identical to SEQ ID NO: 6199
  derived and/or modified sequence opt5 from Purine_Nucleoside_Phosphorylase_deoD__Escherichia_coli__CBJ04246

SEQ ID NO: 6568 - RNA, 720 nt, Artificial Sequence
  derived and/or modified sequence opt6 from Purine_Nucleoside_Phosphorylase_deoD__Escherichia_coli__CBJ04246
auggcaacaccacauauaaaugcagaaaugggagacuuugcagauguaguauuaaugccaggagauccauuaagagcaaaauauauagcagaaacauuucuagaagacgcaagagaaguaaauaacguaagaggaaugcuaggauuuacaggaacauauaaagguagaaaaauaucaguaaugggacauggaaugggaauacccucaugcagcauauauacaaaagaauuaauaacagacuucggagugaaaaaaauaauaagaguaggaucauguggagcaguacuaccacacgugaaauuaagagauguaguaauaggaaugggagcauguacagauagcaaaguaaauagaauaagauuuaaagaucacgauuuugcagccauagcagauuucgauaugguaagaaacgcaguagacgcagcaaaagcauuaggaauagacgcaagaguaggaaaucuauuuagcgcagacuuguucuauucaccagacggggaaauguucgauguaauggaaaaauacggaauuuuaggcguagaaauggaagcagcaggaauauauggaguagcagcagaauuuggagcaaaagcacuaacaauauguacaguaagcgaucacauuagaacacaugaacaaacaacagcagcugaacgacaaacaacauucaaugacaugauaaaaauagcacuagagaguguacuauuaggagauaaagaauaa

SEQ ID NO: 6569 - protein, 239 aa, Artificial Sequence; identical to SEQ ID NO: 6193
  Purine_Nucleoside_Phosphorylase_deoD__Escherichia_coli__E8YEH0

SEQ ID NO: 6570 - RNA, 720 nt, Artificial Sequence; identical to SEQ ID NO: 6546
  Purine_Nucleoside_Phosphorylase_deoD__Escherichia_coli__ADX52500

SEQ ID NO: 6571 - RNA, 720 nt, Artificial Sequence; identical to SEQ ID NO: 6195
  derived and/or modified sequence opt1 from Purine_Nucleoside_Phosphorylase_deoD__Escherichia_coli__ADX52500

SEQ ID NO: 6572 - RNA, 720 nt, Artificial Sequence; identical to SEQ ID NO: 6196
  derived and/or modified sequence opt2 from Purine_Nucleoside_Phosphorylase_deoD__Escherichia_coli__ADX52500

SEQ ID NO: 6573 - RNA, 720 nt, Artificial Sequence; identical to SEQ ID NO: 6197
  derived and/or modified sequence opt3 from Purine_Nucleoside_Phosphorylase_deoD__Escherichia_coli__ADX52500

SEQ ID NO: 6574 - RNA, 720 nt, Artificial Sequence; identical to SEQ ID NO: 6198
  derived and/or modified sequence opt4 from Purine_Nucleoside_Phosphorylase_deoD__Escherichia_coli__ADX52500

SEQ ID NO: 6575 - RNA, 720 nt, Artificial Sequence; identical to SEQ ID NO: 6199
  derived and/or modified sequence opt5 from Purine_Nucleoside_Phosphorylase_deoD__Escherichia_coli__ADX52500

SEQ ID NO: 6576 - RNA, 720 nt, Artificial Sequence
  derived and/or modified sequence opt6 from Purine_Nucleoside_Phosphorylase_deoD__Escherichia_coli__ADX52500
auggcaacaccacauauaaaugcagaaaugggagacuuugcagauguagugcuaaugccaggggacccacuaagagcgaaauacauagcagaaacauuucuagaagacgcgagagaaguaaauaacguaagaggaauguuaggauuuacaggaacauauaaaggaagaaaaauaucaguaaugggacauggaaugggaauaccaucgugcucaauauauacaaaagaauuaauaacagacuuuggaguaaaaaaaauaauaagaguaggaucaugcggagcaguacuaccacacguaaaacuaagagauguaguaauagggaugggagcauguacagauagcaaaguaaauagaauacgauuuaaagaucacgauuucgcagcaauagcagauuucgauaugguacgaaaugcaguagacgcagcaaaagcauuaggaauagacgcaagaguaggaaauuuauuuagcgcagauuuauucuauagcccagacggagaaauguucgauguaauggaaaaauacgggauauuaggaguagaaauggaagcagcaggaauauauggaguagcagcagaauuuggagcaaaagcacuaacaauauguacaguaagcgaucacauaagaacacacgaacaaacaacagcggcagaaagacaaacaacguuuaaugacaugauaaaaauagcacucgaaagcgugcuauuaggagauaaagaauaa

SEQ ID NO: 6577 - protein, 239 aa, Artificial Sequence; identical to SEQ ID NO: 6193
  Purine_Nucleoside_Phosphorylase_deoD__Escherichia_coli__F4NLK2

SEQ ID NO: 6578 - RNA, 720 nt, Artificial Sequence; identical to SEQ ID NO: 6546
  Purine_Nucleoside_Phosphorylase_deoD__Escherichia_coli__EGJ07033

SEQ ID NO: 6579 - RNA, 720 nt, Artificial Sequence; identical to SEQ ID NO: 6195
  derived and/or modified sequence opt1 from Purine_Nucleoside_Phosphorylase_deoD__Escherichia_coli__EGJ07033

SEQ ID NO: 6580 - RNA, 720 nt, Artificial Sequence; identical to SEQ ID NO: 6196
  derived and/or modified sequence opt2 from Purine_Nucleoside_Phosphorylase_deoD__Escherichia_coli__EGJ07033

SEQ ID NO: 6581 - RNA, 720 nt, Artificial Sequence; identical to SEQ ID NO: 6197
  derived and/or modified sequence opt3 from Purine_Nucleoside_Phosphorylase_deoD__Escherichia_coli__EGJ07033

SEQ ID NO: 6582 - RNA, 720 nt, Artificial Sequence; identical to SEQ ID NO: 6198
  derived and/or modified sequence opt4 from Purine_Nucleoside_Phosphorylase_deoD__Escherichia_coli__EGJ07033

SEQ ID NO: 6583 - RNA, 720 nt, Artificial Sequence; identical to SEQ ID NO: 6199
  derived and/or modified sequence opt5 from Purine_Nucleoside_Phosphorylase_deoD__Escherichia_coli__EGJ07033

SEQ ID NO: 6584 - RNA, 720 nt, Artificial Sequence
  derived and/or modified sequence opt6 from Purine_Nucleoside_Phosphorylase_deoD__Escherichia_coli__EGJ07033
auggcaacaccacauauaaaugcagaaaugggagauuuugcagauguaguacuaaugccaggagauccacuaagggccaaauauauugcagaaacauuucuagaagaugcaagagaaguaaauaacguacgaggaaugcuaggauuuaccggaacauauaaaggaagaaaaaucucaguaaugggacauggaaugggcauaccaucaugcucaauauauacaaaagaauuaauaacagacuuuggaguaaaaaaaauaauacgaguaggaucguguggagcaguacucccucacguaaaauuaagagauguaguuauaggaaugggagccuguacagauagcaaaguaaauagaauaagauuuaaagaucacgauuucgcagcaauagcagauuucgauaugguaaggaaugcaguggacgcagcaaaagcauuaggaauagacgcaagaguaggaaacuuauuuagugcagacuuauucuauaguccagacggagaaauguucgauguaauggaaaaauacggaauauuaggaguagaaauggaagcagcaggaauauauggaguagcagcggaauuuggagcaaaagcacuaacaauauguaccgugagugaucacauaagaacacacgaacaaacaacugcagcagaaagacaaacaacauuuaaugauaugauaaaaauagcacuagaaaguguacuauuaggagauaaagaauaa

SEQ ID NO: 6585 - protein, 239 aa, Artificial Sequence; identical to SEQ ID NO: 6201
  Purine_Nucleoside_Phosphorylase_deoD__Escherichia_coli__F4SEX7

SEQ ID NO: 6586 - RNA, 720 nt, Artificial Sequence
  Purine_Nucleoside_Phosphorylase_deoD__Escherichia_coli__EGI12380
auggcuaccccacacauuaaugcagaaaugggcgauuucgcugacguaguuuugaugccaggcgacccgcugcgugcgaaguauauugcugaaacuuuccuugaagaugcccgugaagugaacaacguucgcgguaugcugggcuucaccgguacuuacaaaggccgcaaaauuuccguaaugggucacgguauggguaucccguccugcuccaucuacaccaaagaacugaucaccgauuucggcgugaagaaaauuauccgcguggguuccuguggcgcaguucugccgcacguaaaacugcgcgacgucguuaucgguaugggugccugcaccgauuccaaaguuaaccgcauccguuuuaaagaccaugacuuugccgcuaucgcugacuuugacauggugcguaacgcgguagacgcggcuaaagcacugggcguugaugcucgcguugguaaccuguucuccgcugaccuguucuacucuccggacggcgaaauguucgacgugauggaaaaauacggcauccucggcguggaaauggaagcggcugguaucuacggcgucgcugcagaauuuggcgcgaaagcccugaccaucugcaccgugucugaccacauccgcacucacgagcagaccacugccgcugagcgucagaccaccuucaacgacaugaucaaaaucgcacuggaauccguucugcugggcgauaaagaguaa

SEQ ID NO: 6587 - RNA, 720 nt, Artificial Sequence; identical to SEQ ID NO: 6203
  derived and/or modified sequence opt1 from Purine_Nucleoside_Phosphorylase_deoD__Escherichia_coli__EGI12380

SEQ ID NO: 6588 - RNA, 720 nt, Artificial Sequence; identical to SEQ ID NO: 6204
  derived and/or modified sequence opt2 from Purine_Nucleoside_Phosphorylase_deoD__Escherichia_coli__EGI12380

SEQ ID NO: 6589 - RNA, 720 nt, Artificial Sequence; identical to SEQ ID NO: 6205
  derived and/or modified sequence opt3 from Purine_Nucleoside_Phosphorylase_deoD__Escherichia_coli__EGI12380

SEQ ID NO: 6590 - RNA, 720 nt, Artificial Sequence; identical to SEQ ID NO: 6206
  derived and/or modified sequence opt4 from Purine_Nucleoside_Phosphorylase_deoD__Escherichia_coli__EGI12380

SEQ ID NO: 6591 - RNA, 720 nt, Artificial Sequence; identical to SEQ ID NO: 6207
  derived and/or modified sequence opt5 from Purine_Nucleoside_Phosphorylase_deoD__Escherichia_coli__EGI12380

SEQ ID NO: 6592 - RNA, 720 nt, Artificial Sequence
  derived and/or modified sequence opt6 from Purine_Nucleoside_Phosphorylase_deoD__Escherichia_coli__EGI12380
auggcaacaccacauauaaaugcagaaaugggagacuuugcagauguaguacuaaugccaggagacccauuaagagcaaaauauauagcagaaacauuucuagaagacgcaagagaaguaaauaacguaagaggaauguugggauucacaggaacauauaaaggaagaaaaauaucaguaaugggacacggcaugggaauaccaucaugcucaauauauacaaaagaauuaauaacagacuuuggaguaaaaaaaauaauacgaguaggaucaugcggagccguacuaccacacguaaaauuaagagacguaguaauaggaaugggagcauguacagauaguaaaguaaacagaauacgauuuaaagaucaugauuucgcagcaauagcagauuuugauaugguaagaaaugcaguagacgcugcaaaagcacuaggaguagacgcaagaguaggaaaucuauuuagugcagacuuauucuauagcccagacggagaaauguucgauguaauggaaaaauacgggauauuaggaguagaaauggaagcagcaggaauauauggaguagcagcagaauuuggagcaaaagcacuaacgauauguacagugagcgaucacauaagaacacacgaacaaacgacagcagccgaacgacaaacaacauucaaugacaugauaaaaauagcacuagaaagcguacuauuaggagauaaagaauaa

SEQ ID NO: 6593 - protein, 258 aa, Artificial Sequence
  Purine_Nucleoside_Phosphorylase_deoD__Escherichia_coli__F4STB8
MDLGGAVTPPLICHKKDKTMATPHINAEMGDFADVVLMPGDPLRAKYIAETFLEDAREVNNVRGMLGFTGTYKGRKISVMGHGMGIPSCSIYTKELITDFGVKKIIRVGSCGAVLPHVKLRDVVIGMGACTDSKVNRIRFKDHDFAAIADFDMVRNAVDAAKALGVDARVGNLFSADLFYSPDGEMFDVMEKYGILGVEMEAAGIYGVAAEFGAKALTICTVSDHIRTHEQTTAAERQTTFNDMIKIALESVLLGDKE

SEQ ID NO: 6594 - RNA, 777 nt, Artificial Sequence
  Purine_Nucleoside_Phosphorylase_deoD__Escherichia_coli__EGI17958
auggauuugggcggagcagugacuccgccuuuaauaugucacaaaaaggauaaaacgauggcuacuccacacauuaaugcagaaaugggcgauuuugcugacguaguuuugaugccaggcgacccgcugcgugcgaaguauauugcugaaacuuuccuugaagaugcccgugaagugaacaacguucgcgguaugcugggcuucacugguacuuacaaaggccgcaaaauuuccguaaugggccacgguauggguaucccguccugcuccaucuacaccaaagaacugaucacugauuucggcgugaagaaaauuauccgcguggguuccuguggcgcuguucugccgcacguaaaacugcgcgacgucguuaucgguaugggugccugcaccgauuccaaaguuaaccgcauccguuuuaaagaccaugacuuugccgcuaucgcugacuucgacauggugcguaacgcgguagacgcggcaaaagcacugggcguugaugcucgcguugguaaccuguucuccgcugaccuguucuacucuccggacggcgaaauguucgacgugauggaaaaauacggcauccucggcguggaaauggaagcggcggguaucuacggcgucgcugcagaauuuggcgcgaaagcccugaccaucugcaccgugucugaccacauccgcacucacgagcagaccacugccgcugagcgucagaccaccuucaacgacaugaucaaaaucgcgcuggaauccguucugcugggcgauaaagaguaa

SEQ ID NO: 6595 - RNA, 777 nt, Artificial Sequence
  derived and/or modified sequence opt1 from Purine_Nucleoside_Phosphorylase_deoD__Escherichia_coli__EGI17958
auggaccugggcggggccgugaccccgccccucaucugccacaagaaggacaagaccauggccacgccccacaucaacgcggagaugggcgacuucgccgacgucgugcugaugcccggggacccccugcgcgccaaguacaucgccgagaccuuccucgaggacgcccgggaggugaacaacguccgcggcaugcugggguucaccggcaccuacaagggccggaagaucagcgugauggggcacggcauggggaucccguccugcagcaucuacacgaaggagcugaucaccgacuucggcgugaagaagaucauccgcgucggguccugcggcgcggugcucccccacgugaagcugcgggacgucgugaucggcaugggggccugcaccgacagcaaggugaaccgcauccgguucaaggaccacgacuucgccgccaucgcggacuucgacaugguccgcaacgccguggacgccgccaaggcccugggcguggacgcgcgggucgggaaccucuucuccgccgaccuguucuacagccccgacggcgagauguucgacgugauggagaaguacggcauccuggggguggagauggaggccgccggcaucuacggggucgccgcggaguucggcgccaaggcccucaccaucugcacgguguccgaccacauccgcacccacgagcagaccaccgccgccgagcggcagacgaccuucaacgacaugaucaagaucgcgcuggagagcgugcugcucggggacaaggaguga

SEQ ID NO: 6596 - RNA, 777 nt, Artificial Sequence
  derived and/or modified sequence opt2 from Purine_Nucleoside_Phosphorylase_deoD__Escherichia_coli__EGI17958
auggaccucggcggcgccgucacccccccccucaucugccacaagaaggacaagaccauggccaccccccacaucaacgccgagaugggcgacuucgccgacgucguccucaugcccggcgacccccuccgcgccaaguacaucgccgagaccuuccucgaggacgcccgcgaggucaacaacguccgcggcaugcucggcuucaccggcaccuacaagggccgcaagaucuccgucaugggccacggcaugggcauccccuccugcuccaucuacaccaaggagcucaucaccgacuucggcgucaagaagaucauccgcgucggcuccugcggcgccguccucccccacgucaagcuccgcgacgucgucaucggcaugggcgccugcaccgacuccaaggucaaccgcauccgcuucaaggaccacgacuucgccgccaucgccgacuucgacaugguccgcaacgccgucgacgccgccaaggcccucggcgucgacgcccgcgucggcaaccucuucuccgccgaccucuucuacucccccgacggcgagauguucgacgucauggagaaguacggcauccucggcgucgagauggaggccgccggcaucuacggcgucgccgccgaguucggcgccaaggcccucaccaucugcaccgucuccgaccacauccgcacccacgagcagaccaccgccgccgagcgccagaccaccuucaacgacaugaucaagaucgcccucgaguccguccuccucggcgacaaggaguga

SEQ ID NO: 6597 - RNA, 777 nt, Artificial Sequence
  derived and/or modified sequence opt3 from Purine_Nucleoside_Phosphorylase_deoD__Escherichia_coli__EGI17958
auggaccugggcggggccgugacacccccucucaucugccacaagaaagauaagaccauggcuacuccacauauuaacgcagagaugggagacuucgccgaugucguucuuaugccgggugacccccugagagcgaaauacauagcugaaacguuuuuggaggaugccagggaagugaauaacguacggggcauguuaggguucaccggaacauauaagggccgcaaaaucagcgugaugggucacgggaugggcauuccuuccuguucuaucuacacuaaggagcugauuaccgacuuuggagucaagaaaaucauacgagugggcucaugcggggcaguucuaccacaugugaagcuccgugaugucgugaucggaaugggugccuguacagacaguaaaguaaauagaauuagguucaaggaucacgacuuugcugcaaucgccgauuucgacaugguucggaacgcuguggaugccgcgaaagcacugggcgucgacgcccgcguggggaaucuuuuuagcgcugaccuguucuauucccccgauggagaaauguuugacgugauggagaaguacggcauuuugggugucgagauggaagccgcagggaucuauggaguugcugccgaguucggcgcgaaggcccucaccauaugcacugugucugaucauauuagaacacacgaacagaccacggcagcugagaggcaaacuaccuuuaacgacaugaucaaaauugcccuggagucgguacugcucggcgauaaggaauga

SEQ ID NO: 6598 - RNA, 777 nt, Artificial Sequence
  derived and/or modified sequence opt4 from Purine_Nucleoside_Phosphorylase_deoD__Escherichia_coli__EGI17958
auggaccugggcggcgccgugacccccccccugaucugccacaagaaggacaagaccauggccaccccccacaucaacgccgagaugggcgacuucgccgacguggugcugaugcccggcgacccccugagagccaaguacaucgccgagaccuuccuggaggacgccagagaggugaacaacgugagaggcaugcugggcuucaccggcaccuacaagggcagaaagaucagcgugaugggccacggcaugggcauccccagcugcagcaucuacaccaaggagcugaucaccgacuucggcgugaagaagaucaucagagugggcagcugcggcgccgugcugccccacgugaagcugagagacguggugaucggcaugggcgccugcaccgacagcaaggugaacagaaucagauucaaggaccacgacuucgccgccaucgccgacuucgacauggugagaaacgccguggacgccgccaaggcccugggcguggacgccagagugggcaaccuguucagcgccgaccuguucuacagccccgacggcgagauguucgacgugauggagaaguacggcauccugggcguggagauggaggccgccggcaucuacggcguggccgccgaguucggcgccaaggcccugaccaucugcaccgugagcgaccacaucagaacccacgagcagaccaccgccgccgagagacagaccaccuucaacgacaugaucaagaucgcccuggagagcgugcugcugggcgacaaggaguga

SEQ ID NO: 6599 - RNA, 777 nt, Artificial Sequence
  derived and/or modified sequence opt5 from Purine_Nucleoside_Phosphorylase_deoD__Escherichia_coli__EGI17958
auggaccugggcggggccgugacacccccucucaucugccacaagaaagauaagaccauggcuacgccgcauauuaacgccgagaugggagacuucgcggaugucguucugaugcccggcgacccucuuagagcuaaauacaucgccgaaaccuuucuggaggaugcccgggaagugaauaacgugcgcgggaugcucggauucacaggcaccuauaaggggagaaaaauuagcgucaugggacacggcaugggcauccccuccuguucuauuuacacaaaggagcugaucaccgacuuuggggugaagaaaaucauucggguuggaagcugcggcgcugugcuuccucaugucaagcugcgcgaugugguuaucgggaugggagccuguacagacuccaaagugaaucggauuagauucaaggaucacgacuuugcugccaucgcggauuucgacaugguccgcaacgccguggaugcugccaaagcucucggcguggacgccagagucgggaaucuguuuucugcggaccuguucuauagccccgauggagaaauguuugacguuauggagaaguacggcauucucggcguggagauggaagccgcugggaucuauggaguggccgcugaguucggcgccaaggcccugaccauuugcacggucuccgaucauauccggacccacgaacagacaaccgcugcggagcgccaaacaaccuuuaacgacaugaucaaaauugcccuugagucugugcugcucggggauaaggaauga

SEQ ID NO: 6600 - RNA, 777 nt, Artificial Sequence
  derived and/or modified sequence opt6 from Purine_Nucleoside_Phosphorylase_deoD__Escherichia_coli__EGI17958
auggaucuaggaggagcaguaacaccaccauuaauaugccauaaaaaagacaaaacuauggcaacaccacauauaaaugcagaaaugggagacuuugcagauguaguauuaaugccaggagacccacuaagagcaaaauacauagcagaaacauuucuagaagacgcaagagaaguaaauaacguaagaggaaugcuaggauuuacaggaacuuauaaaggaagaaaaauaucaguaaugggacauggaaugggaauaccaucaugcucgauauauacaaaagaauuaauaacagauuuuggaguaaaaaaaauaauaagaguaggaucaugcggagcaguacuaccucauguaaaacuaagagauguaguaauaggaaugggagcauguacagauaguaaaguaaauagaauaagguuuaaagaucacgacuucgcagcaauagcagauuucgauaugguuagaaaugcaguugaugcagcaaaagccuuaggaguagacgcaagaguaggaaauuuauuuagugcagacuuauucuauaguccagacggagaaauguucgacguaauggaaaaauacggaauauuaggaguagaaauggaagcagcaggaauauauggaguagcagcagaauuuggagcaaaagcacuuacuauuuguacaguaagcgaucacauaagaacacaugaacaaacaacagcagcagaaagacaaacaacguucaaugacaugauaaaaauagcauuagaaagcguauuauuaggagauaaagaauaa

SEQ ID NO: 6601 - protein, 239 aa, Artificial Sequence; identical to SEQ ID NO: 6193
  Purine_Nucleoside_Phosphorylase_deoD__Escherichia_coli__F4T9F1

SEQ ID NO: 6602 - RNA, 720 nt, Artificial Sequence
  Purine_Nucleoside_Phosphorylase_deoD__Escherichia_coli__EGI23374
auggcuaccccacacauuaaugcagaaaugggcgauuucgcugacguaguuuugaugccaggcgacccgcugcgugcgaaguauauugcugaaacuuuccuugaagaugcccgugaagugaacaacguucgcgguaugcugggcuucaccgguacuuacaaaggccgcaaaauuuccguaaugggucacgguauggguaucccguccugcuccaucuacaccaaagaacugaucaccgauuucggcgugaagaaaauuauccgcguaggcuccuguggcgcuguucugccgcacguaaaacugcgcgacgucguuaucgguaugggugccugcaccgauuccaaaguuaaccguauccguuuuaaagaccaugacuuugccgcuaucgcugacuuugacauggugcguaacgcgguagacgcggcuaaagcacugggcauugaugcucgcguugguaaccuguucuccgcugaccuguucuacucuccggacggcgaaauguucgacgugauggaaaaauacggcauccucggcguggaaauggaagcggcugguaucuacggcgucgcugcagaauuuggcgcgaaagcccugaccaucuguaccgugucugaccacauccgcacucacgagcagaccacugccgcugagcgucagaccaccuucaacgacaugaucaaaauugcacuggaauccguucugcugggcgauaaagaguaa

SEQ ID NO: 6603 - RNA, 720 nt, Artificial Sequence; identical to SEQ ID NO: 6195
  derived and/or modified sequence opt1 from Purine_Nucleoside_Phosphorylase_deoD__Escherichia_coli__EGI23374

SEQ ID NO: 6604 - RNA, 720 nt, Artificial Sequence; identical to SEQ ID NO: 6196
  derived and/or modified sequence opt2 from Purine_Nucleoside_Phosphorylase_deoD__Escherichia_coli__EGI23374

SEQ ID NO: 6605 - RNA, 720 nt, Artificial Sequence; identical to SEQ ID NO: 6197
  derived and/or modified sequence opt3 from Purine_Nucleoside_Phosphorylase_deoD__Escherichia_coli__EGI23374

SEQ ID NO: 6606 - RNA, 720 nt, Artificial Sequence; identical to SEQ ID NO: 6198
  derived and/or modified sequence opt4 from Purine_Nucleoside_Phosphorylase_deoD__Escherichia_coli__EGI23374

SEQ ID NO: 6607 - RNA, 720 nt, Artificial Sequence; identical to SEQ ID NO: 6199
  derived and/or modified sequence opt5 from Purine_Nucleoside_Phosphorylase_deoD__Escherichia_coli__EGI23374

SEQ ID NO: 6608 - RNA, 720 nt, Artificial Sequence
  derived and/or modified sequence opt6 from Purine_Nucleoside_Phosphorylase_deoD__Escherichia_coli__EGI23374
auggcaacaccacauauaaaugcggaaaugggagacuuugccgauguaguauuaaugccaggagacccauuaagggcaaaauacauagcagaaacauuucuagaagacgcaagagaaguaaauaacguaagaggaauguugggauuuacaggaacauauaaaggaaggaaaauaaguguaaugggacauggaaugggaauaccaaguugcucaauauauacaaaagaacuaauaacagauuuuggaguaaaaaaaauaauaagaguaggaucauguggagcaguacuaccacacguaaaauuaagagauguaguaauaggaaugggagcauguacagauaguaaaguaaauagaauaagauuuaaagaucacgauuucgcagcaauagcagacuucgauaugguaagaaaugcaguagacgcagccaaagcauuaggaauagacgcaagaguaggaaauuuauuuagcgcagacuuauucuauaguccugacggagaaauguucgauguaauggaaaaauacggaauauuaggaguagaaauggaagcagcaggaauauauggaguagcagcagaauuuggagcaaaagcacuaacaauauguacagugagcgaucacauuagaacacacgaacaaacaacagcagcagaaagacaaacaacauuuaaugacaugauaaaaauagcauuagaaaguguauuauuaggagauaaagaauaa

SEQ ID NO: 6609 - protein, 258 aa, Artificial Sequence
  Purine_Nucleoside_Phosphorylase_deoD__Escherichia_coli__F4UXB7
MDLGGALTPPLLCHKKDKTMATPHINAEMGDFADVVLMPGDPLRAKYIAETFLEDAREVNNVRGMLGFTGTYKGRKISVMGHGMGIPSCSIYTKELITDFGVKKIIRVGSCGAVLPHVKLRDVVIGMGACTDSKVNRIRFKDHDFAAIADFDMVRNAVDAAKALGVDARVGNLFSADLFYSPDGEMFDVMEKYGILGVEMEAAGIYGVAAEFGAKALTICTVSDHIRTHEQTTAAERQTTFNDMIKIALESVLLGDKE

SEQ ID NO: 6610 - RNA, 777 nt, Artificial Sequence
  Purine_Nucleoside_Phosphorylase_deoD__Escherichia_coli__EGI42706
auggauuugggcggagcguugacuccgccuuuguuaugucacaaaaaggauaaaacaauggcuaccccacacauuaaugcagaaaugggcgauuucgcugacguaguuuugaugccaggcgacccgcugcgugcgaaguauauugcugaaacuuuccuugaagaugcccgugaagugaauaacguucgcgguaugcugggcuucacugguacuuacaaaggccgcaaaauuuccguaaugggucacgguauggguaucccguccugcuccaucuacaccaaagaacugaucaccgauuucggcgugaagaaaauuauccgcguaggcuccuguggcgcuguucuaccacacguaaaacugcgcgacgucguuaucgguaugggugccugcaccgauuccaaaguuaaccguauccguuuuaaagaccaugacuuugccgcuaucgcugacuuugacauggugcguaacgcgguagacgcggcuaaagcacugggcguugaugcucgcguugguaaccuguucuccgcugaccuguucuacucuccggacggcgaaauguucgacgugauggaaaaauacggcauccucggcguggaaauggaagcagcugguaucuacggcgucgcugcagaauuuggcgcgaaagcccugaccaucugcaccgugucugaccacauccgcacucacgagcagaccacugccgcugagcgucagaccaccuucaacgacaugaucaaaaucgcacuggaauccguucuguugggcgauaaagaguaa

SEQ ID NO: 6611 - RNA, 777 nt, Artificial Sequence
  derived and/or modified sequence opt1 from Purine_Nucleoside_Phosphorylase_deoD__Escherichia_coli__EGI42706
auggaccugggcggggcccucaccccgccccugcugugccacaagaaggacaagaccauggccacgccccacaucaacgcggagaugggcgacuucgccgacgugguccucaugcccggggacccccugcgcgccaaguacaucgccgagaccuuccuggaggacgcccgggaggugaacaacgugcgcggcaugcucggguucaccggcaccuacaagggccggaagaucagcgucauggggcacggcauggggaucccguccugcagcaucuacacgaaggagcugaucaccgacuucggcgugaagaagaucauccgcgugggguccugcggcgcgguccugccccacgugaagcuccgggacguggucaucggcaugggggccugcaccgacagcaaggugaaccgcauccgguucaaggaccacgacuucgccgccaucgcggacuucgacauggugcgcaacgccgucgacgccgccaaggcccugggcguggacgcgcggguggggaaccuguucuccgccgaccucuucuacagccccgacggcgagauguucgacgucauggagaaguacggcauccuggggguggagauggaggccgccggcaucuacgggguggccgcggaguucggcgccaaggcccugaccaucugcacggucuccgaccacauccgcacccacgagcagaccaccgccgccgagcggcagacgaccuucaacgacaugaucaagaucgcgcucgagagcgugcugcugggggacaaggaguga

SEQ ID NO: 6612 - RNA, 777 nt, Artificial Sequence
  derived and/or modified sequence opt2 from Purine_Nucleoside_Phosphorylase_deoD__Escherichia_coli__EGI42706
auggaccucggcggcgcccucacccccccccuccucugccacaagaaggacaagaccauggccaccccccacaucaacgccgagaugggcgacuucgccgacgucguccucaugcccggcgacccccuccgcgccaaguacaucgccgagaccuuccucgaggacgcccgcgaggucaacaacguccgcggcaugcucggcuucaccggcaccuacaagggccgcaagaucuccgucaugggccacggcaugggcauccccuccugcuccaucuacaccaaggagcucaucaccgacuucggcgucaagaagaucauccgcgucggcuccugcggcgccguccucccccacgucaagcuccgcgacgucgucaucggcaugggcgccugcaccgacuccaaggucaaccgcauccgcuucaaggaccacgacuucgccgccaucgccgacuucgacaugguccgcaacgccgucgacgccgccaaggcccucggcgucgacgcccgcgucggcaaccucuucuccgccgaccucuucuacucccccgacggcgagauguucgacgucauggagaaguacggcauccucggcgucgagauggaggccgccggcaucuacggcgucgccgccgaguucggcgccaaggcccucaccaucugcaccgucuccgaccacauccgcacccacgagcagaccaccgccgccgagcgccagaccaccuucaacgacaugaucaagaucgcccucgaguccguccuccucggcgacaaggaguga

SEQ ID NO: 6613 - RNA, 777 nt, Artificial Sequence
  derived and/or modified sequence opt3 from Purine_Nucleoside_Phosphorylase_deoD__Escherichia_coli__EGI42706
auggaccugggcggggcccucacacccccucuucugugccacaagaaagauaagaccauggcuacuccacauaucaacgcagagaugggagacuucgccgauguggucuugaugccgggugaccccuuaagagcgaaauacauugcugaaacguuucuggaggaugccagggaaguuaauaacgugcggggcaugcuaggguucaccggaacauauaagggccgcaaaauaagcguaaugggucacgggaugggaaucccuuccuguucuauuuacacuaaggagcucaucaccgacuuuggcgugaagaaaauuauccgagucggcucaugcggggcagugcugccacauguuaaacuucgugauguggucauaggaaugggugccuguacagacaguaaggugaauagaaucagguucaaggaucacgacuuugcugcaauugccgauuucgacaugguacggaacgcuguugaugccgcgaaagcacugggcguggacgcccgcgucgggaauuuguuuagcgcugaccucuucuauucccccgauggagaaauguuugacgugauggagaaguacggcauccuggguguggagauggaagccgcagggauuuauggagucgcugccgaguucggcgcgaaggcccugaccaucugcacuguuucugaucauauaagaacacacgaacagaccacggcagcugagaggcaaacuaccuuuaacgacaugauuaaaaucgcccucgagucgguguuacugggcgauaaggaauga

SEQ ID NO: 6614 - RNA, 777 nt, Artificial Sequence
  derived and/or modified sequence opt4 from Purine_Nucleoside_Phosphorylase_deoD__Escherichia_coli__EGI42706
auggaccugggcggcgcccugacccccccccugcugugccacaagaaggacaagaccauggccaccccccacaucaacgccgagaugggcgacuucgccgacguggugcugaugcccggcgacccccugagagccaaguacaucgccgagaccuuccuggaggacgccagagaggugaacaacgugagaggcaugcugggcuucaccggcaccuacaagggcagaaagaucagcgugaugggccacggcaugggcauccccagcugcagcaucuacaccaaggagcugaucaccgacuucggcgugaagaagaucaucagagugggcagcugcggcgccgugcugccccacgugaagcugagagacguggugaucggcaugggcgccugcaccgacagcaaggugaacagaaucagauucaaggaccacgacuucgccgccaucgccgacuucgacauggugagaaacgccguggacgccgccaaggcccugggcguggacgccagagugggcaaccuguucagcgccgaccuguucuacagccccgacggcgagauguucgacgugauggagaaguacggcauccugggcguggagauggaggccgccggcaucuacggcguggccgccgaguucggcgccaaggcccugaccaucugcaccgugagcgaccacaucagaacccacgagcagaccaccgccgccgagagacagaccaccuucaacgacaugaucaagaucgcccuggagagcgugcugcugggcgacaaggaguga

SEQ ID NO: 6615 - RNA, 777 nt, Artificial Sequence
  derived and/or modified sequence opt5 from Purine_Nucleoside_Phosphorylase_deoD__Escherichia_coli__EGI42706
auggaccugggcggggcccucacacccccucugcuuugccacaagaaagauaagaccauggcuacgccgcauaucaacgccgagaugggagacuucgcggaugugguccugaugcccggcgacccucucagagcuaaauacauugccgaaaccuuucuggaggaugcccgggaaguuaauaacgugcgcgggaugcuuggauucacaggcaccuauaaggggagaaaaaucagcgugaugggacacggcaugggcauucccuccuguucuaucuacacaaaggagcugauuaccgacuuuggggucaagaaaaucauccgggugggaagcugcggcgcuguucucccucaugugaagcugcgcgaugucgugauugggaugggagccuguacagacuccaaaguuaauagaauccgguucaaggaucacgacuuugcugccauugcggauuucgacauggugcgcaacgccgucgaugcugccaaagcucugggcguggacgccagaguggggaaucucuuuucugcggaccuguucuauagccccgauggagaaauguuugacgucauggagaaguacggcauccuuggcguugagauggaagccgcugggauuuauggaguggccgcugaguucggcgccaaggcccugaccaucugcacgguguccgaucauauucggacccacgaacagacaaccgcugcggagcgccaaacaaccuuuaacgacaugaucaaaaucgcccucgagucuguccugcuuggggauaaggaauga

SEQ ID NO: 6616 - RNA, 777 nt, Artificial Sequence
  derived and/or modified sequence opt6 from Purine_Nucleoside_Phosphorylase_deoD__Escherichia_coli__EGI42706
auggaccuaggaggagcacuaacaccaccacuauuaugccauaaaaaagacaaaacaauggcaacaccacauauaaaugcagaaaugggagacuuugcagauguaguacuaaugccaggagacccacuaagagcaaaauacauagccgaaacauuucuagaagacgcaagagaaguaaauaacguaagaggaauguuaggauuuacagggacauauaaaggaagaaaaauaaguguaaugggacauggaaugggaauaccaucaugcaguauauauacaaaagaauuaauaacggacuuuggaguaaaaaagaucauaagaguaggcucaugcggagcaguacuaccacauguaaaauuaagagauguaguaauaggaaugggagcauguaccgauucaaaagucaauagaauaagauuuaaagaucacgauuucgcggcaauagcagacuuugauaugguaagaaaugcaguagacgcagcaaaagcauuaggaguagacgcaagaguaggaaaucuauuuagcgcagacuuauucuauagcccagacggagaaauguucgauguaauggaaaaauacggaauauuaggaguagaaauggaagcggcaggaauauauggaguagcagcagaauuuggagcaaaagcauuaacaauauguacaguaagcgaucacauaagaacacacgaacaaacaacagcugcagaaagacaaacaacauucaaugacaugauaaaaauagcacuagaaagcguacuacuaggagauaaagaauaa

SEQ ID NO: 6617 - protein, 239 aa, Artificial Sequence; identical to SEQ ID NO: 6193
  Purine_Nucleoside_Phosphorylase_deoD__Escherichia_coli__F4VN60

SEQ ID NO: 6618 - RNA, 720 nt, Artificial Sequence; identical to SEQ ID NO: 6234
  Purine_Nucleoside_Phosphorylase_deoD__Escherichia_coli__EGI43348

SEQ ID NO: 6619 - RNA, 720 nt, Artificial Sequence; identical to SEQ ID NO: 6195
  derived and/or modified sequence opt1 from Purine_Nucleoside_Phosphorylase_deoD__Escherichia_coli__EGI43348

SEQ ID NO: 6620 - RNA, 720 nt, Artificial Sequence; identical to SEQ ID NO: 6196
  derived and/or modified sequence opt2 from Purine_Nucleoside_Phosphorylase_deoD__Escherichia_coli__EGI43348

SEQ ID NO: 6621 - RNA, 720 nt, Artificial Sequence; identical to SEQ ID NO: 6197
  derived and/or modified sequence opt3 from Purine_Nucleoside_Phosphorylase_deoD__Escherichia_coli__EGI43348

SEQ ID NO: 6622 - RNA, 720 nt, Artificial Sequence; identical to SEQ ID NO: 6198
  derived and/or modified sequence opt4 from Purine_Nucleoside_Phosphorylase_deoD__Escherichia_coli__EGI43348

SEQ ID NO: 6623 - RNA, 720 nt, Artificial Sequence; identical to SEQ ID NO: 6199
  derived and/or modified sequence opt5 from Purine_Nucleoside_Phosphorylase_deoD__Escherichia_coli__EGI43348

SEQ ID NO: 6624 - RNA, 720 nt, Artificial Sequence
  derived and/or modified sequence opt6 from Purine_Nucleoside_Phosphorylase_deoD__Escherichia_coli__EGI43348
auggcaacaccacauauuaaugcagaaaugggagacuuugcagauguaguacuaaugccaggagacccauuaagagcaaaauauauagcagaaacauuuuuagaagacgcaagagaaguaaauaacguaagagggauguuaggauuuacaggaacauauaaaggaagaaaaauaucaguaaugggacauggaaugggaauaccaaguugcucaauauauacaaaagaauuaauaacagacuuuggaguaaaaaagauaauaagaguaggaucaugcggagcaguauuaccacacguaaaauuaagagauguagugauaggaaugggagcauguacagauaguaaagucaaucgaauaagauucaaagaucacgauuucgcagcaauagcagauuucgauaugguaagaaaugcaguagacgcagcaaaagcauuaggaauagaugcaagaguaggaaaucuauuuucagcagacuuauucuauagcccagacggagaaauguucgauguaauggaaaaauacggaauacuaggaguagaaauggaagcagcaggaauauauggaguagcagcagaauuuggagcaaaagcacucacaauauguacaguaagcgaucacauaagaacgcacgaacaaacaacagcagcagaaagacaaacaacauucaacgacaugauaaaaauagcauuagaaagcguacuacuaggagacaaagaauaa

SEQ ID NO: 6625 - protein, 239 aa, Artificial Sequence; identical to SEQ ID NO: 6201
  Purine_Nucleoside_Phosphorylase_deoD__Escherichia_coli__F4VQF8

SEQ ID NO: 6626 - RNA, 720 nt, Artificial Sequence; identical to SEQ ID NO: 6290
  Purine_Nucleoside_Phosphorylase_deoD__Escherichia_coli__EGI52751

SEQ ID NO: 6627 - RNA, 720 nt, Artificial Sequence; identical to SEQ ID NO: 6203
  derived and/or modified sequence opt1 from Purine_Nucleoside_Phosphorylase_deoD__Escherichia_coli__EGI52751

SEQ ID NO: 6628 - RNA, 720 nt, Artificial Sequence; identical to SEQ ID NO: 6204
  derived and/or modified sequence opt2 from Purine_Nucleoside_Phosphorylase_deoD__Escherichia_coli__EGI52751

SEQ ID NO: 6629 - RNA, 720 nt, Artificial Sequence; identical to SEQ ID NO: 6205
  derived and/or modified sequence opt3 from Purine_Nucleoside_Phosphorylase_deoD__Escherichia_coli__EGI52751

SEQ ID NO: 6630 - RNA, 720 nt, Artificial Sequence; identical to SEQ ID NO: 6206
  derived and/or modified sequence opt4 from Purine_Nucleoside_Phosphorylase_deoD__Escherichia_coli__EGI52751

SEQ ID NO: 6631 - RNA, 720 nt, Artificial Sequence; identical to SEQ ID NO: 6207
  derived and/or modified sequence opt5 from Purine_Nucleoside_Phosphorylase_deoD__Escherichia_coli__EGI52751

SEQ ID NO: 6632 - RNA, 720 nt, Artificial Sequence
  derived and/or modified sequence opt6 from Purine_Nucleoside_Phosphorylase_deoD__Escherichia_coli__EGI52751
auggcaacaccacauauaaaugcagaaaugggagacuuugccgauguagugcuaaugccaggagacccacuaagagcaaaauacauagcagaaacauuucuagaagacgcaagagaaguaaauaacguaagaggaauguuaggauuuacaggaaccuauaaaggaagaaaaauaucaguaaugggacauggaaugggaauaccaucauguucaauauauacaaaagaauugauaacagacuuuggaguaaaaaaaauaauaagaguaggaucaugcggagcaguauuaccacacguaaaauuaagagauguaguaauaggaaugggagcauguaccgacagcaaaguaaauagaauaagauuuaaagaucaugauuucgcagcaauagcagauuucgauaugguaagaaaugcaguagacgcggcaaaagcauuaggaguagacgcaagaguaggaaaccuauuuagcgcagacuuguuuuauagcccagacggagaaauguuugauguaauggaaaaauacggaauauuaggaguagaaauggaagcagcaggaauauauggaguagcagcagaauuuggagcaaaagcguuaacaauauguacaguaagugaucacauaagaacacacgaacaaacaacagcagcagaaagacaaacaacauucaaugacaugauaaagauagcacuagaaagcguacuauugggagauaaagaauaa

SEQ ID NO: 6633 - protein, 239 aa, Artificial Sequence; identical to SEQ ID NO: 6201
  Purine_Nucleoside_Phosphorylase_deoD__Escherichia_coli__H9V0H4

SEQ ID NO: 6634 - RNA, 720 nt, Artificial Sequence
  Purine_Nucleoside_Phosphorylase_deoD__Escherichia_coli__AFG43267
auggcuaccccacacauuaaugcagaaaugggcgauuucgcugacguaguuuugaugccaggcgacccgcugcgugcgaaguauauugcugaaacuuuccuugaagaugcccgugaagugaacaacguucgcgguaugcugggcuucaccgguacuuacaaaggccgcaaaauuuccguaaugggucacgguauggguaucccguccugcuccaucuacaccaaagaacugaucaccgauuucggcgugaagaaaauuauccgcguaggcuccuguggcgcuguucugccacacguaaaacugcgcgacgucguuaucgguaugggugccugcaccgauuccaaaguuaaccguauccguuuuaaagaccaugacuuugccgcuaucgcugacuuugacauggugcguaacgcgguagacgcggcuaaagcacugggcguugaugcucgcguugguaaccuguucuccgcugaccuguucuacucuccggacggcgaaauguucgacgugauggaaaaauacggcauccucggcguggaaauggaagcagcugguaucuacggcgucgcugcagaauuuggcgcgaaagcccugaccaucugcaccgugucugaccacauccgcacucacgagcagaccacugccgcugagcgucagaccaccuucaacgacaugaucaaaaucgcacuggaauccguucuguugggcgauaaagaguaa

SEQ ID NO: 6635 - RNA, 720 nt, Artificial Sequence; identical to SEQ ID NO: 6203
  derived and/or modified sequence opt1 from Purine_Nucleoside_Phosphorylase_deoD__Escherichia_coli__AFG43267

SEQ ID NO: 6636 - RNA, 720 nt, Artificial Sequence; identical to SEQ ID NO: 6204
  derived and/or modified sequence opt2 from Purine_Nucleoside_Phosphorylase_deoD__Escherichia_coli__AFG43267

SEQ ID NO: 6637 - RNA, 720 nt, Artificial Sequence; identical to SEQ ID NO: 6205
  derived and/or modified sequence opt3 from Purine_Nucleoside_Phosphorylase_deoD__Escherichia_coli__AFG43267

SEQ ID NO: 6638 - RNA, 720 nt, Artificial Sequence; identical to SEQ ID NO: 6206
  derived and/or modified sequence opt4 from Purine_Nucleoside_Phosphorylase_deoD__Escherichia_coli__AFG43267

SEQ ID NO: 6639 - RNA, 720 nt, Artificial Sequence; identical to SEQ ID NO: 6207
  derived and/or modified sequence opt5 from Purine_Nucleoside_Phosphorylase_deoD__Escherichia_coli__AFG43267

SEQ ID NO: 6640 - RNA, 720 nt, Artificial Sequence
  derived and/or modified sequence opt6 from Purine_Nucleoside_Phosphorylase_deoD__Escherichia_coli__AFG43267
auggcaacaccacauauuaaugcagaaaugggagacuuugcagauguaguauuaaugccaggggacccauuaagagcaaaauacauagcagaaacauuucuagaagacgcaagagaaguaaacaauguaagaggaauguuaggauuuacaggaacauauaaaggaagaaaaauaucaguaaugggacauggaaugggaauaccaucaugcucaauauauacaaaagaauuaauaacagacuuuggaguaaaaaaaauaauaagaguuggaucaugcggagcaguacuaccacacguaaaauuaagagauguaguaauaggaaugggggcauguacagauagcaaaguaaauagaauaagauuuaaagaucacgauuuugcagcaauagcagauuucgauaugguacgaaaugccguggacgcagcaaaagcauuaggaguagacgcaagaguaggaaaucuauuuagcgcagacuuauucuauaguccagacggagaaauguucgauguaauggaaaaauacggaauauuaggaguagaaauggaagcagcaggaauauacggaguagcagcagaauuuggagcaaaagcgcuaacaauaugcacaguaagugaucacauaagaacgcacgaacaaacaacagcagcagaaagacaaacaacauucaaugacaugauaaaaauagcacuagaaagcguauuauuaggcgauaaagaauaa

SEQ ID NO: 6641 - protein, 239 aa, Artificial Sequence; identical to SEQ ID NO: 6193
  Purine_Nucleoside_Phosphorylase_deoD__Escherichia_coli__J7QV83

SEQ ID NO: 6642 - RNA, 720 nt, Artificial Sequence; identical to SEQ ID NO: 6330
  Purine_Nucleoside_Phosphorylase_deoD__Escherichia_coli__CCK49767

SEQ ID NO: 6643 - RNA, 720 nt, Artificial Sequence; identical to SEQ ID NO: 6195
  derived and/or modified sequence opt1 from Purine_Nucleoside_Phosphorylase_deoD__Escherichia_coli__CCK49767

SEQ ID NO: 6644 - RNA, 720 nt, Artificial Sequence; identical to SEQ ID NO: 6196
  derived and/or modified sequence opt2 from Purine_Nucleoside_Phosphorylase_deoD__Escherichia_coli__CCK49767

SEQ ID NO: 6645 - RNA, 720 nt, Artificial Sequence; identical to SEQ ID NO: 6197
  derived and/or modified sequence opt3 from Purine_Nucleoside_Phosphorylase_deoD__Escherichia_coli__CCK49767

SEQ ID NO: 6646 - RNA, 720 nt, Artificial Sequence; identical to SEQ ID NO: 6198
  derived and/or modified sequence opt4 from Purine_Nucleoside_Phosphorylase_deoD__Escherichia_coli__CCK49767

SEQ ID NO: 6647 - RNA, 720 nt, Artificial Sequence; identical to SEQ ID NO: 6199
  derived and/or modified sequence opt5 from Purine_Nucleoside_Phosphorylase_deoD__Escherichia_coli__CCK49767

SEQ ID NO: 6648 - RNA, 720 nt, Artificial Sequence
  derived and/or modified sequence opt6 from Purine_Nucleoside_Phosphorylase_deoD__Escherichia_coli__CCK49767
auggcaacaccacauauaaaugcugaaaugggagauuuugcagauguaguacugaugccaggugauccacuaagagcaaaauacauagcagaaacauuuuuagaagacgcaagagaagugaauaacguaagaggaauguugggauuuacagggacauauaaaggaagaaaaauaucaguaaugggacauggaaugggaauaccaucauguaguauauauacaaaagaauuaauaacagacuuuggaguaaaaaaaauaauaagaguaggaaguugcggagcaguauuaccacacguaaaauuaagagaugucguaauaggaaugggagcauguacagauaguaaaguaaauagaauaagauuuaaagaucacgauuuugcagccauagcagauuuugauaugguaagaaaugcaguagacgcagcaaaagcauuaggaauagacgcaagaguaggaaauuuauuuagugcagacuuauucuauaguccagacggagaaauguucgauguaauggaaaaauacggaauacuaggaguagaaauggaagcagcaggaauauauggaguagcagcagaauuuggagcaaaagcacuaacaauauguacaguaagcgaucacauaagaacacacgaacaaacaacagcagcagaaagacaaacaacauucaaugacaugauaaaaauagcauuagaaagcguacuauuaggagauaaagaauaa

SEQ ID NO: 6649 - protein, 239 aa, Artificial Sequence; identical to SEQ ID NO: 6193
  Purine_Nucleoside_Phosphorylase_deoD__Escherichia_coli__P0ABP8

SEQ ID NO: 6650 - RNA, 720 nt, Artificial Sequence; identical to SEQ ID NO: 6338
  Purine_Nucleoside_Phosphorylase_deoD__Escherichia_coli__AAA24401

SEQ ID NO: 6651 - RNA, 720 nt, Artificial Sequence; identical to SEQ ID NO: 6195
  derived and/or modified sequence opt1 from Purine_Nucleoside_Phosphorylase_deoD__Escherichia_coli__AAA24401

SEQ ID NO: 6652 - RNA, 720 nt, Artificial Sequence; identical to SEQ ID NO: 6196
  derived and/or modified sequence opt2 from Purine_Nucleoside_Phosphorylase_deoD__Escherichia_coli__AAA24401

SEQ ID NO: 6653 - RNA, 720 nt, Artificial Sequence; identical to SEQ ID NO: 6197
  derived and/or modified sequence opt3 from Purine_Nucleoside_Phosphorylase_deoD__Escherichia_coli__AAA24401

SEQ ID NO: 6654 - RNA, 720 nt, Artificial Sequence; identical to SEQ ID NO: 6198
  derived and/or modified sequence opt4 from Purine_Nucleoside_Phosphorylase_deoD__Escherichia_coli__AAA24401

SEQ ID NO: 6655 - RNA, 720 nt, Artificial Sequence; identical to SEQ ID NO: 6199
  derived and/or modified sequence opt5 from Purine_Nucleoside_Phosphorylase_deoD__Escherichia_coli__AAA24401

SEQ ID NO: 6656 - RNA, 720 nt, Artificial Sequence
  derived and/or modified sequence opt6 from Purine_Nucleoside_Phosphorylase_deoD__Escherichia_coli__AAA24401
auggcaacaccacauauaaaugcagaaaugggggacuuugcagauguaguauuaaugccuggggacccacuaagagcaaaauacauagcagaaacauuucuagaagacgcaagagaaguaaauaauguaagaggaauguuaggauuuacaggaacauauaaaggacgaaaaauaucaguaaugggccauggaaugggaauacccucaugcaguauauauacaaaagaauuaauaacagacuuuggaguaaaaaaaaucauaagaguaggaagcugcggagcaguacuaccgcacguaaaacuacgagauguaguaauaggaaugggggcauguacagauaguaaaguaaauagaauaagauuuaaagaucacgauuucgcagcaauagcagauuucgauaugguaagaaaugcaguagacgcagcaaaagcauuaggaauagacgcaaggguaggaaauuuauuuagcgcagacuuauucuauagcccagacggagaaauguucgauguaauggaaaaauauggaauacuaggaguagaaauggaagcagcaggaauauauggaguagcagcagaauuuggugcaaaagcacuaacaauauguacaguaagcgaucacauaagaacacacgaacaaacaacagcagcagaaagacaaacaacauucaaugacaugauaaaaauagcacuagaaagcguauuauuaggagauaaagaauaa

SEQ ID NO: 6657 - protein, 239 aa, Artificial Sequence; identical to SEQ ID NO: 6201
  Purine_Nucleoside_Phosphorylase_deoD__Escherichia_coli__Q0T8S9

SEQ ID NO: 6658 - RNA, 720 nt, Artificial Sequence
  Purine_Nucleoside_Phosphorylase_deoD__Escherichia_coli__ABG72650
auggcuacuccacacauuaaugcagaaaugggcgauuuugcugacguaguuuugaugccaggcgacccgcugcgugcgaaguauauugcugaaacuuuccuugaagaugcccgugaagugaacaacguucgcgguaugcugggcuucacugguacuuacaaaggccgcaaaauuuccguaaugggccacgguauggguaucccguccugcuccaucuacaccaaagaacugaucacugauuucggcgugaagaaaauuauccgcguugguuccuguggcgcuguucugccgcacguaaaacugcgcgacgucguuaucgguaugggugccugcaccgauuccaaaguuaaccgcauccguuuuaaagaccaugacuuugccgcuaucgcugacuucgacauggugcguaacgcgguagacgcggcaaaagcacugggcguugaugcucgcguugguaaccuguucuccgcugaccuguucuacucuccggacggcgaaauguucgacgugauggaaaaauacggcauccucggcguggaaauggaagcggcugguaucuacggcgucgcugcagaauuuggcgcgaaagcccugaccaucugcaccgugucugaccacauccgcacucacgagcagaccacugccgcugagcgucagaccaccuucaacgacaugaucaaaaucgcgcuggaauccguucugcugggcgauaaagaguaa

SEQ ID NO: 6659 - RNA, 720 nt, Artificial Sequence; identical to SEQ ID NO: 6203
  derived and/or modified sequence opt1 from Purine_Nucleoside_Phosphorylase_deoD__Escherichia_coli__ABG72650

SEQ ID NO: 6660 - RNA, 720 nt, Artificial Sequence; identical to SEQ ID NO: 6204
  derived and/or modified sequence opt2 from Purine_Nucleoside_Phosphorylase_deoD__Escherichia_coli__ABG72650

SEQ ID NO: 6661 - RNA, 720 nt, Artificial Sequence; identical to SEQ ID NO: 6205
  derived and/or modified sequence opt3 from Purine_Nucleoside_Phosphorylase_deoD__Escherichia_coli__ABG72650

SEQ ID NO: 6662 - RNA, 720 nt, Artificial Sequence; identical to SEQ ID NO: 6206
  derived and/or modified sequence opt4 from Purine_Nucleoside_Phosphorylase_deoD__Escherichia_coli__ABG72650

SEQ ID NO: 6663 - RNA, 720 nt, Artificial Sequence; identical to SEQ ID NO: 6207
  derived and/or modified sequence opt5 from Purine_Nucleoside_Phosphorylase_deoD__Escherichia_coli__ABG72650

SEQ ID NO: 6664 - RNA, 720 nt, Artificial Sequence
  derived and/or modified sequence opt6 from Purine_Nucleoside_Phosphorylase_deoD__Escherichia_coli__ABG72650
auggcaacaccacauauaaaugcagaaaugggagacuuugcagauguaguauuaaugccaggagacccacuaagagcaaaauacauagcagaaacauuucuagaagacgcaagagaaguaaauaacguaagaggaaugcuaggauuuacaggaacauauaaaggaagaaaaauaucagucaugggacauggaaugggaauaccaucaugcucaauauacaccaaagaauuaauaacagacuuuggaguaaaaaaaauaauaagaguaggcaguugcggagcaguacuaccacacguaaaauuacgagaugucguaauaggaaugggagcauguacagauucaaaaguaaauagaauaagauuuaaagaucacgauuucgcagcaauagcagauuucgauaugguaagaaaugcuguagacgcagcaaaagcauuaggaguagacgcaagaguaggaaaucuauuuagcgcagacuuauucuauagcccagacggagaaauguucgauguaauggaaaaauauggaauauuaggaguagaaauggaagcagcaggaauauauggaguagccgcagaauuuggagcaaaagcacuaacaauauguacaguaagcgaucacauaagaacacacgaacaaacaaccgcagcagaaagacaaacaacauucaaugacaugauaaaaauagcacuagaaaguguacuauugggagauaaagaauga

SEQ ID NO: 6665 - protein, 258 aa, Artificial Sequence; identical to SEQ ID NO: 6313
  Purine_Nucleoside_Phosphorylase_deoD__Escherichia_coli__Q1R259

SEQ ID NO: 6666 - RNA, 777 nt, Artificial Sequence; identical to SEQ ID NO: 6314
  Purine_Nucleoside_Phosphorylase_deoD__Escherichia_coli__ABE10555

SEQ ID NO: 6667 - RNA, 777 nt, Artificial Sequence; identical to SEQ ID NO: 6315
  derived and/or modified sequence opt1 from Purine_Nucleoside_Phosphorylase_deoD__Escherichia_coli__ABE10555

SEQ ID NO: 6668 - RNA, 777 nt, Artificial Sequence; identical to SEQ ID NO: 6316
  derived and/or modified sequence opt2 from Purine_Nucleoside_Phosphorylase_deoD__Escherichia_coli__ABE10555

SEQ ID NO: 6669 - RNA, 777 nt, Artificial Sequence; identical to SEQ ID NO: 6317
  derived and/or modified sequence opt3 from Purine_Nucleoside_Phosphorylase_deoD__Escherichia_coli__ABE10555

SEQ ID NO: 6670 - RNA, 777 nt, Artificial Sequence; identical to SEQ ID NO: 6318
  derived and/or modified sequence opt4 from Purine_Nucleoside_Phosphorylase_deoD__Escherichia_coli__ABE10555

SEQ ID NO: 6671 - RNA, 777 nt, Artificial Sequence; identical to SEQ ID NO: 6319
  derived and/or modified sequence opt5 from Purine_Nucleoside_Phosphorylase_deoD__Escherichia_coli__ABE10555

SEQ ID NO: 6672 - RNA, 777 nt, Artificial Sequence
  derived and/or modified sequence opt6 from Purine_Nucleoside_Phosphorylase_deoD__Escherichia_coli__ABE10555
auggaucuaggaggagcaguaacaccaccauuaauaugccauaaaaaagacaaaaugauggcuacaccccauauaaaugcagaaaugggagacuucgccgauguaguacuaaugccaggagacccacuaagagcaaaauacauagcagaaacauucuuagaagacgcaagagaaguaaauaacguaagaggaaugcuaggauuuacaggaacauauaaaggaagaaaaauaucaguaaugggacauggaaugggaauaccaucaugcucaauauauacaaaagaauugauaacagacuuuggaguaaaaaaaauaauaagaguaggaaguugcggagcagugcuaccgcacguaaaauuaagagauguaguaauaggaaugggagcauguacagauagcaaaguaaauagaauaagauuuaaagaucacgauuucgcagcaauagcagauuuugauaugguaagaaaugcaguagacgcugcaaaagcauuaggaguagacgcaagaguaggaaaucuauuuagcgcagacuuauucuauaguccagacggagaaauguuugacguaauggaaaaauacggaauauuagguguagaaauggaagcagcaggaauauaugguguagcagcagaauuuggagcaaaagcacuaacaauauguacaguaagcgaucacauaagaacacacgaacaaacaacagcagcagaaaggcaaacaacauuuaaugacaugauaaaaauagcauuagaaaguguacuauuaggagauaaagaauaa

SEQ ID NO: 6673 - protein, 258 aa, Artificial Sequence; identical to SEQ ID NO: 6593
  Purine_Nucleoside_Phosphorylase_deoD__Escherichia_coli__W8ZSE4

SEQ ID NO: 6674 - RNA, 777 nt, Artificial Sequence; identical to SEQ ID NO: 6594
  Purine_Nucleoside_Phosphorylase_deoD__Escherichia_coli__CDN85331

SEQ ID NO: 6675 - RNA, 777 nt, Artificial Sequence; identical to SEQ ID NO: 6595
  derived and/or modified sequence opt1 from Purine_Nucleoside_Phosphorylase_deoD__Escherichia_coli__CDN85331

SEQ ID NO: 6676 - RNA, 777 nt, Artificial Sequence; identical to SEQ ID NO: 6596
  derived and/or modified sequence opt2 from Purine_Nucleoside_Phosphorylase_deoD__Escherichia_coli__CDN85331

SEQ ID NO: 6677 - RNA, 777 nt, Artificial Sequence; identical to SEQ ID NO: 6597
  derived and/or modified sequence opt3 from Purine_Nucleoside_Phosphorylase_deoD__Escherichia_coli__CDN85331

SEQ ID NO: 6678 - RNA, 777 nt, Artificial Sequence; identical to SEQ ID NO: 6598
  derived and/or modified sequence opt4 from Purine_Nucleoside_Phosphorylase_deoD__Escherichia_coli__CDN85331

SEQ ID NO: 6679 - RNA, 777 nt, Artificial Sequence; identical to SEQ ID NO: 6599
  derived and/or modified sequence opt5 from Purine_Nucleoside_Phosphorylase_deoD__Escherichia_coli__CDN85331

SEQ ID NO: 6680 - RNA, 777 nt, Artificial Sequence
  derived and/or modified sequence opt6 from Purine_Nucleoside_Phosphorylase_deoD__Escherichia_coli__CDN85331
auggauuuaggaggagcaguaacaccaccacuaauaugccauaaaaaagauaaaacaauggcgacaccacauaucaaugcagagaugggugacuuugcagauguaguacuaaugccaggagauccacuaagggcaaaauauauagcagaaacauuucuagaagacgcaagagaaguaaauaauguaagaggaauguuaggauuuacaggaacauauaaagguagaaaaauaucaguaaugggacauggaaugggaauaccaaguugcaguauauauacaaaagaauuaauaacagacuuuggaguaaaaaaaauaauaagaguaggaaguugcggagcaguauuaccacacguaaaauuaagagauguaguaauaggaaugggggcguguacagauagcaaagucaacagaauaagauuuaaagaucacgauuucgcagcaauagcagacuucgauaugguaagaaaugcaguagacgcagcaaaagcauuaggaguagacgcaagaguaggcaaucuauuuagcgcagaccuauucuauucaccagacggagaaauguucgauguaauggaaaaauacggaauauuaggaguagaaauggaagcagcaggaauauauggaguagcagcagaauuuggagcaaaagcacuaacaauauguacaguuagcgaucauauuagaacacacgaacaaacaacagcagcagaaagacaaacaacauucaaugacaugauaaagauagcacuagaaaguguauuauuaggagauaaagaauaa

SEQ ID NO: 6681 - protein, 221 aa, Artificial Sequence
  Purine_Nucleoside_Phosphorylase_deoD__Escherichia_coli__X5FDR9
MKKDMDINIDALLRDTFLTVVELRQGTTVRHGIELYRHCQRQVELVRERLKDAGFSRENVEHITYAQCALLDETVLSRSGMDDGQAIWMKNPLQSHFFNTLQAGELLYERMKQVLQEPAPAQAVLTCFHRVLLLGFRGRYQDPAAPERDQLISTLNGQVAPFGVLPETAVLNVPLSTRQHPLLHSPFFWLVTLALLLAGVWWGLHHWLNVLVDELLPQSLR

SEQ ID NO: 6682 - RNA, 666 nt, Artificial Sequence
  Purine_Nucleoside_Phosphorylase_deoD__Escherichia_coli__AHW84482
augaaaaaagauauggauaucaauaucgaugcgcugcugcgcgacacguuucugacggugguggaacugcgucagggaaccaccgugcgucacgguaucgagcuguaucgccacugucagcggcagguggaacugguccgcgaacgucugaaagaugccggauucagucgggagaacguggagcacauaacuuacgcgcagugcgcccugcuggacgaaacggugcucagccguaguggcauggacgacggucaggccaucuggaugaaaaacccacuccagucgcauuucuucaacacccugcaggccggugagcugcuguacgagcggaugaagcaggugcuacaggaacccgcccccgcgcaggccgugcugaccugcuuucaccguguccugcugcugggauuucgcgggcguuaucaggauccggcagccccggagcgcgaccagcuuauuucgacgcucaacgggcaggucgcgccauuuggugugcugccggaaacggcgguacugaacgugccguuauccacccgucagcacccuuugcugcauucgccauuuuucuggcugguaacacuggcgcugcuacuggcgggcgucuggugggggcuacaccacuggcugaauguacugguggaugaacugcugccgcaaagccugcguuaa

SEQ ID NO: 6683 - RNA, 666 nt, Artificial Sequence
  derived and/or modified sequence opt1 from Purine_Nucleoside_Phosphorylase_deoD__Escherichia_coli__AHW84482
augaagaaggacauggacaucaacaucgacgcccugcuccgcgacaccuuccugaccguggucgagcugcggcagggcacgaccgugcgccacgggaucgagcucuaccggcacugccagcgccagguggagcugguccgggagcgccugaaggacgccggcuucagccgggagaacguggagcacaucaccuacgcgcagugcgcccuccuggacgagaccgugcugucccgcagcgggauggacgacggccaggccaucuggaugaagaacccccuccagucccacuucuucaacacgcugcaggccggggagcugcucuacgagcggaugaagcagguccugcaggagccggcccccgcgcaggccgugcugaccugcuuccaccgcgugcuccugcugggcuuccggggccgcuaccaggaccccgccgcccccgagcgggaccagcucaucagcacccugaacgggcaggucgcgccguucggcgugcugcccgagaccgccgugcucaacgucccccuguccacgcgccagcacccccugcuccacagcccguucuucuggcuggugacccuggcccuccugcuggccggggugugguggggccuccaccacuggcugaacguccugguggacgagcuccugccccagucccugcgguga

SEQ ID NO: 6684 - RNA, 666 nt, Artificial Sequence
  derived and/or modified sequence opt2 from Purine_Nucleoside_Phosphorylase_deoD__Escherichia_coli__AHW84482
augaagaaggacauggacaucaacaucgacgcccuccuccgcgacaccuuccucaccgucgucgagcuccgccagggcaccaccguccgccacggcaucgagcucuaccgccacugccagcgccaggucgagcucguccgcgagcgccucaaggacgccggcuucucccgcgagaacgucgagcacaucaccuacgcccagugcgcccuccucgacgagaccguccucucccgcuccggcauggacgacggccaggccaucuggaugaagaacccccuccagucccacuucuucaacacccuccaggccggcgagcuccucuacgagcgcaugaagcagguccuccaggagcccgcccccgcccaggccguccucaccugcuuccaccgcguccuccuccucggcuuccgcggccgcuaccaggaccccgccgcccccgagcgcgaccagcucaucuccacccucaacggccaggucgcccccuucggcguccuccccgagaccgccguccucaacgucccccucuccacccgccagcacccccuccuccacucccccuucuucuggcucgucacccucgcccuccuccucgccggcgucugguggggccuccaccacuggcucaacguccucgucgacgagcuccucccccagucccuccgcuga

SEQ ID NO: 6685 - RNA, 666 nt, Artificial Sequence
  derived and/or modified sequence opt3 from Purine_Nucleoside_Phosphorylase_deoD__Escherichia_coli__AHW84482
augaagaaggacauggauaucaacauugacgcccugcucagagauaccuuccuuacaguggucgagcugaggcagggcacuacgguucggcacgggauagaauuguaccgccauugccaacgacagguggaguuaguacgugaaagacugaaggacgcuggauuuagcagggagaauguggaacacaucaccuaugcacagugugcccuacucgaugagacaguccugucccggucugguauggacgauggccaggcgauuuggaugaaaaacccccuucaaucacauuucuuuaauacucugcaggcuggggaguugcucuacgaacgcaugaaacaggugcugcaggagccugccccagcacaagccguucugaccugcuuccacagagugcucuuacugggauuuaggggccgguaucaggacccggcugcacccgaacgcgaucagcuuaucaguacauugaacggucaggucgccccuuucggggugcugccagagaccgcuguacuaaauguuccccucagcacucgacaacauccucugcuucacuccccauuuuucuggcuggugacauuggcccuccuguuagcgggagucugguggggccugcaccauuggcucaacgugcuuguggacgagcuguugccccagucucuaagauga

SEQ ID NO: 6686 - RNA, 666 nt, Artificial Sequence
  derived and/or modified sequence opt4 from Purine_Nucleoside_Phosphorylase_deoD__Escherichia_coli__AHW84482
augaagaaggacauggacaucaacaucgacgcccugcugagagacaccuuccugaccgugguggagcugagacagggcaccaccgugagacacggcaucgagcuguacagacacugccagagacagguggagcuggugagagagagacugaaggacgccggcuucagcagagagaacguggagcacaucaccuacgcccagugcgcccugcuggacgagaccgugcugagcagaagcggcauggacgacggccaggccaucuggaugaagaacccccugcagagccacuucuucaacacccugcaggccggcgagcugcuguacgagagaaugaagcaggugcugcaggagcccgcccccgcccaggccgugcugaccugcuuccacagagugcugcugcugggcuucagaggcagauaccaggaccccgccgcccccgagagagaccagcugaucagcacccugaacggccagguggcccccuucggcgugcugcccgagaccgccgugcugaacgugccccugagcaccagacagcacccccugcugcacagccccuucuucuggcuggugacccuggcccugcugcuggccggcgugugguggggccugcaccacuggcugaacgugcugguggacgagcugcugccccagagccugagauga

SEQ ID NO: 6687 - RNA, 666 nt, Artificial Sequence
  derived and/or modified sequence opt5 from Purine_Nucleoside_Phosphorylase_deoD__Escherichia_coli__AHW84482
augaagaaagacauggauaucaacauugacgcccugcucagagauaccuuccugacaguggucgagcuucggcagggcacgaccguucgccacgggaucgaacuguacagacauugccaacgccagguggagcucgugcgggaaagacugaaggacgcuggauuuagccgggagaaugucgaacacauuacauaugcccagugugcgcuucuggaugagaccgugcucucccgcucuggcauggacgaugggcaggcuaucuggaugaaaaacccccugcaaagccauuucuuuaauacacugcaggccggagagcuccuguacgaaagaaugaagcagguucuucaggagccugccccggcucaagccgugcugaccugcuuccaccggguccuccugcuuggcuuucgcgggagauaucaggaccccgcugccccugaacgggaucagcugauuuccacacucaacggacagguggcgcccuucggcguucugccugagaccgccgugcugaaugucccccucucuacgcgccaacauccucugcuucacagcccguuuuucuggcuggugacccucgcucugcuucuggccggcguguggugggggcuccaccauuggcugaacguccugguugacgagcuccugccccagucccuuagauga

SEQ ID NO: 6688 - RNA, 666 nt, Artificial Sequence
  derived and/or modified sequence opt6 from Purine_Nucleoside_Phosphorylase_deoD__Escherichia_coli__AHW84482
augaaaaaagacauggauauaaacauagacgcauuacuaagagacacauucuuaacaguaguagaauuaagacaaggaacaacaguuagacacggaauagaacuauacagacacugccaaagacaaguagaacuaguaagagaaagauuaaaagacgcaggauucagcagagaaaauguagaacacauaacauacgcacaaugcgcacuccuagaugaaacaguccuaucuagaucaggaauggacgacggacaagcaauauggaugaaaaacccacuacaaucacacuucuucaacacacuacaagcaggagaauuacuauacgaaagaaugaaacaaguacuacaagaaccagcaccagcccaagcaguacuaacaugcuuucacagaguacuacuacuaggcuuuagaggaagauaccaagacccagcugcaccagaaagagaucaacuaauuucaacauuaaacggacaaguagcaccauucggaguacuaccagaaacagcagucuuaaauguaccacuaucaacaagacaacacccacuauuacacucaccauucuucugguuaguaacacuagcccuacuacuagcaggaguaugguggggacuacaccacuggcuaaacguacuaguagacgaacuacuaccacaaucacuaagauaa

SEQ ID NO: 6689 - protein, 376 aa, Artificial Sequence
  Thymidine_Kinase_TK__Herpes_Simplex_Virus_1_(HSV-1)__B2CPP5
MASYPCHQHASAFDQAARSRGHNNRRTALRPRRQQKATEVRLEQKMPTLLRVYIDGPHGMGKTTTTQLLVALGSRDDIVYVPEPMTYWRVLGASETIANIYTTQHRLDQGEISAGDAAVVMTSAQITMGMPYAVTDAVLAPHIGGEAGSSHAPPPALTLIFDRHPIAALLCYPAARYRMGSMTPQAVLAFVALIPPTLPGTNIVLGALPEDRHIDRLAKRQRPGERLDLAMLAAIRRVYELLANTVRYLQGGGSWREDWGQLSGTAVPPQGAEPQSNAGPQPHIGDTLFTLFRAPELLAPNGDLYNVFAWALDVLAKRLRPMHVFILDYDQSPAGCRDALLQLTSGMVQTHVTTPGSIPTICDLARTFAREMGEAN

SEQ ID NO: 6690 - RNA, 1131 nt, Artificial Sequence
  Thymidine_Kinase_TK__Herpes_Simplex_Virus_1_(HSV-1)__ACB59251
auggcuucguaccccugccaucaacacgcgucggcguucgaccaggcugcgcguucucgcggccauaacaaccgacguacggcguugcgcccucgccggcagcaaaaagccacggaaguccgccuggagcagaaaaugcccacgcuacugcggguuuauauagacgguccccacgggauggggaaaaccaccaccacgcaacugcugguggcccuggguucgcgcgacgauaucgucuacguacccgagccgaugacuuacuggcgggugcugggggcuuccgagacaaucgcgaacaucuacaccacacaacaccgccucgaccagggugagauaucggccggggacgcggcggugguaaugacaagcgcccagauaacaaugggcaugccuuaugccgugaccgacgccguucuggcuccucauaucgggggggaggcugggagcucacaugccccgcccccggcccucacccucaucuucgaccgccaucccaucgccgcccuccuguguuacccggccgcgcgauaccguaugggcagcaugaccccccaggccgugcuggcguucguggcccucaucccgccgaccuugcccggcacaaacaucguguugggggcccuuccggaggacagacacaucgaccgccuggccaaacgccagcgccccggcgagcggcuugaccuggcuaugcuggccgcgauucgccgcguuuacgagcugcuugccaauacggugcgguaucugcagggcggcgggucguggcgggaggauuggggacagcuuucggggacggccgugccgccccagggugccgagccccagagcaacgcgggcccacaaccccauaucggggacacguuauuuacccuguuucgggcccccgaguugcuggcccccaacggcgaccuguauaacguguuugccugggccuuggacgucuuggccaaacgccuccgucccaugcacgucuuuauccuggauuacgaccaaucgcccgccggcugccgggacgcccugcugcaacuuaccuccgggaugguccagacccacgucaccacccccggcuccauaccgacgaucugcgaccuggcgcgcacguuugcccgggagaugggggaggcuaacuaa

SEQ ID NO: 6691 - RNA, 1131 nt, Artificial Sequence
  derived and/or modified sequence opt1 from Thymidine_Kinase_TK__Herpes_Simplex_Virus_1_(HSV-1)__ACB59251
auggccagcuaccccugccaccagcacgccuccgcguucgaccaggccgcccgcagccggggccacaacaaccgccggaccgcccugcgcccgcggcgccagcagaaggccaccgaggugcggcucgagcagaagaugcccacgcugcugcgcgucuacaucgacgggccccacggcauggggaagaccaccaccacgcagcuccugguggcgcugggcucccgggacgacaucguguacguccccgagccgaugaccuacuggcgcgugcucggggccagcgagaccaucgccaacaucuacaccacgcagcaccggcuggaccagggcgagaucuccgccggcgacgcggccguggucaugaccagcgcccagaucaccauggggaugcccuacgccgugaccgacgccgugcuggcgccccacaucggcggggaggccggcuccagccacgcgcccccgcccgcccucacgcugaucuucgaccgccaccccaucgccgcccugcucugcuaccccgccgcccgguaccgcaugggguccaugaccccgcaggccguccuggccuucguggcgcugaucccgcccacccuccccggcaccaacaucgugcugggcgcccugcccgaggaccggcacaucgaccgccucgccaagcggcagcgccccggggagcggcuggaccuggccaugcucgccgcgauccgccgggucuacgagcugcuggccaacacggugcgcuaccuccagggcgggggcagcuggcgcgaggacuggggccagcuguccgggaccgccgugccgccccagggcgccgagccccagagcaacgcggggccccagccccacaucggcgacacccuguucacccucuuccgggcccccgagcugcuggccccgaacggggaccucuacaacgucuucgccugggcccuggacgugcuggcgaagcgccuccggcccaugcacguguucauccuggacuacgaccagucccccgccggcugccgcgacgcccugcuccagcugacgagcggcaugguccagacccacgugaccacccccggguccaucccgacgaucugcgaccuggcccggaccuucgcccgcgagaugggcgaggcgaacuga

SEQ ID NO: 6692 - RNA, 1131 nt, Artificial Sequence
  derived and/or modified sequence opt2 from Thymidine_Kinase_TK__Herpes_Simplex_Virus_1_(HSV-1)__ACB59251
auggccuccuaccccugccaccagcacgccuccgccuucgaccaggccgcccgcucccgcggccacaacaaccgccgcaccgcccuccgcccccgccgccagcagaaggccaccgagguccgccucgagcagaagaugcccacccuccuccgcgucuacaucgacggcccccacggcaugggcaagaccaccaccacccagcuccucgucgcccucggcucccgcgacgacaucgucuacguccccgagcccaugaccuacuggcgcguccucggcgccuccgagaccaucgccaacaucuacaccacccagcaccgccucgaccagggcgagaucuccgccggcgacgccgccgucgucaugaccuccgcccagaucaccaugggcaugcccuacgccgucaccgacgccguccucgccccccacaucggcggcgaggccggcuccucccacgcccccccccccgcccucacccucaucuucgaccgccaccccaucgccgcccuccucugcuaccccgccgcccgcuaccgcaugggcuccaugaccccccaggccguccucgccuucgucgcccucaucccccccacccuccccggcaccaacaucguccucggcgcccuccccgaggaccgccacaucgaccgccucgccaagcgccagcgccccggcgagcgccucgaccucgccaugcucgccgccauccgccgcgucuacgagcuccucgccaacaccguccgcuaccuccagggcggcggcuccuggcgcgaggacuggggccagcucuccggcaccgccguccccccccagggcgccgagccccaguccaacgccggcccccagccccacaucggcgacacccucuucacccucuuccgcgcccccgagcuccucgcccccaacggcgaccucuacaacgucuucgccugggcccucgacguccucgccaagcgccuccgccccaugcacgucuucauccucgacuacgaccagucccccgccggcugccgcgacgcccuccuccagcucaccuccggcaugguccagacccacgucaccacccccggcuccauccccaccaucugcgaccucgcccgcaccuucgcccgcgagaugggcgaggccaacuga

SEQ ID NO: 6693 - RNA, 1131 nt, Artificial Sequence
  derived and/or modified sequence opt3 from Thymidine_Kinase_TK__Herpes_Simplex_Virus_1_(HSV-1)__ACB59251
auggccagcuaccccugccaccagcaugcuuccgcauucgaccaagccgcgagaucuaggggccacaacaaucggcgcaccgcucugcgaccucguagacagcagaaggccacagaggugaggcucgaacagaaaaugccaacucuucugcgggucuauaucgaugggccgcauggaauggguaagacgaccacaacucaauuguuaguugcacugggcucacgcgacgauauuguguacguacccgagccuaugaccuauuggagagugcuaggggccagugaaacaauagcuaacaucuacaccacucagcacaggcucgaccagggagagauuagcgcaggcgaugccgcugucgugaugacauccgcccagaucaccauggguaugccauaugcgguuacggacgcagugcuggcuccccauauugggggagaagccgggucuucgcacgccccuccacccgcacuuacucugaucuuugaucggcacccuauagcugccuugcucuguuacccagcggcccgcuaucgaaugggcucaaugaccccgcaagcaguccuggcuuucguggcccugauucccccuacacucccaggcacuaauaucguauuaggagcucugcccgaggacagacauaucgauaggcuugccaaacggcagcguccuggugagcgcuuggaccuggcaaugcuagccgcuauuagaaggguuuacgaacuccuggcgaacaccgugcgguaccuucagggcgggggaagcuggcgagaggauuggggccagcugagugguacagcagucccaccccaaggggccgaaccgcaguccaaugcuggaccucagccccacaucggcgacaccuuguuuacucucuuccgcgccccagagcuguuagcaccuaacggcgaucuguauaauguguuugccugggcucucgacgugcuugccaagagacugaggcccaugcaugucuucauauuggacuacgaucaaucuccagcagggugccgggacgcgcuacugcagcucacgagcggaaugguucagacacacgugaccacucccgguuccauuccuacaaucugugaucuggcucgcaccuuugccagagagaugggcgaagcaaacuga

SEQ ID NO: 6694 - RNA, 1131 nt, Artificial Sequence
  derived and/or modified sequence opt4 from Thymidine_Kinase_TK__Herpes_Simplex_Virus_1_(HSV-1)__ACB59251
auggccagcuaccccugccaccagcacgccagcgccuucgaccaggccgccagaagcagaggccacaacaacagaagaaccgcccugagacccagaagacagcagaaggccaccgaggugagacuggagcagaagaugcccacccugcugagaguguacaucgacggcccccacggcaugggcaagaccaccaccacccagcugcugguggcccugggcagcagagacgacaucguguacgugcccgagcccaugaccuacuggagagugcugggcgccagcgagaccaucgccaacaucuacaccacccagcacagacuggaccagggcgagaucagcgccggcgacgccgccguggugaugaccagcgcccagaucaccaugggcaugcccuacgccgugaccgacgccgugcuggccccccacaucggcggcgaggccggcagcagccacgcccccccccccgcccugacccugaucuucgacagacaccccaucgccgcccugcugugcuaccccgccgccagauacagaaugggcagcaugaccccccaggccgugcuggccuucguggcccugaucccccccacccugcccggcaccaacaucgugcugggcgcccugcccgaggacagacacaucgacagacuggccaagagacagagacccggcgagagacuggaccuggccaugcuggccgccaucagaagaguguacgagcugcuggccaacaccgugagauaccugcagggcggcggcagcuggagagaggacuggggccagcugagcggcaccgccgugcccccccagggcgccgagccccagagcaacgccggcccccagccccacaucggcgacacccuguucacccuguucagagcccccgagcugcuggcccccaacggcgaccuguacaacguguucgccugggcccuggacgugcuggccaagagacugagacccaugcacguguucauccuggacuacgaccagagccccgccggcugcagagacgcccugcugcagcugaccagcggcauggugcagacccacgugaccacccccggcagcauccccaccaucugcgaccuggccagaaccuucgccagagagaugggcgaggccaacuga

SEQ ID NO: 6695 - RNA, 1131 nt, Artificial Sequence
  derived and/or modified sequence opt5 from Thymidine_Kinase_TK__Herpes_Simplex_Virus_1_(HSV-1)__ACB59251
auggccagcuaccccugccaccagcaugcuuccgccuucgaccaagcggcuagaucucggggccacaacaaucgcagaaccgcccugcggccucgcagacagcagaaggccacagaggugcggcucgaacagaaaaugccgacgcugcuucgcgucuauaucgaugggccccauggaaugggcaagaccacaaccacacaacugcucguugcucuggggagcagagacgauauuguguacgugccugagcccaugaccuauuggcggguccuuggagccuccgaaacaaucgcuaacauuuacaccacgcagcaccgccuggaccagggcgagaucucugccggggaugcggccgugguuaugaccagcgcucagauuacaaugggaaugccuuaugccgugaccgacgcuguccucgcuccccauaucggcggcgaagcgggguccucucacgccccuccgcccgcucugacacugaucuuugauagacacccuauugccgcucuccuguguuaccccgccgcccgguaucgcaugggaagcaugaccccucaagcugugcuugcguucguugcccugauucccccgacgcucccuggcacaaauaucgugcugggggcccuucccgaggacagacauaucgaucggcuggccaaacgccagagaccuggagagcggcucgaccuggccaugcuggcugccauuagacgcgucuacgaacuccuggcgaacaccgugcgguaccuucagggcgggggauccuggagagaggauuggggccagcugagcggcacagcugugccuccccaaggggccgaaccccagucuaaugccggaccgcagccccacaucggcgacacccucuuuacccuguuccgcgcuccugagcuucuggcccccaacggggaucucuauaaugucuuugcuugggcccuggacguucuggcgaagcggcucagaccuaugcauguguucauucuggacuacgaucaaucccccgccggaugccgcgacgcccuucugcagcucacaagcggcauggugcagacgcacgucaccacaccggggucuaucccuaccaucugugaucuggcucggacauuugcuagagagaugggagaagccaacuga

SEQ ID NO: 6696 - RNA, 1131 nt, Artificial Sequence
  derived and/or modified sequence opt6 from Thymidine_Kinase_TK__Herpes_Simplex_Virus_1_(HSV-1)__ACB59251
auggcaagcuauccuugucaccaacaugcaucagcauucgaucaagcagcgagaucuagaggacacaauaacagaagaacagcguuaagaccaaggagacaacaaaaagcaaccgaaguuagacuagaacaaaaaaugccaacacuacuaagaguauacauugacggaccccauggaaugggaaaaacaacaacaacacaauuacuuguagcacuaggaagucgagaugauauagucuauguaccagaaccaaugacauauuggagaguuuuaggagcuagugaaacuauagcaaauauauauacaacacaacacagacuagaucaaggagaaaucagugcaggagaugcugcaguaguaaugacaucagcacaaauaacaaugggaaugccauaugcagucacagaugcaguauuagcaccacauauagguggugaagcaggcagcucucaugcaccaccacccgcauuaacauuaauuuuugauagacauccaauagcagcauuacuuugcuauccagcagcaagauacagaaugggcaguaugacaccacaagcaguauuagcauuuguagcacuaauaccaccaacauuaccuggcacaaauauaguuuuaggugcacuaccagaagauagacauauagaucgacuagcaaaacgacaaaggcccggagaaagauuagauuuagcaaugcucgcagcaaucagaagaguauaugaauuauuagcaaacaccguaagauacuuacaaggaggaggaucauggagagaagauuggggacaacuaaguggaacagcaguacccccacaaggugcugaaccacaaucaaaugcaggaccgcaaccccauauaggagauacacucuuuacauuauuuagagcuccagaacuauuagcaccaaauggagaucuauauaauguauuugcaugggcacuagauguguuagcaaaaagauuaaggcccaugcauguauuuauacuagauuacgaucaaucaccugcaggaugucgagaugcccucuuacaacuaacaucaggaaugguacaaacacauguaacaacuccaggaaguauaccaacaauaugugauuuagcaagaacauuugccagagaaaugggagaagcaaauuaa

SEQ ID NO: 6697 - protein, 376 aa, Artificial Sequence
  Thymidine_Kinase_TK__Herpes_Simplex_Virus_1_(HSV-1)__B2CPP6
MASYPGHQHASAFDQAARSRGHSNRRTALRPRRQQEATEVHLEQKMPTLLRVYIDGPHGMGKTTTTQLLVALGSRDDIVYVPEPMTYWRVLGASETIANIYTTQHRLDQGEISAGDAAVVMTSAQITMGMPYAVTDAVLAPHIGGEAGSSHAPPPALTLIFDRHPIAALLCYPAARYLMGSMTPQAVLAFVVLIPPTLPGTNIVLGALPEDRHIDRLAKRQRPGERLDLAMLAAIRRVYGLLANTVRYLQCGGSWREDWGQLSGTALTPQGAEPQSNAGPRPHIGETLFTLFRAPELLAPNGDLYNVFAWALDVLAKRLRPMHVFILDYDQSPAGCRDALLQLTSGMVQTHVTPPGSIPTICDLARTFAREMGEAH

SEQ ID NO: 6698 - RNA, 1131 nt, Artificial Sequence
  Thymidine_Kinase_TK__Herpes_Simplex_Virus_1_(HSV-1)__ACB59252
auggcuucguaccccggccaucaacacgcgucugcguucgaccaggcugcgcguucucgcggccauagcaaccgacguacggcguugcgcccucgccggcagcaagaagccacggaaguccaccuggagcagaaaaugcccacgcuacugcggguuuauauagacgguccucacgggauggggaaaaccaccaccacgcaacugcugguggcccuggguucgcgcgacgauaucgucuacguacccgagccgaugacuuacuggcgggugcugggggcuuccgagacaaucgcgaacaucuacaccacacaacaccgccucgaccagggugagauaucggccggggacgcggcggugguaaugacaagcgcccagauaacaaugggcaugccuuaugccgugaccgacgccguucuggcuccucauaucgggggggaggcugggagcucacaugccccgcccccggcccucacccucaucuucgaccgccaucccaucgccgcccuccugugcuacccggccgcgcgguaccuuaugggcagcaugaccccccaggccgugcuggcguucgugguccucaucccgccgaccuugcccggcacaaacaucguguugggggcccuuccggaggacagacacaucgaccgccuggccaaacgccagcgccccggugagcggcuugaccuggcuaugcuggccgcgauucgccgcguuuacgggcuacuugccaauacggugcgguaucugcagugcggcgggucguggcgggaggauuggggacagcuuucggggacggccuugacgccccagggugccgagccccagagcaacgcgggcccacgaccccauaucggggaaacguuauuuacccuguuucgggcccccgaguugcuggcccccaacggcgaccuguacaacguguuugccugggccuuggacgucuuggccaaacgccuccgucccaugcacgucuuuauccuggauuacgaccaaucgcccgccggcugccgggacgcccugcugcaacuuaccuccgggaugguccagacccaugucacccccccaggcuccauaccgacgaucugcgaccuggcgcgcacguuugcccgggagaugggggaggcucacuaa

SEQ ID NO: 6699 - RNA, 1131 nt, Artificial Sequence
  derived and/or modified sequence opt1 from Thymidine_Kinase_TK__Herpes_Simplex_Virus_1_(HSV-1)__ACB59252
auggccagcuaccccggccaccagcacgccuccgcguucgaccaggccgcccgcagccgggggcacuccaaccgccggaccgcccugcgcccgcggcgccagcaggaggccaccgaggugcaccucgagcagaagaugcccacgcugcugcgggucuacaucgacggcccccacgggaugggcaagaccaccaccacgcagcuccugguggcgcuggggagccgcgacgacaucguguacguccccgagccgaugaccuacuggcgggugcucggcgccuccgagaccaucgccaacaucuacaccacgcagcaccgccuggaccagggcgagaucagcgccggggacgcggccguggucaugaccuccgcccagaucaccaugggcaugcccuacgccgugaccgacgccgugcuggcgccccacaucgggggcgaggccgggagcucccacgcgcccccgcccgcccucacgcugaucuucgaccggcaccccaucgccgcccugcucugcuaccccgccgcccgcuaccugaugggcagcaugaccccgcaggccguccuggccuucguggugcucaucccgcccacccugcccggcaccaacaucguccugggggcgcuccccgaggaccggcacaucgaccgccuggccaagcggcagcgccccggcgagcggcuggaccucgccaugcuggccgccauccgccggguguacgggcugcucgcgaacacggugcgcuaccugcagugcggcggcuccuggcgggaggacugggggcagcugagcggcaccgcccucacgccccagggggccgagccccaguccaacgccggcccgcgcccccacaucggggagacccuguucacccuguuccgcgcgcccgagcuccuggcccccaacggcgaccuguacaacgucuucgccugggcccucgacgugcuggccaagcggcugcgcccgaugcacguguucauccucgacuacgaccagagccccgcgggcugccgggacgcccugcugcagcucaccuccgggaugguccagacccacgugaccccgcccggcagcauccccacgaucugcgaccuggcccgcaccuucgcccgggagaugggggaggcccacuga

SEQ ID NO: 6700 - RNA, 1131 nt, Artificial Sequence
  derived and/or modified sequence opt2 from Thymidine_Kinase_TK__Herpes_Simplex_Virus_1_(HSV-1)__ACB59252
auggccuccuaccccggccaccagcacgccuccgccuucgaccaggccgcccgcucccgcggccacuccaaccgccgcaccgcccuccgcccccgccgccagcaggaggccaccgagguccaccucgagcagaagaugcccacccuccuccgcgucuacaucgacggcccccacggcaugggcaagaccaccaccacccagcuccucgucgcccucggcucccgcgacgacaucgucuacguccccgagcccaugaccuacuggcgcguccucggcgccuccgagaccaucgccaacaucuacaccacccagcaccgccucgaccagggcgagaucuccgccggcgacgccgccgucgucaugaccuccgcccagaucaccaugggcaugcccuacgccgucaccgacgccguccucgccccccacaucggcggcgaggccggcuccucccacgcccccccccccgcccucacccucaucuucgaccgccaccccaucgccgcccuccucugcuaccccgccgcccgcuaccucaugggcuccaugaccccccaggccguccucgccuucgucguccucaucccccccacccuccccggcaccaacaucguccucggcgcccuccccgaggaccgccacaucgaccgccucgccaagcgccagcgccccggcgagcgccucgaccucgccaugcucgccgccauccgccgcgucuacggccuccucgccaacaccguccgcuaccuccagugcggcggcuccuggcgcgaggacuggggccagcucuccggcaccgcccucaccccccagggcgccgagccccaguccaacgccggcccccgcccccacaucggcgagacccucuucacccucuuccgcgcccccgagcuccucgcccccaacggcgaccucuacaacgucuucgccugggcccucgacguccucgccaagcgccuccgccccaugcacgucuucauccucgacuacgaccagucccccgccggcugccgcgacgcccuccuccagcucaccuccggcaugguccagacccacgucaccccccccggcuccauccccaccaucugcgaccucgcccgcaccuucgcccgcgagaugggcgaggcccacuga

SEQ ID NO: 6701 - RNA, 1131 nt, Artificial Sequence
  derived and/or modified sequence opt3 from Thymidine_Kinase_TK__Herpes_Simplex_Virus_1_(HSV-1)__ACB59252
auggccagcuaccccggccaccagcaugcuuccgcauucgaccaagccgcgagaucuagggggcacucaaaccggcgcaccgcucugcgaccucguagacagcaggaggccacagaagugcaucucgagcagaagaugccaacucuucugagggucuauaucgauggaccgcacgguaugggcaaaacgaccacaacucaauuguuaguugcacuggggagucgggacgauauuguguacguacccgaaccuaugaccuauuggcgcgugcuaggagccagcgagacaauagcuaauaucuacaccacucagcauagacucgaccagggcgaaauuuccgccggugaugccgcugucgugaugacaucugcccagaucaccauggggaugccauaugcgguuacggacgcagugcuggcaccccacauuggaggcgaggcuggcucgucacacgccccuccacccgcacuuacucugaucuuugauaggcauccuauagcugccuugcucugcuacccagcggcccgguaucugauggggagcaugaccccgcaagcaguccuggcuuucgugguacucauucccccuacauuaccaggaacuaacaucguucugggugcccuucccgaggaccgccacaucgaucgauuggcuaagagacagaggccuggcgaacggcuggaccuagccaugcucgcagccauucgucgcguguacgggcugcuugcuaauaccgucagauaccugcaguguggaggcaguuggagggaggauuggggucaguuguccgggacagcgcucaccccacaaggagcagaaccccagucuaacgccggcccgcggccucauaucggcgagacgcuguuuacuuuauuccgagcucccgagcugcucgccccaaauggggaccuuuauaacguguuugcaugggcccuggauguguuggcuaaacgccuaagaccuaugcacgucuucauacuggacuacgaccagagccccgccggaugcagggaugcacuccugcaacuuacauccgguaugguucagacccacgugacuccacccggcucaauuccuacaaucugugaccuggcgcggaccuuugcucgcgaaaugggggaggcccauuga

SEQ ID NO: 6702 - RNA, 1131 nt, Artificial Sequence
  derived and/or modified sequence opt4 from Thymidine_Kinase_TK__Herpes_Simplex_Virus_1_(HSV-1)__ACB59252
auggccagcuaccccggccaccagcacgccagcgccuucgaccaggccgccagaagcagaggccacagcaacagaagaaccgcccugagacccagaagacagcaggaggccaccgaggugcaccuggagcagaagaugcccacccugcugagaguguacaucgacggcccccacggcaugggcaagaccaccaccacccagcugcugguggcccugggcagcagagacgacaucguguacgugcccgagcccaugaccuacuggagagugcugggcgccagcgagaccaucgccaacaucuacaccacccagcacagacuggaccagggcgagaucagcgccggcgacgccgccguggugaugaccagcgcccagaucaccaugggcaugcccuacgccgugaccgacgccgugcuggccccccacaucggcggcgaggccggcagcagccacgcccccccccccgcccugacccugaucuucgacagacaccccaucgccgcccugcugugcuaccccgccgccagauaccugaugggcagcaugaccccccaggccgugcuggccuucguggugcugaucccccccacccugcccggcaccaacaucgugcugggcgcccugcccgaggacagacacaucgacagacuggccaagagacagagacccggcgagagacuggaccuggccaugcuggccgccaucagaagaguguacggccugcuggccaacaccgugagauaccugcagugcggcggcagcuggagagaggacuggggccagcugagcggcaccgcccugaccccccagggcgccgagccccagagcaacgccggccccagaccccacaucggcgagacccuguucacccuguucagagcccccgagcugcuggcccccaacggcgaccuguacaacguguucgccugggcccuggacgugcuggccaagagacugagacccaugcacguguucauccuggacuacgaccagagccccgccggcugcagagacgcccugcugcagcugaccagcggcauggugcagacccacgugaccccccccggcagcauccccaccaucugcgaccuggccagaaccuucgccagagagaugggcgaggcccacuga

SEQ ID NO: 6703 - RNA, 1131 nt, Artificial Sequence
  derived and/or modified sequence opt5 from Thymidine_Kinase_TK__Herpes_Simplex_Virus_1_(HSV-1)__ACB59252
auggccagcuaccccggccaccagcaugcuuccgccuucgaccaagcggcuagaucucgggggcacagcaaccgcagaaccgcccugcggccucgcagacagcaggaggccacagaagugcaucucgagcagaagaugccgacgcugcuucgggucuauaucgauggaccccacggcauggggaaaaccacaaccacacaacugcucguugcucugggaucccgcgacgauauuguguacgugccugaacccaugaccuauuggagaguccuuggcgccucugagacaaucgcuaauauuuacaccacgcagcaucggcuggaccagggggaaaucagcgccggagaugcggccgugguuaugaccuccgcucagauuacaaugggcaugccuuaugccgugaccgacgcuguccucgcgccccacaucggcggggaggccggaucuagccacgccccuccgcccgcucugacacugaucuuugaucgccauccuauugccgcucuccugugcuaccccgccgccagauaucuuaugggcuccaugaccccucaagcugugcuggcguucguugugcucauucccccgacgcugccugggacaaacaucguccuuggagcccugcccgaggaccggcacaucgaucgccucgcuaagagacagcggccuggcgaacgccuggaccuggccaugcucgccgcuauuagacggguguacgggcugcuugccaauaccgugagauaccugcaguguggaggcagcuggcgcgaggauuggggccagcucucugggacagcgcugacaccccaaggagcugaaccccaguccaacgccggcccucggccgcauaucggggagacccuuuuuacccuguucagagcccccgagcuccuggcuccuaauggagaccuguauaacgucuuugccugggcucucgauguucuggccaaacgccuucggcccaugcacguguucauucuggacuacgaccagagcccugcgggcugcagagaugcccuccugcaacuuacgucugggauggugcagacccacgucacacccccgggauccaucccuaccaucugugaccuggcucgcacauuugcccgggaaaugggcgaggcucauuga

SEQ ID NO: 6704 - RNA, 1131 nt, Artificial Sequence
  derived and/or modified sequence opt6 from Thymidine_Kinase_TK__Herpes_Simplex_Virus_1_(HSV-1)__ACB59252
auggcaucauauccaggacaucaacaugcaagcgcauuugaucaagcagcaagaucaagaggccacagcaauagaagaaccgcacuuagaccaagacgacaacaagaagcaacggaaguacauuuagaacaaaaaaugccaacacuuuuacgaguauauauugauggaccacauggaaugggaaaaacuacaacaacacaacuauuaguagcauuaggcaguagagaugauauaguuuauguaccagaaccaaugacauauuggagaguuuuaggagcaucagaaacaauagcaaauauauauaccacacaacauaggcuugaccaaggagaaauaagugcuggcgaugccgcaguagucaugacuuccgcacaaauaacuauggguaugccauaugcaguaacagaugccguacuagcaccacacauugguggagaagccgguucaagucaugcaccuccaccagcauuaacacugauauuugauagacauccaauagcugcacuauuauguuauccagcagcuagauauuuaaugggaucaaugacaccucaagcaguacuagcauucgucguuuuaauuccaccaacauuaccaggaacuaauauaguacuuggagcauuaccagaagauagacauauagacaggcuugcaaaaagacaacgaccaggagaaagauuagauuuagcaauguuagcagcaauaagaagaguuuauggauuauuagcaaauacaguaagauauuuacaauguggaggaucauggagagaagauuggggacaacucucaggaacagcuuuaaccccacaaggagcugaaccacaaucaaaugcaggaccaagaccacauauaggagaaacauuauuuacacucuucagagcaccagaauuacuagcaccaaauggagauuuauauaauguauuugccugggcacuagauguauuagcaaaaagauuaagaccuaugcauguauuuauauuagauuaugaccaaucaccagcaggaugcagagaugcuuuauuacaacuaacaagugguaugguacaaacacauguaacaccaccuggaaguauaccaacaauaugugacuuagcacgaacauucgcaagagaaaugggagaggcacauuaa

SEQ ID NO: 6705 - protein, 376 aa, Artificial Sequence
  Thymidine_Kinase_TK__Herpes_Simplex_Virus_1_(HSV-1)__B2CPP7
MASYPCHQHASAFDQAARSRGHSNRRTALRPRRQQEATEVRPEQKMPTLLRVYIDGPHGMGKTTTTQLLVALGSRDDIVYVPEPMTYWRVLGASETIANIYTTQHRLDQGEISAGDAAVVMTSAQITMGMPYAVTDAVLAPHIGGEAGSSHAPPPALTLIFDRHPIAALLCYPAARYLMGSMTPQAVLAFVALIPPTLPGTNIVLGALPEDRHIDRLAKRQRPGERLDLAMLAAIRRVYELLANTVRYLQGGGSWREDWGQLSGTALTPQGAEPQSNAGPRPHIGETLFTLFRAPELLAPNGDLYNVFAWALDVLAKRLRPMHVFILDYDQSPAGCRDALLQLTSGMVQTHVTTPGSIPTICDLARTFAREMGEAP

SEQ ID NO: 6706 - RNA, 1131 nt, Artificial Sequence
  Thymidine_Kinase_TK__Herpes_Simplex_Virus_1_(HSV-1)__ACB59253
auggcuucguaccccugccaucaacacgcgucugcguucgaccaggcugcgcguucucgcggccauagcaaccgacguacggcguugcgcccucgccggcagcaagaagccacggaaguccgcccggagcagaaaaugcccacgcuacugcggguuuauauagacgguccccacgggauggggaaaaccaccaccacgcaacugcugguggcccuggguucgcgcgacgauaucgucuacguacccgagccgaugacuuacuggcgggugcugggggcuuccgagacaaucgcgaacaucuacaccacacaacaccgccucgaccagggugagauaucggccggggacgcggcggugguaaugacaagcgcccagauaacaaugggcaugccuuaugccgugaccgacgccgugcuggcuccucauaucgggggggaggcugggagcucacaugccccgcccccggcccucacccucaucuucgaccgccaucccaucgccgcccuccuguguuacccggccgcgcgauaccuuaugggcagcaugaccccccaggccgugcuggcguucguggcccucaucccgccgaccuugccgggcacaaacaucguguugggggcccuuccggaggacagacacaucgaccgccuggccaaacgccagcgccccggcgagcggcuugaccuggcuaugcuggccgcgauucgccgcguuuacgagcugcuugccaauacggugcgguaucugcagggcggcgggucguggcgggaggauuggggacagcuuucggggacggccuugacgccccagggugccgagccccagagcaacgcgggcccgcgaccccauaucggggaaacguuauuuacccuguuucgggcccccgaguugcuggcccccaacggcgaccuguacaacguguuugccugggccuuggacgucuuggccaaacgccuccgucccaugcacgucuuuauccuggauuacgaccaaucgcccgccggcugccgggacgcccugcugcaacuuaccuccgggaugguccagacccacgucaccaccccaggcuccauaccgacgaucugcgaccuggcgcgcacguuugcccgggagaugggggaggcucccuaa

SEQ ID NO: 6707 - RNA, 1131 nt, Artificial Sequence
  derived and/or modified sequence opt1 from Thymidine_Kinase_TK__Herpes_Simplex_Virus_1_(HSV-1)__ACB59253
auggccagcuaccccugccaccagcacgccuccgcguucgaccaggccgcccgcagccggggccacuccaaccgccggaccgcccugcgcccgcggcgccagcaggaggccaccgaggugcggcccgagcagaagaugcccacgcuccugcgcgucuacaucgacgggccccacggcauggggaagaccaccaccacgcagcugcucguggcgcugggcagccgggacgacaucguguacgucccggagcccaugaccuacuggcgcgugcugggggccuccgagaccaucgccaacaucuacaccacgcagcaccggcucgaccagggcgagaucagcgccggcgacgcggccguggucaugaccuccgcccagaucaccauggggaugcccuacgccgugaccgacgccgugcuggcgccccacaucggcggggaggccggcagcucccacgccccgccgcccgcccugacgcucaucuucgaccgccaccccaucgccgcgcugcugugcuaccccgccgcccgguaccucauggggagcaugacgccccaggccguccuggccuucguggcgcugaucccgcccacccuccccggcaccaacaucgugcugggcgcccugcccgaggaccgccacaucgaccggcucgccaagcgccagcggcccggggagcgccuggaccuggccaugcucgccgcgauccggcgcgucuacgagcugcuggccaacaccgugcgguaccuccagggcgggggcuccuggcgcgaggacuggggccagcugagcgggaccgcccugacgccccagggcgccgagccgcaguccaacgcggggccccgcccccacaucggcgagacccucuucacccuguuccgggcccccgagcugcucgccccgaacggggaccuguacaacguguucgccugggcccuggacguccucgcgaagcgccugcggcccaugcacguguucauccuggacuacgaccagagccccgccggcugccgcgacgcccuccugcagcugaccuccggcauggugcagacccacgucaccacgcccgggagcaucccgaccaucugcgaccucgcccggaccuucgcccgcgagaugggcgaggcgcccuga

SEQ ID NO: 6708 - RNA, 1131 nt, Artificial Sequence
  derived and/or modified sequence opt2 from Thymidine_Kinase_TK__Herpes_Simplex_Virus_1_(HSV-1)__ACB59253
auggccuccuaccccugccaccagcacgccuccgccuucgaccaggccgcccgcucccgcggccacuccaaccgccgcaccgcccuccgcccccgccgccagcaggaggccaccgagguccgccccgagcagaagaugcccacccuccuccgcgucuacaucgacggcccccacggcaugggcaagaccaccaccacccagcuccucgucgcccucggcucccgcgacgacaucgucuacguccccgagcccaugaccuacuggcgcguccucggcgccuccgagaccaucgccaacaucuacaccacccagcaccgccucgaccagggcgagaucuccgccggcgacgccgccgucgucaugaccuccgcccagaucaccaugggcaugcccuacgccgucaccgacgccguccucgccccccacaucggcggcgaggccggcuccucccacgcccccccccccgcccucacccucaucuucgaccgccaccccaucgccgcccuccucugcuaccccgccgcccgcuaccucaugggcuccaugaccccccaggccguccucgccuucgucgcccucaucccccccacccuccccggcaccaacaucguccucggcgcccuccccgaggaccgccacaucgaccgccucgccaagcgccagcgccccggcgagcgccucgaccucgccaugcucgccgccauccgccgcgucuacgagcuccucgccaacaccguccgcuaccuccagggcggcggcuccuggcgcgaggacuggggccagcucuccggcaccgcccucaccccccagggcgccgagccccaguccaacgccggcccccgcccccacaucggcgagacccucuucacccucuuccgcgcccccgagcuccucgcccccaacggcgaccucuacaacgucuucgccugggcccucgacguccucgccaagcgccuccgccccaugcacgucuucauccucgacuacgaccagucccccgccggcugccgcgacgcccuccuccagcucaccuccggcaugguccagacccacgucaccacccccggcuccauccccaccaucugcgaccucgcccgcaccuucgcccgcgagaugggcgaggcccccuga

SEQ ID NO: 6709 - RNA, 1131 nt, Artificial Sequence
  derived and/or modified sequence opt3 from Thymidine_Kinase_TK__Herpes_Simplex_Virus_1_(HSV-1)__ACB59253
auggccagcuaccccugccaccagcaugcuuccgcauucgaccaagccgcgagaucuaggggccacucaaaccggcgcaccgcucugcgaccucguagacagcaggaggccacagaagugaggccagagcagaagaugccgacucuccuucgggucuauaucgaugggccccauggaauggguaaaacgaccacaacucaacuguugguugcauuaggcagucgcgacgauauuguguacguaccugaaccaaugaccuauuggagagugcugggggccagcgagacaauagcuaauaucuacaccacucagcacaggcuagaccagggagaaauuuccgcaggcgaugccgcugucgugaugacaucugcccagaucaccauggguaugcccuaugcgguuacggacgcagugcucgccccucauauugggggagaggcuggcucgucacacgccccacccccugcacugacucuuaucuuugaucggcacccaauagcugcccuguuguguuacccggcggcccgcuaucucaugggcagcaugacaccccaagcaguccuggcuuucguggcccugaucccuccaacccuccccgggacuaacauuguauuaggagcucugccugaggaccgacauaucgauagacuugccaagaggcagcggccaggugaacguuuggaccuggcaaugcuagccgcuauucgcagaguuuacgagcuccuggcgaauaccgugagguaccuucagggcgggggaaguuggcgggaagauuggggccagcuguccgguacagcauugacgccccaaggggccgagccgcagucuaacgcuggaccucgaccccacaucggcgagacccucuuuacucuguuccgcgccccagaauuacuggcaccuaauggcgaccucuauaacgucuuugccugggcucuugaugugcuggccaaaagauugaggcccaugcauguguucauacuagacuacgaccagagcccagcagggugccgggaugcgcugcuccaacugacauccggaaugguccagacccacguuacuacacccgguucaauuccuaccaucugugaccuugcucgcacguuugccagagagaugggcgaagcaccauga

SEQ ID NO: 6710 - RNA, 1131 nt, Artificial Sequence
  derived and/or modified sequence opt4 from Thymidine_Kinase_TK__Herpes_Simplex_Virus_1_(HSV-1)__ACB59253
auggccagcuaccccugccaccagcacgccagcgccuucgaccaggccgccagaagcagaggccacagcaacagaagaaccgcccugagacccagaagacagcaggaggccaccgaggugagacccgagcagaagaugcccacccugcugagaguguacaucgacggcccccacggcaugggcaagaccaccaccacccagcugcugguggcccugggcagcagagacgacaucguguacgugcccgagcccaugaccuacuggagagugcugggcgccagcgagaccaucgccaacaucuacaccacccagcacagacuggaccagggcgagaucagcgccggcgacgccgccguggugaugaccagcgcccagaucaccaugggcaugcccuacgccgugaccgacgccgugcuggccccccacaucggcggcgaggccggcagcagccacgcccccccccccgcccugacccugaucuucgacagacaccccaucgccgcccugcugugcuaccccgccgccagauaccugaugggcagcaugaccccccaggccgugcuggccuucguggcccugaucccccccacccugcccggcaccaacaucgugcugggcgcccugcccgaggacagacacaucgacagacuggccaagagacagagacccggcgagagacuggaccuggccaugcuggccgccaucagaagaguguacgagcugcuggccaacaccgugagauaccugcagggcggcggcagcuggagagaggacuggggccagcugagcggcaccgcccugaccccccagggcgccgagccccagagcaacgccggccccagaccccacaucggcgagacccuguucacccuguucagagcccccgagcugcuggcccccaacggcgaccuguacaacguguucgccugggcccuggacgugcuggccaagagacugagacccaugcacguguucauccuggacuacgaccagagccccgccggcugcagagacgcccugcugcagcugaccagcggcauggugcagacccacgugaccacccccggcagcauccccaccaucugcgaccuggccagaaccuucgccagagagaugggcgaggcccccuga

SEQ ID NO: 6711 - RNA, 1131 nt, Artificial Sequence
  derived and/or modified sequence opt5 from Thymidine_Kinase_TK__Herpes_Simplex_Virus_1_(HSV-1)__ACB59253
auggccagcuaccccugccaccagcaugcuuccgccuucgaccaagcggcuagaucucggggccacagcaaccgcagaaccgcccugcggccucgcagacagcaggaggccacagaagugcggccggagcagaagaugcccacgcuccugcgcgucuauaucgaugggccucauggaaugggcaaaaccacaaccacacaacuucugguugcucucggguccagagacgauauuguguacgugcccgaaccuaugaccuauuggcggguccugggagccucugagacaaucgcuaauauuuacaccacgcagcaccgccuugaccagggcgaaaucagcgccggggaugcggccgugguuaugaccuccgcucagauuacaaugggaaugcccuaugccgugaccgacgcuguccuggccccucauaucggcggcgaggcggggucuagccacgccccgcccccugcucucacacugaucuuugauagacaccccauugccgcucugcucuguuacccugccgcccgguaucugaugggauccaugacgccccaagcugugcuugcguucguugcccugaucccgccuacccuccccggcacaaacauugugcugggggcccuuccugaggaccgccauaucgauagacuggcuaagcggcagcgccccggagaaagacucgaccuggccaugcuggcugccauucggagagucuacgagcuccuggcgaauaccgugcgcuaccuucagggcgggggaagcuggcgggaagauuggggccagcugucuggcacagcucucacaccccaaggggccgagccucaguccaacgccggaccgagaccccacaucggcgagacccuguuuacccuuuuccgcgcuccugaacugcucgcccccaauggggaccuguauaacguguuugcuugggcccuggauguccucgcgaaacggcugagaccuaugcauguuuucauucuugacuacgaccagagccccgccggaugccgcgaugcucugcuccaacugacgucuggcauggugcagacccacgugacaaccccgggguccaucccuacaaucugugaccuugcccggaccuuugcuagagagaugggagaagcccccuga

SEQ ID NO: 6712 - RNA, 1131 nt, Artificial Sequence
  derived and/or modified sequence opt6 from Thymidine_Kinase_TK__Herpes_Simplex_Virus_1_(HSV-1)__ACB59253
auggcuucguacccaugccaucaacaugcaagcgcauucgaucaagcagcaagaucaagaggacauaguaaucgaagaacagcucuaagaccaagaagacaacaagaagcuacagaaguaagaccagaacaaaaaaugccuacauuacuaagaguauauauagauggaccucauggaaugggaaaaacaacaacaacacaacuacuuguugcauuaggaucaagagaugauauaguuuacguuccagaaccgaugacauacuggagaguacuaggagcaucagaaacaauagcaaacauuuauacaacacaacauagauuagaucaaggagaaauaucagcaggagaugcugcaguaguaaugacaagugcacaaauaacaaugggaaugccauaugcaguaacagaugcuguacuagcgccacacauaggaggugaagcagguucaucacacgcaccaccaccagcacuuacauuaauauuugauagacauccaauagcagcauuauugugcuauccugcagcuagauaucuuaugggaucaaugacaccacaagcaguuuuagccuuuguugcuuuaauacccccaacauuaccuggaacaaauauaguacuuggagcauuaccagaagauagacacauagauagguuagcaaaaagacaaagaccaggagaaagacuugaucuagcaauguuggcugcaauaagaagaguauaugaauuauuagccaauacaguaagauacuuacaaggaggagguucuuggagagaagauuggggacaacuaagcggaacagcucuuacaccucaaggagcagaaccccaaucaaaugccggaccaagaccucauauaggagaaacacuauuuacuuuauuuagagcaccagaacuucuagcaccuaacggagacuuauauaacgucuuugcaugggcacuagacguauuagcaaaaagauuaagaccaaugcauguauuuauucuagauuaugaucaaucaccagcaggauguagagaugcauuauuacaacucacuucaggaaugguacaaacacauguaacuaccccaggaaguauaccaacaauuugugaccuugcuagaacauuugcacgagaaaugggagaggcaccauaa

SEQ ID NO: 6713 - protein, 375 aa, Artificial Sequence
  Thymidine_Kinase_TK__Herpes_Simplex_Virus_1_(HSV-1)__B2CPP8
MASYPGHQHASAFDQAARSRGHSNRRTALRPRRQQATEVHLEQKMPTLLRVYIDGPHGMGKTTTTQLLVALGSRDDIVYVPEPMTYWRVLGASETIANIYTTQHRLDQGEISAGDAAVVMTSAQITMGMPYAVTDAVLAPHIGGEAGSSHAPPPALTLIFDRHPIAALLCYPAARYLMGSMTPQAVLAFVVLIPPTLPGTNIVLGALPEDRHIDRLAKRQRPGERLDLAMLAAIRRVYGLLANTVRYLQCGGSWREDWGQLSGTALTPQGAEPQSNAGPRPHIGETLFTLFRAPELLAPNGDLYNVFAWALDVLAKRLRPMHVFILDYDQSPAGCRDALLQLTSGMVQTHVTTPGSIPTICDLARTFAREMGEAH

SEQ ID NO: 6714 - RNA, 1128 nt, Artificial Sequence
  Thymidine_Kinase_TK__Herpes_Simplex_Virus_1_(HSV-1)__ACB59254
auggcuucguaccccggccaucaacacgcgucugcguucgaccaggcugcgcguucucgcggccauagcaaccgacguacggcguugcgcccucgccggcagcaagccacggaaguccaccuggagcagaaaaugcccacgcuacugcggguuuauauagacgguccucacgggauggggaaaaccaccaccacgcaacugcugguggcccuggguucgcgcgacgauaucgucuacguacccgagccgaugacuuacuggcgggugcugggggcuuccgagacaaucgcgaacaucuacaccacacaacaccgccucgaccagggugagauaucggccggggacgcggcggugguaaugacaagcgcccagauaacaaugggcaugccuuaugccgugaccgacgccguucuggcuccucauaucgggggggaggcugggagcucacaugccccgcccccggcccucacccucaucuucgaccgccaucccaucgccgcccuccugugcuacccggccgcgcgguaccuuaugggcagcaugaccccccaggccgugcuggcguucgugguccucaucccgccgaccuugcccggcacaaacaucguguugggggcccuuccggaggacagacacaucgaccgccuggccaaacgccagcgccccggugagcggcuugaccuggcuaugcuggccgcgauucgccgcguuuacgggcuacuugccaauacggugcgguaucugcagugcggcgggucguggcgggaggauuggggacagcuuucggggacggccuugacgccccagggugccgagccccagagcaacgcgggcccacgaccccauaucggggaaacguuauuuacccuguuucgggcccccgaguugcuggcccccaacggcgaccuguacaacguguuugccugggccuuggacgucuuggccaaacgccuccgucccaugcacgucuuuauccuggauuacgaccaaucgcccgccggcugccgggacgcccugcugcaacuuaccuccgggaugguccagacccaugucaccaccccaggcuccauaccgacgaucugcgaccuggcgcgcacguuugcccgggagaugggggaggcucacuaa

SEQ ID NO: 6715 - RNA, 1128 nt, Artificial Sequence
  derived and/or modified sequence opt1 from Thymidine_Kinase_TK__Herpes_Simplex_Virus_1_(HSV-1)__ACB59254
auggccagcuaccccggccaccagcacgccuccgcguucgaccaggccgcccgcagccgggggcacuccaaccgccggaccgcccugcgcccgcggcgccagcaggccaccgaggugcaccucgagcagaagaugcccacgcugcugcgggucuacaucgacggcccccacgggaugggcaagaccaccaccacgcagcuccugguggcgcuggggagccgcgacgacaucguguacguccccgagccgaugaccuacuggcgggugcucggcgccuccgagaccaucgccaacaucuacaccacgcagcaccgccuggaccagggcgagaucagcgccggggacgcggccguggucaugaccuccgcccagaucaccaugggcaugcccuacgccgugaccgacgccgugcuggcgccccacaucgggggcgaggccgggagcucccacgcgcccccgcccgcccucacgcugaucuucgaccggcaccccaucgccgcccugcucugcuaccccgccgcccgcuaccugaugggcagcaugaccccgcaggccguccuggccuucguggugcucaucccgcccacccugcccggcaccaacaucguccugggggcgcuccccgaggaccggcacaucgaccgccuggccaagcggcagcgccccggcgagcggcuggaccucgccaugcuggccgccauccgccggguguacgggcugcucgcgaacacggugcgcuaccugcagugcggcggcuccuggcgggaggacugggggcagcugagcggcaccgcccucacgccccagggggccgagccccaguccaacgccggcccgcgcccccacaucggggagacccuguucacccuguuccgcgcgcccgagcuccuggcccccaacggcgaccuguacaacgucuucgccugggcccucgacgugcuggccaagcggcugcgcccgaugcacguguucauccucgacuacgaccagagccccgcgggcugccgggacgcccugcugcagcucaccuccgggaugguccagacccacgugaccacgcccggcagcauccccaccaucugcgaccuggcccgcaccuucgcccgggagaugggggaggcccacuga

SEQ ID NO: 6716 - RNA, 1128 nt, Artificial Sequence
  derived and/or modified sequence opt2 from Thymidine_Kinase_TK__Herpes_Simplex_Virus_1_(HSV-1)__ACB59254
auggccuccuaccccggccaccagcacgccuccgccuucgaccaggccgcccgcucccgcggccacuccaaccgccgcaccgcccuccgcccccgccgccagcaggccaccgagguccaccucgagcagaagaugcccacccuccuccgcgucuacaucgacggcccccacggcaugggcaagaccaccaccacccagcuccucgucgcccucggcucccgcgacgacaucgucuacguccccgagcccaugaccuacuggcgcguccucggcgccuccgagaccaucgccaacaucuacaccacccagcaccgccucgaccagggcgagaucuccgccggcgacgccgccgucgucaugaccuccgcccagaucaccaugggcaugcccuacgccgucaccgacgccguccucgccccccacaucggcggcgaggccggcuccucccacgcccccccccccgcccucacccucaucuucgaccgccaccccaucgccgcccuccucugcuaccccgccgcccgcuaccucaugggcuccaugaccccccaggccguccucgccuucgucguccucaucccccccacccuccccggcaccaacaucguccucggcgcccuccccgaggaccgccacaucgaccgccucgccaagcgccagcgccccggcgagcgccucgaccucgccaugcucgccgccauccgccgcgucuacggccuccucgccaacaccguccgcuaccuccagugcggcggcuccuggcgcgaggacuggggccagcucuccggcaccgcccucaccccccagggcgccgagccccaguccaacgccggcccccgcccccacaucggcgagacccucuucacccucuuccgcgcccccgagcuccucgcccccaacggcgaccucuacaacgucuucgccugggcccucgacguccucgccaagcgccuccgccccaugcacgucuucauccucgacuacgaccagucccccgccggcugccgcgacgcccuccuccagcucaccuccggcaugguccagacccacgucaccacccccggcuccauccccaccaucugcgaccucgcccgcaccuucgcccgcgagaugggcgaggcccacuga

SEQ ID NO: 6717 - RNA, 1128 nt, Artificial Sequence
  derived and/or modified sequence opt3 from Thymidine_Kinase_TK__Herpes_Simplex_Virus_1_(HSV-1)__ACB59254
auggccagcuaccccggccaccagcaugcuuccgcauucgaccaagccgcgagaucuagggggcacucaaaccggcgcaccgcucugcgaccucguagacagcaggccacagaggugcaucucgaacagaagaugccaacucuucugagggucuauaucgauggaccgcacgguaugggcaaaacgaccacaacucaauuguuaguugcacuggggagucgggacgauauuguguacguacccgagccuaugaccuauuggcgcgugcuaggagccagcgaaacaauagcuaauaucuacaccacucagcauagacucgaccagggcgagauuuccgccggugaugccgcugucgugaugacaucugcccagaucaccauggggaugccauaugcgguuacggacgcagugcuggcaccccacauuggaggcgaagcuggcucgucacacgccccuccacccgcacuuacucugaucuuugauaggcauccuauagcugccuugcucugcuacccagcggcccgguaucugauggggagcaugaccccgcaagcaguccuggcuuucgugguacucauucccccuacauuaccaggaacuaacaucguucugggugcccuucccgaggaccgccacaucgaucgauuggcuaagagacagaggccuggcgagcggcuggaccuagccaugcucgcagccauucgucgcguguacgggcugcuugcuaauaccgucagauaccugcaguguggaggcaguuggagggaagauuggggucaguuguccgggacagcgcucaccccacaaggagcagagccccagucuaacgccggcccgcggccucauaucggcgaaacgcuguuuacuuuauuccgagcucccgagcugcucgccccaaauggggaccuuuauaacguguuugcaugggcccuggauguguuggcuaaacgccuaagaccuaugcacgucuucauacuggacuacgaccagagccccgccggaugcagggaugcacuccugcaacuuacauccgguaugguucagacccacgugacuacaccaggcucaauucccaccaucugugaccuggcgcggacguuugcucgcgagaugggggaagcccauuga

SEQ ID NO: 6718 - RNA, 1128 nt, Artificial Sequence
  derived and/or modified sequence opt4 from Thymidine_Kinase_TK__Herpes_Simplex_Virus_1_(HSV-1)__ACB59254
auggccagcuaccccggccaccagcacgccagcgccuucgaccaggccgccagaagcagaggccacagcaacagaagaaccgcccugagacccagaagacagcaggccaccgaggugcaccuggagcagaagaugcccacccugcugagaguguacaucgacggcccccacggcaugggcaagaccaccaccacccagcugcugguggcccugggcagcagagacgacaucguguacgugcccgagcccaugaccuacuggagagugcugggcgccagcgagaccaucgccaacaucuacaccacccagcacagacuggaccagggcgagaucagcgccggcgacgccgccguggugaugaccagcgcccagaucaccaugggcaugcccuacgccgugaccgacgccgugcuggccccccacaucggcggcgaggccggcagcagccacgcccccccccccgcccugacccugaucuucgacagacaccccaucgccgcccugcugugcuaccccgccgccagauaccugaugggcagcaugaccccccaggccgugcuggccuucguggugcugaucccccccacccugcccggcaccaacaucgugcugggcgcccugcccgaggacagacacaucgacagacuggccaagagacagagacccggcgagagacuggaccuggccaugcuggccgccaucagaagaguguacggccugcuggccaacaccgugagauaccugcagugcggcggcagcuggagagaggacuggggccagcugagcggcaccgcccugaccccccagggcgccgagccccagagcaacgccggccccagaccccacaucggcgagacccuguucacccuguucagagcccccgagcugcuggcccccaacggcgaccuguacaacguguucgccugggcccuggacgugcuggccaagagacugagacccaugcacguguucauccuggacuacgaccagagccccgccggcugcagagacgcccugcugcagcugaccagcggcauggugcagacccacgugaccacccccggcagcauccccaccaucugcgaccuggccagaaccuucgccagagagaugggcgaggcccacuga

SEQ ID NO: 6719 - RNA, 1128 nt, Artificial Sequence
  derived and/or modified sequence opt5 from Thymidine_Kinase_TK__Herpes_Simplex_Virus_1_(HSV-1)__ACB59254
auggccagcuaccccggccaccagcaugcuuccgccuucgaccaagcggcuagaucucgggggcacagcaaccgcagaaccgcccugcggccucgcagacagcaggccacagaggugcaucucgaacagaagaugccgacgcugcuucgggucuauaucgauggaccccacggcauggggaaaaccacaaccacacaacugcucguugcucugggaucccgcgacgauauuguguacgugccugagcccaugaccuauuggagaguccuuggcgccucugaaacaaucgcuaauauuuacaccacgcagcaucggcuggaccagggggagaucagcgccggagaugcggccgugguuaugaccuccgcucagauuacaaugggcaugccuuaugccgugaccgacgcuguccucgcgccccacaucggcggggaagccggaucuagccacgccccuccgcccgcucugacacugaucuuugaucgccauccuauugccgcucuccugugcuaccccgccgccagauaucuuaugggcuccaugaccccucaagcugugcuggcguucguugugcucauucccccgacgcugccugggacaaacaucguccuuggagcccugcccgaggaccggcacaucgaucgccucgcuaagagacagcggccuggcgagcgccuggaccuggccaugcucgccgcuauuagacggguguacgggcugcuugccaauaccgugagauaccugcaguguggaggcagcuggcgcgaagauuggggccagcucucugggacagcgcugacaccccaaggagcugagccccaguccaacgccggcccucggccgcauaucggggaaacccuuuuuacccuguucagagcccccgagcuccuggcuccuaauggagaccuguauaacgucuuugccugggcucucgauguucuggccaaacgccuucggcccaugcacguguucauucuggacuacgaccagagcccugcgggcugcagagaugcccuccugcaacuuacgucugggauggugcagacccacgucacaacccccggauccaucccgacaaucugugaccuggcucgcaccuuugcccgggagaugggcgaagcucauuga

SEQ ID NO: 6720 - RNA, 1128 nt, Artificial Sequence
  derived and/or modified sequence opt6 from Thymidine_Kinase_TK__Herpes_Simplex_Virus_1_(HSV-1)__ACB59254
auggcuucauauccaggccaucaacaugcaucugcauuugaucaagcagcuagaucaagaggacauucaaauaggagaacagcuuuaagaccaagaagacaacaagcaacggaaguacaucuagaacaaaaaaugccaacauuauuaagaguauauaucgauggaccucacggcauggguaaaacaacaaccacacaauuacuaguagcacuaggaaguagagacgauauaguauaugucccagaaccuaugacauauuggagaguauuaggagcaagcgaaacaauagcaaauauauauacaacacaacacagauuagaucaaggagaaauauccgcaggagaugcagcaguaguaaugacaucugcacaaaucacuaugggaaugccauaugcuguaacagacgcaguauuagcaccacauauuggaggagaagcagguucaucgcaugcaccaccucccgcauuaacauuaaucuucgaccgucaucccauagcagcacucuuauguuauccagcagcuagguacuuaaugggaucuaugacaccacaagcaguccuagcuuucguaguauuaauaccaccaacacuaccuggaacuaauaucguauuaggagcuuuaccugaagaucgacauauagauagacuagcaaaaagacaaagaccaggugaacgacuagaucucgcaauguuagcagcaauaagaagaguauauggauuacuagcaaauaccguccgauauuuacaauguggaggaucauggcgagaagauuggggacaauuaucuggcacagcauuaacaccucaaggagcagaaccacaaucaaaugcaggaccaagaccacauauaggagaaacucuuuucaccuuauuuagagcaccagaauuacuagcaccaaauggugaucuauacaauguauuugcuugggcauuagauguauuagcaaaaagacuacgaccaaugcauguauucauauuagauuaugaucaaaguccagcuggaugcagagaugcauuacuacaauuaacaagcggaaugguacaaacacacguaaccacaccaggaucaauaccuaccauaugcgaccuagcaagaacauuugcaagagaaaugggagaagcacauuaa

SEQ ID NO: 6721 - protein, 376 aa, Artificial Sequence
  Thymidine_Kinase_TK__Herpes_Simplex_Virus_1_(HSV-1)__B2CPP9
MASYPGHQHASAFDQAARSRGHSNRRTALRPRRQQEATEVHLEQKMPTLLRVYIDGPHGMGKTTTTQLLVALGSRDDIVYVPEPMTYWRVLGASETIANIYTTQHRLDQGEISAGDAAVVMTSAQITMGMPYAVTDAVLAPHIGGEAGSSHAPPPALTLIFDRHPIAALLCYPAARYLMGNMTPQAVLAFVVLIPPTLPGTNIVLGALPEDRHIDRLAKRQRPGERLDLAMLAAIRRVYGLLANTVRYLQCGGSWREDWGQLSGTALTPQGAEPQSNAGPRPHIGETLFTLFRAPELLAPNGDLYNVFAWALDVLAKRLRPMHVFILDYDQSPAGCRDALLQLTSGMVQTHVTTPGSIPTICDLARTFAREMGEAN

SEQ ID NO: 6722 - RNA, 1131 nt, Artificial Sequence
  Thymidine_Kinase_TK__Herpes_Simplex_Virus_1_(HSV-1)__ACB59255
auggcuucguaccccggccaucaacacgcgucugcguucgaccaggcugcgcguucucgcggccauagcaaccgacguacggcguugcgcccucgccggcagcaagaagccacggaaguccaccuggagcagaaaaugcccacgcuacugcggguuuauauagacgguccucacgggauggggaaaaccaccaccacgcaacugcugguggcccuggguucgcgcgacgauaucgucuacguacccgagccgaugacuuacuggcgggugcugggggcuuccgagacaaucgcgaacaucuacaccacacaacaccgccucgaccagggugagauaucggccggggacgcggcggugguaaugacaagcgcccagauaacaaugggcaugccuuaugccgugaccgacgccguucuggcuccucauaucgggggggaggcugggagcucacaugccccgcccccggcccucacccucaucuucgaccgccaucccaucgccgcccuccugugcuacccggccgcgcgguaccuuaugggcaacaugaccccccaggccgugcuggcguucgugguccucaucccgccgaccuugcccggcacaaacaucguguugggggcccuuccggaggacagacacaucgaccgccuggccaaacgccagcgccccggugagcggcuugaccuggcuaugcuggccgcgauucgccgcguuuacgggcuacuugccaauacggugcgguaucugcagugcggcgggucguggcgggaggauuggggacagcuuucggggacggccuugacgccccagggugccgagccccagagcaacgcgggcccacgaccccauaucggggaaacguuauuuacccuguuucgggcccccgaguugcuggcccccaacggcgaccuguacaacguguuugccugggccuuggacgucuuggccaaacgccuccgucccaugcacgucuuuauccuggauuacgaccaaucgcccgccggcugccgggacgcccugcugcaacuuaccuccgggaugguccagacccacgucaccacccccggcuccauaccgacgaucugcgaccuggcgcgcacguuugcccgggagaugggggaggcuaacuaa

SEQ ID NO: 6723 - RNA, 1131 nt, Artificial Sequence
  derived and/or modified sequence opt1 from Thymidine_Kinase_TK__Herpes_Simplex_Virus_1_(HSV-1)__ACB59255
auggccagcuaccccggccaccagcacgccuccgcguucgaccaggccgcccgcagccgggggcacuccaaccgccggaccgcccugcgcccgcggcgccagcaggaggccaccgaggugcaccucgagcagaagaugcccacgcugcugcgggucuacaucgacggcccccacgggaugggcaagaccaccaccacgcagcuccugguggcgcuggggagccgcgacgacaucguguacguccccgagccgaugaccuacuggcgggugcucggcgccuccgagaccaucgccaacaucuacaccacgcagcaccgccuggaccagggcgagaucagcgccggggacgcggccguggucaugaccuccgcccagaucaccaugggcaugcccuacgccgugaccgacgccgugcuggcgccccacaucgggggcgaggccgggagcucccacgcgcccccgcccgcccucacgcugaucuucgaccggcaccccaucgccgcccugcucugcuaccccgccgcccgcuaccugaugggcaacaugaccccgcaggccguccuggccuucguggugcucaucccgcccacccugcccggcaccaacaucguccugggggcgcuccccgaggaccggcacaucgaccgccuggccaagcggcagcgccccggcgagcggcuggaccucgccaugcuggccgccauccgccggguguacgggcugcucgcgaacacggugcgcuaccugcagugcggcggcagcuggcgggaggacugggggcagcuguccggcaccgcccucacgccccagggggccgagccccagagcaacgccggcccgcgcccccacaucggggagacccuguucacccuguuccgcgcgcccgagcuccuggcccccaacggcgaccuguacaacgucuucgccugggcccucgacgugcuggccaagcggcugcgcccgaugcacguguucauccucgacuacgaccagucccccgcgggcugccgggacgcccugcugcagcucaccagcgggaugguccagacccacgugaccacgcccggcuccauccccaccaucugcgaccuggcccgcaccuucgcccgggagaugggggaggccaacuga

SEQ ID NO: 6724 - RNA, 1131 nt, Artificial Sequence
  derived and/or modified sequence opt2 from Thymidine_Kinase_TK__Herpes_Simplex_Virus_1_(HSV-1)__ACB59255
auggccuccuaccccggccaccagcacgccuccgccuucgaccaggccgcccgcucccgcggccacuccaaccgccgcaccgcccuccgcccccgccgccagcaggaggccaccgagguccaccucgagcagaagaugcccacccuccuccgcgucuacaucgacggcccccacggcaugggcaagaccaccaccacccagcuccucgucgcccucggcucccgcgacgacaucgucuacguccccgagcccaugaccuacuggcgcguccucggcgccuccgagaccaucgccaacaucuacaccacccagcaccgccucgaccagggcgagaucuccgccggcgacgccgccgucgucaugaccuccgcccagaucaccaugggcaugcccuacgccgucaccgacgccguccucgccccccacaucggcggcgaggccggcuccucccacgcccccccccccgcccucacccucaucuucgaccgccaccccaucgccgcccuccucugcuaccccgccgcccgcuaccucaugggcaacaugaccccccaggccguccucgccuucgucguccucaucccccccacccuccccggcaccaacaucguccucggcgcccuccccgaggaccgccacaucgaccgccucgccaagcgccagcgccccggcgagcgccucgaccucgccaugcucgccgccauccgccgcgucuacggccuccucgccaacaccguccgcuaccuccagugcggcggcuccuggcgcgaggacuggggccagcucuccggcaccgcccucaccccccagggcgccgagccccaguccaacgccggcccccgcccccacaucggcgagacccucuucacccucuuccgcgcccccgagcuccucgcccccaacggcgaccucuacaacgucuucgccugggcccucgacguccucgccaagcgccuccgccccaugcacgucuucauccucgacuacgaccagucccccgccggcugccgcgacgcccuccuccagcucaccuccggcaugguccagacccacgucaccacccccggcuccauccccaccaucugcgaccucgcccgcaccuucgcccgcgagaugggcgaggccaacuga

SEQ ID NO: 6725 - RNA, 1131 nt, Artificial Sequence
  derived and/or modified sequence opt3 from Thymidine_Kinase_TK__Herpes_Simplex_Virus_1_(HSV-1)__ACB59255
auggccagcuaccccggccaccagcaugcuuccgcauucgaccaagccgcgagaucuagggggcacucaaaccggcgcaccgcucugcgaccucguagacagcaggaggccacagaagugcaucucgagcagaagaugccaacucuucugagggucuauaucgauggaccgcacgguaugggcaaaacgaccacaacucaauuguuaguugcacuggggagucgggacgauauuguguacguacccgaaccuaugaccuauuggcgcgugcuaggagccagcgagacaauagcuaauaucuacaccacucagcauagacucgaccagggcgaaauuuccgccggugaugccgcugucgugaugacaucugcccagaucaccauggggaugccauaugcgguuacggacgcagugcuggcaccccacauuggaggcgaggcuggcucgucacacgccccuccacccgcacuuacucugaucuuugauaggcauccuauagcugccuugcucugcuacccagcggcccgguaucugauggggaacaugaccccgcaagcaguccuggcuuucgugguacucauucccccuacauuaccaggaacuaauaucguucugggugcccuucccgaggaccgccacaucgaucgauuggcuaagagacagaggccuggcgaacggcuggaccuagccaugcucgcagccauucgucgcguguacgggcugcuugcuaacaccgucagauaccugcaguguggaggcagcuggagggaggauuggggucaguugagugggacagcgcucaccccacaaggagcagaaccccaguccaaugccggcccgcggccucauaucggcgagacgcuguuuacuuuauuccgagcucccgagcugcucgccccaaacggggaccuuuauaauguguuugcaugggcccuggauguguuggcuaaacgccuaagaccuaugcacgucuucauacuggacuacgaccagucucccgccggaugcagggaugcacuccugcaacuuacaagcgguaugguucagacccacgugacuacaccaggcuccauucccaccaucugugaccuggcgcggacguuugcucgcgaaaugggggaggccaacuga

SEQ ID NO: 6726 - RNA, 1131 nt, Artificial Sequence
  derived and/or modified sequence opt4 from Thymidine_Kinase_TK__Herpes_Simplex_Virus_1_(HSV-1)__ACB59255
auggccagcuaccccggccaccagcacgccagcgccuucgaccaggccgccagaagcagaggccacagcaacagaagaaccgcccugagacccagaagacagcaggaggccaccgaggugcaccuggagcagaagaugcccacccugcugagaguguacaucgacggcccccacggcaugggcaagaccaccaccacccagcugcugguggcccugggcagcagagacgacaucguguacgugcccgagcccaugaccuacuggagagugcugggcgccagcgagaccaucgccaacaucuacaccacccagcacagacuggaccagggcgagaucagcgccggcgacgccgccguggugaugaccagcgcccagaucaccaugggcaugcccuacgccgugaccgacgccgugcuggccccccacaucggcggcgaggccggcagcagccacgcccccccccccgcccugacccugaucuucgacagacaccccaucgccgcccugcugugcuaccccgccgccagauaccugaugggcaacaugaccccccaggccgugcuggccuucguggugcugaucccccccacccugcccggcaccaacaucgugcugggcgcccugcccgaggacagacacaucgacagacuggccaagagacagagacccggcgagagacuggaccuggccaugcuggccgccaucagaagaguguacggccugcuggccaacaccgugagauaccugcagugcggcggcagcuggagagaggacuggggccagcugagcggcaccgcccugaccccccagggcgccgagccccagagcaacgccggccccagaccccacaucggcgagacccuguucacccuguucagagcccccgagcugcuggcccccaacggcgaccuguacaacguguucgccugggcccuggacgugcuggccaagagacugagacccaugcacguguucauccuggacuacgaccagagccccgccggcugcagagacgcccugcugcagcugaccagcggcauggugcagacccacgugaccacccccggcagcauccccaccaucugcgaccuggccagaaccuucgccagagagaugggcgaggccaacuga

SEQ ID NO: 6727 - RNA, 1131 nt, Artificial Sequence
  derived and/or modified sequence opt5 from Thymidine_Kinase_TK__Herpes_Simplex_Virus_1_(HSV-1)__ACB59255
auggccagcuaccccggccaccagcaugcuuccgccuucgaccaagcggcuagaucucgggggcacagcaaccgcagaaccgcccugcggccucgcagacagcaggaggccacagaagugcaucucgagcagaagaugccgacgcugcuucgggucuauaucgauggaccccacggcauggggaaaaccacaaccacacaacugcucguugcucugggaucccgcgacgauauuguguacgugccugaacccaugaccuauuggagaguccuuggcgccucugagacaaucgcuaauauuuacaccacgcagcaucggcuggaccagggggaaaucagcgccggagaugcggccgugguuaugaccuccgcucagauuacaaugggcaugccuuaugccgugaccgacgcuguccucgcgccccacaucggcggggaggccggaucuagccacgccccuccgcccgcucugacacugaucuuugaucgccauccuauugccgcucuccugugcuaccccgccgccagauaucuuaugggcaacaugaccccucaagcugugcuggcguucguugugcucauucccccgacgcugccugggacaaauaucguccuuggagcccugcccgaggaccggcacaucgaucgccucgcuaagagacagcggccuggcgaacgccuggaccuggccaugcucgccgcuauuagacggguguacgggcugcuugccaacaccgugagauaccugcaguguggaggcuccuggcgcgaggauuggggccagcucagcgggacagcgcugacaccccaaggagcugaaccccagucuaaugccggcccucggccgcauaucggggagacccuuuuuacccuguucagagcccccgagcuccuggcuccuaacggagaccuguauaaugucuuugccugggcucucgauguucuggccaaacgccuucggcccaugcacguguucauucuggacuacgaccaguccccugcgggcugcagagaugcccuccugcaacuuacgagcgggauggugcagacccacgucacaacccccggaucuaucccgacaaucugugaccuggcucgcaccuuugcccgggaaaugggcgaggcuaacuga

SEQ ID NO: 6728 - RNA, 1131 nt, Artificial Sequence
  derived and/or modified sequence opt6 from Thymidine_Kinase_TK__Herpes_Simplex_Virus_1_(HSV-1)__ACB59255
auggcaucauacccaggacaccaacacgccagugcuuuugaucaagcugcaagaaguagaggacauucaaauagaagaacugcauuaagaccaagaagacaacaagaagcaacagaaguacauuuagaacaaaaaaugccuacacuauuaagaguauauaucgauggaccucauggaauggguaaaacuacuacaacacaauuacuaguagcucuaggcaguagagaugacauuguauauguaccagaaccuaugacauauuggagaguacuaggagcaucagaaacaauagcaaacauuuauacaacacaacauagacucgaucaaggagaaauaagcgcaggcgaugcagcaguaguaaugacaucugcacaaauuacuaugggaaugcccuaugccguaacagacgcuguacuagccccucauauugguggagaagcgggaagcucacaugcaccaccaccagcacucaccuuaauauuugacagacauccaauugcagcauuauuauguuauccagcagcaagauaucuaaugggaaauaugacuccacaagcaguauuagcauucguuguacuaauaccuccaacauuaccaggaacaaacauaguuuuaggagcauuaccugaagauagacacauagauagauuagcaaaaagacaaagaccaggagaacgacuagaccuagcaaugcuagcagcaauaagaagaguauaugguuuauuagcaaauacaguacgauaucuucaaugugguggaucauggagagaagauuggggacaauuaaguggaaccgcauuaacaccacaaggagcagaaccacaaucaaacgcaggaccaagaccacacauaggcgaaacauuauucacauuauuuagagcaccagaacuauuagccccaaauggagaucuguauaaugucuucgcuugggcauuagauguauuagcaaaaagauuaagaccuaugcauguauuuauauuagacuaugaucaaaguccagcuggauguagagacgcauuauuacaauuaacaucaggaaugguacaaacucauguaacaacaccuggaaguauacccacaauaugugacuuagccagaacauuugcacgagaaaugggagaagccaauuaa

SEQ ID NO: 6729 - protein, 375 aa, Artificial Sequence
  Thymidine_Kinase_TK__Herpes_Simplex_Virus_1_(HSV-1)__B2CPQ0
MASYPCHQHASAFDQAARSRGHNNRRTALRPRRQQKATEVRLEQKMPTLLRVYIDGPHGMGKTTTTQLLVALGSRDDIVYVPEPMTYWRVLGASETIANIYTTQHRLDQGEISAGDAAVVMTSAQITMGMPYAVTDAVLAPHIGGEAGSSHAPPPALTLIFDRHPIAALLCYPAARYLMGSMTPQAVLAFVALPPTLPGTNIVLGALPEDRHIDRLAKRQRPGERLDLAMLAAIRRVYELLANTVRYLQGGGSWREDWGQLSGTAVPPQGAEPQSNAGPQPHIGDTLFTLFRAPELLAPNGDLYNVFAWALDVLAKRLRPMHVFILDYDQSPAGCRDALLQLTSGMVQTHVTTPGSIPTICDLARTFAREMGEAN

SEQ ID NO: 6730 - RNA, 1128 nt, Artificial Sequence
  Thymidine_Kinase_TK__Herpes_Simplex_Virus_1_(HSV-1)__ACB59256
auggcuucguaccccugccaucaacacgcgucugcguucgaccaggcugcgcguucucgcggccauaacaaccgacguacggcguugcgcccucgccggcagcaaaaagccacggaaguccgccuggagcagaaaaugcccacgcuacugcggguuuauauagacgguccccacgggauggggaaaaccaccaccacgcaacugcugguggcccuggguucgcgcgacgauaucgucuacguacccgagccgaugacuuacuggcgggugcugggggcuuccgagacaaucgcgaacaucuacaccacacaacaccgccucgaccagggugagauaucggccggggacgcggcggugguaaugacaagcgcccagauaacaaugggcaugccuuaugccgugaccgacgccguucuggcuccucauaucgggggggaggcugggagcucacaugccccgcccccggcccucacccucaucuucgaccgccaucccaucgccgcccuccuguguuacccggccgcgcgauaccuuaugggcagcaugaccccccaggccgugcuggcguucguggcccucccgccgaccuugcccggcacaaacaucguguugggggcccuuccggaggacagacacaucgaccgccuggccaaacgccagcgccccggcgagcggcuugaccuggcuaugcuggccgcgauucgccgcguuuacgagcugcuugccaauacggugcgguaucugcagggcggcgggucguggcgggaggauuggggacagcuuucggggacggccgugccgccccagggugccgagccccagagcaacgcgggcccacaaccccauaucggggacacguuauuuacccuguuucgggcccccgaguugcuggcccccaacggcgaccuguauaacguguuugccugggccuuggacgucuuggccaaacgccuccgucccaugcacgucuuuauccuggauuacgaccaaucgcccgccggcugccgggacgcccugcugcaacuuaccuccgggaugguccagacccacgucaccacccccggcuccauaccgacgaucugcgaccuggcgcgcacguuugcccgggagaugggggaggcuaacuaa

SEQ ID NO: 6731 - RNA, 1128 nt, Artificial Sequence
  derived and/or modified sequence opt1 from Thymidine_Kinase_TK__Herpes_Simplex_Virus_1_(HSV-1)__ACB59256
auggccagcuaccccugccaccagcacgccuccgcguucgaccaggccgcccgcagccggggccacaacaaccgccggaccgcccugcgcccgcggcgccagcagaaggccaccgaggugcggcucgagcagaagaugcccacgcugcugcgcgucuacaucgacgggccccacggcauggggaagaccaccaccacgcagcuccugguggcgcugggcucccgggacgacaucguguacguccccgagccgaugaccuacuggcgcgugcucggggccagcgagaccaucgccaacaucuacaccacgcagcaccggcuggaccagggcgagaucuccgccggcgacgcggccguggucaugaccagcgcccagaucaccauggggaugcccuacgccgugaccgacgccgugcuggcgccccacaucggcggggaggccggcuccagccacgcgcccccgcccgcccucacgcugaucuucgaccgccaccccaucgccgcccugcucugcuaccccgccgcccgguaccugaugggguccaugaccccgcaggccguccuggccuucguggcgcucccgcccacccugcccggcaccaacaucgugcugggcgcccuccccgaggaccgccacaucgaccggcuggccaagcgccagcggcccggggagcgccuggaccucgccaugcuggccgcgauccggcgcgucuacgagcugcucgccaacacggugcgguaccugcagggcgggggcagcuggcgcgaggacuggggccagcuguccgggaccgccgugccgccccagggcgccgagccccagagcaacgcggggccccagccccacaucggcgacacccucuucacccuguuccgcgcccccgagcugcucgccccgaacggggaccuguacaacgucuucgccugggcccuggacgugcucgcgaagcggcugcgccccaugcacguguucauccuggacuacgaccagucccccgccggcugccgggacgcccuccugcagcugacgagcggcaugguccagacccacgugaccacccccggguccaucccgacgaucugcgaccucgcccgcaccuucgcccgggagaugggcgaggcgaacuga

SEQ ID NO: 6732 - RNA, 1128 nt, Artificial Sequence
  derived and/or modified sequence opt2 from Thymidine_Kinase_TK__Herpes_Simplex_Virus_1_(HSV-1)__ACB59256
auggccuccuaccccugccaccagcacgccuccgccuucgaccaggccgcccgcucccgcggccacaacaaccgccgcaccgcccuccgcccccgccgccagcagaaggccaccgagguccgccucgagcagaagaugcccacccuccuccgcgucuacaucgacggcccccacggcaugggcaagaccaccaccacccagcuccucgucgcccucggcucccgcgacgacaucgucuacguccccgagcccaugaccuacuggcgcguccucggcgccuccgagaccaucgccaacaucuacaccacccagcaccgccucgaccagggcgagaucuccgccggcgacgccgccgucgucaugaccuccgcccagaucaccaugggcaugcccuacgccgucaccgacgccguccucgccccccacaucggcggcgaggccggcuccucccacgcccccccccccgcccucacccucaucuucgaccgccaccccaucgccgcccuccucugcuaccccgccgcccgcuaccucaugggcuccaugaccccccaggccguccucgccuucgucgcccucccccccacccuccccggcaccaacaucguccucggcgcccuccccgaggaccgccacaucgaccgccucgccaagcgccagcgccccggcgagcgccucgaccucgccaugcucgccgccauccgccgcgucuacgagcuccucgccaacaccguccgcuaccuccagggcggcggcuccuggcgcgaggacuggggccagcucuccggcaccgccguccccccccagggcgccgagccccaguccaacgccggcccccagccccacaucggcgacacccucuucacccucuuccgcgcccccgagcuccucgcccccaacggcgaccucuacaacgucuucgccugggcccucgacguccucgccaagcgccuccgccccaugcacgucuucauccucgacuacgaccagucccccgccggcugccgcgacgcccuccuccagcucaccuccggcaugguccagacccacgucaccacccccggcuccauccccaccaucugcgaccucgcccgcaccuucgcccgcgagaugggcgaggccaacuga

SEQ ID NO: 6733 - RNA, 1128 nt, Artificial Sequence
  derived and/or modified sequence opt3 from Thymidine_Kinase_TK__Herpes_Simplex_Virus_1_(HSV-1)__ACB59256
auggccagcuaccccugccaccagcaugcuuccgcauucgaccaagccgcgagaucuaggggccacaacaaucggcgcaccgcucugcgaccucguagacagcagaaggccacagaggugaggcucgaacagaaaaugccaacucuucugcgggucuauaucgaugggccgcauggaauggguaagacgaccacaacucaauuguuaguugcacugggcucacgcgacgauauuguguacguacccgagccuaugaccuauuggagagugcuaggggccagugaaacaauagcuaacaucuacaccacucagcacaggcucgaccagggagagauuagcgcaggcgaugccgcugucgugaugacauccgcccagaucaccauggguaugccauaugcgguuacggacgcagugcuggcuccccauauugggggagaagcugggucuucgcacgccccuccacccgcacuuacucugaucuuugaucggcacccuauagcugccuugcucuguuacccagcggcccgcuaucugaugggcucaaugaccccgcaagcaguccuggcuuucguggccuuacccccuacacucccaggcacuaauaucguacugggagcccuucccgaggaccgacauauugauagauuggccaaaaggcagcggccuggugagcgucuggaccuagcaaugcucgccgcuauccgcagaguuuacgaacugcuugcgaacaccgugagguaccugcagggcgggggaagcuggcgggaggauuggggccaguugagugguacagcagucccaccccaaggggccgaaccgcaguccaaugcuggaccucagccccacauuggcgacacccucuuuacgcuguuccgagccccagaguuacuggcaccuaacggcgaucucuauaauguguuugccugggcucuugacgugcuggccaagcgcuugagacccaugcaugucuucauccuagacuacgaucaaucuccagcagggugcagggacgcgcugcuccagcugacuagcggaaugguucagacacacgugaccacucccgguuccauaccuacaauuugugaucuugcucggaccuuugcccgcgagaugggcgaagcaaacuga

SEQ ID NO: 6734 - RNA, 1128 nt, Artificial Sequence
  derived and/or modified sequence opt4 from Thymidine_Kinase_TK__Herpes_Simplex_Virus_1_(HSV-1)__ACB59256
auggccagcuaccccugccaccagcacgccagcgccuucgaccaggccgccagaagcagaggccacaacaacagaagaaccgcccugagacccagaagacagcagaaggccaccgaggugagacuggagcagaagaugcccacccugcugagaguguacaucgacggcccccacggcaugggcaagaccaccaccacccagcugcugguggcccugggcagcagagacgacaucguguacgugcccgagcccaugaccuacuggagagugcugggcgccagcgagaccaucgccaacaucuacaccacccagcacagacuggaccagggcgagaucagcgccggcgacgccgccguggugaugaccagcgcccagaucaccaugggcaugcccuacgccgugaccgacgccgugcuggccccccacaucggcggcgaggccggcagcagccacgcccccccccccgcccugacccugaucuucgacagacaccccaucgccgcccugcugugcuaccccgccgccagauaccugaugggcagcaugaccccccaggccgugcuggccuucguggcccugccccccacccugcccggcaccaacaucgugcugggcgcccugcccgaggacagacacaucgacagacuggccaagagacagagacccggcgagagacuggaccuggccaugcuggccgccaucagaagaguguacgagcugcuggccaacaccgugagauaccugcagggcggcggcagcuggagagaggacuggggccagcugagcggcaccgccgugcccccccagggcgccgagccccagagcaacgccggcccccagccccacaucggcgacacccuguucacccuguucagagcccccgagcugcuggcccccaacggcgaccuguacaacguguucgccugggcccuggacgugcuggccaagagacugagacccaugcacguguucauccuggacuacgaccagagccccgccggcugcagagacgcccugcugcagcugaccagcggcauggugcagacccacgugaccacccccggcagcauccccaccaucugcgaccuggccagaaccuucgccagagagaugggcgaggccaacuga

SEQ ID NO: 6735 - RNA, 1128 nt, Artificial Sequence
  derived and/or modified sequence opt5 from Thymidine_Kinase_TK__Herpes_Simplex_Virus_1_(HSV-1)__ACB59256
auggccagcuaccccugccaccagcaugcuuccgccuucgaccaagcggcuagaucucggggccacaacaaucgcagaaccgcccugcggccucgcagacagcagaaggccacagaggugcggcucgaacagaaaaugccgacgcugcuucgcgucuauaucgaugggccccauggaaugggcaagaccacaaccacacaacugcucguugcucuggggagcagagacgauauuguguacgugccugagcccaugaccuauuggcggguccuuggagccuccgaaacaaucgcuaacauuuacaccacgcagcaccgccuggaccagggcgagaucucugccggggaugcggccgugguuaugaccagcgcucagauuacaaugggaaugccuuaugccgugaccgacgcuguccucgcgccccauaucggcggcgaagccggguccucucacgccccuccgcccgcucugacacugaucuuugauagacacccuauugccgcucuccuguguuaccccgccgcccgguaucuuaugggaagcaugaccccucaagcugugcuggcguucguugcccugcccccgacgcucccuggcacaaauaucgugcuuggggcucugcccgaggaccgccauauugauagacucgccaaacggcagcgcccuggagagagacuggaccuggccaugcucgcugccauccggagagucuacgaacugcuugcgaacaccgugcgcuaccugcagggcgggggauccuggcgggaggauuggggccagcucagcggcacagcugugccuccccaaggggccgaaccccagucuaaugccggaccgcagccccacauuggcgacacccuguuuacccuuuucagagcuccugagcugcucgcccccaacggggaucuguauaaugucuuugcuugggcccuggacguucucgcgaagcgccugcggccuaugcauguguucauccuugacuacgaucaaucccccgccggaugcagagacgcucugcuccagcugacaagcggcauggugcagacgcacgucaccacaccggggucuauuccuaccaucugugaucuugcccgcacauuugcucgggagaugggagaagccaacuga

SEQ ID NO: 6736 - RNA, 1128 nt, Artificial Sequence
  derived and/or modified sequence opt6 from Thymidine_Kinase_TK__Herpes_Simplex_Virus_1_(HSV-1)__ACB59256
auggcuucauauccaugucaucaacaugcauccgcauuugaucaagcagcaagaucaagaggacauaauaaucgaagaacagcccuuagaccaagaagacaacaaaaagcuacagaaguuagauuagaacaaaaaaugccaacauuauuaagaguauauauagauggaccacaugguauggguaaaacuacaacaacacaauuacucguugcauuaggaucaagggacgacauaguauacguaccagaaccaaugacauacuggagaguacucggcgcuagugaaacgauugcuaauauauauacaacacaacacagauuagaccaaggagaaauaucagcaggagaugcagcaguaguuaugacaucagcucaaauaacaauggguaugccauaugcaguaacagaugcgguccuagcaccacauauuggcggcgaagcuggaucaucacacgcaccaccaccagcauuaacauuaauauuugauagacauccaauagccgcauuauuauguuauccagcagcuagauaucuaaugggauccaugacaccacaagcaguauuagcuuuuguagcauuaccaccuacuuuaccagggacaaauauaguucuaggugcuuuaccagaagauagacauauagauagacuagcaaaaagacaacgaccaggagaaagauuagauuuagcaauguuagcagcaauaagaagaguuuacgaacuauuagcaaauacaguuagauaucuacaaggaggaggaucauggagagaagauuggggacaauuaucuggaacagcaguaccaccacaaggagcagaaccacaauccaaugcaggaccucaaccacauauaggagauacacuauuuacauuauucagagcaccagaauuauuagcaccaaauggugaucuauauaauguuuuugcaugggcucuagauguauuagcaaaaagauuaagaccaaugcauguauuuauauuagauuaugaucaaucaccagcugguuguagagaugcacuacuacaauuaacaucagguaugguucaaacucacguuaccacaccaggcaguauaccaacaauaugugaucuagcaagaacauuugcacgagaaaugggagaagcaaauuaa

SEQ ID NO: 6737 - protein, 227 aa, Artificial Sequence
  Thymidine_Kinase_TK__Herpes_Simplex_Virus_1_(HSV-1)__B2CPQ2
MASYPGHQHASAFDQAARSRGHSNRRTALRPRRQQEATEVRPEQKMPTLLRVYIDGPHGMGKTTTTQLLVALGSRDDIVYVPEPMTYWQVLGASETIANIYTTQHRLDQGEISAGDAAVVMTSAQITMGMPYAVTDAVLAPHIGGGGWELTCPAPGPHPHLRPPSHRRPPVLPGRAIPYGQHDPPGRAGVRGPHPADLARHKHRVGGPSGGQTHRPPGQTPAPRRAA

SEQ ID NO: 6738 - RNA, 684 nt, Artificial Sequence
  Thymidine_Kinase_TK__Herpes_Simplex_Virus_1_(HSV-1)__ACB59258
auggcuucguaccccggccaucagcacgcgucugcguucgaccaggcugcgcguucucgcggccauagcaaccgacguacggcguugcgcccucgccggcagcaagaagccacggaaguccgcccggagcagaaaaugcccacgcuacugcggguuuauauagacgguccccacgggauggggaaaaccaccaccacgcaacugcugguggcccuggguucgcgcgacgauaucgucuacguacccgagccgaugacuuacuggcaggugcugggggcuuccgagacaaucgcgaacaucuacaccacacaacaccgccucgaccagggugagauaucggccggggacgcggcggugguaaugacaagcgcccagauaacaaugggcaugccuuaugccgugaccgacgccguucuggcuccucauaucggggggggaggcugggagcucacaugccccgcccccggcccucacccucaucuucgaccgccaucccaucgccgcccuccuguguuacccggccgcgcgauaccuuaugggcagcaugaccccccaggccgugcuggcguucguggcccucaucccgccgaccuugcccggcacaaacaucguguugggggcccuuccggaggacagacacaucgaccgccuggccaaacgccagcgccccggcgagcggcuuga

SEQ ID NO: 6739 - RNA, 684 nt, Artificial Sequence
  derived and/or modified sequence opt1 from Thymidine_Kinase_TK__Herpes_Simplex_Virus_1_(HSV-1)__ACB59258
auggccagcuaccccggccaccagcacgccuccgccuucgaccaggccgcccgcagccgggggcacuccaaccgccggaccgcccugcgcccgcggcgccagcaggaggccaccgaggugcggcccgagcagaagaugcccacgcuccugcgcguguacaucgacggcccccacgggaugggcaagaccaccaccacgcagcugcucguggcgcuggggagccgggacgacaucguguacgucccggagcccaugaccuacuggcagguccugggcgccuccgagaccaucgccaacaucuacaccacgcagcaccgccucgaccagggcgagaucagcgccggggacgcggccguggugaugaccuccgcccagaucaccaugggcaugcccuacgccgugaccgacgccgugcuggcgccccacaucgggggcgggggcugggagcugacgugcccggcccccggcccccacccccaccuccggccgcccagccaccgccggccgcccguccugcccgggcgcgccauccccuacggccagcacgacccgcccgggcgggccggcgugcgcggcccccaccccgccgaccuggcgcggcacaagcaccgcgucgggggccccuccgggggccagacccaccggcccccggggcagacccccgcgccccgccgggccgccuga

SEQ ID NO: 6740 - RNA, 684 nt, Artificial Sequence
  derived and/or modified sequence opt2 from Thymidine_Kinase_TK__Herpes_Simplex_Virus_1_(HSV-1)__ACB59258
auggccuccuaccccggccaccagcacgccuccgccuucgaccaggccgcccgcucccgcggccacuccaaccgccgcaccgcccuccgcccccgccgccagcaggaggccaccgagguccgccccgagcagaagaugcccacccuccuccgcgucuacaucgacggcccccacggcaugggcaagaccaccaccacccagcuccucgucgcccucggcucccgcgacgacaucgucuacguccccgagcccaugaccuacuggcagguccucggcgccuccgagaccaucgccaacaucuacaccacccagcaccgccucgaccagggcgagaucuccgccggcgacgccgccgucgucaugaccuccgcccagaucaccaugggcaugcccuacgccgucaccgacgccguccucgccccccacaucggcggcggcggcugggagcucaccugccccgcccccggcccccacccccaccuccgcccccccucccaccgccgcccccccguccuccccggccgcgccauccccuacggccagcacgacccccccggccgcgccggcguccgcggcccccaccccgccgaccucgcccgccacaagcaccgcgucggcggccccuccggcggccagacccaccgcccccccggccagacccccgccccccgccgcgccgccuga

SEQ ID NO: 6741 - RNA, 684 nt, Artificial Sequence
  derived and/or modified sequence opt3 from Thymidine_Kinase_TK__Herpes_Simplex_Virus_1_(HSV-1)__ACB59258
auggccagcuaccccggccaccagcaugcuuccgcauucgaccaagccgcgagaucuagggggcacucaaaccggcgcaccgcucugcgaccucguagacagcaggaggccacagaagugaggccagagcagaagaugccgacucuccuucgggucuauaucgauggaccccaugguaugggcaaaacgaccacaacucaacuguugguugcauuagggagucgcgacgauauuguguacguaccugaaccaaugaccuauuggcaagugcugggagccagcgagacaauagcuaauaucuacaccacucagcacagacuagaccagggcgaaauuuccgccggugaugcagcugucgugaugacaucugcccagaucaccauggggaugcccuaugcgguuacggacgcagugcucgccccucauauuggaggcggcgggugggagcugacuugcccagcucccggaccucacccacaccuuaggccgcccucgcaucggcgcccuccaguccugcccggucgagccaucccuuacggccagcacgauccacccgggagagcaggagugaggggcccgcauccugcugacuuggcccggcacaagcaccguguaggugggcccucaggaggccagacccaucgcccaccuggccagacacccgcgccaagaagggccgcauga

SEQ ID NO: 6742 - RNA, 684 nt, Artificial Sequence
  derived and/or modified sequence opt4 from Thymidine_Kinase_TK__Herpes_Simplex_Virus_1_(HSV-1)__ACB59258
auggccagcuaccccggccaccagcacgccagcgccuucgaccaggccgccagaagcagaggccacagcaacagaagaaccgcccugagacccagaagacagcaggaggccaccgaggugagacccgagcagaagaugcccacccugcugagaguguacaucgacggcccccacggcaugggcaagaccaccaccacccagcugcugguggcccugggcagcagagacgacaucguguacgugcccgagcccaugaccuacuggcaggugcugggcgccagcgagaccaucgccaacaucuacaccacccagcacagacuggaccagggcgagaucagcgccggcgacgccgccguggugaugaccagcgcccagaucaccaugggcaugcccuacgccgugaccgacgccgugcuggccccccacaucggcggcggcggcugggagcugaccugccccgcccccggcccccacccccaccugagaccccccagccacagaagaccccccgugcugcccggcagagccauccccuacggccagcacgacccccccggcagagccggcgugagaggcccccaccccgccgaccuggccagacacaagcacagagugggcggccccagcggcggccagacccacagaccccccggccagacccccgcccccagaagagccgccuga

SEQ ID NO: 6743 - RNA, 684 nt, Artificial Sequence
  derived and/or modified sequence opt5 from Thymidine_Kinase_TK__Herpes_Simplex_Virus_1_(HSV-1)__ACB59258
auggccagcuaccccggccaccagcaugcuuccgccuucgaccaagcggcuagaucucgggggcacagcaaccgcagaaccgcccugcggccucgcagacagcaggaggccacagaagugcggccggagcagaagaugcccacgcuccugcgcgucuauaucgauggaccucauggcauggggaaaaccacaaccacacaacuucugguugcucucggauccagagacgauauuguguacgugcccgaaccuaugaccuauuggcagguccugggcgccucugagacaaucgcuaauauuuacaccacgcagcaccggcuugaccagggggaaaucagcgccggagaugcggccgugguuaugaccuccgcucaaauuacaaugggcaugcccuaugccgugaccgacgcuguccuggccccucauaucggcgggggaggcugggagcucacaugcccggcgcccgggccucacccccaucugcgcccucccucucacagacggccgccugugcugcccggacgcgccaucccuuacggccagcacgauccucccgggagagcuggaguucggggcccccauccggccgaccucgcucgccacaagcacagagugggcgggcccagcggaggccagacccaucggccucccgggcagacgccugcccccagacgcgccgcuuga

SEQ ID NO: 6744 - RNA, 684 nt, Artificial Sequence
  derived and/or modified sequence opt6 from Thymidine_Kinase_TK__Herpes_Simplex_Virus_1_(HSV-1)__ACB59258
auggcaucauauccaggacaucaacaugcaagcgcauuugaucaagcagcaagaagcagaggacauucaaaucgaagaacagcuuuaagaccaagaagacaacaagaagcaacagaaguaagaccagaacaaaaaaugccaacauuacuaagaguuuauauagaugguccccauggaauggguaaaacaacuacuacacaauuauuaguagcauuaggaucaagagaugauauaguauacguuccagaaccaaugacauauuggcaaguauuaggagcaucagaaacaaucgcaaauauauacaccacacaacauagauuagaucaaggagaaauaagugcaggugaugcagcaguaguuaugacaagugcucaaauaacuaugggaaugccauaugcaguaacagaugcaguauuagcaccacauauaggaggaggaggaugggaauuaacauguccagcaccaggaccacauccacauuuaagaccacccucucauagaagaccaccaguucuaccaggaagagcaauaccauauggacaacaugacccaccaggaagagcaggaguaagaggaccacauccagcagauuuagcacgacauaaacacagaguuggaggaccaucaggaggacaaacucaucgcccaccuggacaaacaccagcaccaagaagagcagcauaa

SEQ ID NO: 6745 - protein, 227 aa, Artificial Sequence
  Thymidine_Kinase_TK__Herpes_Simplex_Virus_1_(HSV-1)__B2CPQ3
MASYPGHQHASAFDQAARSRGHSNRRTALRPRRQQEATEVRPEQKMPTLLRVYIDGPHGMGKTTTTQLLVALGSRDDIVYVPEPMTYWRVLGASETIANIYTTQHRLDQGEISAGDAAVVMTSAQITMGMPYAVTDAVLAPHIGGGGWELTCPAPGPHPHLRPPSHRRPPVLPGRAIPYGQHDPPGRAGVRGPHPADLARHKHRVGGPSGGQTHRPPGQTPAPRRAA

SEQ ID NO: 6746 - RNA, 684 nt, Artificial Sequence
  Thymidine_Kinase_TK__Herpes_Simplex_Virus_1_(HSV-1)__ACB59259
auggcuucguaccccggccaucaacacgcgucugcguucgaccaggcugcgcguucucgcggccauagcaaccgacguacggcguugcgcccucgccggcagcaagaagccacggaaguccgcccggagcagaaaaugcccacgcuacugcggguuuauauagacgguccccacgggauggggaaaaccaccaccacgcaacugcugguggcccuggguucgcgcgacgauaucgucuacguacccgagccgaugacuuacuggcgggugcugggggcuuccgagacaaucgcgaacaucuacaccacacaacaccgccucgaccagggugagauaucggccggggacgcggcggugguaaugacaagcgcccagauaacaaugggcaugccuuaugccgugaccgacgccguucuggcuccucauaucggggggggaggcugggagcucacaugccccgcccccggcccucacccucaucuucgaccgccaucccaucgccgcccuccuguguuacccggccgcgcgauaccuuaugggcagcaugaccccccaggccgugcuggcguucguggcccucaucccgccgaccuugcccggcacaaacaucguguugggggcccuuccggaggacagacacaucgaccgccuggccaaacgccagcgccccggcgagcggcuuga

SEQ ID NO: 6747 - RNA, 684 nt, Artificial Sequence
  derived and/or modified sequence opt1 from Thymidine_Kinase_TK__Herpes_Simplex_Virus_1_(HSV-1)__ACB59259
auggccagcuaccccggccaccagcacgccuccgccuucgaccaggccgcccgcagccgggggcacuccaaccgccggaccgcccugcgcccgcggcgccagcaggaggccaccgaggugcggcccgagcagaagaugcccacgcuccugcgcguguacaucgacggcccccacgggaugggcaagaccaccaccacgcagcugcucguggcgcuggggagccgggacgacaucguguacgucccggagcccaugaccuacuggcgcgugcugggcgccuccgagaccaucgccaacaucuacaccacgcagcaccggcucgaccagggcgagaucagcgccggggacgcggccguggucaugaccuccgcccagaucaccaugggcaugcccuacgccgugaccgacgccgugcuggcgccccacaucgggggcgggggcugggagcugacgugcccggcccccggcccccacccccaccuccgcccgcccagccaccggcgcccgcccguccugcccgggcgggccauccccuacggccagcacgacccgcccgggcgcgccggcgugcggggcccccaccccgccgaccuggcgcgccacaagcaccgggucgggggccccuccgggggccagacccaccggcccccggggcagacccccgcgccccgccgcgccgccuga

SEQ ID NO: 6748 - RNA, 684 nt, Artificial Sequence
  derived and/or modified sequence opt2 from Thymidine_Kinase_TK__Herpes_Simplex_Virus_1_(HSV-1)__ACB59259
auggccuccuaccccggccaccagcacgccuccgccuucgaccaggccgcccgcucccgcggccacuccaaccgccgcaccgcccuccgcccccgccgccagcaggaggccaccgagguccgccccgagcagaagaugcccacccuccuccgcgucuacaucgacggcccccacggcaugggcaagaccaccaccacccagcuccucgucgcccucggcucccgcgacgacaucgucuacguccccgagcccaugaccuacuggcgcguccucggcgccuccgagaccaucgccaacaucuacaccacccagcaccgccucgaccagggcgagaucuccgccggcgacgccgccgucgucaugaccuccgcccagaucaccaugggcaugcccuacgccgucaccgacgccguccucgccccccacaucggcggcggcggcugggagcucaccugccccgcccccggcccccacccccaccuccgcccccccucccaccgccgcccccccguccuccccggccgcgccauccccuacggccagcacgacccccccggccgcgccggcguccgcggcccccaccccgccgaccucgcccgccacaagcaccgcgucggcggccccuccggcggccagacccaccgcccccccggccagacccccgccccccgccgcgccgccuga

SEQ ID NO: 6749 - RNA, 684 nt, Artificial Sequence
  derived and/or modified sequence opt3 from Thymidine_Kinase_TK__Herpes_Simplex_Virus_1_(HSV-1)__ACB59259
auggccagcuaccccggccaccagcaugcuuccgcauucgaccaagccgcgagaucuagggggcacucaaaccggcgcaccgcucugcgaccucguagacagcaggaggccacagaagugaggccagagcagaagaugccgacucuccuucgggucuauaucgauggaccccaugguaugggcaaaacgaccacaacucaacuguugguugcauuagggagucgcgacgauauuguguacguaccugaaccaaugaccuauuggagagugcugggagccagcgagacaauagcuaauaucuacaccacucagcacaggcuagaccagggcgaaauuuccgccggugaugcagcugucgugaugacaucugcccagaucaccauggggaugcccuaugcgguuacggacgcagugcucgccccucauauuggaggcggcgggugggagcugacuugcccagcucccggaccucacccacaccuucggccgcccucgcaucgccgaccuccaguccugcccgguagagccaucccuuacggccaacacgauccacccgggagggcaggagugcggggcccgcauccugcugacuuggcccgucacaagcaccgcguaggugggcccucaggaggccagacccauagaccaccuggccagacacccgcgccaaggcgggccgcauga

SEQ ID NO: 6750 - RNA, 684 nt, Artificial Sequence
  derived and/or modified sequence opt4 from Thymidine_Kinase_TK__Herpes_Simplex_Virus_1_(HSV-1)__ACB59259
auggccagcuaccccggccaccagcacgccagcgccuucgaccaggccgccagaagcagaggccacagcaacagaagaaccgcccugagacccagaagacagcaggaggccaccgaggugagacccgagcagaagaugcccacccugcugagaguguacaucgacggcccccacggcaugggcaagaccaccaccacccagcugcugguggcccugggcagcagagacgacaucguguacgugcccgagcccaugaccuacuggagagugcugggcgccagcgagaccaucgccaacaucuacaccacccagcacagacuggaccagggcgagaucagcgccggcgacgccgccguggugaugaccagcgcccagaucaccaugggcaugcccuacgccgugaccgacgccgugcuggccccccacaucggcggcggcggcugggagcugaccugccccgcccccggcccccacccccaccugagaccccccagccacagaagaccccccgugcugcccggcagagccauccccuacggccagcacgacccccccggcagagccggcgugagaggcccccaccccgccgaccuggccagacacaagcacagagugggcggccccagcggcggccagacccacagaccccccggccagacccccgcccccagaagagccgccuga

SEQ ID NO: 6751 - RNA, 684 nt, Artificial Sequence
  derived and/or modified sequence opt5 from Thymidine_Kinase_TK__Herpes_Simplex_Virus_1_(HSV-1)__ACB59259
auggccagcuaccccggccaccagcaugcuuccgccuucgaccaagcggcuagaucucgggggcacagcaaccgcagaaccgcccugcggccucgcagacagcaggaggccacagaagugcggccggagcagaagaugcccacgcuccugcgcgucuauaucgauggaccucauggcauggggaaaaccacaaccacacaacuucugguugcucucggauccagagacgauauuguguacgugcccgaaccuaugaccuauuggcggguccugggcgccucugagacaaucgcuaauauuuacaccacgcagcaccgccuugaccagggggaaaucagcgccggagaugcggccgugguuaugaccuccgcucagauuacaaugggcaugcccuaugccgugaccgacgcuguccuggccccucauaucggcgggggaggcugggagcucacaugcccggcgcccgggccucacccccaccugagaccucccucucaucggcgcccgccugugcugcccggacgcgccaucccuuacggccaacacgauccucccgggcgggcuggaguucgcggcccccauccggccgaccucgcuagacacaagcaccgggugggcgggcccagcggaggccagacccauagaccucccgggcagacgccugcccccagacgggccgcuuga

SEQ ID NO: 6752 - RNA, 684 nt, Artificial Sequence
  derived and/or modified sequence opt6 from Thymidine_Kinase_TK__Herpes_Simplex_Virus_1_(HSV-1)__ACB59259
auggcaucauauccaggucaccaacacgcuucagcauuugaucaagcagcaagaucaagaggacauaguaauagaagaacagcauuaagaccaagaagacaacaagaagcaacagaaguaagaccagaacaaaaaaugccaacauuacuaagaguauauauagauggaccucacggaauggguaaaacaacaacaacacaauuauuaguagcacuaggaucaagagaugauauaguauauguaccagaaccaaugacauauuggagaguacuaggagcaucagaaacaauagcaaauauauauacaacacaacauagacuagaucaaggagaaauaucagcaggugacgcagcaguaguaaugacaagcgcacaaauaacaaugggaaugccauaugcaguaacagaugcuguauuagcaccacauauaggaggaggaggaugggaauuaacauguccagcaccaggaccucacccucaucuaagaccaccaucacauaggagaccaccaguauuaccaggaagagcaauaccauauggacaacaugauccaccaggaagagcagguguaagaggaccacauccagcagauuuagcaagacauaaacauagaguaggugggccaagcggaggacaaacacaucgaccaccaggucaaacaccagcuccaagaagggcagcauaa

SEQ ID NO: 6753 - protein, 376 aa, Artificial Sequence
  Thymidine_Kinase_TK__Herpes_Simplex_Virus_1_(HSV-1)__B2CPQ4
MASYPGHQHASAFDQAARSRGHSNRRTALRPRRQQEATEVRLEQKMPTLLRVYIDGPHGMGKTTTTQLLVALGSRDDSVYVPEPMTYWRVLGASETIANIYTTQHRLDQGEISAGDAAVVMTSAQITMGMPYAVTDAVLAPHIGGEAGSSHAPPPALTLIFDRHPIAALLCYPAARYLMGSMTPQAVLAFVVLIPPTLPGTNIVLGALPEDRHIDRLAKRQRPGERLDLAMLAAIRRVYGLLANTVRYLQCGGSWREDWGQLSGTALTPQGAEPQSNAGPRPHIGETLFTLFRAPELLAPNGDLYNVFAWALDVLAKRLRPMHVFILDYDQSPAGCRDALLQLTSGMVQTHVTTPGSIPTICDLARTFAREMGEAN

SEQ ID NO: 6754 - RNA, 1131 nt, Artificial Sequence
  Thymidine_Kinase_TK__Herpes_Simplex_Virus_1_(HSV-1)__ACB59260
auggcuucguaccccggccaucaacacgcgucugcguucgaccaggcugcgcguucucgcggccauagcaaccgacguacggcguugcgcccucgccggcagcaagaagccacggaaguccgccuggagcagaaaaugcccacgcuacugcggguuuauauagacgguccucacgggauggggaaaaccaccaccacgcaacugcugguggcccuggguucgcgcgacgauagcgucuacguacccgagccgaugacuuacuggcgggugcugggggcuuccgagacaaucgcgaacaucuacaccacacaacaccgccucgaccagggugagauaucggccggggacgcggcggugguaaugacaagcgcccagauaacaaugggcaugccuuaugccgugaccgacgccguucuggcuccucauaucgggggggaggcugggagcucacaugccccgcccccggcccucacccucaucuucgaccgccaucccaucgccgcccuccugugcuacccggccgcgcgguaccuuaugggcagcaugaccccccaggccgugcuggcguucgugguccucaucccgccgaccuugcccggcacaaacaucguguugggggcccuuccggaggacagacacaucgaccgccuggccaaacgccagcgccccggugagcggcuugaccuggcuaugcuggccgcgauucgccgcguuuacgggcuacuugccaauacggugcgguaucugcagugcggcgggucguggcgggaggauuggggacagcuuucggggacggccuugacgccccagggugccgagccccagagcaacgcgggcccacgaccccauaucggggaaacguuauuuacccuguuucgggcccccgaguugcuggcccccaacggcgaccuguacaacguguuugccugggccuuggacgucuuggccaaacgccuccgucccaugcacgucuuuauccuggauuacgaccaaucgcccgccggcugccgggacgcccugcugcaacuuaccuccgggaugguccagacccaugucaccaccccaggcuccauaccgacgaucugcgaccuggcgcgcacguuugcccgggagaugggggaggcuaacuaa

SEQ ID NO: 6755 - RNA, 1131 nt, Artificial Sequence
  derived and/or modified sequence opt1 from Thymidine_Kinase_TK__Herpes_Simplex_Virus_1_(HSV-1)__ACB59260
auggccagcuaccccggccaccagcacgccuccgcguucgaccaggccgcccgcagccgggggcacuccaaccgccggaccgcccugcgcccgcggcgccagcaggaggccaccgaggugcggcucgagcagaagaugcccacgcugcugcgcgucuacaucgacggcccccacgggaugggcaagaccaccaccacgcagcuccugguggcgcuggggagccgggacgacuccguguacguccccgagccgaugaccuacuggcgcgugcucggcgccagcgagaccaucgccaacaucuacaccacgcagcaccggcuggaccagggcgagaucuccgccggggacgcggccguggucaugaccagcgcccagaucaccaugggcaugcccuacgccgugaccgacgccgugcuggcgccccacaucgggggcgaggccggguccagccacgcgcccccgcccgcccucacgcugaucuucgaccgccaccccaucgccgcccugcucugcuaccccgccgcccgguaccugaugggcuccaugaccccgcaggccguccuggccuucguggugcucaucccgcccacccugcccggcaccaacaucguccugggggcgcuccccgaggaccgccacaucgaccggcuggccaagcgccagcggcccggcgagcgccuggaccucgccaugcuggccgccauccggcgcguguacgggcugcucgcgaacacggugcgguaccugcagugcggcggcagcuggcgcgaggacugggggcagcuguccggcaccgcccucacgccccagggggccgagccccagagcaacgccggcccgcgcccccacaucggggagacccuguucacccuguuccgggcgcccgagcuccuggcccccaacggcgaccuguacaacgucuucgccugggcccucgacgugcuggccaagcgccugcggccgaugcacguguucauccucgacuacgaccagucccccgcgggcugccgcgacgcccugcugcagcucaccagcgggaugguccagacccacgugaccacgcccggcuccauccccaccaucugcgaccuggcccggaccuucgcccgcgagaugggggaggccaacuga

SEQ ID NO: 6756 - RNA, 1131 nt, Artificial Sequence
  derived and/or modified sequence opt2 from Thymidine_Kinase_TK__Herpes_Simplex_Virus_1_(HSV-1)__ACB59260
auggccuccuaccccggccaccagcacgccuccgccuucgaccaggccgcccgcucccgcggccacuccaaccgccgcaccgcccuccgcccccgccgccagcaggaggccaccgagguccgccucgagcagaagaugcccacccuccuccgcgucuacaucgacggcccccacggcaugggcaagaccaccaccacccagcuccucgucgcccucggcucccgcgacgacuccgucuacguccccgagcccaugaccuacuggcgcguccucggcgccuccgagaccaucgccaacaucuacaccacccagcaccgccucgaccagggcgagaucuccgccggcgacgccgccgucgucaugaccuccgcccagaucaccaugggcaugcccuacgccgucaccgacgccguccucgccccccacaucggcggcgaggccggcuccucccacgcccccccccccgcccucacccucaucuucgaccgccaccccaucgccgcccuccucugcuaccccgccgcccgcuaccucaugggcuccaugaccccccaggccguccucgccuucgucguccucaucccccccacccuccccggcaccaacaucguccucggcgcccuccccgaggaccgccacaucgaccgccucgccaagcgccagcgccccggcgagcgccucgaccucgccaugcucgccgccauccgccgcgucuacggccuccucgccaacaccguccgcuaccuccagugcggcggcuccuggcgcgaggacuggggccagcucuccggcaccgcccucaccccccagggcgccgagccccaguccaacgccggcccccgcccccacaucggcgagacccucuucacccucuuccgcgcccccgagcuccucgcccccaacggcgaccucuacaacgucuucgccugggcccucgacguccucgccaagcgccuccgccccaugcacgucuucauccucgacuacgaccagucccccgccggcugccgcgacgcccuccuccagcucaccuccggcaugguccagacccacgucaccacccccggcuccauccccaccaucugcgaccucgcccgcaccuucgcccgcgagaugggcgaggccaacuga

SEQ ID NO: 6757 - RNA, 1131 nt, Artificial Sequence
  derived and/or modified sequence opt3 from Thymidine_Kinase_TK__Herpes_Simplex_Virus_1_(HSV-1)__ACB59260
auggccagcuaccccggccaccagcaugcuuccgcauucgaccaagccgcgagaucuagggggcacucaaaccggcgcaccgcucugcgaccucguagacagcaggaggccacagaagugaggcucgagcagaagaugccaacucuucugcgggucuauaucgauggaccgcaugguaugggcaaaacgaccacaacucaauuguuaguugcacuggggagucgcgacgauagcguguacguacccgaaccuaugaccuauuggagagugcuaggagccuccgagacaauugcuaauauauacaccacucagcacaggcucgaccagggcgaaaucucugccggugaugccgcugucgugaugacaucggcccagauuaccauggggaugccauaugcgguuacggacgcagugcuggcaccccauaucggaggcgaggcuggcucaagccacgccccuccacccgcacuuacucugauuuuugaucggcacccuaucgcugccuugcucugcuacccagcggcccgcuaucugauggggaguaugaccccgcaagcaguccuggcuuucgugguacucauacccccuacauuaccaggaacuaacaucguucugggugcccuucccgaggaccgacauauugauagauuggcuaagaggcagcggccuggcgaacgucuggaccuagccaugcucgcagccauccgcagaguguacgggcugcuugcuaauaccgucagguaccugcaguguggaggcuccuggcgggaggauuggggucaguugucugggacagcgcucaccccacaaggagcagaaccccagagcaacgccggcccgcgaccucacauuggcgagacgcuguuuacuuuauuccgcgcucccgagcugcucgccccaaauggggaccuuuauaacguguuugcaugggcccuggauguguuggcuaaaagacuaaggccuaugcaugucuucauccuggacuacgaccagucccccgccggaugccgggaugcacuccugcaacuuacaucagguaugguucagacccacgugacuacaccaggcaguauacccaccauuugugaccuggcgcgcacguuugcuagagaaaugggggaggccaauuga

SEQ ID NO: 6758 - RNA, 1131 nt, Artificial Sequence
  derived and/or modified sequence opt4 from Thymidine_Kinase_TK__Herpes_Simplex_Virus_1_(HSV-1)__ACB59260
auggccagcuaccccggccaccagcacgccagcgccuucgaccaggccgccagaagcagaggccacagcaacagaagaaccgcccugagacccagaagacagcaggaggccaccgaggugagacuggagcagaagaugcccacccugcugagaguguacaucgacggcccccacggcaugggcaagaccaccaccacccagcugcugguggcccugggcagcagagacgacagcguguacgugcccgagcccaugaccuacuggagagugcugggcgccagcgagaccaucgccaacaucuacaccacccagcacagacuggaccagggcgagaucagcgccggcgacgccgccguggugaugaccagcgcccagaucaccaugggcaugcccuacgccgugaccgacgccgugcuggccccccacaucggcggcgaggccggcagcagccacgcccccccccccgcccugacccugaucuucgacagacaccccaucgccgcccugcugugcuaccccgccgccagauaccugaugggcagcaugaccccccaggccgugcuggccuucguggugcugaucccccccacccugcccggcaccaacaucgugcugggcgcccugcccgaggacagacacaucgacagacuggccaagagacagagacccggcgagagacuggaccuggccaugcuggccgccaucagaagaguguacggccugcuggccaacaccgugagauaccugcagugcggcggcagcuggagagaggacuggggccagcugagcggcaccgcccugaccccccagggcgccgagccccagagcaacgccggccccagaccccacaucggcgagacccuguucacccuguucagagcccccgagcugcuggcccccaacggcgaccuguacaacguguucgccugggcccuggacgugcuggccaagagacugagacccaugcacguguucauccuggacuacgaccagagccccgccggcugcagagacgcccugcugcagcugaccagcggcauggugcagacccacgugaccacccccggcagcauccccaccaucugcgaccuggccagaaccuucgccagagagaugggcgaggccaacuga

SEQ ID NO: 6759 - RNA, 1131 nt, Artificial Sequence
  derived and/or modified sequence opt5 from Thymidine_Kinase_TK__Herpes_Simplex_Virus_1_(HSV-1)__ACB59260
auggccagcuaccccggccaccagcaugcuuccgccuucgaccaagcggcuagaucucgggggcacagcaaccgcagaaccgcccugcggccucgcagacagcaggaggccacagaagugcggcucgagcagaagaugccgacgcugcuucgcgucuauaucgauggaccccauggcauggggaaaaccacaaccacacaacugcucguugcucugggauccagagacgauucuguguacgugccugaacccaugaccuauuggcggguccuuggcgccagcgagacaauugcuaauaucuacaccacgcagcaccgccuggaccagggggaaauuuccgccggagaugcggccgugguuaugaccucugcucagaucacaaugggcaugccuuaugccgugaccgacgcuguccucgcgccccauauuggcggggaggccggaagcucccacgccccuccgcccgcucugacacugaucuuugauagacacccuaucgccgcucuccugugcuaccccgccgcccgguaucuuaugggcagcaugaccccucaagcugugcuggcguucguugugcucauucccccgacgcugccugggacaaacaucguccuuggagcccugcccgaggaccgccauauugauagacucgcuaagcggcagcgcccuggcgaaagacuggaccuggccaugcucgccgcuauccggagaguguacgggcugcuugccaauaccgugcgcuaccugcaguguggaggcucuuggcgggaggauuggggccagcucuccgggacagcgcugacaccccaaggagcugaaccccagagcaacgccggcccuagaccgcacauuggggagacccuuuuuacccuguuccgcgcccccgagcuccuggcuccuaauggagaccuguauaacgucuuugccugggcucucgauguucuggccaaacggcuuagacccaugcauguguucauccuggacuacgaccagucuccugcgggcugccgcgaugcccuccugcaacuuacguccgggauggugcagacccacgucacaacccccggaagcauuccgacaaucugugaccuggcucggaccuuugccagagaaaugggcgaggcuaauuga

SEQ ID NO: 6760 - RNA, 1131 nt, Artificial Sequence
  derived and/or modified sequence opt6 from Thymidine_Kinase_TK__Herpes_Simplex_Virus_1_(HSV-1)__ACB59260
auggccagcuauccaggucaucaacaugcaagugcauuugaccaagcagcaagaucaagaggucauucaaauagaaggacagcucuaagaccuagaagacaacaagaagcaacagaaguaagacuagaacaaaaaaugccaacauuauuaagaguauauauagauggaccacauggaaugggaaaaacaacaaccacacaauuauuaguagcuuuaggaucaagagaugacucaguauauguaccagagccaaugacguauuggagaguacuaggagcaagcgaaacaauagcaaauauauacacaacacaacauagauuagaucaaggagaaauaagcgcaggagaugcagcaguaguaaugaccagugcacaaauaacaaugggaaugccuuaugcaguuaccgaugcaguauuagccccacauauagguggugaagcagguaguucacaugcaccaccaccugcguuaacauuaauuuuugaucgacacccaauagccgcccuacuaugcuaccccgcagcaagauaucuaaugggaaguaugacaccacaagcaguauuagcauuuguaguuuuaauaccuccuaccuuaccaggaacaaauauaguauuaggagcauugccugaagacagacauauagaccgauuagcaaaaagacaaagaccaggagaaagacuagaucuagcuauguuagcagcaauaagacgaguauacggacuauuagcaaacacaguuagauauuuacaauguggaggaucguggagagaagauuggggacaauuaaguggaacagcauuaacaccacaaggagcagaaccacaaagcaacgcaggaccaagaccacacauaggcgaaacauuguuuacacuauuuagagcaccagaauuauuagcaccaaacggagaucuauauaacguauuugccugggcauuagauguuuuagcaaaaagauuaagaccaaugcauguauuuauucuagauuaugaucaaucaccggcaggauguagagaugcauuauuacaacuuacaagcggaaugguacaaacacaugugacaacaccaggaucaauaccaacaauaugugaccuugcaagaacauuugcaagagaaaugggugaagcuaauuaa

SEQ ID NO: 6761 - protein, 376 aa, Artificial Sequence
  Thymidine_Kinase_TK__Herpes_Simplex_Virus_1_(HSV-1)__B2CPQ5
MASYPGHQHASAFDQAARSRGHSNRRTALRPRRQQEATEVHLEQKMPTLLRVYIDGPHGMGKTTTTQLLVALGSRDDIVYVPEPMTYWRVLGASETIANIYTTQHRLDQGEISAGDAAVVMTSAQITMGMPYAVTDAVLAPHIGGEAGSSHAPPPALTLIFDRHPIAALLCYPAARYLMGSMTPQAVLAFVVLIPPTLPGTNIVLGALPEDRHIDRLAKRQRPGERLDLAMLAAIRRVYGLLANTVRYLQCGGSWRENWGQLSGTALTPQGAEPQSNAGPRPHIGETLFTLFRAPELLAPNGDLYNVFAWALDVLAKRLRPMHVFILDYDQSPAGCRDALLQLTSGMVQTHVTTPGSIPTICDLARTFAREMGEAN

SEQ ID NO: 6762 - RNA, 1131 nt, Artificial Sequence
  Thymidine_Kinase_TK__Herpes_Simplex_Virus_1_(HSV-1)__ACB59261
auggcuucguaccccggccaucaacacgcgucugcguucgaccaggcugcgcguucucgcggccauagcaaccgacguacggcguugcgcccucgccggcagcaagaagccacggaaguccaccuggagcagaaaaugcccacgcuacugcggguuuauauagacgguccucacgggauggggaaaaccaccaccacgcaacugcugguggcccuggguucgcgcgacgauaucgucuacguacccgagccgaugacuuacuggcgggugcugggggcuuccgagacaaucgcgaacaucuacaccacacaacaccgccucgaccagggugagauaucggccggggacgcggcggugguaaugacaagcgcccagauaacaaugggcaugccuuaugccgugaccgacgccguucuggcuccucauaucgggggggaggcugggagcucacaugccccgcccccggcccucacccucaucuucgaccgccaucccaucgccgcccuccugugcuacccggccgcgcgguaccuuaugggcagcaugaccccccaggccgugcuggcguucgugguccucaucccgccgaccuugcccggcacaaacaucguguugggggcccuuccggaggacagacacaucgaccgccuggccaaacgccagcgccccggugagcggcuugaccuggcuaugcuggccgcgauucgccgcguuuacgggcuacuugccaauacggugcgguaucugcagugcggcgggucguggcgggagaauuggggacagcuuucggggacggccuugacgccccagggugccgagccccagagcaacgcgggcccacgaccccauaucggggaaacguuauuuacccuguuucgggcccccgaguugcuggcccccaacggcgaccuguacaacguguuugccugggccuuggacgucuuggccaaacgccuccgucccaugcacgucuuuauccuggauuacgaccaaucgcccgccggcugccgggacgcccugcugcaacuuaccuccgggaugguccagacccacgucaccacccccggcuccauaccgacgaucugcgaccuggcgcgcacguuugcccgggagaugggggaggcuaacuaa

SEQ ID NO: 6763 - RNA, 1131 nt, Artificial Sequence
  derived and/or modified sequence opt1 from Thymidine_Kinase_TK__Herpes_Simplex_Virus_1_(HSV-1)__ACB59261
auggccagcuaccccggccaccagcacgccuccgcguucgaccaggccgcccgcagccgggggcacuccaaccgccggaccgcccugcgcccgcggcgccagcaggaggccaccgaggugcaccucgagcagaagaugcccacgcugcugcgggucuacaucgacggcccccacgggaugggcaagaccaccaccacgcagcuccugguggcgcuggggagccgcgacgacaucguguacguccccgagccgaugaccuacuggcgggugcucggcgccuccgagaccaucgccaacaucuacaccacgcagcaccgccuggaccagggcgagaucagcgccggggacgcggccguggucaugaccuccgcccagaucaccaugggcaugcccuacgccgugaccgacgccgugcuggcgccccacaucgggggcgaggccgggagcucccacgcgcccccgcccgcccucacgcugaucuucgaccggcaccccaucgccgcccugcucugcuaccccgccgcccgcuaccugaugggcagcaugaccccgcaggccguccuggccuucguggugcucaucccgcccacccugcccggcaccaacaucguccugggggcgcuccccgaggaccggcacaucgaccgccuggccaagcggcagcgccccggcgagcggcuggaccucgccaugcuggccgccauccgccggguguacgggcugcucgcgaacacggugcgcuaccugcagugcggcggcuccuggcgggagaacugggggcagcugagcggcaccgcccucacgccccagggggccgagccccaguccaacgccggcccgcgcccccacaucggggagacccuguucacccuguuccgcgcgcccgagcuccuggcccccaacggcgaccuguacaacgucuucgccugggcccucgacgugcuggccaagcggcugcgcccgaugcacguguucauccucgacuacgaccagagccccgcgggcugccgggacgcccugcugcagcucaccuccgggaugguccagacccacgugaccacgcccggcagcauccccaccaucugcgaccuggcccgcaccuucgcccgggagaugggggaggccaacuga

SEQ ID NO: 6764 - RNA, 1131 nt, Artificial Sequence
  derived and/or modified sequence opt2 from Thymidine_Kinase_TK__Herpes_Simplex_Virus_1_(HSV-1)__ACB59261
auggccuccuaccccggccaccagcacgccuccgccuucgaccaggccgcccgcucccgcggccacuccaaccgccgcaccgcccuccgcccccgccgccagcaggaggccaccgagguccaccucgagcagaagaugcccacccuccuccgcgucuacaucgacggcccccacggcaugggcaagaccaccaccacccagcuccucgucgcccucggcucccgcgacgacaucgucuacguccccgagcccaugaccuacuggcgcguccucggcgccuccgagaccaucgccaacaucuacaccacccagcaccgccucgaccagggcgagaucuccgccggcgacgccgccgucgucaugaccuccgcccagaucaccaugggcaugcccuacgccgucaccgacgccguccucgccccccacaucggcggcgaggccggcuccucccacgcccccccccccgcccucacccucaucuucgaccgccaccccaucgccgcccuccucugcuaccccgccgcccgcuaccucaugggcuccaugaccccccaggccguccucgccuucgucguccucaucccccccacccuccccggcaccaacaucguccucggcgcccuccccgaggaccgccacaucgaccgccucgccaagcgccagcgccccggcgagcgccucgaccucgccaugcucgccgccauccgccgcgucuacggccuccucgccaacaccguccgcuaccuccagugcggcggcuccuggcgcgagaacuggggccagcucuccggcaccgcccucaccccccagggcgccgagccccaguccaacgccggcccccgcccccacaucggcgagacccucuucacccucuuccgcgcccccgagcuccucgcccccaacggcgaccucuacaacgucuucgccugggcccucgacguccucgccaagcgccuccgccccaugcacgucuucauccucgacuacgaccagucccccgccggcugccgcgacgcccuccuccagcucaccuccggcaugguccagacccacgucaccacccccggcuccauccccaccaucugcgaccucgcccgcaccuucgcccgcgagaugggcgaggccaacuga

SEQ ID NO: 6765 - RNA, 1131 nt, Artificial Sequence
  derived and/or modified sequence opt3 from Thymidine_Kinase_TK__Herpes_Simplex_Virus_1_(HSV-1)__ACB59261
auggccagcuaccccggccaccagcaugcuuccgcauucgaccaagccgcgagaucuagggggcacucaaaccggcgcaccgcucugcgaccucguagacagcaggaggccacagaagugcaucucgagcagaagaugccaacucuucugagggucuauaucgauggaccgcacgguaugggcaaaacgaccacaacucaauuguuaguugcacuggggagucgggacgauauuguguacguacccgaaccuaugaccuauuggcgcgugcuaggagccagcgagacaauagcuaauaucuacaccacucagcauagacucgaccagggcgaaauuuccgccggugaugccgcugucgugaugacaucugcccagaucaccauggggaugccauaugcgguuacggacgcagugcuggcaccccacauuggaggcgaggcuggcucgucacacgccccuccacccgcacuuacucugaucuuugauaggcauccuauagcugccuugcucugcuacccagcggcccgguaucugauggggagcaugaccccgcaagcaguccuggcuuucgugguacucauucccccuacauuaccaggaacuaacaucguucugggugcccuucccgaggaccgccacaucgaucgauuggcuaagagacagaggccuggcgaacggcuggaccuagccaugcucgcagccauucgucgcguguacgggcugcuugcuaauaccgucagauaccugcaguguggaggcaguuggagggagaacuggggucaguuguccgggacagcgcucaccccacaaggagcagaaccccagucuaaugccggcccgcggccucauaucggcgagacgcuguuuacuuuauuccgagcucccgagcugcucgccccaaacggggaucuuuauaauguguuugcaugggcccuggacguguuggcuaaacgccuaagaccuaugcacgucuucauacuggauuacgaccagagccccgccggaugcagggacgcacuccugcaacuuacauccgguaugguucagacccacgugacuacaccaggcucaauucccaccaucugugaucuggcgcggacguuugcucgcgaaaugggggaggccaacuga

SEQ ID NO: 6766 - RNA, 1131 nt, Artificial Sequence
  derived and/or modified sequence opt4 from Thymidine_Kinase_TK__Herpes_Simplex_Virus_1_(HSV-1)__ACB59261
auggccagcuaccccggccaccagcacgccagcgccuucgaccaggccgccagaagcagaggccacagcaacagaagaaccgcccugagacccagaagacagcaggaggccaccgaggugcaccuggagcagaagaugcccacccugcugagaguguacaucgacggcccccacggcaugggcaagaccaccaccacccagcugcugguggcccugggcagcagagacgacaucguguacgugcccgagcccaugaccuacuggagagugcugggcgccagcgagaccaucgccaacaucuacaccacccagcacagacuggaccagggcgagaucagcgccggcgacgccgccguggugaugaccagcgcccagaucaccaugggcaugcccuacgccgugaccgacgccgugcuggccccccacaucggcggcgaggccggcagcagccacgcccccccccccgcccugacccugaucuucgacagacaccccaucgccgcccugcugugcuaccccgccgccagauaccugaugggcagcaugaccccccaggccgugcuggccuucguggugcugaucccccccacccugcccggcaccaacaucgugcugggcgcccugcccgaggacagacacaucgacagacuggccaagagacagagacccggcgagagacuggaccuggccaugcuggccgccaucagaagaguguacggccugcuggccaacaccgugagauaccugcagugcggcggcagcuggagagagaacuggggccagcugagcggcaccgcccugaccccccagggcgccgagccccagagcaacgccggccccagaccccacaucggcgagacccuguucacccuguucagagcccccgagcugcuggcccccaacggcgaccuguacaacguguucgccugggcccuggacgugcuggccaagagacugagacccaugcacguguucauccuggacuacgaccagagccccgccggcugcagagacgcccugcugcagcugaccagcggcauggugcagacccacgugaccacccccggcagcauccccaccaucugcgaccuggccagaaccuucgccagagagaugggcgaggccaacuga

SEQ ID NO: 6767 - RNA, 1131 nt, Artificial Sequence
  derived and/or modified sequence opt5 from Thymidine_Kinase_TK__Herpes_Simplex_Virus_1_(HSV-1)__ACB59261
auggccagcuaccccggccaccagcaugcuuccgccuucgaccaagcggcuagaucucgggggcacagcaaccgcagaaccgcccugcggccucgcagacagcaggaggccacagaagugcaucucgagcagaagaugccgacgcugcuucgggucuauaucgauggaccccacggcauggggaaaaccacaaccacacaacugcucguugcucugggaucccgcgacgauauuguguacgugccugaacccaugaccuauuggagaguccuuggcgccucugagacaaucgcuaauauuuacaccacgcagcaucggcuggaccagggggaaaucagcgccggagaugcggccgugguuaugaccuccgcucagauuacaaugggcaugccuuaugccgugaccgacgcuguccucgcgccccacaucggcggggaggccggaucuagccacgccccuccgcccgcucugacacugaucuuugaucgccauccuauugccgcucuccugugcuaccccgccgccagauaucuuaugggcuccaugaccccucaagcugugcuggcguucguugugcucauucccccgacgcugccugggacaaacaucguccuuggagcccugcccgaggaccggcacaucgaucgccucgcuaagagacagcggccuggcgaacgccuggaccuggccaugcucgccgcuauuagacggguguacgggcugcuugccaauaccgugagauaccugcaguguggaggcagcuggcgcgagaacuggggccagcucucugggacagcgcugacaccccaaggagcugaaccccaguccaaugccggcccucggccgcauaucggggagacccuuuuuacccuguucagagcccccgagcuccuggcuccuaacggagaucuguauaaugucuuugccugggcucucgacguucuggccaaacgccuucggcccaugcacguguucauucuggauuacgaccagagcccugcgggcugcagagacgcccuccugcaacuuacgucugggauggugcagacccacgucacaacccccggauccaucccgacaaucugugaucuggcucgcaccuuugcccgggaaaugggcgaggcuaacuga

SEQ ID NO: 6768 - RNA, 1131 nt, Artificial Sequence
  derived and/or modified sequence opt6 from Thymidine_Kinase_TK__Herpes_Simplex_Virus_1_(HSV-1)__ACB59261
auggcuaguuauccaggacaucaacaugcaucagcauuugaucaagccgcaagaucaagaggacauucaaauagaagaacugcacuaagaccaagacgacaacaagaagcaacagaaguacaucuagaacaaaaaaugccuacacuacuaagaguauacauagauggaccacaugguauggguaaaacaacgaccacacaauuauuaguagcacuuggcagucgugacgauauaguauaugucccagaaccaaugacauauuggagaguacuuggagcaucagaaacaauagcaaauaucuauacaacacaacauagacuagaucaaggugaaauaagugcaggagaugcagcaguaguaaugaccucagcacaaaucacaauggguaugccauaugcaguaacagaugcaguauuagcaccacacauuggaggagaagcaggaucaagucaugcaccuccaccagcauuaacacuaauuuuugauagacauccaauagcagcacuacugugcuauccagcagcucgauacuuaaugggaucaaugacaccacaagcaguucuagccuuuguaguauuaauaccaccaacauuaccaggaacaaacauaguacuaggagcacuaccagaagauagacauauagaucgacuagcaaaaagacaaaggccaggagaacgauuagaucuugcaauguuagcagcaauaagaagaguauacggauuauuagcaaauacuguaagauaucuacaaugcggagguucauggagagaaaacuggggacaacuaucaggaacagcauuaacaccacaaggagcugaaccacaaucaaacgcagguccaagaccacauauaggagaaacacucuucacccucuuuagagcaccagaacuacuagcaccaaacggugauuuauauaauguauuugcaugggcccuagauguauuagcaaaaagacuaagaccaaugcauguauuuauacuagauuaugaucaaucacccgcaggaugucgcgaugcacuauuacaauuaacaagcgguaugguacaaacacauguaacaaccccaggaucaauaccaacaauuugugauuuagcaagaacauucgcaagagaaaugggagaagcaaauuga

SEQ ID NO: 6769 - protein, 376 aa, Artificial Sequence
  Thymidine_Kinase_TK__Herpes_Simplex_Virus_1_(HSV-1)__O72346
MASYPCHQHASAFDQAARSRGHSNRRTALRPRRQQEATEVRPEQKMPTLLRVYIDGPHGMGKTTTTQLLVALGSRDDIVYVPEPMTYWRVLGASETIANIYTTQHRLDQGEISAGDAAVVMTSAQITMGMPYAVTDAVLAPHIGGEAGSSHAPPPALTLIFDRHPIAALLCYPAARYLMGSMTPQAVLAFVALIPPTLPGTNIVLGALPEDRHIDRLAKRQRPGERLDLAMLAAIRRVYGLLANTVRYLQGGGSWREDWGQLSGTAVPPQGAEPQSNAGPRPHIGDTLFTLFRAPELLAPNGDLYNVFAWALDVLAKRLRPMHVFILDYDQSPAGCRDALLQLTSGMVQTHVTTPGSIPTICDLARTFAREMGEAN

SEQ ID NO: 6770 - RNA, 1131 nt, Artificial Sequence
  Thymidine_Kinase_TK__Herpes_Simplex_Virus_1_(HSV-1)__AAC16235
auggcuucguaccccugccaucaacacgcgucugcguucgaccaggcugcgcguucucgcggccauagcaaccgacguacggcguugcgcccucgccggcagcaagaagccacggaaguccgcccggagcagaaaaugcccacgcuacugcggguuuauauagacgguccccacgggauggggaaaaccaccaccacgcaacugcugguggcccuggguucgcgcgacgauaucgucuacguacccgagccgaugacuuacuggcgggugcugggggcuuccgagacaaucgcgaacaucuacaccacacaacaccgccucgaccagggugagauaucggccggggacgcggcggugguaaugacaagcgcccagauaacaaugggcaugccuuaugccgugaccgacgccguucuggcuccucauaucgggggggaggcugggagcucacaugccccgcccccggcccucacccucaucuucgaccgccaucccaucgccgcccuccugugcuacccggccgcgcgauaccuuaugggcagcaugaccccccaggccgugcuggcguucguggcccucaucccgccgaccuugcccggcacaaacaucguguugggggcccuuccggaggacagacacaucgaccgccuggccaaacgccagcgccccggcgagcggcuugaccuggcuaugcuggccgcgauucgccgcguuuacgggcugcuugccaauacggugcgguaucugcagggcggcgggucguggcgggaggauuggggacagcuuucggggacggccgugccgccccagggugccgagccccagagcaacgcgggcccacgaccccauaucggggacacguuauuuacccuguuucgggcccccgaguugcuggcccccaacggcgaccuguauaacguguuugccugggccuuggacgucuuggccaaacgccuccgucccaugcacgucuuuauccuggauuacgaccaaucgcccgccggcugccgggacgcccugcugcaacuuaccuccgggaugguccagacccacgucaccaccccaggcuccauaccgacgaucugcgaccuggcgcgcacguuugcccgggagaugggggaggcuaacuga

SEQ ID NO: 6771 - RNA, 1131 nt, Artificial Sequence
  derived and/or modified sequence opt1 from Thymidine_Kinase_TK__Herpes_Simplex_Virus_1_(HSV-1)__AAC16235
auggccagcuaccccugccaccagcacgccuccgcguucgaccaggccgcccgcagccggggccacuccaaccgccggaccgcccugcgcccgcggcgccagcaggaggccaccgaggugcggcccgagcagaagaugcccacgcuccugcgcgucuacaucgacgggccccacggcauggggaagaccaccaccacgcagcugcucguggcgcugggcagccgggacgacaucguguacgucccggagcccaugaccuacuggcgcgugcugggggccuccgagaccaucgccaacaucuacaccacgcagcaccggcucgaccagggcgagaucagcgccggcgacgcggccguggucaugaccuccgcccagaucaccauggggaugcccuacgccgugaccgacgccgugcuggcgccccacaucggcggggaggccggcagcucccacgccccgccgcccgcccugacgcucaucuucgaccgccaccccaucgccgcgcugcugugcuaccccgccgcccgguaccucauggggagcaugacgccccaggccguccuggccuucguggcgcugaucccgcccacccuccccggcaccaacaucgugcugggcgcccugcccgaggaccgccacaucgaccggcucgccaagcgccagcggcccggggagcgccuggaccuggccaugcucgccgcgauccggcgcgucuacggccugcuggccaacaccgugcgguaccuccagggcgggggcuccuggcgcgaggacugggggcagcugagcggcaccgccgugcccccgcagggggccgagccccaguccaacgcgggcccccgcccccacaucggggacacccuguucacccucuuccgggccccggagcugcuggcccccaacggcgaccucuacaacgucuucgccugggcccuggacgugcuggcgaagcgccuccggcccaugcacguguucauccuggacuacgaccagagccccgccggcugccgcgacgcccugcuccagcugacguccgggaugguccagacccacgugaccaccccgggcagcauccccacgaucugcgaccuggcccggaccuucgcccgcgagaugggggaggcgaacuga

SEQ ID NO: 6772 - RNA, 1131 nt, Artificial Sequence
  derived and/or modified sequence opt2 from Thymidine_Kinase_TK__Herpes_Simplex_Virus_1_(HSV-1)__AAC16235
auggccuccuaccccugccaccagcacgccuccgccuucgaccaggccgcccgcucccgcggccacuccaaccgccgcaccgcccuccgcccccgccgccagcaggaggccaccgagguccgccccgagcagaagaugcccacccuccuccgcgucuacaucgacggcccccacggcaugggcaagaccaccaccacccagcuccucgucgcccucggcucccgcgacgacaucgucuacguccccgagcccaugaccuacuggcgcguccucggcgccuccgagaccaucgccaacaucuacaccacccagcaccgccucgaccagggcgagaucuccgccggcgacgccgccgucgucaugaccuccgcccagaucaccaugggcaugcccuacgccgucaccgacgccguccucgccccccacaucggcggcgaggccggcuccucccacgcccccccccccgcccucacccucaucuucgaccgccaccccaucgccgcccuccucugcuaccccgccgcccgcuaccucaugggcuccaugaccccccaggccguccucgccuucgucgcccucaucccccccacccuccccggcaccaacaucguccucggcgcccuccccgaggaccgccacaucgaccgccucgccaagcgccagcgccccggcgagcgccucgaccucgccaugcucgccgccauccgccgcgucuacggccuccucgccaacaccguccgcuaccuccagggcggcggcuccuggcgcgaggacuggggccagcucuccggcaccgccguccccccccagggcgccgagccccaguccaacgccggcccccgcccccacaucggcgacacccucuucacccucuuccgcgcccccgagcuccucgcccccaacggcgaccucuacaacgucuucgccugggcccucgacguccucgccaagcgccuccgccccaugcacgucuucauccucgacuacgaccagucccccgccggcugccgcgacgcccuccuccagcucaccuccggcaugguccagacccacgucaccacccccggcuccauccccaccaucugcgaccucgcccgcaccuucgcccgcgagaugggcgaggccaacuga

SEQ ID NO: 6773 - RNA, 1131 nt, Artificial Sequence
  derived and/or modified sequence opt3 from Thymidine_Kinase_TK__Herpes_Simplex_Virus_1_(HSV-1)__AAC16235
auggccagcuaccccugccaccagcaugcuuccgcauucgaccaagccgcgagaucuaggggccacucaaaccggcgcaccgcucugcgaccucguagacagcaggaggccacagaagugaggccagagcagaagaugccgacucuccuucgggucuauaucgaugggccccauggaauggguaaaacgaccacaacucaacuguugguugcauuaggcagucgcgacgauauuguguacguaccugaaccaaugaccuauuggagagugcugggggccagcgagacaauagcuaauaucuacaccacucagcacaggcuagaccagggagaaauuuccgcaggcgaugccgcugucgugaugacaucugcccagaucaccauggguaugcccuaugcgguuacggacgcagugcucgccccucauauugggggagaggcuggcucgucacacgccccacccccugcacugacucuuaucuuugaucggcacccaauagcugcccuguuguguuacccggcggcccgcuaucucaugggcagcaugacgccccaagcaguccuggcuuucguggcccugaucccuccaacacuccccgggacuaacauuguauuaggagcucugccugaggaccgacauaucgauagacuugccaagaggcagcggccaggugaacguuuggaccuggcaaugcuagccgcuauucgcagaguuuacggccuccuggcgaauaccgugagguaccuucaagggggaggcaguuggcgggaggauuggggucagcuguccgggacagcagugcccccgcagggagccgaaccucagucuaacgcuggcccccgaccacacaucggcgacaccuuguuuacccucuuccgcgccccugagcuguuagcacccaauggggaucuguauaacgucuuugccugggcucucgacgugcuugccaaaagacugaggccaaugcaugucuucauauuggacuacgaucagagccccgcaggaugccgggacgcgcuacugcaacucacuuccgguaugguucagacacacgugaccacuccuggcucaauuccaacaaucugugaucuggcucgcaccuuugccagagagaugggggaagcaaauuga

SEQ ID NO: 6774 - RNA, 1131 nt, Artificial Sequence
  derived and/or modified sequence opt4 from Thymidine_Kinase_TK__Herpes_Simplex_Virus_1_(HSV-1)__AAC16235
auggccagcuaccccugccaccagcacgccagcgccuucgaccaggccgccagaagcagaggccacagcaacagaagaaccgcccugagacccagaagacagcaggaggccaccgaggugagacccgagcagaagaugcccacccugcugagaguguacaucgacggcccccacggcaugggcaagaccaccaccacccagcugcugguggcccugggcagcagagacgacaucguguacgugcccgagcccaugaccuacuggagagugcugggcgccagcgagaccaucgccaacaucuacaccacccagcacagacuggaccagggcgagaucagcgccggcgacgccgccguggugaugaccagcgcccagaucaccaugggcaugcccuacgccgugaccgacgccgugcuggccccccacaucggcggcgaggccggcagcagccacgcccccccccccgcccugacccugaucuucgacagacaccccaucgccgcccugcugugcuaccccgccgccagauaccugaugggcagcaugaccccccaggccgugcuggccuucguggcccugaucccccccacccugcccggcaccaacaucgugcugggcgcccugcccgaggacagacacaucgacagacuggccaagagacagagacccggcgagagacuggaccuggccaugcuggccgccaucagaagaguguacggccugcuggccaacaccgugagauaccugcagggcggcggcagcuggagagaggacuggggccagcugagcggcaccgccgugcccccccagggcgccgagccccagagcaacgccggccccagaccccacaucggcgacacccuguucacccuguucagagcccccgagcugcuggcccccaacggcgaccuguacaacguguucgccugggcccuggacgugcuggccaagagacugagacccaugcacguguucauccuggacuacgaccagagccccgccggcugcagagacgcccugcugcagcugaccagcggcauggugcagacccacgugaccacccccggcagcauccccaccaucugcgaccuggccagaaccuucgccagagagaugggcgaggccaacuga

SEQ ID NO: 6775 - RNA, 1131 nt, Artificial Sequence
  derived and/or modified sequence opt5 from Thymidine_Kinase_TK__Herpes_Simplex_Virus_1_(HSV-1)__AAC16235
auggccagcuaccccugccaccagcaugcuuccgccuucgaccaagcggcuagaucucggggccacagcaaccgcagaaccgcccugcggccucgcagacagcaggaggccacagaagugcggccggagcagaagaugcccacgcuccugcgcgucuauaucgaugggccucauggaaugggcaaaaccacaaccacacaacuucugguugcucucggguccagagacgauauuguguacgugcccgaaccuaugaccuauuggcggguccugggagccucugagacaaucgcuaauauuuacaccacgcagcaccgccuugaccagggcgaaaucagcgccggggaugcggccgugguuaugaccuccgcucagauuacaaugggaaugcccuaugccgugaccgacgcuguccuggccccucauaucggcggcgaggcggggucuagccacgccccgcccccugcucucacacugaucuuugauagacaccccauugccgcucugcucuguuacccugccgcccgguaucugaugggauccaugacgccccaagcugugcuugcguucguugcccugaucccgccuacccuccccggcacaaacauugugcugggggcccuuccugaggaccgccauaucgauagacuggcuaagcggcagcgccccggagaaagacucgaccuggccaugcuggcugccauucggagagucuacggccuccuggcgaauaccgugcgcuaccuucaagggggaggcagcuggcgggaggauuggggccagcugucugggacagcugugcccccucagggagccgaaccgcaguccaacgccggccccagaccucacaucggggacacccucuuuacccuguuccgcgcucccgagcuucuggccccuaauggagaucucuauaacgucuuugcuugggcccuggacguucuggcgaaacggcucagacccaugcauguguucauucuggacuacgaucagagcccggccggcugccgcgacgcccuucugcaacucacaucugggauggugcagacgcacgucaccacaccuggauccauccccaccaucugugaucuggcucggacauuugcuagagagaugggcgaagccaauuga

SEQ ID NO: 6776 - RNA, 1131 nt, Artificial Sequence
  derived and/or modified sequence opt6 from Thymidine_Kinase_TK__Herpes_Simplex_Virus_1_(HSV-1)__AAC16235
auggcaucauauccaugucaccaacacgcaagugcauuugaucaagcagcaaggagcagaggucauucaaauagaagaacagcauuaagaccuagacgacaacaagaagcuacugaaguaagaccagaacaaaaaaugccaaccuuauuaagaguauauauagaugguccacacggaaugggaaaaacuacaacaacucaauuacuuguugcauuagguucaagggacgauauaguauauguaccagaaccuaugacauacuggagaguacuaggugcaucugaaacaauugcaaauauuuauacaacacaacauagacuagaucaaggcgaaauaucagcaggagaugcagcaguuguuaugacaagugcacaaauaacuaugggaaugccauacgcaguuacagacgcaguacucgcaccacauauaggaggagaagcaggaucuucacaugcaccaccaccagcacuaacauuaauauucgacagacaucccauagcagcauuacuaugcuauccagcugcaagauauuuaaugggaucaaugacaccacaagcaguauuagccuuuguagccuugauaccaccaacauuaccaggcacaaacauuguucuaggagcauuaccagaagauagacauauagauagacuagcaaaaagacaaagaccaggagaaagacuagauuuagccaugcucgcagcaauaagaagagucuauggacuuuuagcaaauacaguaagauacuuacaaggaggagguucauggagagaagacuggggacaacuaucaggaacagcaguaccaccucaaggagcagaaccacaaucaaacgcaggaccgagaccccauauaggagauacauuauucaccuuauuuagagcaccagaauuacucgcaccaaauggagaccuauauaauguauuugccugggcauuagauguacuagcuaaaagacucagaccaaugcacguauuuauacuagauuaugaucaauccccagcagguuguagagaugcacucuuacaauuaacaucaggaaugguucaaacacauguaacaacaccaggaucuaucccaacaauaugugaucuagccagaacauuugcuagagaaaugggagaagcuaauuaa

SEQ ID NO: 6777 - protein, 376 aa, Artificial Sequence
  Thymidine_Kinase_TK__Herpes_Simplex_Virus_1_(HSV-1)__P06478
MASYPCHQHASAFDQAARSRGHSNRRTALRPRRQQEATEVRLEQKMPTLLRVYIDGPHGMGKTTTTQLLVALGSRDDIVYVPEPMTYWQVLGASETIANIYTTQHRLDQGEISAGDAAVVMTSAQITMGMPYAVTDAVLAPHVGGEAGSSHAPPPALTLIFDRHPIAALLCYPAARYLMGSMTPQAVLAFVALIPPTLPGTNIVLGALPEDRHIDRLAKRQRPGERLDLAMLAAIRRVYGLLANTVRYLQGGGSWWEDWGQLSGTAVPPQGAEPQSNAGPRPHIGDTLFTLFRAPELLAPNGDLYNVFAWALDVLAKRLRPMHVFILDYDQSPAGCRDALLQLTSGMVQTHVTTPGSIPTICDLARTFAREMGEAN

SEQ ID NO: 6778 - RNA, 1131 nt, Artificial Sequence
  Thymidine_Kinase_TK__Herpes_Simplex_Virus_1_(HSV-1)__AAA45811
auggcuucguaccccugccaucaacacgcgucugcguucgaccaggcugcgcguucucgcggccauagcaaccgacguacggcguugcgcccucgccggcagcaagaagccacggaaguccgccuggagcagaaaaugcccacgcuacugcggguuuauauagacgguccucacgggauggggaaaaccaccaccacgcaacugcugguggcccuggguucgcgcgacgauaucgucuacguacccgagccgaugacuuacuggcaggugcugggggcuuccgagacaaucgcgaacaucuacaccacacaacaccgccucgaccagggugagauaucggccggggacgcggcggugguaaugacaagcgcccagauaacaaugggcaugccuuaugccgugaccgacgccguucuggcuccucaugucgggggggaggcugggaguucacaugccccgcccccggcccucacccucaucuucgaccgccaucccaucgccgcccuccugugcuacccggccgcgcgauaccuuaugggcagcaugaccccccaggccgugcuggcguucguggcccucaucccgccgaccuugcccggcacaaacaucguguugggggcccuuccggaggacagacacaucgaccgccuggccaaacgccagcgccccggcgagcggcuugaccuggcuaugcuggccgcgauucgccgcguuuacgggcugcuugccaauacggugcgguaucugcagggcggcgggucguggugggaggauuggggacagcuuucggggacggccgugccgccccagggugccgagccccagagcaacgcgggcccacgaccccauaucggggacacguuauuuacccuguuucgggcccccgaguugcuggcccccaacggcgaccuguauaacguguuugccugggccuuggacgucuuggccaaacgccuccgucccaugcacgucuuuauccuggauuacgaccaaucgcccgccggcugccgggacgcccugcugcaacuuaccuccgggaugguccagacccacgucaccaccccaggcuccauaccgacgaucugcgaccuggcgcgcacguuugcccgggagaugggggaggcuaacuga

SEQ ID NO: 6779 - RNA, 1131 nt, Artificial Sequence
  derived and/or modified sequence opt1 from Thymidine_Kinase_TK__Herpes_Simplex_Virus_1_(HSV-1)__AAA45811
auggccagcuaccccugccaccagcacgccuccgcguucgaccaggccgcccgcagccggggccacuccaaccgccggaccgcccugcgcccgcggcgccagcaggaggccaccgaggugcggcucgagcagaagaugcccacgcugcugcgcgucuacaucgacgggccccacggcauggggaagaccaccaccacgcagcuccugguggcgcugggcagccgggacgacaucguguacguccccgagccgaugaccuacuggcagguccucggggccuccgagaccaucgccaacaucuacaccacgcagcaccgccuggaccagggcgagaucagcgccggcgacgcggccguggugaugaccuccgcccagaucaccauggggaugcccuacgccgugaccgacgccgugcuggcgccccacgucggcggggaggccggcagcucccacgcgcccccgcccgcccucacgcugaucuucgaccggcaccccaucgccgcccugcucugcuaccccgccgcccgcuaccugauggggagcaugaccccgcaggccgugcuggccuucguggcgcucaucccgcccacccugcccggcaccaacaucguccugggcgcccuccccgaggaccggcacaucgaccgccuggccaagcggcagcgccccggggagcggcuggaccucgccaugcuggccgcgauccgccggguguacggccugcucgccaacacggugcgcuaccugcagggcgggggcuccuggugggaggacugggggcagcugagcggcaccgccgucccgccccagggggccgagccccaguccaacgcgggcccccggccccacaucggggacacccucuucacccuguuccgcgcccccgagcugcucgccccgaacggcgaccuguacaacguguucgccugggcccuggacgugcucgcgaagcgccugcggcccaugcacgucuucauccuggacuacgaccagagccccgccggcugccgcgacgcccuccugcagcugacguccgggauggugcagacccacgugaccacccccggcagcaucccgacgaucugcgaccucgcccggaccuucgcccgcgagaugggggaggcgaacuga

SEQ ID NO: 6780 - RNA, 1131 nt, Artificial Sequence
  derived and/or modified sequence opt2 from Thymidine_Kinase_TK__Herpes_Simplex_Virus_1_(HSV-1)__AAA45811
auggccuccuaccccugccaccagcacgccuccgccuucgaccaggccgcccgcucccgcggccacuccaaccgccgcaccgcccuccgcccccgccgccagcaggaggccaccgagguccgccucgagcagaagaugcccacccuccuccgcgucuacaucgacggcccccacggcaugggcaagaccaccaccacccagcuccucgucgcccucggcucccgcgacgacaucgucuacguccccgagcccaugaccuacuggcagguccucggcgccuccgagaccaucgccaacaucuacaccacccagcaccgccucgaccagggcgagaucuccgccggcgacgccgccgucgucaugaccuccgcccagaucaccaugggcaugcccuacgccgucaccgacgccguccucgccccccacgucggcggcgaggccggcuccucccacgcccccccccccgcccucacccucaucuucgaccgccaccccaucgccgcccuccucugcuaccccgccgcccgcuaccucaugggcuccaugaccccccaggccguccucgccuucgucgcccucaucccccccacccuccccggcaccaacaucguccucggcgcccuccccgaggaccgccacaucgaccgccucgccaagcgccagcgccccggcgagcgccucgaccucgccaugcucgccgccauccgccgcgucuacggccuccucgccaacaccguccgcuaccuccagggcggcggcuccuggugggaggacuggggccagcucuccggcaccgccguccccccccagggcgccgagccccaguccaacgccggcccccgcccccacaucggcgacacccucuucacccucuuccgcgcccccgagcuccucgcccccaacggcgaccucuacaacgucuucgccugggcccucgacguccucgccaagcgccuccgccccaugcacgucuucauccucgacuacgaccagucccccgccggcugccgcgacgcccuccuccagcucaccuccggcaugguccagacccacgucaccacccccggcuccauccccaccaucugcgaccucgcccgcaccuucgcccgcgagaugggcgaggccaacuga

SEQ ID NO: 6781 - RNA, 1131 nt, Artificial Sequence
  derived and/or modified sequence opt3 from Thymidine_Kinase_TK__Herpes_Simplex_Virus_1_(HSV-1)__AAA45811
auggccagcuaccccugccaccagcaugcuuccgcauucgaccaagccgcgagaucuaggggccacucaaaccggcgcaccgcucugcgaccucguagacagcaggaggccacagaagugaggcucgagcagaagaugccaacucuucugcgggucuauaucgaugggccgcauggaauggguaaaacgaccacaacucaauuguuaguugcacugggcagucgcgacgauauuguguacguacccgaaccuaugaccuauuggcaagugcuaggggccagcgagacaauagcuaauaucuacaccacucagcacagacucgaccagggagaaauuuccgcaggcgaugccgcugucgugaugacaucugcccagaucaccauggguaugccauaugcgguuacggacgcagugcuggcuccccaugucgggggagaggcuggcucgucacacgccccuccacccgcacuuacucugauuuuugauaggcacccuaucgcugccuugcucuguuacccagcggcccgguaucugaugggcagcaugaccccgcaggcagugcuggcuuucguagcccucauacccccuacauuaccagggacuaacaucguucugggagcccuucccgaggaccgccauauugaucgauuggccaagagacagaggccuggugaacggcuggaccuagcaaugcucgccgcuauccgucgcguguacggccugcuugcgaauaccgucagauaccugcaagggggaggcaguuggugggaggauuggggucaguuguccgggacagcagugccaccccagggagccgaaccgcagucuaacgcuggcccuaggccccacauuggcgacacccucuuuacgcuguuccgggccccagaguuacuggcaccuaauggggaucucuauaacguguuugccugggcucuugacguccuggccaaacgauugcgccccaugcauguuuucauccuagacuacgaucaaagcccagcaggaugcagagacgcgcugcuccagcugacuuccgguauggugcagacacacguaaccacucccggcucaauaccuacaauuugugaucuugcuaggaccuuugcccgggagaugggggaagcaaauuga

SEQ ID NO: 6782 - RNA, 1131 nt, Artificial Sequence
  derived and/or modified sequence opt4 from Thymidine_Kinase_TK__Herpes_Simplex_Virus_1_(HSV-1)__AAA45811
auggccagcuaccccugccaccagcacgccagcgccuucgaccaggccgccagaagcagaggccacagcaacagaagaaccgcccugagacccagaagacagcaggaggccaccgaggugagacuggagcagaagaugcccacccugcugagaguguacaucgacggcccccacggcaugggcaagaccaccaccacccagcugcugguggcccugggcagcagagacgacaucguguacgugcccgagcccaugaccuacuggcaggugcugggcgccagcgagaccaucgccaacaucuacaccacccagcacagacuggaccagggcgagaucagcgccggcgacgccgccguggugaugaccagcgcccagaucaccaugggcaugcccuacgccgugaccgacgccgugcuggccccccacgugggcggcgaggccggcagcagccacgcccccccccccgcccugacccugaucuucgacagacaccccaucgccgcccugcugugcuaccccgccgccagauaccugaugggcagcaugaccccccaggccgugcuggccuucguggcccugaucccccccacccugcccggcaccaacaucgugcugggcgcccugcccgaggacagacacaucgacagacuggccaagagacagagacccggcgagagacuggaccuggccaugcuggccgccaucagaagaguguacggccugcuggccaacaccgugagauaccugcagggcggcggcagcuggugggaggacuggggccagcugagcggcaccgccgugcccccccagggcgccgagccccagagcaacgccggccccagaccccacaucggcgacacccuguucacccuguucagagcccccgagcugcuggcccccaacggcgaccuguacaacguguucgccugggcccuggacgugcuggccaagagacugagacccaugcacguguucauccuggacuacgaccagagccccgccggcugcagagacgcccugcugcagcugaccagcggcauggugcagacccacgugaccacccccggcagcauccccaccaucugcgaccuggccagaaccuucgccagagagaugggcgaggccaacuga

SEQ ID NO: 6783 - RNA, 1131 nt, Artificial Sequence
  derived and/or modified sequence opt5 from Thymidine_Kinase_TK__Herpes_Simplex_Virus_1_(HSV-1)__AAA45811
auggccagcuaccccugccaccagcaugcuuccgccuucgaccaagcggcuagaucucggggccacagcaaccgcagaaccgcccugcggccucgcagacagcaggaggccacagaagugcggcucgagcagaagaugccgacgcugcuucgcgucuauaucgaugggccccauggaaugggcaaaaccacaaccacacaacugcucguugcucugggguccagagacgauauuguguacgugccugaacccaugaccuauuggcagguccuuggagccucugagacaaucgcuaauauuuacaccacgcagcaccggcuggaccagggcgaaaucagcgccggggaugcggccgugguuaugaccuccgcucaaauuacaaugggaaugccuuaugccgugaccgacgcuguccucgcgccccaugugggcggcgaggccgggucuagccacgccccuccgcccgcucugacacugaucuuugaucgccacccuaucgccgcucuccuguguuaccccgccgccagauaucuuaugggauccaugaccccucaggcuguucuggcguucguggcccucauucccccgacgcugccuggcacaaacaucguccuuggggcucugcccgaggaccggcauauugaucgccucgccaagagacagcggccuggagaacgccuggaccuggccaugcucgcugccaucagacggguguacggccugcuugcgaauaccgugagauaccugcaagggggaggcagcuggugggaggauuggggccagcucucugggacagcugucccuccccagggagccgaaccccaguccaacgccggcccgcgcccccacauuggggacacccuguuuacccuuuuccgggcuccugagcugcucgcccccaauggagaucuguauaacguuuuugcuugggcccuggacgugcucgcgaaaagacugcgcccuaugcauguguucauccuugacuacgaucaaagccccgccggcugccgggacgcucugcuccagcugacaucugggaugguccagacgcacgugaccacaccgggauccauuccuaccaucugugaucuugccagaacauuugcucgcgagaugggcgaagccaauuga

SEQ ID NO: 6784 - RNA, 1131 nt, Artificial Sequence
  derived and/or modified sequence opt6 from Thymidine_Kinase_TK__Herpes_Simplex_Virus_1_(HSV-1)__AAA45811
auggcaucauacccuugucaccaacaugcaucagcauuugaucaagcagcacgaucaagaggacauucaaauagaagaacugcacuaagaccuagaagacaacaagaagcaacagaaguaagauuagaacaaaaaaugcccacacuacuuagaguuuauauagauggaccacaugguaugggaaaaacaacaacaacucaauuacuaguagcauuaggaucaagagaugauauaguauauguucccgaacccaugaccuacuggcaaguauuaggagcaagcgaaacaauagcaaauauauacacaacucaacauagacuugaccaaggcgaaauaucagcaggagacgcagcaguuguaaugacaucagcacaaauaacaaugggcaugccauaugcaguuacagacgcaguauuagcuccccacguaggaggcgaagcaggauccucacaugcaccaccaccagcacuaacauuaauuuuugacagacaccccauagcugcacuccuauguuacccagcagcaagauauuuaaugggcucaaugacaccacaagcaguauuagccuucguagcauugauacccccaacauuaccaggaacaaauaucguuuuaggagcauuaccagaagacagacauauagaucgccuugcaaagagacaaagaccuggagaaagacuagaccuugcaaugcuagcagcaaucagaagaguauacggauuacuagcaaauacaguaagauaucuucaaggaggaggaucauggugggaagauuggggacaauuaucaggaacagcaguuccaccacaaggagcagaaccucaaucaaaugcuggcccuagaccacauauaggagauacauuauuuacuuuauucagagcaccugaauuacucgcucccaauggugauuuauauaauguuuucgcuugggcauuagauguauuagcaaaaagacuaagaccaaugcauguauuuauauuagauuaugaucaaucaccagcaggauguagagaugcuuuacuacaauuaacaagugguaugguacaaacacauguaacaaccccugguucuauaccaacaauaugugauuuggcaagaacauuugcaagagaaaugggcgaagcaaauuaa

SEQ ID NO: 6785 - protein, 376 aa, Artificial Sequence
  Thymidine_Kinase_TK__Herpes_Simplex_Virus_1_(HSV-1)__P08333
MASYPGHQHASAFDQAARSRGHSNRRTALRPRRQQEATEVRPEQKMPTLLRVYIDGPHGMGKTTTTQLLVALGSRDDIVYVPEPMTYWRVLGASETIANIYTTQHRLDQGEISAGDAAVVMTSAQITIGMPYAVTDAVLAPHIGGEAGSSHAPPPALTLIFDRHPIAALLCYPAARYLMGSMTPQAVLAFVALIPPTLPGTNIVLGALPEDRHIDRLAKRQRPGERLDLAMLAAIRRVYGLLANTVRYLQGGGSWREDWGQLSGTAVPPQGAEPQSNAGPRPHIGDTLFTLFRAPELLAPNGDLYNVFAWALDVLAKRLRPMHVFILDYDQSPAGCRDALLQLTSGMIQTHVTTPGSIPTICDLARTFAREMGEAN

SEQ ID NO: 6786 - RNA, 1131 nt, Artificial Sequence
  Thymidine_Kinase_TK__Herpes_Simplex_Virus_1_(HSV-1)__AAA45814
auggcuucguaccccggccaucagcacgcgucugcguucgaccaggcugcgcguucucgcggccauagcaaccgacguacggcguugcgcccucgccggcagcaagaagccacggaaguccgcccggagcagaaaaugcccacgcuacugcggguuuauauagacgguccccacgggauggggaaaaccaccaccacgcaacugcugguggcccuggguucgcgcgacgauaucgucuacguacccgagccgaugacuuacuggcgggugcugggggcuuccgagacaaucgcgaacaucuacaccacacaacaccgccucgaccagggugagauaucggccggggacgcggcggugguaaugacaagcgcccagauaacaauaggcaugccuuaugccgugaccgacgccguucuggcuccucauaucgggggggaggcugggagcucacaugccccgcccccggcccucacccucaucuucgaccgccaucccaucgccgcccuccugugcuacccggccgcgcgauaccuuaugggcagcaugaccccccaggccgugcuggcguucguggcccucaucccgccgaccuugcccggcacaaacaucguguugggggcccuuccggaggacagacacaucgaccgccuggccaaacgccagcgccccggcgagcggcuugaccuggcuaugcuggccgcgauucgccgcguuuacgggcugcuugccaauacggugcgguaucugcagggcggcgggucguggcgggaggauuggggacagcuuucggggacggccgugccgccccagggugccgagccccagagcaacgcgggcccacgaccccauaucggggacacguuauuuacccuguuucgggcccccgaguugcuggcccccaacggcgaccuguacaacguguuugccugggccuuggacgucuuggccaaacgccuccgucccaugcacgucuuuauccuggauuacgaccaaucgcccgccggcugccgggacgcccugcugcaacuuaccuccgggaugauccagacccacgucaccaccccaggcuccauaccgacgaucugcgaccuggcgcgcacguuugcccgggagaugggggaggcuaacuga

SEQ ID NO: 6787 - RNA, 1131 nt, Artificial Sequence
  derived and/or modified sequence opt1 from Thymidine_Kinase_TK__Herpes_Simplex_Virus_1_(HSV-1)__AAA45814
auggccagcuaccccggccaccagcacgccuccgcguucgaccaggccgcccgcagccgggggcacuccaaccgccggaccgcccugcgcccgcggcgccagcaggaggccaccgaggugcggcccgagcagaagaugcccacgcuccugcgcgucuacaucgacggcccccacgggaugggcaagaccaccaccacgcagcugcucguggcgcuggggagccgggacgacaucguguacgucccggagcccaugaccuacuggcgcgugcugggcgccuccgagaccaucgccaacaucuacaccacgcagcaccggcucgaccagggcgagaucagcgccggggacgcggccguggucaugaccuccgcccagaucaccaucggcaugcccuacgccgugaccgacgccgugcuggcgccccacaucgggggcgaggccgggagcucccacgccccgccgcccgcccugacgcucaucuucgaccgccaccccaucgccgcgcugcugugcuaccccgccgcccgguaccucaugggcagcaugacgccccaggccguccuggccuucguggcgcugaucccgcccacccuccccggcaccaacaucgugcugggggcccugcccgaggaccgccacaucgaccggcucgccaagcgccagcggcccggcgagcgccuggaccuggccaugcucgccgcgauccggcgcgucuacgggcugcuggccaacaccgugcgguaccuccagggcggcggguccuggcgcgaggacuggggccagcugagcgggaccgccgugcccccgcagggcgccgagccccaguccaacgcggggccccgcccccacaucggcgacacccuguucacccucuuccgggccccggagcugcuggcccccaacggcgaccucuacaacgucuucgccugggcccuggacgugcuggcgaagcgccuccggcccaugcacguguucauccuggacuacgaccagagccccgccgggugccgcgacgcccugcuccagcugacguccggcaugauccagacccacgucaccaccccggggagcauccccacgaucugcgaccuggcccggaccuucgcccgcgagaugggcgaggcgaacuga

SEQ ID NO: 6788 - RNA, 1131 nt, Artificial Sequence
  derived and/or modified sequence opt2 from Thymidine_Kinase_TK__Herpes_Simplex_Virus_1_(HSV-1)__AAA45814
auggccuccuaccccggccaccagcacgccuccgccuucgaccaggccgcccgcucccgcggccacuccaaccgccgcaccgcccuccgcccccgccgccagcaggaggccaccgagguccgccccgagcagaagaugcccacccuccuccgcgucuacaucgacggcccccacggcaugggcaagaccaccaccacccagcuccucgucgcccucggcucccgcgacgacaucgucuacguccccgagcccaugaccuacuggcgcguccucggcgccuccgagaccaucgccaacaucuacaccacccagcaccgccucgaccagggcgagaucuccgccggcgacgccgccgucgucaugaccuccgcccagaucaccaucggcaugcccuacgccgucaccgacgccguccucgccccccacaucggcggcgaggccggcuccucccacgcccccccccccgcccucacccucaucuucgaccgccaccccaucgccgcccuccucugcuaccccgccgcccgcuaccucaugggcuccaugaccccccaggccguccucgccuucgucgcccucaucccccccacccuccccggcaccaacaucguccucggcgcccuccccgaggaccgccacaucgaccgccucgccaagcgccagcgccccggcgagcgccucgaccucgccaugcucgccgccauccgccgcgucuacggccuccucgccaacaccguccgcuaccuccagggcggcggcuccuggcgcgaggacuggggccagcucuccggcaccgccguccccccccagggcgccgagccccaguccaacgccggcccccgcccccacaucggcgacacccucuucacccucuuccgcgcccccgagcuccucgcccccaacggcgaccucuacaacgucuucgccugggcccucgacguccucgccaagcgccuccgccccaugcacgucuucauccucgacuacgaccagucccccgccggcugccgcgacgcccuccuccagcucaccuccggcaugauccagacccacgucaccacccccggcuccauccccaccaucugcgaccucgcccgcaccuucgcccgcgagaugggcgaggccaacuga

SEQ ID NO: 6789 - RNA, 1131 nt, Artificial Sequence
  derived and/or modified sequence opt3 from Thymidine_Kinase_TK__Herpes_Simplex_Virus_1_(HSV-1)__AAA45814
auggccagcuaccccggccaccagcaugcuuccgcauucgaccaagccgcgagaucuagggggcacucaaaccggcgcaccgcucugcgaccucguagacagcaggaggccacagaagugaggccagagcagaagaugccgacucuccuucgggucuauaucgauggaccccaugguaugggcaaaacgaccacaacucaacuguugguugcauuagggagucgcgacgauauuguguacguaccugaaccaaugaccuauuggagagugcugggagccagcgagacaauagcuaauaucuacaccacucagcacaggcuagaccagggcgaaauuuccgccggugaugcagcugucgugaugacaucugcccagaucaccauugggaugcccuaugcgguuacggacgcagugcucgccccucauaucggaggcgaggcuggcucgucacacgccccacccccugcacugacucuuauauuugaucggcacccaaucgcugcccuguugugcuacccggcggcccgcuaucucauggggagcaugacgccccaagcaguccuggcuuucguggcccugauuccuccaacacuccccggaacuaacaucguauuaggugcucugccugaggaccgacauauugauagacuugccaagaggcagcggccaggcgaacguuuggaccuggcaaugcuagccgcuauccgcagaguuuacgggcuccuggcgaauaccgugagguaccuucagggaggcgguaguuggcgggaggauugggggcagcuguccggaacagcagugcccccgcaaggcgccgaaccucagucuaacgcuggcccccgaccacacauaggggacaccuuguuuacccucuuccgcgccccugagcuguuagcacccaauggagaucuguauaacgucuuugccugggcucucgacgugcuugccaaaagacugaggccaaugcaugucuucauuuuggacuacgaucagagccccgcagguugucgggacgcgcuacugcaacucacuuccggcaugauccagacacacguuaccacuccugggucaauuccaacaaucugcgaucuggcucgcaccuuugccagagagaugggagaagcaaauuga

SEQ ID NO: 6790 - RNA, 1131 nt, Artificial Sequence
  derived and/or modified sequence opt4 from Thymidine_Kinase_TK__Herpes_Simplex_Virus_1_(HSV-1)__AAA45814
auggccagcuaccccggccaccagcacgccagcgccuucgaccaggccgccagaagcagaggccacagcaacagaagaaccgcccugagacccagaagacagcaggaggccaccgaggugagacccgagcagaagaugcccacccugcugagaguguacaucgacggcccccacggcaugggcaagaccaccaccacccagcugcugguggcccugggcagcagagacgacaucguguacgugcccgagcccaugaccuacuggagagugcugggcgccagcgagaccaucgccaacaucuacaccacccagcacagacuggaccagggcgagaucagcgccggcgacgccgccguggugaugaccagcgcccagaucaccaucggcaugcccuacgccgugaccgacgccgugcuggccccccacaucggcggcgaggccggcagcagccacgcccccccccccgcccugacccugaucuucgacagacaccccaucgccgcccugcugugcuaccccgccgccagauaccugaugggcagcaugaccccccaggccgugcuggccuucguggcccugaucccccccacccugcccggcaccaacaucgugcugggcgcccugcccgaggacagacacaucgacagacuggccaagagacagagacccggcgagagacuggaccuggccaugcuggccgccaucagaagaguguacggccugcuggccaacaccgugagauaccugcagggcggcggcagcuggagagaggacuggggccagcugagcggcaccgccgugcccccccagggcgccgagccccagagcaacgccggccccagaccccacaucggcgacacccuguucacccuguucagagcccccgagcugcuggcccccaacggcgaccuguacaacguguucgccugggcccuggacgugcuggccaagagacugagacccaugcacguguucauccuggacuacgaccagagccccgccggcugcagagacgcccugcugcagcugaccagcggcaugauccagacccacgugaccacccccggcagcauccccaccaucugcgaccuggccagaaccuucgccagagagaugggcgaggccaacuga

SEQ ID NO: 6791 - RNA, 1131 nt, Artificial Sequence
  derived and/or modified sequence opt5 from Thymidine_Kinase_TK__Herpes_Simplex_Virus_1_(HSV-1)__AAA45814
auggccagcuaccccggccaccagcaugcuuccgccuucgaccaagcggcuagaucucgggggcacagcaaccgcagaaccgcccugcggccucgcagacagcaggaggccacagaagugcggccggagcagaagaugcccacgcuccugcgcgucuauaucgauggaccucauggcauggggaaaaccacaaccacacaacuucugguugcucucggauccagagacgauauuguguacgugcccgaaccuaugaccuauuggcggguccugggcgccucugagacaaucgcuaauauuuacaccacgcagcaccgccuugaccagggggaaaucagcgccggagaugcggccgugguuaugaccuccgcucagauuacaaucggcaugcccuaugccgugaccgacgcuguccuggccccucauaucggcggggaggcgggaucuagccacgccccgcccccugcucucacacugauuuuugauagacaccccaucgccgcucugcucugcuacccugccgcccgguaucugaugggcuccaugacgccccaagcugugcuugcguucguugcccugauuccgccuacccuccccgggacaaacaucgugcugggagcccuuccugaggaccgccauauugauagacuggcuaagcggcagcgccccggcgaaagacucgaccuggccaugcuggcugccauccggagagucuacgggcuccuggcgaauaccgugcgcuaccuucagggaggcggcagcuggcgggaggauugggggcagcugucuggaacagcugugcccccucaaggcgccgaaccgcaguccaacgccgggcccagaccucacauuggagacacccucuuuacccuguuccgcgcucccgagcuucuggccccuaauggcgaucucuauaacgucuuugcuugggcccuggacguucuggcgaaacggcucagacccaugcauguguucauccuggacuacgaucagagcccggccgggugucgcgacgcccuucugcaacucacaucuggaaugauccagacgcacgugaccacaccuggcuccauucccaccaucugcgaucuggcucggacauuugcuagagagaugggcgaagccaauuga

SEQ ID NO: 6792 - RNA, 1131 nt, Artificial Sequence
  derived and/or modified sequence opt6 from Thymidine_Kinase_TK__Herpes_Simplex_Virus_1_(HSV-1)__AAA45814
auggcaucauauccaggacaucaacaugcaucagcauucgaucaagcagcaagaucaagaggacauagcaaucguagaacagcauuacgaccaagacgacaacaagaagcaacagaaguaagaccagaacaaaaaaugccaacauuacuaagaguauauauagaugguccacauggaaugggaaaaacaacaacaacucaauuauuaguagcacuaggaucaagagaugauauaguuuacguaccagaaccaaugacauauuggagaguacuaggagccucagaaacuauagcaaauauauacacaacacaacacagauuagaucaaggagaaauaagugcaggugacgcugcaguuguuaugacaagugcacaaauaacuauaggcaugccuuaugcaguaacugaugcuguccuagcaccacauauaggaggagaagcaggaucaucacacgcuccuccaccugcccucacauuaauauuugaucgacaccccauagcugcacuauuauguuauccagcagcaagauaucucaugggauccaugacaccacaagcuguuuuagccuuuguagcauuaauuccaccaacucucccaggcacaaauauuguauuaggagcccuaccagaagaucgacauauagauagauuagcaaaaagacaaagaccaggagaaagauuagauuuagcuaugcuagcugcuauacgucgaguauauggauuacuagcaaauacaguaagauauuuacaaggaggaggaaguuggagagaagacuggggacaauuaucaggaacagcuguaccaccacaaggagcagaaccacaaucaaaugcaggaccaagaccacacauaggugauacacuauuuaccuuauucagagcaccagaacuauuagcuccaaauggagaccuauauaacguauuugcaugggccuuagacguauuagcuaaaagacuaagaccaaugcauguuuuuauucucgacuaugaucaaucaccagccgguuguagagacgcauuacuacaauuaacuucagguaugauacaaacacauguaacaacaccuggaucaauaccaaccauaugcgaccuagcaaggacauuugcaagagaaaugggagaagcaaauuaa

SEQ ID NO: 6793 - protein, 376 aa, Artificial Sequence
  Thymidine_Kinase_TK__Herpes_Simplex_Virus_1_(HSV-1)__Q9DLP2
MASYPCHQHASAFDQAARSRGHSNRRTALRPRRQQEATEVRLEQKMPTLLRVYIDGPHGMGKTTTTQLLVALGSRDDIVYVPEPMTYWQVLGASETIANIYTTQHRLDQGEISAGDAAVVMTSAQITMGMPYAVTDAVLAPHIGGEAGSSHAPPPALTLIFDRHPIAALLCYPAARYLMGSMTPQAVLAFVALIPPTLPGTNIVLGALPEDRHIDRLAKRQRPGERLDLAMLAAIRRVYGLLANTVRYLQGGGSWREDWGQLSGTAVPPQGAEPQSNAGPRPHIGDTLFTLFRAPELLAPNGDLYNVFAWALDVLAKRLRPMHVFILDYDQSPAGCRDALLQLTSGMVQTHVTTPGSIPTICDLARTFARGVGEAN

SEQ ID NO: 6794 - RNA, 1131 nt, Artificial Sequence
  Thymidine_Kinase_TK__Herpes_Simplex_Virus_1_(HSV-1)__AAG40842
auggcuucguaccccugccaucaacacgcgucugcguucgaccaggcugcgcguucucgcggccauagcaaccgacguacggcguugcgcccucgccggcagcaagaagccacggaaguccgccuggagcagaaaaugcccacgcuacugcggguuuauauagacgguccucacgggauggggaaaaccaccaccacgcaacugcugguggcccuggguucgcgcgacgauaucgucuacguacccgagccgaugacuuacuggcaggugcugggggcuuccgagacaaucgcgaacaucuacaccacacaacaccgccucgaccagggugagauaucggccggggacgcggcggugguaaugacaagcgcccagauaacaaugggcaugccuuaugccgugaccgacgccguucuggcuccucauaucgggggggaggcugggagcucacaugccccgcccccggcccucacccucaucuucgaccgccaucccaucgccgcccuccugugcuacccggccgcgcgauaccuuaugggcagcaugaccccccaggccgugcuggcguucguggcccucaucccgccgaccuugcccggcacaaacaucguguugggggcccuuccggaggacagacacaucgaccgccuggccaaacgccagcgccccggcgagcggcuugaccuggcuaugcuggccgcgauucgccgcguuuacgggcugcuugccaauacggugcgguaucugcagggcggcgggucguggcgggaggauuggggacagcuuucggggacggccgugccgccccagggugccgagccccagagcaacgcgggcccacgaccccauaucggggacacguuauuuacccuguuucgggcccccgaguugcuggcccccaacggcgaccuguauaacguguuugccugggccuuggacgucuuggccaaacgccuccgucccaugcacgucuuuauccuggauuacgaccaaucgcccgccggcugccgggacgcccugcugcaacuuaccuccgggaugguccagacccacgucaccacccccggcuccauaccgacgaucugcgaccuggcgcgcacguuugcccggggagugggggaggcuaacuga

SEQ ID NO: 6795 - RNA, 1131 nt, Artificial Sequence
  derived and/or modified sequence opt1 from Thymidine_Kinase_TK__Herpes_Simplex_Virus_1_(HSV-1)__AAG40842
auggccagcuaccccugccaccagcacgccuccgcguucgaccaggccgcccggagccggggccacuccaaccgccggaccgcccugcgcccgcggcgccagcaggaggccaccgaggugcggcucgagcagaagaugcccacgcugcugcgcgucuacaucgacgggccccacggcauggggaagaccaccaccacgcagcuccugguggcgcugggcagccgggacgacaucguguacguccccgagccgaugaccuacuggcagguccucggggccuccgagaccaucgccaacaucuacaccacgcagcaccgccuggaccagggcgagaucagcgccggcgacgcggccguggugaugaccuccgcccagaucaccauggggaugcccuacgccgugaccgacgccgugcuggcgccccacaucggcggggaggccggcagcucccacgcgcccccgcccgcccucacgcugaucuucgaccggcaccccaucgccgcccugcucugcuaccccgccgcccgcuaccugauggggagcaugaccccgcaggccguccuggccuucguggcgcucaucccgcccacccugcccggcaccaacaucgugcugggcgcccuccccgaggaccggcacaucgaccgccuggccaagcggcagcgccccggggagcggcuggaccucgccaugcuggccgcgauccgccgggucuacggccugcucgccaacacggugcgcuaccugcagggcgggggcuccuggcgggaggacugggggcagcugagcggcaccgccgugccgccccagggggccgagccccaguccaacgcgggcccccgcccccacaucggggacacccucuucacccuguuccgcgcccccgagcugcucgccccgaacggcgaccuguacaacgucuucgccugggcccuggacgugcucgcgaagcggcugcgccccaugcacguguucauccuggacuacgaccagagccccgccggcugccgggacgcccuccugcagcugacguccgggaugguccagacccacgugaccacccccggcagcaucccgacgaucugcgaccucgcccgcaccuucgcccgcggggugggcgaggcgaacuga

SEQ ID NO: 6796 - RNA, 1131 nt, Artificial Sequence
  derived and/or modified sequence opt2 from Thymidine_Kinase_TK__Herpes_Simplex_Virus_1_(HSV-1)__AAG40842
auggccuccuaccccugccaccagcacgccuccgccuucgaccaggccgcccgcucccgcggccacuccaaccgccgcaccgcccuccgcccccgccgccagcaggaggccaccgagguccgccucgagcagaagaugcccacccuccuccgcgucuacaucgacggcccccacggcaugggcaagaccaccaccacccagcuccucgucgcccucggcucccgcgacgacaucgucuacguccccgagcccaugaccuacuggcagguccucggcgccuccgagaccaucgccaacaucuacaccacccagcaccgccucgaccagggcgagaucuccgccggcgacgccgccgucgucaugaccuccgcccagaucaccaugggcaugcccuacgccgucaccgacgccguccucgccccccacaucggcggcgaggccggcuccucccacgcccccccccccgcccucacccucaucuucgaccgccaccccaucgccgcccuccucugcuaccccgccgcccgcuaccucaugggcuccaugaccccccaggccguccucgccuucgucgcccucaucccccccacccuccccggcaccaacaucguccucggcgcccuccccgaggaccgccacaucgaccgccucgccaagcgccagcgccccggcgagcgccucgaccucgccaugcucgccgccauccgccgcgucuacggccuccucgccaacaccguccgcuaccuccagggcggcggcuccuggcgcgaggacuggggccagcucuccggcaccgccguccccccccagggcgccgagccccaguccaacgccggcccccgcccccacaucggcgacacccucuucacccucuuccgcgcccccgagcuccucgcccccaacggcgaccucuacaacgucuucgccugggcccucgacguccucgccaagcgccuccgccccaugcacgucuucauccucgacuacgaccagucccccgccggcugccgcgacgcccuccuccagcucaccuccggcaugguccagacccacgucaccacccccggcuccauccccaccaucugcgaccucgcccgcaccuucgcccgcggcgucggcgaggccaacuga

SEQ ID NO: 6797 - RNA, 1131 nt, Artificial Sequence
  derived and/or modified sequence opt3 from Thymidine_Kinase_TK__Herpes_Simplex_Virus_1_(HSV-1)__AAG40842
auggccagcuaccccugccaccagcaugcuuccgcauucgaccaagccgcgagaucuaggggccacucaaaccggcgcaccgcucugcgaccucguagacagcaggaggccacagaagugaggcucgagcagaagaugccaacucuucugcgggucuauaucgaugggccgcauggaauggguaaaacgaccacaacucaauuguuaguugcacugggcagucgcgacgauauuguguacguacccgaaccuaugaccuauuggcaagugcuaggggccagcgagacaauagcuaauaucuacaccacucagcacagacucgaccagggagaaauuuccgcaggcgaugccgcugucgugaugacaucugcccagaucaccauggguaugccauaugcgguuacggacgcagugcuggcuccccauauugggggagaggcuggcucgucacacgccccuccacccgcacuuacucugaucuuugauaggcacccuauagcugccuugcucuguuacccagcggcccgguaucugaugggcagcaugaccccgcaggcaguccuggcuuucguggcccucauucccccuacauuaccagggacuaacaucguacugggagcccuucccgaggaccgccauaucgaucgauuggccaagagacagaggccuggugaacggcuggaccuagcaaugcucgccgcuauucgucgcguuuacggccugcuugcgaauaccgugagauaccugcaagggggaggcaguuggagggaggauuggggucaguuguccgggacagcagucccaccccagggagccgaaccgcagucuaacgcuggcccucggccccacaucggcgacacccucuuuacgcuguuccgagccccagaguuacuggcaccuaauggggaucucuauaacguguuugccugggcucuugacgugcuggccaaacgcuugagacccaugcaugucuucauacuagacuacgaucaaagcccagcaggaugcagggacgcgcugcuccagcugacuuccgguaugguucagacacacgugaccacucccggcucaauuccuacaaucugugaucuugcucggaccuuugcccgcgggguaggagaggcaaauuga

SEQ ID NO: 6798 - RNA, 1131 nt, Artificial Sequence
  derived and/or modified sequence opt4 from Thymidine_Kinase_TK__Herpes_Simplex_Virus_1_(HSV-1)__AAG40842
auggccagcuaccccugccaccagcacgccagcgccuucgaccaggccgccagaagcagaggccacagcaacagaagaaccgcccugagacccagaagacagcaggaggccaccgaggugagacuggagcagaagaugcccacccugcugagaguguacaucgacggcccccacggcaugggcaagaccaccaccacccagcugcugguggcccugggcagcagagacgacaucguguacgugcccgagcccaugaccuacuggcaggugcugggcgccagcgagaccaucgccaacaucuacaccacccagcacagacuggaccagggcgagaucagcgccggcgacgccgccguggugaugaccagcgcccagaucaccaugggcaugcccuacgccgugaccgacgccgugcuggccccccacaucggcggcgaggccggcagcagccacgcccccccccccgcccugacccugaucuucgacagacaccccaucgccgcccugcugugcuaccccgccgccagauaccugaugggcagcaugaccccccaggccgugcuggccuucguggcccugaucccccccacccugcccggcaccaacaucgugcugggcgcccugcccgaggacagacacaucgacagacuggccaagagacagagacccggcgagagacuggaccuggccaugcuggccgccaucagaagaguguacggccugcuggccaacaccgugagauaccugcagggcggcggcagcuggagagaggacuggggccagcugagcggcaccgccgugcccccccagggcgccgagccccagagcaacgccggccccagaccccacaucggcgacacccuguucacccuguucagagcccccgagcugcuggcccccaacggcgaccuguacaacguguucgccugggcccuggacgugcuggccaagagacugagacccaugcacguguucauccuggacuacgaccagagccccgccggcugcagagacgcccugcugcagcugaccagcggcauggugcagacccacgugaccacccccggcagcauccccaccaucugcgaccuggccagaaccuucgccagaggcgugggcgaggccaacuga

SEQ ID NO: 6799 - RNA, 1131 nt, Artificial Sequence
  derived and/or modified sequence opt5 from Thymidine_Kinase_TK__Herpes_Simplex_Virus_1_(HSV-1)__AAG40842
auggccagcuaccccugccaccagcaugcuuccgccuucgaccaagcggcuagaucucggggccacagcaaccgcagaaccgcccugcggccucgcagacagcaggaggccacagaagugcggcucgagcagaagaugccgacgcugcuucgcgucuauaucgaugggccccauggaaugggcaaaaccacaaccacacaacugcucguugcucugggguccagagacgauauuguguacgugccugaacccaugaccuauuggcagguccuuggagccucugagacaaucgcuaauauuuacaccacgcagcaccggcuggaccagggcgaaaucagcgccggggaugcggccgugguuaugaccuccgcucaaauuacaaugggaaugccuuaugccgugaccgacgcuguccucgcgccccauaucggcggcgaggccgggucuagccacgccccuccgcccgcucugacacugaucuuugaucgccacccuauugccgcucuccuguguuaccccgccgccagauaucuuaugggauccaugaccccucaggcugugcuggcguucguugcccucauucccccgacgcugccuggcacaaacaucgugcuuggggcucugcccgaggaccggcauaucgaucgccucgccaagagacagcggccuggagaacgccuggaccuggccaugcucgcugccauuagacgggucuacggccugcuugcgaauaccgugagauaccugcaagggggaggcagcuggcgcgaggauuggggccagcucucugggacagcugugccuccccagggagccgaaccccaguccaacgccggcccgcggccccacaucggggacacccuguuuacccuuuucagagcuccugagcugcucgcccccaauggagaucuguauaacgucuuugcuugggcccuggacguucucgcgaaacgccugcggccuaugcauguguucauucuugacuacgaucaaagccccgccggcugcagagacgcucugcuccagcugacaucugggauggugcagacgcacgucaccacaccgggauccaucccuaccaucugugaucuugcccgcacauuugcucggggcgugggcgaggccaauuga

SEQ ID NO: 6800 - RNA, 1131 nt, Artificial Sequence
  derived and/or modified sequence opt6 from Thymidine_Kinase_TK__Herpes_Simplex_Virus_1_(HSV-1)__AAG40842
auggcuucauauccaugucaucaacacgcaucagcauucgaucaagccgcaagaucaagaggucauucaaauagaagaacagcacuaagaccaagaagacaacaagaagcaacugaaguaagacuagaacaaaaaaugccaacuuuacuaagaguuuauauugauggcccacauggcaugggaaaaacaacuacaacacaacuccuaguagcauuaggcucacgagaugauauaguauacgucccagaaccaaugacauauuggcaaguauuaggagcaucagaaacaauagcuaauauauauacaacacaacauagacucgaucaaggugaaauaucagcaggugaugcagcaguaguaaugacaucagcacaaauaacaaugggaaugccauacgcaguaacagacgcaguacuagcaccccacauaggaggugaagccgguucaucacaugcaccaccaccugcacuaacacuaauauuugaucgacaucccauagcugcauuauuauguuacccugcagcaagauaucuaaugggaucaaugacaccacaagcaguauuagcauuugucgcacuaauaccaccaacuuuaccaggaacaaauauaguauuaggagcacuaccagaagacaggcauauagauagacuagcaaaaagacaaagaccaggagaacgcuuagaucuagcaaugcuagcagcaauuaggagaguauauggauuauuagcaaauacaguuagauauuuacaaggcgguggaucauggagagaggauuggggacaauuaucagguacugcaguaccaccucaaggagcagaaccacaaucaaacgccggaccgagaccacauauaggugauacauuauucacauuauuuagagccccagaacuacuagcaccaaauggugauuuauauaacguauucgcaugggccuuagauguacuagcaaaaagguuaagacccaugcauguuuucauauuagauuaugaucaaaguccagcaggauguagagaugcucuacuacaauuaacaaguggaaugguucaaacucauguaacaacaccaggauccauaccaacaauaugugauuuagcaagaacuuucgcaagaggaguaggugaagcaaauuaa

SEQ ID NO: 6801 - protein, 280 aa, Artificial Sequence
  Thymidine_Kinase_TK__Herpes_Simplex_Virus_1_(HSV-1)__Q9ENS0
MASYPCHQHASAFDQAARSRGHSNRRTALRPRRQQEATEVRLEQKMPTLLRVYIDGPHGMGKTTTTQLLVALGSRDDIVYVPEPMTYWQVLGASETIANIYTTQHRLDQGEISAGDAAVVMTSAQITMGMPYAVTDAVLAPHIGGEAGSSHAPPPALTLIFDRHPIAALLCYPAARYLMGSMTPQAVLAFVALIPPTLPGTNIVLGALPEDRHIDRLAKRQRPGERLDLAMLAAIRRVYGLLANTVRYLQGGGSWREDWGQLSGTAVPPQGAEPQSNAGP

SEQ ID NO: 6802 - RNA, 843 nt, Artificial Sequence
  Thymidine_Kinase_TK__Herpes_Simplex_Virus_1_(HSV-1)__AEL30083
auggcuucguaccccugccaucaacacgcgucugcguucgaccaggcugcgcguucucgcggccauagcaaccgacguacggcguugcgcccucgccggcagcaagaagccacggaaguccgccuggagcagaaaaugcccacgcuacugcggguuuauauagacgguccucacgggauggggaaaaccaccaccacgcaacugcugguggcccuggguucgcgcgacgauaucgucuacguacccgagccgaugacuuacuggcaggugcugggggcuuccgagacaaucgcgaacaucuacaccacacaacaccgccucgaccagggugagauaucggccggggacgcggcggugguaaugacaagcgcccagauaacaaugggcaugccuuaugccgugaccgacgccguucuggcuccucauaucgggggggaggcugggagcucacaugccccgcccccggcccucacccucaucuucgaccgccaucccaucgccgcccuccugugcuacccggccgcgcgauaccuuaugggcagcaugaccccccaggccgugcuggcguucguggcccucaucccgccgaccuugcccggcacaaacaucguguugggggcccuuccggaggacagacacaucgaccgccuggccaaacgccagcgccccggcgagcggcuugaccuggcuaugcuggccgcgauucgccgcguuuacgggcugcuugccaauacggugcgguaucugcagggcggcgggucguggcgggaggauuggggacagcuuucggggacggccgugccgccccagggugccgagccccagagcaacgcgggcccauga

SEQ ID NO: 6803 - RNA, 843 nt, Artificial Sequence
  derived and/or modified sequence opt1 from Thymidine_Kinase_TK__Herpes_Simplex_Virus_1_(HSV-1)__AEL30083
auggccagcuaccccugccaccagcacgccuccgcguucgaccaggccgcccgcagccggggccacuccaaccgccggaccgcccugcgcccgcggcgccagcaggaggccaccgaggugcggcucgagcagaagaugcccacgcugcugcgcgucuacaucgacgggccccacggcauggggaagaccaccaccacgcagcuccugguggcgcugggcagccgggacgacaucguguacguccccgagccgaugaccuacuggcagguccucggggccuccgagaccaucgccaacaucuacaccacgcagcaccgccuggaccagggcgagaucagcgccggcgacgcggccguggugaugaccuccgcccagaucaccauggggaugcccuacgccgugaccgacgccgugcuggcgccccacaucggcggggaggccggcagcucccacgcgcccccgcccgcccucacgcugaucuucgaccggcaccccaucgccgcccugcucugcuaccccgccgcccgcuaccugauggggagcaugaccccgcaggccguccuggccuucguggcgcucaucccgcccacccugcccggcaccaacaucgugcugggcgcccuccccgaggaccggcacaucgaccgccuggccaagcggcagcgccccggggagcggcuggaccucgccaugcuggccgcgauccgccgggucuacggccugcucgccaacacggugcgcuaccugcagggcgggggcuccuggcgggaggacugggggcagcugagcggcaccgccgugccgccccagggggccgagccccaguccaacgcgggccccuga

SEQ ID NO: 6804 - RNA, 843 nt, Artificial Sequence
  derived and/or modified sequence opt2 from Thymidine_Kinase_TK__Herpes_Simplex_Virus_1_(HSV-1)__AEL30083
auggccuccuaccccugccaccagcacgccuccgccuucgaccaggccgcccgcucccgcggccacuccaaccgccgcaccgcccuccgcccccgccgccagcaggaggccaccgagguccgccucgagcagaagaugcccacccuccuccgcgucuacaucgacggcccccacggcaugggcaagaccaccaccacccagcuccucgucgcccucggcucccgcgacgacaucgucuacguccccgagcccaugaccuacuggcagguccucggcgccuccgagaccaucgccaacaucuacaccacccagcaccgccucgaccagggcgagaucuccgccggcgacgccgccgucgucaugaccuccgcccagaucaccaugggcaugcccuacgccgucaccgacgccguccucgccccccacaucggcggcgaggccggcuccucccacgcccccccccccgcccucacccucaucuucgaccgccaccccaucgccgcccuccucugcuaccccgccgcccgcuaccucaugggcuccaugaccccccaggccguccucgccuucgucgcccucaucccccccacccuccccggcaccaacaucguccucggcgcccuccccgaggaccgccacaucgaccgccucgccaagcgccagcgccccggcgagcgccucgaccucgccaugcucgccgccauccgccgcgucuacggccuccucgccaacaccguccgcuaccuccagggcggcggcuccuggcgcgaggacuggggccagcucuccggcaccgccguccccccccagggcgccgagccccaguccaacgccggccccuga

SEQ ID NO: 6805 - RNA, 843 nt, Artificial Sequence
  derived and/or modified sequence opt3 from Thymidine_Kinase_TK__Herpes_Simplex_Virus_1_(HSV-1)__AEL30083
auggccagcuaccccugccaccagcaugcuuccgcauucgaccaagccgcgagaucuaggggccacucaaaccggcgcaccgcucugcgaccucguagacagcaggaggccacagaagugaggcucgagcagaagaugccaacucuucugcgggucuauaucgaugggccgcauggaauggguaaaacgaccacaacucaauuguuaguugcacugggcagucgcgacgauauuguguacguacccgaaccuaugaccuauuggcaagugcuaggggccagcgagacaauagcuaauaucuacaccacucagcacagacucgaccagggagaaauuuccgcaggcgaugccgcugucgugaugacaucugcccagaucaccauggguaugccauaugcgguuacggacgcagugcuggcuccccauauugggggagaggcuggcucgucacacgccccuccacccgcacuuacucugaucuuugauaggcacccuauagcugccuugcucuguuacccagcggcccgguaucugaugggcagcaugaccccgcaggcaguccuggcuuucguggcccucauucccccuacauuaccagggacuaacaucguacugggagcccuucccgaggaccgccauaucgaucgauuggccaagagacagaggccuggugaacggcuggaccuagcaaugcucgccgcuauucgucgcguuuacggccugcuugcgaauaccgugagauaccugcaagggggaggcaguuggagggaggauuggggucaguuguccgggacagcagucccaccccagggagccgaaccgcagucuaacgcuggcccuuga

SEQ ID NO: 6806 - RNA, 843 nt, Artificial Sequence
  derived and/or modified sequence opt4 from Thymidine_Kinase_TK__Herpes_Simplex_Virus_1_(HSV-1)__AEL30083
auggccagcuaccccugccaccagcacgccagcgccuucgaccaggccgccagaagcagaggccacagcaacagaagaaccgcccugagacccagaagacagcaggaggccaccgaggugagacuggagcagaagaugcccacccugcugagaguguacaucgacggcccccacggcaugggcaagaccaccaccacccagcugcugguggcccugggcagcagagacgacaucguguacgugcccgagcccaugaccuacuggcaggugcugggcgccagcgagaccaucgccaacaucuacaccacccagcacagacuggaccagggcgagaucagcgccggcgacgccgccguggugaugaccagcgcccagaucaccaugggcaugcccuacgccgugaccgacgccgugcuggccccccacaucggcggcgaggccggcagcagccacgcccccccccccgcccugacccugaucuucgacagacaccccaucgccgcccugcugugcuaccccgccgccagauaccugaugggcagcaugaccccccaggccgugcuggccuucguggcccugaucccccccacccugcccggcaccaacaucgugcugggcgcccugcccgaggacagacacaucgacagacuggccaagagacagagacccggcgagagacuggaccuggccaugcuggccgccaucagaagaguguacggccugcuggccaacaccgugagauaccugcagggcggcggcagcuggagagaggacuggggccagcugagcggcaccgccgugcccccccagggcgccgagccccagagcaacgccggccccuga

SEQ ID NO: 6807 - RNA, 843 nt, Artificial Sequence
  derived and/or modified sequence opt5 from Thymidine_Kinase_TK__Herpes_Simplex_Virus_1_(HSV-1)__AEL30083
auggccagcuaccccugccaccagcaugcuuccgccuucgaccaagcggcuagaucucggggccacagcaaccgcagaaccgcccugcggccucgcagacagcaggaggccacagaagugcggcucgagcagaagaugccgacgcugcuucgcgucuauaucgaugggccccauggaaugggcaaaaccacaaccacacaacugcucguugcucugggguccagagacgauauuguguacgugccugaacccaugaccuauuggcagguccuuggagccucugagacaaucgcuaauauuuacaccacgcagcaccggcuggaccagggcgaaaucagcgccggggaugcggccgugguuaugaccuccgcucaaauuacaaugggaaugccuuaugccgugaccgacgcuguccucgcgccccauaucggcggcgaggccgggucuagccacgccccuccgcccgcucugacacugaucuuugaucgccacccuauugccgcucuccuguguuaccccgccgccagauaucuuaugggauccaugaccccucaggcugugcuggcguucguugcccucauucccccgacgcugccuggcacaaacaucgugcuuggggcucugcccgaggaccggcauaucgaucgccucgccaagagacagcggccuggagaacgccuggaccuggccaugcucgcugccauuagacgggucuacggccugcuugcgaauaccgugagauaccugcaagggggaggcagcuggcgcgaggauuggggccagcucucugggacagcugugccuccccagggagccgaaccccaguccaacgccggcccguga

SEQ ID NO: 6808 - RNA, 843 nt, Artificial Sequence
  derived and/or modified sequence opt6 from Thymidine_Kinase_TK__Herpes_Simplex_Virus_1_(HSV-1)__AEL30083
auggcaucauauccaugccaucaacaugcaagcgcauuugaucaagcagcaagaucaagaggacauagcaauagaagaacugcauuaagaccaagaagacaacaagaagcaacagaaguaagauuagaacaaaaaaugccaacacuacuaagaguauauauagauggaccacacggcaugggaaaaaccacaacuacacaacuauuaguagcucuaggaagcagagaugauauaguauauguuccagaaccaaugacauauuggcaaguacucggagcaucagaaacaauagcaaauauauacacaacacaacauagacuugaucaaggagaaauaagcgcaggugaugcagcuguuguuaugacaagcgcacaaauaacaaugggaaugccauaugcaguaaccgaugcaguauuagcaccucacauaggaggagaagcaggaaguagccaugcaccaccaccagcauuaacacuaauauuugaccgacacccaauagcagcauuacuauguuauccagcagcaagauaucuaaugggaaguaugacaccacaagcaguacuagcauuuguagcauuaauacccccaacauuaccaggaacaaauauaguauuaggagcacuaccagaagauagacauauagauagauuagcaaaaagacaaagaccaggagaaagauuagauuuagcaauguuagcagcaauaaggagaguauauggauuauuagcaaauacaguaagauauuuacaaggaggaggaucauggagagaagacuggggacaauuaucaggaacagcaguaccaccacaaggagcagaaccucaaucaaaugcaggaccauaa

SEQ ID NO: 6809 - protein, 108 aa, Artificial Sequence
  Thymidine_Kinase_TK__Herpes_Simplex_Virus_1_(HSV-1)__Q9ENS1
MASYPCHQHASAFDQAARSRGHSNRRTALRPRRQQEATEVRLEQKMPTLLRVYIDGPHGMGKTTTTQLLVALGSRDDIVYVPEPMTYWQVLGASETIANIYTTQHRLD

SEQ ID NO: 6810 - RNA, 327 nt, Artificial Sequence
  Thymidine_Kinase_TK__Herpes_Simplex_Virus_1_(HSV-1)__BAB11946
auggcuucguaccccugccaucaacacgcgucugcguucgaccaggcugcgcguucucgcggccauagcaaccgacguacggcguugcgcccucgccggcagcaagaagccacggaaguccgccuggagcagaaaaugcccacgcuacugcggguuuauauagacgguccucacgggauggggaaaaccaccaccacgcaacugcugguggcccuggguucgcgcgacgauaucgucuacguacccgagccgaugacuuacuggcaggugcugggggcuuccgagacaaucgcgaacaucuacaccacacaacaccgccucgacuag

SEQ ID NO: 6811 - RNA, 327 nt, Artificial Sequence
  derived and/or modified sequence opt1 from Thymidine_Kinase_TK__Herpes_Simplex_Virus_1_(HSV-1)__BAB11946
auggccagcuaccccugccaccagcacgccuccgcguucgaccaggccgcccgcagccggggccacuccaaccgccggaccgcccugcgcccgcggcgccagcaggaggccaccgaggugcggcucgagcagaagaugcccacgcugcugcgcguguacaucgacgggccccacggcauggggaagaccaccaccacgcagcuccugguggcgcugggcagccgggacgacaucguguacguccccgagccgaugaccuacuggcagguccucggggccuccgagaccaucgccaacaucuacaccacgcagcaccgccuggacuga

SEQ ID NO: 6812 - RNA, 327 nt, Artificial Sequence
  derived and/or modified sequence opt2 from Thymidine_Kinase_TK__Herpes_Simplex_Virus_1_(HSV-1)__BAB11946
auggccuccuaccccugccaccagcacgccuccgccuucgaccaggccgcccgcucccgcggccacuccaaccgccgcaccgcccuccgcccccgccgccagcaggaggccaccgagguccgccucgagcagaagaugcccacccuccuccgcgucuacaucgacggcccccacggcaugggcaagaccaccaccacccagcuccucgucgcccucggcucccgcgacgacaucgucuacguccccgagcccaugaccuacuggcagguccucggcgccuccgagaccaucgccaacaucuacaccacccagcaccgccucgacuga

SEQ ID NO: 6813 - RNA, 327 nt, Artificial Sequence
  derived and/or modified sequence opt3 from Thymidine_Kinase_TK__Herpes_Simplex_Virus_1_(HSV-1)__BAB11946
auggccagcuaccccugccaccagcaugcuuccgcauucgaccaggccgcgagaucuaggggccacucaaaccggcgcaccgcucugcgaccucguagacagcaggaggccacagaagugaggcucgagcagaagaugccaacucuucugcgggucuauaucgaugggccgcauggaauggguaaaacgaccacaacucaauuguuaguugcacugggcagucgcgacgauauuguguacguacccgaaccuaugaccuauuggcaagugcuaggggccagcgagacaauagcuaauaucuacaccacucagcacagacucgacuga

SEQ ID NO: 6814 - RNA, 327 nt, Artificial Sequence
  derived and/or modified sequence opt4 from Thymidine_Kinase_TK__Herpes_Simplex_Virus_1_(HSV-1)__BAB11946
auggccagcuaccccugccaccagcacgccagcgccuucgaccaggccgccagaagcagaggccacagcaacagaagaaccgcccugagacccagaagacagcaggaggccaccgaggugagacuggagcagaagaugcccacccugcugagaguguacaucgacggcccccacggcaugggcaagaccaccaccacccagcugcugguggcccugggcagcagagacgacaucguguacgugcccgagcccaugaccuacuggcaggugcugggcgccagcgagaccaucgccaacaucuacaccacccagcacagacuggacuga

SEQ ID NO: 6815 - RNA, 327 nt, Artificial Sequence
  derived and/or modified sequence opt5 from Thymidine_Kinase_TK__Herpes_Simplex_Virus_1_(HSV-1)__BAB11946
auggccagcuaccccugccaccagcaugcuuccgccuucgaccaagcggcuagaucucggggccacagcaaccgcagaaccgcccugcggccucgcagacagcaggaggccacagaagugcggcucgagcagaagaugccgacgcugcuucgcgucuauaucgaugggccccauggaaugggcaaaaccacaaccacacaacugcucguugcucugggguccagagacgauauuguguacgugccugaacccaugaccuauuggcagguccuuggagccucugagacaaucgcuaauauuuacaccacgcagcaccggcuggacuga

SEQ ID NO: 6816 - RNA, 327 nt, Artificial Sequence
  derived and/or modified sequence opt6 from Thymidine_Kinase_TK__Herpes_Simplex_Virus_1_(HSV-1)__BAB11946
auggcaucauacccaugccaccaacacgcaucagcauucgaccaagcagcaagaucaagaggacacucaaacagaagaacagcacuaagaccaagaagacaacaagaagcaacagaaguaagacuagaacaaaaaaugccaacacuacuaagaguauacauagacggaccacacggaaugggaaaaacaacaacaacacaacuacuaguagcacuaggaucaagagacgacauaguauacguaccagaaccaaugacauacuggcaaguacuaggagcaucagaaacaauagcaaacauauacacaacacaacacagacuagacuaa

SEQ ID NO: 6817 - protein, 103 aa, Artificial Sequence
  Thymidine_Kinase_TK__Herpes_Simplex_Virus_1_(HSV-1)__Q9ENS2
MASYPCHQHASAFDQAARSRGHSNRRTALRPRRQQEATEVRLEQKMPTLLRVYIDGPHGMGKTTTTQLLVALGSRDDIVYVPEPMTYWQVLGASETIANIYTT

SEQ ID NO: 6818 - RNA, 312 nt, Artificial Sequence
  Thymidine_Kinase_TK__Herpes_Simplex_Virus_1_(HSV-1)__BAB11945
auggcuucguaccccugccaucaacacgcgucugcguucgaccaggcugcgcguucucgcggccauagcaaccgacguacggcguugcgcccucgccggcagcaagaagccacggaaguccgccuggagcagaaaaugcccacgcuacugcggguuuauauagacgguccucacgggauggggaaaaccaccaccacgcaacugcugguggcccuggguucgcgcgacgauaucgucuacguacccgagccgaugacuuacuggcaggugcugggggcuuccgagacaaucgcgaacaucuacaccacauaa

SEQ ID NO: 6819 - RNA, 312 nt, Artificial Sequence
  derived and/or modified sequence opt1 from Thymidine_Kinase_TK__Herpes_Simplex_Virus_1_(HSV-1)__BAB11945
auggccagcuaccccugccaccagcacgccuccgcguucgaccaggccgcccgcagccggggccacuccaaccgccggaccgcccugcgcccgcggcgccagcaggaggccaccgaggugcggcucgagcagaagaugcccacgcugcugcgcguguacaucgacgggccccacggcauggggaagaccaccaccacgcagcuccugguggcgcugggcagccgggacgacaucguguacguccccgagccgaugaccuacuggcagguccucggggccuccgagaccaucgccaacaucuacaccacguga

SEQ ID NO: 6820 - RNA, 312 nt, Artificial Sequence
  derived and/or modified sequence opt2 from Thymidine_Kinase_TK__Herpes_Simplex_Virus_1_(HSV-1)__BAB11945
auggccuccuaccccugccaccagcacgccuccgccuucgaccaggccgcccgcucccgcggccacuccaaccgccgcaccgcccuccgcccccgccgccagcaggaggccaccgagguccgccucgagcagaagaugcccacccuccuccgcgucuacaucgacggcccccacggcaugggcaagaccaccaccacccagcuccucgucgcccucggcucccgcgacgacaucgucuacguccccgagcccaugaccuacuggcagguccucggcgccuccgagaccaucgccaacaucuacaccaccuga

SEQ ID NO: 6821 - RNA, 312 nt, Artificial Sequence
  derived and/or modified sequence opt3 from Thymidine_Kinase_TK__Herpes_Simplex_Virus_1_(HSV-1)__BAB11945
auggccagcuaccccugccaccagcaugcuuccgcauucgaccaggccgcgagaucuaggggccacucaaaccggcgcaccgcucugcgaccucguagacagcaggaggccacagaagugaggcucgagcagaagaugccaacucuucugcgggucuauaucgaugggccgcauggaauggguaaaacgaccacaacucaauuguuaguugcacugggcagucgcgacgauauuguguacguacccgaaccuaugaccuauuggcaagugcuaggggccagcgagacaauagcuaauaucuacaccacuuga

SEQ ID NO: 6822 - RNA, 312 nt, Artificial Sequence
  derived and/or modified sequence opt4 from Thymidine_Kinase_TK__Herpes_Simplex_Virus_1_(HSV-1)__BAB11945
auggccagcuaccccugccaccagcacgccagcgccuucgaccaggccgccagaagcagaggccacagcaacagaagaaccgcccugagacccagaagacagcaggaggccaccgaggugagacuggagcagaagaugcccacccugcugagaguguacaucgacggcccccacggcaugggcaagaccaccaccacccagcugcugguggcccugggcagcagagacgacaucguguacgugcccgagcccaugaccuacuggcaggugcugggcgccagcgagaccaucgccaacaucuacaccaccuga

SEQ ID NO: 6823 - RNA, 312 nt, Artificial Sequence
  derived and/or modified sequence opt5 from Thymidine_Kinase_TK__Herpes_Simplex_Virus_1_(HSV-1)__BAB11945
auggccagcuaccccugccaccagcaugcuuccgccuucgaccaagcggcuagaucucggggccacagcaaccgcagaaccgcccugcggccucgcagacagcaggaggccacagaagugcggcucgagcagaagaugccgacgcugcuucgcgucuauaucgaugggccccauggaaugggcaaaaccacaaccacacaacugcucguugcucugggguccagagacgauauuguguacgugccugaacccaugaccuauuggcagguccuuggagccucugagacaaucgcuaauauuuacaccacguga

SEQ ID NO: 6824 - RNA, 312 nt, Artificial Sequence
  derived and/or modified sequence opt6 from Thymidine_Kinase_TK__Herpes_Simplex_Virus_1_(HSV-1)__BAB11945
auggcaucauacccaugccaccaacacgcaucagcauucgaccaagcagcaagaucaagaggacacucaaacagaagaacagcacuaagaccaagaagacaacaagaagcaacagaaguaagacuagaacaaaaaaugccaacacuacuaagaguauacauagacggaccacacggaaugggaaaaacaacaacaacacaacuacuaguagcacuaggaucaagagacgacauaguauacguaccagaaccaaugacauacuggcaaguacuaggagcaucagaaacaauagcaaacauauacacaacauaa

SEQ ID NO: 6825 - protein, 262 aa, Artificial Sequence
  Thymidine_Kinase_TK__Herpes_Simplex_Virus_1_(HSV-1)__Q9ENS3
MASYPCHQHASAFDQAARSRGHSNRRTALRPRRQQEATEVRLEQKMPTLLRVYIDGPHGMGKTTTTQLLVALGSRDDIVYVPEPMTYWQVLGASETIANIYTTQHRLDQGEISAGDAAVVMTSAQITMGMPYAAHDPISGTRYLPCFGPPSCWPPTATCITCLPGPWTSWPNASVPCTSLSWITTNRPPAAGTPCCNLPPGWSRPTSPPQAPYRRSATWRARLPGRWGRLTETRKETIPEGTRAMTAIKRQNKTHGCWVVCS

SEQ ID NO: 6826 - RNA, 789 nt, Artificial Sequence
  Thymidine_Kinase_TK__Herpes_Simplex_Virus_1_(HSV-1)__BAB11944
auggcuucguaccccugccaucaacacgcgucugcguucgaccaggcugcgcguucucgcggccauagcaaccgacguacggcguugcgcccucgccggcagcaagaagccacggaaguccgccuggagcagaaaaugcccacgcuacugcggguuuauauagacgguccucacgggauggggaaaaccaccaccacgcaacugcugguggcccuggguucgcgcgacgauaucgucuacguacccgagccgaugacuuacuggcaggugcugggggcuuccgagacaaucgcgaacaucuacaccacacaacaccgccucgaccagggugagauaucggccggggacgcggcggugguaaugacaagcgcccagauaacaaugggcaugccuuaugccgcccacgaccccauaucggggacacguuauuuacccuguuucgggcccccgaguugcuggcccccaacggcgaccuguauaacguguuugccugggccuuggacgucuuggccaaacgccuccgucccaugcacgucuuuauccuggauuacgaccaaucgcccgccggcugccgggacgcccugcugcaacuuaccuccgggaugguccagacccacgucaccaccccaggcuccauaccgacgaucugcgaccuggcgcgcacguuugcccgggagaugggggaggcuaacugaaacacggaaggagacaauaccggaaggaacccgcgcuaugacggcaauaaaaagacagaauaaaacgcacggguguugggucguuuguucauaa

SEQ ID NO: 6827 - RNA, 789 nt, Artificial Sequence
  derived and/or modified sequence opt1 from Thymidine_Kinase_TK__Herpes_Simplex_Virus_1_(HSV-1)__BAB11944
auggccagcuaccccugccaccagcacgccuccgcguucgaccaggccgcccgcagccggggccacuccaaccgccggaccgcccugcgcccgcggcgccagcaggaggccaccgaggugcggcucgagcagaagaugcccacgcugcugcgcgucuacaucgacgggccccacggcauggggaagaccaccaccacgcagcuccugguggcgcugggcagccgggacgacaucguguacguccccgagccgaugaccuacuggcagguccucggggccuccgagaccaucgccaacaucuacaccacgcagcaccgccuggaccagggcgagaucagcgccggcgacgcggccguggugaugaccuccgcccagaucaccauggggaugcccuacgccgcccacgaccccaucagcggcacccgguaccugcccugcuucgggccgcccuccugcuggccgcccacggcgaccugcaucacgugccuccccggccccuggaccagcuggcccaacgccuccgugcccugcaccagccuguccuggaucaccaccaaccgcccgcccgccgccgggacccccugcugcaaccugcccccgggcuggagccggcccacguccccgccccaggcccccuaccgccggagcgcgaccuggcgcgcccggcuccccggccgcugggggcggcugaccgagacccgcaaggagacgauccccgagggcacccgggccaugaccgccaucaagcgccagaacaagacccacgggugcuggguggucugcuccuga

SEQ ID NO: 6828 - RNA, 789 nt, Artificial Sequence
  derived and/or modified sequence opt2 from Thymidine_Kinase_TK__Herpes_Simplex_Virus_1_(HSV-1)__BAB11944
auggccuccuaccccugccaccagcacgccuccgccuucgaccaggccgcccgcucccgcggccacuccaaccgccgcaccgcccuccgcccccgccgccagcaggaggccaccgagguccgccucgagcagaagaugcccacccuccuccgcgucuacaucgacggcccccacggcaugggcaagaccaccaccacccagcuccucgucgcccucggcucccgcgacgacaucgucuacguccccgagcccaugaccuacuggcagguccucggcgccuccgagaccaucgccaacaucuacaccacccagcaccgccucgaccagggcgagaucuccgccggcgacgccgccgucgucaugaccuccgcccagaucaccaugggcaugcccuacgccgcccacgaccccaucuccggcacccgcuaccuccccugcuucggcccccccuccugcuggccccccaccgccaccugcaucaccugccuccccggccccuggaccuccuggcccaacgccuccguccccugcaccucccucuccuggaucaccaccaaccgcccccccgccgccggcacccccugcugcaaccucccccccggcuggucccgccccaccucccccccccaggcccccuaccgccgcuccgccaccuggcgcgcccgccuccccggccgcuggggccgccucaccgagacccgcaaggagaccauccccgagggcacccgcgccaugaccgccaucaagcgccagaacaagacccacggcugcugggucgucugcuccuga

SEQ ID NO: 6829 - RNA, 789 nt, Artificial Sequence
  derived and/or modified sequence opt3 from Thymidine_Kinase_TK__Herpes_Simplex_Virus_1_(HSV-1)__BAB11944
auggccagcuaccccugccaccagcaugcuuccgcauucgaccaagccgcgagaucuaggggccacucaaaccggcgcaccgcucugcgaccucguagacagcaggaggccacagaagugaggcucgagcagaagaugccaacucuucugcgggucuauaucgaugggccgcauggaauggguaaaacgaccacaacucaauuguuaguugcacugggcagucgcgacgauauuguguacguacccgaaccuaugaccuauuggcaagugcuaggggccagcgagacaauagcuaauaucuacaccacucagcacagacucgaccagggagaaauuuccgcaggcgaugccgcugucgugaugacaucugcccagaucaccauggguaugccauaugcggcacaugaccccauuucggggacgagguaccugccuuguuuuggaccacccucaugcuggccuccaacugccaccuguaucacaugccuuccgggccccuggacuagcuggccuaacgcuaguguuccauguaccucccugucuuggauaacaaccaaucggcccccugccgcaggcacgccaugcuguaacuugcccccgggguggagccgcccuacuucacccccacaggcuccuuaucgaagauccgccacauggagggcgcggcuccccggacguuggggucgccugaccgagacuagaaaggagacaaucccagaaggcaccagggccaugacggcaauuaaacggcagaauaagacccacgggugcuggguggucuguaguuga

SEQ ID NO: 6830 - RNA, 789 nt, Artificial Sequence
  derived and/or modified sequence opt4 from Thymidine_Kinase_TK__Herpes_Simplex_Virus_1_(HSV-1)__BAB11944
auggccagcuaccccugccaccagcacgccagcgccuucgaccaggccgccagaagcagaggccacagcaacagaagaaccgcccugagacccagaagacagcaggaggccaccgaggugagacuggagcagaagaugcccacccugcugagaguguacaucgacggcccccacggcaugggcaagaccaccaccacccagcugcugguggcccugggcagcagagacgacaucguguacgugcccgagcccaugaccuacuggcaggugcugggcgccagcgagaccaucgccaacaucuacaccacccagcacagacuggaccagggcgagaucagcgccggcgacgccgccguggugaugaccagcgcccagaucaccaugggcaugcccuacgccgcccacgaccccaucagcggcaccagauaccugcccugcuucggcccccccagcugcuggccccccaccgccaccugcaucaccugccugcccggccccuggaccagcuggcccaacgccagcgugcccugcaccagccugagcuggaucaccaccaacagaccccccgccgccggcacccccugcugcaaccugccccccggcuggagcagacccaccagccccccccaggcccccuacagaagaagcgccaccuggagagccagacugcccggcagauggggcagacugaccgagaccagaaaggagaccauccccgagggcaccagagccaugaccgccaucaagagacagaacaagacccacggcugcuggguggugugcagcuga

SEQ ID NO: 6831 - RNA, 789 nt, Artificial Sequence
  derived and/or modified sequence opt5 from Thymidine_Kinase_TK__Herpes_Simplex_Virus_1_(HSV-1)__BAB11944
auggccagcuaccccugccaccagcaugcuuccgccuucgaccaagcggcuagaucucggggccacagcaaccgcagaaccgcccugcggccucgcagacagcaggaggccacagaagugcggcucgagcagaagaugccgacgcugcuucgcgucuauaucgaugggccccauggaaugggcaaaaccacaaccacacaacugcucguugcucugggguccagagacgauauuguguacgugccugaacccaugaccuauuggcagguccuuggagccucugagacaaucgcuaauauuuacaccacgcagcaccggcuggaccagggcgaaaucagcgccggggaugcggccgugguuaugaccuccgcucaaauuacaaugggaaugccuuaugccgcucaugaccccaucucuggcacccgcuaccucccuuguuuuggcccgcccagcugcuggccucccacagccaccuguaucacgugccugccugggcccuggacauccuggccgaacgcgagcgugccuuguaccucucuguccuggauuacaaccaauagacccccugccgcuggaacccccugcuguaaccugcccccuggcuggagccggccgacaucucccccucaggcccccuaucgcagauccgcuacguggcgggcccgccucccugggagauggggacggcuuaccgagacaagaaaggagaccauccccgaaggcacacgcgccaugaccgcuauuaaacggcagaauaagacgcacgggugcugggucguguguagcuga

SEQ ID NO: 6832 - RNA, 789 nt, Artificial Sequence
  derived and/or modified sequence opt6 from Thymidine_Kinase_TK__Herpes_Simplex_Virus_1_(HSV-1)__BAB11944
auggcauccuacccuugccaucaacaugccucagcauuugaccaagcagcuagaucaagaggacacucaaacagaagaacagcauuaagaccaagacgacaacaagaagcaacagaaguaagacuagaacaaaaaaugccaacacuacuaagaguauauauagauggaccacauggaaugggaaaaacaacaacaacacaacucuuaguagcacuaggaucaagagacgauauaguauacguaccagaaccaaugacauauuggcaaguauuaggagcaucagaaacaauagcaaacauauauacaacacaacaucgauuagaucaaggagaaauaucagcaggagacgcagcagugguaaugacaucagcacaaaucacuaugggaaugccauacgcagcacaugaccccauauccggaacaagauaucuaccaugcuucggaccaccaucaugcuggccaccaacagcaacauguauaacaugcuuaccaggaccauggacaucauggccuaacgccucaguaccauguaccucauuaucauggauuacaacaaacagaccaccagcagcaggaacaccauguugcaaucuaccaccaggauggucuagaccaacaucaccaccacaagcaccuuauagaagaucagcaacauggagagcaagacuuccagguagauggggacgcuuaaccgaaaccagaaaagaaacaauaccagaaggaacaagagcuaugacagcaauaaaacgacaaaacaaaacacauggaugcuggguaguauguucauaa

SEQ ID NO: 6833 - protein, 407 aa, Artificial Sequence
  Thymidine_Kinase_TK__Herpes_Simplex_Virus_1_(HSV-1)__Q9ENS4
MASYPCHQHASAFDQAARSRGHSNRRTALRPRRQQEATEVRLEQKMPTLLRVYIDGPHGMGKTTTTQLLVALGSRDDIVYVPEPMTYWQVLGASETIANIYTTQHRLDQGEISAGDAAVVMTSAQITMGMPYAVTDAVLAPHIGGEAGSSHAPPPALTLIFDRHPIAALLCYPAARYLMGSMTPRPCWRSWPSSRRPCPAQTSCWGPFRRTDTSTAWPNASAPASGLTWLCWPRFAAFTGCLPIRCGICRAAGRGGRIGDSFRGRPCRPRVPSPRATRAHDPISGTRYLPCFGPPSCWPPTATCITCLPGPWTSWPNASVPCTSLSWITTNRPPAAGTPCCNLPPGWSRPTSPPQAPYRRSATWRARLPGRWGRLTETRKETIPEGTRAMTAIKRQNKTHGCWVVCS

SEQ ID NO: 6834 - RNA, 1224 nt, Artificial Sequence
  Thymidine_Kinase_TK__Herpes_Simplex_Virus_1_(HSV-1)__BAB11943
auggcuucguaccccugccaucaacacgcgucugcguucgaccaggcugcgcguucucgcggccauagcaaccgacguacggcguugcgcccucgccggcagcaagaagccacggaaguccgccuggagcagaaaaugcccacgcuacugcggguuuauauagacgguccucacgggauggggaaaaccaccaccacgcaacugcugguggcccuggguucgcgcgacgauaucgucuacguacccgagccgaugacuuacuggcaggugcugggggcuuccgagacaaucgcgaacaucuacaccacacaacaccgccucgaccagggugagauaucggccggggacgcggcggugguaaugacaagcgcccagauaacaaugggcaugccuuaugccgugaccgacgccguucuggcuccucauaucgggggggaggcugggagcucacaugccccgcccccggcccucacccucaucuucgaccgccaucccaucgccgcccuccugugcuacccggccgcgcgauaccuuaugggcagcaugacccccaggccgugcuggcguucguggcccucaucccgccgaccuugcccggcacaaacaucguguugggggcccuuccggaggacagacacaucgaccgccuggccaaacgccagcgccccggcgagcggcuugaccuggcuaugcuggccgcgauucgccgcguuuacgggcugcuugccaauacggugcgguaucugcagggcggcgggucguggcgggaggauuggggacagcuuucggggacggccgugccgccccagggugccgagccccagagcaacgcgggcccacgaccccauaucggggacacguuauuuacccuguuucgggcccccgaguugcuggcccccaacggcgaccuguauaacguguuugccugggccuuggacgucuuggccaaacgccuccgucccaugcacgucuuuauccuggauuacgaccaaucgcccgccggcugccgggacgcccugcugcaacuuaccuccgggaugguccagacccacgucaccaccccaggcuccauaccgacgaucugcgaccuggcgcgcacguuugcccgggagaugggggaggcuaacugaaacacggaaggagacaauaccggaaggaacccgcgcuaugacggcaauaaaaagacagaauaaaacgcacggguguugggucguuuguucauaa

SEQ ID NO: 6835 - RNA, 1224 nt, Artificial Sequence
  derived and/or modified sequence opt1 from Thymidine_Kinase_TK__Herpes_Simplex_Virus_1_(HSV-1)__BAB11943
auggccagcuaccccugccaccagcacgccuccgcguucgaccaggccgcccgcagccggggccacuccaaccgccggaccgcccugcgcccccggcgccagcaggaggccaccgaggugcggcucgagcagaagaugcccacgcugcugcgcgucuacaucgacgggccccacggcauggggaagaccaccaccacgcagcuccugguggcgcugggcagccgggacgacaucguguacguccccgagccgaugaccuacuggcagguccucggggccuccgagaccaucgccaacaucuacaccacgcagcaccgccuggaccagggcgagaucagcgccggcgacgcggccguggugaugaccuccgcccagaucaccauggggaugcccuacgccgugaccgacgccgugcuggcgccccacaucggcggggaggccggcagcucccacgcgcccccgcccgcccucacgcugaucuucgaccggcaccccaucgccgcccugcucugcuaccccgccgcccgcuaccugauggggagcaugaccccgcggcccugcuggcgcuccuggcccagcucccggcgccccugcccggcccagaccagcugcuggggccccuuccggcgcaccgacacguccaccgccuggcccaacgcgagcgcccccgccuccggccugaccuggcucugcuggccgcgguucgccgccuucaccgggugccugcccauccgcugcggcaucugccgggcggccgggcgcggcggccgcaucggggacagcuuccggggccgccccugccggccccgcgucccgagcccccgggccacgcgcgcccacgaccccaucuccgggacccgguaccugcccugcuucggcccgcccagcugcuggcccccgaccgcgaccugcaucacgugccuccccgggcccuggaccuccuggcccaacgccagcgugccgugcaccucccugagcuggaucaccacgaaccgcccgcccgccgccggcacccccugcugcaaccugccgcccggcuggucccggcccaccagcccgccccaggcccccuaccgccgguccgcgaccuggcgcgcccggcuccccgggcgcuggggccggcugacggagacccgcaaggagaccauccccgaggggacccgggccaugacggccaucaagcgccagaacaagacccacggcugcuggguggucugcagcuga

SEQ ID NO: 6836 - RNA, 1224 nt, Artificial Sequence
  derived and/or modified sequence opt2 from Thymidine_Kinase_TK__Herpes_Simplex_Virus_1_(HSV-1)__BAB11943
auggccuccuaccccugccaccagcacgccuccgccuucgaccaggccgcccgcucccgcggccacuccaaccgccgcaccgcccuccgcccccgccgccagcaggaggccaccgagguccgccucgagcagaagaugcccacccuccuccgcgucuacaucgacggcccccacggcaugggcaagaccaccaccacccagcuccucgucgcccucggcucccgcgacgacaucgucuacguccccgagcccaugaccuacuggcagguccucggcgccuccgagaccaucgccaacaucuacaccacccagcaccgccucgaccagggcgagaucuccgccggcgacgccgccgucgucaugaccuccgcccagaucaccaugggcaugcccuacgccgucaccgacgccguccucgccccccacaucggcggcgaggccggcuccucccacgcccccccccccgcccucacccucaucuucgaccgccaccccaucgccgcccuccucugcuaccccgccgcccgcuaccucaugggcuccaugaccccccgccccugcuggcgcuccuggcccuccucccgccgccccugccccgcccagaccuccugcuggggccccuuccgccgcaccgacaccuccaccgccuggcccaacgccuccgcccccgccuccggccucaccuggcucugcuggccccgcuucgccgccuucaccggcugccuccccauccgcugcggcaucugccgcgccgccggccgcggcggccgcaucggcgacuccuuccgcggccgccccugccgcccccgcguccccuccccccgcgccacccgcgcccacgaccccaucuccggcacccgcuaccuccccugcuucggcccccccuccugcuggccccccaccgccaccugcaucaccugccuccccggccccuggaccuccuggcccaacgccuccguccccugcaccucccucuccuggaucaccaccaaccgcccccccgccgccggcacccccugcugcaaccucccccccggcuggucccgccccaccucccccccccaggcccccuaccgccgcuccgccaccuggcgcgcccgccuccccggccgcuggggccgccucaccgagacccgcaaggagaccauccccgagggcacccgcgccaugaccgccaucaagcgccagaacaagacccacggcugcugggucgucugcuccuga

SEQ ID NO: 6837 - RNA, 1224 nt, Artificial Sequence
  derived and/or modified sequence opt3 from Thymidine_Kinase_TK__Herpes_Simplex_Virus_1_(HSV-1)__BAB11943
auggccagcuaccccugccaccagcaugcuuccgcauucgaccaagccgcgagaucuaggggccacucaaaccggcgcaccgcucugcgaccucguagacagcaggaggccacagaagugaggcucgagcagaagaugccaacucuucugcgggucuauaucgaugggccgcauggaauggguaaaacgaccacaacucaauuguuaguugcacugggcagucgcgacgauauuguguacguacccgaaccuaugaccuauuggcaagugcuaggggccagcgagacaauagcuaauaucuacaccacucagcacagacucgaccagggagaaauuuccgcaggcgaugccgcugucgugaugacaucugcccagaucaccauggguaugccauaugcgguuacggacgcagugcuggcuccccauauugggggagaggccggcucgucacacgccccuccacccgcacuuacucugaucuuugauaggcacccuauagcugccuugcucuguuacccagcggcccgguaucugaugggcagcaugaccccgcgccccugcuggcgaaguuggccuuccucuagaaggccaugucccgcacagacaagcugcugggggccuuuccggcguacugacaccuccacagcuuggccaaacgccucagcucccgccaguggacugaccuggcucuguuggccgcgcuuugcagccuucacggguugcuuaccuaucagauguggcauuugcagggcugcggggcggggaggccgaaucggugauagcuuucgcgggagacccuguaggccacgggucccuucuccccgcgcaacuagagcccaugacccaauuuccggaacaagguaccugcccugcuucggcccuccaucauguuggccgcccaccgcuacuugcaucacaugccuuccuggcccauggaccagcuggcccaaugccagugugccuuguacgucuuuguccuggauaaccacaaaccguccacccgcagccgggacuccgugcuguaaucugccuccaggauggagccggcccaccucgccuccccaggcuccauaccgaagaucugccacauggagggcacgccuaccuggucgguggggcagacucacugagaccaggaaggaaacaauucccgaggggacccgcgcgaugacugcuaucaaacgacagaacaagacgcacggaugcuggguaguuuguuccuga

SEQ ID NO: 6838 - RNA, 1224 nt, Artificial Sequence
  derived and/or modified sequence opt4 from Thymidine_Kinase_TK__Herpes_Simplex_Virus_1_(HSV-1)__BAB11943
auggccagcuaccccugccaccagcacgccagcgccuucgaccaggccgccagaagcagaggccacagcaacagaagaaccgcccugagacccagaagacagcaggaggccaccgaggugagacuggagcagaagaugcccacccugcugagaguguacaucgacggcccccacggcaugggcaagaccaccaccacccagcugcugguggcccugggcagcagagacgacaucguguacgugcccgagcccaugaccuacuggcaggugcugggcgccagcgagaccaucgccaacaucuacaccacccagcacagacuggaccagggcgagaucagcgccggcgacgccgccguggugaugaccagcgcccagaucaccaugggcaugcccuacgccgugaccgacgccgugcuggccccccacaucggcggcgaggccggcagcagccacgcccccccccccgcccugacccugaucuucgacagacaccccaucgccgcccugcugugcuaccccgccgccagauaccugaugggcagcaugacccccagacccugcuggagaagcuggcccagcagcagaagacccugccccgcccagaccagcugcuggggccccuucagaagaaccgacaccagcaccgccuggcccaacgccagcgcccccgccagcggccugaccuggcugugcuggcccagauucgccgccuucaccggcugccugcccaucagaugcggcaucugcagagccgccggcagaggcggcagaaucggcgacagcuucagaggcagacccugcagacccagagugcccagccccagagccaccagagcccacgaccccaucagcggcaccagauaccugcccugcuucggcccccccagcugcuggccccccaccgccaccugcaucaccugccugcccggccccuggaccagcuggcccaacgccagcgugcccugcaccagccugagcuggaucaccaccaacagaccccccgccgccggcacccccugcugcaaccugccccccggcuggagcagacccaccagccccccccaggcccccuacagaagaagcgccaccuggagagccagacugcccggcagauggggcagacugaccgagaccagaaaggagaccauccccgagggcaccagagccaugaccgccaucaagagacagaacaagacccacggcugcuggguggugugcagcuga

SEQ ID NO: 6839 - RNA, 1224 nt, Artificial Sequence
  derived and/or modified sequence opt5 from Thymidine_Kinase_TK__Herpes_Simplex_Virus_1_(HSV-1)__BAB11943
auggccagcuaccccugccaccagcaugcuuccgccuucgaccaagcggcuagaucucggggccacagcaaccgcagaaccgcccugcggccucgcagacagcaggaggccacagaagugcggcucgagcagaagaugccgacgcugcuucgcgucuauaucgaugggccccauggaaugggcaaaaccacaaccacacaacugcucguugcucugggguccagagacgauauuguguacgugccugaacccaugaccuauuggcagguccuuggagccucugagacaaucgcuaauauuuacaccacgcagcaccggcuggaccagggcgaaaucagcgccggggaugcggccgugguuaugaccuccgcucaaauuacaaugggaaugccuuaugccgugaccgacgcuguccucgcgccccauaucggcggcgaggccgggucuagccacgccccuccgcccgcucugacacugaucuuugaucgccacccuauugccgcucuccuguguuaccccgccgccagauaucuuaugggauccaugaccccucggcccugcuggcgcagcuggccgucuuccagacggccuugucccgcucagacgagcugcuggggcccuuuccgcagaacagacaccucuacagcguggcccaacgccuccgcucccgccagcgggcugaccuggcucuguuggccucgguuugccgcuuucaccggaugccugccgaucagauguggcauuugccgcgccgcggggcggggaggcagaaucggcgauucuuuucgcgggcggcccuguagaccucgcgugcccuccccucgggcuacaagagcccaugaccccauuagcggaacgcgcuaccuuccgugcuucggcccucccuccuguuggccucccaccgccacaugcauuaccugccugccugggcccuggacaucuuggccgaaugcuagcguuccuuguaccucccucagcuggaucacgacaaaccggccucccgccgcuggaacccccugcuguaaucugccgcccggcuggucuagaccuaccuccccuccccaggcccccuaccgccggagcgcgacauggagagcccggcugccugggcgcuggggaagacucaccgagacacggaaggaaacgauccccgagggcaccagagcuaugacagccaucaaacgccagaacaagacccacggcugcuggguggucuguucuuga

SEQ ID NO: 6840 - RNA, 1224 nt, Artificial Sequence
  derived and/or modified sequence opt6 from Thymidine_Kinase_TK__Herpes_Simplex_Virus_1_(HSV-1)__BAB11943
auggcaaguuauccaugucaucaacaugcaucagcauuugaucaagcagcaagaagcaggggacauucaaauagaagaacugcucuuagacccaggagacaacaagaagcaacagaaguuagauuagaacaaaaaaugccuacauuauuacgaguauacauagacggaccacauggaaugggaaaaacaacaacaacgcaauuacuaguagcuuuaggaucaagagaugacauaguauacguuccggaaccaaugacauauuggcaaguacuuggagcaagugaaacaauagcaaacauauauacuacccaacaucgauuagaucaaggagaaauaagcgcaggagaugcugcuguaguaaugacaucagcacaaauaacaauggggaugccauaugcaguuaccgaugcaguauuagcaccucauauaggcggagaagcaggaaguagucaugcaccaccaccagcacuuacuuuaauauuugauaggcauccuauagcagcauuauuauguuaucccgcagcaagauauuuaaugggaagcaugacaccaagaccauguuggagaucauggccgucaucaagaagaccauguccugcacaaacaucauguuggggaccauuuagaagaacagacacuaguacagcuuggccaaaugcaagugcuccagcaucaggacuaacauggcucuguuggccaagauuugcagcauucacaggauguuugccaauaagaugcggaauauguagagcagcaggacgaggaggaagaauaggugauucauucagaggaagaccuuguagaccaagaguaccuaguccaagagcaacuagagcccaugauccaauuagcggaacaagauauuuaccauguuuuggaccaccuaguuguuggccaccaacagcaacauguauaacuuguuuaccaggaccguggacaucauggccuaacgcaaguguaccauguaccucacuaucauggauaacaacaaauagaccaccagccgcagguacaccuugcugcaauuuacccccuggauggucaagaccaacuuccccaccucaagcaccauacagaagguccgcaacauggcgugcaagauuaccaggaagauggggaagacucacagaaacaagaaaagaaacaauaccagaaggaacuagagcuaugacugcaauaaaaagacaaaauaaaacacauggaugcuggguaguauguucauaa

SEQ ID NO: 6841 - protein, 407 aa, Artificial Sequence
  Thymidine_Kinase_TK__Herpes_Simplex_Virus_1_(HSV-1)__Q9ENS5
MASYPCHQHASAFDQAARSRGHSNRRTALRPRRQQEATEVRLEQKMPTLLRVYIDGPHGMGKTTTTQLLVALGSRDDIVYVPEPMTYWQVLGASETIANIYTTQHRLDQGEISAGDAAVVMTSAQITMGMPYAVTDAVLAPHIGGEAGSSHAPPPALTLIFDRHPIAALLCYPAARYLMGSMTPQAVLAFVALIPPTLPGTNIVLGALPEDRHIDRLAKRQRPGERLDLAMLAAIRRVYGLLANTVRYLQGGGSWREDWGQLSGTAVPPQGAEPQSNAGPRPHIGDTLFTLFRAPELLAPNGDLYNVFAWALDVLAKRLRPMHVFILDYDQSPAGCRDALLQLTSGMVQTHVTTQAPYRRSATWRARLPGRWGRLTETRKETIPEGTRAMTAIKRQNKTHGCWVVCS

SEQ ID NO: 6842 - RNA, 1224 nt, Artificial Sequence
  Thymidine_Kinase_TK__Herpes_Simplex_Virus_1_(HSV-1)__BAB11942
auggcuucguaccccugccaucaacacgcgucugcguucgaccaggcugcgcguucucgcggccauagcaaccgacguacggcguugcgcccucgccggcagcaagaagccacggaaguccgccuggagcagaaaaugcccacgcuacugcggguuuauauagacgguccucacgggauggggaaaaccaccaccacgcaacugcugguggcccuggguucgcgcgacgauaucgucuacguacccgagccgaugacuuacuggcaggugcugggggcuuccgagacaaucgcgaacaucuacaccacacaacaccgccucgaccagggugagauaucggccggggacgcggcggugguaaugacaagcgcccagauaacaaugggcaugccuuaugccgugaccgacgccguucuggcuccucauaucgggggggaggcugggagcucacaugccccgcccccggcccucacccucaucuucgaccgccaucccaucgccgcccuccugugcuacccggccgcgcgauaccuuaugggcagcaugaccccccaggccgugcuggcguucguggcccucaucccgccgaccuugcccggcacaaacaucguguugggggcccuuccggaggacagacacaucgaccgccuggccaaacgccagcgccccggcgagcggcuugaccuggcuaugcuggccgcgauucgccgcguuuacgggcugcuugccaauacggugcgguaucugcagggcggcgggucguggcgggaggauuggggacagcuuucggggacggccgugccgccccagggugccgagccccagagcaacgcgggcccacgaccccauaucggggacacguuauuuacccuguuucgggcccccgaguugcuggcccccaacggcgaccuguauaacguguuugccugggccuuggacgucuuggccaaacgccuccgucccaugcacgucuuuauccuggauuacgaccaaucgcccgccggcugccgggacgcccugcugcaacuuaccuccgggaugguccagacccacgucaccacccaggcuccauaccgacgaucugcgaccuggcgcgcacguuugcccgggagaugggggaggcuaacugaaacacggaaggagacaauaccggaaggaacccgcgcuaugacggcaauaaaaagacagaauaaaacgcacggguguugggucguuuguucauaa

SEQ ID NO: 6843 - RNA, 1224 nt, Artificial Sequence
  derived and/or modified sequence opt1 from Thymidine_Kinase_TK__Herpes_Simplex_Virus_1_(HSV-1)__BAB11942
auggccagcuaccccugccaccagcacgccuccgcguucgaccaggccgcccgcagccggggccacuccaaccgccggaccgcccugcgcccgcggcgccagcaggaggccaccgaggugcggcucgagcagaagaugcccacgcugcugcgcgucuacaucgacgggccccacggcauggggaagaccaccaccacgcagcuccugguggcgcugggcagccgggacgacaucguguacguccccgagccgaugaccuacuggcagguccucggggccuccgagaccaucgccaacaucuacaccacgcagcaccgccuggaccagggcgagaucagcgccggcgacgcggccguggugaugaccuccgcccagaucaccauggggaugcccuacgccgugaccgacgccgugcuggcgccccacaucggcggggaggccggcagcucccacgcgcccccgcccgcccucacgcugaucuucgaccggcaccccaucgccgcccugcucugcuaccccgccgcccgcuaccugauggggagcaugaccccgcaggccguccuggccuucguggcgcucaucccgcccacccugcccggcaccaacaucgugcugggcgcccuccccgaggaccggcacaucgaccgccuggccaagcggcagcgccccggggagcggcuggaccucgccaugcuggccgcgauccgccgggucuacggccugcucgccaacacggugcgcuaccugcagggcgggggcuccuggcgggaggacugggggcagcugagcggcaccgccgugccgccccagggggccgagccccaguccaacgcgggcccccgcccccacaucggggacacccucuucacccuguuccgcgcccccgagcugcucgccccgaacggcgaccuguacaacgucuucgccugggcccuggacgugcucgcgaagcggcugcgccccaugcacguguucauccuggacuacgaccagagccccgccggcugccgggacgcccuccugcagcugacguccgggaugguccagacccacgugaccacccaggcccccuaccgccggagcgccacguggcgcgcgcggcucccgggccgcugggggcggcugaccgagacccgcaaggagaccauccccgagggcacgcgggccaugaccgccaucaagcgccagaacaagacccacgggugcuggguggucugcuccuga

SEQ ID NO: 6844 - RNA, 1224 nt, Artificial Sequence
  derived and/or modified sequence opt2 from Thymidine_Kinase_TK__Herpes_Simplex_Virus_1_(HSV-1)__BAB11942
auggccuccuaccccugccaccagcacgccuccgccuucgaccaggccgcccgcucccgcggccacuccaaccgccgcaccgcccuccgcccccgccgccagcaggaggccaccgagguccgccucgagcagaagaugcccacccuccuccgcgucuacaucgacggcccccacggcaugggcaagaccaccaccacccagcuccucgucgcccucggcucccgcgacgacaucgucuacguccccgagcccaugaccuacuggcagguccucggcgccuccgagaccaucgccaacaucuacaccacccagcaccgccucgaccagggcgagaucuccgccggcgacgccgccgucgucaugaccuccgcccagaucaccaugggcaugcccuacgccgucaccgacgccguccucgccccccacaucggcggcgaggccggcuccucccacgcccccccccccgcccucacccucaucuucgaccgccaccccaucgccgcccuccucugcuaccccgccgcccgcuaccucaugggcuccaugaccccccaggccguccucgccuucgucgcccucaucccccccacccuccccggcaccaacaucguccucggcgcccuccccgaggaccgccacaucgaccgccucgccaagcgccagcgccccggcgagcgccucgaccucgccaugcucgccgccauccgccgcgucuacggccuccucgccaacaccguccgcuaccuccagggcggcggcuccuggcgcgaggacuggggccagcucuccggcaccgccguccccccccagggcgccgagccccaguccaacgccggcccccgcccccacaucggcgacacccucuucacccucuuccgcgcccccgagcuccucgcccccaacggcgaccucuacaacgucuucgccugggcccucgacguccucgccaagcgccuccgccccaugcacgucuucauccucgacuacgaccagucccccgccggcugccgcgacgcccuccuccagcucaccuccggcaugguccagacccacgucaccacccaggcccccuaccgccgcuccgccaccuggcgcgcccgccuccccggccgcuggggccgccucaccgagacccgcaaggagaccauccccgagggcacccgcgccaugaccgccaucaagcgccagaacaagacccacggcugcugggucgucugcuccuga

SEQ ID NO: 6845 - RNA, 1224 nt, Artificial Sequence
  derived and/or modified sequence opt3 from Thymidine_Kinase_TK__Herpes_Simplex_Virus_1_(HSV-1)__BAB11942
auggccagcuaccccugccaccagcaugcuuccgcauucgaccaagccgcgagaucuaggggccacucaaaccggcgcaccgcucugcgaccucguagacagcaggaggccacagaagugaggcucgagcagaagaugccaacucuucugcgggucuauaucgaugggccgcauggaauggguaaaacgaccacaacucaauuguuaguugcacugggcagucgcgacgauauuguguacguacccgaaccuaugaccuauuggcaagugcuaggggccagcgagacaauagcuaauaucuacaccacucagcacagacucgaccagggagaaauuuccgcaggcgaugccgcugucgugaugacaucugcccagaucaccauggguaugccauaugcgguuacggacgcagugcuggcuccccauauugggggagaggcuggcucgucacacgccccuccacccgcacuuacucugaucuuugauaggcacccuauagcugccuugcucuguuacccagcggcccgguaucugaugggcagcaugaccccgcaggcaguccuggcuuucguggcccucauucccccuacauuaccagggacuaacaucguacugggagcccuucccgaggaccgccauaucgaucgauuggccaagagacagaggccuggugaacggcuggaccuagcaaugcucgccgcuauucgucgcguuuacggccugcuugcgaauaccgugagauaccugcaagggggaggcaguuggagggaggauuggggucaguuguccgggacagcagucccaccccagggagccgaaccgcagucuaacgcuggcccucggccccacaucggcgacacccucuuuacgcuguuccgagccccagaguuacuggcaccuaauggggaucucuauaacguguuugccugggcucuugacgugcuggccaaacgcuugagacccaugcaugucuucauacuagacuacgaucaaagcccagcaggaugcagggacgcgcugcuccagcugacuuccgguaugguucagacacacgugaccacucaggcucccuaucggcgcucagccacauggagagcaaggcuuccuggccguugggggcggcugaccgagacgcgaaaggaaaccauuccagagggaacaagagccaugacugcuaucaaaaggcaaaauaagacccacggcuguuggguagugugcaguuga

SEQ ID NO: 6846 - RNA, 1224 nt, Artificial Sequence
  derived and/or modified sequence opt4 from Thymidine_Kinase_TK__Herpes_Simplex_Virus_1_(HSV-1)__BAB11942
auggccagcuaccccugccaccagcacgccagcgccuucgaccaggccgccagaagcagaggccacagcaacagaagaaccgcccugagacccagaagacagcaggaggccaccgaggugagacuggagcagaagaugcccacccugcugagaguguacaucgacggcccccacggcaugggcaagaccaccaccacccagcugcugguggcccugggcagcagagacgacaucguguacgugcccgagcccaugaccuacuggcaggugcugggcgccagcgagaccaucgccaacaucuacaccacccagcacagacuggaccagggcgagaucagcgccggcgacgccgccguggugaugaccagcgcccagaucaccaugggcaugcccuacgccgugaccgacgccgugcuggccccccacaucggcggcgaggccggcagcagccacgcccccccccccgcccugacccugaucuucgacagacaccccaucgccgcccugcugugcuaccccgccgccagauaccugaugggcagcaugaccccccaggccgugcuggccuucguggcccugaucccccccacccugcccggcaccaacaucgugcugggcgcccugcccgaggacagacacaucgacagacuggccaagagacagagacccggcgagagacuggaccuggccaugcuggccgccaucagaagaguguacggccugcuggccaacaccgugagauaccugcagggcggcggcagcuggagagaggacuggggccagcugagcggcaccgccgugcccccccagggcgccgagccccagagcaacgccggccccagaccccacaucggcgacacccuguucacccuguucagagcccccgagcugcuggcccccaacggcgaccuguacaacguguucgccugggcccuggacgugcuggccaagagacugagacccaugcacguguucauccuggacuacgaccagagccccgccggcugcagagacgcccugcugcagcugaccagcggcauggugcagacccacgugaccacccaggcccccuacagaagaagcgccaccuggagagccagacugcccggcagauggggcagacugaccgagaccagaaaggagaccauccccgagggcaccagagccaugaccgccaucaagagacagaacaagacccacggcugcuggguggugugcagcuga

SEQ ID NO: 6847 - RNA, 1224 nt, Artificial Sequence
  derived and/or modified sequence opt5 from Thymidine_Kinase_TK__Herpes_Simplex_Virus_1_(HSV-1)__BAB11942
auggccagcuaccccugccaccagcaugcuuccgccuucgaccaagcggcuagaucucggggccacagcaaccgcagaaccgcccugcggccucgcagacagcaggaggccacagaagugcggcucgagcagaagaugccgacgcugcuucgcgucuauaucgaugggccccauggaaugggcaaaaccacaaccacacaacugcucguugcucugggguccagagacgauauuguguacgugccugaacccaugaccuauuggcagguccuuggagccucugagacaaucgcuaauauuuacaccacgcagcaccggcuggaccagggcgaaaucagcgccggggaugcggccgugguuaugaccuccgcucaaauuacaaugggaaugccuuaugccgugaccgacgcuguccucgcgccccauaucggcggcgaggccgggucuagccacgccccuccgcccgcucugacacugaucuuugaucgccacccuauugccgcucuccuguguuaccccgccgccagauaucuuaugggauccaugaccccucaggcugugcuggcguucguugcccucauucccccgacgcugccuggcacaaacaucgugcuuggggcucugcccgaggaccggcauaucgaucgccucgccaagagacagcggccuggagaacgccuggaccuggccaugcucgcugccauuagacgggucuacggccugcuugcgaauaccgugagauaccugcaagggggaggcagcuggcgcgaggauuggggccagcucucugggacagcugugccuccccagggagccgaaccccaguccaacgccggcccgcggccccacaucggggacacccuguuuacccuuuucagagcuccugagcugcucgcccccaauggagaucuguauaacgucuuugcuugggcccuggacguucucgcgaaacgccugcggccuaugcauguguucauucuugacuacgaucaaagccccgccggcugcagagacgcucugcuccagcugacaucugggauggugcagacgcacgucaccacacaggccccguaucgccgguccgcuaccuggagagcccgccuuccuggacgguggggcagacugacagagacccgcaaggaaacgauccccgagggcacacgggcgaugaccgccaucaaaagacaaaauaagacccacggguguugggugguuugcagcuga

SEQ ID NO: 6848 - RNA, 1224 nt, Artificial Sequence
  derived and/or modified sequence opt6 from Thymidine_Kinase_TK__Herpes_Simplex_Virus_1_(HSV-1)__BAB11942
auggcaaguuauccuugccaucaacacgcaagugcauuugaccaagcagcacgaaguagaggucacaguaauagacgaacagcacuuagaccacgaagacaacaagaagccacagaaguacgauuagaacaaaaaaugcccacacuauuaagaguauacauagaugguccucauggaaugggcaaaacaacaacuacacaauuauuaguagcauuaggaaguagagaugauauaguauauguuccggaaccaaugacauauuggcaaguauuaggagccucagaaacgauagcaaacauauacacuacacaacauaggcuagaucaaggagaaauaagugcuggagaugcagcagucguaaugacaucagcccaaauaacaaugggaaugccauaugcaguaacagaugccguauuagcuccacauauaggaggagaagcaggaucaucacaugcuccacccccagcucuaacucucauauuugauagacauccaauagcugcacuauuauguuauccugcagcuagauaucugaugggaagcaugacaccacaagcaguauuagcauucguagcuuuaauucccccaacauuaccaggcacaaauauaguucuuggagcuuuaccagaagauagacauauagauagauuggccaaaagacaaagaccaggagaaagacuagauuuagcuauguuagcagcaauaagaagaguuuacgguuuauuagcaaacacaguaagauaucuacaaggaggagguaguuggagagaagauuggggacaauuaaguggaacagcuguaccaccacaaggagcagaaccacaaucaaaugcuggaccacgaccacauauaggagacacacuauuuacacuauuuagagcaccagaacucuuagcucccaauggagauuuauauaauguuuuugccugggccuuagauguacuagcuaaaagauuaaggccaaugcacguauuuauacuagauuacgaucaaucacccgcaggaugucgagacgcacuacuacaacuaaccucaggaaugguccaaacucauguaacuacacaagcaccauaucgaaggagcgcaacauggagagcaagauuaccaggaagauggggaaggcuaacggaaacuagaaaagaaacaauuccagaaggaacuagagcaaugacagcaauaaaaagacaaaacaaaacacauggauguuggguagucuguaguuaa

SEQ ID NO: 6849 - protein, 227 aa, Artificial Sequence
  Thymidine_Kinase_TK__Herpes_Simplex_Virus_1_(HSV-1)__Q9IYZ7
MASYPCHQHASAFDQAARSRGHSNRRTALRPRRQQEATEVRLEQKMPTLLRVYIDGPHGMGKTTTTQLLVALGSRDNIVYVPEPMTYWQVLGASETIANIYTTQHRLDQGEISAGDAAVVMTSAQITMGMPYAVTDAVLAPHIGGGGWELTCPAPGPHPHLRPPSHRRPPVLPGRAIPYGQHDPPGRAGVRGPHPADLARHKHRVGGPSGGQTHRPPGQTPAPRRAA

SEQ ID NO: 6850 - RNA, 684 nt, Artificial Sequence
  Thymidine_Kinase_TK__Herpes_Simplex_Virus_1_(HSV-1)__AAF72505
auggcuucguaccccugccaucaacacgcgucugcguucgaccaggcugcgcguucucgcggccauagcaaccgacguacggcguugcgcccucgccggcagcaagaagccacggaaguccgccuggagcagaaaaugcccacgcuacugcggguuuauauagacgguccucacgggauggggaaaaccaccaccacgcaacugcugguggcccuggguucgcgcgacaauaucgucuacguacccgagccgaugacuuacuggcaggugcugggggcuuccgagacaaucgcgaacaucuacaccacacaacaccgccucgaccagggugagauaucggccggggacgcggcggugguaaugacaagcgcccagauaacaaugggcaugccuuaugccgugaccgacgccguucuggcuccucauaucggggggggaggcugggagcucacaugccccgcccccggcccucacccucaucuucgaccgccaucccaucgccgcccuccugugcuacccggccgcgcgauaccuuaugggcagcaugaccccccaggccgugcuggcguucguggcccucaucccgccgaccuugcccggcacaaacaucguguugggggcccuuccggaggacagacacaucgaccgccuggccaaacgccagcgccccggcgagcggcuuga

SEQ ID NO: 6851 - RNA, 684 nt, Artificial Sequence
  derived and/or modified sequence opt1 from Thymidine_Kinase_TK__Herpes_Simplex_Virus_1_(HSV-1)__AAF72505
auggccagcuaccccugccaccagcacgccuccgccuucgaccaggccgcccgcagccggggccacuccaaccgccggaccgcccugcgcccgcggcgccagcaggaggccaccgaggugcggcucgagcagaagaugcccacgcugcugcgcgucuacaucgacgggccccacggcauggggaagaccaccaccacgcagcuccugguggcgcugggcagccgggacaacaucguguacguccccgagccgaugaccuacuggcagguccucggggccuccgagaccaucgccaacaucuacaccacgcagcaccgccuggaccagggcgagaucagcgccggcgacgcggccguggugaugaccuccgcccagaucaccauggggaugcccuacgccgugaccgacgccgugcuggcgccccacaucggcgggggcgggugggagcucacgugccccgccccgggcccccacccccaccuccggcccccgagccaccgccggccgcccguccugcccggccgcgccauccccuacgggcagcacgacccgcccggccgggccggggugcgcggcccccaccccgccgaccuggcgcggcacaagcaccgcgugggcgggcccuccggcgggcagacccaccggccgcccggccagacccccgcgccccgccgggccgccuga

SEQ ID NO: 6852 - RNA, 684 nt, Artificial Sequence
  derived and/or modified sequence opt2 from Thymidine_Kinase_TK__Herpes_Simplex_Virus_1_(HSV-1)__AAF72505
auggccuccuaccccugccaccagcacgccuccgccuucgaccaggccgcccgcucccgcggccacuccaaccgccgcaccgcccuccgcccccgccgccagcaggaggccaccgagguccgccucgagcagaagaugcccacccuccuccgcgucuacaucgacggcccccacggcaugggcaagaccaccaccacccagcuccucgucgcccucggcucccgcgacaacaucgucuacguccccgagcccaugaccuacuggcagguccucggcgccuccgagaccaucgccaacaucuacaccacccagcaccgccucgaccagggcgagaucuccgccggcgacgccgccgucgucaugaccuccgcccagaucaccaugggcaugcccuacgccgucaccgacgccguccucgccccccacaucggcggcggcggcugggagcucaccugccccgcccccggcccccacccccaccuccgcccccccucccaccgccgcccccccguccuccccggccgcgccauccccuacggccagcacgacccccccggccgcgccggcguccgcggcccccaccccgccgaccucgcccgccacaagcaccgcgucggcggccccuccggcggccagacccaccgcccccccggccagacccccgccccccgccgcgccgccuga

SEQ ID NO: 6853 - RNA, 684 nt, Artificial Sequence
  derived and/or modified sequence opt3 from Thymidine_Kinase_TK__Herpes_Simplex_Virus_1_(HSV-1)__AAF72505
auggccagcuaccccugccaccagcaugcuuccgcauucgaccaagccgcgagaucuaggggccacucaaaccggcgcaccgcucugcgaccucguagacagcaggaggccacagaagugaggcucgagcagaagaugccaacucuucugcgggucuauaucgaugggccgcauggaauggguaaaacgaccacaacucaauuguuaguugcacugggcagucgcgacaauauuguguacguacccgaaccuaugaccuauuggcaagugcuaggggccagcgagacaauagcuaacaucuacaccacucagcacagacucgaucagggagaaauuuccgcaggcgacgccgcugucgugaugacaucugcccagaucaccauggguaugccauaugcgguuacggaugcagugcuggccccucauauugggggaggcggcugggagcuuacuuguccugcuccagggccccacccucaccugaggccaccgucgcaucggcgacccccugucuugccaggacgcgccauccccuacggucagcacgacccuccaggcagagcaggggugaggggaccccauccggcugaucucgcccggcacaagcaccguguaggcgguccuucagggggacagacccauagacccccaggccagacacccgcgccccgcagggccgcauga

SEQ ID NO: 6854 - RNA, 684 nt, Artificial Sequence
  derived and/or modified sequence opt4 from Thymidine_Kinase_TK__Herpes_Simplex_Virus_1_(HSV-1)__AAF72505
auggccagcuaccccugccaccagcacgccagcgccuucgaccaggccgccagaagcagaggccacagcaacagaagaaccgcccugagacccagaagacagcaggaggccaccgaggugagacuggagcagaagaugcccacccugcugagaguguacaucgacggcccccacggcaugggcaagaccaccaccacccagcugcugguggcccugggcagcagagacaacaucguguacgugcccgagcccaugaccuacuggcaggugcugggcgccagcgagaccaucgccaacaucuacaccacccagcacagacuggaccagggcgagaucagcgccggcgacgccgccguggugaugaccagcgcccagaucaccaugggcaugcccuacgccgugaccgacgccgugcuggccccccacaucggcggcggcggcugggagcugaccugccccgcccccggcccccacccccaccugagaccccccagccacagaagaccccccgugcugcccggcagagccauccccuacggccagcacgacccccccggcagagccggcgugagaggcccccaccccgccgaccuggccagacacaagcacagagugggcggccccagcggcggccagacccacagaccccccggccagacccccgcccccagaagagccgccuga

SEQ ID NO: 6855 - RNA, 684 nt, Artificial Sequence
  derived and/or modified sequence opt5 from Thymidine_Kinase_TK__Herpes_Simplex_Virus_1_(HSV-1)__AAF72505
auggccagcuaccccugccaccagcaugcuuccgccuucgaccaagcggcuagaucucggggccacagcaaccgcagaaccgcccugcggccucgcagacagcaggaggccacagaagugcggcucgagcagaagaugccgacgcugcuucgcgucuauaucgaugggccccauggaaugggcaaaaccacaaccacacaacugcucguugcucugggguccagagacaauauuguguacgugccugaacccaugaccuauuggcagguccuuggagccucugagacaaucgcuaacauuuacaccacgcagcaccggcuggaucagggcgaaaucagcgccggggacgcggccgugguuaugaccuccgcucaaauuacaaugggaaugccuuaugccgugaccgaugcuguccucgcgccccauaucggcggcgggggaugggagcugacauguccugccccgggcccccacccucaccugagacccccuucucaucgccggcccccggugcucccugggcgcgccauccccuacggacagcacgacccucccggcagagcugggguucggggaccccauccugccgaucuggcucgccacaagcacagagugggcggcccgagcgggggacagacccaucggcccccuggccagacgcccgccccuagacgcgccgcuuga

SEQ ID NO: 6856 - RNA, 684 nt, Artificial Sequence
  derived and/or modified sequence opt6 from Thymidine_Kinase_TK__Herpes_Simplex_Virus_1_(HSV-1)__AAF72505
auggcaaguuauccaugccaucaacacgcaucagcauucgaucaagcagcaagaucaagaggacauucaaauagaagaacagcauuaagaccaagaagacaacaagaagcaacagaaguacgauuagaacaaaaaaugccaacauuauuacgaguauacauagacggaccacauggaauggguaaaacaacaacaacacaacuacuaguagcauuaggaucaagagauaauauaguauauguaccagaaccuaugacauacuggcaaguacuaggagcaucagaaacaauagcaaacauuuacacaacacaacacagacuagaucaaggagaaauaagugcaggagaugcagcaguaguaaugacaucagcacaaauaacaaugggaaugccauaugcaguaacagaugcaguacuagcgccacauauagggggcggaggaugggaacuaacauguccagcaccaggaccacauccacauuuaagaccaccaucacauagaagaccaccaguacuaccaggaagagcaauaccauauggucaacaugauccaccaggacgagcagguguaagaggaccucauccagcagacuuagcaagacauaaacauagaguaggaggcccaucaggaggacaaacacauagaccaccaggacaaacacccgcacccagaagagcagcauaa

SEQ ID NO: 6857 - protein, 181 aa, Artificial Sequence
  Thymidine_Kinase_TK__Herpes_Simplex_Virus_1_(HSV-1)__Q9IYZ9
MASYPCHQHASAFDQAARSRGHSNRRTALRPRRQQEATEVRLEQKMPTLLRVYIDGPHGMGKTTTTQLLVALGSRDDIVYVPEPMTYWQVLGASETIANIYTTQHRLDQGEISAGDAAVVMTSAQITMGMPYAVTDAVLAPHIGGRLGAHMPRPRPSPSSSTAIPSPPSCATRPRDTLWAA

SEQ ID NO: 6858 - RNA, 546 nt, Artificial Sequence
  Thymidine_Kinase_TK__Herpes_Simplex_Virus_1_(HSV-1)__AAF72503
auggcuucguaccccugccaucaacacgcgucugcguucgaccaggcugcgcguucucgcggccauagcaaccgacguacggcguugcgcccucgccggcagcaagaagccacggaaguccgccuggagcagaaaaugcccacgcuacugcggguuuauauagacgguccucacgggauggggaaaaccaccaccacgcaacugcugguggcccuggguucgcgcgacgauaucgucuacguacccgagccgaugacuuacuggcaggugcugggggcuuccgagacaaucgcgaacaucuacaccacacaacaccgccucgaccagggugagauaucggccggggacgcggcggugguaaugacaagcgcccagauaacaaugggcaugccuuaugccgugaccgacgccguucuggcuccucauaucggggggaggcugggagcucacaugccccgcccccggcccucacccucaucuucgaccgccaucccaucgccgcccuccugugcuacccggccgcgcgauaccuuaugggcagcauga

SEQ ID NO: 6859 - RNA, 546 nt, Artificial Sequence
  derived and/or modified sequence opt1 from Thymidine_Kinase_TK__Herpes_Simplex_Virus_1_(HSV-1)__AAF72503
auggccagcuaccccugccaccagcacgccuccgcguucgaccaggccgcccgcagccggggccacuccaaccgccggaccgcccugcgcccgcggcgccagcaggaggccaccgaggugcggcucgagcagaagaugcccacgcugcugcgcgucuacaucgacgggccccacggcauggggaagaccaccaccacgcagcuccugguggcgcugggcagccgggacgacaucguguacguccccgagccgaugaccuacuggcagguccucggggccuccgagaccaucgccaacaucuacaccacgcagcaccgccuggaccagggcgagaucagcgccggcgacgcggccguggugaugaccuccgcccagaucaccauggggaugcccuacgccgugaccgacgccgugcuggcgccccacaucggcgggcggcucggcgcccacaugccccgcccgcggcccagccccuccagcuccacggccauccccagcccgcccuccugcgccacccgcccccgggacacccugugggccgcguga

SEQ ID NO: 6860 - RNA, 546 nt, Artificial Sequence
  derived and/or modified sequence opt2 from Thymidine_Kinase_TK__Herpes_Simplex_Virus_1_(HSV-1)__AAF72503
auggccuccuaccccugccaccagcacgccuccgccuucgaccaggccgcccgcucccgcggccacuccaaccgccgcaccgcccuccgcccccgccgccagcaggaggccaccgagguccgccucgagcagaagaugcccacccuccuccgcgucuacaucgacggcccccacggcaugggcaagaccaccaccacccagcuccucgucgcccucggcucccgcgacgacaucgucuacguccccgagcccaugaccuacuggcagguccucggcgccuccgagaccaucgccaacaucuacaccacccagcaccgccucgaccagggcgagaucuccgccggcgacgccgccgucgucaugaccuccgcccagaucaccaugggcaugcccuacgccgucaccgacgccguccucgccccccacaucggcggccgccucggcgcccacaugccccgcccccgccccucccccuccuccuccaccgccauccccuccccccccuccugcgccacccgcccccgcgacacccucugggccgccuga

SEQ ID NO: 6861 - RNA, 546 nt, Artificial Sequence
  derived and/or modified sequence opt3 from Thymidine_Kinase_TK__Herpes_Simplex_Virus_1_(HSV-1)__AAF72503
auggccagcuaccccugccaccagcaugcuuccgcauucgaccaagccgcgagaucuaggggccacucaaaccggcgcaccgcucugcgaccucguagacagcaggaggccacagaagugaggcucgagcagaagaugccaacucuucugcgggucuauaucgaugggccgcauggaauggguaaaacgaccacaacucaauuguuaguugcacugggcagucgcgacgauauuguguacguacccgaaccuaugaccuauuggcaagugcuaggggccagcgagacaauagcuaauaucuacaccacucagcacagacucgaccagggagaaauuuccgcaggcgaugccgcugucgugaugacaucugcccagaucaccauggguaugccauaugcgguuacggacgcagugcuggcuccccauauugggggaaggcuuggcgcccacaugccucggccacgccccucgccuucaagcaguacugccaucccauccccgcccucuugugcaacccgaccuagagauacacugugggcugccuga

SEQ ID NO: 6862 - RNA, 546 nt, Artificial Sequence
  derived and/or modified sequence opt4 from Thymidine_Kinase_TK__Herpes_Simplex_Virus_1_(HSV-1)__AAF72503
auggccagcuaccccugccaccagcacgccagcgccuucgaccaggccgccagaagcagaggccacagcaacagaagaaccgcccugagacccagaagacagcaggaggccaccgaggugagacuggagcagaagaugcccacccugcugagaguguacaucgacggcccccacggcaugggcaagaccaccaccacccagcugcugguggcccugggcagcagagacgacaucguguacgugcccgagcccaugaccuacuggcaggugcugggcgccagcgagaccaucgccaacaucuacaccacccagcacagacuggaccagggcgagaucagcgccggcgacgccgccguggugaugaccagcgcccagaucaccaugggcaugcccuacgccgugaccgacgccgugcuggccccccacaucggcggcagacugggcgcccacaugcccagacccagacccagccccagcagcagcaccgccauccccagcccccccagcugcgccaccagacccagagacacccugugggccgccuga

SEQ ID NO: 6863 - RNA, 546 nt, Artificial Sequence
  derived and/or modified sequence opt5 from Thymidine_Kinase_TK__Herpes_Simplex_Virus_1_(HSV-1)__AAF72503
auggccagcuaccccugccaccagcaugcuuccgccuucgaccaagcggcuagaucucggggccacagcaaccgcagaaccgcccugcggccucgcagacagcaggaggccacagaagugcggcucgagcagaagaugccgacgcugcuucgcgucuauaucgaugggccccauggaaugggcaaaaccacaaccacacaacugcucguugcucugggguccagagacgauauuguguacgugccugaacccaugaccuauuggcagguccuuggagccucugagacaaucgcuaauauuuacaccacgcagcaccggcuggaccagggcgaaaucagcgccggggaugcggccgugguuaugaccuccgcucaaauuacaaugggaaugccuuaugccgugaccgacgcuguccucgcgccccauaucggcggccgccugggggcccacaugccuagaccgcggcccucuccuagcuccagcacagccauccccucuccucccuccugugcuacccgcccgagagauacgcugugggccgcuuga

SEQ ID NO: 6864 - RNA, 546 nt, Artificial Sequence
  derived and/or modified sequence opt6 from Thymidine_Kinase_TK__Herpes_Simplex_Virus_1_(HSV-1)__AAF72503
auggcaucauacccaugccaccaacacgcaucagcauucgaccaagcagcaagaucaagaggacacucaaaccgaagaacagcacuaagaccaagaagacaacaagaagcaacagaaguaagacuagaacaaaaaaugccaacacuacuaagaguauacauagauggcccacacggaaugggaaaaacaacaacaacacaacuacuuguagcauuaggaucaagagacgacauaguauacguaccagaaccaaugacauacuggcaaguacuaggagcaucagaaacaauagcaaacauauacacaacacaacacagacuagaccaaggagaaauaucagcaggagacgcagcaguaguaaugacaucagcacaaauaacaaugggaaugccauacgcaguaacagacgcaguauuagcaccacacauaggaggaagacuaggagcacacaugccaagaccaagaccaucaccaagcucaagcacagcaauaccaucaccaccaucaugcgcaacaagaccaagagacacacuaugggcagcauaa

SEQ ID NO: 6865 - protein, 119 aa, Artificial Sequence
  Thymidine_Kinase_TK__Herpes_Simplex_Virus_1_(HSV-1)__Q9IZ02
MASYPCHQHASAFDQAARSRGHNNRRTALRPRRQQKATEVRLEQKMPTLLRVYIDGPHGMGKTTTTQLLVALGSRDDIVYVPEPMTYWRVLGLPRQSRTSTPHNTASTRVRYRPGTRRW

SEQ ID NO: 6866 - RNA, 360 nt, Artificial Sequence
  Thymidine_Kinase_TK__Herpes_Simplex_Virus_1_(HSV-1)__AAF72499
auggcuucguaccccugccaucaacacgcgucugcguucgaccaggcugcgcguucucgcggccauaacaaccgacguacggcguugcgcccucgccggcagcaaaaagccacggaaguccgccuggagcagaaaaugcccacgcuacugcggguuuauauagacgguccccacgggauggggaaaaccaccaccacgcaacugcugguggcccuggguucgcgcgacgauaucgucuacguacccgagccgaugacuuacuggcggguguuggggcuuccgagacaaucgcgaacaucuacaccacacaacaccgccucgaccagggugagauaucggccggggacgcggcggugguaa

SEQ ID NO: 6867 - RNA, 360 nt, Artificial Sequence
  derived and/or modified sequence opt1 from Thymidine_Kinase_TK__Herpes_Simplex_Virus_1_(HSV-1)__AAF72499
auggccagcuaccccugccaccagcacgccuccgcguucgaccaggccgcccgcagccggggccacaacaaccgccggaccgcccugcgcccgcggcgccagcagaaggccaccgaggugcggcucgagcagaagaugcccacgcugcugcgcgucuacaucgacgggccccacggcauggggaagaccaccaccacgcagcuccugguggcgcugggcucccgggacgacaucguguacguccccgagccgaugaccuacuggcgcgugcucgggcugccccggcagagccgcaccuccacgccccacaacaccgccagcacccgggugcgcuaccggcccggcacccgccggugguga

SEQ ID NO: 6868 - RNA, 360 nt, Artificial Sequence
  derived and/or modified sequence opt2 from Thymidine_Kinase_TK__Herpes_Simplex_Virus_1_(HSV-1)__AAF72499
auggccuccuaccccugccaccagcacgccuccgccuucgaccaggccgcccgcucccgcggccacaacaaccgccgcaccgcccuccgcccccgccgccagcagaaggccaccgagguccgccucgagcagaagaugcccacccuccuccgcgucuacaucgacggcccccacggcaugggcaagaccaccaccacccagcuccucgucgcccucggcucccgcgacgacaucgucuacguccccgagcccaugaccuacuggcgcguccucggccucccccgccagucccgcaccuccaccccccacaacaccgccuccacccgcguccgcuaccgccccggcacccgccgcugguga

SEQ ID NO: 6869 - RNA, 360 nt, Artificial Sequence
  derived and/or modified sequence opt3 from Thymidine_Kinase_TK__Herpes_Simplex_Virus_1_(HSV-1)__AAF72499
auggccagcuaccccugccaccagcaugcuuccgcauucgaccaagccgcgagaucuaggggccacaacaaucggcgcaccgcucugcgaccucguagacagcagaaggccacagaggugaggcucgaacagaaaaugccaacucuucugcgggucuauaucgaugggccgcauggaauggguaagacgaccacaacucaauuguuaguugcacugggcucacgcgacgauauuguguacguacccgagccuaugaccuauuggagagugcuagggcucccaaggcagagucggacaagcacuccccacaacaccgccuccacacgcguccgauacagaccuggaaccaggcggugguga

SEQ ID NO: 6870 - RNA, 360 nt, Artificial Sequence
  derived and/or modified sequence opt4 from Thymidine_Kinase_TK__Herpes_Simplex_Virus_1_(HSV-1)__AAF72499
auggccagcuaccccugccaccagcacgccagcgccuucgaccaggccgccagaagcagaggccacaacaacagaagaaccgcccugagacccagaagacagcagaaggccaccgaggugagacuggagcagaagaugcccacccugcugagaguguacaucgacggcccccacggcaugggcaagaccaccaccacccagcugcugguggcccugggcagcagagacgacaucguguacgugcccgagcccaugaccuacuggagagugcugggccugcccagacagagcagaaccagcaccccccacaacaccgccagcaccagagugagauacagacccggcaccagaagaugguga

SEQ ID NO: 6871 - RNA, 360 nt, Artificial Sequence
  derived and/or modified sequence opt5 from Thymidine_Kinase_TK__Herpes_Simplex_Virus_1_(HSV-1)__AAF72499
auggccagcuaccccugccaccagcaugcuuccgccuucgaccaagcggcuagaucucggggccacaacaaucgcagaaccgcccugcggccucgcagacagcagaaggccacagaggugcggcucgaacagaaaaugccgacgcugcuucgcgucuauaucgaugggccccauggaaugggcaagaccacaaccacacaacugcucguugcucuggggagcagagacgauauuguguacgugccugagcccaugaccuauuggcggguccuuggacugccucgccaguccagaacaucuacgccccacaacaccgccagcacccgggugcgcuacagaccuggcacacggcgcugguga

SEQ ID NO: 6872 - RNA, 360 nt, Artificial Sequence
  derived and/or modified sequence opt6 from Thymidine_Kinase_TK__Herpes_Simplex_Virus_1_(HSV-1)__AAF72499
auggcaagcuauccaugucaccaacacgcaagcgcauucgaucaagcagcaagaagcagaggacauaacaauagaagaacagcauuaagaccaagaagacaacaaaaagcaacagaaguaagauuagaacaaaaaaugccaacacuauuaagaguauacauagacggaccacacggaaugggaaaaacaacaacaacacaauuauuaguagcauuaggaucaagagaugacauaguauauguaccagaaccaaugacauacuggagaguacuaggacuaccaagacaaagcagaacaucaacaccacacaauacagcaagcacaagaguaagauauagaccaggaacaagaagaugguaa

SEQ ID NO: 6873 - protein, 103 aa, Artificial Sequence
  Thymidine_Kinase_TK__Herpes_Simplex_Virus_1_(HSV-1)__Q9IZ03
MASYPCHQHASAFDQAARSRGHSNRRTALRPRRQQEATEVRLEQKMPTLLRVYIDGPHGMGKTTTTQLLVALGSRDDIVYVPEPITYWQVLGASETIANIYTT

SEQ ID NO: 6874 - RNA, 312 nt, Artificial Sequence
  Thymidine_Kinase_TK__Herpes_Simplex_Virus_1_(HSV-1)__AAF72498
auggcuucguaccccugccaucaacacgcgucugcguucgaccaggcugcgcguucucgcggccauagcaaccgacguacggcguugcgcccucgccggcaacaagaagccacggaaguccgccuggagcagaaaaugcccacgcuacugcggguuuauauagacgguccucacgggauggggaaaaccaccaccacgcaacugcugguggcccuggguucgcgcgacgauaucgucuacguacccgagccgauaacuuacuggcaggugcugggggcuuccgagacaaucgcgaacaucuacaccacauaa

SEQ ID NO: 6875 - RNA, 312 nt, Artificial Sequence
  derived and/or modified sequence opt1 from Thymidine_Kinase_TK__Herpes_Simplex_Virus_1_(HSV-1)__AAF72498
auggccagcuaccccugccaccagcacgccuccgcguucgaccaggccgcccgcagccggggccacuccaaccgccggaccgcccugcgcccgcggcgccagcaggaggccaccgaggugcggcucgagcagaagaugcccacgcugcugcgcguguacaucgacgggccccacggcauggggaagaccaccaccacgcagcuccugguggcgcugggcagccgggacgacaucguguacguccccgagccgaucaccuacuggcagguccucggggccuccgagaccaucgccaacaucuacaccacguga

SEQ ID NO: 6876 - RNA, 312 nt, Artificial Sequence
  derived and/or modified sequence opt2 from Thymidine_Kinase_TK__Herpes_Simplex_Virus_1_(HSV-1)__AAF72498
auggccuccuaccccugccaccagcacgccuccgccuucgaccaggccgcccgcucccgcggccacuccaaccgccgcaccgcccuccgcccccgccgccagcaggaggccaccgagguccgccucgagcagaagaugcccacccuccuccgcgucuacaucgacggcccccacggcaugggcaagaccaccaccacccagcuccucgucgcccucggcucccgcgacgacaucgucuacguccccgagcccaucaccuacuggcagguccucggcgccuccgagaccaucgccaacaucuacaccaccuga

SEQ ID NO: 6877 - RNA, 312 nt, Artificial Sequence
  derived and/or modified sequence opt3 from Thymidine_Kinase_TK__Herpes_Simplex_Virus_1_(HSV-1)__AAF72498
auggccagcuaccccugccaccagcaugcuuccgcauucgaccaggccgcgagaucuaggggccacucaaaccggcgcaccgcucugcgaccucguagacagcaggaggccacagaagugaggcucgagcagaagaugccaacucuucugcgggucuauaucgaugggccgcauggaauggguaaaacgaccacaacucaauuguuaguugcacugggcagucgcgacgauauuguguacguacccgaaccuauaaccuauuggcaagugcuaggggccagcgagacaaucgcuaauauuuacaccacuuga

SEQ ID NO: 6878 - RNA, 312 nt, Artificial Sequence
  derived and/or modified sequence opt4 from Thymidine_Kinase_TK__Herpes_Simplex_Virus_1_(HSV-1)__AAF72498
auggccagcuaccccugccaccagcacgccagcgccuucgaccaggccgccagaagcagaggccacagcaacagaagaaccgcccugagacccagaagacagcaggaggccaccgaggugagacuggagcagaagaugcccacccugcugagaguguacaucgacggcccccacggcaugggcaagaccaccaccacccagcugcugguggcccugggcagcagagacgacaucguguacgugcccgagcccaucaccuacuggcaggugcugggcgccagcgagaccaucgccaacaucuacaccaccuga

SEQ ID NO: 6879 - RNA, 312 nt, Artificial Sequence
  derived and/or modified sequence opt5 from Thymidine_Kinase_TK__Herpes_Simplex_Virus_1_(HSV-1)__AAF72498
auggccagcuaccccugccaccagcaugcuuccgccuucgaccaagcggcuagaucucggggccacagcaaccgcagaaccgcccugcggccucgcagacagcaggaggccacagaagugcggcucgagcagaagaugccgacgcugcuucgcgucuauaucgaugggccccauggaaugggcaaaaccacaaccacacaacugcucguugcucugggguccagagacgauauuguguacgugccugaacccaucaccuauuggcagguccuuggagccucugagacaauugcuaauaucuacaccacguga

SEQ ID NO: 6880 - RNA, 312 nt, Artificial Sequence
  derived and/or modified sequence opt6 from Thymidine_Kinase_TK__Herpes_Simplex_Virus_1_(HSV-1)__AAF72498
auggcaucauacccaugccaccaacacgcaucagcauucgaccaagcagcaagaucaagaggacacucaaacagaagaacagcacuaagaccaagaagacaacaagaagcaacagaaguaagacuagaacaaaaaaugccaacacuacuaagaguauacauagacggaccacacggaaugggaaaaacaacaacaacacaacuacuaguagcacuaggaucaagagacgacauaguauacguaccagaaccaauaacauacuggcaaguacuaggagcaucagaaacaauagcaaacauauacacaacauaa

SEQ ID NO: 6881 - protein, 224 aa, Artificial Sequence
  Thymidine_Kinase_TK__Herpes_Simplex_Virus_1_(HSV-1)__Q9IZ07
MASYPGHQHASAFDQAARSRGHSNRRTALRPRRQQEATEVRLEQKMPTLLRVYIDGPHGMGKTTTTQLLVALGSRDDIVYVPEPMTYWRVLGASETIANIYTTQHRLDQGEISAGDAAVVMTSAQITMGMPYAVTDAVLAPHIGGGGWELTCPAPGPHPHLRPASHRRPPVLPGRAVPYGQHDPPGRAGVRGPHPADLARHKHRVGGPSGGQTHRPPGQTPAPR

SEQ ID NO: 6882 - RNA, 675 nt, Artificial Sequence
  Thymidine_Kinase_TK__Herpes_Simplex_Virus_1_(HSV-1)__AAF72494
auggcuucguaccccggccaucaacacgcgucugcguucgaccaggcugcgcguucucgcggccauagcaaccgacguacggcguugcgcccucgccggcagcaagaagccacggaaguccgccuggagcagaaaaugcccacgcuacugcggguuuauauagacgguccucacgggauggggaaaaccaccaccacgcaacugcugguggcccuggguucgcgcgacgauaucgucuacguacccgagccgaugacuuacuggcgggugcugggggcuuccgagacaaucgcgaacaucuacaccacacaacaccgccucgaccagggugagauaucggccggggacgcggcggugguaaugacaagcgcccagauaacaaugggcaugccuuaugccgugaccgacgccguucuggcuccucauaucggggggggaggcugggagcucacaugccccgcccccggcccucacccucaucuucgaccggcaucccaucgccgcccuccugugcuacccggccgcgcgguaccuuaugggcagcaugaccccccaggccgugcuggcguucguggcccucaucccgccgaccuugcccggcacaaacaucguguugggggcccuuccggaggacagacacaucgaccgccuggccaaacgccagcgccccgguga

SEQ ID NO: 6883 - RNA, 675 nt, Artificial Sequence
  derived and/or modified sequence opt1 from Thymidine_Kinase_TK__Herpes_Simplex_Virus_1_(HSV-1)__AAF72494
auggccagcuaccccggccaccagcacgccuccgccuucgaccaggccgcccgcagccgggggcacuccaaccgccggaccgcccugcgcccgcggcgccagcaggaggccaccgaggugcggcucgagcagaagaugcccacgcugcugcgcgucuacaucgacggcccccacgggaugggcaagaccaccaccacgcagcuccugguggcgcuggggagccgggacgacaucguguacguccccgagccgaugaccuacuggcgcgugcucggcgccuccgagaccaucgccaacaucuacaccacgcagcaccggcuggaccagggcgagaucagcgccggggacgcggccguggucaugaccuccgcccagaucaccaugggcaugcccuacgccgugaccgacgccgugcuggcgccccacaucgggggcgggggcugggagcucacgugccccgccccgggcccccacccccaccuccgccccgccagccaccggcgcccgcccguccugcccgggcgggccgugcccuacggccagcacgacccgcccgggcgcgccggcgugcggggcccccaccccgcggaccuggcccgccacaagcaccgggucgggggcccguccgggggccagacccaccgcccgcccgggcagacccccgcgccccgguga

SEQ ID NO: 6884 - RNA, 675 nt, Artificial Sequence
  derived and/or modified sequence opt2 from Thymidine_Kinase_TK__Herpes_Simplex_Virus_1_(HSV-1)__AAF72494
auggccuccuaccccggccaccagcacgccuccgccuucgaccaggccgcccgcucccgcggccacuccaaccgccgcaccgcccuccgcccccgccgccagcaggaggccaccgagguccgccucgagcagaagaugcccacccuccuccgcgucuacaucgacggcccccacggcaugggcaagaccaccaccacccagcuccucgucgcccucggcucccgcgacgacaucgucuacguccccgagcccaugaccuacuggcgcguccucggcgccuccgagaccaucgccaacaucuacaccacccagcaccgccucgaccagggcgagaucuccgccggcgacgccgccgucgucaugaccuccgcccagaucaccaugggcaugcccuacgccgucaccgacgccguccucgccccccacaucggcggcggcggcugggagcucaccugccccgcccccggcccccacccccaccuccgccccgccucccaccgccgcccccccguccuccccggccgcgccguccccuacggccagcacgacccccccggccgcgccggcguccgcggcccccaccccgccgaccucgcccgccacaagcaccgcgucggcggccccuccggcggccagacccaccgcccccccggccagacccccgccccccgcuga

SEQ ID NO: 6885 - RNA, 675 nt, Artificial Sequence
  derived and/or modified sequence opt3 from Thymidine_Kinase_TK__Herpes_Simplex_Virus_1_(HSV-1)__AAF72494
auggccagcuaccccggccaccagcaugcuuccgcauucgaccaagccgcgagaucuagggggcacucaaaccggcgcaccgcucugcgaccucguagacagcaggaggccacagaagugaggcucgagcagaagaugccaacucuucugcgggucuauaucgauggaccgcaugguaugggcaaaacgaccacaacucaauuguuaguugcacuggggagucgcgacgauauuguguacguacccgaaccuaugaccuauuggagagugcuaggagccagcgagacaauagcuaauaucuacaccacucagcacaggcucgaccagggcgaaauuuccgccggugaugccgcugucgugaugacaucugcccagaucaccauggggaugccauaugcgguuacggacgcagugcuggcaccccauauuggaggcggcgggugggagcuuacuugcccugcuccaggaccccacccucaucugcggccagccucgcaccgccgaccgcccgucuugccugguagagcagugccauacggccaacacgaucccccugggagggcuggaguacggggcccacaucccgccgaccucgcgcgucacaagcaccgcguuggugggccgucaggaggccagacccauagaccucccggccagacaccagccccuagguga

SEQ ID NO: 6886 - RNA, 675 nt, Artificial Sequence
  derived and/or modified sequence opt4 from Thymidine_Kinase_TK__Herpes_Simplex_Virus_1_(HSV-1)__AAF72494
auggccagcuaccccggccaccagcacgccagcgccuucgaccaggccgccagaagcagaggccacagcaacagaagaaccgcccugagacccagaagacagcaggaggccaccgaggugagacuggagcagaagaugcccacccugcugagaguguacaucgacggcccccacggcaugggcaagaccaccaccacccagcugcugguggcccugggcagcagagacgacaucguguacgugcccgagcccaugaccuacuggagagugcugggcgccagcgagaccaucgccaacaucuacaccacccagcacagacuggaccagggcgagaucagcgccggcgacgccgccguggugaugaccagcgcccagaucaccaugggcaugcccuacgccgugaccgacgccgugcuggccccccacaucggcggcggcggcugggagcugaccugccccgcccccggcccccacccccaccugagacccgccagccacagaagaccccccgugcugcccggcagagccgugcccuacggccagcacgacccccccggcagagccggcgugagaggcccccaccccgccgaccuggccagacacaagcacagagugggcggccccagcggcggccagacccacagaccccccggccagacccccgcccccagauga

SEQ ID NO: 6887 - RNA, 675 nt, Artificial Sequence
  derived and/or modified sequence opt5 from Thymidine_Kinase_TK__Herpes_Simplex_Virus_1_(HSV-1)__AAF72494
auggccagcuaccccggccaccagcaugcuuccgccuucgaccaagcggcuagaucucgggggcacagcaaccgcagaaccgcccugcggccucgcagacagcaggaggccacagaagugcggcucgagcagaagaugccgacgcugcuucgcgucuauaucgauggaccccauggcauggggaaaaccacaaccacacaacugcucguugcucugggauccagagacgauauuguguacgugccugaacccaugaccuauuggcggguccuuggcgccucugagacaaucgcuaauauuuacaccacgcagcaccgccuggaccagggggaaaucagcgccggagaugcggccgugguuaugaccuccgcucagauuacaaugggcaugccuuaugccgugaccgacgcuguccucgcgccccauaucggcgggggaggcugggagcugacaugcccugccccggggccccacccucaccugagacccgccucucaucggcgcccucccgugcucccgggacgcgcuguuccuuacggccaacacgaucccccugggcgggccggagugcgcggcccccaucccgcugaccuggccagacacaagcaccgggucggcgggccuagcggaggccagacccauagaccgcccgggcagacgccugcccccagauga

SEQ ID NO: 6888 - RNA, 675 nt, Artificial Sequence
  derived and/or modified sequence opt6 from Thymidine_Kinase_TK__Herpes_Simplex_Virus_1_(HSV-1)__AAF72494
auggcaucauauccaggacaccaacacgccagcgcauuugaucaagcagcacgaagcagaggacauucaaauaggagaacagcauuacgaccacgaagacaacaagaagcaacagaaguaagacuagaacaaaaaaugccaacauuacuaagaguauacauagauggaccacauggaaugggaaaaacaacaacaacacaacuauuaguagcauuaggcucaagagacgauauaguauauguaccagaaccaaugaccuacuggagaguacuaggagcaucagaaacaauagcaaacauauauacaacacaacauagauuagaucaaggagaaauaucagcaggagacgcagcaguaguaaugacaucagcacaaauaaccaugggaaugccauaugcaguaacagaugcaguacuagcaccacauauaggaggaggaggaugggaauuaacauguccagcaccaggaccacauccacauuuaagaccagcaucacauagaaggccaccaguauuaccaggaagagcagucccauacggacaacaugauccuccaggaagagcaggaguaagaggaccacauccagcagaccuagcaagacacaaacacagaguaggaggaccaucaggaggacaaacacauagaccaccaggacaaacaccagcaccaagauaa

SEQ ID NO: 6889 - protein, 376 aa, Artificial Sequence
  Thymidine_Kinase_TK__Herpes_Simplex_Virus_1_(HSV-1)__Q9QNF7
MASYPCHQHASAFDQAARSRGHSNRRTALRPRRQQEATEVRLEQKMPTLLRVYIDGPHGMGKTTTTQLLVALGSRDDIVYVPEPMTYWQVLGASETIANIYTTQHRLDQGEISAGDAAVVMTSAQITMGMPYAVTDAVLAPHIGGEAGSSHAPPPALTLIFDRHPIAALLCYPAARYLMGSMTPQAVLAFVALIPPTLPGTNIVLGALPEDRHIDRLAKRQRPGERLDLAMLAAIRRVYGLLANTVRYLQGGGSWREDWGQLSGTAVPPQGAEPQSNAGPRPHIGDTLFTLFRAPELLAPNGDLYNVFAWALDVLAKRLRPMHVFILDYDQSPAGCRDALLQLTSGMVQTHVTTPGSIPTICDLARTFAREMGEAN

SEQ ID NO: 6890 - RNA, 1131 nt, Artificial Sequence
  Thymidine_Kinase_TK__Herpes_Simplex_Virus_1_(HSV-1)__AAF72491
auggcuucguaccccugccaucaacacgcgucugcguucgaccaggcugcgcguucucgcggccauagcaaccgacguacggcguugcgcccucgccggcagcaagaagccacggaaguccgccuggagcagaaaaugcccacgcuacugcggguuuauauagacgguccucacgggauggggaaaaccaccaccacgcaacugcugguggcccuggguucgcgcgacgauaucgucuacguacccgagccgaugacuuacuggcaggugcugggggcuuccgagacaaucgcgaacaucuacaccacacaacaccgccucgaccagggugagauaucggccggggacgcggcggugguaaugacaagcgcccagauaacaaugggcaugccuuaugccgugaccgacgccguucuggcuccucauaucgggggggaggcugggagcucacaugccccgcccccggcccucacccucaucuucgaccgccaucccaucgccgcccuccugugcuacccggccgcgcgauaccuuaugggcagcaugaccccccaggccgugcuggcguucguggcccucaucccgccgaccuugcccggcacaaacaucguguugggggcccuuccggaggacagacacaucgaccgccuggccaaacgccagcgccccggcgagcggcuugaccuggcuaugcuggccgcgauucgccgcguuuacgggcugcuugccaauacggugcgguaucugcagggcggcgggucguggcgggaggauuggggacagcuuucggggacggccgugccgccccagggugccgagccccagagcaacgcgggcccacgaccccauaucggggacacguuauuuacccuguuucgggcccccgaguugcuggcccccaacggcgaccuguauaacguguuugccugggccuuggacgucuuggccaaacgccuccgucccaugcacgucuuuauccuggauuacgaccaaucgcccgccggcugccgggacgcccugcugcaacuuaccuccgggaugguccagacccacgucaccaccccaggcuccauaccgacgaucugcgaccuggcgcgcacguuugcccgggagaugggggaggcuaacuga

SEQ ID NO: 6891 - RNA, 1131 nt, Artificial Sequence
  derived and/or modified sequence opt1 from Thymidine_Kinase_TK__Herpes_Simplex_Virus_1_(HSV-1)__AAF72491
auggccagcuaccccugccaccagcacgccuccgcguucgaccaggccgcccgcagccggggccacuccaaccgccggaccgcccugcgcccgcggcgccagcaggaggccaccgaggugcggcucgagcagaagaugcccacgcugcugcgcgucuacaucgacgggccccacggcauggggaagaccaccaccacgcagcuccugguggcgcugggcagccgggacgacaucguguacguccccgagccgaugaccuacuggcagguccucggggccuccgagaccaucgccaacaucuacaccacgcagcaccgccuggaccagggcgagaucagcgccggcgacgcggccguggugaugaccuccgcccagaucaccauggggaugcccuacgccgugaccgacgccgugcuggcgccccacaucggcggggaggccggcagcucccacgcgcccccgcccgcccucacgcugaucuucgaccggcaccccaucgccgcccugcucugcuaccccgccgcccgcuaccugauggggagcaugaccccgcaggccguccuggccuucguggcgcucaucccgcccacccugcccggcaccaacaucgugcugggcgcccuccccgaggaccggcacaucgaccgccuggccaagcggcagcgccccggggagcggcuggaccucgccaugcuggccgcgauccgccgggucuacggccugcucgccaacacggugcgcuaccugcagggcgggggcuccuggcgggaggacugggggcagcugagcggcaccgccgugccgccccagggggccgagccccaguccaacgcgggcccccgcccccacaucggggacacccucuucacccuguuccgcgcccccgagcugcucgccccgaacggcgaccuguacaacgucuucgccugggcccuggacgugcucgcgaagcggcugcgccccaugcacguguucauccuggacuacgaccagagccccgccggcugccgggacgcccuccugcagcugacguccgggaugguccagacccacgugaccacccccggcagcaucccgacgaucugcgaccucgcccgcaccuucgcccgggagaugggggaggcgaacuga

SEQ ID NO: 6892 - RNA, 1131 nt, Artificial Sequence
  derived and/or modified sequence opt2 from Thymidine_Kinase_TK__Herpes_Simplex_Virus_1_(HSV-1)__AAF72491
auggccuccuaccccugccaccagcacgccuccgccuucgaccaggccgcccgcucccgcggccacuccaaccgccgcaccgcccuccgcccccgccgccagcaggaggccaccgagguccgccucgagcagaagaugcccacccuccuccgcgucuacaucgacggcccccacggcaugggcaagaccaccaccacccagcuccucgucgcccucggcucccgcgacgacaucgucuacguccccgagcccaugaccuacuggcagguccucggcgccuccgagaccaucgccaacaucuacaccacccagcaccgccucgaccagggcgagaucuccgccggcgacgccgccgucgucaugaccuccgcccagaucaccaugggcaugcccuacgccgucaccgacgccguccucgccccccacaucggcggcgaggccggcuccucccacgcccccccccccgcccucacccucaucuucgaccgccaccccaucgccgcccuccucugcuaccccgccgcccgcuaccucaugggcuccaugaccccccaggccguccucgccuucgucgcccucaucccccccacccuccccggcaccaacaucguccucggcgcccuccccgaggaccgccacaucgaccgccucgccaagcgccagcgccccggcgagcgccucgaccucgccaugcucgccgccauccgccgcgucuacggccuccucgccaacaccguccgcuaccuccagggcggcggcuccuggcgcgaggacuggggccagcucuccggcaccgccguccccccccagggcgccgagccccaguccaacgccggcccccgcccccacaucggcgacacccucuucacccucuuccgcgcccccgagcuccucgcccccaacggcgaccucuacaacgucuucgccugggcccucgacguccucgccaagcgccuccgccccaugcacgucuucauccucgacuacgaccagucccccgccggcugccgcgacgcccuccuccagcucaccuccggcaugguccagacccacgucaccacccccggcuccauccccaccaucugcgaccucgcccgcaccuucgcccgcgagaugggcgaggccaacuga

SEQ ID NO: 6893 - RNA, 1131 nt, Artificial Sequence
  derived and/or modified sequence opt3 from Thymidine_Kinase_TK__Herpes_Simplex_Virus_1_(HSV-1)__AAF72491
auggccagcuaccccugccaccagcaugcuuccgcauucgaccaagccgcgagaucuaggggccacucaaaccggcgcaccgcucugcgaccucguagacagcaggaggccacagaagugaggcucgagcagaagaugccaacucuucugcgggucuauaucgaugggccgcauggaauggguaaaacgaccacaacucaauuguuaguugcacugggcagucgcgacgauauuguguacguacccgaaccuaugaccuauuggcaagugcuaggggccagcgagacaauagcuaauaucuacaccacucagcacagacucgaccagggagaaauuuccgcaggcgaugccgcugucgugaugacaucugcccagaucaccauggguaugccauaugcgguuacggacgcagugcuggcuccccauauugggggagaggcuggcucgucacacgccccuccacccgcacuuacucugaucuuugauaggcacccuauagcugccuugcucuguuacccagcggcccgguaucugaugggcagcaugaccccgcaggcaguccuggcuuucguggcccucauucccccuacauuaccagggacuaacaucguacugggagcccuucccgaggaccgccauaucgaucgauuggccaagagacagaggccuggugaacggcuggaccuagcaaugcucgccgcuauucgucgcguuuacggccugcuugcgaauaccgugagauaccugcaagggggaggcaguuggagggaggauuggggucaguuguccgggacagcagucccaccccagggagccgaaccgcagucuaacgcuggcccucggccccacaucggcgacacccucuuuacgcuguuccgagccccagaguuacuggcaccuaauggggaucucuauaacguguuugccugggcucuugacgugcuggccaaacgcuugagacccaugcaugucuucauacuagacuacgaucaaagcccagcaggaugcagggacgcgcugcuccagcugacuuccgguaugguucagacacacgugaccacucccggcucaauuccuacaaucugugaucuugcucggaccuuugcccgcgagaugggggaagcaaauuga

SEQ ID NO: 6894 - RNA, 1131 nt, Artificial Sequence
  derived and/or modified sequence opt4 from Thymidine_Kinase_TK__Herpes_Simplex_Virus_1_(HSV-1)__AAF72491
auggccagcuaccccugccaccagcacgccagcgccuucgaccaggccgccagaagcagaggccacagcaacagaagaaccgcccugagacccagaagacagcaggaggccaccgaggugagacuggagcagaagaugcccacccugcugagaguguacaucgacggcccccacggcaugggcaagaccaccaccacccagcugcugguggcccugggcagcagagacgacaucguguacgugcccgagcccaugaccuacuggcaggugcugggcgccagcgagaccaucgccaacaucuacaccacccagcacagacuggaccagggcgagaucagcgccggcgacgccgccguggugaugaccagcgcccagaucaccaugggcaugcccuacgccgugaccgacgccgugcuggccccccacaucggcggcgaggccggcagcagccacgcccccccccccgcccugacccugaucuucgacagacaccccaucgccgcccugcugugcuaccccgccgccagauaccugaugggcagcaugaccccccaggccgugcuggccuucguggcccugaucccccccacccugcccggcaccaacaucgugcugggcgcccugcccgaggacagacacaucgacagacuggccaagagacagagacccggcgagagacuggaccuggccaugcuggccgccaucagaagaguguacggccugcuggccaacaccgugagauaccugcagggcggcggcagcuggagagaggacuggggccagcugagcggcaccgccgugcccccccagggcgccgagccccagagcaacgccggccccagaccccacaucggcgacacccuguucacccuguucagagcccccgagcugcuggcccccaacggcgaccuguacaacguguucgccugggcccuggacgugcuggccaagagacugagacccaugcacguguucauccuggacuacgaccagagccccgccggcugcagagacgcccugcugcagcugaccagcggcauggugcagacccacgugaccacccccggcagcauccccaccaucugcgaccuggccagaaccuucgccagagagaugggcgaggccaacuga

SEQ ID NO: 6895 - RNA, 1131 nt, Artificial Sequence
  derived and/or modified sequence opt5 from Thymidine_Kinase_TK__Herpes_Simplex_Virus_1_(HSV-1)__AAF72491
auggccagcuaccccugccaccagcaugcuuccgccuucgaccaagcggcuagaucucggggccacagcaaccgcagaaccgcccugcggccucgcagacagcaggaggccacagaagugcggcucgagcagaagaugccgacgcugcuucgcgucuauaucgaugggccccauggaaugggcaaaaccacaaccacacaacugcucguugcucugggguccagagacgauauuguguacgugccugaacccaugaccuauuggcagguccuuggagccucugagacaaucgcuaauauuuacaccacgcagcaccggcuggaccagggcgaaaucagcgccggggaugcggccgugguuaugaccuccgcucaaauuacaaugggaaugccuuaugccgugaccgacgcuguccucgcgccccauaucggcggcgaggccgggucuagccacgccccuccgcccgcucugacacugaucuuugaucgccacccuauugccgcucuccuguguuaccccgccgccagauaucuuaugggauccaugaccccucaggcugugcuggcguucguugcccucauucccccgacgcugccuggcacaaacaucgugcuuggggcucugcccgaggaccggcauaucgaucgccucgccaagagacagcggccuggagaacgccuggaccuggccaugcucgcugccauuagacgggucuacggccugcuugcgaauaccgugagauaccugcaagggggaggcagcuggcgcgaggauuggggccagcucucugggacagcugugccuccccagggagccgaaccccaguccaacgccggcccgcggccccacaucggggacacccuguuuacccuuuucagagcuccugagcugcucgcccccaauggagaucuguauaacgucuuugcuugggcccuggacguucucgcgaaacgccugcggccuaugcauguguucauucuugacuacgaucaaagccccgccggcugcagagacgcucugcuccagcugacaucugggauggugcagacgcacgucaccacaccgggauccaucccuaccaucugugaucuugcccgcacauuugcucgggagaugggcgaagccaauuga

SEQ ID NO: 6896 - RNA, 1131 nt, Artificial Sequence
  derived and/or modified sequence opt6 from Thymidine_Kinase_TK__Herpes_Simplex_Virus_1_(HSV-1)__AAF72491
auggcaaguuacccaugccaucaacacgccucagcauuugaucaagcagcaagaucuagaggucauaguaauagaagaacagcucucagaccaagaagacaacaagaagcaacagaaguacgauuagaacaaaaaaugccaacacuacuaagaguauauauagacggaccacauggaaugggcaaaacaacaacaacacaauuauuaguagcauuagguucacgagaugauauaguauauguaccagaaccaaugacauauuggcaaguauuaggagcaagcgaaacuauagcaaauauauauacaacacaacauagacuagaucaaggugaaauaagcgcaggagaugcagccguaguaaugacaucagcucaaauaacaaugggaaugccauaugcaguaacugaugcaguauuagcaccacacauaggaggagaagcaggcucaucacaugccccacccccagcauuaacacuaauauucgaucgacacccaauagcugcacuauuguguuauccagcagcuagauauuuaaugggaagcaugacuccacaagcaguuuuagcauuuguagcauuaauaccuccaacauuaccaggaacaaacauuguacuaggagcacuaccagaagauagacauauagauagauuagcaaaaagacaaagaccaggagaaagauuagaucuugcaauguuagcugcaauaagaagaguauauggauuauuagcaaacacuguaagauaccuacaaggaggaggauccuggagagaagauuggggacaauuaaguggaacagcaguacccccacaaggugcagaaccucaauccaacgcaggaccaagaccccauauaggagacacuuuauucacauuauuuagagccccagaauuauuagcaccaaauggcgauuuauauaacguauuugcaugggcauuagacguacuugcaaaaagacuaagaccuaugcacguauucauauuagauuaugaccaaucaccagcaggcugucgagaugccuuauuacaacuuacaucuggaaugguacaaacacacguaacaacaccaggguccauaccaacaaucugugauuuagcacgaacauuugcuagagaaaugggugaagccaauuaa

SEQ ID NO: 6897 - protein, 281 aa, Artificial Sequence [sequence omitted]

SEQ ID NO: 6898 - RNA, 846 nt, Artificial Sequence
  Apo2L/TRAIL__Homo_sapiens__AAB01233
auggcuaugauggagguccaggggggacccagccugggacagaccugcgugcugaucgugaucuucacagugcuccugcagucucucuguguggcuguaacuuacguguacuuuaccaacgagcugaagcagaugcaggacaaguacuccaaaaguggcauugcuuguuucuuaaaagaagaugacaguuauugggaccccaaugacgaagagaguaugaacagccccugcuggcaagucaaguggcaacuccgucagcucguuagaaagaugauuuugagaaccucugaggaaaccauuucuacaguucaagaaaagcaacaaaauauuucuccccuagugagagaaagagguccucagagaguagcagcucacauaacugggaccagaggaagaagcaacacauugucuucuccaaacuccaagaaugaaaaggcucugggccgcaaaauaaacuccugggaaucaucaaggagugggcauucauuccugagcaacuugcacuugaggaauggugaacuggucauccaugaaaaaggguuuuacuacaucuauucccaaacauacuuucgauuucaggaggaaauaaaagaaaacacaaagaacgacaaacaaaugguccaauauauuuacaaauacacaaguuauccugacccuauauuguugaugaaaagugcuagaaauaguuguuggucuaaagaugcagaauauggacucuauuccaucuaucaagggggaauauuugagcuuaaggaaaaugacagaauuuuuguuucuguaacaaaugagcacuugauagacauggaccaugaagccaguuuuuucggggccuuuuuaguuggcuaa

SEQ ID NO: 6899 - RNA, 846 nt, Artificial Sequence
  derived and/or modified sequence opt1 from Apo2L/TRAIL__Homo_sapiens__AAB01233
auggccaugauggaggugcagggcgggcccagccugggccagaccugcguccucaucgugaucuucaccgugcugcugcagucccucugcgucgccgugacguacguguacuucaccaacgagcugaagcagaugcaggacaaguacagcaaguccgggaucgcgugcuuccugaaggaggacgacagcuacugggacccgaacgacgaggaguccaugaacagccccugcuggcaggucaaguggcagcuccgccagcuggugcggaagaugauccugcgcaccuccgaggagaccaucagcacggugcaggagaagcagcagaacaucagcccccucguccgggagcgcggcccccagcggguggccgcccacaucaccgggacccgcggccgguccaacacccuguccagcccgaacuccaagaacgagaaggcccugggccgcaagaucaacagcugggaguccagccgguccgggcacagcuuccucuccaaccugcaccuccgcaacggcgagcuggugauccacgagaagggguucuacuacaucuacagccagacguacuuccgguuccaggaggagaucaaggagaacaccaagaacgacaagcagaugguccaguacaucuacaaguacaccagcuaccccgaccccauccugcugaugaaguccgcccgcaacagcugcugguccaaggacgcggaguacggccucuacagcaucuaccagggcgggaucuucgagcugaaggagaacgaccggaucuucguguccgugaccaacgagcaccugaucgacauggaccacgaggccagcuucuucggcgccuuccucgucggguga

SEQ ID NO: 6900 - RNA, 846 nt, Artificial Sequence
  derived and/or modified sequence opt2 from Apo2L/TRAIL__Homo_sapiens__AAB01233
auggccaugauggagguccagggcggccccucccucggccagaccugcguccucaucgucaucuucaccguccuccuccagucccucugcgucgccgucaccuacgucuacuucaccaacgagcucaagcagaugcaggacaaguacuccaaguccggcaucgccugcuuccucaaggaggacgacuccuacugggaccccaacgacgaggaguccaugaacucccccugcuggcaggucaaguggcagcuccgccagcucguccgcaagaugauccuccgcaccuccgaggagaccaucuccaccguccaggagaagcagcagaacaucuccccccucguccgcgagcgcggcccccagcgcgucgccgcccacaucaccggcacccgcggccgcuccaacacccucuccucccccaacuccaagaacgagaaggcccucggccgcaagaucaacuccugggaguccucccgcuccggccacuccuuccucuccaaccuccaccuccgcaacggcgagcucgucauccacgagaagggcuucuacuacaucuacucccagaccuacuuccgcuuccaggaggagaucaaggagaacaccaagaacgacaagcagaugguccaguacaucuacaaguacaccuccuaccccgaccccauccuccucaugaaguccgcccgcaacuccugcugguccaaggacgccgaguacggccucuacuccaucuaccagggcggcaucuucgagcucaaggagaacgaccgcaucuucgucuccgucaccaacgagcaccucaucgacauggaccacgaggccuccuucuucggcgccuuccucgucggcuga

SEQ ID NO: 6901 - RNA, 846 nt, Artificial Sequence
  derived and/or modified sequence opt3 from Apo2L/TRAIL__Homo_sapiens__AAB01233
auggccaugauggaggugcagggcgggcccagccugggacaaaccugcguccucaucguuauuuucacagugcuucugcaguccuuguguguagcugugacuuacgucuauuuuacgaacgaauuaaagcagaugcaggacaaauacucuaagucagguauagcaugcuuccugaaagaggaugacaguuauugggauccuaaugacgaagagagcaugaacuccccauguuggcaagugaaguggcagcuaagacagcucguuaggaaaaugauccugcggaccucugaagagacaauuucgacugugcaggagaagcaacagaauaucucaccgcuuguccgcgaacgaggcccccagcguguggccgcgcacauuaccgggacaagaggaaggagcaacacccugaguuccccuaauucuaagaacgagaaggcuuugggccggaaaaucaauagcugggaauccucacgcaguggucauagcuuucucucuaaccugcaccugagaaauggggagcucguaauacaugagaaaggauucuacuauaucuacucccagacuuauuuuagguuccaagaagagauuaaggaaaacaccaaaaaugauaagcagaugguucaguacaucuacaaguauacaucauacccagaccccauuuuacugaugaaaagcgcccggaacaguugcuggucuaaggaugcagaguauggccuuuacuccaucuaucaaggcgggauauuugaauugaaagagaaugaccgcauuuucgugagcgucacgaacgagcaccugaucgauauggaccaugaagccucguuuuucggagcuuuucuaguggguuga

SEQ ID NO: 6902 - RNA, 846 nt, Artificial Sequence
  derived and/or modified sequence opt4 from Apo2L/TRAIL__Homo_sapiens__AAB01233
auggccaugauggaggugcagggcggccccagccugggccagaccugcgugcugaucgugaucuucaccgugcugcugcagagccugugcguggccgugaccuacguguacuucaccaacgagcugaagcagaugcaggacaaguacagcaagagcggcaucgccugcuuccugaaggaggacgacagcuacugggaccccaacgacgaggagagcaugaacagccccugcuggcaggugaaguggcagcugagacagcuggugagaaagaugauccugagaaccagcgaggagaccaucagcaccgugcaggagaagcagcagaacaucagcccccuggugagagagagaggcccccagagaguggccgcccacaucaccggcaccagaggcagaagcaacacccugagcagccccaacagcaagaacgagaaggcccugggcagaaagaucaacagcugggagagcagcagaagcggccacagcuuccugagcaaccugcaccugagaaacggcgagcuggugauccacgagaagggcuucuacuacaucuacagccagaccuacuucagauuccaggaggagaucaaggagaacaccaagaacgacaagcagauggugcaguacaucuacaaguacaccagcuaccccgaccccauccugcugaugaagagcgccagaaacagcugcuggagcaaggacgccgaguacggccuguacagcaucuaccagggcggcaucuucgagcugaaggagaacgacagaaucuucgugagcgugaccaacgagcaccugaucgacauggaccacgaggccagcuucuucggcgccuuccuggugggcuga

SEQ ID NO: 6903 - RNA, 846 nt, Artificial Sequence
  derived and/or modified sequence opt5 from Apo2L/TRAIL__Homo_sapiens__AAB01233
auggccaugauggaggugcagggcgggcccagccugggacaaaccugcguccucaucguuauuuucacagugcugcuucagucccuguguguggcugucacguacguguauuuuaccaacgaacucaagcagaugcaggacaaauacucuaagagcggcaucgccugcuuccugaaagaggaugacuccuauugggauccuaaugacgaagagucuaugaacagcccguguuggcaaguuaaguggcagcuuagacagcuggugcggaaaaugauucuccgcacauccgaagagaccaucucuacaguccaggagaagcaacagaauauuagcccccuggugagagaacgggggccucagcgcguugcggcucacaucaccggaacaagaggccgguccaacacccugagcucucccaauuccaagaacgagaaagcccucgggcgcaagaucaauagcugggaaucuuccagaagcggacauucuuuucuguccaaccuucaucugcggaauggcgagcucgugauucacgagaaaggcuucuacuauaucuacagccagacguauuuucgcuuccaagaagagauuaaggaaaacaccaaaaaugauaagcagaugguccaguacaucuacaaguauacauccuacccugaccccauucugcuuaugaaaucugccagaaacagcugcugguccaaggaugcugaguaugggcuguacagcaucuaucaaggaggcauuuuugaacucaaagagaaugaccggaucuucgugucugugaccaacgagcaccugaucgauauggaccaugaagccuccuuuuucggggcuuuucuggucggauga

SEQ ID NO: 6904 - RNA, 846 nt, Artificial Sequence
  derived and/or modified sequence opt6 from Apo2L/TRAIL__Homo_sapiens__AAB01233
auggcaaugauggaaguacaaggaggaccaucacuaggccaaacauguguacuaaucguaauauucacaguacuacuacaaucacuaugcguagcaguaacauacguauacuucaccaacgaacuaaaacaaaugcaagauaaauacagcaaaucaggaauagcaugcuuccuaaaagaagacgacucauacugggacccaaaugacgaagaaucaaugaacaguccauguuggcaaguaaaauggcaauuacgacaacuaguaagaaaaaugauauuaagaacuuccgaagaaacaauaucaacaguacaagaaaaacaacaaaacauaucaccauuaguaagagaaagaggaccacaaagaguagcagcccauauaacaggaacaagaggaagaagcaacacacuaucaucaccaaacagcaaaaacgaaaaagcauuaggaagaaaaauaaacucaugggaaucaucaagaucuggacacucauucuuaagcaacuuacaccuaagaaacggagaacuagucauccacgaaaaaggauucuauuacauauacucucaaacauacuuucgcuuccaagaagaaauaaaagaaaacacaaaaaacgacaaacaaaugguacaauacauauacaaauacacaucauauccagacccaaucuuacuaaugaaauccgcacgaaacucauguuggucaaaagacgcagaauacggacuauacucaauauaucaaggaggaauauuugaacuaaaagaaaacgacagaauauucguaucaguaacaaacgaacaccuaauagacauggaccacgaagcaucauucuucggagcauuccuaguaggauaa

SEQ ID NO: 6905 - protein, 249 aa, Artificial Sequence; identical to SEQ ID NO: 4825
  Apo3L__Homo_sapiens__O43508

SEQ ID NO: 6906 - RNA, 750 nt, Artificial Sequence; identical to SEQ ID NO: 4826
  Apo3L__Homo_sapiens__AAC39724

SEQ ID NO: 6907 - RNA, 750 nt, Artificial Sequence; identical to SEQ ID NO: 4827
  derived and/or modified sequence opt1 from Apo3L__Homo_sapiens__AAC39724

SEQ ID NO: 6908 - RNA, 750 nt, Artificial Sequence; identical to SEQ ID NO: 4828
  derived and/or modified sequence opt2 from Apo3L__Homo_sapiens__AAC39724

SEQ ID NO: 6909 - RNA, 750 nt, Artificial Sequence; identical to SEQ ID NO: 4829
  derived and/or modified sequence opt3 from Apo3L__Homo_sapiens__AAC39724

SEQ ID NO: 6910 - RNA, 750 nt, Artificial Sequence; identical to SEQ ID NO: 4830
  derived and/or modified sequence opt4 from Apo3L__Homo_sapiens__AAC39724

SEQ ID NO: 6911 - RNA, 750 nt, Artificial Sequence; identical to SEQ ID NO: 4831
  derived and/or modified sequence opt5 from Apo3L__Homo_sapiens__AAC39724

SEQ ID NO: 6912 - RNA, 750 nt, Artificial Sequence
  derived and/or modified sequence opt6 from Apo3L__Homo_sapiens__AAC39724
auggcagcuagaagaucacaaagaagaagaggaagaagaggagaaccagguacagcccuauuaguaccauuagcauuaggauuaggcuuagcauuagcauguuuaggauuacuauuagcagucguaucacuaggcucaagagcaagucuaucagcacaagaaccagcacaagaagaauuaguagcagaagaagaccaagauccaagcgaauuaaauccacaaacagaagaaucacaagauccagcacccuuucuaaaucgauuaguacgacccagaagaagugcaccaaaaggaagaaaaacaagagcaagacgagcuauagcagcacauuaugaaguacauccaagaccaggacaagauggagcacaagcaggaguugauggaacaguaucaggaugggaagaagcuagaauaaauucaucaucaccacuaagauauaacagacaaauuggagaauuuauaguaacaagagcaggauuauauuauuuauauugucaaguacauuuugaugaaggaaaagcaguauauuuaaaacuagaucuauuaguagauggaguacuagcauuaagaugucuagaagaauuuagugcuacagcagcaucaagucuaggaccucaauuaagauuaugucaaguaaguggacuauuagcauuaagaccaggaagcucauuaagaauacguacauuaccaugggcacauuuaaaagcagcaccauuuuuaacauacuuuggauuauuccaaguacauuaa

SEQ ID NO: 6913 - protein, 168 aa, Artificial Sequence
  Bad__Homo_sapiens__A0A024R562
MFQIPEFEPSEQEDSSSAERGLGPSPAGDGPSGSGKHHRQAPGLLWDASHQQEQPTSSSHHGGAGAVEIRSRHSSYPAGTEDDEGMGEEPSPFRGRSRSAPPNLWAAQRYGRELRRMSDEFVDSFKKGLPRPKSAGTATQMRQSSSWTRVFQSWWDRNLGRGSSAPSQ

SEQ ID NO: 6914 - RNA, 507 nt, Artificial Sequence
  Bad__Homo_sapiens__EAW74236
auguuccagaucccagaguuugagccgagugagcaggaagacuccagcucugcagagaggggccugggccccagccccgcaggggacgggcccucaggcuccggcaagcaucaucgccaggccccaggccuccugugggacgccagucaccagcaggagcagccaaccagcagcagccaucauggaggcgcuggggcuguggagauccggagucgccacagcuccuaccccgcggggacggaggacgacgaagggaugggggaggagcccagccccuuucggggccgcucgcgcucggcgccccccaaccucugggcagcacagcgcuauggccgcgagcuccggaggaugagugacgaguuuguggacuccuuuaagaagggacuuccucgcccgaagagcgcgggcacagcaacgcagaugcggcaaagcuccagcuggacgcgagucuuccaguccuggugggaucggaacuugggcaggggaagcuccgcccccucccaguga

SEQ ID NO: 6915 - RNA, 507 nt, Artificial Sequence
  derived and/or modified sequence opt1 from Bad__Homo_sapiens__EAW74236
auguuccagauccccgaguucgagccgagcgagcaggaggacuccagcuccgccgagcgcggccuggggcccagccccgccggcgacgggcccuccggcagcgggaagcaccaccggcaggcgccgggccuccugugggacgccucccaccagcaggagcagcccaccagcuccagccaccacggcggggccggcgccguggagauccgcucccggcacagcuccuaccccgccgggaccgaggacgacgagggcaugggggaggagcccagcccguuccgcggccggucccgcagcgcgccgcccaaccugugggccgcccagcgguacggccgcgagcuccggcgcauguccgacgaguucgucgacagcuucaagaaggggcugccccggcccaaguccgccggcacggcgacccagaugcgccagagcagcuccuggacccggguguuccagagcuggugggaccgcaaccuggggcggggcuccagcgcccccucccaguga

SEQ ID NO: 6916 - RNA, 507 nt, Artificial Sequence
  derived and/or modified sequence opt2 from Bad__Homo_sapiens__EAW74236
auguuccagauccccgaguucgagcccuccgagcaggaggacuccuccuccgccgagcgcggccucggccccucccccgccggcgacggccccuccggcuccggcaagcaccaccgccaggcccccggccuccucugggacgccucccaccagcaggagcagcccaccuccuccucccaccacggcggcgccggcgccgucgagauccgcucccgccacuccuccuaccccgccggcaccgaggacgacgagggcaugggcgaggagcccucccccuuccgcggccgcucccgcuccgccccccccaaccucugggccgcccagcgcuacggccgcgagcuccgccgcauguccgacgaguucgucgacuccuucaagaagggccucccccgccccaaguccgccggcaccgccacccagaugcgccaguccuccuccuggacccgcgucuuccaguccuggugggaccgcaaccucggccgcggcuccuccgcccccucccaguga

SEQ ID NO: 6917 - RNA, 507 nt, Artificial Sequence
  derived and/or modified sequence opt3 from Bad__Homo_sapiens__EAW74236
auguuccagauccccgaguuugaaccuagcgagcaagaagacuccucuucagccgagagaggccuggggccaaguccggcuggagauggucccagcggcuccgggaagcaccauaggcaggcaccuggacuccuuugggacgccucucaccagcaggaacaaccaaccucgucaagccaucacggcggugcgggggcuguggagauucggagucgccauuccucuuaccccgccggaacagaggaugacgaaggcaugggcgaggaaccuagcccauuccgagggcguuccagaucagcacccccuaaccugugggccgcucagagguauggacgggaguugcgcagaaugagugaugaguuugucgacagcuucaaaaaggguuuaccaaggccgaaaucugcaggcacugccacgcagaugcggcaguccucaagcuggacccgcguuuuucaaaguuggugggaucgaaaucuggggagaggaucuuccgcucccagccaguga

SEQ ID NO: 6918 - RNA, 507 nt, Artificial Sequence
  derived and/or modified sequence opt4 from Bad__Homo_sapiens__EAW74236
auguuccagauccccgaguucgagcccagcgagcaggaggacagcagcagcgccgagagaggccugggccccagccccgccggcgacggccccagcggcagcggcaagcaccacagacaggcccccggccugcugugggacgccagccaccagcaggagcagcccaccagcagcagccaccacggcggcgccggcgccguggagaucagaagcagacacagcagcuaccccgccggcaccgaggacgacgagggcaugggcgaggagcccagccccuucagaggcagaagcagaagcgccccccccaaccugugggccgcccagagauacggcagagagcugagaagaaugagcgacgaguucguggacagcuucaagaagggccugcccagacccaagagcgccggcaccgccacccagaugagacagagcagcagcuggaccagaguguuccagagcuggugggacagaaaccugggcagaggcagcagcgcccccagccaguga

SEQ ID NO: 6919 - RNA, 507 nt, Artificial Sequence
  derived and/or modified sequence opt5 from Bad__Homo_sapiens__EAW74236
auguuccagauccccgaguuugaaccuagcgagcaagaagacuccucuagcgccgagagaggccuggggccgucccccgcuggagauggcccuucugggagcggaaagcaccaucggcaggcccccggccuccugugggacgcgucccaccagcaggaacaaccuaccucuagcucccaucacgggggagcuggcgccguggagauucgcagcagacauucuuccuaccccgccggcacagaggaugacgaagggaugggagaggaaccuagcccguuccggggccgcucuagauccgcucccccuaaccuuugggccgcucagcgguaugggcgcgagcugagacggaugagcgaugaguuugucgacucuuucaaaaagggacucccccgcccuaaauccgccggcacggcgacccagaugagacagagcuccucuuggacacggguuuuucaaagcuggugggaucgcaaucuggggagaggauccagcgcccccucucaguga

SEQ ID NO: 6920 - RNA, 507 nt, Artificial Sequence
  derived and/or modified sequence opt6 from Bad__Homo_sapiens__EAW74236
auguuucaaauaccagaauucgaaccaagugaacaagaagauaguaguagugcagaaagaggauuaggaccaaguccagcaggagauggaccaaguggaaguggaaaacaucauagacaagcuccaggauuauuaugggaugcaagucaucaacaagaacaaccaacaagcaguagucaucauggaggagcaggagcaguagaaauaagaaguagacauaguaguuauccggcaggaacagaagaugaugaaggaaugggagaagaaccaucaccauuuaggggaagaaguagaagugcaccaccaaauuuaugggcagcacaaagauauggaagagaauuaagaagaaugagugaugaauuuguagauaguuuuaaaaaaggauuaccaagaccaaaaagugcaggaacagcaacacaaaugaggcaaaguagcaguuggacaagaguauuucaaaguuggugggauagaaauuuaggaagaggaagcagugcaccaagucaauaa

SEQ ID NO: 6921 - protein, 168 aa, Artificial Sequence; identical to SEQ ID NO: 6913
  Bad__Homo_sapiens__Q92934

SEQ ID NO: 6922 - RNA, 507 nt, Artificial Sequence
  Bad__Homo_sapiens__AAB72092
auguuccagaucccagaguuugagccgagugagcaggaagacuccagcucugcagagaggggccugggccccagccccgcaggggacgggcccucaggcuccggcaagcaucaucgccaggccccaggccuccugugggacgccagucaccagcaggagcagccaaccagcagcagccaucauggaggcgcuggggcuguggagauccggagucgccacagcuccuaccccgcggggacggaggacgacgaagggaugggggaggagcccagccccuuucggggccguucgcgcucggcgccccccaaccucugggcagcacagcgcuauggccgcgagcuccggaggaugagugacgaguuuguggacuccuuuaagaagggacuuccucgcccgaagagcgcgggcacagcaacgcagaugcggcaaagcuccagcuggacgcgagucuuccaguccuggugggaucggaacuugggcaggggaagcuccgcccccucccaguga

SEQ ID NO: 6923 - RNA, 507 nt, Artificial Sequence; identical to SEQ ID NO: 6915
  derived and/or modified sequence opt1 from Bad__Homo_sapiens__AAB72092

SEQ ID NO: 6924 - RNA, 507 nt, Artificial Sequence; identical to SEQ ID NO: 6916
  derived and/or modified sequence opt2 from Bad__Homo_sapiens__AAB72092

SEQ ID NO: 6925 - RNA, 507 nt, Artificial Sequence; identical to SEQ ID NO: 6917
  derived and/or modified sequence opt3 from Bad__Homo_sapiens__AAB72092

SEQ ID NO: 6926 - RNA, 507 nt, Artificial Sequence; identical to SEQ ID NO: 6918
  derived and/or modified sequence opt4 from Bad__Homo_sapiens__AAB72092

SEQ ID NO: 6927 - RNA, 507 nt, Artificial Sequence; identical to SEQ ID NO: 6919
  derived and/or modified sequence opt5 from Bad__Homo_sapiens__AAB72092

SEQ ID NO: 6928 - RNA, 507 nt, Artificial Sequence
  derived and/or modified sequence opt6 from Bad__Homo_sapiens__AAB72092
auguuucaaauaccagaauuugaaccaagugaacaagaagauucaaguagugcagaaagaggauuaggaccaucaccagcaggagauggaccaaguggaaguggaaaacaucauagacaagcaccaggauuauuaugggaugcaucacaucaacaagaacaaccaacaucaagcucacaucauggaggagcaggagcaguagaaauaagaucaagacacaguucauauccagcaggaacagaagaugaugaaggaaugggagaagaaccaucaccauuuagaggaagaucaagaagugcaccaccaaauuuaugggcagcacaaagauauggaagagaauuaagaagaaugagugaugaauuuguagauaguuuuaaaaaaggauuaccaagaccaaaaagugcaggaacagcaacacaaaugagacaaaguucaagcuggacaagaguauuucaaaguuggugggauagaaauuuaggaagaggaucaagcgcaccaucacaauaa

SEQ ID NO: 6929 - protein, 211 aa, Artificial Sequence
  Bak__Homo_sapiens__Q16611
MASGQGPGPPRQECGEPALPSASEEQVAQDTEEVFRSYVFYRHQQEQEAEGVAAPADPEMVTLPLQPSSTMGQVGRQLAIIGDDINRRYDSEFQTMLQHLQPTAENAYEYFTKIATSLFESGINWGRVVALLGFGYRLALHVYQHGLTGFLGQVTRFVVDFMLHHCIARWIAQRGGWVAALNLGNGPILNVLVVLGVVLLGQFVVRRFFKS

SEQ ID NO: 6930 - RNA, 636 nt, Artificial Sequence
  Bak__Homo_sapiens__AAA74466
auggcuucggggcaaggcccagguccucccaggcaggagugcggagagccugcccugcccucugcuucugaggagcagguagcccaggacacagaggagguuuuccgcagcuacguuuuuuaccgccaucagcaggaacaggaggcugaagggguggcugccccugccgacccagagauggucaccuuaccucugcaaccuagcagcaccauggggcaggugggacggcagcucgccaucaucggggacgacaucaaccgacgcuaugacucagaguuccagaccauguugcagcaccugcagcccacggcagagaaugccuaugaguacuucaccaagauugccaccagccuguuugagaguggcaucaauuggggccgugugguggcucuucugggcuucggcuaccgucuggcccuacacgucuaccagcauggccugacuggcuuccuaggccaggugacccgcuucguggucgacuucaugcugcaucacugcauugcccgguggauugcacagagggguggcuggguggcagcccugaacuugggcaauggucccauccugaacgugcuggugguucugggugugguucuguugggccaguuugugguacgaagauucuucaaaucauga

SEQ ID NO: 6931 - RNA, 636 nt, Artificial Sequence
  derived and/or modified sequence opt1 from Bak__Homo_sapiens__AAA74466
auggccagcggccaggggcccggcccgccccgccaggagugcggggagcccgcccugcccuccgcgagcgaggagcaggucgcccaggacaccgaggagguguuccgguccuacguguucuaccgccaccagcaggagcaggaggccgagggcguggccgccccggcggaccccgagauggucacccucccccugcagcccagcuccacgaugggccagguggggcggcagcuggccaucaucggcgacgacaucaaccgccgguacgacagcgaguuccagaccaugcuccagcaccuccagccgaccgccgagaacgccuacgaguacuucaccaagaucgcgacgucccuguucgagagcgggaucaacuggggccgcguggucgcccugcugggguucggcuaccggcuggcccuccacguguaccagcacgggcugaccggcuuccugggccaggugacccgcuucgucguggacuucaugcuccaccacugcaucgcccgguggaucgcccagcgcgggggcuggguggcggcccugaaccuggggaacggccccauccucaacguccugguggugcugggcgucgugcuccuggggcaguucgugguccggcgcuucuucaaguccuga

SEQ ID NO: 6932 - RNA, 636 nt, Artificial Sequence
  derived and/or modified sequence opt2 from Bak__Homo_sapiens__AAA74466
auggccuccggccagggccccggccccccccgccaggagugcggcgagcccgcccuccccuccgccuccgaggagcaggucgcccaggacaccgaggaggucuuccgcuccuacgucuucuaccgccaccagcaggagcaggaggccgagggcgucgccgcccccgccgaccccgagauggucacccucccccuccagcccuccuccaccaugggccaggucggccgccagcucgccaucaucggcgacgacaucaaccgccgcuacgacuccgaguuccagaccaugcuccagcaccuccagcccaccgccgagaacgccuacgaguacuucaccaagaucgccaccucccucuucgaguccggcaucaacuggggccgcgucgucgcccuccucggcuucggcuaccgccucgcccuccacgucuaccagcacggccucaccggcuuccucggccaggucacccgcuucgucgucgacuucaugcuccaccacugcaucgcccgcuggaucgcccagcgcggcggcugggucgccgcccucaaccucggcaacggccccauccucaacguccucgucguccucggcgucguccuccucggccaguucgucguccgccgcuucuucaaguccuga

SEQ ID NO: 6933 - RNA, 636 nt, Artificial Sequence
  derived and/or modified sequence opt3 from Bak__Homo_sapiens__AAA74466
auggccagcggccaggggcccggaccuccaagacaagagugcggugaaccggcucugcccuccgcaucugaggaacagguggcccaggacaccgaggaagucuucaggucauacguuuucuaucggcaccagcaagagcaggaggcggaaggcguggcugccccugcagauccagagaugguaacacucccccuucagccuaguagcacuaugggacagguggggcgccaacuggccaucauuggcgacgauauaaaccgacguuacgacuccgaauuucagacgauguugcagcauuuacagccaaccgcugagaaugcauaugaguacuuuacaaagaucgccacuucucuguucgaaucggguauuaacugggggagagucguggcucuacucggauuuggcuauaggcuggcccuucacguuuaccaacauggccugaccggguucuugggacaggugacacgguuugucguggauuucaugcuccaccauuguaucgcgcgcuggauugcacagagagguggcuggguagccgcucugaaucuggggaacggacccauccucaauguuuuagugguccugggcguggugcuuuugggucaauuugucguuaggcgguucuuuaaaucauga

SEQ ID NO: 6934 - RNA, 636 nt, Artificial Sequence
  derived and/or modified sequence opt4 from Bak__Homo_sapiens__AAA74466
auggccagcggccagggccccggcccccccagacaggagugcggcgagcccgcccugcccagcgccagcgaggagcagguggcccaggacaccgaggagguguucagaagcuacguguucuacagacaccagcaggagcaggaggccgagggcguggccgcccccgccgaccccgagauggugacccugccccugcagcccagcagcaccaugggccaggugggcagacagcuggccaucaucggcgacgacaucaacagaagauacgacagcgaguuccagaccaugcugcagcaccugcagcccaccgccgagaacgccuacgaguacuucaccaagaucgccaccagccuguucgagagcggcaucaacuggggcagagugguggcccugcugggcuucggcuacagacuggcccugcacguguaccagcacggccugaccggcuuccugggccaggugaccagauucgugguggacuucaugcugcaccacugcaucgccagauggaucgcccagagaggcggcuggguggccgcccugaaccugggcaacggccccauccugaacgugcugguggugcugggcguggugcugcugggccaguucguggugagaagauucuucaagagcuga

SEQ ID NO: 6935 - RNA, 636 nt, Artificial Sequence
  derived and/or modified sequence opt5 from Bak__Homo_sapiens__AAA74466
auggccagcggccaggggcccggaccuccgagacaagagugcggcgaacccgcucugccuuccgccucugaggaacagguggcgcaggacaccgaggaagucuuccggagcuacguuuucuaucgccaccagcaagagcaggaggcugaagggguggccgcccccgcugauccugagauggugacacucccccugcagccuuccucuacgaugggacaggucggcagacaacuugccaucauuggggacgauaucaaccggcgcuacgacagcgaauuucagaccaugcugcagcaucuccagccgacagcugagaaugccuaugaguacuuuaccaagauugcgacaucccuguucgaaucuggaaucaacuggggcagagugguugcccuucugggcuuuggguaucggcucgcucugcacguguaccaacauggacugaccggcuuccucgggcaggucacacgcuuugugguugauuucaugcugcaccauuguauugccagauggaucgcucagcggggaggcuggguggccgcgcuuaaucuggggaacggacccauccucaauguccugguggugcuuggcgucguucugcucggccaauuuguggugcgcagauucuuuaaaagcuga

SEQ ID NO: 6936 - RNA, 636 nt, Artificial Sequence
  derived and/or modified sequence opt6 from Bak__Homo_sapiens__AAA74466
auggcaucaggacaaggaccaggaccaccaagacaagaauguggagaaccagcacuaccaucagcaagcgaagaacaaguagcacaagauacagaagaaguauucagaaguuacguauuuuacagacaccaacaagaacaagaagcagaaggaguagcagcaccagcagacccagaaaugguaacacucccacuacaaccaucaaguacaaugggucaaguaggcagacaauuagcaauaauaggagacgacauaaauagaagauacgauagcgaauuccaaacaauguuacaacacuuacaaccaacagcggaaaaugcauaugaauauuucacaaaaauagcaacaaguuuauucgaaagugguauaaauuggggaagaguaguagcauuauuaggcuucggauauagauuagcauuacacguauaccaacacggacuaacaggauuuuuaggacaaguaacuagauucguaguagauuuuauguuacaucacugcauagcuagauggauagcacaaagaggaggauggguagcagcacuaaauuuaggaaacggaccaauacuaaauguauuaguaguauuaggaguaguauuauuaggacaauucguaguaagaagauuuuuuaaaagcuaa

SEQ ID NO: 6937 - protein, 190 aa, Artificial Sequence
  Bak__Homo_sapiens__Q8NFF3
MASGQGPGPPRQECGEPALPSASEEQVAQDTEEVFRSYVFYRHQQPSSTMGQVGRQLAIIGDDINRRYDSEFQTMLQHLQPTAENAYEYFTKIATSLFESGINWGRVVALLGFGYRLALHVYQHGLTGFLGQVTRFVVDFMLHHCIARWIAQRGGWVAALNLGNGPILNVLVVLGVVLLGQFVVRRFFKS

SEQ ID NO: 6938 - RNA, 573 nt, Artificial Sequence
  Bak__Homo_sapiens__AAM74949
auggcuucggggcaaggcccagguccucccaggcaggaguguggagagccugcccugcccucugcuucugaggagcagguagcccaggacacagaggagguuuuccgcagcuacguuuuuuaccgccaucagcaaccuagcagcaccauggggcaggugggacggcagcucgccaucaucggggacgacaucaaccgacgcuaugacucagaguuccagaccauguugcagcaccugcagcccacggcagagaaugccuaugaguacuucaccaagauugccaccagccuguuugagaguggcaucaauuggggccgugugguggcucuucugggcuucggcuaccgucuggcccuacacgucuaccagcauggccugacuggcuuccuaggccaggugacccgcuucguggucgacuucaugcugcaucacugcauugcccgguggauugcacagagggguggcuggguggcagcccugaacuugggcaauggucccauccugaacgugcuggugguucugggugugguucuguugggccaguuugugguacgaagauucuucaaaucauga

SEQ ID NO: 6939 - RNA, 573 nt, Artificial Sequence
  derived and/or modified sequence opt1 from Bak__Homo_sapiens__AAM74949
auggccagcggccaggggcccggcccgccccgccaggagugcggggagcccgcccugcccuccgcgagcgaggagcaggucgcccaggacaccgaggagguguuccgguccuacguguucuaccgccaccagcagccgagcuccaccaugggccagguggggcggcagcucgccaucaucggcgacgacaucaaccgccgguacgacagcgaguuccagacgaugcugcagcaccuccagcccaccgccgagaacgccuacgaguacuucaccaagaucgcgaccucccuguucgagagcggcaucaacugggggcgcgucguggcccugcugggcuucggguaccggcucgcccugcacguguaccagcacggccugacgggguuccucggccaggucacccgcuucgugguggacuucaugcugcaccacugcaucgcccgguggaucgcgcagcgcggcgggugggucgccgcccugaaccucggcaacgggcccauccugaacgugcuggugguccucggcguggugcugcugggccaguucgucgugcggcgcuucuucaaguccuga

SEQ ID NO: 6940 - RNA, 573 nt, Artificial Sequence
  derived and/or modified sequence opt2 from Bak__Homo_sapiens__AAM74949
auggccuccggccagggccccggccccccccgccaggagugcggcgagcccgcccuccccuccgccuccgaggagcaggucgcccaggacaccgaggaggucuuccgcuccuacgucuucuaccgccaccagcagcccuccuccaccaugggccaggucggccgccagcucgccaucaucggcgacgacaucaaccgccgcuacgacuccgaguuccagaccaugcuccagcaccuccagcccaccgccgagaacgccuacgaguacuucaccaagaucgccaccucccucuucgaguccggcaucaacuggggccgcgucgucgcccuccucggcuucggcuaccgccucgcccuccacgucuaccagcacggccucaccggcuuccucggccaggucacccgcuucgucgucgacuucaugcuccaccacugcaucgcccgcuggaucgcccagcgcggcggcugggucgccgcccucaaccucggcaacggccccauccucaacguccucgucguccucggcgucguccuccucggccaguucgucguccgccgcuucuucaaguccuga

SEQ ID NO: 6941 - RNA, 573 nt, Artificial Sequence
  derived and/or modified sequence opt3 from Bak__Homo_sapiens__AAM74949
auggccagcggccaggggcccggaccuccaagacaagagugcggugaaccggcucugcccuccgcaucugaggaacagguggcccaggacaccgaggaagucuucaggucauacguguuuuaucggcaccagcaaccuaguagcacaaugggccagguggggcgccagcucgcgaucauuggagaugacauaaaccgacguuacgauuccgaguuccagacuaugcuucaacaucugcagccaacggcugagaaugccuaugaauacuuuaccaagaucgcaacaucuuuguucgagucgggcauuaacugggguagaguaguggccuuacugggguuuggauauaggcuagcucuccacgucuaccagcauggccugacuggcuuccuugggcagguuacccgguuuguuguggacuucaugcugcaccauuguaucgcacgcuggauugcccaaagaggagguugggucgcugccuugaaucucggcaacgggcccauccugaaugugcugguaguucucggaguggucuuacugggccaguuuguggugaggcgguucuuuaaaucauga

SEQ ID NO: 6942 - RNA, 573 nt, Artificial Sequence
  derived and/or modified sequence opt4 from Bak__Homo_sapiens__AAM74949
auggccagcggccagggccccggcccccccagacaggagugcggcgagcccgcccugcccagcgccagcgaggagcagguggcccaggacaccgaggagguguucagaagcuacguguucuacagacaccagcagcccagcagcaccaugggccaggugggcagacagcuggccaucaucggcgacgacaucaacagaagauacgacagcgaguuccagaccaugcugcagcaccugcagcccaccgccgagaacgccuacgaguacuucaccaagaucgccaccagccuguucgagagcggcaucaacuggggcagagugguggcccugcugggcuucggcuacagacuggcccugcacguguaccagcacggccugaccggcuuccugggccaggugaccagauucgugguggacuucaugcugcaccacugcaucgccagauggaucgcccagagaggcggcuggguggccgcccugaaccugggcaacggccccauccugaacgugcugguggugcugggcguggugcugcugggccaguucguggugagaagauucuucaagagcuga

SEQ ID NO: 6943 - RNA, 573 nt, Artificial Sequence
  derived and/or modified sequence opt5 from Bak__Homo_sapiens__AAM74949
auggccagcggccaggggcccggaccuccgagacaagagugcggcgaacccgcucugccuuccgccucugaggaacagguggcgcaggacaccgaggaagucuuccggagcuacguguuuuaucgccaccagcaacccuccucuacaauggggcagguuggaagacagcucgcuaucauuggcgaugacaucaaccggcgcuacgauagcgaguuccagacgaugcugcaacaucuucagccuaccgccgagaaugccuaugaauacuuuacaaagauugcuaccucccuguucgagucugggaucaacuggggaagaguggucgcccuccugggcuuuggcuaucggcuugcucugcacguguaccagcaugggcucacaggauuccugggccagguuacccgcuuuguggucgacuucaugcugcaccauuguauugccagauggaucgcgcaacgcgggggauggguggccgcucucaaucugggcaacgggcccauccuuaauguucuggugguccucggaguggugcugcuuggccaguuugucguucggagauucuuuaaaagcuga

SEQ ID NO: 6944 - RNA, 573 nt, Artificial Sequence
  derived and/or modified sequence opt6 from Bak__Homo_sapiens__AAM74949
auggcaucaggucaaggaccaggaccaccaagacaagaauguggagaaccagcauuaccaagugcuucagaagaacaaguagcacaagauacagaagaaguauuuagaucauauguauuuuauagacaccaacaaccaucaucaacaaugggacaaguaggaagacaauuagcaauaauaggagacgauauaaauagaagauaugauucagaauuucaaacaauguuacaacauuuacaaccaacagcagaaaaugcauaugaauauuucacaaaaauagcaacaucauuauuugaaucaggaauaaauuggggaagaguaguagcuuuauuaggauucggauaucgauuagcccuacauguauaucaacauggauuaacaggauuuuuaggacaaguuacaagauuuguaguugauuuuauguuacaucauuguauagcuagauggauagcacaaagaggaggauggguagcagcacuaaaucuaggaaauggaccaauacuaaauguauuaguaguauuaggaguaguacuauuaggacaauuuguaguaagaagauuuuuuaaaucauaa

SEQ ID NO: 6945 - protein, 204 aa, Artificial Sequence
  Bax__Homo_sapiens__A0A0C4MVT1
MDGSGEQPRGGVSSRIEQGEWGGEAPELALDPVPQDASTKKLSECLKRIGDELDSNMELQRMIAAVDTDSPREVFFRVAADMFSDGNFNWGRVVALFYFASKLVLKALCTKVPELIRTIMGWTLDFLRERLLGWIQDQGGWGLPLAESLKRLMSLSPGRPPLLLWDAHVADRDHLCGGSAHRLTHHLEEDGLRPPAALDCVFPP

SEQ ID NO: 6946 - RNA, 615 nt, Artificial Sequence
  Bax__Homo_sapiens__AIO10780
auggacggguccggggagcagcccagaggcgggguuucauccaggaucgagcagggcgaaugggggggggaggcacccgagcuggcccuggacccggugccucaggaugcguccaccaagaagcugagcgagugucucaagcgcaucggggacgaacuggacaguaacauggagcugcagaggaugauugccgccguggacacagacuccccccgagaggucuuuuuccgaguggcagcugacauguuuucugacggcaacuucaacuggggccggguugucgcccuuuucuacuuugccagcaaacuggugcucaaggcccugugcaccaaggugccggaacugaucagaaccaucaugggcuggacauuggacuuccuccgggagcggcuguugggcuggauccaagaccagggugguugggggcugccccuggccgagucacugaagcgacugaugucccugucuccaggacggccuccucuccuacuuugggacgcccacguggcagaccgugaccaucuuuguggcgggagugcucaccgccucacucaccaucuggaagaagaugggcugaggcccccagcugccuuggacuguguuuuuccuccauaa

SEQ ID NO: 6947 - RNA, 615 nt, Artificial Sequence
  derived and/or modified sequence opt1 from Bax__Homo_sapiens__AIO10780
auggacggcagcggggagcagccccgcggcgggguguccagccggaucgagcagggcgaguggggcggggaggcccccgagcuggcccucgaccccgucccccaggacgcguccaccaagaagcugagcgagugccugaagcgcaucggcgacgagcucgacuccaacauggagcugcagcggaugaucgccgccguggacaccgacagcccccgcgagguguucuuccgggucgccgccgacauguucuccgacgggaacuucaacuggggccgcgugguggcgcuguucuacuucgccagcaagcucguccugaaggcccugugcacgaaggugccggagcucauccggaccaucaugggguggacccuggacuuccugcgcgagcggcuccugggcuggauccaggaccagggcggguggggccugccccucgccgagucccugaagcgccugaugagccucucccccgggcggcccccgcugcugcucugggacgcgcacguggccgaccgcgaccaccugugcggcgggagcgcccaccggcugacccaccaccucgaggaggacggccugcgcccgcccgccgcccuggacugcgucuucccgcccuga

SEQ ID NO: 6948 - RNA, 615 nt, Artificial Sequence
  derived and/or modified sequence opt2 from Bax__Homo_sapiens__AIO10780
auggacggcuccggcgagcagccccgcggcggcgucuccucccgcaucgagcagggcgaguggggcggcgaggcccccgagcucgcccucgaccccgucccccaggacgccuccaccaagaagcucuccgagugccucaagcgcaucggcgacgagcucgacuccaacauggagcuccagcgcaugaucgccgccgucgacaccgacuccccccgcgaggucuucuuccgcgucgccgccgacauguucuccgacggcaacuucaacuggggccgcgucgucgcccucuucuacuucgccuccaagcucguccucaaggcccucugcaccaagguccccgagcucauccgcaccaucaugggcuggacccucgacuuccuccgcgagcgccuccucggcuggauccaggaccagggcggcuggggccucccccucgccgagucccucaagcgccucaugucccucucccccggccgccccccccuccuccucugggacgcccacgucgccgaccgcgaccaccucugcggcggcuccgcccaccgccucacccaccaccucgaggaggacggccuccgcccccccgccgcccucgacugcgucuucccccccuga

SEQ ID NO: 6949 - RNA, 615 nt, Artificial Sequence
  derived and/or modified sequence opt3 from Bax__Homo_sapiens__AIO10780
auggacggcagcggggagcagcccagaggagguguguccucuaggaucgaacaaggcgaguggggaggggaagccccugagcuggcucucgauccagucccgcaggacgcaucaaccaagaaacuuagugaaugccugaagcggauuggcgaugaguuggacagcaacauggaguuacagcgcaugauagccgcgguugauacagacucuccccgagaaguguucuuucguguagcugccgauauguucuccgacgguaauuuuaacugggggagaguggucgcacuguucuacuuugccucgaagcuagugcucaaagcucuguguacuaaaguuccugagcuuaucaggacgauuaugggauggacccuggauuucuugcgggaacgccuccugggcuggauccaggaccaaggcggguggggacugccacucgcagagucauuaaagagacugaugagccuuagucccgguaggccuccauugcugcuaugggaugcccacguggcugaccgggaucaucucugcggcggguccgcccaccgccugacacaucaccuugaggaagacggacugcgacccccugcggcauuggacugugucuuuccaccguga

SEQ ID NO: 6950 - RNA, 615 nt, Artificial Sequence
  derived and/or modified sequence opt4 from Bax__Homo_sapiens__AIO10780
auggacggcagcggcgagcagcccagaggcggcgugagcagcagaaucgagcagggcgaguggggcggcgaggcccccgagcuggcccuggaccccgugccccaggacgccagcaccaagaagcugagcgagugccugaagagaaucggcgacgagcuggacagcaacauggagcugcagagaaugaucgccgccguggacaccgacagccccagagagguguucuucagaguggccgccgacauguucagcgacggcaacuucaacuggggcagagugguggcccuguucuacuucgccagcaagcuggugcugaaggcccugugcaccaaggugcccgagcugaucagaaccaucaugggcuggacccuggacuuccugagagagagacugcugggcuggauccaggaccagggcggcuggggccugccccuggccgagagccugaagagacugaugagccugagccccggcagacccccccugcugcugugggacgcccacguggccgacagagaccaccugugcggcggcagcgcccacagacugacccaccaccuggaggaggacggccugagaccccccgccgcccuggacugcguguucccccccuga

SEQ ID NO: 6951 - RNA, 615 nt, Artificial Sequence
  derived and/or modified sequence opt5 from Bax__Homo_sapiens__AIO10780
auggacggcagcggggagcagccccgcggaggcguguccucucggaucgaacaaggggaguggggaggcgaagccccugagcuggcucucgauccggucccccaggacgccagcaccaagaaacuguccgaaugccuuaagcgcauuggggaugagcuggacucuaacauggagcuccagagaaugaucgcggcuguugauacagacagcccucgggaaguguucuuucgcguggccgccgauauguucuccgacggaaauuuuaacuggggcagagucguggcucuguucuacuuugccucuaaacuuguucugaaggcucucuguacgaaagugcccgagcugauucggaccaucaugggcuggacacuggauuuccuccgcgaaagacugcuuggguggauucaggaccaaggaggcugggggcugccucucgccgagagccugaagcggcuuaugucccugagccccggacgcccuccgcuccugcugugggaugcgcacgucgccgacagagaucaucucugcggcgggucugcucaccggcugacccaucaccuugaggaagacggacugagacccccugccgcucucgacuguguguuucccccuuga

SEQ ID NO: 6952 - RNA, 615 nt, Artificial Sequence
  derived and/or modified sequence opt6 from Bax__Homo_sapiens__AIO10780
auggauggaagcggagaacaaccaagaggaggaguaaguaguagaauagaacaaggagaauggggaggagaagcaccagaauuagcacuagauccaguaccacaagaugcaucaacgaaaaaauuaucagaauguuuaaaaagaauaggagaugaauuagauaguaauauggaauuacaaagaaugauagcagcaguagauacagauaguccaagagaaguauuuuuuagaguagcagcagauauguuuagugauggaaauuuuaauuggggaagaguaguagcauuauuuuauuuugcaaguaaauuaguauuaaaagcauuauguacaaaagugccagaauuaauaagaacaauaaugggauggacauuagauuuucugagagaaagauuauuaggauggauucaagaucaaggaggauggggauuaccauuagcagaaagcuuaaaaagauuaaugaguuuaaguccaggaagaccaccauuacuauuaugggaugcacauguagcagauagagaucaucuauguggaggaucagcacauagauuaacacaucauuuagaagaagauggauuaagaccaccagcagcauuagauuguguauuuccaccauaa

SEQ ID NO: 6953 - protein, 175 aa, Artificial Sequence
  Bax__Homo_sapiens__A0A0C4MW46
MDGSGEQPRGGVSSRIEQGEWGGEAPELALDPVPQDASTKKLSECLKRIGDELDSNMELQRMIAAVDTDSPREVFFRVAADMFSDGNFNWGRVVALFYFASKLVLKALCTKVPELIRTIMGWTLDFLRERLLGWIQDQGGWDGLLSYFGTPTWQTVTIFVAGVLTASLTIWKKMG

SEQ ID NO: 6954 - RNA, 528 nt, Artificial Sequence
  Bax__Homo_sapiens__AIO10778
auggacggguccggggagcagcccagaggcgggguuucauccaggaucgagcagggcgaaugggggggggaggcacccgagcuggcccuggacccggugccucaggaugcguccaccaagaagcugagcgagugucucaagcgcaucggggacgaacuggacaguaacauggagcugcagaggaugauugccgccguggacacagacuccccccgagaggucuuuuuccgaguggcagcugacauguuuucugacggcaacuucaacuggggccggguugucgcccuuuucuacuuugccagcaaacuggugcucaaggcccugugcaccaaggugccggaacugaucagaaccaucaugggcuggacauuggacuuccuccgggagcggcuguugggcuggauccaagaccagggugguugggacggccuccucuccuacuuugggacgcccacguggcagaccgugaccaucuuuguggcgggagugcucaccgccucacucaccaucuggaagaagaugggcuga

SEQ ID NO: 6955 - RNA, 528 nt, Artificial Sequence
  derived and/or modified sequence opt1 from Bax__Homo_sapiens__AIO10778
auggacggcagcggggagcagccccgcggcgggguguccagccggaucgagcagggcgaguggggcggggaggccccggagcuggcccucgaccccgucccccaggacgcguccaccaagaagcugagcgagugccugaagcgcaucggcgacgagcucgacuccaacauggagcugcagcggaugaucgccgccguggacaccgacagcccccgcgagguguucuuccgggucgccgccgacauguucuccgacgggaacuucaacuggggccgcgugguggcgcuguucuacuucgccagcaagcucguccugaaggcccugugcacgaaggugccggagcucauccggaccaucaugggguggacccuggacuuccugcgcgagcggcuccugggcuggauccaggaccagggcgggugggacggccugcucuccuacuucgggacccccacguggcagaccgugaccaucuucgucgccggcgugcugaccgcgagccugacgaucuggaagaagaugggguga

SEQ ID NO: 6956 - RNA, 528 nt, Artificial Sequence
  derived and/or modified sequence opt2 from Bax__Homo_sapiens__AIO10778
auggacggcuccggcgagcagccccgcggcggcgucuccucccgcaucgagcagggcgaguggggcggcgaggcccccgagcucgcccucgaccccgucccccaggacgccuccaccaagaagcucuccgagugccucaagcgcaucggcgacgagcucgacuccaacauggagcuccagcgcaugaucgccgccgucgacaccgacuccccccgcgaggucuucuuccgcgucgccgccgacauguucuccgacggcaacuucaacuggggccgcgucgucgcccucuucuacuucgccuccaagcucguccucaaggcccucugcaccaagguccccgagcucauccgcaccaucaugggcuggacccucgacuuccuccgcgagcgccuccucggcuggauccaggaccagggcggcugggacggccuccucuccuacuucggcacccccaccuggcagaccgucaccaucuucgucgccggcguccucaccgccucccucaccaucuggaagaagaugggcuga

SEQ ID NO: 6957 - RNA, 528 nt, Artificial Sequence
  derived and/or modified sequence opt3 from Bax__Homo_sapiens__AIO10778
auggacggcagcggggagcagcccagaggagguguguccucuaggaucgaacaaggcgaguggggaggggaagccccugagcuggcucucgauccagucccgcaggacgcaucaaccaagaaacuuagugaaugccugaagcggauuggcgaugaguuggacagcaacauggaguuacagcgcaugauagccgcgguugauacagacucuccccgagaaguguucuuucguguagcugccgauauguucuccgacgguaauuuuaacugggggagaguggucgcacuguucuacuuugccucgaagcuagugcucaaagcucuguguacuaaaguuccugagcuuaucaggacgauuaugggauggacccuggauuucuugcgggaacgccuccugggcuggauccaggaccaaggcgggugggauggacugcucucauauuuugguacaccaacuuggcagaccgugacaauuuucgucgcaggcguguuaaccgccagccugacuaucuggaagaagaugggguga

SEQ ID NO: 6958 - RNA, 528 nt, Artificial Sequence
  derived and/or modified sequence opt4 from Bax__Homo_sapiens__AIO10778
auggacggcagcggcgagcagcccagaggcggcgugagcagcagaaucgagcagggcgaguggggcggcgaggcccccgagcuggcccuggaccccgugccccaggacgccagcaccaagaagcugagcgagugccugaagagaaucggcgacgagcuggacagcaacauggagcugcagagaaugaucgccgccguggacaccgacagccccagagagguguucuucagaguggccgccgacauguucagcgacggcaacuucaacuggggcagagugguggcccuguucuacuucgccagcaagcuggugcugaaggcccugugcaccaaggugcccgagcugaucagaaccaucaugggcuggacccuggacuuccugagagagagacugcugggcuggauccaggaccagggcggcugggacggccugcugagcuacuucggcacccccaccuggcagaccgugaccaucuucguggccggcgugcugaccgccagccugaccaucuggaagaagaugggcuga

SEQ ID NO: 6959 - RNA, 528 nt, Artificial Sequence
  derived and/or modified sequence opt5 from Bax__Homo_sapiens__AIO10778
auggacggcagcggggagcagcccagaggaggcguguccucucggaucgaacaaggggaguggggaggcgaagccccugagcuggcucucgauccggucccccaggacgccagcaccaagaaacuguccgaaugccuuaagcgcauuggggaugagcuggacucuaacauggagcuccagagaaugaucgcggcuguugauacagacagcccucgggaaguguucuuucgcguggccgccgauauguucuccgacggaaauuuuaacuggggcagagucguggcucuguucuacuuugccucuaaacuuguucugaaggcucucuguacgaaagugcccgagcugauucggaccaucaugggcuggacacuggauuuccuccgcgaaagacugcuuggguggauucaggaccaaggaggcugggaugggcugcucagcuauuuuggaaccccuacauggcagaccgucacaaucuucguggccggcguucugaccgcgucccuuacgaucuggaagaagaugggguga

SEQ ID NO: 6960 - RNA, 528 nt, Artificial Sequence
  derived and/or modified sequence opt6 from Bax__Homo_sapiens__AIO10778
auggacggaaguggagaacaaccaagaggaggaguaucaaguagaauagaacaaggagaauggggaggagaagcaccagaauuagcauuagauccaguaccacaagaugcaaguacaaaaaaauuaagugaauguuuaaaaagaauaggagaugaacuagauaguaauauggaauuacaaagaaugauagcagcaguagauacagauaguccaagagaaguauuuuuuagaguagcagcagauauguuuagugauggaaauuuuaauuggggaagaguaguagcauuauuuuauuuugcaaguaaacuaguauuaaaagcauuauguacaaaaguaccagaacuaauaagaacaauaaugggauggacauuagauuuuuuaagagaaagauuguuaggauggauacaagaucaaggaggaugggauggauuauuaaguuauuuuggaacaccaacauggcaaacaguaacaauauuuguagcaggaguauugacagcaaguuuaacaauauggaaaaaaaugggauaa

SEQ ID NO: 6961 - protein, 204 aa, Artificial Sequence
  Bax__Homo_sapiens__A0A0C4MWS3
MDGSGEQPRGGGFHPGSSRANGGEAPELALDPVPQDASTKKLSECLKRIGDELDSNMELQRMIAAVDTDSPREVFFRVAADMFSDGNFNWGRVVALFYFASKLVLKALCTKVPELIRTIMGWTLDFLRERLLGWIQDQGGWGLPLAESLKRLMSLSPGRPPLLLWDAHVADRDHLCGGSAHRLTHHLEEDGLRPPAALDCVFPP

SEQ ID NO: 6962 - RNA, 615 nt, Artificial Sequence
  Bax__Homo_sapiens__AIO10779
auggacggguccggggagcagcccagaggcgggggguuucauccaggaucgagcagggcgaaugggggggaggcacccgagcuggcccuggacccggugccucaggaugcguccaccaagaagcugagcgagugucucaagcgcaucggggacgaacuggacaguaacauggagcugcagaggaugauugccgccguggacacagacuccccccgagaggucuuuuuccgaguggcagcugacauguuuucugacggcaacuucaacuggggccggguugucgcccuuuucuacuuugccagcaaacuggugcucaaggcccugugcaccaaggugccggaacugaucagaaccaucaugggcuggacauuggacuuccuccgggagcggcuguugggcuggauccaagaccagggugguugggggcugccccuggccgagucacugaagcgacugaugucccugucuccaggacggccuccucuccuacuuugggacgcccacguggcagaccgugaccaucuuuguggcgggagugcucaccgccucacucaccaucuggaagaagaugggcugaggcccccagcugccuuggacuguguuuuuccuccauaa

SEQ ID NO: 6963 - RNA, 615 nt, Artificial Sequence
  derived and/or modified sequence opt1 from Bax__Homo_sapiens__AIO10779
auggacggcagcggggagcagccccgcggcgggggcuuccaccccggguccagccgggccaacggcggcgaggcccccgagcuggcgcucgaccccgugccccaggacgccuccaccaagaagcugagcgagugccugaagcgcaucggggacgagcucgacuccaacauggagcugcagcggaugaucgccgccgucgacaccgacagcccgcgcgagguguucuuccggguggccgcggacauguucuccgacggcaacuucaacugggggcgcgucguggcccuguucuacuucgccagcaagcucgugcugaaggcccugugcacgaagguccccgagcucauccggaccaucaugggcuggacccuggacuuccugcgcgagcggcuccugggguggauccaggaccagggcggcugggggcugccccucgcggagucccugaagcgccugaugagccucucccccggccggccgccccugcugcucugggacgcccacguggccgaccgcgaccaccugugcgggggcagcgcccaccggcugacccaccaccucgaggaggacggccugcgcccgcccgccgcgcuggacugcguguucccgcccuga

SEQ ID NO: 6964 - RNA, 615 nt, Artificial Sequence
  derived and/or modified sequence opt2 from Bax__Homo_sapiens__AIO10779
auggacggcuccggcgagcagccccgcggcggcggcuuccaccccggcuccucccgcgccaacggcggcgaggcccccgagcucgcccucgaccccgucccccaggacgccuccaccaagaagcucuccgagugccucaagcgcaucggcgacgagcucgacuccaacauggagcuccagcgcaugaucgccgccgucgacaccgacuccccccgcgaggucuucuuccgcgucgccgccgacauguucuccgacggcaacuucaacuggggccgcgucgucgcccucuucuacuucgccuccaagcucguccucaaggcccucugcaccaagguccccgagcucauccgcaccaucaugggcuggacccucgacuuccuccgcgagcgccuccucggcuggauccaggaccagggcggcuggggccucccccucgccgagucccucaagcgccucaugucccucucccccggccgccccccccuccuccucugggacgcccacgucgccgaccgcgaccaccucugcggcggcuccgcccaccgccucacccaccaccucgaggaggacggccuccgcccccccgccgcccucgacugcgucuucccccccuga

SEQ ID NO: 6965 - RNA, 615 nt, Artificial Sequence
  derived and/or modified sequence opt3 from Bax__Homo_sapiens__AIO10779
auggacggcagcggggagcagcccagaggagguggcuuccacccuggguccucuagggccaacggaggcgaagcuccagagcuggcacucgauccggugccccaggacgccucaaccaagaaacuuagugaaugccugaagcggaucggugaugaguuggacagcaauauggaauuacagcgcaugauugcggcugucgauacagacuccccucgagagguguuuuuccguguugccgcagauauguuuucugacgggaacuucaauuggggaagaguaguggcccuguuuuacuucgcuucgaaauugguccucaaggcacuguguacuaaagugccagagcuuauaaggacgaucaugggcuggacccuggauuuucuacgggaacgccuccugggcuggauucaggaccaagggggauggggucugccccucgccgagucauuaaagagacugaugagccuuaguccuggcaggccacccuugcugcuaugggaugcucauguugccgaccgggaucaccucugcgggggauccgcgcaucgccugacacaccaucuugaagaggacggccugcgaccuccagcagccuuggacuguguguucccgcccuga

SEQ ID NO: 6966 - RNA, 615 nt, Artificial Sequence
  derived and/or modified sequence opt4 from Bax__Homo_sapiens__AIO10779
auggacggcagcggcgagcagcccagaggcggcggcuuccaccccggcagcagcagagccaacggcggcgaggcccccgagcuggcccuggaccccgugccccaggacgccagcaccaagaagcugagcgagugccugaagagaaucggcgacgagcuggacagcaacauggagcugcagagaaugaucgccgccguggacaccgacagccccagagagguguucuucagaguggccgccgacauguucagcgacggcaacuucaacuggggcagagugguggcccuguucuacuucgccagcaagcuggugcugaaggcccugugcaccaaggugcccgagcugaucagaaccaucaugggcuggacccuggacuuccugagagagagacugcugggcuggauccaggaccagggcggcuggggccugccccuggccgagagccugaagagacugaugagccugagccccggcagacccccccugcugcugugggacgcccacguggccgacagagaccaccugugcggcggcagcgcccacagacugacccaccaccuggaggaggacggccugagaccccccgccgcccuggacugcguguucccccccuga

SEQ ID NO: 6967 - RNA, 615 nt, Artificial Sequence
  derived and/or modified sequence opt5 from Bax__Homo_sapiens__AIO10779
auggacggcagcggggagcagcccagaggaggcggguuccacccuggauccucucgggccaacggcggggaagcuccggagcuggcccucgaucccgugccucaagacgcgagcaccaagaaacuguccgaaugccuuaagcgcaucggagaugagcuggacucuaauauggaacuccagagaaugauugcugccgucgauacagacagcccccgggagguguuuuuccgcguugccgcugauauguuuuccgacggcaacuucaauuggggcagaguggucgcccuguuuuacuucgcuucuaaacuugugcugaaggcccucuguacgaaaguuccugagcugauccggaccauuaugggguggacacuggauuuucuccgcgaaagacugcuuggauggauccaggaccagggcggguggggacugccccucgcggagagccugaagcggcuuaugucccugagcccuggccgcccgccccuccugcugugggaugcccauguggcugacagagaucaccucugcgggggaucugcccaucggcugacccaccaucuugaagaggacggccugcgcccucccgcugcccucgacugugucuucccucccuga

SEQ ID NO: 6968 - RNA, 615 nt, Artificial Sequence
  derived and/or modified sequence opt6 from Bax__Homo_sapiens__AIO10779
auggauggaaguggagaacaaccaagaggaggaggauuucauccaggaucaagcagagcaaauggaggagaagcaccagaacuagcguuagauccaguaccacaagaugcaaguacaaaaaaauuaucagaauguuuaaaaagaauaggagaugaauuagauaguaauauggaauuacaaagaaugauagcagcaguagauacagauaguccaagagaaguauuuuuuagaguagcagcagauauguuuagugauggaaauuuuaauuggggaagaguaguagcauuauuuuauuuugcaucaaaauuaguauuaaaagcauuauguacaaaaguaccagaauuaauaagaacaauaaugggauggacacuagauuuuuuaagagaaagauuacuaggguggauacaagaucaaggaggauggggauuaccacuagcagaaaguuuaaaaagauuaaugaguuuaaguccaggaagaccaccauuauuacuaugggaugcacauguugcagacagagaucauuuauguggaggaucagcacauagauuaacacaucaucuagaagaagauggacuuagaccaccagcagcauuagauuguguuuuuccaccauaa

SEQ ID NO: 6969 - protein, 140 aa, Artificial Sequence
  Bax__Homo_sapiens__I6LPK7
MIAAVDTDSPREVFFRVAADMFSDGNFNWGRVVALFYFASKLVLKALCTKVPELIRTIMGWTLDFLRERLLGWIQDQGGWVRLLKPPHPHHRALTTAPAPPSLPPATPLGPWAFWSRSQWCPLPIFRSSDVVYNAFSLRV

SEQ ID NO: 6970 - RNA, 423 nt, Artificial Sequence
  Bax__Homo_sapiens__ADZ05507
augauugccgccguggacacagacuccccccgagaggucuuuuuccgaguggcagcugacauguuuucugacggcaacuucaacuggggccggguugucgcccuuuucuacuuugccagcaaacuggugcucaaggcccugugcaccaaggugccggaacugaucagaaccaucaugggcuggacauuggacuuccuccgggagcggcuguugggcuggauccaagaccagggugguugggugagacuccucaagccuccucacccccaccaccgcgcccucaccaccgccccugccccaccgucccugccccccgccacuccucugggacccugggccuucuggagcaggucacaguggugcccucuccccaucuucagaucaucagauguggucuauaaugcguuuuccuuacgugucuga

SEQ ID NO: 6971 - RNA, 423 nt, Artificial Sequence
  derived and/or modified sequence opt1 from Bax__Homo_sapiens__ADZ05507
augaucgccgccguggacaccgacagcccccgcgaggucuucuuccggguggcggccgacauguucuccgacggcaacuucaacugggggcgcguggucgcccuguucuacuucgccagcaagcucgugcugaaggcccugugcaccaaggugccggagcucauccggacgaucaugggcuggacccuggacuuccugcgcgagcggcuccugggguggauccaggaccagggcggguggguccgccugcucaagccgccccacccccaccaccgggcgcugaccaccgcccccgccccgcccucccugccgcccgccacgccccucggccccugggcguucuggagccgcucccaguggugcccccugcccaucuuccggagcuccgacgugguguacaacgccuucagccugcgcgucuga

SEQ ID NO: 6972 - RNA, 423 nt, Artificial Sequence
  derived and/or modified sequence opt2 from Bax__Homo_sapiens__ADZ05507
augaucgccgccgucgacaccgacuccccccgcgaggucuucuuccgcgucgccgccgacauguucuccgacggcaacuucaacuggggccgcgucgucgcccucuucuacuucgccuccaagcucguccucaaggcccucugcaccaagguccccgagcucauccgcaccaucaugggcuggacccucgacuuccuccgcgagcgccuccucggcuggauccaggaccagggcggcuggguccgccuccucaagcccccccacccccaccaccgcgcccucaccaccgcccccgccccccccucccucccccccgccaccccccucggccccugggccuucuggucccgcucccaguggugcccccuccccaucuuccgcuccuccgacgucgucuacaacgccuucucccuccgcgucuga

SEQ ID NO: 6973 - RNA, 423 nt, Artificial Sequence
  derived and/or modified sequence opt3 from Bax__Homo_sapiens__ADZ05507
augaucgccgcuguggacaccgauagccccagagaggucuucuuuaggguugcagccgacauguucuccgauggcaacuuuaauugggggcgggugguagcgcuguucuacuuugcuucuaagcucgugcuuaaagcccugugcacaaaggucccugaauugauucgcacuauaaugggauggacguuagacuuccugcgagagcgucuacucgguuggauccaggaucaaggcgggugggugagacugcuuaaaccaccgcacccccaucacagggcacugaccacagccccugcuccacccucauugccuccagcaacuccccucggaccuugggccuuuuggagucggagccagugguguccacugccgauuuuccgcuccucugacguuguguauaacgcuuuuucgcugagagucuga

SEQ ID NO: 6974 - RNA, 423 nt, Artificial Sequence
  derived and/or modified sequence opt4 from Bax__Homo_sapiens__ADZ05507
augaucgccgccguggacaccgacagccccagagagguguucuucagaguggccgccgacauguucagcgacggcaacuucaacuggggcagagugguggcccuguucuacuucgccagcaagcuggugcugaaggcccugugcaccaaggugcccgagcugaucagaaccaucaugggcuggacccuggacuuccugagagagagacugcugggcuggauccaggaccagggcggcugggugagacugcugaagcccccccacccccaccacagagcccugaccaccgcccccgccccccccagccugccccccgccaccccccugggccccugggccuucuggagcagaagccaguggugcccccugcccaucuucagaagcagcgacgugguguacaacgccuucagccugagaguguga

SEQ ID NO: 6975 - RNA, 423 nt, Artificial Sequence
  derived and/or modified sequence opt5 from Bax__Homo_sapiens__ADZ05507
augaucgccgcuguggacaccgauagccccagagaggucuucuuucggguugccgcggacauguucuccgauggcaacuuuaauugggggcgcgugguggcucuguucuacuuugccucuaagcucguccugaaagcccuuugcacaaaggugccugaacugauuagaacgaucaugggauggacccucgacuuccugcgggagcgccuucugggcuggauucaggaucaagggggauggguuagacuccugaaaccgccccacccucaucaccgggcucugacaaccgcccccgcuccucccagccucccuccggccacaccccugggcccuugggcguuuuggucccgcucucagugguguccccuuccuaucuucagaagcuccgacguggucuauaacgccuuuucucugcggguguga

SEQ ID NO: 6976 - RNA, 423 nt, Artificial Sequence
  derived and/or modified sequence opt6 from Bax__Homo_sapiens__ADZ05507
augauagcagcaguagauacagauucaccaagagaaguauuuuucagaguagcagcagauauguuuucagauggaaauuucaauuggggaagaguaguagcacuauuuuacuuugcaucaaaauuaguauuaaaagcauuauguacaaaaguaccagaauuaauaagaacaauaaugggauggacacuagauuucuuaagagaaagauuacuaggauggauacaagaucaaggaggauggguaagacuauuaaaaccaccacauccacaucaccgagcauuaacaacagcaccagcaccaccaucacuaccaccagcaacaccacuaggaccaugggcauuuuggucaagaagucaauggugcccacuaccaauauuuagaucaucagauguaguauacaaugcauuuucauuaagaguauaa

SEQ ID NO: 6977 - protein, 175 aa, Artificial Sequence
  Bax__Homo_sapiens__K4JQN1
MDGSGEQPRGGGFHPGSSRANGGEAPELALDPVPQDASTKKLSECLKRIGDELDSNMELQRMIAAVDTDSPREVFFRVAADMFSDGNFNWGRVVALFYFASKLVLKALCTKVPELIRTIMGWTLDFLRERLLGWIQDQGGWDGLLSYFGTPTWQTVTIFVAGVLTASLTIWKKMG

SEQ ID NO: 6978 - RNA, 528 nt, Artificial Sequence
  Bax__Homo_sapiens__AFU81108
auggacggguccggggagcagcccagaggcgggggguuucauccaggaucgagcagggcgaaugggggggaggcacccgagcuggcccuggacccggugccucaggaugcguccaccaagaagcugagcgagugucucaagcgcaucggggacgaacuggacaguaacauggagcugcagaggaugauugccgccguggacacagacuccccccgagaggucuuuuuccgaguggcagcugacauguuuucugacggcaacuucaacuggggccggguugucgcccuuuucuacuuugccagcaaacuggugcucaaggcccugugcaccaaggugccggaacugaucagaaccaucaugggcuggacauuggacuuccuccgggagcggcuguugggcuggauccaagaccagggugguugggacggccuccucuccuacuuugggacgcccacguggcagaccgugaccaucuuuguggcgggagugcucaccgccucacucaccaucuggaagaagaugggcuga

SEQ ID NO: 6979 - RNA, 528 nt, Artificial Sequence
  derived and/or modified sequence opt1 from Bax__Homo_sapiens__AFU81108
auggacggcagcggggagcagccccgcggcgggggcuuccacccgggguccagccgggccaacggcggcgaggcccccgagcuggcgcucgaccccgugccccaggacgccuccaccaagaagcugagcgagugccugaagcgcaucggggacgagcucgacuccaacauggagcugcagcggaugaucgccgccgucgacaccgacagcccgcgcgagguguucuuccggguggccgcggacauguucuccgacggcaacuucaacugggggcgcgucguggcccuguucuacuucgccagcaagcucgugcugaaggcccugugcacgaagguccccgagcucauccggaccaucaugggcuggacccuggacuuccugcgcgagcggcuccugggguggauccaggaccagggcggcugggacgggcugcucuccuacuucggcacccccacguggcagaccgugaccaucuucguggcggggguccugaccgccagccugacgaucuggaagaagaugggcuga

SEQ ID NO: 6980 - RNA, 528 nt, Artificial Sequence
  derived and/or modified sequence opt2 from Bax__Homo_sapiens__AFU81108
auggacggcuccggcgagcagccccgcggcggcggcuuccaccccggcuccucccgcgccaacggcggcgaggcccccgagcucgcccucgaccccgucccccaggacgccuccaccaagaagcucuccgagugccucaagcgcaucggcgacgagcucgacuccaacauggagcuccagcgcaugaucgccgccgucgacaccgacuccccccgcgaggucuucuuccgcgucgccgccgacauguucuccgacggcaacuucaacuggggccgcgucgucgcccucuucuacuucgccuccaagcucguccucaaggcccucugcaccaagguccccgagcucauccgcaccaucaugggcuggacccucgacuuccuccgcgagcgccuccucggcuggauccaggaccagggcggcugggacggccuccucuccuacuucggcacccccaccuggcagaccgucaccaucuucgucgccggcguccucaccgccucccucaccaucuggaagaagaugggcuga

SEQ ID NO: 6981 - RNA, 528 nt, Artificial Sequence
  derived and/or modified sequence opt3 from Bax__Homo_sapiens__AFU81108
auggacggcagcggggagcagcccagaggagguggcuuccacccuggguccucuagggccaacggaggcgaagcuccagagcuggcacucgauccggugccccaagacgccucaaccaagaaacuuagugaaugccugaagcggaucggugaugaguuggacagcaauauggaauuacagcgcaugauugcggcugucgauacagacuccccucgagagguguuuuuccguguugccgcagauauguuuucugacgggaacuucaauuggggaagaguaguggcccuguuuuacuucgcuucgaaauugguccucaaggcacuguguacuaaagugccagagcuuauaaggacgaucaugggcuggacccuggauuuucuacgggaacgccuccugggcuggauucaggaccaagggggaugggauggucugcucucauauuucggcacacccacuuggcagaccguuacaaucuuuguggccggggucuuaaccgcuagccugacuauuuggaagaagaugggauga

SEQ ID NO: 6982 - RNA, 528 nt, Artificial Sequence
  derived and/or modified sequence opt4 from Bax__Homo_sapiens__AFU81108
auggacggcagcggcgagcagcccagaggcggcggcuuccaccccggcagcagcagagccaacggcggcgaggcccccgagcuggcccuggaccccgugccccaggacgccagcaccaagaagcugagcgagugccugaagagaaucggcgacgagcuggacagcaacauggagcugcagagaaugaucgccgccguggacaccgacagccccagagagguguucuucagaguggccgccgacauguucagcgacggcaacuucaacuggggcagagugguggcccuguucuacuucgccagcaagcuggugcugaaggcccugugcaccaaggugcccgagcugaucagaaccaucaugggcuggacccuggacuuccugagagagagacugcugggcuggauccaggaccagggcggcugggacggccugcugagcuacuucggcacccccaccuggcagaccgugaccaucuucguggccggcgugcugaccgccagccugaccaucuggaagaagaugggcuga

SEQ ID NO: 6983 - RNA, 528 nt, Artificial Sequence
  derived and/or modified sequence opt5 from Bax__Homo_sapiens__AFU81108
auggacggcagcggggagcagcccagaggaggcggguuccacccuggauccucucgggccaacggcggggaagcuccggagcuggcccucgaucccgugccucaagacgcgagcaccaagaaacuguccgaaugccuuaagcgcaucggagaugagcuggacucuaauauggaacuccagagaaugauugcugccgucgauacagacagcccccgggagguguuuuuccgcguugccgcugauauguuuuccgacggcaacuucaauuggggcagaguggucgcccuguuuuacuucgcuucuaaacuugugcugaaggcccucuguacgaaaguuccugagcugauccggaccauuaugggguggacacuggauuuucuccgcgaaagacugcuuggauggauccaggaccagggcgggugggauggacugcucagcuauuucggcacccccacauggcaaaccgugacaauuuuugucgcgggggugcugaccgccucccuuacgaucuggaagaagaugggauga

SEQ ID NO: 6984 - RNA, 528 nt, Artificial Sequence
  derived and/or modified sequence opt6 from Bax__Homo_sapiens__AFU81108
auggauggaaguggggaacaaccaagaggaggaggauuucauccaggaaguaguagagcaaauggaggagaagcuccagaauuagcauuagauccaguaccacaagaugcaaguacaaaaaaauuaagugaauguuuaaaaagaauaggagaugaauuagauaguaauauggaauuacaaagaaugauagcagcaguagauacagauucaccaagagaaguauuuuuuagaguagcagcagauauguuuagugauggaaauuuuaauugggguagaguaguagcauuauuuuauuuugcaaguaaauuaguacuaaaagcauuauguacaaaaguaccagaauuaauaagaacaauaaugggauggacauuagauuuuuuaagggaaagauuauuaggauggauacaagaucaaggaggaugggauggauuauuaagcuauuuuggaacaccaacauggcaaacaguaacaauauuuguagcaggaguauuaacagcaaguuuaacaauauggaaaaaaaugggauaa

SEQ ID NO: 6985 - protein, 192 aa, Artificial Sequence
  Bax__Homo_sapiens__Q07812
MDGSGEQPRGGGPTSSEQIMKTGALLLQGFIQDRAGRMGGEAPELALDPVPQDASTKKLSECLKRIGDELDSNMELQRMIAAVDTDSPREVFFRVAADMFSDGNFNWGRVVALFYFASKLVLKALCTKVPELIRTIMGWTLDFLRERLLGWIQDQGGWDGLLSYFGTPTWQTVTIFVAGVLTASLTIWKKMG

SEQ ID NO: 6986 - RNA, 579 nt, Artificial Sequence
  Bax__Homo_sapiens__AAA03619
auggacggguccggggagcagcccagaggcggggggcccaccagcucugagcagaucaugaagacaggggcccuuuugcuucaggguuucauccaggaucgagcagggcgaauggggggggaggcacccgagcuggcccuggacccggugccucaggaugcguccaccaagaagcugagcgagugucucaagcgcaucggggacgaacuggacaguaacauggagcugcagaggaugauugccgccguggacacagacuccccccgagaggucuuuuuccgaguggcagcugacauguuuucugacggcaacuucaacuggggccggguugucgcccuuuucuacuuugccagcaaacuggugcucaaggcccugugcaccaaggugccggaacugaucagaaccaucaugggcuggacauuggacuuccuccgggagcggcuguugggcuggauccaagaccagggugguugggacggccuccucuccuacuuugggacgcccacguggcagaccgugaccaucuuuguggcgggagugcucaccgccucgcucaccaucuggaagaagaugggcuga

SEQ ID NO: 6987 - RNA, 579 nt, Artificial Sequence
  derived and/or modified sequence opt1 from Bax__Homo_sapiens__AAA03619
auggacggcagcggggagcagccccgcggcgggggcccgaccuccagcgagcagaucaugaagaccggggcccugcuccugcagggcuucauccaggaccgggccggccgcaugggcggggaggcgcccgagcuggcccucgaccccgugccccaggacgccuccacgaagaagcugagcgagugccugaagcggaucggggacgagcucgacuccaacauggagcugcagcgcaugaucgccgccgucgacaccgacagcccgcgggagguguucuuccgcguggcggccgacauguucuccgacggcaacuucaacugggggcgggucguggcccuguucuacuucgccagcaagcucgugcugaaggcgcugugcaccaagguccccgagcucauccgcaccaucaugggcuggacgcuggacuuccugcgggagcgccuccugggcuggauccaggaccagggcgggugggacgggcugcucuccuacuucggcacccccaccuggcagaccgugacgaucuucguggccggcguccugaccgccagccugaccaucuggaagaagaugggguga

SEQ ID NO: 6988 - RNA, 579 nt, Artificial Sequence
  derived and/or modified sequence opt2 from Bax__Homo_sapiens__AAA03619
auggacggcuccggcgagcagccccgcggcggcggccccaccuccuccgagcagaucaugaagaccggcgcccuccuccuccagggcuucauccaggaccgcgccggccgcaugggcggcgaggcccccgagcucgcccucgaccccgucccccaggacgccuccaccaagaagcucuccgagugccucaagcgcaucggcgacgagcucgacuccaacauggagcuccagcgcaugaucgccgccgucgacaccgacuccccccgcgaggucuucuuccgcgucgccgccgacauguucuccgacggcaacuucaacuggggccgcgucgucgcccucuucuacuucgccuccaagcucguccucaaggcccucugcaccaagguccccgagcucauccgcaccaucaugggcuggacccucgacuuccuccgcgagcgccuccucggcuggauccaggaccagggcggcugggacggccuccucuccuacuucggcacccccaccuggcagaccgucaccaucuucgucgccggcguccucaccgccucccucaccaucuggaagaagaugggcuga

SEQ ID NO: 6989 - RNA, 579 nt, Artificial Sequence
  derived and/or modified sequence opt3 from Bax__Homo_sapiens__AAA03619
auggacggcagcggggagcagcccagaggagguggcccuaccuccucugaacaaaucaugaagacaggggcccugcuccuucagggauucauucaggauagggcuggccggauggguggggaggcaccagaacuggccuuggacccggugccccaggaugcgucaacuaaaaaguuaagugagugccugaaacgcauaggagacgaacuagauagcaacauggagcuccaacgaaugaucgcugccgucgacacggauuccccucgugagguguuuuucagaguugcagccgacauguuuucugauggcaauuucaacuggggcaggguaguggcucuguuuuacuucgcaucgaaacuuguccugaaggccuuguguaccaaggugccagaacucauucggacaaucaugggguggacucuggacuuucugcgcgagagacucuuaggauggauucaggaucaggguggcugggacgggcugcuuucauauuucggaacccccacauggcagaccguuacuaucuuuguggcuggcgucuugacagccagccugaccauauggaagaaaauggguuga

SEQ ID NO: 6990 - RNA, 579 nt, Artificial Sequence
  derived and/or modified sequence opt4 from Bax__Homo_sapiens__AAA03619
auggacggcagcggcgagcagcccagaggcggcggccccaccagcagcgagcagaucaugaagaccggcgcccugcugcugcagggcuucauccaggacagagccggcagaaugggcggcgaggcccccgagcuggcccuggaccccgugccccaggacgccagcaccaagaagcugagcgagugccugaagagaaucggcgacgagcuggacagcaacauggagcugcagagaaugaucgccgccguggacaccgacagccccagagagguguucuucagaguggccgccgacauguucagcgacggcaacuucaacuggggcagagugguggcccuguucuacuucgccagcaagcuggugcugaaggcccugugcaccaaggugcccgagcugaucagaaccaucaugggcuggacccuggacuuccugagagagagacugcugggcuggauccaggaccagggcggcugggacggccugcugagcuacuucggcacccccaccuggcagaccgugaccaucuucguggccggcgugcugaccgccagccugaccaucuggaagaagaugggcuga

SEQ ID NO: 6991 - RNA, 579 nt, Artificial Sequence
  derived and/or modified sequence opt5 from Bax__Homo_sapiens__AAA03619
auggacggcagcggggagcagcccagaggaggcgggccuaccuccucugaacaaaucaugaagacaggagcccugcuccugcagggcuucauucaggaucgggcugggcgcaugggaggcgaggccccggaacuugcgcuggaccccgugccucaggaugcuagcacgaaaaagcucuccgagugccugaaaagaaucggcgacgaacuugauucuaacauggagcugcaacggaugauugccgccgucgacaccgauagcccccgcgagguguuuuucagaguugcugccgacauguuuuccgaugggaauuucaacuggggacggguggucgcucucuuuuacuucgccucuaagcuggugcugaaagcgcucuguacaaagguuccugaacugauccgcaccauuaugggcuggacacuugacuuucugagagagcggcuccugggguggauccaggaucagggaggcugggacgggcuucugagcuauuucggaacccccacauggcagaccgugacgaucuuugucgccggcgugcucaccgcuucccugacaauuuggaagaaaaugggcuga

SEQ ID NO: 6992 - RNA, 579 nt, Artificial Sequence
  derived and/or modified sequence opt6 from Bax__Homo_sapiens__AAA03619
auggauggaaguggagaacaaccaagaggaggaggaccaacaagcagugaacaaauaaugaaaacaggagcauuauuauuacaaggauuuauacaagauagagcaggaagaaugggaggagaagcaccagaauuagcauuagauccaguaccacaagaugcaagcacaaaaaaacuaagcgaaugcuuaaaaagaauaggagaugaauuagauaguaauauggaauuacaaagaaugauagcagcaguagauacagauaguccaagagaaguauuuuucagaguagcagcagauauguuuagugacggaaauuuuaauuggggaagaguaguagcauuauuuuauuuugcaaguaaauuaguauuaaaagcauuauguacaaaaguaccagaauuaauaagaacaauaaugggauggacauuagauuuucuaagagaaagacuuuuaggauggauacaagaucaaggaggaugggauggacuauuaaguuauuucggaacaccaacauggcaaacaguaacaauauuuguagcaggaguauuaacagcaaguuuaacaauauggaaaaaaauggguuga

SEQ ID NO: 6993 - protein, 233 aa, Artificial Sequence
  Bcl-10__Homo_sapiens__O95999
MEPTAPSLTEEDLTEVKKDALENLRVYLCEKIIAERHFDHLRAKKILSREDTEEISCRTSSRKRAGKLLDYLQENPKGLDTLVESIRREKTQNFLIQKITDEVLKLRNIKLEHLKGLKCSSCEPFPDGATNNLSRSNSDESNFSEKLRASTVMYHPEGESSTTPFFSTNSSLNLPVLEVGRTENTIFSSTTLPRPGDPGAPPLPPDLQLEEEGTCANSSEMFLPLRSRTVSRQ

SEQ ID NO: 6994 - RNA, 702 nt, Artificial Sequence
  Bcl-10__Homo_sapiens__AAC99767
auggagcccaccgcaccgucccucaccgaggaggaccucacugaagugaagaaggacgccuuagaaaauuuacguguauaccugugugagaaaaucauagcugagagacauuuugaucaucuacgugcaaaaaaaauacucaguagagaagacacugaagaaauuucuugucgaacaucaaguagaaaaagggcuggaaaauuguuagacuacuuacaggaaaacccaaaaggucuggacacccuuguugaaucuauucggcgagaaaaaacacagaacuuccugauacagaagauuacagaugaagugcugaaacuuagaaauauaaaacuagaacaucugaaaggacuaaaauguagcaguugugaaccuuuuccagauggagccacgaacaaccucuccagaucaaauucagaugagaguaauuucucugaaaaacugagggcauccacugucauguaccauccagaaggagaauccagcacgacgcccuuuuuuucuacuaauucuucucugaauuugccuguucuagaaguaggcagaacugaaaauaccaucuucucuucaacuacacuucccagaccuggggacccaggggcuccuccuuugccaccagaucuacaguuagaagaagaaggaacuugugcaaacucuagugagauguuucuucccuuaagaucacguacuguuucacgacaauga

SEQ ID NO: 6995 - RNA, 702 nt, Artificial Sequence
  derived and/or modified sequence opt1 from Bcl-10__Homo_sapiens__AAC99767
auggagcccaccgcccccagccugaccgaggaggaccucacggaggugaagaaggacgcccuggagaaccugcgcgucuaccucugcgagaagaucaucgcggagcggcacuucgaccaccuccgcgccaagaagauccugucccgggaggacaccgaggagaucagcugccgcaccuccagccggaagcgcgccggcaagcugcuggacuaccugcaggagaaccccaaggggcucgacacccugguggaguccauccggcgcgagaagacgcagaacuuccugauccagaagaucaccgacgaggugcucaagcugcggaacaucaagcuggagcaccucaagggccugaagugcagcuccugcgagcccuuccccgacggggccaccaacaaccugagccgcuccaacagcgacgaguccaacuucagcgagaagcuccgggccuccaccgucauguaccacccggagggcgagagcuccacgacccccuucuucagcaccaacuccagccugaaccugcccgugcucgagguggggcgcaccgagaacacgaucuucuccagcaccacccugccccggccgggcgaccccggcgcgccgccccugccgcccgaccuccagcuggaggaggaggggaccugcgccaacagcuccgagauguuccugccccuccgcagccggacggucucccgccaguga

SEQ ID NO: 6996 - RNA, 702 nt, Artificial Sequence
  derived and/or modified sequence opt2 from Bcl-10__Homo_sapiens__AAC99767
auggagcccaccgcccccucccucaccgaggaggaccucaccgaggucaagaaggacgcccucgagaaccuccgcgucuaccucugcgagaagaucaucgccgagcgccacuucgaccaccuccgcgccaagaagauccucucccgcgaggacaccgaggagaucuccugccgcaccuccucccgcaagcgcgccggcaagcuccucgacuaccuccaggagaaccccaagggccucgacacccucgucgaguccauccgccgcgagaagacccagaacuuccucauccagaagaucaccgacgagguccucaagcuccgcaacaucaagcucgagcaccucaagggccucaagugcuccuccugcgagcccuuccccgacggcgccaccaacaaccucucccgcuccaacuccgacgaguccaacuucuccgagaagcuccgcgccuccaccgucauguaccaccccgagggcgaguccuccaccacccccuucuucuccaccaacuccucccucaaccuccccguccucgaggucggccgcaccgagaacaccaucuucuccuccaccacccucccccgccccggcgaccccggcgcccccccccucccccccgaccuccagcucgaggaggagggcaccugcgccaacuccuccgagauguuccucccccuccgcucccgcaccgucucccgccaguga

SEQ ID NO: 6997 - RNA, 702 nt, Artificial Sequence
  derived and/or modified sequence opt3 from Bcl-10__Homo_sapiens__AAC99767
auggagcccaccgccccuagccugacagaagaggaccucacugaagugaagaaggaugcucuugagaaccugagagucuacuugugcgaaaagaucauugcagagaggcacuucgaccauuuacgggccaaaaagauacugucccgcgaggauacggaagagaucucuugucgaaccucaagucguaaaagagcgggcaagcuacucgacuaucugcaggaaaauccaaaggggcuugauacacugguugagagcauuaggcgggagaaaacucaaaacuuuuugauccagaagauuaccgacgaagugcucaaacugcgcaauaucaagcuggagcaccucaaaggauuaaagugcuccucuugugaaccguuccccgauggugcuacaaacaaucugucgagaucaaacagcgacgagaguaauuuuuccgaaaaacuuagggccucuaccguaauguaccauccugagggcgagagcuccacuacaccauucuuuucaaccaacaguagcuugaaucugcccgugcuagaagucgggcggacggagaacacuauauucucuuccaccacacucccucgcccaggagaucccggcgcaccuccacugccgcccgaccuucagcuggaagaggaagguacuugcgccaauucaagcgagauguuuuugccucuccgaaguagaaccgugucuaggcaguga

SEQ ID NO: 6998 - RNA, 702 nt, Artificial Sequence
  derived and/or modified sequence opt4 from Bcl-10__Homo_sapiens__AAC99767
auggagcccaccgcccccagccugaccgaggaggaccugaccgaggugaagaaggacgcccuggagaaccugagaguguaccugugcgagaagaucaucgccgagagacacuucgaccaccugagagccaagaagauccugagcagagaggacaccgaggagaucagcugcagaaccagcagcagaaagagagccggcaagcugcuggacuaccugcaggagaaccccaagggccuggacacccugguggagagcaucagaagagagaagacccagaacuuccugauccagaagaucaccgacgaggugcugaagcugagaaacaucaagcuggagcaccugaagggccugaagugcagcagcugcgagcccuuccccgacggcgccaccaacaaccugagcagaagcaacagcgacgagagcaacuucagcgagaagcugagagccagcaccgugauguaccaccccgagggcgagagcagcaccacccccuucuucagcaccaacagcagccugaaccugcccgugcuggaggugggcagaaccgagaacaccaucuucagcagcaccacccugcccagacccggcgaccccggcgcccccccccugccccccgaccugcagcuggaggaggagggcaccugcgccaacagcagcgagauguuccugccccugagaagcagaaccgugagcagacaguga

SEQ ID NO: 6999 - RNA, 702 nt, Artificial Sequence
  derived and/or modified sequence opt5 from Bcl-10__Homo_sapiens__AAC99767
auggagcccaccgccccuagccugacagaagaggaccucacggaagugaagaaagaugcucuggagaaccuuagagucuaccugugcgaaaagaucauugccgagcggcacuucgaccaucuccgcgcgaaaaagauccuguccagagaggauaccgaagagauuucuugucggacaagcucccgcaaaagagcuggcaaacuucuggacuaucuccaggaaaauccgaaggggcuggauacccugguugagucuauccggcgcgagaagacacaaaacuuucucauucagaagaucaccgacgaagugcugaaacuuagaaauaucaagcuggagcaccucaaaggacugaagugcagcuccugugaacccuucccugauggcgccacaaacaaucuuucucggagcaacuccgacgagagcaauuuuucugaaaagcugcgcgccuccaccgugauguaccaucccgagggggagagcucuacgaccccuuucuuuuccacaaacagcucucucaaucugcccguccuggaagugggaagaaccgagaacacaauuuucuccagcaccacgcucccucggccgggcgaucccggggcuccuccccugccucccgaccuucagcuggaagaggaaggaacaugcgccaauuccucugagauguuucucccgcugcgcagcagaaccguuucccggcaguga

SEQ ID NO: 7000 - RNA, 702 nt, Artificial Sequence
  derived and/or modified sequence opt6 from Bcl-10__Homo_sapiens__AAC99767
auggaaccaacagcaccaucacuaaccgaagaagaccuaacagaagucaaaaaagacgcacuagaaaaccuaagaguauaccuaugcgaaaaaauaauagcagaaagacacuucgaccaccuaagagcaaaaaaaauccuauccagagaagacacagaagaaauaucaugcagaacaucaagcagaaaaagagcaggaaaacuauuagacuaccuucaagaaaacccaaaaggcuuagacacucuaguagaauccauaagaagagaaaaaacacaaaacuucuuaauacaaaaaauaacagacgaaguacuaaaauuaagaaacauaaaacuugaacaccuaaaaggacuaaaaugcucaucaugcgaaccauucccagauggagcaacaaacaaccuaucaagaucaaacuccgacgaaucaaacuucuccgaaaaacuacgagcaucaacaguaauguaccacccagaaggagaaagcuccacaacaccauuuuucaguacaaacucaucacuaaaccuaccaguauuagaaguaggaagaacagaaaacacaauauucucaucaacaacacuaccaagaccaggagacccaggagcaccaccacucccaccagaccuacaacuagaagaagaaggaacaugcgccaacucaagcgaaauguuccuaccacuaagaucaagaacaguaucaagacaauaa

SEQ ID NO: 7001 - protein, 195 aa, Artificial Sequence
  Bid__Homo_sapiens__A8ASI8
MDCEVNNGSSLRDECITNLLVFGFLQSCSDNSFRRELDALGHELPVLAPQWEGYDELQTDGNRSSHSRLGRIEADSESQEDIIRNIARHLAQVGDSMDRSIPPGLVNGLALQLRNTSRSEEDRNRDLATALEQLLQAYPRDMEKEKTMLVLALLLAKKVASHTPSLLRDVFHTTVNFINQNLRTYVRSLARNGMD

SEQ ID NO: 7002 - RNA, 588 nt, Artificial Sequence
  Bid__Homo_sapiens__ACD47108
auggacugugaggucaacaacgguuccagccucagggaugagugcaucacaaaccuacugguguuuggcuuccuccaaagcuguucugacaacagcuuccgcagagagcuggacgcacugggccacgagcugccagugcuggcuccccagugggagggcuacgaugagcugcagacugauggcaaccgcagcagccacucccgcuugggaagaauagaggcagauucugaaagucaagaagacaucauccggaauauugccaggcaccucgcccaggucggggacagcauggaccguagcaucccuccgggccuggugaacggccuggcccugcagcucaggaacaccagccggucggaggaggaccggaacagggaccuggccacugcccuggagcagcugcugcaggccuacccuagagacauggagaaggagaagaccaugcuggugcuggcccugcugcuggccaagaagguggccagucacacgccguccuugcuccgugaugucuuucacacaacagugaauuuuauuaaccagaaccuacgcaccuacgugaggagcuuagccagaaaugggauggacuga

SEQ ID NO: 7003 - RNA, 588 nt, Artificial Sequence
  derived and/or modified sequence opt1 from Bid__Homo_sapiens__ACD47108
auggacugcgaggugaacaacggcagcucccugcgcgacgagugcaucaccaaccuccuggucuucggguuccugcagagcugcuccgacaacagcuuccggcgcgagcucgacgcccugggccacgagcugcccgugcucgccccgcagugggagggguacgacgagcugcagaccgacggcaaccgguccagccacucccgccuggggcggaucgaggcggacagcgagucccaggaggacaucauccgcaacaucgcccggcaccucgcccaggugggcgacagcauggaccgcuccaucccgcccggccuggucaacgggcuggcccuccagcugcggaacacgagccgcuccgaggaggaccggaaccgcgaccuggccaccgcgcucgagcagcugcugcaggccuacccccgggacauggagaaggagaagaccaugcucgugcuggcccugcuccuggccaagaagguggcgagccacacccccucccugcuccgcgacgucuuccacacgaccgugaacuucaucaaccagaaccugcggaccuacgugcgcagccuggcccggaacggcauggacuga

SEQ ID NO: 7004 - RNA, 588 nt, Artificial Sequence
  derived and/or modified sequence opt2 from Bid__Homo_sapiens__ACD47108
auggacugcgaggucaacaacggcuccucccuccgcgacgagugcaucaccaaccuccucgucuucggcuuccuccaguccugcuccgacaacuccuuccgccgcgagcucgacgcccucggccacgagcuccccguccucgccccccagugggagggcuacgacgagcuccagaccgacggcaaccgcuccucccacucccgccucggccgcaucgaggccgacuccgagucccaggaggacaucauccgcaacaucgcccgccaccucgcccaggucggcgacuccauggaccgcuccaucccccccggccucgucaacggccucgcccuccagcuccgcaacaccucccgcuccgaggaggaccgcaaccgcgaccucgccaccgcccucgagcagcuccuccaggccuacccccgcgacauggagaaggagaagaccaugcucguccucgcccuccuccucgccaagaaggucgccucccacacccccucccuccuccgcgacgucuuccacaccaccgucaacuucaucaaccagaaccuccgcaccuacguccgcucccucgcccgcaacggcauggacuga

SEQ ID NO: 7005 - RNA, 588 nt, Artificial Sequence
  derived and/or modified sequence opt3 from Bid__Homo_sapiens__ACD47108
auggacugcgaagugaacaauggcagcucccugagagaugaauguaucaccaaccuccuugucuucggguuucugcagucuugcucagacaauaguuucaggcgggaguuggaugccuuaggacacgaacugcccguucuagcuccucaaugggaggguuacgacgaacuccagacagauggcaaccgcagcucccauucucgacuggggcguauugaggcagacucggagucacaggaagauauaaucagaaauauugccaggcaccuugcucaggugggagacagcauggaucggaguaucccaccgggccugguaaacgguuuggcgcuccaacugcgcaauacuuccagaucugaggaagacaggaaccgggaucuggccacggcacucgagcaguuacugcaggccuauccccgcgacauggagaaggagaaaaccaugcuuguguuggcucugcuacucgcaaagaaagucgccagccauacaccuucccugcuucgagauguguuucacacuaccguuaauuucauuaaccagaaucugagaacauacgugaggucauuggcucggaacgggauggacuga

SEQ ID NO: 7006 - RNA, 588 nt, Artificial Sequence
  derived and/or modified sequence opt4 from Bid__Homo_sapiens__ACD47108
auggacugcgaggugaacaacggcagcagccugagagacgagugcaucaccaaccugcugguguucggcuuccugcagagcugcagcgacaacagcuucagaagagagcuggacgcccugggccacgagcugcccgugcuggccccccagugggagggcuacgacgagcugcagaccgacggcaacagaagcagccacagcagacugggcagaaucgaggccgacagcgagagccaggaggacaucaucagaaacaucgccagacaccuggcccaggugggcgacagcauggacagaagcaucccccccggccuggugaacggccuggcccugcagcugagaaacaccagcagaagcgaggaggacagaaacagagaccuggccaccgcccuggagcagcugcugcaggccuaccccagagacauggagaaggagaagaccaugcuggugcuggcccugcugcuggccaagaagguggccagccacacccccagccugcugagagacguguuccacaccaccgugaacuucaucaaccagaaccugagaaccuacgugagaagccuggccagaaacggcauggacuga

SEQ ID NO: 7007 - RNA, 588 nt, Artificial Sequence
  derived and/or modified sequence opt5 from Bid__Homo_sapiens__ACD47108
auggacugcgaagugaacaauggcagcucccugagagaugaauguaucaccaaccuccuggucuucggguuucuucagucuugcagcgacaauuccuuccggcgcgagcuggaugcccucggacacgaacugcccguucuugcuccucaaugggagggcuacgacgaacugcagacagaugggaacagaucuagccauucccggcucggacgcauugaggccgacucugagagccaggaagauaucauuagaaauaucgcgcggcaccuggcucaggugggcgacuccauggaucgcagcauuccgcccgggcuggugaacggacucgcccugcaacuuagaaauacgucucgguccgaggaagaccgcaacagagaucuggccaccgcucucgagcagcugcuucaggccuauccucgggacauggagaaggagaaaacaaugcugguccucgcucugcugcucgccaagaaaguggcgagccauacccccucucugcuucgcgauguuuuucacacaaccgugaauuucaucaaccagaaucugagaacauacguccggucccucgcccgcaacggcauggacuga

SEQ ID NO: 7008 - RNA, 588 nt, Artificial Sequence
  derived and/or modified sequence opt6 from Bid__Homo_sapiens__ACD47108
auggauugcgaaguaaauaacggaucaucacuaagagacgaaugcauaacaaaucuauuaguauuuggauuucuacaaaguuguagcgauaacucauucagaagagaacuagaugcauuaggacaugaauuaccaguacuagcaccacaaugggaaggauaugacgaauuacaaacagauggaaauagaucaagccauaguagacuaggaagaauagaagcagacucagaaucacaagaagacauaauacgaaacauagcaagacacuuagcacaaguaggagacucaauggauagaucgauaccaccaggacuaguaaacggacuagcacuacaacuaagaaacacaaguagaagcgaagaagauagaaauagagaucuagcaacagcacuagaacaacuacuacaagcuuauccaagagacauggaaaaagaaaaaacaaugcuaguacuagcacuauuacucgcaaaaaaaguagcaagucacacaccaagcuuauuaagagacguauuccauacaacaguaaauuucauaaaccaaaacuuaagaacauacguaagaucauuagcaagaaauggaauggacuaa

SEQ ID NO: 7009 - protein, 122 aa, Artificial Sequence
  Bid__Homo_sapiens__B2ZP78
MDCEVNNGSSLRDECITNLLVFGFLQSCSDNSFRRELDALGHELPVLAPQWEGYDELQTDGNRSSHSRLGRIEAGASDNNTASAEEETEAAGSVAVERGLHGAATVVLGQGQHGGCAPEEED

SEQ ID NO: 7010 - RNA, 369 nt, Artificial Sequence
  Bid__Homo_sapiens__ACD47106
auggacugugaggucaacaacgguuccagccucagggaugagugcaucacaaaccuacugguguuuggcuuccuccaaagcuguucugacaacagcuuccgcagagagcuggacgcacugggccacgagcugccagugcuggcuccccagugggagggcuacgaugagcugcagacugauggcaaccgcagcagccacucccgcuugggaagaauagaggcaggggcgucagacaauaacacagcaagugcugaggaagaaacggaggcggcagggagcguggcaguugagcguggccuucauggagcugcgacagugguacucgggcaggggcagcacggaggcugugcgccagaggaggaggacuga

SEQ ID NO: 7011 - RNA, 369 nt, Artificial Sequence
  derived and/or modified sequence opt1 from Bid__Homo_sapiens__ACD47106
auggacugcgaggugaacaacggcagcucccugcgcgacgagugcaucaccaaccuccuggucuucggguuccugcagagcugcuccgacaacagcuuccggcgcgagcucgacgcccugggccacgagcugcccgugcucgccccgcagugggagggguacgacgagcugcagaccgacggcaaccgguccagccacucccgccuggggcggaucgaggcgggcgccagcgacaacaacacggccuccgccgaggaggagaccgaggccgcgggcagcguggccgucgagcgcgggcuccacggcgccgccaccguggugcuggggcagggccagcacgggggcugcgcgcccgaggaggaggacuga

SEQ ID NO: 7012 - RNA, 369 nt, Artificial Sequence
  derived and/or modified sequence opt2 from Bid__Homo_sapiens__ACD47106
auggacugcgaggucaacaacggcuccucccuccgcgacgagugcaucaccaaccuccucgucuucggcuuccuccaguccugcuccgacaacuccuuccgccgcgagcucgacgcccucggccacgagcuccccguccucgccccccagugggagggcuacgacgagcuccagaccgacggcaaccgcuccucccacucccgccucggccgcaucgaggccggcgccuccgacaacaacaccgccuccgccgaggaggagaccgaggccgccggcuccgucgccgucgagcgcggccuccacggcgccgccaccgucguccucggccagggccagcacggcggcugcgcccccgaggaggaggacuga

SEQ ID NO: 7013 - RNA, 369 nt, Artificial Sequence
  derived and/or modified sequence opt3 from Bid__Homo_sapiens__ACD47106
auggacugcgaggugaacaauggcagcucccugagagaugaauguaucaccaaccuccuugucuucggguuucugcagucuugcucagacaauaguuucaggcgggaguuggaugccuuaggacacgaacugcccguucuagcuccucaaugggaggguuacgacgaacuccagacagauggcaaccgcagcucccauucucgacuggggcguauugaggcaggagccucggacaauaacacugcgucagcugaggaagagacggaagccgcaggcagcguggccguagagagaggucuucacggggcugcaaccgugguccugggacagggccagcauggcgggugugccccagaggaagaggauuga

SEQ ID NO: 7014 - RNA, 369 nt, Artificial Sequence
  derived and/or modified sequence opt4 from Bid__Homo_sapiens__ACD47106
auggacugcgaggugaacaacggcagcagccugagagacgagugcaucaccaaccugcugguguucggcuuccugcagagcugcagcgacaacagcuucagaagagagcuggacgcccugggccacgagcugcccgugcuggccccccagugggagggcuacgacgagcugcagaccgacggcaacagaagcagccacagcagacugggcagaaucgaggccggcgccagcgacaacaacaccgccagcgccgaggaggagaccgaggccgccggcagcguggccguggagagaggccugcacggcgccgccaccguggugcugggccagggccagcacggcggcugcgcccccgaggaggaggacuga

SEQ ID NO: 7015 - RNA, 369 nt, Artificial Sequence
  derived and/or modified sequence opt5 from Bid__Homo_sapiens__ACD47106
auggacugcgaggugaacaauggcagcucccugagagaugaauguaucaccaaccuccuggucuucggguuucuucagucuugcagcgacaauuccuuccggcgcgagcuggaugcccucggacacgaacugcccguucuugcuccucaaugggagggcuacgacgaacugcagacagaugggaacagaucuagccauucccggcucggacgcauugaggccggcgcgucugacaauaacacggcuagcgccgaggaagagaccgaagccgcuggguccguggccguggagagaggacugcacggcgcugccacagucgugcugggccaggggcagcauggaggcugugcgccggaggaagaggauuga

SEQ ID NO: 7016 - RNA, 369 nt, Artificial Sequence
  derived and/or modified sequence opt6 from Bid__Homo_sapiens__ACD47106
auggauugugaaguaaauaauggaaguaguuuaagagaugaauguauaacaaauuuauuaguauuuggauuuuuacaaaguuguagugauaauaguuuuagaagagaauuagaugcauuaggacaugaauuaccaguauuagcaccacaaugggaaggauaugaugaacuacaaacagauggaaauagaaguagucauagcagauuaggaagaauagaagcaggagcaagugauaauaauacagcaagugcagaagaagaaacagaagcagcaggaagcguagcaguagaaagaggauuacauggagcagcaacaguaguacuaggacaaggacaacauggaggaugugcaccagaagaagaagauuaa

SEQ ID NO: 7017 - protein, 99 aa, Artificial Sequence
  Bid__Homo_sapiens__B2ZP79
MDRSIPPGLVNGLALQLRNTSRSEEDRNRDLATALEQLLQAYPRDMEKEKTMLVLALLLAKKVASHTPSLLRDVFHTTVNFINQNLRTYVRSLARNGMD

SEQ ID NO: 7018 - RNA, 300 nt, Artificial Sequence
  Bid__Homo_sapiens__ACD47107
auggaccguagcaucccuccgggccuggugaacggccuggcccugcagcucaggaacaccagccggucggaggaggaccggaacagggaccuggccacugcccuggagcagcugcugcaggccuacccuagagacauggagaaggagaagaccaugcuggugcuggcccugcugcuggccaagaagguggccagucacacgccguccuugcuccgugaugucuuucacacaacagugaauuuuauuaaccagaaccuacgcaccuacgugaggagcuuagccagaaaugggauggacuga

SEQ ID NO: 7019 - RNA, 300 nt, Artificial Sequence
  derived and/or modified sequence opt1 from Bid__Homo_sapiens__ACD47107
auggaccgcagcaucccgcccggccuggugaacgggcucgcccugcagcugcggaacaccucccgcagcgaggaggaccggaaccgcgaccucgccaccgcgcuggagcagcugcuccaggccuacccccgggacauggagaaggagaagacgaugcugguccuggcccuccugcuggccaagaagguggccucccacacccccagccuccugcgcgacguguuccacaccaccgucaacuucaucaaccagaaccugcggacguacgugcgcucccucgcgcggaacggcauggacuga

SEQ ID NO: 7020 - RNA, 300 nt, Artificial Sequence
  derived and/or modified sequence opt2 from Bid__Homo_sapiens__ACD47107
auggaccgcuccaucccccccggccucgucaacggccucgcccuccagcuccgcaacaccucccgcuccgaggaggaccgcaaccgcgaccucgccaccgcccucgagcagcuccuccaggccuacccccgcgacauggagaaggagaagaccaugcucguccucgcccuccuccucgccaagaaggucgccucccacacccccucccuccuccgcgacgucuuccacaccaccgucaacuucaucaaccagaaccuccgcaccuacguccgcucccucgcccgcaacggcauggacuga

SEQ ID NO: 7021 - RNA, 300 nt, Artificial Sequence
  derived and/or modified sequence opt3 from Bid__Homo_sapiens__ACD47107
auggacagaagcauucccccuggccuggugaacgggcucgcccuucagcugaggaauaccucccggucugaggaagaucgcaaccgagacuuggcuacagcauuagagcaacugcuacaggccuacccacgugauauggaaaaggagaaaacuaugcucguccuggcgcuucuguuggcuaagaaaguugccucacacacgccgagucuccugagagacguguuccauaccacaguaaauuuuaucaaccagaaucugaggacuuaugugcggagccucgcacgcaacggaauggauuga

SEQ ID NO: 7022 - RNA, 300 nt, Artificial Sequence
  derived and/or modified sequence opt4 from Bid__Homo_sapiens__ACD47107
auggacagaagcaucccccccggccuggugaacggccuggcccugcagcugagaaacaccagcagaagcgaggaggacagaaacagagaccuggccaccgcccuggagcagcugcugcaggccuaccccagagacauggagaaggagaagaccaugcuggugcuggcccugcugcuggccaagaagguggccagccacacccccagccugcugagagacguguuccacaccaccgugaacuucaucaaccagaaccugagaaccuacgugagaagccuggccagaaacggcauggacuga

SEQ ID NO: 7023 - RNA, 300 nt, Artificial Sequence
  derived and/or modified sequence opt5 from Bid__Homo_sapiens__ACD47107
auggacagaagcauucccccuggccuggugaacgggcucgcccugcagcuucggaauaccucccgcucugaggaagauagaaaccgggaccuggcuacagcccucgagcaacugcuucaggcguacccgcgcgauauggaaaaggagaaaacgaugcugguccucgcucugcugcucgccaagaaaguugccagccacacccccucccugcuuagagacguguuccauacaaccgugaauuuuaucaaccagaaucugcggacauauguccgcucucucgcuagaaacggaauggauuga

SEQ ID NO: 7024 - RNA, 300 nt, Artificial Sequence
  derived and/or modified sequence opt6 from Bid__Homo_sapiens__ACD47107
auggacagaucaauaccaccaggacuaguaaacggacucgcacuacaacuaagaaacacaagcagaagcgaagaagacagaaacagagaccuagcaacagcacuagaacaacuacuacaagcauacccaagagacauggaaaaagaaaaaacaaugcuaguauuagcacuacuacuagcaaaaaaaguagcaagccacacaccaagccuacuaagagacguauuccauacaacaguaaacuucauaaaccaaaaccuaagaacauacguaagaucacuagcaagaaacggaauggacuaa

SEQ ID NO: 7025 - protein, 195 aa, Artificial Sequence; identical to SEQ ID NO: 7001
  Bid__Homo_sapiens__P55957

SEQ ID NO: 7026 - RNA, 588 nt, Artificial Sequence; identical to SEQ ID NO: 7002
  Bid__Homo_sapiens__AAC34365

SEQ ID NO: 7027 - RNA, 588 nt, Artificial Sequence; identical to SEQ ID NO: 7003
  derived and/or modified sequence opt1 from Bid__Homo_sapiens__AAC34365

SEQ ID NO: 7028 - RNA, 588 nt, Artificial Sequence; identical to SEQ ID NO: 7004
  derived and/or modified sequence opt2 from Bid__Homo_sapiens__AAC34365

SEQ ID NO: 7029 - RNA, 588 nt, Artificial Sequence; identical to SEQ ID NO: 7005
  derived and/or modified sequence opt3 from Bid__Homo_sapiens__AAC34365

SEQ ID NO: 7030 - RNA, 588 nt, Artificial Sequence; identical to SEQ ID NO: 7006
  derived and/or modified sequence opt4 from Bid__Homo_sapiens__AAC34365

SEQ ID NO: 7031 - RNA, 588 nt, Artificial Sequence; identical to SEQ ID NO: 7007
  derived and/or modified sequence opt5 from Bid__Homo_sapiens__AAC34365

SEQ ID NO: 7032 - RNA, 588 nt, Artificial Sequence
  derived and/or modified sequence opt6 from Bid__Homo_sapiens__AAC34365
auggauugcgaaguaaauaacggaagcucacuaagagacgaaugcauaacaaaucuauuaguauuuggauuuuuacaaagcuguagcgauaacaguuucagaagagaacuagacgcacucggacaugaacuaccaguacuagcaccacaaugggaaggauaugacgaacuacaaacagauggaaauagaucaagccauagcagacuaggaagaauagaagcagacucagaaucacaagaagacauaauaagaaacauagcaagacaccuugcacaaguaggagacuccauggauagaucaauaccaccaggacuaguaaacggacuagcacuacaacuaagaaacacaagcagaucagaagaagacagaaauagagaucuagcaacagcccuagaacaauuacuacaagcauauccaagagacauggaaaaagaaaaaacaauguuaguacuagcacuauuauuagcaaaaaaaguagcaagccauacaccaucauuacuaagagacguauuccauacaacaguaaacuucauaaaccaaaaccuaagaacauacguacgaucucuagcaagaaauggaauggacuaa

SEQ ID NO: 7033 - protein, 160 aa, Artificial Sequence
  Bik__Homo_sapiens__A0A024R4X6
MSEVRPLSRDILMETLLYEQLLEPPTMEVLGMTDSEEDLDPMEDFDSLECMEGSDALALRLACIGDEMDVSLRAPRLAQLSEVAMHSLGLAFIYDQTEDIRDVLRSFMDGFTTLKENIMRFWRSPNPGSWVSCEQVLLALLLLLALLLPLLSGGLHLLLK

SEQ ID NO: 7034 - RNA, 483 nt, Artificial Sequence
  Bik__Homo_sapiens__EAW73284
augucugaaguaagaccccucuccagagacaucuugauggagacccuccuguaugagcagcuccuggaacccccgaccauggagguucuuggcaugacugacucugaagaggaccuggacccuauggaggacuucgauucuuuggaaugcauggagggcagugacgcauuggcccugcggcuggccugcaucggggacgagauggacgugagccucagggccccgcgccuggcccagcucuccgagguggccaugcacagccugggucuggcuuucaucuacgaccagacugaggacaucagggauguucuuagaaguuucauggacgguuucaccacacuuaaggagaacauaaugagguucuggagauccccgaaccccggguccuggguguccugcgaacaggugcugcuggcgcugcugcugcugcuggcgcugcugcugccgcugcucagcgggggccugcaccugcugcucaaguga

SEQ ID NO: 7035 - RNA, 483 nt, Artificial Sequence
  derived and/or modified sequence opt1 from Bik__Homo_sapiens__EAW73284
augagcgaggugcgcccccugucccgggacauccucauggagacccugcuguacgagcagcuccuggagccgcccaccauggaggugcugggcaugacggacagcgaggaggaccucgaccccauggaggacuucgacucccuggagugcauggaggggagcgacgcccuggcccuccgccuggcgugcaucggcgacgagauggacgugucccugcgggcgccccgccucgcccagcugagcgagguggccaugcacucccuggggcucgccuucaucuacgaccagaccgaggacauccgggacguccugcgcagcuucauggacggcuucaccacccugaaggagaacaucaugcgguucuggcgcuccccgaaccccgggagcuggguguccugcgagcagguccuccuggcccugcuccugcugcucgcccugcugcucccccugcugagcggcggccuccaccuccugcugaaguga

SEQ ID NO: 7036 - RNA, 483 nt, Artificial Sequence
  derived and/or modified sequence opt2 from Bik__Homo_sapiens__EAW73284
auguccgagguccgcccccucucccgcgacauccucauggagacccuccucuacgagcagcuccucgagccccccaccauggagguccucggcaugaccgacuccgaggaggaccucgaccccauggaggacuucgacucccucgagugcauggagggcuccgacgcccucgcccuccgccucgccugcaucggcgacgagauggacgucucccuccgcgccccccgccucgcccagcucuccgaggucgccaugcacucccucggccucgccuucaucuacgaccagaccgaggacauccgcgacguccuccgcuccuucauggacggcuucaccacccucaaggagaacaucaugcgcuucuggcgcucccccaaccccggcuccugggucuccugcgagcagguccuccucgcccuccuccuccuccucgcccuccuccucccccuccucuccggcggccuccaccuccuccucaaguga

SEQ ID NO: 7037 - RNA, 483 nt, Artificial Sequence
  derived and/or modified sequence opt3 from Bik__Homo_sapiens__EAW73284
augagcgaggugagaccccuguccagggacauccucauggaaacccuucuguacgagcaguuguuagaaccuccaacaauggagguccugggcaugacugauucugaagaggaccuagauccgauggaggacuucgauucacucgaaugcauggaggggagugacgcccuggcccuucggcuggcauguauuggagaugaaauggacguuagcuugcgcgcuccccgacucgcgcaacuguccgagguggcuaugcacucucugggucucgccuuuauauaugaucagacggaggacauccgugauguauuaagaucguucauggacggcuuuaccacacugaaggaaaacauuaugagguucuggcggucaccuaauccagggagcugggugaguugcgagcagguccuuuuggcacugcuacuccugcuugcccuguugcucccccuguuauccggaggccugcaucuccuucugaaauga

SEQ ID NO: 7038 - RNA, 483 nt, Artificial Sequence
  derived and/or modified sequence opt4 from Bik__Homo_sapiens__EAW73284
augagcgaggugagaccccugagcagagacauccugauggagacccugcuguacgagcagcugcuggagccccccaccauggaggugcugggcaugaccgacagcgaggaggaccuggaccccauggaggacuucgacagccuggagugcauggagggcagcgacgcccuggcccugagacuggccugcaucggcgacgagauggacgugagccugagagcccccagacuggcccagcugagcgagguggccaugcacagccugggccuggccuucaucuacgaccagaccgaggacaucagagacgugcugagaagcuucauggacggcuucaccacccugaaggagaacaucaugagauucuggagaagccccaaccccggcagcugggugagcugcgagcaggugcugcuggcccugcugcugcugcuggcccugcugcugccccugcugagcggcggccugcaccugcugcugaaguga

SEQ ID NO: 7039 - RNA, 483 nt, Artificial Sequence
  derived and/or modified sequence opt5 from Bik__Homo_sapiens__EAW73284
augagcgaggugagaccccugucccgggacauccucauggagacccugcuuuacgagcagcugcucgaaccuccgacaauggagguccugggcaugacggauucugaagaggaccuugaucccauggaggacuucgauagccuggaaugcauggagggguccgacgcccucgcucugcgccuggccuguauuggagaugaaauggacguuucucucagagcgccucggcuggcucaacuuagcgagguggccaugcacucccugggccucgccuuuaucuaugaucagaccgaggacauucgcgaugugcugagaucuuucauggacggguuuacaacccuuaaggaaaacaucaugcgguucuggcgcagccccaauccuggauccugggucagcugcgaacaggugcugcucgcucugcugcuccugcuugcccugcuccugccccuucugucuggcgggcuccaucugcugcucaaauga

SEQ ID NO: 7040 - RNA, 483 nt, Artificial Sequence
  derived and/or modified sequence opt6 from Bik__Homo_sapiens__EAW73284
augucugaaguaagaccacuaucaagagauauauuaauggaaacauuauuauaugaacaacuauuagaaccucccacaauggaaguauuaggaaugacagauagugaagaagaucuagauccaauggaagauuucgauaguuuagaauguauggaaggaucagacgcauuagcacuaagacuagcaugcauaggagaugaaauggacguaagcuuaagagcaccaagauuagcacaacuaagugaaguagcaaugcauagcuuaggauuagcauuuauauaugaccaaacagaagacauaagagauguauuaagaucauucauggacggauucacaacauuaaaagaaaacauaaugagauucuggagaucaccaaauccaggaagcuggguaucaugcgaacaaguacuacuagcauuauuauuacuauuagcauuauuauuaccauuauuaucaggcggacuacaucuauuacuaaaauaa

SEQ ID NO: 7041 - protein, 160 aa, Artificial Sequence; identical to SEQ ID NO: 7033
  Bik__Homo_sapiens__Q13323

SEQ ID NO: 7042 - RNA, 483 nt, Artificial Sequence; identical to SEQ ID NO: 7034
  Bik__Homo_sapiens__AAC50413

SEQ ID NO: 7043 - RNA, 483 nt, Artificial Sequence; identical to SEQ ID NO: 7035
  derived and/or modified sequence opt1 from Bik__Homo_sapiens__AAC50413

SEQ ID NO: 7044 - RNA, 483 nt, Artificial Sequence; identical to SEQ ID NO: 7036
  derived and/or modified sequence opt2 from Bik__Homo_sapiens__AAC50413

SEQ ID NO: 7045 - RNA, 483 nt, Artificial Sequence; identical to SEQ ID NO: 7037
  derived and/or modified sequence opt3 from Bik__Homo_sapiens__AAC50413

SEQ ID NO: 7046 - RNA, 483 nt, Artificial Sequence; identical to SEQ ID NO: 7038
  derived and/or modified sequence opt4 from Bik__Homo_sapiens__AAC50413

SEQ ID NO: 7047 - RNA, 483 nt, Artificial Sequence; identical to SEQ ID NO: 7039
  derived and/or modified sequence opt5 from Bik__Homo_sapiens__AAC50413

SEQ ID NO: 7048 - RNA, 483 nt, Artificial Sequence
  derived and/or modified sequence opt6 from Bik__Homo_sapiens__AAC50413
augucagaaguaagaccacuaucaagagauauauuaauggaaacauuauuauaugaacaacuauuagaaccaccaacaauggaaguauuaggaaugacagauagugaagaagaucuagauccaauggaagauuucgauagcuuagaauguauggaaggaucagacgcauuagcacuaagacuagcaugcauaggagaugaaauggacguaaguuuaagagcaccaagacuagcacaauuaagugaaguagcaaugcauagcuuaggauuagcauuuauauaugaccaaaccgaagacauaagagauguauuaagaucauucauggacggauucacaacauuaaaagaaaacauaaugagauucuggagaucaccaaauccaggaagcuggguaucaugcgaacaaguacuacuagcauuacuauuacuauuagcauuacuauuaccacuacuaucuggaggacuacaucuauuacuaaaauaa

SEQ ID NO: 7049 - protein, 198 aa, Artificial Sequence
  Bim__Homo_sapiens__O43521
MAKQPSDVSSECDREGRQLQPAERPPQLRPGAPTSLQTEPQGNPEGNHGGEGDSCPHGSPQGPLAPPASPGPFATRSPLFIFMRRSSLLSRSSSGYFSFDTDRSPAPMSCDKSTQTPSPPCQAFNHYLSAMASMRQAEPADMRPEIWIAQELRRIGDEFNAYYARRVFLNNYQAAEDHPRMVILRLLRYIVRLVWRMH

SEQ ID NO: 7050 - RNA, 597 nt, Artificial Sequence
  Bim__Homo_sapiens__AAC39593
auggcaaagcaaccuucugauguaaguucugagugugaccgagaagguagacaauugcagccugcggagaggccuccccagcucagaccuggggccccuaccucccuacagacagagccacaagguaauccugaaggcaaucacggaggugaaggggacagcugcccccacggcagcccucagggcccgcuggccccaccugccagcccuggcccuuuugcuaccagauccccgcuuuucaucuuuaugagaagauccucccugcugucucgauccuccaguggguauuucucuuuugacacagacaggagcccagcacccaugaguugugacaaaucaacacaaaccccaaguccuccuugccaggccuucaaccacuaucucagugcaauggcuuccaugaggcaggcugaaccugcagauaugcgcccagagauauggaucgcccaagaguugcggcguaucggagacgaguuuaacgcuuacuaugcaaggaggguauuuuugaauaauuaccaagcagccgaagaccacccacgaaugguuaucuuacgacuguuacguuacauuguccgccugguguggagaaugcauuga

SEQ ID NO: 7051 - RNA, 597 nt, Artificial Sequence
  derived and/or modified sequence opt1 from Bim__Homo_sapiens__AAC39593
auggccaagcagcccagcgacguguccagcgagugcgaccgcgagggccggcagcugcagccggccgagcgcccgccccagcuccggcccggggcgcccaccucccugcagaccgagccccagggcaaccccgaggggaaccacggcggggagggcgacagcugcccccacggcuccccgcaggggccccuggccccgcccgccagccccggccccuucgccacgcgcagcccccucuucaucuucaugcggcgcuccucccugcugagccgguccagcuccggguacuucagcuucgacaccgaccgcucccccgccccgaugagcugcgacaaguccacccagacccccagcccgcccugccaggcguucaaccacuaccucuccgccauggccagcaugcggcaggccgagcccgcggacaugcgccccgagaucuggaucgcccaggagcugcggcgcaucggcgacgaguucaacgccuacuacgcccggcgcgucuuccugaacaacuaccaggccgcggaggaccacccccggauggugauccuccgccugcugcgguacaucgugcgccucgucuggcggaugcacuga

SEQ ID NO: 7052 - RNA, 597 nt, Artificial Sequence
  derived and/or modified sequence opt2 from Bim__Homo_sapiens__AAC39593
auggccaagcagcccuccgacgucuccuccgagugcgaccgcgagggccgccagcuccagcccgccgagcgccccccccagcuccgccccggcgcccccaccucccuccagaccgagccccagggcaaccccgagggcaaccacggcggcgagggcgacuccugcccccacggcuccccccagggcccccucgccccccccgccucccccggccccuucgccacccgcuccccccucuucaucuucaugcgccgcuccucccuccucucccgcuccuccuccggcuacuucuccuucgacaccgaccgcucccccgcccccauguccugcgacaaguccacccagacccccuccccccccugccaggccuucaaccacuaccucuccgccauggccuccaugcgccaggccgagcccgccgacaugcgccccgagaucuggaucgcccaggagcuccgccgcaucggcgacgaguucaacgccuacuacgcccgccgcgucuuccucaacaacuaccaggccgccgaggaccacccccgcauggucauccuccgccuccuccgcuacaucguccgccucgucuggcgcaugcacuga

SEQ ID NO: 7053 - RNA, 597 nt, Artificial Sequence
  derived and/or modified sequence opt3 from Bim__Homo_sapiens__AAC39593
auggccaagcagcccagcgacguguccucugagugcgauagagaaggcaggcaacugcagccugcugagcggccaccgcagcuccgccccggggcaccuaccucacuucagacagaaccacaaggaaaccccgaggguaaucacggcggggaaggagacaguuguccucauggcagcccacaggguccccuggccccuccagcguccccggggcccuucgcuacucgaucuccuuuguuuaucuucaugcguagaucgucauuacugagcaggaguuccucuggauacuuuagcuucgauacggaccgguccccagcccccaugucaugcgauaaaaguacccagacaccuagcccacccugucaggcauuuaaccacuaucuaucugccauggcuuccaugcgccaagcagagccggccgacaugagaccugagauuuggauagcucaggaacucaggcggaucggcgaugaguucaaugccuacuaugcgcgccgagucuuucugaacaauuaccaggcagccgaagaccaucccagaaugguuauucuuaggcuguugcgguauaucgugcgucucguauggcgcaugcacuga

SEQ ID NO: 7054 - RNA, 597 nt, Artificial Sequence
  derived and/or modified sequence opt4 from Bim__Homo_sapiens__AAC39593
auggccaagcagcccagcgacgugagcagcgagugcgacagagagggcagacagcugcagcccgccgagagacccccccagcugagacccggcgcccccaccagccugcagaccgagccccagggcaaccccgagggcaaccacggcggcgagggcgacagcugcccccacggcagcccccagggcccccuggccccccccgccagccccggccccuucgccaccagaagcccccuguucaucuucaugagaagaagcagccugcugagcagaagcagcagcggcuacuucagcuucgacaccgacagaagccccgcccccaugagcugcgacaagagcacccagacccccagcccccccugccaggccuucaaccacuaccugagcgccauggccagcaugagacaggccgagcccgccgacaugagacccgagaucuggaucgcccaggagcugagaagaaucggcgacgaguucaacgccuacuacgccagaagaguguuccugaacaacuaccaggccgccgaggaccaccccagaauggugauccugagacugcugagauacaucgugagacugguguggagaaugcacuga

SEQ ID NO: 7055 - RNA, 597 nt, Artificial Sequence
  derived and/or modified sequence opt5 from Bim__Homo_sapiens__AAC39593
auggccaagcagcccagcgacguguccucugagugcgauagagaaggccggcaacugcagccugcugagcgcccgccccagcucagaccuggggcccccaccagccugcagacagaaccucaaggaaaccccgagggcaaucacgggggagaaggcgacuccuguccucaugggucuccgcagggaccccuugcgccucccgcuagcccuggccccuucgccacgcgguccccgcuguuuaucuucaugcgcagaucuagccuccugucccggucuagcuccggcuacuuuagcuucgauaccgaccgcucuccugcccccauguccugcgauaaaagcacacagaccccuucuccucccugucaggcuuuuaaccacuaucuuuccgccauggcuagcaugagacaagccgagcccgcggacaugcggccggagauuuggaucgcccaggaacugcgcagaauuggggaugaguucaaugcuuacuaugcccggcgcgucuuucucaacaauuaccaggcugccgaagaccaucccagaaugguuauccugcggcugcuccgcuauauugugagacugguguggcggaugcacuga

SEQ ID NO: 7056 - RNA, 597 nt, Artificial Sequence
  derived and/or modified sequence opt6 from Bim__Homo_sapiens__AAC39593
auggcaaaacaaccaagcgacguaucaucagaaugugacagagaaggaagacaauuacaaccagcagaaagaccuccacaauuaagaccaggagcaccaacaucacuacaaacagaaccacaaggcaauccagaaggaaaucacggaggagaaggagacucauguccacacggaucaccacaaggaccauuagcaccaccagcaucaccaggaccauuugcaacaagaucaccacuauucauauucaugcgaagaucaucacuauuaucaagaucaucaucaggauacuuuucauuugacacagacagaaguccagcaccaaugucaugcgauaaaucaacacaaacaccaucaccaccaugucaagcauucaaucacuaucuaucagcaauggcaucaaugagacaagcagaaccagccgacaugagaccagaaauauggauagcacaagaacuaagacgaauaggagaugaauucaacgcauacuaugcaagaagaguauucuuaaacaauuaccaagcagcagaagaucacccaagaaugguaauauuacgacuauuaagauauauaguaagauuaguauggagaaugcacuaa

SEQ ID NO: 7057 - protein, 505 aa, Artificial Sequence
  Blk__Homo_sapiens__P51451
MGLVSSKKPDKEKPIKEKDKGQWSPLKVSAQDKDAPPLPPLVVFNHLTPPPPDEHLDEDKHFVVALYDYTAMNDRDLQMLKGEKLQVLKGTGDWWLARSLVTGREGYVPSNFVARVESLEMERWFFRSQGRKEAERQLLAPINKAGSFLIRESETNKGAFSLSVKDVTTQGELIKHYKIRCLDEGGYYISPRITFPSLQALVQHYSKKGDGLCQRLTLPCVRPAPQNPWAQDEWEIPRQSLRLVRKLGSGQFGEVWMGYYKNNMKVAIKTLKEGTMSPEAFLGEANVMKALQHERLVRLYAVVTKEPIYIVTEYMARGCLLDFLKTDEGSRLSLPRLIDMSAQIAEGMAYIERMNSIHRDLRAANILVSEALCCKIADFGLARIIDSEYTAQEGAKFPIKWTAPEAIHFGVFTIKADVWSFGVLLMEVVTYGRVPYPGMSNPEVIRNLERGYRMPRPDTCPPELYRGVIAECWRSRPEERPTFEFLQSVLEDFYTATERQYELQP

SEQ ID NO: 7058 - RNA, 1518 nt, Artificial Sequence
  Blk__Homo_sapiens__AAH07371
auggggcugguaaguagcaaaaagccggacaaggaaaagccgaucaaagagaaggacaagggccaauggagcccccugaaggucagcgcccaagacaaggacgccccgccacugccgccccugguugucuucaaccaccuuacuccuccaccgcccgaugaacaccuggaugaagacaagcauuucgugguggcucuguaugacuacaccgcuaugaaugaucgggaccugcagaugcugaagggggagaagcuacagguccugaagggaacuggagacugguggcuggccaggucacucgucacaggaagagaaggcuaugugcccagcaacuuuguggcccgaguggagagccuggaaauggaaaggugguucuuuagaucacagggucggaaggaggcugagaggcagcuucuugcuccaaucaacaaggccggcuccuuucuuaucagagagagugaaaccaacaaaggugccuucucccugucugugaaggaugucaccacccagggggagcugaucaagcacuauaagauccgcugccuggaugaagggggcuacuacaucuccccccggaucaccuuccccucgcuccaggcccuggugcagcacuauucuaagaagggggauggucuaugccagaggcugacccugcccugugugcgcccggccccgcagaaucccugggcccaggaugaaugggagaucccccggcagucucucaggcuggucaggaaacucgggucuggacaauucggcgaagucuggauggguuacuacaaaaacaacaugaagguggccauuaagacgcugaaggagggaaccaugucuccagaagccuuucugggugaggccaacgugaugaaggcucugcagcacgagcggcugguccgacucuacgcaguggucaccaaggagcccaucuacauugucaccgaguacauggccagaggaugccugcuggauuuccugaagacagaugaagggagcagauugucacucccaaggcugauugacaugucggcgcagauugcugaagggauggcauacauugagcgcaugaauuccauccaccgcgaccugcgggcggccaacauccuggugucugaggccuugugcugcaaaauugcugauuuuggcuuggcucgaaucaucgacagugaauacacggcccaagagggggccaaguuccccaucaaguggacagccccggaagccauccacuucggggucuucaccaucaaagcagacguguggucguuuggaguccuccugauggaaguugucacuuaugggcgggugccauacccagggaugagcaaccccgaggucauccgcaaccuggagcgcggcuaccgcaugccgcgccccgacaccugcccgcccgagcuguaccgcggcgucaucgccgagugcuggcgcagccggcccgaggagcggcccaccuucgaguuccugcagucggugcuggaggacuucuacacggccaccgagcggcaguacgagcugcagcccuag

SEQ ID NO: 7059 - RNA, 1518 nt, Artificial Sequence
  derived and/or modified sequence opt1 from Blk__Homo_sapiens__AAH07371
augggccuggugagcuccaagaagcccgacaaggagaagccgaucaaggagaaggacaaggggcaguggagcccccucaaggucuccgcccaggacaaggacgccccgccccugccgccccuggugguguucaaccaccucaccccgccgccgcccgacgagcaccuggacgaggacaagcacuucgucguggcgcuguacgacuacaccgccaugaacgaccgcgaccuccagaugcugaagggcgagaagcuccaggugcugaaggggacgggcgacugguggcuggcccggagccuggucaccgggcgcgagggcuacgugcccuccaacuucguggcccgggucgagagccucgagauggagcgcugguucuuccggucccagggccgcaaggaggccgagcggcagcugcuggcgcccaucaacaaggccgggagcuuccucauccgcgaguccgagaccaacaagggcgccuucagccuguccgugaaggacgugaccacgcagggggagcugaucaagcacuacaagauccggugccucgacgagggcggguacuacaucagcccccgcaucaccuuccccucccugcaggcccugguccagcacuacagcaagaagggcgacggccucugccagcggcugacccugcccugcgugcgccccgcgccccagaaccccugggcccaggacgagugggagaucccccggcagucccuccgccuggugcggaagcuggggagcggccaguucggggaggucuggaugggcuacuacaagaacaacaugaagguggccaucaagacccucaaggagggcacgaugucccccgaggccuuccugggggaggccaacgugaugaaggcgcugcagcacgagcgccucguccggcuguacgccguggugaccaaggagcccaucuacaucgucaccgaguacauggcccgcggcugccugcucgacuuccugaagaccgacgaggggagccggcugucccucccccgccugaucgacaugagcgcccagaucgccgagggcauggcguacaucgagcggaugaacagcauccaccgcgaccugcgcgccgccaacauccucguguccgaggcccugugcugcaagaucgccgacuucgggcuggcgcggaucaucgacagcgaguacacggcccaggagggcgccaaguuccccaucaaguggaccgcccccgaggccauccacuucggcguguucaccaucaaggcggacgucugguccuucggggugcuccugauggaggucgugaccuacggccgcgugccguaccccgggaugagcaaccccgaggucauccggaaccuggagcgcggcuaccggaugccccgcccggacacgugcccgcccgagcucuaccgcggggugaucgccgagugcuggcggucccggcccgaggagcgccccaccuucgaguuccugcagagcgugcuggaggacuucuacaccgccaccgagcggcaguacgagcuccagcccuga

SEQ ID NO: 7060 - RNA, 1518 nt, Artificial Sequence
  derived and/or modified sequence opt2 from Blk__Homo_sapiens__AAH07371
augggccucgucuccuccaagaagcccgacaaggagaagcccaucaaggagaaggacaagggccagugguccccccucaaggucuccgcccaggacaaggacgcccccccccuccccccccucgucgucuucaaccaccucaccccccccccccccgacgagcaccucgacgaggacaagcacuucgucgucgcccucuacgacuacaccgccaugaacgaccgcgaccuccagaugcucaagggcgagaagcuccagguccucaagggcaccggcgacugguggcucgcccgcucccucgucaccggccgcgagggcuacguccccuccaacuucgucgcccgcgucgagucccucgagauggagcgcugguucuuccgcucccagggccgcaaggaggccgagcgccagcuccucgcccccaucaacaaggccggcuccuuccucauccgcgaguccgagaccaacaagggcgccuucucccucuccgucaaggacgucaccacccagggcgagcucaucaagcacuacaagauccgcugccucgacgagggcggcuacuacaucuccccccgcaucaccuuccccucccuccaggcccucguccagcacuacuccaagaagggcgacggccucugccagcgccucacccuccccugcguccgccccgccccccagaaccccugggcccaggacgagugggagaucccccgccagucccuccgccucguccgcaagcucggcuccggccaguucggcgaggucuggaugggcuacuacaagaacaacaugaaggucgccaucaagacccucaaggagggcaccaugucccccgaggccuuccucggcgaggccaacgucaugaaggcccuccagcacgagcgccucguccgccucuacgccgucgucaccaaggagcccaucuacaucgucaccgaguacauggcccgcggcugccuccucgacuuccucaagaccgacgagggcucccgccucucccucccccgccucaucgacauguccgcccagaucgccgagggcauggccuacaucgagcgcaugaacuccauccaccgcgaccuccgcgccgccaacauccucgucuccgaggcccucugcugcaagaucgccgacuucggccucgcccgcaucaucgacuccgaguacaccgcccaggagggcgccaaguuccccaucaaguggaccgcccccgaggccauccacuucggcgucuucaccaucaaggccgacgucugguccuucggcguccuccucauggaggucgucaccuacggccgcguccccuaccccggcauguccaaccccgaggucauccgcaaccucgagcgcggcuaccgcaugccccgccccgacaccugcccccccgagcucuaccgcggcgucaucgccgagugcuggcgcucccgccccgaggagcgccccaccuucgaguuccuccaguccguccucgaggacuucuacaccgccaccgagcgccaguacgagcuccagcccuga

SEQ ID NO: 7061 - RNA, 1518 nt, Artificial Sequence
  derived and/or modified sequence opt3 from Blk__Homo_sapiens__AAH07371
augggccuggugagcuccaagaaacccgacaaggagaaaccuaucaaggaaaaagauaaggggcaguggucuccacucaaggucucagcccaagacaaagaugcuccgccccuuccuccacugguuguguucaaccacuugacacccccuccacccgacgagcauuuagaugaagacaagcacuuuguaguggcacuguacgauuauaccgccaugaaugacagagaucuacagaugcucaaaggagagaagcugcagguccuuaaagguacuggcgacugguggcuggcgaggaguuuggugacggggcgggaaggauacguuccuagcaacuucguggcucgcgucgagucccucgagauggaacgaugguuuuuccguucucagggcagaaaggaggccgaaaggcaacugcuggcaccaauuaauaaggccgguucguuucucauacgggagucagagaccaacaaaggggcuuucagcuuaagugugaaggauguaacaacucagggagaacugaucaaacauuauaagauucgcugccuugacgagggcggcuacuauaucuccccgagaauuaccuuucccucuuugcaggcacugguucagcacuacagcaaaaagggggauggacuaugucaaaggcucacacugccuugcgugcggccagcuccccagaauccuugggcccaggacgaaugggagaucccacgccagucccuucgacuggucagaaaauuggguucaggccaauucggggaaguguggaugggauauuacaagaacaauaugaagguggccauaaaaacccucaaggagggcacuaugagucccgaggcguuucugggugaagcaaacgucaugaaagccuuacagcaugagaggcugguucggcucuacgcugugguaacaaaggaaccgaucuauauugugaccgaguacauggcccgugggugucuucuggacuucuugaaaacggaugaaggaagccgccuaucucugccuagacucaucgacauguccgcacagauugcugagggcauggccuauaucgagaggaugaacucaauacaccgggaucugcgagcggccaauauucuugucagcgaagcacugugcuguaagaucgcugacuuuggcuuggcccgcauuaucgauagugaguacacugcucaagaaggggccaaguuccccaucaaauggaccgcaccagaggccauucacuuuggaguguucacaauaaaggcugacguuuggucuuucggugugcuccugauggaagucgugacuuauggcagaguaccuuaccccgggauguccaauccagagguuaucaggaacuuagagcggggauaucgcaugcccagaccugauaccugcccaccggaacuguacaggggcgugauugcggaguguuggcguagccggcccgaggaacgaccuacauuugaguuccuacagucgguccucgaagacuuuuacaccgcaacggagagacaguaugaacugcagccauga

SEQ ID NO: 7062 - RNA, 1518 nt, Artificial Sequence
  derived and/or modified sequence opt4 from Blk__Homo_sapiens__AAH07371
augggccuggugagcagcaagaagcccgacaaggagaagcccaucaaggagaaggacaagggccaguggagcccccugaaggugagcgcccaggacaaggacgcccccccccugcccccccuggugguguucaaccaccugaccccccccccccccgacgagcaccuggacgaggacaagcacuucgugguggcccuguacgacuacaccgccaugaacgacagagaccugcagaugcugaagggcgagaagcugcaggugcugaagggcaccggcgacugguggcuggccagaagccuggugaccggcagagagggcuacgugcccagcaacuucguggccagaguggagagccuggagauggagagaugguucuucagaagccagggcagaaaggaggccgagagacagcugcuggcccccaucaacaaggccggcagcuuccugaucagagagagcgagaccaacaagggcgccuucagccugagcgugaaggacgugaccacccagggcgagcugaucaagcacuacaagaucagaugccuggacgagggcggcuacuacaucagccccagaaucaccuuccccagccugcaggcccuggugcagcacuacagcaagaagggcgacggccugugccagagacugacccugcccugcgugagacccgccccccagaaccccugggcccaggacgagugggagauccccagacagagccugagacuggugagaaagcugggcagcggccaguucggcgagguguggaugggcuacuacaagaacaacaugaagguggccaucaagacccugaaggagggcaccaugagccccgaggccuuccugggcgaggccaacgugaugaaggcccugcagcacgagagacuggugagacuguacgccguggugaccaaggagcccaucuacaucgugaccgaguacauggccagaggcugccugcuggacuuccugaagaccgacgagggcagcagacugagccugcccagacugaucgacaugagcgcccagaucgccgagggcauggccuacaucgagagaaugaacagcauccacagagaccugagagccgccaacauccuggugagcgaggcccugugcugcaagaucgccgacuucggccuggccagaaucaucgacagcgaguacaccgcccaggagggcgccaaguuccccaucaaguggaccgcccccgaggccauccacuucggcguguucaccaucaaggccgacguguggagcuucggcgugcugcugauggagguggugaccuacggcagagugcccuaccccggcaugagcaaccccgaggugaucagaaaccuggagagaggcuacagaaugcccagacccgacaccugcccccccgagcuguacagaggcgugaucgccgagugcuggagaagcagacccgaggagagacccaccuucgaguuccugcagagcgugcuggaggacuucuacaccgccaccgagagacaguacgagcugcagcccuga

SEQ ID NO: 7063 - RNA, 1518 nt, Artificial Sequence
  derived and/or modified sequence opt5 from Blk__Homo_sapiens__AAH07371
augggccuggugagcuccaagaaacccgacaaggagaaaccuaucaaggaaaaagauaaggggcaguggucuccgcucaaggucagcgcccaagacaaagaugcucccccucugcccccucuuguuguguucaaccaccugacacccccuccgcccgacgagcaucucgaugaagacaagcacuuuguggucgcccuguacgauuauaccgcgaugaaugacagagaucuucagaugcugaaaggagagaagcuccaggugcugaaaggcacgggggacugguggcuggcucggucccucguuaccggacgcgaaggcuacgugccuucuaacuucgucgccagaguggagagccuggagauggaacggugguuuuuccgcucccaggggagaaaggaggccgaacggcaacuucuggcucccauuaauaaggccggaucuuuucucauccgcgagagcgagacaaacaaaggcgcuuucucccugagcguuaaggaugugaccacacagggcgaacuuauuaaacauuauaagaucagaugccuggacgaagggggauacuauauuucuccucggaucaccuuucccucccuccaggcccugguccagcacuacagcaaaaagggcgaugggcugugucaacgccucacacugccgugcgugagaccugcgccccagaauccuugggcccaggacgaaugggagaucccccggcagucucuucgccuggugagaaaacucggauccggccaauucggggaagucuggaugggauauuacaagaacaauaugaagguugcuauuaaaacccugaaggagggcacgaugagccccgaggccuuucuuggcgaagcuaacgugaugaaagcccugcagcaugagcggcucgugcgccuguacgcggucgugaccaaggaaccuaucuauauuguuacagaguacauggccagagggugucugcucgacuuccugaaaaccgaugaaggaucucggcuuucccugccgagacucaucgacaugagcgcucagauugccgagggcauggcuuauaucgagcgcaugaacuccauucaccgggaucugagagccgccaauauccuugugucugaagcucugugcuguaagaucgcggacuuugggcucgcccgcauuaucgauagcgaguacacagcucaagaaggagccaaguuccccauuaaauggaccgccccugaggcuauccacuuuggcgucuucacgauuaaggccgacgugugguccuucgggguucugcugauggaaguggucacauauggacgggugcccuacccuggcaugagcaaucccgaggucaucagaaaccucgagcgcggcuaucggaugccgagaccugauaccugucccccugaacuguaccgcggggugaucgcggagugcuggcggucuagacccgaggagcgcccuacauuugaguuccuucaguccguucuggaagacuuuuacaccgcuaccgagcggcaguaugaacuccagcccuga

SEQ ID NO: 7064 - RNA, 1518 nt, Artificial Sequence
  derived and/or modified sequence opt6 from Blk__Homo_sapiens__AAH07371
augggauuaguaucaucaaaaaaaccagauaaagaaaaaccaauaaaagaaaaagauaaaggacaauggagcccauuaaaaguaucagcacaagacaaagacgcaccaccauuaccaccccucgugguguuuaaucaccuuacacccccuccaccagaugaacacuuagacgaagauaaacauuuugucguagcauuauacgauuauacagcaaugaacgacagagaucuacaaaugcugaaaggagaaaaacuacaaguacucaagggaacaggugauuggugguuagcgagaucauuaguaacaggaagagaaggauauguaccaaguaacuuuguagcaagagucgaaagucuagaaauggaacgaugguucuuuagaucacaaggaagaaaagaagcagagcgacaauuauuagcaccaauaaauaaagcaggaagcuuccucauaagagaaagcgaaacuaauaaaggagcauuuucauuaucaguaaaagauguaaccacacaaggagaacuaauaaaacauuauaaaauaagaugccuagaugaaggcggauauuacauaucaccacgcauaacauuucccaguuuacaagcacuaguacagcauuauucaaaaaaaggcgauggauuaugccaaagacuaacauuaccauguguaagaccagcaccacagaacccaugggcacaagaugaaugggaaauaccaagacaaucacuuagauuaguaagaaaauuaggcuccggacaauuuggugaaguauggauggguuacuacaaaaauaacaugaaaguagcuaucaaaacauuaaaagaagguacaaugucaccagaagccuucuuaggagaagcaaauguaaugaaagcucuccaacacgaacgauuagugagacuuuacgcaguaguaacaaaagaaccaauauacauagucacagaauauauggcaaggggaugucuccuagacuuucuaaaaacagaugaaggaucaagacuaucacuaccaagacuaauagauaugagcgcacaaauagcugaaggcauggccuauauugaaagaaugaauaguauccauagagacuuacgagcagcaaacauauuaguuagugaagccuuaugcuguaaaauagcagauuuuggacuagcacgaauaauagacucagaauacacugcacaggaaggugcuaaauucccaauaaaauggacagcuccggaagcaauacacuuuggaguauuuacaauaaaagcggacguuuggucauuuggagucuuacuaauggaaguaguaacauauggaagaguuccauauccaggaaugucaaacccagaaguaauaagaaaccuagaaagaggauauagaaugccaagaccagauacauguccaccagaauuauacagaggcguuauagcggaaugcuggagaaguaggccugaagaaagaccaacauuugaauuuuuacaaucaguacuagaagauuuuuacacugcaacagaaagacaguacgaauuacaaccauaa

SEQ ID NO: 7065 - protein, 277 aa, Artificial Sequence
  Caspase_3__Homo_sapiens__P42574
MENTENSVDSKSIKNLEPKIIHGSESMDSGISLDNSYKMDYPEMGLCIIINNKNFHKSTGMTSRSGTDVDAANLRETFRNLKYEVRNKNDLTREEIVELMRDVSKEDHSKRSSFVCVLLSHGEEGIIFGTNGPVDLKKITNFFRGDRCRSLTGKPKLFIIQACRGTELDCGIETDSGVDDDMACHKIPVEADFLYAYSTAPGYYSWRNSKDGSWFIQSLCAMLKQYADKLEFMHILTRVNRKVATEFESFSFDATFHAKKQIPCIVSMLTKELYFYH

SEQ ID NO: 7066 - RNA, 834 nt, Artificial Sequence
  Caspase_3__Homo_sapiens__AAA74929
auggagaacacugaaaacucaguggauucaaaauccauuaaaaauuuggaaccaaagaucauacauggaagcgaaucaauggacucuggaauaucccuggacaacaguuauaaaauggauuauccugagauggguuuauguauaauaauuaauaauaagaauuuucauaaaagcacuggaaugacaucucggucugguacagaugucgaugcagcaaaccucagggaaacauucagaaacuugaaauaugaagucaggaauaaaaaugaucuuacacgugaagaaauuguggaauugaugcgugauguuucuaaagaagaucacagcaaaaggagcaguuuuguuugugugcuucugagccauggugaagaaggaauaauuuuuggaacaaauggaccuguugaccugaaaaaaauaacaaacuuuuucagaggggaucguuguagaagucuaacuggaaaacccaaacuuuucauuauucaggccugccgugguacagaacuggacuguggcauugagacagacagugguguugaugaugacauggcgugucauaaaauaccaguggaggccgacuucuuguaugcauacuccacagcaccugguuauuauucuuggcgaaauucaaaggauggcuccugguucauccagucgcuuugugccaugcugaaacaguaugccgacaagcuugaauuuaugcacauucuuacccggguuaaccgaaagguggcaacagaauuugaguccuuuuccuuugacgcuacuuuucaugcaaagaaacagauuccauguauuguuuccaugcucacaaaagaacucuauuuuuaucacuaa

SEQ ID NO: 7067 - RNA, 834 nt, Artificial Sequence
  derived and/or modified sequence opt1 from Caspase_3__Homo_sapiens__AAA74929
auggagaacaccgagaacagcguggacuccaagagcaucaagaaccuggagcccaagaucauccacggcuccgagagcauggacuccgggaucagccucgacaacuccuacaagauggacuacccggagaugggccugugcaucaucaucaacaacaagaacuuccacaagagcaccgggaugacgucccgcagcggcaccgacgucgacgccgccaaccugcgggagaccuuccgcaaccucaaguacgaggugcggaacaagaacgaccugacccgcgaggagaucguggagcugaugcgggacgucuccaaggaggaccacagcaagcgcuccagcuucgugugcgugcuccugucccacggggaggagggcaucaucuucggcacgaacgggcccgucgaccugaagaagaucaccaacuucuuccggggcgaccgcugccggagccucaccgggaagcccaagcuguucaucauccaggcgugccgcggcaccgagcuggacugcgggaucgagacggacuccggcguggacgacgacauggccugccacaagauccccguggaggccgacuuccucuacgccuacagcaccgccccgggcuacuacuccuggcggaacagcaaggacgggagcugguucauccagucccugugcgcgaugcugaagcaguacgccgacaagcucgaguucaugcacauccugacccgcgucaaccggaagguggccaccgaguucgagagcuucuccuucgacgccacguuccacgcgaagaagcagauccccugcaucgugagcaugcugaccaaggagcucuacuucuaccacuga

SEQ ID NO: 7068 - RNA, 834 nt, Artificial Sequence
  derived and/or modified sequence opt2 from Caspase_3__Homo_sapiens__AAA74929
auggagaacaccgagaacuccgucgacuccaaguccaucaagaaccucgagcccaagaucauccacggcuccgaguccauggacuccggcaucucccucgacaacuccuacaagauggacuaccccgagaugggccucugcaucaucaucaacaacaagaacuuccacaaguccaccggcaugaccucccgcuccggcaccgacgucgacgccgccaaccuccgcgagaccuuccgcaaccucaaguacgagguccgcaacaagaacgaccucacccgcgaggagaucgucgagcucaugcgcgacgucuccaaggaggaccacuccaagcgcuccuccuucgucugcguccuccucucccacggcgaggagggcaucaucuucggcaccaacggccccgucgaccucaagaagaucaccaacuucuuccgcggcgaccgcugccgcucccucaccggcaagcccaagcucuucaucauccaggccugccgcggcaccgagcucgacugcggcaucgagaccgacuccggcgucgacgacgacauggccugccacaagauccccgucgaggccgacuuccucuacgccuacuccaccgcccccggcuacuacuccuggcgcaacuccaaggacggcuccugguucauccagucccucugcgccaugcucaagcaguacgccgacaagcucgaguucaugcacauccucacccgcgucaaccgcaaggucgccaccgaguucgaguccuucuccuucgacgccaccuuccacgccaagaagcagauccccugcaucgucuccaugcucaccaaggagcucuacuucuaccacuga

SEQ ID NO: 7069 - RNA, 834 nt, Artificial Sequence
  derived and/or modified sequence opt3 from Caspase_3__Homo_sapiens__AAA74929
auggagaacaccgaaaauagcguggacuccaagucuaucaaaaaccuggagcccaagauuauacacggcucagaaaguauggauagcgggaucucccucgacaauucuuacaaaauggauuauccugagaugggacuuugcauuaucauuaacaauaagaacuuccauaaaucgacagguaugacuucaagaagcggcacggacgucgaugccgcuaaucugagggaaaccuuucggaacuugaaguacgagguucgcaauaagaacgacuuaacacgagaggaaaucguggagcugaugcgugauguaaguaaagaagaccacuccaagagaucuagcuucguguguguccuacucucccauggggaggagggaauaaucuuuggcacuaaugguccaguggaucugaaaaagauuaccaacuucuuuaggggagaccggugccgcucacuuacagggaaaccgaagcuguucaucauucaggcauguagaggcaccgaauuggauugcggcaucgagacugacagugggguugaugacgacauggccugucacaagauacccguggaagcggauuuucucuaugcuuacagcacagccccuggauauuacucuuggaggaacuccaaagacgguucaugguucauucaaagccugugcgcaaugcugaagcaguaugccgauaaacucgaguuuaugcauaucuuaacccgggucaaucgcaagguggcuacggaguucgaaaguuuuucuuucgacgcaacuuuucacgccaaaaagcagauuccauguaucguauccaugcugaccaaagagcuuuacuucuaccacuga

SEQ ID NO: 7070 - RNA, 834 nt, Artificial Sequence
  derived and/or modified sequence opt4 from Caspase_3__Homo_sapiens__AAA74929
auggagaacaccgagaacagcguggacagcaagagcaucaagaaccuggagcccaagaucauccacggcagcgagagcauggacagcggcaucagccuggacaacagcuacaagauggacuaccccgagaugggccugugcaucaucaucaacaacaagaacuuccacaagagcaccggcaugaccagcagaagcggcaccgacguggacgccgccaaccugagagagaccuucagaaaccugaaguacgaggugagaaacaagaacgaccugaccagagaggagaucguggagcugaugagagacgugagcaaggaggaccacagcaagagaagcagcuucgugugcgugcugcugagccacggcgaggagggcaucaucuucggcaccaacggccccguggaccugaagaagaucaccaacuucuucagaggcgacagaugcagaagccugaccggcaagcccaagcuguucaucauccaggccugcagaggcaccgagcuggacugcggcaucgagaccgacagcggcguggacgacgacauggccugccacaagauccccguggaggccgacuuccuguacgccuacagcaccgcccccggcuacuacagcuggagaaacagcaaggacggcagcugguucauccagagccugugcgccaugcugaagcaguacgccgacaagcuggaguucaugcacauccugaccagagugaacagaaagguggccaccgaguucgagagcuucagcuucgacgccaccuuccacgccaagaagcagauccccugcaucgugagcaugcugaccaaggagcuguacuucuaccacuga

SEQ ID NO: 7071 - RNA, 834 nt, Artificial Sequence
  derived and/or modified sequence opt5 from Caspase_3__Homo_sapiens__AAA74929
auggagaacaccgaaaauagcguggacuccaagucuaucaaaaaccuggagcccaagauuauccacggcagcgaauccauggauucugggauuagccucgacaauuccuacaaaauggauuauccugagaugggacugugcaucauuaucaacaauaagaacuuccauaaaucuacaggcaugacgagcagauccgggaccgacgucgaugccgcuaaucuucgggaaacauuucgcaaccugaaguacgagguuagaaauaagaacgaccucacccgggaggaaaucguggagcugaugcgcgaugugagcaaagaagaccacucuaagagauccagcuucgucugugugcuucugucucauggagaggagggcauuaucuuugggacaaauggaccgguugaucucaaaaagauuaccaacuucuuucggggcgaccgcugcagaucccugacaggcaaacccaagcuguucaucauucaggccugucgggggaccgaacucgauugcggaaucgagacggacagcggcguggaugacgacauggcgugucacaagauuccugucgaagcugauuuucuguaugccuacucuaccgcccccggguauuacuccuggcgcaauagcaaagacggauccugguucauccaaucucuuugcgcuaugcugaagcaguaugccgauaaacucgaguuuaugcauauccugacaagagugaaccggaagguugcuaccgaauuugagagcuucuccuucgacgccacauuucacgcgaaaaagcagauuccuuguaucgugagcaugcuuaccaaagagcuguacuucuaccacuga

SEQ ID NO: 7072 - RNA, 834 nt, Artificial Sequence
  derived and/or modified sequence opt6 from Caspase_3__Homo_sapiens__AAA74929
auggaaaacacagaaaauagcguagacucaaaaucaauaaaaaaccuagaaccaaaaauaauacacggaucagaaucaauggacucaggaauaagccuagacaacucauacaaaauggauuacccagaaaugggauuaugcauaauaauaaacaacaaaaacuuccauaaaucaacaggaaugaccucaagaagcggcacagacguagacgcagcaaaccuaagagaaacauucagaaaccuaaaauacgaaguaagaaacaaaaacgaccuaacaagagaagaaauaguagaacuaaugagagacguaucaaaagaagaccauuccaaaagaucaucauucguaugcguacuacuaagccacggagaagaaggaauaauauucggaaccaacggaccaguagaccuaaaaaaaauuaccaacuuuuuucgaggagacagaugccgaucacuaaccggaaaaccaaaauuauucauaauacaagcaugcagaggcacagaacuagacugcggaauagaaacagacucaggaguagacgacgacauggcaugccacaaaauacccguagaagcagauuuccuauaugcauacaguacagcaccaggauacuauucauggagaaacucaaaagacggcagcugguucauacaaucacuaugcgcaauguuaaaacaauacgcagacaaacuagaauucaugcacauauuaacaagaguaaacagaaaaguagcaacagaauucgaaucauucagcuucgacgcaacauuccacgcaaaaaaacaaauaccaugcauaguaucaaugcuaacaaaagaacuauacuucuaccacuaa

SEQ ID NO: 7073 - protein, 293 aa, Artificial Sequence
  Caspase_6__Homo_sapiens__P55212
MSSASGLRRGHPAGGEENMTETDAFYKREMFDPAEKYKMDHRRRGIALIFNHERFFWHLTLPERRGTCADRDNLTRRFSDLGFEVKCFNDLKAEELLLKIHEVSTVSHADADCFVCVFLSHGEGNHIYAYDAKIEIQTLTGLFKGDKCHSLVGKPKIFIIQACRGNQHDVPVIPLDVVDNQTEKLDTNITEVDAASVYTLPAGADFLMCYSVAEGYYSHRETVNGSWYIQDLCEMLGKYGSSLEFTELLTLVNRKVSQRRVDFCKDPSAIGKKQVPCFASMLTKKLHFFPKSN

SEQ ID NO: 7074 - RNA, 882 nt, Artificial Sequence
  Caspase_6__Homo_sapiens__AAH00305
augagcucggccucggggcuccgcagggggcacccggcagguggggaagaaaacaugacagaaacagaugccuucuauaaaagagaaauguuugauccggcagaaaaguacaaaauggaccacaggaggagaggaauugcuuuaaucuucaaucaugagagguucuuuuggcacuuaacacugccagaaaggcggggcaccugcgcagauagagacaaucuuacccgcagguuuucagaucuaggauuugaagugaaaugcuuuaaugaucuuaaagcagaagaacuacugcucaaaauucaugaggugucaacuguuagccacgcagaugccgauugcuuugugugugucuuccugagccauggcgaaggcaaucacauuuaugcauaugaugcuaaaaucgaaauucagacauuaacuggcuuguucaaaggagacaagugucacagccugguuggaaaacccaagauauuuaucauucaggcaugucggggaaaccagcacgaugugccagucauuccuuuggauguaguagauaaucagacagagaaguuggacaccaacauaacugagguggaugcagccuccguuuacacgcugccugcuggagcugacuuccucauguguuacucuguugcagaaggauauuauucucaccgggaaacugugaacggcucaugguacauucaagauuugugugagauguugggaaaauauggcuccuccuuagaguucacagaacuccucacacuggugaacaggaaaguuucucagcgccgaguggacuuuugcaaagacccaagugcaauuggaaagaagcagguucccuguuuugccucaaugcuaacuaaaaagcugcauuucuuuccaaaaucuaauuaa

SEQ ID NO: 7075 - RNA, 882 nt, Artificial Sequence
  derived and/or modified sequence opt1 from Caspase_6__Homo_sapiens__AAH00305
augagcuccgccagcggccugcgccgggggcaccccgccggcggggaggagaacaugaccgagaccgacgcguucuacaagcgcgagauguucgacccggccgagaaguacaagauggaccaccggcgccggggcaucgcccucaucuucaaccacgagcgcuucuucuggcaccugacgcugcccgagcggcgcgggaccugcgccgaccgggacaaccucacccgccgguucuccgaccugggcuucgaggugaagugcuucaacgaccugaaggccgaggagcuccugcugaagauccacgaggugagcaccgugucccacgcggacgccgacugcuucgugugcgucuuccucagccacggcgaggggaaccacaucuacgccuacgacgccaagaucgagauccagacgcugaccggccuguucaagggggacaagugccacucccucgugggcaagcccaagaucuucaucauccaggcgugccgcgggaaccagcacgacgugcccgucaucccgcuggacgugguggacaaccagaccgagaagcuggacaccaacaucacggaggucgacgccgccagcguguacacccuccccgccggcgccgacuuccugaugugcuacuccguggcggagggcuacuacagccaccgggagaccgucaacggguccugguacauccaggaccugugcgagaugcucggcaaguacgggagcucccuggaguucaccgagcugcucacgcuggugaaccgcaaggugagccagcggcgcgucgacuucugcaaggaccccuccgccaucggcaagaagcagguccccugcuucgccagcaugcugaccaagaagcuccacuucuucccgaaguccaacuga

SEQ ID NO: 7076 - RNA, 882 nt, Artificial Sequence
  derived and/or modified sequence opt2 from Caspase_6__Homo_sapiens__AAH00305
auguccuccgccuccggccuccgccgcggccaccccgccggcggcgaggagaacaugaccgagaccgacgccuucuacaagcgcgagauguucgaccccgccgagaaguacaagauggaccaccgccgccgcggcaucgcccucaucuucaaccacgagcgcuucuucuggcaccucacccuccccgagcgccgcggcaccugcgccgaccgcgacaaccucacccgccgcuucuccgaccucggcuucgaggucaagugcuucaacgaccucaaggccgaggagcuccuccucaagauccacgaggucuccaccgucucccacgccgacgccgacugcuucgucugcgucuuccucucccacggcgagggcaaccacaucuacgccuacgacgccaagaucgagauccagacccucaccggccucuucaagggcgacaagugccacucccucgucggcaagcccaagaucuucaucauccaggccugccgcggcaaccagcacgacguccccgucaucccccucgacgucgucgacaaccagaccgagaagcucgacaccaacaucaccgaggucgacgccgccuccgucuacacccuccccgccggcgccgacuuccucaugugcuacuccgucgccgagggcuacuacucccaccgcgagaccgucaacggcuccugguacauccaggaccucugcgagaugcucggcaaguacggcuccucccucgaguucaccgagcuccucacccucgucaaccgcaaggucucccagcgccgcgucgacuucugcaaggaccccuccgccaucggcaagaagcagguccccugcuucgccuccaugcucaccaagaagcuccacuucuuccccaaguccaacuga

SEQ ID NO: 7077 - RNA, 882 nt, Artificial Sequence
  derived and/or modified sequence opt3 from Caspase_6__Homo_sapiens__AAH00305
augagcuccgccucuggccuuagaagggggcaccccgcuggaggugaggaaaacaugaccgagacagacgcauucuacaagcgggaaauguuugauccugccgagaaauauaagauggaccaucgccgacguggcaucgcgcucauuuucaaucacgaaagauuuuucuggcaucuuacucugccagagaggcgggggacgugcgcugaucgcgacaacuugaccagaagguuuucagauuuaggauucgaggugaaauguuuuaaugaccugaaggccgaggaacuacuccugaaaauacacgaagucaguacaguuagccaugcagaugccgacugcuucguguguguauuucuuucccacggcgaggguaaccacaucuacgcuuaugaugcaaagauugagauccagacucugaccggguuguucaagggagacaaaugccauucucucgugggcaagccgaaaauuuuuaucauacaagccugucggggcaaucagcacgauguccccgugaucccucuggacguuguggauaaccagacagaaaagcuggacaccaauauuacugaggucgacgcugccucgguguacacacucccagcgggggcagauuucuuaaugugcuauucaguagccgaaggauacuauagccaucgcgagaccguuaacgguaguugguacauccaggaccugugugaaaugcuuggcaaauacggguccucuuuggaguuuacggagcugcuaacucucgugaaucgaaaggucagccaaagaaggguggauuucugcaaggaccccuccgcuauuggaaagaaacaggugccuuguuucgccucaaugcugaccaaaaagcugcacuuuuucccaaaaaguaacuga

SEQ ID NO: 7078 - RNA, 882 nt, Artificial Sequence
  derived and/or modified sequence opt4 from Caspase_6__Homo_sapiens__AAH00305
augagcagcgccagcggccugagaagaggccaccccgccggcggcgaggagaacaugaccgagaccgacgccuucuacaagagagagauguucgaccccgccgagaaguacaagauggaccacagaagaagaggcaucgcccugaucuucaaccacgagagauucuucuggcaccugacccugcccgagagaagaggcaccugcgccgacagagacaaccugaccagaagauucagcgaccugggcuucgaggugaagugcuucaacgaccugaaggccgaggagcugcugcugaagauccacgaggugagcaccgugagccacgccgacgccgacugcuucgugugcguguuccugagccacggcgagggcaaccacaucuacgccuacgacgccaagaucgagauccagacccugaccggccuguucaagggcgacaagugccacagccuggugggcaagcccaagaucuucaucauccaggccugcagaggcaaccagcacgacgugcccgugaucccccuggacgugguggacaaccagaccgagaagcuggacaccaacaucaccgagguggacgccgccagcguguacacccugcccgccggcgccgacuuccugaugugcuacagcguggccgagggcuacuacagccacagagagaccgugaacggcagcugguacauccaggaccugugcgagaugcugggcaaguacggcagcagccuggaguucaccgagcugcugacccuggugaacagaaaggugagccagagaagaguggacuucugcaaggaccccagcgccaucggcaagaagcaggugcccugcuucgccagcaugcugaccaagaagcugcacuucuuccccaagagcaacuga

SEQ ID NO: 7079 - RNA, 882 nt, Artificial Sequence
  derived and/or modified sequence opt5 from Caspase_6__Homo_sapiens__AAH00305
augagcuccgccucuggacuuagacgggggcaccccgcuggaggcgaggaaaacaugaccgagacagacgccuucuacaagcgcgaaauguuugauccugcggagaaauauaagauggaccauagacggcgcgggaucgcucucauuuucaaucacgaaagauuuuucuggcaucugacgcuuccggagcggcgcggaaccugcgccgauagagacaaccugacacggcgcuuuagcgaucucggcuucgaggugaaauguuuuaaugaccugaaggccgaggaacuucugcucaaaauccacgaagucuccaccguuucucaugcugaugccgacugcuucguguguguguuucugagccacggggagggaaaccacauuuacgcuuaugaugccaagaucgagauucagacacugaccggccucuucaagggcgacaaaugccauucccuggucgggaagcccaaaaucuuuaucauucaagcguguagaggaaaucagcacgaugugccuguuaucccccuugacguggucgauaaccagacagaaaagcuggacaccaauauuacggagguggacgccgcuucuguuuacacccucccugccggcgcugauuuccugaugugcuauagcguggccgaaggguacuauucccaucgggagacagucaacggaagcugguacauccaggaccuuugugaaaugcugggcaaauacgggucuucccucgaguuuaccgagcugcugacacucgugaaucgcaaggugagccaaagacgggucgauuucugcaaggaccccucugcgauuggcaaaaagcagguuccuuguuucgccuccaugcugaccaaaaagcugcacuuuuucccgaaaagcaacuga

SEQ ID NO: 7080 - RNA, 882 nt, Artificial Sequence
  derived and/or modified sequence opt6 from Caspase_6__Homo_sapiens__AAH00305
augaguagugcaucaggacuaagaagaggacauccagcaggaggagaagaaaacaugacagaaacagaugcauucuacaaaagagaaauguucgacccagcagaaaaauacaaaauggaucaccgaagaagaggaauagcauuaauauucaaucacgaaagauuuuuuuggcacuuaacacuaccagaaagaagaggaacaugcgcagacagagacaaccuaacacgaagauuuucagacuuaggauucgaagucaaaugcuucaaugaccuaaaagcagaagaacuacuacuaaaaauacacgaaguaagcacaguaucacacgcagaugcagacugcuucguaugcguauuuuuaucacacggugaaggaaaucacauauacgcauacgacgcaaaaauagaaauacaaacacuaacaggacuauuuaaaggagacaaaugccacaguuuaguaggaaaaccaaaaauauucauaauacaagcaugcagaggcaaucaacacgacguaccaguaauaccacuagauguaguagauaaccaaacagaaaaacuagacacaaacauaaccgaaguagacgcagcaagcguauacacacuaccagcaggagcagauuuccuaaugugcuacucaguagcagaaggauauuacucacacagagaaacaguaaauggaucaugguacauacaagaccuuugcgaaaugcuuggaaaauaugggucaucacuagaauucacagaacuauuaacacuaguaaauagaaaaguaucacaaagaagagucgacuuuuguaaagacccaucagcaaucggaaaaaaacaaguacccuguuucgcaagcaugcuaacaaaaaaauuacacuucuucccuaaaucaaacuaa

SEQ ID NO: 7081 - protein, 303 aa, Artificial Sequence
  Caspase_7__Homo_sapiens__P55210
MADDQGCIEEQGVEDSANEDSVDAKPDRSSFVPSLFSKKKKNVTMRSIKTTRDRVPTYQYNMNFEKLGKCIIINNKNFDKVTGMGVRNGTDKDAEALFKCFRSLGFDVIVYNDCSCAKMQDLLKKASEEDHTNAACFACILLSHGEENVIYGKDGVTPIKDLTAHFRGDRCKTLLEKPKLFFIQACRGTELDDGIQADSGPINDTDANPRYKIPVEADFLFAYSTVPGYYSWRSPGRGSWFVQALCSILEEHGKDLEIMQILTRVNDRVARHFESQSDDPHFHEKKQIPCVVSMLTKELYFSQ

SEQ ID NO: 7082 - RNA, 912 nt, Artificial Sequence
  Caspase_7__Homo_sapiens__AAC50303
auggcagaugaucagggcuguauugaagagcaggggguugaggauucagcaaaugaagauucaguggaugcuaagccagaccgguccucguuuguaccgucccucuucaguaagaagaagaaaaaugucaccaugcgauccaucaagaccacccgggaccgagugccuacauaucaguacaacaugaauuuugaaaagcugggcaaaugcaucauaauaaacaacaagaacuuugauaaagugacagguaugggcguucgaaacggaacagacaaagaugccgaggcgcucuucaagugcuuccgaagccuggguuuugacgugauugucuauaaugacugcucuugugccaagaugcaagaucugcuuaaaaaagcuucugaagaggaccauacaaaugccgccugcuucgccugcauccucuuaagccauggagaagaaaauguaauuuaugggaaagauggugucacaccaauaaaggauuugacagcccacuuuaggggggauagaugcaaaacccuuuuagagaaacccaaacucuucuucauucaggcuugccgagggaccgagcuugaugauggcauccaggccgacucggggcccaucaaugacacagaugcuaauccucgauacaagaucccaguggaagcugacuuccucuucgccuauuccacgguuccaggcuauuacucguggaggagcccaggaagaggcuccugguuugugcaagcccucugcuccauccuggaggagcacggaaaagaccuggaaaucaugcagauccucaccagggugaaugacagaguugccaggcacuuugagucucagucugaugacccacacuuccaugagaagaagcagauccccuguguggucuccaugcucaccaaggaacucuacuucagucaauag

SEQ ID NO: 7083 - RNA, 912 nt, Artificial Sequence
  derived and/or modified sequence opt1 from Caspase_7__Homo_sapiens__AAC50303
auggccgacgaccagggcugcaucgaggagcaggggguggaggacagcgccaacgaggacuccgucgacgcgaagcccgaccgcagcuccuucgugccgagccuguucuccaagaagaagaagaacgugaccaugcggagcaucaagaccacgcgcgaccggguccccaccuaccaguacaacaugaacuucgagaagcucggcaagugcaucaucaucaacaacaagaacuucgacaaggugaccgggaugggcgugcgcaacgggaccgacaaggacgccgaggcccuguucaagugcuuccggucccugggcuucgacgucaucguguacaacgacugcagcugcgccaagaugcaggaccuccugaagaaggccuccgaggaggaccacacgaacgcggccugcuucgccugcauccugcucagccacggcgaggagaacgugaucuacgggaaggacggcgucacccccaucaaggaccugaccgcccacuuccgcggggaccggugcaagacccugcucgagaagcccaagcuguucuucauccaggcgugccgcggcacggagcuggacgacgggauccaggccgacuccggcccgaucaacgacaccgacgccaacccccgguacaagauccccguggaggccgacuuccucuucgccuacagcaccgugcccggcuacuacuccuggcgcagcccggggcggggcuccugguucguccaggcgcugugcagcauccuggaggagcacgggaaggaccucgagaucaugcagauccugacccgcgugaacgaccggguggcccgccacuucgagucccagagcgacgacccccacuuccacgagaagaagcagauccccugcgucguguccaugcugacgaaggagcucuacuucagccaguga

SEQ ID NO: 7084 - RNA, 912 nt, Artificial Sequence
  derived and/or modified sequence opt2 from Caspase_7__Homo_sapiens__AAC50303
auggccgacgaccagggcugcaucgaggagcagggcgucgaggacuccgccaacgaggacuccgucgacgccaagcccgaccgcuccuccuucguccccucccucuucuccaagaagaagaagaacgucaccaugcgcuccaucaagaccacccgcgaccgcguccccaccuaccaguacaacaugaacuucgagaagcucggcaagugcaucaucaucaacaacaagaacuucgacaaggucaccggcaugggcguccgcaacggcaccgacaaggacgccgaggcccucuucaagugcuuccgcucccucggcuucgacgucaucgucuacaacgacugcuccugcgccaagaugcaggaccuccucaagaaggccuccgaggaggaccacaccaacgccgccugcuucgccugcauccuccucucccacggcgaggagaacgucaucuacggcaaggacggcgucacccccaucaaggaccucaccgcccacuuccgcggcgaccgcugcaagacccuccucgagaagcccaagcucuucuucauccaggccugccgcggcaccgagcucgacgacggcauccaggccgacuccggccccaucaacgacaccgacgccaacccccgcuacaagauccccgucgaggccgacuuccucuucgccuacuccaccguccccggcuacuacuccuggcgcucccccggccgcggcuccugguucguccaggcccucugcuccauccucgaggagcacggcaaggaccucgagaucaugcagauccucacccgcgucaacgaccgcgucgcccgccacuucgagucccaguccgacgacccccacuuccacgagaagaagcagauccccugcgucgucuccaugcucaccaaggagcucuacuucucccaguga

SEQ ID NO: 7085 - RNA, 912 nt, Artificial Sequence
  derived and/or modified sequence opt3 from Caspase_7__Homo_sapiens__AAC50303
auggccgacgaucagggcugcaucgaggaacaagggguggaggacagcgcuaacgaagauuccgucgacgcaaagcccgauagaucuucauucguuccuagucuguuuagcaaaaagaaaaagaaugugaccaugagguccauuaaaacaacucgggaccgcguaccaacguaccaguauaacaugaauuucgagaagcucggaaaguguauaaucauuaacaauaaaaacuuugauaaggugaccgguaugggcguccgaaaugggacagacaaagaugccgaagcgcuuuucaagugcuuucguucucugggauucgacgugaucguuuacaacgauuguucgugcgcuaaaaugcaggacuuguuaaagaaggccucagaggaggaucacacuaaugcagccuguuuugcuugcauucugcuaagccauggcgaagagaacgugaucuaugguaaagacggggucaccccgauaaaggaccucacagcacacuucagaggagauagguguaaaacccugcuugaaaagcccaaacuguuuuucauccaggccugccggggcacugaguuggacgauggcauucaagcugacagugggccuaucaaugauacagacgccaacccacgcuacaagauucccguggaggcggauuuucucuucgcauauuccaccguaccuggauacuauucuuggagaagcccagguaggggcuccugguuuguucaggcccuguguucaauccuggaggaacaugggaaagaccucgaaauaaugcagauuuuaacgcgggugaaugaucgcgucgcucgacacuucgagagucagagcgacgauccccauuuccacgaaaagaagcaaaucccuugcguggugucuaugcugacuaaagagcuuuacuuuucccaguga

SEQ ID NO: 7086 - RNA, 912 nt, Artificial Sequence
  derived and/or modified sequence opt4 from Caspase_7__Homo_sapiens__AAC50303
auggccgacgaccagggcugcaucgaggagcagggcguggaggacagcgccaacgaggacagcguggacgccaagcccgacagaagcagcuucgugcccagccuguucagcaagaagaagaagaacgugaccaugagaagcaucaagaccaccagagacagagugcccaccuaccaguacaacaugaacuucgagaagcugggcaagugcaucaucaucaacaacaagaacuucgacaaggugaccggcaugggcgugagaaacggcaccgacaaggacgccgaggcccuguucaagugcuucagaagccugggcuucgacgugaucguguacaacgacugcagcugcgccaagaugcaggaccugcugaagaaggccagcgaggaggaccacaccaacgccgccugcuucgccugcauccugcugagccacggcgaggagaacgugaucuacggcaaggacggcgugacccccaucaaggaccugaccgcccacuucagaggcgacagaugcaagacccugcuggagaagcccaagcuguucuucauccaggccugcagaggcaccgagcuggacgacggcauccaggccgacagcggccccaucaacgacaccgacgccaaccccagauacaagauccccguggaggccgacuuccuguucgccuacagcaccgugcccggcuacuacagcuggagaagccccggcagaggcagcugguucgugcaggcccugugcagcauccuggaggagcacggcaaggaccuggagaucaugcagauccugaccagagugaacgacagaguggccagacacuucgagagccagagcgacgacccccacuuccacgagaagaagcagauccccugcguggugagcaugcugaccaaggagcuguacuucagccaguga

SEQ ID NO: 7087 - RNA, 912 nt, Artificial Sequence
  derived and/or modified sequence opt5 from Caspase_7__Homo_sapiens__AAC50303
auggccgacgaucagggcugcaucgaggaacaagggguggaggacagcgcuaacgaagauuccgucgacgccaagcccgauagaucuagcuucguuccuucccuguuuucuaaaaagaaaaagaaugugaccaugcggagcauuaaaacaacgcgcgacagagugccgaccuaccaguauaacaugaauuucgagaagcucggaaaguguaucauuaucaacaauaaaaacuuugauaaggucacaggcaugggggugcggaauggaaccgacaaagaugcggaagcucuguucaagugcuuucgcucccuuggcuucgacguuauuguguacaacgauuguucuugcgccaaaaugcaggaccugcucaagaaggccagcgaggaggaucacacaaaugcugccuguuuugcuugcauccugcuuucccauggggaagagaacgucaucuauggaaaagacggcgugacccccauuaaggaccugacagcccacuucagaggcgaucgguguaaaacccuccuggaaaagccuaaacuguuuuucauccaggcgugccgcgggacggagcucgacgauggcauucaagccgacagcggacccaucaaugauaccgacgcuaacccuagauacaagauucccguugaggccgauuuucuguucgcuuauucuacagugccuggguacuauuccuggcggagcccgggacgcggcucuugguuuguccaggcccuuuguuccauccuggaggaacaugggaaagaccucgaaauuaugcagauccugaccagagugaaugaucggguggcgcgccacuucgagagccagucugacgauccccauuuccacgaaaagaagcaaaucccuugcgucguuuccaugcuuacaaaagagcuguacuuuagccaguga

SEQ ID NO: 7088 - RNA, 912 nt, Artificial Sequence
  derived and/or modified sequence opt6 from Caspase_7__Homo_sapiens__AAC50303
auggcugaugaccaaggaugcaucgaagaacaaggaguagaagacucagcaaaugaagacagcguagacgcaaaaccagacagaucaucauucguaccaucacuuuucagcaaaaaaaaaaaaaacguaacaaugagaucaauaaaaacaacaagagacagaguaccaacauaccaauauaacaugaauuuugaaaaacuaggaaaaugcauaauaauaaacaacaaaaacuucgacaaaguaacaggcaugggaguaagaaacggaacagacaaagacgccgaagcacuauucaaaugcuucagaucccuaggauucgacguaauagucuacaacgacugcucaugugccaaaaugcaagaccuauuaaaaaaagcaucagaagaagaucacacaaacgcagcaugcuuugcauguauacuacuaagccacggagaagaaaacguaauauacggaaaagacggaguuacacccauaaaagauuuaacagcacacuucagaggugacagaugcaaaacacuacuagaaaaaccaaaacucuucuucauacaagcaugcagaggaacagaauuagacgacggaauacaagcagacucaggacccauaaacgacacagacgcaaauccaagauacaaaauaccaguagaagcagauuuccuauucgcauacagcacaguaccaggauacuacucauggagaucaccaggaagaggaucaugguucguacaagcacuauguucaauacuagaagaacacggaaaagacuuagaaauaaugcaaauacuaacaagaguuaacgacagaguagcaagacacuucgaaucacaaagcgacgacccccauuuccacgaaaaaaaacaaauaccauguguaguaaguaugcuaacaaaagaauuauacuucucacaauaa

SEQ ID NO: 7089 - protein, 464 aa, Artificial Sequence [sequence omitted]

SEQ ID NO: 7090 - RNA, 1395 nt, Artificial Sequence
  Caspase_8__Homo_sapiens__BAG70096
auggacuucagcagaaaucuuuaugauauuggggaacaacuggacagugaagaucuggccucccucaaguuccugagccuggacuacauuccgcaaaggaagcaagaacccaucaaggaugccuugauguuauuccagagacuccaggaaaagagaauguuggaggaaagcaaucuguccuuccugagggagcugcucuuccgaauuaauagacuggauuugcugauuaccuaccuaaacacuagaaaggaggagauggaaagggaacuucagacaccaggcagggcucaaauuucugccuacagggucaugcucuaucagauuucagaagaagugagcagaucagaauugaggucuuuuaaguuucuuuugcaagaggaaaucuccaaaugcaaacuggaugaugacaugaaccugcuggauauuuucauagagauggagaagagggucauccugggagaaggaaaguuggacauccugaaaagagucugugcccaaaucaacaagagccugcugaagauaaucaacgacuaugaagaauucagcaaaggggaggaguugugugggguaaugacaaucucggacucuccaagagaacaggauagugaaucacagacuuuggacaaaguuuaccaaaugaaaagcaaaccucggggauacugucugaucaucaacaaucacaauuuugcaaaagcacgggagaaagugcccaaacuucacagcauuagggacaggaauggaacacacuuggaugcaggggcuuugaccacgaccuuugaagagcuucauuuugagaucaagccccacgaugacugcacaguagagcaaaucuaugagauuuugaaaaucuaccaacucauggaccacaguaacauggacugcuucaucugcuguauccucucccauggagacaagggcaucaucuauggcacugauggacaggaggcccccaucuaugagcugacaucucaguucacugguuugaagugcccuucccuugcuggaaaacccaaaguguuuuuuauucaggcuugucagggggauaacuaccagaaagguauaccuguugagacugauucagaggagcaacccuauuuagaaauggauuuaucaucaccucaaacgagauauaucccggaugaggcugacuuucugcuggggauggccacugugaauaacuguguuuccuaccgaaacccugcagagggaaccugguacauccagucacuuugccagagccugggagagcgauguccucgaggcgaugauauucucaccauccugacugaagugaacuaugaaguaagcaacaaggaugacaagaaaaacauggggaaacagaugccucagccuacuugcacacuaagaaaaaaacuugucuucccuucugauuaa

SEQ ID NO: 7091 - RNA, 1395 nt, Artificial Sequence
  derived and/or modified sequence opt1 from Caspase_8__Homo_sapiens__BAG70096
auggacuucagccgcaaccuguacgacaucggcgagcagcucgacuccgaggaccuggccagccugaaguuccucucccuggacuacaucccccagcggaagcaggagccgaucaaggacgcccugaugcuguuccagcgccugcaggagaagcggaugcuggaggagagcaaccucuccuuccugcgcgagcuccucuuccggaucaaccgccuggaccugcucaucaccuaccugaacacccggaaggaggagauggagcgcgagcugcagacgcccgggcgggcgcagaucagcgccuaccgcgugaugcucuaccagaucuccgaggaggucagccgguccgagcugcgcagcuucaaguuccugcuccaggaggagaucuccaagugcaagcuggacgacgacaugaaccugcucgacaucuucaucgagauggagaagcgggugauccugggcgaggggaagcuggacauccucaagcgcgugugcgcccagaucaacaagagccugcugaagaucaucaacgacuacgaggaguucuccaagggcgaggagcucugcggggucaugaccaucagcgacagcccccgggagcaggacagcgagucccagacccuggacaagguguaccagaugaaguccaagccccgcggcuacugccugaucaucaacaaccacaacuucgccaaggcccgggagaaggugccgaagcuccacuccauccgcgaccggaacggcacccaccuggacgcgggggcccugacgaccaccuucgaggagcuccacuucgagaucaagccccacgacgacugcaccgucgagcagaucuacgagauccugaagaucuaccagcugauggaccacagcaacauggacugcuucaucugcugcauccucagccacggcgacaaggggaucaucuacggcacggacgggcaggaggcccccaucuacgagcugaccucccaguucaccggccugaagugccccagccucgccggcaagccgaagguguucuucauccaggcgugccagggggacaacuaccagaagggcauccccguggagaccgacuccgaggagcagcccuaccuggagauggaccugagcagcccccagacgcgcuacaucccggacgaggccgacuuccuccuggggauggccaccgucaacaacugcguguccuaccggaaccccgccgagggcaccugguacauccagucccugugccagagccucggcgagcgcugcccccgcggggacgacauccugaccauccugacggaggugaacuacgaggucuccaacaaggacgacaagaagaacaugggcaagcagaugccccagccgaccugcacccugcggaagaagcucguguuccccagcgacuga

SEQ ID NO: 7092 - RNA, 1395 nt, Artificial Sequence
  derived and/or modified sequence opt2 from Caspase_8__Homo_sapiens__BAG70096
auggacuucucccgcaaccucuacgacaucggcgagcagcucgacuccgaggaccucgccucccucaaguuccucucccucgacuacaucccccagcgcaagcaggagcccaucaaggacgcccucaugcucuuccagcgccuccaggagaagcgcaugcucgaggaguccaaccucuccuuccuccgcgagcuccucuuccgcaucaaccgccucgaccuccucaucaccuaccucaacacccgcaaggaggagauggagcgcgagcuccagacccccggccgcgcccagaucuccgccuaccgcgucaugcucuaccagaucuccgaggaggucucccgcuccgagcuccgcuccuucaaguuccuccuccaggaggagaucuccaagugcaagcucgacgacgacaugaaccuccucgacaucuucaucgagauggagaagcgcgucauccucggcgagggcaagcucgacauccucaagcgcgucugcgcccagaucaacaagucccuccucaagaucaucaacgacuacgaggaguucuccaagggcgaggagcucugcggcgucaugaccaucuccgacuccccccgcgagcaggacuccgagucccagacccucgacaaggucuaccagaugaaguccaagccccgcggcuacugccucaucaucaacaaccacaacuucgccaaggcccgcgagaagguccccaagcuccacuccauccgcgaccgcaacggcacccaccucgacgccggcgcccucaccaccaccuucgaggagcuccacuucgagaucaagccccacgacgacugcaccgucgagcagaucuacgagauccucaagaucuaccagcucauggaccacuccaacauggacugcuucaucugcugcauccucucccacggcgacaagggcaucaucuacggcaccgacggccaggaggcccccaucuacgagcucaccucccaguucaccggccucaagugccccucccucgccggcaagcccaaggucuucuucauccaggccugccagggcgacaacuaccagaagggcauccccgucgagaccgacuccgaggagcagcccuaccucgagauggaccucuccuccccccagacccgcuacauccccgacgaggccgacuuccuccucggcauggccaccgucaacaacugcgucuccuaccgcaaccccgccgagggcaccugguacauccagucccucugccagucccucggcgagcgcugcccccgcggcgacgacauccucaccauccucaccgaggucaacuacgaggucuccaacaaggacgacaagaagaacaugggcaagcagaugccccagcccaccugcacccuccgcaagaagcucgucuuccccuccgacuga

SEQ ID NO: 7093 - RNA, 1395 nt, Artificial Sequence
  derived and/or modified sequence opt3 from Caspase_8__Homo_sapiens__BAG70096
auggacuucagcagaaaccuguacgauaucggcgagcagcucgacuccgaagaucuugccucucugaaguuuuugucauuagacuauauuccccaaaggaaacaggagccuauaaaggaugcucugaugcuauuccagcggcuccaggaaaaacgcaugcuggaggaaaguaaucuuagcuuucugcgagagcucuuguuccguaucaacagacuggaccugcucauuaccuacuuaaauacaaggaaggaggaaauggagcgggaacugcaaacuccagggcgcgcacagaucuccgccuauagagugaugcuuuaccagauuucugaggaggucucgaggucagaauugcggagcuuuaaauuccugcuacaggaggaaaucaguaagugcaagcucgaugacgauaugaaccugcuugacauauuuaucgagauggaaaaacgcguuauucugggagaggguaaguuggauauccucaaacgagugugugcgcaaauuaauaagucccuguuaaaaaucauaaacgacuaugaggaguucucuaagggcgaggaacugugcgggguaaugacgauuagcgauuccccgagagagcaggacucagaaagucagacccucgacaagguguaccagaugaaaagcaagcccaggggauauugucuuaucauuaauaaccacaauuuugcuaaagcccgggagaaggucccuaaacugcauucuauccgugaucgcaacggcacacacuuggacgccggugcacuaacuaccacauucgaggaacugcauuuugagaucaagccacacgaugacugcaccguggaacaaauuuacgagauacucaaaaucuaccagcugauggaucauuccaauauggacuguuucauuugcuguauccuuucacacggggauaagggaauaauuuauggcacugacggccaggaagcucccaucuacgagcugacaagccaauuuaccggguugaagugcccuagucucgcaggaaaaccaaagguuuucuucauccaggccugucagggugauaacuaucagaaaggcauucccguggagacggacucugaagaacaaccuuaccuggaaauggauuuauccagcccacagacuagauauaucccggacgaggcugacuuucugcuagggauggccaccgucaauaacugcgugucguacaggaaucccgcggagggaacaugguauauucagucucucugucagucccugggcgaacggugcccucgaggugaugacauacuuacuaucuugaccgagguaaacuacgaaguuucaaacaaggaugacaaaaagaauauggggaagcaaaugccacagcccacaugcacccugcgcaaaaagcucguguucccuagugauuga

SEQ ID NO: 7094 - RNA, 1395 nt, Artificial Sequence
  derived and/or modified sequence opt4 from Caspase_8__Homo_sapiens__BAG70096
auggacuucagcagaaaccuguacgacaucggcgagcagcuggacagcgaggaccuggccagccugaaguuccugagccuggacuacaucccccagagaaagcaggagcccaucaaggacgcccugaugcuguuccagagacugcaggagaagagaaugcuggaggagagcaaccugagcuuccugagagagcugcuguucagaaucaacagacuggaccugcugaucaccuaccugaacaccagaaaggaggagauggagagagagcugcagacccccggcagagcccagaucagcgccuacagagugaugcuguaccagaucagcgaggaggugagcagaagcgagcugagaagcuucaaguuccugcugcaggaggagaucagcaagugcaagcuggacgacgacaugaaccugcuggacaucuucaucgagauggagaagagagugauccugggcgagggcaagcuggacauccugaagagagugugcgcccagaucaacaagagccugcugaagaucaucaacgacuacgaggaguucagcaagggcgaggagcugugcggcgugaugaccaucagcgacagccccagagagcaggacagcgagagccagacccuggacaagguguaccagaugaagagcaagcccagaggcuacugccugaucaucaacaaccacaacuucgccaaggccagagagaaggugcccaagcugcacagcaucagagacagaaacggcacccaccuggacgccggcgcccugaccaccaccuucgaggagcugcacuucgagaucaagccccacgacgacugcaccguggagcagaucuacgagauccugaagaucuaccagcugauggaccacagcaacauggacugcuucaucugcugcauccugagccacggcgacaagggcaucaucuacggcaccgacggccaggaggcccccaucuacgagcugaccagccaguucaccggccugaagugccccagccuggccggcaagcccaagguguucuucauccaggccugccagggcgacaacuaccagaagggcauccccguggagaccgacagcgaggagcagcccuaccuggagauggaccugagcagcccccagaccagauacauccccgacgaggccgacuuccugcugggcauggccaccgugaacaacugcgugagcuacagaaaccccgccgagggcaccugguacauccagagccugugccagagccugggcgagagaugccccagaggcgacgacauccugaccauccugaccgaggugaacuacgaggugagcaacaaggacgacaagaagaacaugggcaagcagaugccccagcccaccugcacccugagaaagaagcugguguuccccagcgacuga

SEQ ID NO: 7095 - RNA, 1395 nt, Artificial Sequence
  derived and/or modified sequence opt5 from Caspase_8__Homo_sapiens__BAG70096
auggacuucagcagaaaccuguacgauaucggcgagcagcucgacuccgaagaucuggccucucuuaaguuucugagccucgacuauauuccccaacggaaacaggagccuaucaaggaugcucugaugcuuuuccagcgccugcaggagaaaagaaugcucgaggaauccaaucugucuuuucugcgggagcuccuguuccgcauuaacagacuugaccugcucaucaccuaccugaauacacggaaggaggaaauggagcgcgaacuucaaacgccggggagagcccagauuagcgcguaucgggugaugcuguaccagaucuccgaggaggucucucgcagcgaacucagauccuuuaaauuccugcugcaggaggaaaucagcaagugcaagcucgaugacgauaugaaccugcuugacauuuuuaucgagauggaaaaacggguuauucugggagagggcaagcucgauauccugaaacgcgugugugcucaaauuaauaagucucuucugaaaaucauuaacgacuaugaggaguucuccaagggggaagaacucugcggagugaugaccaucagcgauucucccagagagcaggacuccgaaagccagacacuggacaaggucuaccagaugaaaucuaagccucggggcuauugucugaucauuaauaaccacaauuuugccaaagcccgcgagaaggugcccaaacuccauuccaucagagaucggaacgggacccaccuggacgcuggagcccuuacaaccacauucgaggaacugcauuuugagauuaagccucacgaugacugcaccguugaacaaaucuacgagauucucaaaaucuaccagcugauggaucauagcaauauggacuguuucaucugcuguauucuuucccacggcgauaagggcaucauuuaugggacggacggacaggaagcucccaucuacgagcugaccucucaauuuacaggccucaagugcccuagccuggccgggaaaccgaagguguucuucauucaggcgugucagggagauaacuaucagaaaggcauccccgucgagaccgacuccgaagaacaaccuuaccuggaaauggaucucagcucuccccagacaagauauaucccugacgaggccgacuuucugcuugggauggcuaccgugaauaacugcguuuccuaccgcaaucccgccgagggaacgugguauauucagagccugugucagucucucggcgaacggugcccgagaggcgaugacauccugacaauucugaccgaggugaacuacgaagucagcaacaaggaugacaaaaagaauauggggaagcaaaugccucagcccacaugcacccuucgcaaaaagcucguguucccuuccgauuga

SEQ ID NO: 7096 - RNA, 1395 nt, Artificial Sequence
  derived and/or modified sequence opt6 from Caspase_8__Homo_sapiens__BAG70096
auggacuucuccagaaacuuauacgacauaggagaacaauuagauucugaagaccucgccucacuaaaauuccuaucauuagacuauauaccacaaagaaaacaagaaccuauaaaagaugcauuaaugcucuuccaaagauuacaagaaaaacgaaugcuagaagaaaguaacuuaucauucuuaagggaacuauuauuccgcauaaaccgucuagaccuucuaauaacauaucuaaacacuagaaaagaagaaauggaacgagaacuacaaacaccaggaagagcacaaauaucagcauauagaguaauguuauaucaaauaagcgaagaaguaaguagaucagaauuaagaagcuucaaauucuuacuacaagaagaaauaucaaaauguaaacucgacgacgauaugaauuuacuagacauauucaucgaaauggaaaaaagaguaauacuaggcgaaggaaaacuagacauauuaaaacgaguaugugcacaaaucaauaaaucgcuauuaaaaauuauaaacgauuacgaagaauucagcaaaggcgaagaacuaugcggaguaaugacaauaucagacucaccaagagaacaagacucagaaucacaaacucuagacaaaguuuaucaaaugaaauccaaaccacgaggauauugccuaauaauaaacaaucacaacuucgcaaaagccagagaaaaaguaccaaaacuccacucaauaagagacagaaacggaacacaccuagacgccggagcacuaacaaccacauucgaagaacuacacuucgaaauaaaaccacacgacgacuguaccguagaacaaauauaugaaauauuaaaaaucuaccaauuaauggaucacucaaauauggacugcuucauaugcugcaucuugucacacggagacaaagggaucauuuacggaacagacggacaagaagcaccaauauacgaacuaaccucacaauucacaggacucaaaugcccaucauuagcaggcaaaccaaaagucuuuuucauccaagcaugccaaggcgauaauuaccaaaaaggaauaccaguagaaacagacagcgaagaacaaccauaccuagaaauggaucucucaucaccccaaacaagauauauaccagaugaagcagacuuccuacuaggcauggcaacuguaaacaacugcguaagcuacagaaacccagcggaaggaaccugguacauacaaucucuaugccaaucauuaggagaaagaugcccaagaggagacgacauacuaacaauuuuaacagaaguaaacuaugaaguauccaauaaagacgauaaaaaaaauauggguaaacaaaugccacaaccaacaugcacccuaagaaaaaaauuaguauucccuagugauuaa

SEQ ID NO: 7097 - protein, 395 aa, Artificial Sequence [sequence omitted]

SEQ ID NO: 7098 - RNA, 1188 nt, Artificial Sequence
  Caspase_8__Homo_sapiens__ABX09989
auggacuucagcagaaaucuuuaugauauuggggaacaacuggacagugaagaucuggccucccucaaguuccugagccuggacuacauuccgcaaaggaagcaagaacccaucaaggaugccuugauguuauuccagagacuccaggaaaagagaauguuggaggaaagcaaucuguccuuccugaaggagcugcucuuccgaauuaauagacuggauuugcugauuaccuaccuaaacacuagaaaggaggagauggaaagggaacuucagacaccaggcagggcucaaauuucugccuacagggucaugcucuaucagauuucagaagaagugagcagaucagaauugaggucuuuuaaguuucuuuugcaagaggaaaucuccaaaugcaaacuggaugaugacaugaaccugcuggauauuuucauagagauggagaagagggucauccugggagaaggaaaguuggacauccugaaaagagucugugcccaaaucaacaagagccugcugaagauaaucaacgacuaugaagaauucagcaaaggggcuuugaccacgaccuuugaagagcuucauuuugagaucaagccccaccaugacugcacaguagagcaaaucuaugagauuuugaaaaucuaccaacucauggaccacaguaacauggacugcuucaucugcuguauccucucccauggagacaagggcaucaucuauggcacugauggacaggaggcccccaucuaugagcugacaucucaguucacugguuugaagugcccuucccuugcuggaaaacccaaaguguuuuuuauucaggcuugucagggggauaacuaccagaaagguauaccuguugagacugauucagaggagcaacccuauuuagaaauggauuuaucaucaccucaaacgagauauaucccggaugaggcugacuuucugcuggggauggccacugugaauaacuguguuuccuaccgaaacccugcagagggaaccugguacauccagucacuuugccagagccugagagagcgauguccucgaggcgaugauauucucaccauccugacugaagugaacuaugaaguaagcaacaaggaugacaagaaaaacauggggaaacagaugccucagccuacuuucacacuaagaaaaaaacuugucuucccuucugauuga

SEQ ID NO: 7099 - RNA, 1188 nt, Artificial Sequence
  derived and/or modified sequence opt1 from Caspase_8__Homo_sapiens__ABX09989
auggacuucagccgcaaccuguacgacaucggcgagcagcucgacuccgaggaccuggccagccugaaguuccucucccuggacuacaucccccagcggaagcaggagccgaucaaggacgcccugaugcuguuccagcgccugcaggagaagcggaugcuggaggagagcaaccucuccuuccugaaggagcuccucuuccgcaucaaccggcuggaccugcucaucaccuaccugaacacccgcaaggaggagauggagcgggagcugcagacgcccgggcgcgcgcagaucagcgccuaccgggugaugcucuaccagaucuccgaggaggucagccgcuccgagcugcggagcuucaaguuccugcuccaggaggagaucuccaagugcaagcuggacgacgacaugaaccugcucgacaucuucaucgagauggagaagcgcgugauccugggcgaggggaagcuggacauccucaagcgggugugcgcccagaucaacaagagccugcugaagaucaucaacgacuacgaggaguucuccaagggcgcccucaccaccaccuucgaggagcugcacuucgagaucaagccccaccacgacugcacggucgagcagaucuacgagauccugaagaucuaccagcucauggaccacagcaacauggacugcuucaucugcugcauccugucccacggggacaagggcaucaucuacggcaccgacgggcaggaggcccccaucuacgagcugaccagccaguucaccggccucaagugcccgucccuggcggggaagcccaagguguucuucauccaggccugccagggcgacaacuaccagaaggggauccccguggagacggacagcgaggagcagcccuaccuggagauggaccucuccagcccgcagacccgcuacauccccgacgaggccgacuuccugcugggcauggccaccgucaacaacugcgugagcuaccggaaccccgcggagggcaccugguacauccagucccucugccagagccugcgcgagcggugcccccgcggggacgacauccugacgauccucaccgaggugaacuacgaggucuccaacaaggacgacaagaagaacaugggcaagcagaugccgcagcccaccuucacccugcggaagaagcugguguuccccagcgacuga

SEQ ID NO: 7100 - RNA, 1188 nt, Artificial Sequence
  derived and/or modified sequence opt2 from Caspase_8__Homo_sapiens__ABX09989
auggacuucucccgcaaccucuacgacaucggcgagcagcucgacuccgaggaccucgccucccucaaguuccucucccucgacuacaucccccagcgcaagcaggagcccaucaaggacgcccucaugcucuuccagcgccuccaggagaagcgcaugcucgaggaguccaaccucuccuuccucaaggagcuccucuuccgcaucaaccgccucgaccuccucaucaccuaccucaacacccgcaaggaggagauggagcgcgagcuccagacccccggccgcgcccagaucuccgccuaccgcgucaugcucuaccagaucuccgaggaggucucccgcuccgagcuccgcuccuucaaguuccuccuccaggaggagaucuccaagugcaagcucgacgacgacaugaaccuccucgacaucuucaucgagauggagaagcgcgucauccucggcgagggcaagcucgacauccucaagcgcgucugcgcccagaucaacaagucccuccucaagaucaucaacgacuacgaggaguucuccaagggcgcccucaccaccaccuucgaggagcuccacuucgagaucaagccccaccacgacugcaccgucgagcagaucuacgagauccucaagaucuaccagcucauggaccacuccaacauggacugcuucaucugcugcauccucucccacggcgacaagggcaucaucuacggcaccgacggccaggaggcccccaucuacgagcucaccucccaguucaccggccucaagugccccucccucgccggcaagcccaaggucuucuucauccaggccugccagggcgacaacuaccagaagggcauccccgucgagaccgacuccgaggagcagcccuaccucgagauggaccucuccuccccccagacccgcuacauccccgacgaggccgacuuccuccucggcauggccaccgucaacaacugcgucuccuaccgcaaccccgccgagggcaccugguacauccagucccucugccagucccuccgcgagcgcugcccccgcggcgacgacauccucaccauccucaccgaggucaacuacgaggucuccaacaaggacgacaagaagaacaugggcaagcagaugccccagcccaccuucacccuccgcaagaagcucgucuuccccuccgacuga

SEQ ID NO: 7101 - RNA, 1188 nt, Artificial Sequence
  derived and/or modified sequence opt3 from Caspase_8__Homo_sapiens__ABX09989
auggacuucagcagaaaccuguacgauaucggcgagcagcucgacuccgaagaucuugccucucugaaguuuuugucauuagacuauauuccccaaaggaaacaggagccuauaaaggaugcucugaugcuauuccagcggcuccaggaaaaacgcaugcuggaggaaaguaaucuuagcuuucugaaggagcucuuguuccgaaucaaccgucuggaccugcucauuaccuacuuaaauacaagaaaagaggaaauggagagggaacugcaaacuccagggcgggcacagaucuccgccuaucgcgugaugcuuuaccagauuucugaggaggucucgagaucagaauugaggagcuuuaaguuccugcuacaggaggaaaucaguaagugcaaacucgaugacgauaugaaccugcuugacauauuuaucgagauggaaaagcggguuauucugggagaggguaaauuggauauccucaagcgcgugugugcgcaaauuaauaaaucccuguuaaagaucauaaacgacuaugaggaguucucuaagggcgcucugacgaccacauuugaggaacuccacuucgagauuaaaccgcaucacgauugcacuguagaacagaucuacgagauucuuaagaucuaucagcugauggaccauagcaauauggacuguuuuaucugcuguauuuugucccacggggauaaaggaauaaucuacggcaccgacggucaggaggcccccauuuacgaacuaacaucacaauucaccgggcugaagugcccuagucucgcaggaaaaccaaagguguuuuucauccaggccugucagggcgauaacuaucaaaaaggcauacccgucgagacugacagcgaagaacagccuuaccuggaaauggaucuuucuuccccacagacacgauauauucccgacgaggcugauuuccuguuggggauggcaaccgugaauaacugcguuucauacagaaauccugccgagggaacgugguauauccagagccucugucaaagucugagggaacggugcccacguggugacgauaucuuaacuauucugaccgaggugaacuacgaagucucuaauaaggacgauaagaaaaacaugggcaagcagaugccgcagcccacauuuacucuacgcaaaaagcucguguucccuuccgacuga

SEQ ID NO: 7102 - RNA, 1188 nt, Artificial Sequence
  derived and/or modified sequence opt4 from Caspase_8__Homo_sapiens__ABX09989
auggacuucagcagaaaccuguacgacaucggcgagcagcuggacagcgaggaccuggccagccugaaguuccugagccuggacuacaucccccagagaaagcaggagcccaucaaggacgcccugaugcuguuccagagacugcaggagaagagaaugcuggaggagagcaaccugagcuuccugaaggagcugcuguucagaaucaacagacuggaccugcugaucaccuaccugaacaccagaaaggaggagauggagagagagcugcagacccccggcagagcccagaucagcgccuacagagugaugcuguaccagaucagcgaggaggugagcagaagcgagcugagaagcuucaaguuccugcugcaggaggagaucagcaagugcaagcuggacgacgacaugaaccugcuggacaucuucaucgagauggagaagagagugauccugggcgagggcaagcuggacauccugaagagagugugcgcccagaucaacaagagccugcugaagaucaucaacgacuacgaggaguucagcaagggcgcccugaccaccaccuucgaggagcugcacuucgagaucaagccccaccacgacugcaccguggagcagaucuacgagauccugaagaucuaccagcugauggaccacagcaacauggacugcuucaucugcugcauccugagccacggcgacaagggcaucaucuacggcaccgacggccaggaggcccccaucuacgagcugaccagccaguucaccggccugaagugccccagccuggccggcaagcccaagguguucuucauccaggccugccagggcgacaacuaccagaagggcauccccguggagaccgacagcgaggagcagcccuaccuggagauggaccugagcagcccccagaccagauacauccccgacgaggccgacuuccugcugggcauggccaccgugaacaacugcgugagcuacagaaaccccgccgagggcaccugguacauccagagccugugccagagccugagagagagaugccccagaggcgacgacauccugaccauccugaccgaggugaacuacgaggugagcaacaaggacgacaagaagaacaugggcaagcagaugccccagcccaccuucacccugagaaagaagcugguguuccccagcgacuga

SEQ ID NO: 7103 - RNA, 1188 nt, Artificial Sequence
  derived and/or modified sequence opt5 from Caspase_8__Homo_sapiens__ABX09989
auggacuucagcagaaaccuguacgauaucggcgagcagcucgacuccgaagaucuggccucucuuaaguuucugagccucgacuauauuccccaacggaaacaggagccuaucaaggaugcucugaugcuuuuccagcgccugcaggagaaaagaaugcucgaggaauccaaucugucuuuucugaaggagcuccuguuccggauuaaccgccuugaccugcucaucaccuaccugaauacaagaaaagaggaaauggagcgggaacuucaaacgccggggcgcgcccagauuagcgcguauagagugaugcuguaccagaucuccgaggaggucucucggagcgaacuccgcuccuuuaaguuccugcugcaggaggaaaucagcaagugcaaacucgaugacgauaugaaccugcuugacauuuuuaucgagauggaaaagagaguuauucugggagagggcaaacucgauauccugaagcgggugugugcucaaauuaauaaaucucuucugaagaucauuaacgacuaugaggaguucuccaagggggcccucaccacaaccuuugaagaacugcacuucgagaucaaaccccaucacgauugcacaguggaacagaucuacgagauucugaagaucuaucagcucauggaccauagcaauauggacuguuuuauuugcuguauccugucucacggagauaaaggcauuaucuacgggaccgacggacaggaggccccuaucuacgaacuuacaucccaauucaccggccugaagugccccagccucgcuggcaaaccuaaggucuuuuucauucaggccugucagggggauaacuaucaaaaaggaauccccguggagacggacucugaagaacagccuuaccuggaaauggaucuuuccagcccgcagacccgcuauauucccgacgaggcugauuuccugcucggcauggccacaguuaauaacugcguguccuacagaaauccugcggaggggaccugguauauccagucucugugucaaagccugcgggaacgcugccccagaggagacgauauucucacaauccugaccgaggucaacuacgaaguguccaauaaggacgauaagaaaaacaugggcaagcagaugccucagcccacguuuacacuucggaaaaagcugguuuucccgagcgacuga

SEQ ID NO: 7104 - RNA, 1188 nt, Artificial Sequence
  derived and/or modified sequence opt6 from Caspase_8__Homo_sapiens__ABX09989
auggacuucuccagaaaucuauacgacauaggagaacaacuagacucagaagaccuagcuucucuaaaauuucuaucacuagacuacauaccacaacgaaaacaagaaccaauaaaagacgcauuaaugcuauuccaaagauuacaagaaaaaagaaugcuagaagaaucaaaucuaucauuccuaaaagaacuacuauuuagaauaaacagacucgaccuccuaauaacauaccuaaacacaagaaaagaagaaauggaaagagaacuccaaaccccaggaagagcacaaauaucagcauaccgaguaaugcuauaucaaauaucagaagaagucucacgaucagaacuacgauccuucaaauuccuauuacaagaagaaauaucaaaaugcaaacuagacgacgacaugaacuuacuagacauauuuauagaaauggaaaaaagaguaauacuaggagagggcaaacucgacauacuaaaaagaguuugcgcccaaauuaauaaaucacugcuaaaaauaaucaaugacuacgaagaauucucaaaaggagcacuaaccacuacauucgaagaacugcacuucgaaauaaaaccacaccacgacuguacaguagaacaaauauacgaaauauuaaaaauauaccaacugauggaucauuccaauauggacugcuuuauaugcugcauacucucacacggagacaaaggaauaauauacggaacagacggucaagaagcaccaauauacgaacuuacaucacaauucacaggauuaaaaugcccaucauuagccggaaaaccaaaaguauucuucauccaagcaugccaaggcgacaacuaccaaaaaggcauaccaguagaaacagacagugaagaacaaccauacuuagaaauggauuuauccucaccccaaacaagauauauacccgacgaagcagacuucuuacuaggaauggcaacuguuaauaacugcguuucauauagaaauccagcagaaggaacaugguauauacaaucauuaugccaaagccuaagagaaagaugccccagaggagacgauauacuuacaauacuaacagaaguaaacuacgaaguuuccaacaaagacgacaaaaaaaacaugggcaaacaaaugccucaaccaacauucacuuuaagaaaaaaauuaguauucccuagcgauuaa

SEQ ID NO: 7105 - protein, 108 aa, Artificial Sequence
  Caspase_8__Homo_sapiens__C3S3G0
MDFSRNLYDIGEQLDSEDLASLKFLSLDYIPQRKQEPIKDALMLFQRLQEKRMLEESNLSFLKELLFRINRLDLLITYLNTRKEEMERELQTPGRAQISAYRTCWIFS

SEQ ID NO: 7106 - RNA, 327 nt, Artificial Sequence
  Caspase_8__Homo_sapiens__ACF93415
auggacuucagcagaaaucuuuaugauauuggggaacaacuggacagugaagaucuggccucccucaaguuccugagccuggacuacauuccgcaaaggaagcaagaacccaucaaggaugccuugauguuauuccagagacuccaggaaaagagaauguuggaggaaagcaaucuguccuuccugaaggagcugcucuuccgaauuaauagacuggauuugcugauuaccuaccuaaacacuagaaaggaggagauggaaagggaacuucagacaccaggcagggcucaaauuucugccuacagaaccugcuggauauuuucauag

SEQ ID NO: 7107 - RNA, 327 nt, Artificial Sequence
  derived and/or modified sequence opt1 from Caspase_8__Homo_sapiens__ACF93415
auggacuucagccgcaaccuguacgacaucggcgagcagcucgacuccgaggaccuggccagccugaaguuccucucccuggacuacaucccccagcggaagcaggagccgaucaaggacgcccugaugcuguuccagcgccugcaggagaagcggaugcuggaggagagcaaccucuccuuccugaaggagcuccucuuccgcaucaaccggcuggaccugcucaucaccuaccugaacacccgcaaggaggagauggagcgggagcugcagacgcccgggcgcgcgcagaucagcgccuaccggaccugcuggaucuucuccuga

SEQ ID NO: 7108 - RNA, 327 nt, Artificial Sequence
  derived and/or modified sequence opt2 from Caspase_8__Homo_sapiens__ACF93415
auggacuucucccgcaaccucuacgacaucggcgagcagcucgacuccgaggaccucgccucccucaaguuccucucccucgacuacaucccccagcgcaagcaggagcccaucaaggacgcccucaugcucuuccagcgccuccaggagaagcgcaugcucgaggaguccaaccucuccuuccucaaggagcuccucuuccgcaucaaccgccucgaccuccucaucaccuaccucaacacccgcaaggaggagauggagcgcgagcuccagacccccggccgcgcccagaucuccgccuaccgcaccugcuggaucuucuccuga

SEQ ID NO: 7109 - RNA, 327 nt, Artificial Sequence
  derived and/or modified sequence opt3 from Caspase_8__Homo_sapiens__ACF93415
auggacuucagcagaaaccuguacgauaucggcgagcagcucgacuccgaagaucuugccucucugaaguuuuugucauuagacuauauuccccaaaggaaacaggagccuauaaaggaugcucugaugcuauuccagcggcuccaggaaaaacgcaugcuggaggaaaguaaucuuagcuuucugaaggaguugcucuuucgaaucaaccgucuggaccugcucauuaccuacuuaaauacaagaaaagaggaaauggagagggaacugcaaacuccagggcgggcacagaucuccgccuaucgcacgugcuggauuuucucuuga

SEQ ID NO: 7110 - RNA, 327 nt, Artificial Sequence
  derived and/or modified sequence opt4 from Caspase_8__Homo_sapiens__ACF93415
auggacuucagcagaaaccuguacgacaucggcgagcagcuggacagcgaggaccuggccagccugaaguuccugagccuggacuacaucccccagagaaagcaggagcccaucaaggacgcccugaugcuguuccagagacugcaggagaagagaaugcuggaggagagcaaccugagcuuccugaaggagcugcuguucagaaucaacagacuggaccugcugaucaccuaccugaacaccagaaaggaggagauggagagagagcugcagacccccggcagagcccagaucagcgccuacagaaccugcuggaucuucagcuga

SEQ ID NO: 7111 - RNA, 327 nt, Artificial Sequence
  derived and/or modified sequence opt5 from Caspase_8__Homo_sapiens__ACF93415
auggacuucagcagaaaccuguacgauaucggcgagcagcucgacuccgaagaucuggccucucuuaaguuucugagccucgacuauauuccccaacggaaacaggagccuaucaaggaugcucugaugcuuuuccagcgccugcaggagaaaagaaugcucgaagaauccaaucugucuuuucugaaggagcuccuguuccggauuaaccgccuugaccugcucaucaccuaccugaauacaagaaaagaggaaauggagcgggaacuucaaacgccggggcgcgcccagauuagcgcguauagaaccugcuggaucuuuuccuga

SEQ ID NO: 7112 - RNA, 327 nt, Artificial Sequence
  derived and/or modified sequence opt6 from Caspase_8__Homo_sapiens__ACF93415
auggacuucucaagaaaccuauacgacauaggagaacaacuagacucagaagaccuagcaucacuaaaauuccuaucacuagacuacauaccacaaagaaaacaagaaccaauaaaagacgcacuaaugcuauuccaaagacuacaagaaaaaagaaugcuagaagaaucaaaccuaucauuccuaaaagaacuacuauucagaauaaacagacuagaccuacuaauaacauaccuaaacacaagaaaagaagaaauggaaagagaacuacaaacaccaggaagagcacaaauaucagcauacagaacaugcuggauauucucauaa

SEQ ID NO: 7113 - protein, 479 aa, Artificial Sequence
  Caspase_8__Homo_sapiens__Q14790
MDFSRNLYDIGEQLDSEDLASLKFLSLDYIPQRKQEPIKDALMLFQRLQEKRMLEESNLSFLKELLFRINRLDLLITYLNTRKEEMERELQTPGRAQISAYRVMLYQISEEVSRSELRSFKFLLQEEISKCKLDDDMNLLDIFIEMEKRVILGEGKLDILKRVCAQINKSLLKIINDYEEFSKERSSSLEGSPDEFSNGEELCGVMTISDSPREQDSESQTLDKVYQMKSKPRGYCLIINNHNFAKAREKVPKLHSIRDRNGTHLDAGALTTTFEELHFEIKPHDDCTVEQIYEILKIYQLMDHSNMDCFICCILSHGDKGIIYGTDGQEAPIYELTSQFTGLKCPSLAGKPKVFFIQACQGDNYQKGIPVETDSEEQPYLEMDLSSPQTRYIPDEADFLLGMATVNNCVSYRNPAEGTWYIQSLCQSLRERCPRGDDILTILTEVNYEVSNKDDKKNMGKQMPQPTFTLRKKLVFPSD

SEQ ID NO: 7114 - RNA, 1440 nt, Artificial Sequence
  Caspase_8__Homo_sapiens__CAA66853
auggacuucagcagaaaucuuuaugauauuggggaacaacuggacagugaagaucuggccucccucaaguuccugagccuggacuacauuccgcaaaggaagcaagaacccaucaaggaugccuugauguuauuccagagacuccaggaaaagagaauguuggaggaaagcaaucuguccuuccugaaggagcugcucuuccgaauuaauagacuggauuugcugauuaccuaccuaaacacuagaaaggaggagauggaaagggaacuucagacaccaggcagggcucaaauuucugccuacagggucaugcucuaucagauuucagaagaagugagcagaucagaauugaggucuuuuaaguuucuuuugcaagaggaaaucuccaaaugcaaacuggaugaugacaugaaccugcuggauauuuucauagagauggagaagagggucauccugggagaaggaaaguuggacauccugaaaagagucugugcccaaaucaacaagagccugcugaagauaaucaacgacuaugaagaauucagcaaagagagaagcagcagccuugaaggaaguccugaugaauuuucaaauggggaggaguugugugggguaaugacaaucucggacucuccaagagaacaggauagugaaucacagacuuuggacaaaguuuaccaaaugaaaagcaaaccucggggauacugucugaucaucaacaaucacaauuuugcaaaagcacgggagaaagugcccaaacuucacagcauuagggacaggaauggaacacacuuggaugcaggggcuuugaccacgaccuuugaagagcuucauuuugagaucaagccccacgaugacugcacaguagagcaaaucuaugagauuuugaaaaucuaccaacucauggaccacaguaacauggacugcuucaucugcuguauccucucccauggagacaaaggcaucaucuauggcacugauggacaggaggcccccaucuaugagcugacaucucaguucacugguuugaagugcccuucccuugcuggaaaacccaaaguguuuuuuauucaggcuugucagggggauaacuaccagaaagguauaccuguugagacugauucagaggagcaacccuauuuagaaauggauuuaucaucaccucaaacgagauauaucccggaugaggcugacuuucugcuggggauggccacugugaauaacuguguuuccuaccgaaacccugcagagggaaccugguacauccagucacuuugccagagccugagagagcgauguccucgaggcgaugauauucucaccauccugacugaagugaacuaugaaguaagcaacaaggaugacaagaaaaacauggggaaacagaugccucagccuacuuucacacuaagaaaaaaacuugucuucccuucugauuga

SEQ ID NO: 7115 - RNA, 1440 nt, Artificial Sequence
  derived and/or modified sequence opt1 from Caspase_8__Homo_sapiens__CAA66853
auggacuucagccgcaaccuguacgacaucggcgagcagcucgacuccgaggaccuggccagccugaaguuccucucccuggacuacaucccccagcggaagcaggagccgaucaaggacgcccugaugcuguuccagcgccugcaggagaagcggaugcuggaggagagcaaccucuccuuccugaaggagcuccucuuccgcaucaaccggcuggaccugcucaucaccuaccugaacacccgcaaggaggagauggagcgggagcugcagacgcccgggcgcgcgcagaucagcgccuaccgggugaugcucuaccagaucuccgaggaggucagccgcuccgagcugcggagcuucaaguuccugcuccaggaggagaucuccaagugcaagcuggacgacgacaugaaccugcucgacaucuucaucgagauggagaagcgcgugauccugggcgaggggaagcuggacauccucaagcgggugugcgcccagaucaacaagagccugcugaagaucaucaacgacuacgaggaguucuccaaggagcgcagcuccagccucgagggcucccccgacgaguucagcaacggggaggagcugugcggcgucaugaccaucuccgacagcccccgggagcaggacagcgagucccagacccuggacaagguguaccagaugaaguccaagccgcgcggcuacugccucaucaucaacaaccacaacuucgccaaggcccgggagaaggugcccaagcugcacagcauccgcgaccggaacgggacccaccuggacgcgggcgcccucacgaccaccuucgaggagcugcacuucgagaucaagccccacgacgacugcaccgucgagcagaucuacgagauccugaagaucuaccagcucauggaccacagcaacauggacugcuucaucugcugcauccugucccacggggacaagggcaucaucuacgggacggacggccaggaggcccccaucuacgagcugaccagccaguucaccggccucaagugcccgucccuggccgggaagcccaagguguucuucauccaggcgugccagggcgacaacuaccagaaggggauccccguggagaccgacagcgaggagcagcccuaccuggagauggaccucuccagcccgcagacgcgcuacauccccgacgaggccgacuuccugcugggcauggccaccgucaacaacugcguguccuaccggaaccccgccgagggcaccugguacauccagagccucugccagucccugcgcgagcgcugcccccgcggggacgacauccugaccauccugacggaggugaacuacgaggucagcaacaaggacgacaagaagaacaugggcaagcagaugccgcagcccaccuucacccuccggaagaagcugguguuccccuccgacuga

SEQ ID NO: 7116 - RNA, 1440 nt, Artificial Sequence
  derived and/or modified sequence opt2 from Caspase_8__Homo_sapiens__CAA66853
auggacuucucccgcaaccucuacgacaucggcgagcagcucgacuccgaggaccucgccucccucaaguuccucucccucgacuacaucccccagcgcaagcaggagcccaucaaggacgcccucaugcucuuccagcgccuccaggagaagcgcaugcucgaggaguccaaccucuccuuccucaaggagcuccucuuccgcaucaaccgccucgaccuccucaucaccuaccucaacacccgcaaggaggagauggagcgcgagcuccagacccccggccgcgcccagaucuccgccuaccgcgucaugcucuaccagaucuccgaggaggucucccgcuccgagcuccgcuccuucaaguuccuccuccaggaggagaucuccaagugcaagcucgacgacgacaugaaccuccucgacaucuucaucgagauggagaagcgcgucauccucggcgagggcaagcucgacauccucaagcgcgucugcgcccagaucaacaagucccuccucaagaucaucaacgacuacgaggaguucuccaaggagcgcuccuccucccucgagggcucccccgacgaguucuccaacggcgaggagcucugcggcgucaugaccaucuccgacuccccccgcgagcaggacuccgagucccagacccucgacaaggucuaccagaugaaguccaagccccgcggcuacugccucaucaucaacaaccacaacuucgccaaggcccgcgagaagguccccaagcuccacuccauccgcgaccgcaacggcacccaccucgacgccggcgcccucaccaccaccuucgaggagcuccacuucgagaucaagccccacgacgacugcaccgucgagcagaucuacgagauccucaagaucuaccagcucauggaccacuccaacauggacugcuucaucugcugcauccucucccacggcgacaagggcaucaucuacggcaccgacggccaggaggcccccaucuacgagcucaccucccaguucaccggccucaagugccccucccucgccggcaagcccaaggucuucuucauccaggccugccagggcgacaacuaccagaagggcauccccgucgagaccgacuccgaggagcagcccuaccucgagauggaccucuccuccccccagacccgcuacauccccgacgaggccgacuuccuccucggcauggccaccgucaacaacugcgucuccuaccgcaaccccgccgagggcaccugguacauccagucccucugccagucccuccgcgagcgcugcccccgcggcgacgacauccucaccauccucaccgaggucaacuacgaggucuccaacaaggacgacaagaagaacaugggcaagcagaugccccagcccaccuucacccuccgcaagaagcucgucuuccccuccgacuga

SEQ ID NO: 7117 - RNA, 1440 nt, Artificial Sequence
  derived and/or modified sequence opt3 from Caspase_8__Homo_sapiens__CAA66853
auggacuucagcagaaaccuguacgauaucggcgagcagcucgacuccgaagaucuugccucucugaaguuuuugucauuagacuauauuccccaaaggaaacaggagccuauaaaggaugcucugaugcuauuccagcggcuccaggaaaaacgcaugcuggaggaaaguaaucuuagcuuucugaaggagcuccucuuccgaaucaaccgucuggaccugcucauuaccuacuuaaauacaagaaaagaggaaauggagagggaacugcaaacuccagggcgggcacagaucuccgccuaucgcgugaugcuuuaccagauuucugaggaggucucgagaucagaauugaggagcuuuaaguuccugcuacaggaggaaaucaguaagugcaaacucgaugacgauaugaaccugcuugacauauuuaucgagauggaaaagcggguuauucugggagaggguaaauuggauauccucaagcgcgugugugcgcaaauuaauaaaucccuguuaaagaucauaaacgacuaugaggaguucucuaaggagcgaagcuccucacuggaaggcaguccggaugaguuuagcaauggggaagaguugugcggaguaaugacgauuucugacucccccagagagcaggacucagaaagccagacccuugauaaaguguaccagaugaagaguaaaccuaggggcuauugucugaucauuaacaaucacaacuucgcuaaggcccgggagaaagucccaaaguugcauucuauccgugaccgcaaugguacacaccuagaugcaggggcccugacuaccacauuugaagaacuccauuucgaaaucaaaccccacgacgauugcaccguggagcaaauuuacgagauacugaagaucuaccagcuuauggaccauuccaacauggauuguuuuauuugcuguauccugagccacggagacaagggcauaauuuauggcacugaugggcaggaagcuccuaucuacgaguugacaucgcaauucaccggacucaaaugcccaucucuggcagguaagcccaaaguuuucuuuauccaggccugucagggcgacaauuaucagaaggggauuccuguggaaacggauuccgaggagcaaccauacuuagaaauggaccugucaaguccgcagacuagauauauccccgacgaggcugauuuccuacucggaauggccaccgucaacaauugcgugagcuacaggaacccugcggaaggcacaugguauauucagucccugugucagucucuucgggagcgaugcccacgcggugacgauauauugacuauccugaccgaaguaaacuacgagguuagcaauaaagacgauaagaagaacauggggaaacaaaugccccagccuacauuuacccucagaaagaaacugguguucccaucagacuga

SEQ ID NO: 7118 - RNA, 1440 nt, Artificial Sequence
  derived and/or modified sequence opt4 from Caspase_8__Homo_sapiens__CAA66853
auggacuucagcagaaaccuguacgacaucggcgagcagcuggacagcgaggaccuggccagccugaaguuccugagccuggacuacaucccccagagaaagcaggagcccaucaaggacgcccugaugcuguuccagagacugcaggagaagagaaugcuggaggagagcaaccugagcuuccugaaggagcugcuguucagaaucaacagacuggaccugcugaucaccuaccugaacaccagaaaggaggagauggagagagagcugcagacccccggcagagcccagaucagcgccuacagagugaugcuguaccagaucagcgaggaggugagcagaagcgagcugagaagcuucaaguuccugcugcaggaggagaucagcaagugcaagcuggacgacgacaugaaccugcuggacaucuucaucgagauggagaagagagugauccugggcgagggcaagcuggacauccugaagagagugugcgcccagaucaacaagagccugcugaagaucaucaacgacuacgaggaguucagcaaggagagaagcagcagccuggagggcagccccgacgaguucagcaacggcgaggagcugugcggcgugaugaccaucagcgacagccccagagagcaggacagcgagagccagacccuggacaagguguaccagaugaagagcaagcccagaggcuacugccugaucaucaacaaccacaacuucgccaaggccagagagaaggugcccaagcugcacagcaucagagacagaaacggcacccaccuggacgccggcgcccugaccaccaccuucgaggagcugcacuucgagaucaagccccacgacgacugcaccguggagcagaucuacgagauccugaagaucuaccagcugauggaccacagcaacauggacugcuucaucugcugcauccugagccacggcgacaagggcaucaucuacggcaccgacggccaggaggcccccaucuacgagcugaccagccaguucaccggccugaagugccccagccuggccggcaagcccaagguguucuucauccaggccugccagggcgacaacuaccagaagggcauccccguggagaccgacagcgaggagcagcccuaccuggagauggaccugagcagcccccagaccagauacauccccgacgaggccgacuuccugcugggcauggccaccgugaacaacugcgugagcuacagaaaccccgccgagggcaccugguacauccagagccugugccagagccugagagagagaugccccagaggcgacgacauccugaccauccugaccgaggugaacuacgaggugagcaacaaggacgacaagaagaacaugggcaagcagaugccccagcccaccuucacccugagaaagaagcugguguuccccagcgacuga

SEQ ID NO: 7119 - RNA, 1440 nt, Artificial Sequence
  derived and/or modified sequence opt5 from Caspase_8__Homo_sapiens__CAA66853
auggacuucagcagaaaccuguacgauaucggcgagcagcucgacuccgaagaucuggccucucuuaaguuucugagccucgacuauauuccccaacggaaacaggagccuaucaaggaugcucugaugcuuuuccagcgccugcaggagaaaagaaugcucgaggaauccaaucugucuuuucugaaggagcuccuguuccggauuaaccgccuugaccugcucaucaccuaccugaauacaagaaaagaggaaauggagcgggaacuucaaacgccggggcgcgcccagauuagcgcguauagagugaugcuguaccagaucuccgaggaggucucucggagcgaacuccgcuccuuuaaguuccugcugcaggaggaaaucagcaagugcaaacucgaugacgauaugaaccugcuugacauuuuuaucgagauggaaaagagaguuauucugggagagggcaaacucgauauccugaagcgggugugugcucaaauuaauaaaucucuucugaagaucauuaacgacuaugaggaguucuccaaggagcgcagcagcucccucgaagggagccccgaugaguuuucuaauggagaagaacugugcggcgugaugaccaucuccgacagcccuagagagcaggacuccgaaucucagacacuggauaaagucuaccagaugaagucuaaaccccggggguauugucucaucauuaacaaucacaacuucgccaaggcccgcgagaaagugccuaagcugcauuccaucagagaccggaauggaacccaccuugaugcuggcgcccugacaaccacauuugaagaacuccauuucgaaauuaaaccccacgacgauugcaccguugagcaaaucuacgagauucugaagaucuaccagcuuauggaccauagcaacauggauuguuuuaucugcuguauucugucucacggcgacaaggggaucauuuauggaacggauggccaggaagcuccuaucuacgagcucaccucccaauucacagggcugaaaugcccgagccuggccggaaagcccaaaguguucuuuauucaggcgugucagggcgacaauuaucagaaggggaucccugucgaaaccgauucugaggagcaacccuaccucgaaauggaccugagcuccccucagacaagauauauccccgacgaggccgauuuccuucugggaauggcuaccgugaacaauugcguuucuuaccgcaacccggccgaaggcacgugguauauucagagccucugucagucccugcgggagagaugcccucgcggcgacgauauccugacaauucuuaccgaagugaacuacgaggucagcaauaaagacgauaagaagaacauggggaaacaaaugccccagccuacauuuacccuccggaagaaacugguguuccccucugacuga

SEQ ID NO: 7120 - RNA, 1440 nt, Artificial Sequence
  derived and/or modified sequence opt6 from Caspase_8__Homo_sapiens__CAA66853
auggacuucucaagaaauuuauacgacauaggugaacaacuagauucagaagacuuagcaucucuaaaguuucuuucacuagacuacauaccacaaagaaaacaagaaccaauaaaagaugcccuaaugcuauuccaaagauuacaagaaaaacgaaugcuagaagaaucaaauuuaucuuuucucaaagaauuacucuuuagaauaaacagacuagaccuacuaauaacauaccugaacacacgcaaagaagaaauggaacgagaacuacaaaccccaggaagagcacaaauaucagcauauagaguaaugcuauaccaaaucuccgaagaaguauccagaucagaacuaagaucauuuaaauuccuccuacaagaagaaauuucaaaauguaaauuagacgacgacaugaaucuacuagacaucuucauagaaauggaaaaaagaguaauacuaggagaaggaaaauuagauauacuaaaacgaguaugcgcacaaauaaauaaaucauuauuaaaaaucauaaacgacuaugaagaauuuucaaaagaaagaaguucaucauuagaaggaucacccgacgaauucuccaauggagaagaauuaugcggaguaaugacaaucucagacaguccaagagaacaagacucagaaucacaaacccucgacaaaguauaccaaaugaaaucaaaaccaagaggauacugucuaauaauaaacaaccacaacuucgccaaagcaagagaaaaaguacccaaauuacacuccaucagagacagaaacgguacucaucuagaugcaggcgcucuuacaacuacauucgaagaacuacacuucgaaauaaaaccucacgacgacugcacaguagaacaaauauaugaaauacuaaaaaucuaucaacuaauggaucauucaaacauggacugcuucauuugcugcauacuaucucacggagacaaaggaauaaucuacggaacagacggacaagaagcaccaauauaugaauuaacaagccaauuuacaggacuaaaauguccaucacucgcaggaaaaccuaaaguauuuuucauacaagcaugccaaggcgauaauuaccaaaaaggaauacccguagaaacagacuccgaagaacaaccauaccucgaaauggaucuaucaucaccacaaacucgauauauaccagacgaagcagacuuuuuauuaggcauggcaacaguaaauaauugcguaucauauagaaacccagccgaaggcacuugguacauacaaucccuaugucaaucauuaagagaacgaugcccccgaggagacgacauacucacaauauuaacagaaguaaacuaugaaguauccaauaaagacgauaaaaaaaacaugggcaaacaaaugccucaaccuacauuuacacucagaaaaaaacuaguauuuccaagcgacuaa

SEQ ID NO: 7121 - protein, 536 aa, Artificial Sequence
  Caspase_9__Homo_sapiens__A0A024R8F1
MSDYENDDECWSVLEGFRVTLTSVIDPSRITPYLRQCKVLNPDDEEQVLSDPNLVIRKRKVGVLLDILQRTGHKGYVAFLESLELYYPQLYKKVTGKEPARVFSMIIDASGESGLTQLLMTEVMKLQKKVQDLTALLSSKDDFIKELRVKDSLLRKHQERVQRLKEECEAGSRELKRCKEENYDLAMRLAHQSEEKGAALMRNRDLQLEIDQLKHSLMKAEDDCKVERKHTLKLRHAMEQRPSQELLWELQQEKALLQARVQELEASVQEGKLDRSSPYIQVLEEDWRQALRDHQEQANTIFSLRKDLRQGEARRLRCMEEKEMFELQCLALRKDSKMYKDRIEAILLQMEEVAIERDQAIATREELHAQHARGLQEKDALRKQVRELGEKADELQLQVFQCEAQLLAVEGRLRRQQLETLVLSSDLEDGSPRRSQELSLPQDLEDTQLSDKGCLAGGGSPKQPFAALHQEQVLRNPHDAGLSSGEPPEKERRRLKESFENYRRKRALRKMQKGWRQGEEDRENTTGSDNTDTEGS

SEQ ID NO: 7122 - RNA, 1611 nt, Artificial Sequence
  Caspase_9__Homo_sapiens__EAW88222
augucggacuacgagaacgaugacgagugcuggagcguccuggagggcuuccgggugacgcucaccucggucaucgaccccucacgcaucacaccuuaccugcggcagugcaagguccugaaccccgaugaugaggagcaggugcucagcgaccccaaccuggucauccgcaaacggaaagugggugugcuccuggacauccugcagcggaccggccacaagggcuacguggccuuccucgagagccuggagcucuacuacccgcagcuguacaagaaggucacaggcaaggagccggcccgcgucuucuccaugaucaucgacgcguccggggagucaggccugacucagcugcugaugacugaggucaugaagcugcagaagaaggugcaggaccugaccgcgcugcugagcuccaaagaugacuucaucaaggagcugcgggugaaggacagccugcugcgcaagcaccaggagcgugugcagaggcucaaggaggagugcgaggccggcagccgcgagcucaagcgcugcaaggaggagaacuacgaccuggccaugcgccuggcgcaccagagugaggagaagggcgccgcgcucaugcggaaccgugaccugcagcuggagauugaccagcucaagcacagccucaugaaggccgaggacgacugcaagguggagcgcaagcacacgcugaagcucaggcacgccauggagcagcggcccagccaggagcugcugugggagcugcagcaggagaaggcccugcuccaggcccgggugcaggagcuggaggccuccguccaggaggggaagcuggacaggagcagccccuacauccagguacuggaggaggacuggcggcaggcgcugcgggaccaccaggagcaggccaacaccaucuucucccugcgcaaggaccuccgccagggcgaggcccgacgccuccggugcauggaggagaaggagauguucgagcugcagugccuggcacuacguaaggacuccaagauguacaaggaccgcaucgaggccauccugcugcagauggaggaggucgccauugagcgggaccaggccauagccacgcgggaggagcugcacgcacagcacgcccggggccugcaggagaaggacgcgcugcgcaagcaggugcgggagcugggcgagaaggcggaugagcugcagcugcagguguuccagugugaggcgcagcuacuggccguggagggcaggcucaggcggcagcagcuggagacgcucguccugagcuccgaccuggaagauggcucacccaggaggucccaggagcucucacucccccaggaccuggaggacacccagcucucagacaaaggcugccuugccggcggggggagcccgaaacagcccuuugcagcucugcaccaggagcagguuuugcggaacccccaugacgcaggccugagcagcggggagccgcccgagaaggagcggcggcgccucaaagagaguuuugagaacuaccgcaggaagcgcgcccucaggaagaugcagaaaggauggcggcagggggaggaggaccgggagaacaccacgggcagcgacaacaccgacacugagggcuccuag

SEQ ID NO: 7123 - RNA, 1611 nt, Artificial Sequence
  derived and/or modified sequence opt1 from Caspase_9__Homo_sapiens__EAW88222
augagcgacuacgagaacgacgacgagugcugguccgugcuggagggcuuccgcgugacccucaccagcgugaucgaccccucccggaucacgccguaccugcgccagugcaaggugcugaaccccgacgacgaggagcagguccucagcgaccccaaccuggugauccggaagcgcaagguggggguccugcucgacauccugcagcggaccggccacaagggguacguggccuuccuggagucccucgagcuguacuacccccagcuguacaagaaggugaccggcaaggagccggcccgcgucuucagcaugaucaucgacgcguccggggagagcggccucacccagcugcugaugacggaggugaugaagcuccagaagaaggugcaggaccugaccgcccugcucuccagcaaggacgacuucaucaaggagcugcgggucaaggacucccugcuccgcaagcaccaggagcgggugcagcgccugaaggaggagugcgaggccggcagccgggagcugaagcgcugcaaggaggagaacuacgaccucgccaugcggcuggcccaccaguccgaggagaagggggcggcccugaugcgcaaccgggaccuccagcuggagaucgaccagcugaagcacagccucaugaaggccgaggacgacugcaagguggagcgcaagcacacccugaagcugcggcacgccauggagcagcgccccucccaggagcuccugugggagcugcagcaggagaaggcgcuccugcaggcccggguccaggagcuggaggccagcgugcaggagggcaagcucgaccgcuccagccccuacauccaggugcuggaggaggacuggcggcaggcccugcgcgaccaccaggagcaggccaacaccaucuucucccuccgcaaggaccugcggcagggggaggcgcgccggcugcgcugcauggaggagaaggagauguucgagcuccagugccuggcccugcggaaggacagcaagauguacaaggaccgcaucgaggccauccuccugcagauggaggaggucgccaucgagcgggaccaggccaucgcgacgcgcgaggagcugcacgcccagcacgcccggggccugcaggagaaggacgcccuccgcaagcagguccgggagcugggggagaaggccgacgagcugcagcuccagguguuccagugcgaggcgcagcugcuggccguggagggccgccuccggcgccagcagcuggagacccuggugcucagcuccgaccuggaggacggcagcccccggcgcucccaggagcugagccucccgcaggaccuggaggacacccagcuguccgacaaggggugccucgccggcgggggcagccccaagcagcccuucgccgcccugcaccaggagcagguccugcggaacccccacgacgcgggccucuccagcggggagccgcccgagaaggagcgccggcgccugaaggaguccuucgagaacuaccgccggaagcgcgcccugcggaagaugcagaagggcuggcgccagggggaggaggaccgggagaacaccacgggcagcgacaacaccgacaccgagggguccuga

SEQ ID NO: 7124 - RNA, 1611 nt, Artificial Sequence
  derived and/or modified sequence opt2 from Caspase_9__Homo_sapiens__EAW88222
auguccgacuacgagaacgacgacgagugcugguccguccucgagggcuuccgcgucacccucaccuccgucaucgaccccucccgcaucacccccuaccuccgccagugcaagguccucaaccccgacgacgaggagcagguccucuccgaccccaaccucgucauccgcaagcgcaaggucggcguccuccucgacauccuccagcgcaccggccacaagggcuacgucgccuuccucgagucccucgagcucuacuacccccagcucuacaagaaggucaccggcaaggagcccgcccgcgucuucuccaugaucaucgacgccuccggcgaguccggccucacccagcuccucaugaccgaggucaugaagcuccagaagaagguccaggaccucaccgcccuccucuccuccaaggacgacuucaucaaggagcuccgcgucaaggacucccuccuccgcaagcaccaggagcgcguccagcgccucaaggaggagugcgaggccggcucccgcgagcucaagcgcugcaaggaggagaacuacgaccucgccaugcgccucgcccaccaguccgaggagaagggcgccgcccucaugcgcaaccgcgaccuccagcucgagaucgaccagcucaagcacucccucaugaaggccgaggacgacugcaaggucgagcgcaagcacacccucaagcuccgccacgccauggagcagcgccccucccaggagcuccucugggagcuccagcaggagaaggcccuccuccaggcccgcguccaggagcucgaggccuccguccaggagggcaagcucgaccgcuccucccccuacauccagguccucgaggaggacuggcgccaggcccuccgcgaccaccaggagcaggccaacaccaucuucucccuccgcaaggaccuccgccagggcgaggcccgccgccuccgcugcauggaggagaaggagauguucgagcuccagugccucgcccuccgcaaggacuccaagauguacaaggaccgcaucgaggccauccuccuccagauggaggaggucgccaucgagcgcgaccaggccaucgccacccgcgaggagcuccacgcccagcacgcccgcggccuccaggagaaggacgcccuccgcaagcagguccgcgagcucggcgagaaggccgacgagcuccagcuccaggucuuccagugcgaggcccagcuccucgccgucgagggccgccuccgccgccagcagcucgagacccucguccucuccuccgaccucgaggacggcuccccccgccgcucccaggagcucucccucccccaggaccucgaggacacccagcucuccgacaagggcugccucgccggcggcggcucccccaagcagcccuucgccgcccuccaccaggagcagguccuccgcaacccccacgacgccggccucuccuccggcgagccccccgagaaggagcgccgccgccucaaggaguccuucgagaacuaccgccgcaagcgcgcccuccgcaagaugcagaagggcuggcgccagggcgaggaggaccgcgagaacaccaccggcuccgacaacaccgacaccgagggcuccuga

SEQ ID NO: 7125 - RNA, 1611 nt, Artificial Sequence
  derived and/or modified sequence opt3 from Caspase_9__Homo_sapiens__EAW88222
augagcgacuacgagaacgaugacgaaugcugguccgugcuggagggcuucagagucacccucacaucuguuaucgaucccucaaggauuacuccuuaucuucggcaguguaaggugcugaauccagacgaugaggagcaaguauugagugacccgaacuuagugauacgcaaacgaaaggucggggugcugcuagauauccuccagcguacgggacacaaagguuacguugccuuucuggaaagccuugagcuguauuacccccaguuguauaagaaagugaccggcaaggagccugcuagagucuucuccaugauuaucgacgcaucuggggaaucgggacucacacagcugcugaugacugaggugaugaagcuccaaaagaagguacaggauuuaaccgcccugcuuucaagcaaagacgauuuuauuaaggaauugaggguuaaagacagucugcuacggaagcaucaggagcgcgugcagagacucaaggaggaaugcgaggcgggcuccagggaacugaaacgguguaaggaggaaaauuacgaucuugcuaugcgccuggcccaccaaucugaggagaaaggugcagccuugaugcgaaacagagaccuccagcuggaaaucgaccaguuaaagcauagccugaugaaagcugaggaugacugcaaggucgaaaggaaacacacacucaaacuucggcaugcaauggagcagcguccaucccaagaacuguugugggagcuacagcaggagaaggcccugcuccaagcucgcgugcaggaacuggaggccucagugcaggaagggaaacuugauagaaguagccccuauauacagguccuggaggaagacuggaggcaagcguugcgggaucaccaggagcaggcaaauaccaucuucucucuccgaaaggaccugcgccagggagaggccagaagguuacgguguauggaagagaaagaaauguuugagcugcaaugccuagcucuccgcaaggauuccaaaauguacaaggacagaauugaggccauccugcuucagauggaagagguugcaauugaaagggaucaggcuaucgccacucgugaggaauugcacgcgcagcaugcccggggccugcaagagaaggacgcacuccgaaaacaggugagagagcugggcgaaaaggcugaugagcuucagcugcagguauuccaaugugaagcccaguugcucgcuguggaggggaggcugcgccggcagcaauuagaaacacugguccuaucaagcgaccucgaggacggaaguccuagaaggucucaggagcugucccuuccacaggauuuggaagacacccagcugagcgauaaagguugccucgccggcgggggaucgcccaagcaaccuuuugcagcccugcaccaggaacagguguuacgcaacccacaugacgcuggccugucuuccggugaaccgcccgagaaagaacgacggcgucuuaaggagucauucgagaauuacagaaggaagcgcgcguugcggaaaaugcagaagggguggagacaaggagaagaggauagggaaaacacgacuggcagugacaauaccgauacagagggcagcuga

SEQ ID NO: 7126 - RNA, 1611 nt, Artificial Sequence
  derived and/or modified sequence opt4 from Caspase_9__Homo_sapiens__EAW88222
augagcgacuacgagaacgacgacgagugcuggagcgugcuggagggcuucagagugacccugaccagcgugaucgaccccagcagaaucacccccuaccugagacagugcaaggugcugaaccccgacgacgaggagcaggugcugagcgaccccaaccuggugaucagaaagagaaaggugggcgugcugcuggacauccugcagagaaccggccacaagggcuacguggccuuccuggagagccuggagcuguacuacccccagcuguacaagaaggugaccggcaaggagcccgccagaguguucagcaugaucaucgacgccagcggcgagagcggccugacccagcugcugaugaccgaggugaugaagcugcagaagaaggugcaggaccugaccgcccugcugagcagcaaggacgacuucaucaaggagcugagagugaaggacagccugcugagaaagcaccaggagagagugcagagacugaaggaggagugcgaggccggcagcagagagcugaagagaugcaaggaggagaacuacgaccuggccaugagacuggcccaccagagcgaggagaagggcgccgcccugaugagaaacagagaccugcagcuggagaucgaccagcugaagcacagccugaugaaggccgaggacgacugcaagguggagagaaagcacacccugaagcugagacacgccauggagcagagacccagccaggagcugcugugggagcugcagcaggagaaggcccugcugcaggccagagugcaggagcuggaggccagcgugcaggagggcaagcuggacagaagcagccccuacauccaggugcuggaggaggacuggagacaggcccugagagaccaccaggagcaggccaacaccaucuucagccugagaaaggaccugagacagggcgaggccagaagacugagaugcauggaggagaaggagauguucgagcugcagugccuggcccugagaaaggacagcaagauguacaaggacagaaucgaggccauccugcugcagauggaggagguggccaucgagagagaccaggccaucgccaccagagaggagcugcacgcccagcacgccagaggccugcaggagaaggacgcccugagaaagcaggugagagagcugggcgagaaggccgacgagcugcagcugcagguguuccagugcgaggcccagcugcuggccguggagggcagacugagaagacagcagcuggagacccuggugcugagcagcgaccuggaggacggcagccccagaagaagccaggagcugagccugccccaggaccuggaggacacccagcugagcgacaagggcugccuggccggcggcggcagccccaagcagcccuucgccgcccugcaccaggagcaggugcugagaaacccccacgacgccggccugagcagcggcgagccccccgagaaggagagaagaagacugaaggagagcuucgagaacuacagaagaaagagagcccugagaaagaugcagaagggcuggagacagggcgaggaggacagagagaacaccaccggcagcgacaacaccgacaccgagggcagcuga

SEQ ID NO: 7127 - RNA, 1611 nt, Artificial Sequence
  derived and/or modified sequence opt5 from Caspase_9__Homo_sapiens__EAW88222
augagcgacuacgagaacgaugacgaaugcugguccgugcuggagggcuucagagucacccucacaucuguuaucgaucccagccggauuacgccuuaucugcgccaguguaaggugcuuaauccggacgaugaggaacaagugcuguccgaccccaaccucgucaucagaaaacggaagguggggguucugcuugauauucugcagcgcaccggacacaaaggcuacguggccuuucucgaaucucuggagcuguauuacccucagcucuauaagaaagucacagggaaggagcccgcuagaguguucagcaugaucauugacgccuccggagaaucuggccugacccagcuucugaugacagagguuaugaagcuccagaaaaaggugcaagaucugaccgcgcuucugagcuccaaagacgauuuuaucaaggaacuccgggucaaagacagccugcugcgcaagcaucaggagagagugcagcggcucaaggaggaaugcgaggcugggucucgcgaacugaaaagauguaaggaggaaaauuacgaucuugccaugcggcuggcccaccaauccgaggagaaaggagcugcccucaugcgcaacagagaccugcagcuugaaaucgaccagcugaagcauagccucaugaaagcugaggaugacugcaagguggaacggaaacacacacugaagcugcgccaugccauggagcagagaccuucucaagaacuccugugggagcuucagcaggagaaggcgcugcuccaagcccggguccaggaacuggaggcuuccguucaggaaggcaaacuugauagaagcucucccuauauucaggugcuggaggaagacuggcgccaagcccuccgggaucaccaggagcaggcuaauaccaucuucucccugagaaaggaccugcgccagggcgaggcccggagacuccgcuguauggaagagaaagaaauguuugagcugcaaugccuugcgcugcggaaggauagcaaaauguacaaggacagaauugaggccauccuccugcagauggaagagguggcuauugaacgcgaucaggccaucgcuacgcgggaggaacugcacgcccagcaugccagagggcuucaagagaaggacgcucuccgcaaacagguccgggagcugggagaaaaggcggaugagcugcagcuccagguguuccaaugugaagcccagcugcuugcuguugagggcagacugcggcgccagcaacucgaaacccuggugcuguccucugaccuugaggacgggagcccuagacggucccaggagcucagccugccgcaggaucuggaagacacacagcucucugauaaaggaugccuggccggcgggggaucccccaagcaaccuuuugccgcccuucaccaggagcagguccugagaaacccccaugacgcuggccucagcucuggcgaaccucccgagaaagaacgccggagacugaaggagagcuucgagaauuaccgcagaaagcgggcgcugcgcaaaaugcagaagggguggagacaaggagaagaggaucgggaaaacaccacaggcuccgacaauaccgauacggaggggucuuga

SEQ ID NO: 7128 - RNA, 1611 nt, Artificial Sequence
  derived and/or modified sequence opt6 from Caspase_9__Homo_sapiens__EAW88222
augucagauuacgaaaaugaugaugaauguuggucaguuuuagaaggauuuagagugacacuaaccucaguaauagacccaaguaggauaacaccauaucuaagacaauguaaagugcuaaauccagaugacgaagaacaaguauuaagcgauccaaaucuaguaauaagaaaaagaaaaguaggaguucucuuagacauacuccaacgaacaggacacaagggauacguagcauuucuagaaagccuggaauuauauuauccacaacucuacaaaaaagucacaggaaaagaaccagcaagagucuuuagcaugauaauagaugcgaguggagaaucuggacuaacacaauuauuaaugacugaaguuaugaaacuucaaaaaaaaguacaagacuuaacagcuuuauuaagcucaaaagacgacuuuauuaaagaauuacgaguaaaagauagcuuacugagaaaacaccaagaacgaguacaaagacuaaaagaagaaugcgaagcagggagcagagaacuaaaaagauguaaagaagaaaauuaugacuuagccaugagauuagcucaucaaucggaagaaaaaggagcugcauuaaugcgaaaucgagaucuccaacuugaaauagaucaguugaaacauucauuaaugaaagcagaagacgauugcaaaguagaacgaaagcacacacuaaaacuaagacacgcaauggaacaaagacccagucaagaauuacugugggaauuacaacaagaaaaagcacuauuacaagcaaggguacaagaacuagaagccucaguacaagaagggaaacuagaccguagcagcccuuacauacaaguacuagaagaagacuggcgacaagcacuaagagaucaccaggaacaggccaauacaauauuuucacuaaggaaagaucuaaggcaaggugaagcaagacgauuaagauguauggaagaaaaagaaauguuugaauugcaauguuuagcacuaagaaaagauucaaaaauguauaaagauagaauugaagcaauacuuuuacaaauggaagaaguagccauagaaagagaucaggcaaucgcaacaagagaagaauugcacgcacaacaugcaagaggacuacaagaaaaagaugcauuacgcaaacaagugagagaacuaggagaaaaagcagaugaauuacaauuacaaguauuccaaugcgaagcacagcuauuagcaguagaaggaagauuaagaagacaacaauuagaaaccuuagucuuaucaucagacuuagaagauggaucacccagaagaucacaagaauuaucguuaccacaagaucuugaagacacacaauuaagugauaaaggaugcuuagcaggcgggggaagcccaaaacaacccuuugcagcauuacaucaagaacaagugcuccgcaauccgcaugaugccggacucaguagcggugaaccuccagagaaagaaagaagaagauugaaagaaagcuuugaaaauuauaggcgcaaaagagcacucagaaaaaugcaaaaaggauggagacaaggagaagaagaucgagaaaacacaaccgguagcgauaauacagacacagaaggaaguuaa

SEQ ID NO: 7129 - protein, 366 aa, Artificial Sequence
  Caspase_9__Homo_sapiens__A0A024R8I4
MSDYENDDECWSVLEGFRVTLTSVIDPSRITPYLRQCKVLNPDDEEQVLSDPNLVIRKRKVGVLLDILQRTGHKGYVAFLESLELYYPQLYKKVTGKEPARVFSMIIDASGESGLTQLLMTEVMKLQKKVQDLTALLSSKDDFIKELRVKDSLLRKHQERVQRLKEECEAGSRELKRCKEENYDLAMRLAHQSEEKGAALMRNRDLQLEIDQLKHSLMKAEDDCKVERKHTLKLRHAMEQRPSQELLWELQQEKALLQARVQELEASVQEGKLDRSSPYIQVLEEDWRQALRDHQEQANTIFSLRKDLRQGEARRLRCMEEKEMFELQCLALRKDSKMYKDRIEAILLQMEEVAIERDQSTQMEGL

SEQ ID NO: 7130 - RNA, 1101 nt, Artificial Sequence
  Caspase_9__Homo_sapiens__EAW88219
augucggacuacgagaacgaugacgagugcuggagcguccuggagggcuuccgggugacgcucaccucggucaucgaccccucacgcaucacaccuuaccugcggcagugcaagguccugaaccccgaugaugaggagcaggugcucagcgaccccaaccuggucauccgcaaacggaaagugggugugcuccuggacauccugcagcggaccggccacaagggcuacguggccuuccucgagagccuggagcucuacuacccgcagcuguacaagaaggucacaggcaaggagccggcccgcgucuucuccaugaucaucgacgcguccggggagucaggccugacucagcugcugaugacugaggucaugaagcugcagaagaaggugcaggaccugaccgcgcugcugagcuccaaagaugacuucaucaaggagcugcgggugaaggacagccugcugcgcaagcaccaggagcgugugcagaggcucaaggaggagugcgaggccggcagccgcgagcucaagcgcugcaaggaggagaacuacgaccuggccaugcgccuggcgcaccagagugaggagaagggcgccgcgcucaugcggaaccgugaccugcagcuggagauugaccagcucaagcacagccucaugaaggccgaggacgacugcaagguggagcgcaagcacacgcugaagcucaggcacgccauggagcagcggcccagccaggagcugcugugggagcugcagcaggagaaggcccugcuccaggcccgggugcaggagcuggaggccuccguccaggaggggaagcuggacaggagcagccccuacauccagguacuggaggaggacuggcggcaggcgcugcgggaccaccaggagcaggccaacaccaucuucucccugcgcaaggaccuccgccagggcgaggcccgacgccuccggugcauggaggagaaggagauguucgagcugcagugccuggcacuacguaaggacuccaagauguacaaggaccgcaucgaggccauccugcugcagauggaggaggucgccauugagcgggaccagagcacacaaauggaggggcuguga

SEQ ID NO: 7131 - RNA, 1101 nt, Artificial Sequence
  derived and/or modified sequence opt1 from Caspase_9__Homo_sapiens__EAW88219
augagcgacuacgagaacgacgacgagugcugguccgugcuggagggcuuccgcgucacccucaccagcgugaucgaccccucccggaucacgccguaccugcgccagugcaaggugcugaaccccgacgacgaggagcagguccucagcgaccccaaccuggugauccggaagcgcaagguggggguccugcucgacauccugcagcggaccggccacaagggguacguggccuuccuggagucccucgagcuguacuacccccagcuguacaagaaggugaccggcaaggagccggcccgcgucuucagcaugaucaucgacgcguccggggagagcggccucacccagcugcugaugacggaggugaugaagcuccagaagaaggugcaggaccugaccgcccugcucuccagcaaggacgacuucaucaaggagcugcgggucaaggacucccugcuccgcaagcaccaggagcgggugcagcgccugaaggaggagugcgaggccggcagccgggagcugaagcgcugcaaggaggagaacuacgaccucgccaugcggcuggcccaccaguccgaggagaagggggcggcccugaugcgcaaccgggaccuccagcuggagaucgaccagcugaagcacagccucaugaaggccgaggacgacugcaagguggagcgcaagcacacccugaagcugcggcacgccauggagcagcgccccucccaggagcuccugugggagcugcagcaggagaaggcgcuccugcaggcccggguccaggagcuggaggccagcgugcaggagggcaagcucgaccgcuccagccccuacauccaggugcuggaggaggacuggcggcaggcccugcgcgaccaccaggagcaggccaacaccaucuucucccuccgcaaggaccugcggcagggggaggcgcgccggcugcgcugcauggaggagaaggagauguucgagcuccagugccuggcccugcggaaggacagcaagauguacaaggaccgcaucgaggccauccuccugcagauggaggaggucgccaucgagcgggaccagagcacgcagauggagggccuguga

SEQ ID NO: 7132 - RNA, 1101 nt, Artificial Sequence
  derived and/or modified sequence opt2 from Caspase_9__Homo_sapiens__EAW88219
auguccgacuacgagaacgacgacgagugcugguccguccucgagggcuuccgcgucacccucaccuccgucaucgaccccucccgcaucacccccuaccuccgccagugcaagguccucaaccccgacgacgaggagcagguccucuccgaccccaaccucgucauccgcaagcgcaaggucggcguccuccucgacauccuccagcgcaccggccacaagggcuacgucgccuuccucgagucccucgagcucuacuacccccagcucuacaagaaggucaccggcaaggagcccgcccgcgucuucuccaugaucaucgacgccuccggcgaguccggccucacccagcuccucaugaccgaggucaugaagcuccagaagaagguccaggaccucaccgcccuccucuccuccaaggacgacuucaucaaggagcuccgcgucaaggacucccuccuccgcaagcaccaggagcgcguccagcgccucaaggaggagugcgaggccggcucccgcgagcucaagcgcugcaaggaggagaacuacgaccucgccaugcgccucgcccaccaguccgaggagaagggcgccgcccucaugcgcaaccgcgaccuccagcucgagaucgaccagcucaagcacucccucaugaaggccgaggacgacugcaaggucgagcgcaagcacacccucaagcuccgccacgccauggagcagcgccccucccaggagcuccucugggagcuccagcaggagaaggcccuccuccaggcccgcguccaggagcucgaggccuccguccaggagggcaagcucgaccgcuccucccccuacauccagguccucgaggaggacuggcgccaggcccuccgcgaccaccaggagcaggccaacaccaucuucucccuccgcaaggaccuccgccagggcgaggcccgccgccuccgcugcauggaggagaaggagauguucgagcuccagugccucgcccuccgcaaggacuccaagauguacaaggaccgcaucgaggccauccuccuccagauggaggaggucgccaucgagcgcgaccaguccacccagauggagggccucuga

SEQ ID NO: 7133 - RNA, 1101 nt, Artificial Sequence
  derived and/or modified sequence opt3 from Caspase_9__Homo_sapiens__EAW88219
augagcgacuacgagaacgaugacgaaugcugguccgugcuggagggcuucagagucacccucacaucuguuaucgaucccucaaggauuacuccuuaucuucggcaguguaaggugcugaauccagacgaugaggaacaaguauugagugacccgaacuuagugauacgcaaacgaaaggucggggugcugcuagauauccuccagcguacgggacacaaagguuacguugccuuucuggaaagccuugagcuguauuacccccaguuguauaagaaagugaccggcaaggagccugcuagagucuucuccaugauuaucgacgcaucuggggaaucgggacucacacagcugcugaugacugaggugaugaagcuccaaaagaagguacaggauuuaaccgcccugcuuucaagcaaagacgauuuuauuaaggaauugaggguuaaagacagucugcuacggaagcaucaggagcgcgugcagagacucaaggaggaaugcgaggcgggcuccagggaacugaaacgguguaaggaggaaaauuacgaucuugcuaugcgccuggcccaccaaucugaggagaaaggugcagccuugaugcgaaacagagaccuccagcuggaaaucgaccaguuaaagcauagccugaugaaagcugaggaugacugcaaggucgaaaggaaacacacacucaaacuucggcaugcaauggagcagcguccaucccaagaacuguugugggagcuacagcaggagaaggcccugcuccaagcucgcgugcaggaacuggaggccucagugcaggaagggaaacuugauagaaguagccccuauauacagguccuggaggaagacuggaggcaagcguugcgggaucaccaggagcaggcaaauaccaucuucucucuccgaaaggaccugcgccagggagaggccagaagguuacgguguauggaagagaaagaaauguuugagcugcaaugccuagcucuccgcaaggauuccaaaauguacaaggacagaauugaggccauccugcuucagauggaagagguugcaauugaaagggaucagucaacucagauggagggcuuguga

SEQ ID NO: 7134 - RNA, 1101 nt, Artificial Sequence
  derived and/or modified sequence opt4 from Caspase_9__Homo_sapiens__EAW88219
augagcgacuacgagaacgacgacgagugcuggagcgugcuggagggcuucagagugacccugaccagcgugaucgaccccagcagaaucacccccuaccugagacagugcaaggugcugaaccccgacgacgaggagcaggugcugagcgaccccaaccuggugaucagaaagagaaaggugggcgugcugcuggacauccugcagagaaccggccacaagggcuacguggccuuccuggagagccuggagcuguacuacccccagcuguacaagaaggugaccggcaaggagcccgccagaguguucagcaugaucaucgacgccagcggcgagagcggccugacccagcugcugaugaccgaggugaugaagcugcagaagaaggugcaggaccugaccgcccugcugagcagcaaggacgacuucaucaaggagcugagagugaaggacagccugcugagaaagcaccaggagagagugcagagacugaaggaggagugcgaggccggcagcagagagcugaagagaugcaaggaggagaacuacgaccuggccaugagacuggcccaccagagcgaggagaagggcgccgcccugaugagaaacagagaccugcagcuggagaucgaccagcugaagcacagccugaugaaggccgaggacgacugcaagguggagagaaagcacacccugaagcugagacacgccauggagcagagacccagccaggagcugcugugggagcugcagcaggagaaggcccugcugcaggccagagugcaggagcuggaggccagcgugcaggagggcaagcuggacagaagcagccccuacauccaggugcuggaggaggacuggagacaggcccugagagaccaccaggagcaggccaacaccaucuucagccugagaaaggaccugagacagggcgaggccagaagacugagaugcauggaggagaaggagauguucgagcugcagugccuggcccugagaaaggacagcaagauguacaaggacagaaucgaggccauccugcugcagauggaggagguggccaucgagagagaccagagcacccagauggagggccuguga

SEQ ID NO: 7135 - RNA, 1101 nt, Artificial Sequence
  derived and/or modified sequence opt5 from Caspase_9__Homo_sapiens__EAW88219
augagcgacuacgagaacgaugacgaaugcugguccgugcuggagggcuucagagucacccucacaucuguuaucgaucccagccggauuacgccuuaucugcgccaguguaaggugcuuaauccggacgaugaggaacaagugcuguccgaccccaaccucgucaucagaaaacggaagguggggguucugcuugauauucugcagcgcaccggacacaaaggcuacguggccuuucucgaaucucuggagcuguauuacccucagcucuauaagaaagucacagggaaggagcccgcuagaguguucagcaugaucauugacgccuccggagaaucuggccugacccagcuucugaugacagagguuaugaagcuccagaaaaaggugcaagaucugaccgcgcuucugagcuccaaagacgauuuuaucaaggaacuccgggucaaagacagccugcugcgcaagcaucaggagagagugcagcggcucaaggaggaaugcgaggcugggucucgcgaacugaaaagauguaaggaggaaaauuacgaucuugccaugcggcuggcccaccaauccgaggagaaaggagcugcccucaugcgcaacagagaccugcagcuugaaaucgaccagcugaagcauagccucaugaaagcugaggaugacugcaagguggaacggaaacacacacugaagcugcgccaugccauggagcagagaccuucucaagaacuccugugggagcuucagcaggagaaggcgcugcuccaagcccggguccaggaacuggaggcuuccguucaggaaggcaaacuugauagaagcucucccuauauucaggugcuggaggaagacuggcgccaagcccuccgggaucaccaggagcaggcuaauaccaucuucucccugagaaaggaccugcgccagggcgaggcccggagacuccgcuguauggaagagaaagaaauguuugagcugcaaugccuugcgcugcggaaggauagcaaaauguacaaggacagaauugaggccauccuccugcagauggaagagguggcuauugaacgcgaucaguccacgcagauggaggggcuguga

SEQ ID NO: 7136 - RNA, 1101 nt, Artificial Sequence
  derived and/or modified sequence opt6 from Caspase_9__Homo_sapiens__EAW88219
augagugauuacgaaaaugaugaugagugcuggagcguauuagaaggauucagaguaacauuaacaucaguaauagacccaaguagaauaacaccauaccuaagacaaugcaaaguacuaaaucccgaugacgaagaacaaguacuaucagauccaaaucuaguaauaagaaaaagaaaaguaggaguacuauuagacauauuacagagaacaggacauaaaggauacguagcauuccuagaaaguuuagaauuauacuauccacaacuauauaaaaaaguaacuggaaaagaaccagcaagaguauuuaguaugauaauagacgcaaguggggaaaguggauuaacacaacuauugaugacagaaguaaugaaacuacagaaaaaaguacaagaccuaacagcgcuacuaagcucaaaagacgacuuuauaaaggaacugagaguaaaagacaguuuacuaagaaaacaccaagaacgaguucaacgacucaaagaagaaugcgaagcaggaagcagagaauugaaaagaugcaaagaagaaaacuaugauuuagcaaugagauuagcacaucaaucagaagaaaaaggagccgcacuaaugcgaaacagagaucuccaacuagagauagaucaauuaaaacauagucuaaugaaagcagaagacgauugcaaaguagaaagaaaacacacgcuaaagcuaagacaugcaauggaacaaagaccaucacaagaacuacuaugggaacuacaacaagaaaaagcacuauuacaagcaagaguacaagaacuagaagcaucaguccaagaaggaaaauuagacagaagcucacccuauauccaaguccuggaagaagauuggcgacaggcauuaagagaucaccaagaacaagcaaacacaauauucucauuaagaaaagauuuaagacaaggugaggcaagaagacuaagaugcauggaggaaaaggaaauguucgaauuacaaugucuagcacuaagaaaagauagcaagauguauaaagauagaauagaagcuauauuacuacaaauggaagaaguagcaauagaaagagaucaaucaacacaaauggaaggacuauaa

SEQ ID NO: 7137 - protein, 416 aa, Artificial Sequence
  Caspase_9__Homo_sapiens__P55211
MDEADRRLLRRCRLRLVEELQVDQLWDALLSRELFRPHMIEDIQRAGSGSRRDQARQLIIDLETRGSQALPLFISCLEDTGQDMLASFLRTNRQAAKLSKPTLENLTPVVLRPEIRKPEVLRPETPRPVDIGSGGFGDVGALESLRGNADLAYILSMEPCGHCLIINNVNFCRESGLRTRTGSNIDCEKLRRRFSSLHFMVEVKGDLTAKKMVLALLELAQQDHGALDCCVVVILSHGCQASHLQFPGAVYGTDGCPVSVEKIVNIFNGTSCPSLGGKPKLFFIQACGGEQKDHGFEVASTSPEDESPGSNPEPDATPFQEGLRTFDQLDAISSLPTPSDIFVSYSTFPGFVSWRDPKSGSWYVETLDDIFEQWAHSEDLQSLLLRVANAVSVKGIYKQMPGCFNFLRKKLFFKTS

SEQ ID NO: 7138 - RNA, 1251 nt, Artificial Sequence
  Caspase_9__Homo_sapiens__AAH02452
auggacgaagcggaucggcggcuccugcggcggugccggcugcggcugguggaagagcugcagguggaccagcucugggacgcccugcugagccgcgagcuguucaggccccauaugaucgaggacauccagcgggcaggcucuggaucucggcgggaucaggccaggcagcugaucauagaucuggagacucgagggagucaggcucuuccuuuguucaucuccugcuuagaggacacaggccaggacaugcuggcuucguuucugcgaacuaacaggcaagcagcaaaguugucgaagccaacccuagaaaaccuuaccccaguggugcucagaccagagauucgcaaaccagagguucucagaccggaaacacccagaccaguggacauugguucuggaggauuuggugaugucggugcucuugagaguuugaggggaaaugcagauuuggcuuacauccugagcauggagcccuguggccacugccucauuaucaacaaugugaacuucugccgugaguccgggcuccgcacccgcacuggcuccaacaucgacugugagaaguugcggcgucgcuucuccucgcugcauuucaugguggaggugaagggcgaccugacugccaagaaaauggugcuggcuuugcuggagcuggcgcagcaggaccacggugcucuggacugcugcgugguggucauucucucucacggcugucaggccagccaccugcaguucccaggggcugucuacggcacagauggaugcccugugucggucgagaagauugugaacaucuucaaugggaccagcugccccagccugggagggaagcccaagcucuuuuucauccaggccugugguggggagcagaaagaccauggguuugagguggccuccacuuccccugaagacgaguccccuggcaguaaccccgagccagaugccaccccguuccaggaagguuugaggaccuucgaccagcuggacgccauaucuaguuugcccacacccagugacaucuuuguguccuacucuacuuucccagguuuuguuuccuggagggaccccaagaguggcuccugguacguugagacccuggacgacaucuuugagcagugggcucacucugaagaccugcagucccuccugcuuagggucgcuaaugcuguuucggugaaagggauuuauaaacagaugccugguugcuuuaauuuccuccggaaaaaacuuuucuuuaaaacaucauaa

SEQ ID NO: 7139 - RNA, 1251 nt, Artificial Sequence
  derived and/or modified sequence opt1 from Caspase_9__Homo_sapiens__AAH02452
auggacgaggccgaccgccggcugcuccgccggugccgccugcggcugguggaggagcuccaggucgaccagcugugggacgcccugcucagccgcgagcuguuccggccccacaugaucgaggacauccagcgcgcgggcuccgggagccggcgcgaccaggcccggcagcugaucaucgaccucgagacccgcggcucccaggcccugccgcuguucaucagcugccucgaggacaccgggcaggacaugcuggccuccuuccugcggacgaaccgccaggccgcgaagcucagcaagcccacccuggagaaccugacccccguggugcuccggcccgagauccgcaagccggagguccugcggcccgagacgccccgccccguggacaucggcuccgggggcuucggcgacgugggggcccuggagagccuccggggcaacgccgaccuggccuacauccuguccauggagccgugcgggcacugccucaucaucaacaacgucaacuucugccgcgagagcggccugcggacccgcaccggguccaacaucgacugcgagaagcugcgccggcgcuucagcucccuccacuucaugguggaggugaagggcgaccugaccgcgaagaagaugguccuggcccuccuggagcuggcccagcaggaccacggcgcccucgacugcugcgugguggucauccugagccacgggugccaggccucccaccuccaguuccccggcgcgguguacgggaccgacggcugccccgugagcgucgagaagaucgugaacaucuucaacggcacguccugccccagccucgggggcaagccgaagcuguucuucauccaggccugcgggggcgagcagaaggaccacggguucgagguggccuccaccagccccgaggacgagagccccggcuccaaccccgagccggacgccacccccuuccaggagggccugcggaccuucgaccagcuggacgccaucagcucccugcccacgcccagcgacaucuucgucuccuacagcaccuucccgggguucguguccuggcgcgaccccaagagcggcuccugguacguggagacccuggacgacaucuucgagcagugggcgcacagcgaggaccuccagucccugcugcuccgggucgccaacgccgugagcgugaaggggaucuacaagcagaugcccggcugcuucaacuuccugcgcaagaagcuguucuucaagaccuccuga

SEQ ID NO: 7140 - RNA, 1251 nt, Artificial Sequence
  derived and/or modified sequence opt2 from Caspase_9__Homo_sapiens__AAH02452
auggacgaggccgaccgccgccuccuccgccgcugccgccuccgccucgucgaggagcuccaggucgaccagcucugggacgcccuccucucccgcgagcucuuccgcccccacaugaucgaggacauccagcgcgccggcuccggcucccgccgcgaccaggcccgccagcucaucaucgaccucgagacccgcggcucccaggcccucccccucuucaucuccugccucgaggacaccggccaggacaugcucgccuccuuccuccgcaccaaccgccaggccgccaagcucuccaagcccacccucgagaaccucacccccgucguccuccgccccgagauccgcaagcccgagguccuccgccccgagaccccccgccccgucgacaucggcuccggcggcuucggcgacgucggcgcccucgagucccuccgcggcaacgccgaccucgccuacauccucuccauggagcccugcggccacugccucaucaucaacaacgucaacuucugccgcgaguccggccuccgcacccgcaccggcuccaacaucgacugcgagaagcuccgccgccgcuucuccucccuccacuucauggucgaggucaagggcgaccucaccgccaagaagaugguccucgcccuccucgagcucgcccagcaggaccacggcgcccucgacugcugcgucgucgucauccucucccacggcugccaggccucccaccuccaguuccccggcgccgucuacggcaccgacggcugccccgucuccgucgagaagaucgucaacaucuucaacggcaccuccugccccucccucggcggcaagcccaagcucuucuucauccaggccugcggcggcgagcagaaggaccacggcuucgaggucgccuccaccucccccgaggacgagucccccggcuccaaccccgagcccgacgccacccccuuccaggagggccuccgcaccuucgaccagcucgacgccaucuccucccuccccacccccuccgacaucuucgucuccuacuccaccuuccccggcuucgucuccuggcgcgaccccaaguccggcuccugguacgucgagacccucgacgacaucuucgagcagugggcccacuccgaggaccuccagucccuccuccuccgcgucgccaacgccgucuccgucaagggcaucuacaagcagaugcccggcugcuucaacuuccuccgcaagaagcucuucuucaagaccuccuga

SEQ ID NO: 7141 - RNA, 1251 nt, Artificial Sequence
  derived and/or modified sequence opt3 from Caspase_9__Homo_sapiens__AAH02452
auggacgaggccgauagaaggcugcuccggcgcugccgacuucgucugguggaagaguugcaggucgaccaauuaugggaugcucugcuaagcagagaacucuucaggccccacaugaucgaggacauucagcgggcaggcuccgggucucgcagagaucaggccaggcagcugauaaucgaccuugaaacccggggaucacaagcgcugccuuuguuuauuaguugucucgaggauacaggucaggacaugcuggcuagcuuccugcgcacuaaccgacaggccgcaaagcucuccaaaccaacguuagagaaucugaccccgguugugcuuagacccgaaaucaggaagccugagguauugcggccagaaacaccccguccuguggauauuggcucugggggauuuggcgacgucggugcccuggagucgcuacgcgggaacgcugaucucgcauacauccugucaauggagccaugcggacauugucuuauaaucaauaacgugaauuucugcagagaaagcggccugaggacucggaccggcaguaacauugacugugagaaauugcgacgcagauuuuccucucuccacuucaugguugaagugaagggggaucugacagccaaaaagauggucuuagcucugcucgagcuugcccagcaagaccauggagcgcuggacugcugugugguaguuaucuugagccacgguugccaggcaucccaucuacaguuucccggcgccguguaugggaccgauggauguccugucucaguggaaaagauugugaauaucuucaacggcacaaguugcccaagccugggugggaaaccgaagcucuuuuucauacaggcuuguggaggcgagcaaaaagaccacggcuuugaggucgccucuacuucccccgaagaugagucaccugggagcaauccagaacccgacgcaaccccuuuccaggagggacugaggacguuugaucagcuugacgcuauuaguucucugccaacucccuccgauaucuucguuagcuacucgaccuucccggguuuugugucuuggcgggacccuaaguccggcucaugguauguagaaacauuggaugacauuuucgagcaaugggcccacagugaggaucuccagagccuguuacugcgcguggcgaacgccgucuccgugaaagggaucuacaagcagaugcccggaugcuuuaauuuccuaagaaagaaacucuuuuucaagacuucuuga

SEQ ID NO: 7142 - RNA, 1251 nt, Artificial Sequence
  derived and/or modified sequence opt4 from Caspase_9__Homo_sapiens__AAH02452
auggacgaggccgacagaagacugcugagaagaugcagacugagacugguggaggagcugcagguggaccagcugugggacgcccugcugagcagagagcuguucagaccccacaugaucgaggacauccagagagccggcagcggcagcagaagagaccaggccagacagcugaucaucgaccuggagaccagaggcagccaggcccugccccuguucaucagcugccuggaggacaccggccaggacaugcuggccagcuuccugagaaccaacagacaggccgccaagcugagcaagcccacccuggagaaccugacccccguggugcugagacccgagaucagaaagcccgaggugcugagacccgagacccccagacccguggacaucggcagcggcggcuucggcgacgugggcgcccuggagagccugagaggcaacgccgaccuggccuacauccugagcauggagcccugcggccacugccugaucaucaacaacgugaacuucugcagagagagcggccugagaaccagaaccggcagcaacaucgacugcgagaagcugagaagaagauucagcagccugcacuucaugguggaggugaagggcgaccugaccgccaagaagauggugcuggcccugcuggagcuggcccagcaggaccacggcgcccuggacugcugcgugguggugauccugagccacggcugccaggccagccaccugcaguuccccggcgccguguacggcaccgacggcugccccgugagcguggagaagaucgugaacaucuucaacggcaccagcugccccagccugggcggcaagcccaagcuguucuucauccaggccugcggcggcgagcagaaggaccacggcuucgagguggccagcaccagccccgaggacgagagccccggcagcaaccccgagcccgacgccacccccuuccaggagggccugagaaccuucgaccagcuggacgccaucagcagccugcccacccccagcgacaucuucgugagcuacagcaccuuccccggcuucgugagcuggagagaccccaagagcggcagcugguacguggagacccuggacgacaucuucgagcagugggcccacagcgaggaccugcagagccugcugcugagaguggccaacgccgugagcgugaagggcaucuacaagcagaugcccggcugcuucaacuuccugagaaagaagcuguucuucaagaccagcuga

SEQ ID NO: 7143 - RNA, 1251 nt, Artificial Sequence
  derived and/or modified sequence opt5 from Caspase_9__Homo_sapiens__AAH02452
auggacgaggccgauagacggcugcuccgcagaugccggcugcgccuuguggaggaacugcaggucgaccaacucugggaugcucugcuuagcagagaacuguuccggccccacaugaucgaggacauucagcgcgccggcuccgggucuagacgggaucaggcgcgccagcucaucauugaccuggaaaccagaggaagccaagcucugccucucuuuaucuccugucuggaggauacaggccaggacaugcuugccucuuuccugcggacgaaccgccaggccgcuaagcucagcaaaccgacccuggagaaucuuacacccguugugcugagaccugaaauucggaagcccgaggugcuccgcccugaaacccccagaccugucgauaucggguccggaggcuuuggggacgugggagcccuggagucucugcggggcaacgcugaucucgccuacauccugagcauggagccgugcggccauugucuuauuaucaauaacguuaauuucugcagagaauccgggcugcgcacacggaccggaagcaacauugacugugagaaacucagacgccgguuuucuucccugcacuucaugguggaagucaagggcgaucuuacagcgaaaaagauggugcuggcccuccuggagcuggcucagcaagaccauggggcccucgacugcuguguuguggucauccugagccacggaugccaggcuucucaucuucaguuucccggcgccguguaugggaccgauggauguccuguguccgucgaaaagauuguuaauaucuucaacggcacgagcugccccucucugggcgggaaaccuaagcucuuuuucauucaggcguguggaggcgagcaaaaagaccacggguuugagguggccuccaccagccccgaagaugaguccccgggaucuaauccugaacccgacgcuacaccuuuccaggagggccugagaaccuuugaucagcuugacgccaucagcucccugcccacacccagcgauaucuucgugucuuacuccaccuucccuggguuugucagcuggcgcgacccgaagucuggaagcugguauguggaaacgcucgaugacauuuucgagcaaugggcucacuccgaggaucugcagucucugcuccugcggguugccaacgccgugagcgucaaaggcaucuacaagcagaugcccggcugcuuuaauuuccuuagaaagaaacuguuuuucaagacauccuga

SEQ ID NO: 7144 - RNA, 1251 nt, Artificial Sequence
  derived and/or modified sequence opt6 from Caspase_9__Homo_sapiens__AAH02452
auggaugaagccgauagaagacuacuaagaagaugcagauuaagacuaguagaagaguuacaaguagaccaacuaugggacgcuuuauuaucaagagaauuauucagaccccauaugauugaagauauacaaagagcaggaucaggaucaagacgagaucaagcuagacaacuaauaauagaccuagaaacuagaggaucacaagcuuuaccacuauucauaucauguuuggaagauacgggacaagauauguuagccucauucuuaagaacuaauagacaagcagcaaaacuaucaaaaccaacauuagaaaacuuaacaccaguuguauuacgaccagaaauacgaaaaccugaaguacuaagaccagaaacuccccgaccaguagacauaggaucaggagguuuuggagacguaggagcacuagaaucauuaagagguaacgcugauuuagcuuauauauuaagcauggaacccugcggacauugucuaauaauaaauaacguaaauuuuuguagagaaucaggauuaagaacgcgcacaggaucuaauauagauugugaaaaauuaagaagaagauucucaagcuuacauuucaugguagaaguaaaaggugaccuaacagcaaaaaaaaugguacuagcauuacuagaauuagcucaacaagaucacggagcacuagauuguuguguaguaguaauauuaucucauggaugucaagcaagucaucuccaauucccaggugcaguauauggaacagacggaugcccaguaucaguagaaaaaauaguaaauaucuuuaacggaaccucauguccaagccuuggaggaaaaccaaaauuauucuuuauucaagcaugcggaggagaacaaaaagaucacggauuugaagucgcaucaacaucaccugaagaugaauccccagggucaaauccagaaccugacgcaacaccuuuccaagaaggauuaagaacauucgaucaauuagaugccauaagcucauuaccaacaccaucagauauauucguaaguuauucaacauucccaggauuuguauccuggcgagauccaaaaaguggaaguugguauguagaaacacuagacgacauauuugaacaaugggcacauucagaagaucuacaaucauuacuccuuagagucgccaaugcaguaucuguaaaaggaauauauaaacaaaugccuggauguuuuaauuucuuaagaaaaaaauuauuuuuuaaaacaaguuaa

SEQ ID NO: 7145 - protein, 536 aa, Artificial Sequence; identical to SEQ ID NO: 7121
  Caspase_9__Homo_sapiens__Q9H257

SEQ ID NO: 7146 - RNA, 1611 nt, Artificial Sequence; identical to SEQ ID NO: 7122
  Caspase_9__Homo_sapiens__BAF84770

SEQ ID NO: 7147 - RNA, 1611 nt, Artificial Sequence; identical to SEQ ID NO: 7123
  derived and/or modified sequence opt1 from Caspase_9__Homo_sapiens__BAF84770

SEQ ID NO: 7148 - RNA, 1611 nt, Artificial Sequence; identical to SEQ ID NO: 7124
  derived and/or modified sequence opt2 from Caspase_9__Homo_sapiens__BAF84770

SEQ ID NO: 7149 - RNA, 1611 nt, Artificial Sequence; identical to SEQ ID NO: 7125
  derived and/or modified sequence opt3 from Caspase_9__Homo_sapiens__BAF84770

SEQ ID NO: 7150 - RNA, 1611 nt, Artificial Sequence; identical to SEQ ID NO: 7126
  derived and/or modified sequence opt4 from Caspase_9__Homo_sapiens__BAF84770

SEQ ID NO: 7151 - RNA, 1611 nt, Artificial Sequence; identical to SEQ ID NO: 7127
  derived and/or modified sequence opt5 from Caspase_9__Homo_sapiens__BAF84770

SEQ ID NO: 7152 - RNA, 1611 nt, Artificial Sequence
  derived and/or modified sequence opt6 from Caspase_9__Homo_sapiens__BAF84770
augagugacuacgaaaacgacgaugaauguuggagcguguuagaaggauuuaggguaacuuugaccucaguaauugacccaucaagaauaacaccauaucugagacaauguaaaguacuaaacccagaugaugaagaacaaguacuaucagauccaaaucuaguaauaagaaaaaggaaaguaggaguacuacuugauauucugcaaagaacaggacauaaaggauacguugcauuucucgagucauuagaacuauauuacccacaacuauauaaaaaaguaacaggaaaagaaccagcaagaguuuucaguaugauaauagaugcaaguggagaaaguggacuaacacaacuauugaugaccgaaguaaugaaauugcaaaaaaaaguacaagacuuaacagcauuauugucaucaaaagacgauuuuauaaaagaacuaagaguaaaagacagucuacuaagaaaacaccaagaacgaguacaacgacuaaaagaagaaugcgaagcaggcaguagagaauuaaaaagaugcaaagaagaaaacuaugaucuagcaaugagacuagcacaucaaagugaagaaaaaggagccgcauuaaugcggaaucgagauuuacaacucgaaauagaccaguuaaaacacagucuaaugaaagcggaagaugauuguaaaguagaacgcaaacacacucuuaaacucagacacgccauggagcaaaggccaagucaagaacuauuaugggaauuacaacaagaaaaagcucuauuacaagcacgaguacaagaacuagaagcauccguacaagaagggaaacuugauagaaguaguccauauauacaaguacuagaagaagacuggagacaagcauugcgagaccaucaggaacaagcaaacacaauauucagucuuaggaaagaucuaagacagggggaagcacgaagacuuagaugcauggaagaaaaagaaauguuugaacuacaaugccuggcccuaagaaaagacucaaaaauguauaaagauagaauugaagcaauauuacuucaaauggaagaaguggcaauugaaagagaccaagcaauagcaacucgagaagaauuacacgcacaacaugcaaggggauuacaagaaaaagaugccuuaagaaaacaaguaagagaacuaggggaaaaagcagaugaacuccaauuacaaguauuccagugcgaggcacaacuccuagcuguagaaggaagauuaagaaggcagcaacuagaaacauuaguauuaagcucagacuuagaagaugggucaccaagacgaagccaagaauuaucuuuaccgcaagaccuagaagacacacaguuaucagauaagggaugcuuagccgguggaggaagcccgaaacaaccauuugcagcguuacaucaagaacaagugcuaagaaacccacaugaugcuggacuaucaagcggagaaccaccagaaaaagaaagaagaagacuaaaagaaaguuucgaaaauuauaggagaaaaagagcacuaagaaaaaugcaaaaagguuggagacagggagaagaagauagagaaaacacgacaggaagcgauaacacugacacagaagggucauaa

SEQ ID NO: 7153 - protein, 75 aa, Artificial Sequence
  Cytochrome_c__Homo_sapiens__A0A024R9B7
MAPEVLPKPRMRGLLARRLRNHMAVAFVLSLGVAALYKFRVADQRKKAYADFYRNYDVMKDFEEMRKAGIFQSVK

SEQ ID NO: 7154 - RNA, 228 nt, Artificial Sequence
  Cytochrome_c__Homo_sapiens__EAW91792
auggcucccgaaguuuugccaaaaccucggaugcguggccuucuggccaggcgucugcgaaaucauauggcuguagcauucgugcuaucccuggggguugcagcuuuguauaaguuucguguggcugaucaaagaaagaaggcauacgcagauuucuacagaaacuacgaugucaugaaagauuuugaggagaugaggaaggcugguaucuuucagaguguaaaguaa

SEQ ID NO: 7155 - RNA, 228 nt, Artificial Sequence
  derived and/or modified sequence opt1 from Cytochrome_c__Homo_sapiens__EAW91792
auggcccccgaggugcugccgaagccccgcaugcggggccuccuggcccgccggcugcgcaaccacauggcggucgccuucgugcucagccuggggguggccgcccuguacaaguuccgggucgccgaccagcgcaagaaggcguacgccgacuucuaccggaacuacgacgugaugaaggacuucgaggagaugcgcaaggccggcaucuuccaguccgugaaguga

SEQ ID NO: 7156 - RNA, 228 nt, Artificial Sequence
  derived and/or modified sequence opt2 from Cytochrome_c__Homo_sapiens__EAW91792
auggcccccgagguccuccccaagccccgcaugcgcggccuccucgcccgccgccuccgcaaccacauggccgucgccuucguccucucccucggcgucgccgcccucuacaaguuccgcgucgccgaccagcgcaagaaggccuacgccgacuucuaccgcaacuacgacgucaugaaggacuucgaggagaugcgcaaggccggcaucuuccaguccgucaaguga

SEQ ID NO: 7157 - RNA, 228 nt, Artificial Sequence
  derived and/or modified sequence opt3 from Cytochrome_c__Homo_sapiens__EAW91792
auggcccccgaggugcugccuaagccaagaaugaggggccuccuugcucggcgccugcgaaaccacauggcagucgccuucguuuugagcuuagggguggcggcucuguacaaauuucguguagccgaccagagaaagaaagcauaugccgauuucuacaggaauuaugacgugaugaaggauuuugaagagaugcggaaagcuggaaucuuccaauccgucaaguga

SEQ ID NO: 7158 - RNA, 228 nt, Artificial Sequence
  derived and/or modified sequence opt4 from Cytochrome_c__Homo_sapiens__EAW91792
auggcccccgaggugcugcccaagcccagaaugagaggccugcuggccagaagacugagaaaccacauggccguggccuucgugcugagccugggcguggccgcccuguacaaguucagaguggccgaccagagaaagaaggccuacgccgacuucuacagaaacuacgacgugaugaaggacuucgaggagaugagaaaggccggcaucuuccagagcgugaaguga

SEQ ID NO: 7159 - RNA, 228 nt, Artificial Sequence
  derived and/or modified sequence opt5 from Cytochrome_c__Homo_sapiens__EAW91792
auggcccccgaggugcugccuaagccgagaaugcggggccuccuggcucgcagacuucggaaccacauggccgucgcguucguucugagccucgggguggcugcccuguacaaauuucgcguggccgaccagagaaagaaggcuuaugccgauuucuaccggaauuaugacgucaugaaagauuuugaagagaugcgcaaagcuggaaucuuccaauccgugaaguga

SEQ ID NO: 7160 - RNA, 228 nt, Artificial Sequence
  derived and/or modified sequence opt6 from Cytochrome_c__Homo_sapiens__EAW91792
auggcaccagaaguacuaccaaaaccaagaaugagaggacuauuagcaagaagauuaagaaaucacauggcaguagcauuuguauuaagcuuaggaguagcagcacuauauaaauuuagaguagcagaucaaagaaaaaaagcauaugcagauuucuauagaaauuacgauguaaugaaagauuucgaagaaaugagaaaagcaggaauauuucaaucaguaaaauaa

SEQ ID NO: 7161 - protein, 23 aa, Artificial Sequence
  Cytochrome_c__Homo_sapiens__A0A024RAP6
MCLYFGSAFATPFLVVRHQLLKT

SEQ ID NO: 7162 - RNA, 72 nt, Artificial Sequence
  Cytochrome_c__Homo_sapiens__EAW95922
auguguuuguacuuuggaucugcauuugcuacacccuuccuuguaguaagacaccaacugcuuaaaacauaa

SEQ ID NO: 7163 - RNA, 72 nt, Artificial Sequence
  derived and/or modified sequence opt1 from Cytochrome_c__Homo_sapiens__EAW95922
augugccuguacuucggcagcgccuucgccacccccuuccucgugguccgccaccagcugcugaagaccuga

SEQ ID NO: 7164 - RNA, 72 nt, Artificial Sequence
  derived and/or modified sequence opt2 from Cytochrome_c__Homo_sapiens__EAW95922
augugccucuacuucggcuccgccuucgccacccccuuccucgucguccgccaccagcuccucaagaccuga

SEQ ID NO: 7165 - RNA, 72 nt, Artificial Sequence
  derived and/or modified sequence opt3 from Cytochrome_c__Homo_sapiens__EAW95922
augugccuguacuucggcagcgccuuugcuacccccuuccucguggucagacaccagcuucugaagacauga

SEQ ID NO: 7166 - RNA, 72 nt, Artificial Sequence
  derived and/or modified sequence opt4 from Cytochrome_c__Homo_sapiens__EAW95922
augugccuguacuucggcagcgccuucgccacccccuuccugguggugagacaccagcugcugaagaccuga

SEQ ID NO: 7167 - RNA, 72 nt, Artificial Sequence
  derived and/or modified sequence opt5 from Cytochrome_c__Homo_sapiens__EAW95922
augugccuguacuucggcagcgccuuugcuacccccuuccucguggucagacaccagcugcuuaagacauga

SEQ ID NO: 7168 - RNA, 72 nt, Artificial Sequence
  derived and/or modified sequence opt6 from Cytochrome_c__Homo_sapiens__EAW95922
augugucuauauuucgguucagcuuucgcuacaccuuuccuuguaguuagacaucaacuucuaaaaacauaa

SEQ ID NO: 7169 - protein, 152 aa, Artificial Sequence
  Cytochrome_c__Homo_sapiens__A0A024RBN6
MIVLRLMPVGGRRPIVTSFGGCSTAPRANFPLPLPALRQSRSKMAVVGVSSVSRLLGRSRPQLGRPMSSGAHGEEGSARMWKTLTFFVALPGVAVSMLNVYLKSHHGEHERPEFIAYPHLRIRTKPFPWGDGNHTLFHNPHVNPLPTGYEDE

SEQ ID NO: 7170 - RNA, 459 nt, Artificial Sequence
  Cytochrome_c__Homo_sapiens__EAW98190
augauagugcucagguuaaugccagugggagggcggcgcccaauaguaacuuccuuuggagguuguaguaccgcccccagagccaauuuuccacuuccgcuuccggcgcugcggcaguccagaucaaaaauggcgguaguugguguguccucgguuucucggcugcugggucggucccgcccacagcuggggcggccuaugucgaguggcgcccauggcgaagagggcucagcucgcauguggaagacucucaccuucuucgucgcgcuccccgggguggcagucagcaugcugaauguguaccugaagucgcaccacggagagcacgagagacccgaguucaucgccuacccccaucuccgcaucaggaccaagccguuucccuggggagaugguaaccauacucuauuccauaacccucaugugaauccacuuccaacuggcuacgaagaugaauaa

SEQ ID NO: 7171 - RNA, 459 nt, Artificial Sequence
  derived and/or modified sequence opt1 from Cytochrome_c__Homo_sapiens__EAW98190
augaucgugcugcgccugaugcccgucggcgggcggcgcccgaucgugaccagcuucggcgggugcuccaccgcgccccgggccaacuucccccugccccugccggcccuccgccagagccgguccaagauggccguggucggcgugagcuccgugagccgccugcuggggcggucccgcccccagcucggccggcccaugagcuccggcgcccacggggaggagggcagcgcccgcauguggaagacgcugaccuucuucgucgcccugcccgggguggcgguguccaugcucaacgucuaccucaagagccaccacggcgagcacgagcggccggaguucaucgccuacccccaccuccgcauccggaccaagcccuuccccuggggcgacgggaaccacacccuguuccacaacccgcacgugaacccccugcccacgggcuacgaggacgaguga

SEQ ID NO: 7172 - RNA, 459 nt, Artificial Sequence
  derived and/or modified sequence opt2 from Cytochrome_c__Homo_sapiens__EAW98190
augaucguccuccgccucaugcccgucggcggccgccgccccaucgucaccuccuucggcggcugcuccaccgccccccgcgccaacuucccccucccccuccccgcccuccgccagucccgcuccaagauggccgucgucggcgucuccuccgucucccgccuccucggccgcucccgcccccagcucggccgccccauguccuccggcgcccacggcgaggagggcuccgcccgcauguggaagacccucaccuucuucgucgcccuccccggcgucgccgucuccaugcucaacgucuaccucaagucccaccacggcgagcacgagcgccccgaguucaucgccuacccccaccuccgcauccgcaccaagcccuuccccuggggcgacggcaaccacacccucuuccacaacccccacgucaacccccuccccaccggcuacgaggacgaguga

SEQ ID NO: 7173 - RNA, 459 nt, Artificial Sequence
  derived and/or modified sequence opt3 from Cytochrome_c__Homo_sapiens__EAW98190
augaucgugcugagacucaugcccgucggcgggaggcggccuauuguuaccagcuucggagguugcuccacagccccacgcgcuaacuuuccgcuuccccugccugcauugcgacagucucguucaaagauggccgugguaggcgugaguagcgucuccagauuacuggggaggucucggccacaacuaggacgccccaugucgucaggcgcgcacggugaggaagggagcgcuagaauguggaaaacucucacguucuuuguggcccugccuggaguugcagugaguaugcuuaaugucuaccugaagucccaucacggcgagcaugaaaggccagaguucauagccuauccccacuugcggauccgcaccaaaccuuuuccauggggcgacgggaaccauacacucuuccacaauccgcacgugaacccccugccuacuggauacgaagaugaguga

SEQ ID NO: 7174 - RNA, 459 nt, Artificial Sequence
  derived and/or modified sequence opt4 from Cytochrome_c__Homo_sapiens__EAW98190
augaucgugcugagacugaugcccgugggcggcagaagacccaucgugaccagcuucggcggcugcagcaccgcccccagagccaacuucccccugccccugcccgcccugagacagagcagaagcaagauggccguggugggcgugagcagcgugagcagacugcugggcagaagcagaccccagcugggcagacccaugagcagcggcgcccacggcgaggagggcagcgccagaauguggaagacccugaccuucuucguggcccugcccggcguggccgugagcaugcugaacguguaccugaagagccaccacggcgagcacgagagacccgaguucaucgccuacccccaccugagaaucagaaccaagcccuuccccuggggcgacggcaaccacacccuguuccacaacccccacgugaacccccugcccaccggcuacgaggacgaguga

SEQ ID NO: 7175 - RNA, 459 nt, Artificial Sequence
  derived and/or modified sequence opt5 from Cytochrome_c__Homo_sapiens__EAW98190
augaucgugcugagacucaugcccgucggcgggcggcgcccuauuguuaccagcuucggaggcugcuccacagccccgagagcuaacuuuccccugccucuucccgcccugcggcagucucgcagcaagauggcgguggugggggucuccucugugagcagacuccugggacggucccgcccucaacuuggcagacccaugucuagcggggcucacggagaggaaggcuccgcccggauguggaaaacgcugaccuucuuuguugcccucccuggcguggcugucagcaugcugaauguguaccugaagucucaucacggggagcaugaacgcccggaguucaucgccuauccccaccuccggauuagaacaaaaccuuuucccuggggagacggcaaccauacccuguuccacaauccucacguuaacccccuuccgacaggguacgaagaugaguga

SEQ ID NO: 7176 - RNA, 459 nt, Artificial Sequence
  derived and/or modified sequence opt6 from Cytochrome_c__Homo_sapiens__EAW98190
augauaguauuaagacuaaugccaguaggaggaagaagaccaauaguaacaucauucggaggaugcucaacagcaccaagagcaaacuucccacuaccacuaccagcacuaagacaaucaagaucaaaaauggcaguaguaggaguaucaucaguaaguagacuauuaggaagaucaagaccacaacuaggaagaccaaugucaucaggagcacacggagaagaaggaucagcaagaauguggaaaacacuaacauucuucguagcauuaccaggagucgcaguaucaauguuaaacguauacuuaaaaucacaccacggcgaacacgaaagaccagaauuuauagcauacccacacuuaagaauacgaacaaaaccauucccauggggagauggaaaucacacacuauuccacaacccacacguaaacccacuaccaacaggauacgaagacgaauaa

SEQ ID NO: 7177 - protein, 268 aa, Artificial Sequence
  Cytochrome_c__Homo_sapiens__A0A024RBY9
MGLSPSAPAVAVQASNASASPPSGCPMHEGKMKGCPVNTEPSGPTCEKKTYSVPAHQERAYEYVECPIRGTAAENKENLDPSNLMPPPNQTPAPDQPFALSTVREESSIPRADSEKKWVYPSEQMFWNAMLKKGWKWKDEDISQKDMYNIIRIHNQNNEQAWKEILKWEALHAAECPCGPSLIRFGGKAKEYSPRARIRSWMGYELPFDRHDWIINRCGTEVRYVIDYYDGGEVNKDYQFTILDVRPALDSLSAVWDRMKVAWWRWTS

SEQ ID NO: 7178 - RNA, 807 nt, Artificial Sequence
  Cytochrome_c__Homo_sapiens__EAW98784
auggguuugucuccaucugcuccugcuguugcaguucaggccucaaaugcuucagcguccccaccuucaggaugcccgaugcaugaagggaaaaugaaaggcuguccagugaauacagagccaucuggcccaaccugugagaagaaaacauacucugugccugcccaccaggaacgcgccuaugaguacguggagugucccauuaggggcacugcggcugagaauaaggagaaccuagauccuucaaaucugaugccaccaccaaaucaaacaccagcuccagaucagccauuugcauugucuacugucagagaagagucauccauuccgagagcagauucagagaaaaaguggguuuacccuucugagcagauguucuggaaugcaauguuaaagaaaggguggaaguggaaggaugaggauaucagucagaaggauauguauaauaucauuagaauucacaaucagaauaacgagcaggcuuggaaggagauuuugaagugggaagcccuucaugcugcagaguguccuugugguccaucauugauccgguuuggagggaaagcaaaagaguauucaccaagggcacgaauucguuccuggaugggguaugaguugccuuuugauaggcacgauuggaucauaaaccguugcgggacagaaguuagauaugugauugauuauuaugaugguggugaagucaacaaggacuaccaguucaccauccuggacguccguccugccuuagauucacuuucggcaguaugggacagaaugaaagucgcuugguggcguuggaccucguaa

SEQ ID NO: 7179 - RNA, 807 nt, Artificial Sequence
  derived and/or modified sequence opt1 from Cytochrome_c__Homo_sapiens__EAW98784
augggccugagccccuccgccccggccguggcgguccaggccagcaacgccuccgccagcccgcccuccgggugccccaugcacgagggcaagaugaaggggugccccgugaacaccgagcccagcggcccgaccugcgagaagaagacguacuccgugcccgcccaccaggagcgcgcguacgaguacgucgagugccccauccgggggaccgccgccgagaacaaggagaaccucgaccccagcaaccugaugcccccgcccaaccagacccccgcccccgaccagcccuucgcgcuguccaccgugcgcgaggagagcuccaucccgcgggccgacagcgagaagaaguggguguaccccuccgagcagauguucuggaacgccaugcucaagaagggcuggaaguggaaggacgaggacaucagccagaaggacauguacaacaucauccgcauccacaaccagaacaacgagcaggccuggaaggagauccugaagugggaggcccugcacgcggccgagugccccugcggccccucccucauccgguucgggggcaaggccaaggaguacagcccgcgcgcccggauccgcuccuggaugggguacgagcugcccuucgaccggcacgacuggaucaucaaccgcugcggcacggagguccgguacgugaucgacuacuacgacgggggcgaggugaacaaggacuaccaguucaccauccuggacguccgccccgcccucgacagccuguccgcggugugggaccggaugaagguggccugguggcgcuggaccagcuga

SEQ ID NO: 7180 - RNA, 807 nt, Artificial Sequence
  derived and/or modified sequence opt2 from Cytochrome_c__Homo_sapiens__EAW98784
augggccucucccccuccgcccccgccgucgccguccaggccuccaacgccuccgccuccccccccuccggcugccccaugcacgagggcaagaugaagggcugccccgucaacaccgagcccuccggccccaccugcgagaagaagaccuacuccguccccgcccaccaggagcgcgccuacgaguacgucgagugccccauccgcggcaccgccgccgagaacaaggagaaccucgaccccuccaaccucaugcccccccccaaccagacccccgcccccgaccagcccuucgcccucuccaccguccgcgaggaguccuccaucccccgcgccgacuccgagaagaagugggucuaccccuccgagcagauguucuggaacgccaugcucaagaagggcuggaaguggaaggacgaggacaucucccagaaggacauguacaacaucauccgcauccacaaccagaacaacgagcaggccuggaaggagauccucaagugggaggcccuccacgccgccgagugccccugcggccccucccucauccgcuucggcggcaaggccaaggaguacuccccccgcgcccgcauccgcuccuggaugggcuacgagcuccccuucgaccgccacgacuggaucaucaaccgcugcggcaccgagguccgcuacgucaucgacuacuacgacggcggcgaggucaacaaggacuaccaguucaccauccucgacguccgccccgcccucgacucccucuccgccgucugggaccgcaugaaggucgccugguggcgcuggaccuccuga

SEQ ID NO: 7181 - RNA, 807 nt, Artificial Sequence
  derived and/or modified sequence opt3 from Cytochrome_c__Homo_sapiens__EAW98784
augggccugagccccuccgccccugcuguggcaguccaggccucuaacgcgucagcuaguccaccgagcgggugccccaugcacgagggaaagaugaaagguuguccuguuaauaccgaaccauccggccccacaugcgagaagaaaacuuacucugugccugcccaucaagaaagagcauaugaguacguagaauguccaaucagggggacggccgcugagaacaaggagaaucucgaccccucgaaccuuaugccuccaccgaaucagacccccgcaccugaucagccauucgcccugucaacagugcgggaagagagcaguauuccccgcgcugacuccgagaaaaagugggucuauccuucugaacagauguuuuggaacgccauguugaagaaaggauggaaguggaaagaugaggacauaagccaaaaggauauguacaauaucauucgaauccacaaccagaauaacgaacaggcguggaaagagauuuuaaagugggaagcacugcaugccgcugagugcccauguggccccucccuaauccguuucggugggaaggccaaagaauauucaccgagagcaaggauacggaguuggaugggauacgagcucccuuuugaccgccacgauuggaucauuaauagaugcggcacugaggugagguauguuaucgacuacuacgauggcggggaagugaacaaggacuaucaguucaccauucuggauguccggcccgcucuugacagccugucugccgugugggaucgcaugaaaguagcgugguggcgauggacauccuga

SEQ ID NO: 7182 - RNA, 807 nt, Artificial Sequence
  derived and/or modified sequence opt4 from Cytochrome_c__Homo_sapiens__EAW98784
augggccugagccccagcgcccccgccguggccgugcaggccagcaacgccagcgccagcccccccagcggcugccccaugcacgagggcaagaugaagggcugccccgugaacaccgagcccagcggccccaccugcgagaagaagaccuacagcgugcccgcccaccaggagagagccuacgaguacguggagugccccaucagaggcaccgccgccgagaacaaggagaaccuggaccccagcaaccugaugcccccccccaaccagacccccgcccccgaccagcccuucgcccugagcaccgugagagaggagagcagcauccccagagccgacagcgagaagaaguggguguaccccagcgagcagauguucuggaacgccaugcugaagaagggcuggaaguggaaggacgaggacaucagccagaaggacauguacaacaucaucagaauccacaaccagaacaacgagcaggccuggaaggagauccugaagugggaggcccugcacgccgccgagugccccugcggccccagccugaucagauucggcggcaaggccaaggaguacagccccagagccagaaucagaagcuggaugggcuacgagcugcccuucgacagacacgacuggaucaucaacagaugcggcaccgaggugagauacgugaucgacuacuacgacggcggcgaggugaacaaggacuaccaguucaccauccuggacgugagacccgcccuggacagccugagcgccgugugggacagaaugaagguggccugguggagauggaccagcuga

SEQ ID NO: 7183 - RNA, 807 nt, Artificial Sequence
  derived and/or modified sequence opt5 from Cytochrome_c__Homo_sapiens__EAW98784
augggccugagccccuccgccccugcuguggccguccaggcgucuaacgcuagcgccuccccgcccucugggugcccuaugcacgagggaaagaugaaaggcugucccguuaauaccgaaccuagcgggcccacaugcgagaagaaaacguacuccgugccugcccaucaagaaagagcuuaugaguacguggaauguccgauccggggaaccgccgcugagaacaaggagaaucucgaccccucuaaccugaugccucccccuaaucagacacccgccccggaucagccuuucgcgcuuagcaccguccgcgaagaguccagcauucccagagccgacucugagaaaaaguggguguauccuuccgaacagauguuuuggaacgcuaugcugaagaaaggcuggaaguggaaagaugaggacaucagccaaaaggauauguacaauauuauccggauucacaaccagaauaacgaacaggccuggaaagagauccucaagugggaagcucugcaugccgcggagugccccugugggcccucucuuauccgcuucggaggcaaggccaaagaauauuccccuagagcucggauucgcagcuggaugggcuacgagcugccguuugacagacacgauuggaucauuaaucggugcgggacagagguucgcuaugugaucgacuacuacgauggaggcgaagucaacaaggacuaucaguucaccauucucgaugugagacccgcccuggacucucuguccgcuguuugggaucggaugaaaguggccugguggcgcuggacaagcuga

SEQ ID NO: 7184 - RNA, 807 nt, Artificial Sequence
  derived and/or modified sequence opt6 from Cytochrome_c__Homo_sapiens__EAW98784
augggacuaaguccaagcgcaccagcaguagcaguacaagcaaguaacgcaagcgcaucaccgccaucaggauguccaaugcacgaaggaaaaaugaaaggauguccaguaaacacagaaccaagcggaccaacaugcgaaaaaaaaacauauagcgugccagcacaccaagaaagagcauaugaauauguagaaugcccaauaagaggaacagcagcagaaaauaaagaaaauuuagacccaagcaaucuaaugcccccaccaaaucaaacaccagcaccagaucaaccauucgcauuaucaacaguaagagaagaaucaaguauaccaagagcagacagcgaaaaaaaauggguauacccaagugaacaaauguuuuggaacgcaaugcuaaaaaaaggauggaaauggaaagaugaagauauaucacaaaaagacauguacaauauaauaagaauacacaaucaaaauaaugaacaagcauggaaggaaauacuaaaaugggaagcacuacacgcagcagaaugcccaugcggaccaaguuuaauaagauuuggaggaaaagcaaaagaauacagcccaagagcaagaauaagaagcuggaugggauacgaacuaccauuugauagacaugacuggauaauaaacagaugcggaacagaaguaagauacguaauagauuacuaugacggaggagaaguaaauaaagauuaccaauuuacaauacuagauguaagaccagcauuagacucacuaucagcaguaugggauagaaugaaaguagcaugguggagauggacaaguuaa

SEQ ID NO: 7185 - protein, 106 aa, Artificial Sequence
  Cytochrome_c__Homo_sapiens__B8XYC5
MFAPAVMRAFRKNKTLGYGVPMLLLIVGGSFGLREFSQIRYDAVKSKMDPELEKKLKENKISLESEYEKIKDSKFDDWKNIRGPRPWEDPDLLQGRNPESLKTKTT

SEQ ID NO: 7186 - RNA, 321 nt, Artificial Sequence
  Cytochrome_c__Homo_sapiens__ACJ76681
auguuugcacccgcggugaugcgugcuuuucgcaagaacaagacucucggcuauggaguccccauguuguugcugauuguuggagguucuuuuggucuucgugaguuuucucaaauccgauaugaugcugugaagaguaaaauggauccugagcuugaaaaaaaacugaaagagaauaaaauaucuuuagagucggaauaugagaaaaucaaagacuccaaguuugaugacuggaagaauauucgaggacccaggccuugggaagauccugaccuccuccaaggaagaaauccagaaagccuuaagacuaagacaacuuga

SEQ ID NO: 7187 - RNA, 321 nt, Artificial Sequence
  derived and/or modified sequence opt1 from Cytochrome_c__Homo_sapiens__ACJ76681
auguucgcccccgccgugaugcgcgcguuccggaagaacaagacccugggcuacggggugccgaugcuccugcugaucgugggcgggagcuucggccuccgcgaguucucccagauccgguacgacgccgucaagagcaagauggaccccgagcuggagaagaagcugaaggagaacaagaucucccucgagagcgaguacgagaagaucaaggacuccaaguucgacgacuggaagaacauccgcgggccccggcccugggaggacccggaccugcugcagggccgcaaccccgagagccucaagaccaagacgaccuga

SEQ ID NO: 7188 - RNA, 321 nt, Artificial Sequence
  derived and/or modified sequence opt2 from Cytochrome_c__Homo_sapiens__ACJ76681
auguucgcccccgccgucaugcgcgccuuccgcaagaacaagacccucggcuacggcguccccaugcuccuccucaucgucggcggcuccuucggccuccgcgaguucucccagauccgcuacgacgccgucaaguccaagauggaccccgagcucgagaagaagcucaaggagaacaagaucucccucgaguccgaguacgagaagaucaaggacuccaaguucgacgacuggaagaacauccgcggcccccgccccugggaggaccccgaccuccuccagggccgcaaccccgagucccucaagaccaagaccaccuga

SEQ ID NO: 7189 - RNA, 321 nt, Artificial Sequence
  derived and/or modified sequence opt3 from Cytochrome_c__Homo_sapiens__ACJ76681
auguucgcccccgcugugaugagagcauuuaggaagaacaaaacccugggcuacggggucccuaugcuccuucugaucguuggagguagcuucggcuugcgggaguuuucccagauucgcuaugacgccgugaagucuaaaauggauccagaauuagagaagaaacugaaggaaaauaagauaucacuagagagugaauacgagaaaaucaaggacagcaaauucgaugacuggaagaacauucgagggccgcgucccugggaggauccugaccuccugcaaggaagaaauccagaaucccuuaaaacaaagacuacguga

SEQ ID NO: 7190 - RNA, 321 nt, Artificial Sequence
  derived and/or modified sequence opt4 from Cytochrome_c__Homo_sapiens__ACJ76681
auguucgcccccgccgugaugagagccuucagaaagaacaagacccugggcuacggcgugcccaugcugcugcugaucgugggcggcagcuucggccugagagaguucagccagaucagauacgacgccgugaagagcaagauggaccccgagcuggagaagaagcugaaggagaacaagaucagccuggagagcgaguacgagaagaucaaggacagcaaguucgacgacuggaagaacaucagaggccccagacccugggaggaccccgaccugcugcagggcagaaaccccgagagccugaagaccaagaccaccuga

SEQ ID NO: 7191 - RNA, 321 nt, Artificial Sequence
  derived and/or modified sequence opt5 from Cytochrome_c__Homo_sapiens__ACJ76681
auguucgcccccgcugugaugagagccuuucggaagaacaaaacccugggcuacggggucccuaugcuccugcuuaucguuggaggcagcuucgggcugcgcgaguuuucccagauuagauaugacgcggugaagucuaaaauggauccggaacucgagaagaaacugaaggaaaauaagaucagccuugaguccgaauacgagaaaauuaaggacucuaaauucgaugacuggaagaacauccggggaccccgcccuugggaggaucccgaccugcuccaaggcagaaauccugaaagccugaaaacaaagacgaccuga

SEQ ID NO: 7192 - RNA, 321 nt, Artificial Sequence
  derived and/or modified sequence opt6 from Cytochrome_c__Homo_sapiens__ACJ76681
auguucgcaccagcaguaaugagagcauucagaaaaaacaaaacacuaggauacggaguaccaaugcuacuauuaauaguaggaggaagcuucggacuaagagaauucucacaaauaagauacgacgcaguaaaaagcaaaauggacccagaacuagaaaaaaaacuaaaagaaaacaaaauaagccuagaaucagaauacgaaaaaauaaaagacucaaaauucgacgacuggaaaaacauaagaggaccaagaccaugggaagacccagaccuacuacaaggaagaaacccagaaagccuaaaaacaaaaacaacauaa

SEQ ID NO: 7193 - protein, 105 aa, Artificial Sequence
  Cytochrome_c__Homo_sapiens__G4XXL9
MGDVEKGKKIFIMKCSQCHTVEKGGKHKTGPNLHGLFGRKTGQAPGYSYTAANKNKGIIWGEDTLMEYLENPKKYIPGTKMIFVGIKKKEERADLIAYLKKATNE

SEQ ID NO: 7194 - RNA, 318 nt, Artificial Sequence
  Cytochrome_c__Homo_sapiens__AEP27189
augggugauguugagaaaggcaagaagauuuuuauuaugaaguguucccagugccacaccguugaaaagggaggcaagcacaagacugggccaaaucuccauggucucuuugggcggaagacaggucaggccccuggauacucuuacacagccgccaauaagaacaaaggcaucaucuggggagaggauacacugauggaguauuuggagaaucccaagaaguacaucccuggaacaaaaaugaucuuugucggcauuaagaagaaggaagaaagggcagacuuaauagcuuaucucaaaaaagcuacuaaugaguaa

SEQ ID NO: 7195 - RNA, 318 nt, Artificial Sequence
  derived and/or modified sequence opt1 from Cytochrome_c__Homo_sapiens__AEP27189
augggcgacguggagaaggggaagaagaucuucaucaugaagugcagccagugccacaccgucgagaagggcgggaagcacaagaccggccccaaccugcacggccucuucgggcgcaagacgggccaggccccgggguacuccuacaccgccgcgaacaagaacaagggcaucaucuggggcgaggacacccugauggaguaccuggagaaccccaagaaguacauccccgggaccaagaugaucuucguggggaucaagaagaaggaggagcgggccgaccucaucgccuaccugaagaaggccacgaacgaguga

SEQ ID NO: 7196 - RNA, 318 nt, Artificial Sequence
  derived and/or modified sequence opt2 from Cytochrome_c__Homo_sapiens__AEP27189
augggcgacgucgagaagggcaagaagaucuucaucaugaagugcucccagugccacaccgucgagaagggcggcaagcacaagaccggccccaaccuccacggccucuucggccgcaagaccggccaggcccccggcuacuccuacaccgccgccaacaagaacaagggcaucaucuggggcgaggacacccucauggaguaccucgagaaccccaagaaguacauccccggcaccaagaugaucuucgucggcaucaagaagaaggaggagcgcgccgaccucaucgccuaccucaagaaggccaccaacgaguga

SEQ ID NO: 7197 - RNA, 318 nt, Artificial Sequence
  derived and/or modified sequence opt3 from Cytochrome_c__Homo_sapiens__AEP27189
augggcgacguggagaaggggaaaaagaucuucauuaugaaaugcagccagugucacaccgucgaaaagggagguaaacauaagacaggccccaaccugcacgggcucuuuggaagaaagacuggccaagccccugguuacuccuauacggcugcaaauaaaaacaaggggauaaucuggggagaggauacccuuauggaauaccuggagaauccgaaaaaguauauuccaggcacaaaaaugaucuucguuggcauuaagaagaaagaagagagggccgacuugaucgcguacuuaaagaaagcuacuaacgaguga

SEQ ID NO: 7198 - RNA, 318 nt, Artificial Sequence
  derived and/or modified sequence opt4 from Cytochrome_c__Homo_sapiens__AEP27189
augggcgacguggagaagggcaagaagaucuucaucaugaagugcagccagugccacaccguggagaagggcggcaagcacaagaccggccccaaccugcacggccuguucggcagaaagaccggccaggcccccggcuacagcuacaccgccgccaacaagaacaagggcaucaucuggggcgaggacacccugauggaguaccuggagaaccccaagaaguacauccccggcaccaagaugaucuucgugggcaucaagaagaaggaggagagagccgaccugaucgccuaccugaagaaggccaccaacgaguga

SEQ ID NO: 7199 - RNA, 318 nt, Artificial Sequence
  derived and/or modified sequence opt5 from Cytochrome_c__Homo_sapiens__AEP27189
augggcgacguggagaaggggaaaaagaucuucauuaugaaaugcagccagugucacaccgucgaaaagggaggcaaacauaagacagggcccaaccugcacggacucuuuggcagaaagacggggcaagccccuggauacuccuauaccgcugccaauaaaaacaagggcaucauuuggggcgaggauacacugauggaauaccuugagaauccgaaaaaguauauccccgggaccaaaaugauuuucguuggaaucaagaagaaagaggaacgggcggaccugaucgcuuaccucaagaaagccacaaacgaguga

SEQ ID NO: 7200 - RNA, 318 nt, Artificial Sequence
  derived and/or modified sequence opt6 from Cytochrome_c__Homo_sapiens__AEP27189
augggagacguagaaaaaggaaaaaaaauauucauaaugaaaugcagccaaugccacacaguagaaaaaggaggaaaacacaaaacaggaccaaaccuacacggacuauucggaagaaaaacaggacaagcaccaggauacagcuacacagcagcaaacaaaaacaaaggaauaauauggggagaagacacacuaauggaauaccuagaaaacccaaaaaaauacauaccaggaacaaaaaugauauucguaggaauaaaaaaaaaagaagaaagagcagaccuaauagcauaccuaaaaaaagcaacaaacgaauaa

SEQ ID NO: 7201 - protein, 115 aa, Artificial Sequence
  Cytochrome_c__Homo_sapiens__H0UI06
MHTQDSEVVPVPAWPFSLVVFSCGGCWSVTAKMLRNLLALRQIGQRTISTASRRHFKNKVPEKQKLFQEDDEIPLYLKGGVADALLYRATMILTVGGTAYAIYELAVASFPKKQE

SEQ ID NO: 7202 - RNA, 348 nt, Artificial Sequence
  Cytochrome_c__Homo_sapiens__CCF23109
augcauacgcaagacucggagguaguuccgguuccggcguggccauuuucguuggugguguucaguuguggcgguugcuggucaguaacagccaagaugcugcggaaucugcuggcucuucgucagauugggcagaggacgauaagcacugcuucccgcaggcauuuuaaaaauaaaguuccggagaagcaaaaacuguuccaggaggaugaugaaauuccacuguaucuaaagggugggguagcugaugcccuccuguauagagccaccaugauucuuacaguugguggaacagcauaugccauauaugagcuggcuguggcuucauuucccaagaagcaggaguga

SEQ ID NO: 7203 - RNA, 348 nt, Artificial Sequence
  derived and/or modified sequence opt1 from Cytochrome_c__Homo_sapiens__CCF23109
augcacacccaggacagcgagguggugcccgugccggccuggcccuucucccugguggucuucagcugcggcgggugcugguccgugaccgccaagaugcuccgcaaccugcuggcgcuccggcagaucggccagcgcacgaucagcaccgccucccggcgccacuucaagaacaaggugcccgagaagcagaagcuguuccaggaggacgacgagaucccccuguaccucaagggcggggucgccgacgcccugcuguaccgggccaccaugauccucaccgucgggggcacggcguacgccaucuacgagcuggccguggccagcuucccgaagaagcaggaguga

SEQ ID NO: 7204 - RNA, 348 nt, Artificial Sequence
  derived and/or modified sequence opt2 from Cytochrome_c__Homo_sapiens__CCF23109
augcacacccaggacuccgaggucguccccguccccgccuggcccuucucccucgucgucuucuccugcggcggcugcugguccgucaccgccaagaugcuccgcaaccuccucgcccuccgccagaucggccagcgcaccaucuccaccgccucccgccgccacuucaagaacaagguccccgagaagcagaagcucuuccaggaggacgacgagaucccccucuaccucaagggcggcgucgccgacgcccuccucuaccgcgccaccaugauccucaccgucggcggcaccgccuacgccaucuacgagcucgccgucgccuccuuccccaagaagcaggaguga

SEQ ID NO: 7205 - RNA, 348 nt, Artificial Sequence
  derived and/or modified sequence opt3 from Cytochrome_c__Homo_sapiens__CCF23109
augcacacccaggacagcgaggugguccccguuccugccuggccauucucccuggugguauuuucuugcggcggguguuggucagugacagcuaagaugcucagaaaccuucuggcauugaggcaaaucggacagcggacuauuaguacggccagccgccgacauuucaaaaauaaggucccggaaaaacagaaguuauuucaggaggaugacgaaauaccccuguaccuaaaagguggcguggcggaugcucuccuguaucgugccaccaugauccuuacaguugggggaacugcauacgccauuuaugagcuggcuguggcauccuucccuaagaagcaagaauga

SEQ ID NO: 7206 - RNA, 348 nt, Artificial Sequence
  derived and/or modified sequence opt4 from Cytochrome_c__Homo_sapiens__CCF23109
augcacacccaggacagcgagguggugcccgugcccgccuggcccuucagccuggugguguucagcugcggcggcugcuggagcgugaccgccaagaugcugagaaaccugcuggcccugagacagaucggccagagaaccaucagcaccgccagcagaagacacuucaagaacaaggugcccgagaagcagaagcuguuccaggaggacgacgagaucccccuguaccugaagggcggcguggccgacgcccugcuguacagagccaccaugauccugaccgugggcggcaccgccuacgccaucuacgagcuggccguggccagcuuccccaagaagcaggaguga

SEQ ID NO: 7207 - RNA, 348 nt, Artificial Sequence
  derived and/or modified sequence opt5 from Cytochrome_c__Homo_sapiens__CCF23109
augcacacccaggacagcgaggugguccccguuccugccuggccguucucccuggugguguuuucuugcggcggguguuggagcgucacagcuaagaugcucagaaaccugcuugcccugcggcaaaucggacagcgcacgauuuccaccgcgucuagacggcauuucaaaaauaaggugcccgaaaaacagaagcucuuucaggaggaugacgaaaucccucuguaccuuaaaggcgggguugcugaugcccugcucuaucgcgccacaaugauucugaccgugggaggcacagcuuacgccaucuaugagcuggcugucgccagcuuccccaagaagcaagaauga

SEQ ID NO: 7208 - RNA, 348 nt, Artificial Sequence
  derived and/or modified sequence opt6 from Cytochrome_c__Homo_sapiens__CCF23109
augcacacacaagauagcgaaguaguaccaguaccagcauggccauucucacuaguagucuuuagcuguggaggaugcuggaguguaacagcaaaaaugcuaagaaacuuauuagcacuaagacaaauaggacaaagaacaauaucaacagcaagcagaagacauuucaaaaacaaaguaccagaaaaacaaaaacuauuucaagaagacgaugaaauaccauuauaccuaaaaggaggaguagcagaugcauuacuauauagagcaacaaugauauuaacaguaggaggaacagcauacgcaauauaugaacuagcaguagcaucauucccaaaaaaacaagaauaa

SEQ ID NO: 7209 - protein, 78 aa, Artificial Sequence
  Cytochrome_c__Homo_sapiens__H6SG12
MQALRVSQALIRSFSSTARNRFQNRVREKQLFQEDNDIPLYLKGGIVDNILYRVTMTLCLGGTVYSLYSLGWASFPRN

SEQ ID NO: 7210 - RNA, 237 nt, Artificial Sequence
  Cytochrome_c__Homo_sapiens__CCF23103
augcaggcccuucgggugucccaggcgcugauccgcuccuucagcuccaccgcccggaaccgcuuucagaaccgagugcgcgagaaacagcucuuccaggaggacaaugacaucccguuguaccugaagggcggcaucguugacaacauccuguaccgagugacaaugacgcugugucugggcggcacugucuacagcuuguacucccuuggcugggccuccuuccccaggaauuaa

SEQ ID NO: 7211 - RNA, 237 nt, Artificial Sequence
  derived and/or modified sequence opt1 from Cytochrome_c__Homo_sapiens__CCF23103
augcaggcccugcgcgugagccaggcccucauccgguccuucagcuccaccgcgcgcaaccgguuccagaaccgcguccgggagaagcagcuguuccaggaggacaacgacaucccccuguaccucaagggcgggaucguggacaacauccuguaccgcgugaccaugacgcugugccucggcgggaccgucuacagccuguacucccugggcugggccagcuucccgcggaacuga

SEQ ID NO: 7212 - RNA, 237 nt, Artificial Sequence
  derived and/or modified sequence opt2 from Cytochrome_c__Homo_sapiens__CCF23103
augcaggcccuccgcgucucccaggcccucauccgcuccuucuccuccaccgcccgcaaccgcuuccagaaccgcguccgcgagaagcagcucuuccaggaggacaacgacaucccccucuaccucaagggcggcaucgucgacaacauccucuaccgcgucaccaugacccucugccucggcggcaccgucuacucccucuacucccucggcugggccuccuucccccgcaacuga

SEQ ID NO: 7213 - RNA, 237 nt, Artificial Sequence
  derived and/or modified sequence opt3 from Cytochrome_c__Homo_sapiens__CCF23103
augcaggcccugagagugagccaagcucucaucagguccuucucuucaaccgcacggaaccgcuuucagaaucgaguccgugagaagcagcuuuuccaggaagacaacgauauuccccuguacuugaaaggcgggauaguugacaauaucuuauauagagugacaaugacucugugccuaggagguacgguauacagucucuauagccugggcugggccuccuuuccuaggaacuga

SEQ ID NO: 7214 - RNA, 237 nt, Artificial Sequence
  derived and/or modified sequence opt4 from Cytochrome_c__Homo_sapiens__CCF23103
augcaggcccugagagugagccaggcccugaucagaagcuucagcagcaccgccagaaacagauuccagaacagagugagagagaagcagcuguuccaggaggacaacgacaucccccuguaccugaagggcggcaucguggacaacauccuguacagagugaccaugacccugugccugggcggcaccguguacagccuguacagccugggcugggccagcuuccccagaaacuga

SEQ ID NO: 7215 - RNA, 237 nt, Artificial Sequence
  derived and/or modified sequence opt5 from Cytochrome_c__Homo_sapiens__CCF23103
augcaggcccugagagugagccaagcucucauccgguccuucucuagcaccgcccgcaacagauuucagaaucggguccgcgagaagcagcuguuccaggaagacaacgauauuccccuuuaccugaaaggcgggaucguugacaauauucucuauagagugacaaugacgcugugccuuggaggcaccguguacucccuguauucucucgggugggcgagcuuuccucggaacuga

SEQ ID NO: 7216 - RNA, 237 nt, Artificial Sequence
  derived and/or modified sequence opt6 from Cytochrome_c__Homo_sapiens__CCF23103
augcaagcauuaagaguaagccaagcauuaauaagaagcuuuagcucaacagcaagaaauagauuucaaaauagaguaagagaaaaacaacuauuucaagaagacaaugacauaccauuauacuuaaaaggaggaauaguagauaacauacuauauagaguaacaaugacauuaugcuuaggaggaacaguauacucacuauauagcuuaggaugggcaucauucccaagaaauuaa

SEQ ID NO: 7217 - protein, 97 aa, Artificial Sequence [sequence omitted]

SEQ ID NO: 7218 - RNA, 294 nt, Artificial Sequence
  Cytochrome_c__Homo_sapiens__CCF23106
auggcuuugccucugaggccccugacccggggcguggccagcgcugccaaaggaggccacggaggagcaggagcucguaccuggcgucugcugaccuucgugcuggcgcugcccagcguggcccucugcaccuucaacuccuaucuccacucgggccaccgcccgcgccccgaguuccgucccuaccaacaccuccgcauccgcaccaagcccuaccccuggggggacggcaaccacacucuguuccacaauagccacgugaacccucugcccacgggcuacgaacaccccuga

SEQ ID NO: 7219 - RNA, 294 nt, Artificial Sequence
  derived and/or modified sequence opt1 from Cytochrome_c__Homo_sapiens__CCF23106
auggcccugccccuccgcccgcugacccggggcguggccagcgcggccaagggcgggcacgggggcgccggggcccgcaccuggcggcugcucacguucguccuggcccugcccuccguggcgcucugcaccuucaacagcuaccugcacuccggccaccgcccccggcccgaguuccgcccguaccagcaccuccggauccgcaccaagcccuaccccuggggcgacgggaaccacacccuguuccacaacagccacgugaacccccugccgacgggcuacgagcaccccuga

SEQ ID NO: 7220 - RNA, 294 nt, Artificial Sequence
  derived and/or modified sequence opt2 from Cytochrome_c__Homo_sapiens__CCF23106
auggcccucccccuccgcccccucacccgcggcgucgccuccgccgccaagggcggccacggcggcgccggcgcccgcaccuggcgccuccucaccuucguccucgcccuccccuccgucgcccucugcaccuucaacuccuaccuccacuccggccaccgcccccgccccgaguuccgccccuaccagcaccuccgcauccgcaccaagcccuaccccuggggcgacggcaaccacacccucuuccacaacucccacgucaacccccuccccaccggcuacgagcaccccuga

SEQ ID NO: 7221 - RNA, 294 nt, Artificial Sequence
  derived and/or modified sequence opt3 from Cytochrome_c__Homo_sapiens__CCF23106
auggcccugccccucagaccucuuaccaggggcguggcuagcgcagccaaagggggacacgguggcgcgggggcucggacauggcgccuguugacuuucgucuuagcccugccauccguugcacuaugcacguuuaacucuuaccuccauucaggacaccgaccgcgucccgaguucagaccuuaucagcaucugaggauccggaccaagccauaccccuggggcgacgguaaucacacacuuuuucauaacagucacgugaauccucugccaacuggguaugaacaccccuga

SEQ ID NO: 7222 - RNA, 294 nt, Artificial Sequence
  derived and/or modified sequence opt4 from Cytochrome_c__Homo_sapiens__CCF23106
auggcccugccccugagaccccugaccagaggcguggccagcgccgccaagggcggccacggcggcgccggcgccagaaccuggagacugcugaccuucgugcuggcccugcccagcguggcccugugcaccuucaacagcuaccugcacagcggccacagacccagacccgaguucagacccuaccagcaccugagaaucagaaccaagcccuaccccuggggcgacggcaaccacacccuguuccacaacagccacgugaacccccugcccaccggcuacgagcaccccuga

SEQ ID NO: 7223 - RNA, 294 nt, Artificial Sequence
  derived and/or modified sequence opt5 from Cytochrome_c__Homo_sapiens__CCF23106
auggcccugccccucagaccucugacccggggcguggcuagcgccgcgaaagggggacacggcggggcuggagcccgcacauggagacuucugacguucguccucgcccugccguccguugcucuuugcaccuuuaacucuuaccugcauagcggccaccggccccgcccugaguucagacccuaucagcaucuccggauccgcacaaagccuuaccccuggggagacgggaaucacacccuguuucauaacucccacgugaauccucugccgacaggcuaugaacaccccuga

SEQ ID NO: 7224 - RNA, 294 nt, Artificial Sequence
  derived and/or modified sequence opt6 from Cytochrome_c__Homo_sapiens__CCF23106
auggcacuaccacuaagaccauuaacaagaggaguagcaucagcagcaaaaggaggacacggaggagcaggagcaagaacauggagacuacuaacauucguacuagcacuaccaucaguagcacuaugcacauucaacucauaccuacacucaggacacagaccaagaccagaauucagaccauaccaacaccuaagaauaagaacaaaaccauacccauggggagacggaaaccacacacuauuccacaacucacacguaaacccacuaccaacaggauacgaacacccauaa

SEQ ID NO: 7225 - protein, 171 aa, Artificial Sequence
  Cytochrome_c__Homo_sapiens__H6SG14
MLPRAAWSLVLRKGGGGRRGMHSSEGTTRGGGKMSPYTNCYAQRYYPMPEEPFCTELNAEEQALKEKEKGSWTQLTHAEKVALYRLQFNETFAEMNRRSNEWKTVMGCVFFFIGFAALVIWWQRVYVFPPKPITLTDERKAQQLQRMLDMKVNPVQGLASRWDYEKKQWKK

SEQ ID NO: 7226 - RNA, 516 nt, Artificial Sequence
  Cytochrome_c__Homo_sapiens__CCF23107
augcuccccagagcugccuggagcuuggugcugaggaaagguggagguggaagacgagggaugcacagcucagaaggcaccacccgugguggggggaagaugucccccuacaccaacugcuaugcccagcgcuacuaccccaugccagaagagcccuucugcacagaacucaacgcugaggagcaggcccugaaggagaaggagaagggaagcuggacccagcugacccacgccgaaaagguggccuuguaccggcuccaguucaaugagaccuuugcggagaugaaccgucgcuccaaugaguggaagacagugauggguugugucuucuucuucauuggauucgcagcucuggugauuugguggcagcgggucuacguauuuccuccaaagccgaucaccuugacggacgagcggaaagcccagcagcugcagcgcaugcuggacaugaaggugaauccugugcagggccuggccucccgcugggacuaugagaagaagcaguggaagaaguga

SEQ ID NO: 7227 - RNA, 516 nt, Artificial Sequence
  derived and/or modified sequence opt1 from Cytochrome_c__Homo_sapiens__CCF23107
augcugccccgcgccgccuggagccucgugcugcggaagggcgggggcgggcgccggggcaugcacuccagcgaggggaccacccgcggcggcgggaagauguccccguacacgaacugcuacgcgcagcgguacuaccccaugcccgaggagcccuucugcaccgagcugaacgccgaggagcaggcccucaaggagaaggagaagggcagcuggacccagcugacccacgccgagaaggucgcccuguaccgccuccaguucaacgagacguucgcggagaugaaccggcgcuccaacgaguggaagaccgugauggggugcguguucuucuucaucggcuucgccgcccuggucaucugguggcagcggguguacguguucccgcccaagcccaucacccugaccgacgagcgcaaggcccagcagcuccagcggaugcuggacaugaaggucaaccccgugcaggggcuggcgagccgcugggacuacgagaagaagcaguggaagaaguga

SEQ ID NO: 7228 - RNA, 516 nt, Artificial Sequence
  derived and/or modified sequence opt2 from Cytochrome_c__Homo_sapiens__CCF23107
augcucccccgcgccgccuggucccucguccuccgcaagggcggcggcggccgccgcggcaugcacuccuccgagggcaccacccgcggcggcggcaagaugucccccuacaccaacugcuacgcccagcgcuacuaccccaugcccgaggagcccuucugcaccgagcucaacgccgaggagcaggcccucaaggagaaggagaagggcuccuggacccagcucacccacgccgagaaggucgcccucuaccgccuccaguucaacgagaccuucgccgagaugaaccgccgcuccaacgaguggaagaccgucaugggcugcgucuucuucuucaucggcuucgccgcccucgucaucugguggcagcgcgucuacgucuucccccccaagcccaucacccucaccgacgagcgcaaggcccagcagcuccagcgcaugcucgacaugaaggucaaccccguccagggccucgccucccgcugggacuacgagaagaagcaguggaagaaguga

SEQ ID NO: 7229 - RNA, 516 nt, Artificial Sequence
  derived and/or modified sequence opt3 from Cytochrome_c__Homo_sapiens__CCF23107
augcugcccagagccgcuuggagccucgugcuuaggaagggcgggggaggucggcgcggcaugcacuccucugaggggaccacacgaggaggcgguaaaaugucaccuuacacuaacugcuaugcacagcguuacuauccaaugccggaagaacccuucuguacggaacugaaugccgaggaacaagcguugaaggagaaagagaaggggaguuggacccaguuaacacaugcugaaaaagucgcccuguacagacuacaguuuaacgagacuuucgcagaaaugaauaggcggagcaacgaguggaagaccguuaugggaugcguguuuuucuuuaucggcuucgccgcucucguaauuugguggcagcgcguguaugucuuuccuccaaagcccauaacacugaccgacgagagaaaagcacaacagcuucagaggaugcuggauaugaaggugaauccuguucagggcuuggccucccggugggacuacgagaaaaagcaauggaaaaaguga

SEQ ID NO: 7230 - RNA, 516 nt, Artificial Sequence
  derived and/or modified sequence opt4 from Cytochrome_c__Homo_sapiens__CCF23107
augcugcccagagccgccuggagccuggugcugagaaagggcggcggcggcagaagaggcaugcacagcagcgagggcaccaccagaggcggcggcaagaugagccccuacaccaacugcuacgcccagagauacuaccccaugcccgaggagcccuucugcaccgagcugaacgccgaggagcaggcccugaaggagaaggagaagggcagcuggacccagcugacccacgccgagaagguggcccuguacagacugcaguucaacgagaccuucgccgagaugaacagaagaagcaacgaguggaagaccgugaugggcugcguguucuucuucaucggcuucgccgcccuggugaucugguggcagagaguguacguguucccccccaagcccaucacccugaccgacgagagaaaggcccagcagcugcagagaaugcuggacaugaaggugaaccccgugcagggccuggccagcagaugggacuacgagaagaagcaguggaagaaguga

SEQ ID NO: 7231 - RNA, 516 nt, Artificial Sequence
  derived and/or modified sequence opt5 from Cytochrome_c__Homo_sapiens__CCF23107
augcugcccagagccgcuuggagccucgugcugcggaagggcgggggaggccgcagagggaugcacuccucugagggaaccacacggggcgggggaaaaaugagcccuuacacgaacugcuaugcccagcgcuacuauccgaugcccgaagaaccuuucuguaccgaacuuaaugcggaggaacaagcucugaaggagaaagagaagggcuccuggacacagcucacccaugccgaaaaagucgcccuguacagacuucaguuuaacgagacauucgcugaaaugaaucggcgcucuaacgaguggaagaccguuaugggcugcguguuuuucuuuaucggguucgccgcucuggugauuugguggcagagagucuauguguuucccccuaagcccaucacacucaccgacgagcggaaagcccaacagcugcagcgcaugcuggauaugaagguuaauccugugcagggacucgcgagcagaugggacuacgagaaaaagcaauggaaaaaguga

SEQ ID NO: 7232 - RNA, 516 nt, Artificial Sequence
  derived and/or modified sequence opt6 from Cytochrome_c__Homo_sapiens__CCF23107
augcuaccgagagcagcauggagccuaguauuaagaaaaggagguggaggaagaagaggaaugcacucaagcgaaggaacaacaagaggaggaggaaaaaugucaccauauacaaauugcuaugcacaaagauauuacccaaugccagaagaaccauucugcacggaauuaaacgcagaagaacaagcacuaaaagaaaaagaaaaaggaucauggacacaauuaacacaugcagaaaaaguagcauuauacagacuacaauucaaugaaacauucgcagaaaugaacagaagaucaaacgaauggaaaacaguaaugggaugcguauucuuuuucauagguuuugcagcacuaguaauaugguggcaaagaguauacguauucccaccaaaaccaauaacauuaacagaugaaagaaaagcacaacaacuacaaagaauguuagauaugaaagucaauccaguacaaggacuagcaagcagaugggauuacgaaaaaaaacaauggaaaaaauaa

SEQ ID NO: 7233 - protein, 109 aa, Artificial Sequence
  Cytochrome_c__Homo_sapiens__H6SG15
MAVVGVSSVSRLLGRSRPQLGRPMSSGAHGEEGSARMWKTLTFFVALPGVAVSMLNVYLKSHHGEHERPEFIAYPHLRIRTKPFPWGDGNHTLFHNPHVNPLPTGYEDE

SEQ ID NO: 7234 - RNA, 330 nt, Artificial Sequence
  Cytochrome_c__Homo_sapiens__CCF23108
auggcgguaguugguguguccucgguuucucggcugcugggucggucccgcccacagcuggggcggccuaugucgaguggcgcccauggcgaagagggcucagcucgcauguggaagacucucaccuucuucgucgcgcuccccgggguggcagucagcaugcugaauguguaccugaagucgcaccacggagagcacgagagacccgaguucaucgccuacccccaucuccgcaucaggaccaagccguuucccuggggagaugguaaccauacucuauuccauaacccucaugugaauccacuuccaacuggcuacgaagaugaauaa

SEQ ID NO: 7235 - RNA, 330 nt, Artificial Sequence
  derived and/or modified sequence opt1 from Cytochrome_c__Homo_sapiens__CCF23108
auggccguggucggcgugagcagcgugagccgccugcucgggcggucccgcccccagcugggccggccgaugagcuccggggcccacggcgaggaggggagcgcgcgcauguggaagacccugaccuucuucgucgcccuccccggcguggccguguccaugcugaacgucuaccugaagucccaccacggcgagcacgagcggcccgaguucaucgccuacccccaccuccgcauccggacgaagccguuccccuggggcgacgggaaccacacccuguuccacaacccccacgugaacccccugccgaccggguacgaggacgaguga

SEQ ID NO: 7236 - RNA, 330 nt, Artificial Sequence
  derived and/or modified sequence opt2 from Cytochrome_c__Homo_sapiens__CCF23108
auggccgucgucggcgucuccuccgucucccgccuccucggccgcucccgcccccagcucggccgccccauguccuccggcgcccacggcgaggagggcuccgcccgcauguggaagacccucaccuucuucgucgcccuccccggcgucgccgucuccaugcucaacgucuaccucaagucccaccacggcgagcacgagcgccccgaguucaucgccuacccccaccuccgcauccgcaccaagcccuuccccuggggcgacggcaaccacacccucuuccacaacccccacgucaacccccuccccaccggcuacgaggacgaguga

SEQ ID NO: 7237 - RNA, 330 nt, Artificial Sequence
  derived and/or modified sequence opt3 from Cytochrome_c__Homo_sapiens__CCF23108
auggccguggucggcguuagcuccgugucuagacugcucgggaggucacggccccagcuuggacgcccuaugaguagcggugcucacggcgaggaaggguccgcacgaauguggaagacccugacauucuuuguagccuugccaggaguggcggucucuauguuaaacguguaccugaaaucgcaucacggcgagcaugaacguccggaguucaucgcuuauccccaccuaagaauuaggacuaagccuuuuccauggggugacgggaaucauacccucuuccacaacccccacguuaauccucugccaacgggauacgaagaugaguga

SEQ ID NO: 7238 - RNA, 330 nt, Artificial Sequence
  derived and/or modified sequence opt4 from Cytochrome_c__Homo_sapiens__CCF23108
auggccguggugggcgugagcagcgugagcagacugcugggcagaagcagaccccagcugggcagacccaugagcagcggcgcccacggcgaggagggcagcgccagaauguggaagacccugaccuucuucguggcccugcccggcguggccgugagcaugcugaacguguaccugaagagccaccacggcgagcacgagagacccgaguucaucgccuacccccaccugagaaucagaaccaagcccuuccccuggggcgacggcaaccacacccuguuccacaacccccacgugaacccccugcccaccggcuacgaggacgaguga

SEQ ID NO: 7239 - RNA, 330 nt, Artificial Sequence
  derived and/or modified sequence opt5 from Cytochrome_c__Homo_sapiens__CCF23108
auggccguggucggcguuagcuccgugucuagacugcucgggcggagccgcccccagcugggaagaccuauguccucuggcgcucacggggaggaaggaagcgcccggauguggaagacccuuacauucuuuguggcgcugccgggcgucgcuguguccaugcucaacguuuaccugaaaucucaucacggggagcaugaacgccccgaguucaucgccuauccucaccuucggauuagaacgaagcccuuuccuuggggagacggcaaucauacccuguuccacaacccccacgugaauccucucccgacaggcuacgaagaugaguga

SEQ ID NO: 7240 - RNA, 330 nt, Artificial Sequence
  derived and/or modified sequence opt6 from Cytochrome_c__Homo_sapiens__CCF23108
auggcaguaguaggaguaucaucaguaucaagacuacuaggaagaucaagaccacaacucggaagaccaaugucaucaggagcacacggagaagaaggaucagcaagaauguggaaaacacuaacauucuucguagcauuaccaggaguagcaguaucaaugcuaaacguauaccuaaaaucacaucacggagaacaugaaagaccagaauucauagcauacccacaccuaagaauaagaacaaaaccauucccauggggagacggaaaucacacacuauuccacaacccacacguaaacccacuaccaacaggauaugaagacgaauaa

SEQ ID NO: 7241 - protein, 86 aa, Artificial Sequence [sequence omitted]

SEQ ID NO: 7242 - RNA, 261 nt, Artificial Sequence
  Cytochrome_c__Homo_sapiens__AAC98895
augucgaguggcgcccacggcgaggaggguucagcucggauguggaaggcccucaccuacuucguggcgcugcccggggugggagugagcaugcucaacguguuccucaagucgcggcacgaagagcacgagagacccccguucguugccuacccucaccugcgcaucaggaccaagcccuuccccuggggagacgguaaccauacccucuuccacaacccucaugugaacccacuuccgaccggcuaugaagaugaguaa

SEQ ID NO: 7243 - RNA, 261 nt, Artificial Sequence
  derived and/or modified sequence opt1 from Cytochrome_c__Homo_sapiens__AAC98895
augagcagcggcgcccacggggaggagggcagcgcccgcauguggaaggcgcugaccuacuucguggcccuccccggggucggcguguccaugcugaacguguuccugaagucccggcacgaggagcacgagcgcccgcccuucgucgccuacccccaccuccggauccgcaccaagcccuucccguggggcgacgggaaccacacgcuguuccacaacccccacgugaacccccugcccaccggcuacgaggacgaguga

SEQ ID NO: 7244 - RNA, 261 nt, Artificial Sequence
  derived and/or modified sequence opt2 from Cytochrome_c__Homo_sapiens__AAC98895
auguccuccggcgcccacggcgaggagggcuccgcccgcauguggaaggcccucaccuacuucgucgcccuccccggcgucggcgucuccaugcucaacgucuuccucaagucccgccacgaggagcacgagcgcccccccuucgucgccuacccccaccuccgcauccgcaccaagcccuuccccuggggcgacggcaaccacacccucuuccacaacccccacgucaacccccuccccaccggcuacgaggacgaguga

SEQ ID NO: 7245 - RNA, 261 nt, Artificial Sequence
  derived and/or modified sequence opt3 from Cytochrome_c__Homo_sapiens__AAC98895
augagcuccggcgcccacggggaggaaggaucugcuagaauguggaaggcacugaccuacuucguggcccuccccggugucggcguuucaaugcuuaacguguuucugaaaaguaggcaugaggaacacgagcggccuccauucguagcguauccgcauuugcgcauccgaacaaagcccuuuccuuggggagacgggaaucacacuuuauuccauaacccacacgugaauccccugccuacgggcuacgaagaugaguga

SEQ ID NO: 7246 - RNA, 261 nt, Artificial Sequence
  derived and/or modified sequence opt4 from Cytochrome_c__Homo_sapiens__AAC98895
augagcagcggcgcccacggcgaggagggcagcgccagaauguggaaggcccugaccuacuucguggcccugcccggcgugggcgugagcaugcugaacguguuccugaagagcagacacgaggagcacgagagaccccccuucguggccuacccccaccugagaaucagaaccaagcccuuccccuggggcgacggcaaccacacccuguuccacaacccccacgugaacccccugcccaccggcuacgaggacgaguga

SEQ ID NO: 7247 - RNA, 261 nt, Artificial Sequence
  derived and/or modified sequence opt5 from Cytochrome_c__Homo_sapiens__AAC98895
augagcuccggcgcccacggggaggaaggaucugcuagaauguggaaggcccugaccuacuucguggcgcuccccggcgucgggguuagcaugcugaacguguuucuuaaaucccggcaugaggaacacgagcgcccuccguucguggcuuauccccaucugagaauccggacaaagccuuuucccuggggagacggcaaucacacccucuuccauaacccucacgucaauccccugccuacgggguacgaagaugaguga

SEQ ID NO: 7248 - RNA, 261 nt, Artificial Sequence
  derived and/or modified sequence opt6 from Cytochrome_c__Homo_sapiens__AAC98895
augucaucaggagcacacggagaagaaggaucagcaagaauguggaaagcacuaacauacuucguagcacuaccaggaguaggaguaucaaugcuaaacguauuccuaaaaucaagacacgaagaacacgaaagaccaccauucguagcauacccacaccuaagaauaagaacaaaaccauucccauggggagacggaaaccacacacuauuccacaacccacacguaaacccacuaccaacaggauacgaagacgaauaa

SEQ ID NO: 7249 - protein, 325 aa, Artificial Sequence
  Cytochrome_c__Homo_sapiens__P08574
MAAAAASLRGVVLGPRGAGLPGARARGLLCSARPGQLPLRTPQAVALSSKSGLSRGRKVMLSALGMLAAGGAGLAMALHSAVSASDLELHPPSYPWSHRGLLSSLDHTSIRRGFQVYKQVCASCHSMDFVAYRHLVGVCYTEDEAKELAAEVEVQDGPNEDGEMFMRPGKLFDYFPKPYPNSEAARAANNGALPPDLSYIVRARHGGEDYVFSLLTGYCEPPTGVSLREGLYFNPYFPGQAIAMAPPIYTDVLEFDDGTPATMSQIAKDVCTFLRWASEPEHDHRKRMGLKMLMMMALLVPLVYTIKRHKWSVLKSRKLAYRPPK

SEQ ID NO: 7250 - RNA, 978 nt, Artificial Sequence
  Cytochrome_c__Homo_sapiens__AAV38601
auggcggcagcugcggcuucgcuucgcgggguaguguugggcccgcggggcgcggggcucccgggcgcgcgugcccggggucugcugugcagcgcgcgucccgggcagcucccgcuacggacaccucaggcaguggccuugucgucgaagucuggccuuucccgaggccggaaagugaugcugucagcgcugggcaugcuggcggcagggggugcggggcuggccauggcucugcauucggcugugagugccagugaccuggagcugcacccccccagcuauccguggucucaccguggccuccucucuuccuuggaccacaccagcauccggagggguuuccagguauauaagcaggugugcgccuccugccacagcauggacuucguggccuaccgccaccuggugggcgugugcuacacggaggaugaagcuaaggagcuggcugcggagguggagguucaagacggccccaaugaagauggggagauguucaugcggccagggaagcuguucgacuauuucccaaaaccauaccccaacagugaggcugcucgagcugccaacaacggagcauugcccccugaccucagcuacaucgugcgagcuaggcaugguggugaggacuacgucuucucccugcucacgggcuacugcgagccacccaccggggugucacugcgggaaggucucuacuucaaccccuacuuuccuggccaggccauugccauggccccucccaucuacacagaugucuuagaguuugacgauggcaccccagcuaccaugucccagauagccaaggaugugugcaccuuccugcgcugggcaucugagccagagcacgaccaucgaaaacgcauggggcucaagauguugaugaugauggcucugcuggugccccuggucuacaccauaaagcggcacaaguggucaguccugaagagucggaagcuggcauaucggccgcccaaguag

SEQ ID NO: 7251 - RNA, 978 nt, Artificial Sequence
  derived and/or modified sequence opt1 from Cytochrome_c__Homo_sapiens__AAV38601
auggccgccgcggccgccagccugcgcggcgugguccucgggccccgcggcgccgggcugccgggcgcccgcgcgcgggggcugcucugcuccgcccgccccggccagcugccccugcggacgccccaggccguggcccucagcuccaagagcggccugucccgcgggcggaaggugaugcugagcgcgcucggcaugcuggccgccgggggcgccgggcuggccauggcgcuccacuccgccgucagcgccuccgaccuggagcugcacccgcccagcuaccccuggucccaccgcggccuccugagcucccuggaccacaccagcauccggcgcggcuuccagguguacaagcaggucugcgccuccugccacagcauggacuucguggccuaccggcaccucgugggggugugcuacaccgaggacgaggcgaaggagcuggccgccgaggucgaggugcaggacggccccaacgaggacggggagauguucaugcgcccgggcaagcuguucgacuacuuccccaagcccuaccccaacuccgaggccgcccgggcggccaacaacggcgcccucccgcccgaccugagcuacaucgugcgcgcccggcacgggggcgaggacuacgucuucucccugcucaccggguacugcgagccgcccaccggcgugagccugcgcgaggggcuguacuucaaccccuacuuccccggccaggccaucgcgauggccccgcccaucuacaccgacgugcucgaguucgacgacggcacgcccgccaccaugagccagaucgccaaggacgucugcaccuuccugcggugggcguccgagcccgagcacgaccaccgcaagcggauggggcugaagaugcucaugaugauggcccugcuggugccccucguguacaccaucaagcgccacaaguggagcguccugaagucccggaagcuggccuaccggcccccgaaguga

SEQ ID NO: 7252 - RNA, 978 nt, Artificial Sequence
  derived and/or modified sequence opt2 from Cytochrome_c__Homo_sapiens__AAV38601
auggccgccgccgccgccucccuccgcggcgucguccucggcccccgcggcgccggccuccccggcgcccgcgcccgcggccuccucugcuccgcccgccccggccagcucccccuccgcaccccccaggccgucgcccucuccuccaaguccggccucucccgcggccgcaaggucaugcucuccgcccucggcaugcucgccgccggcggcgccggccucgccauggcccuccacuccgccgucuccgccuccgaccucgagcuccacccccccuccuaccccuggucccaccgcggccuccucuccucccucgaccacaccuccauccgccgcggcuuccaggucuacaagcaggucugcgccuccugccacuccauggacuucgucgccuaccgccaccucgucggcgucugcuacaccgaggacgaggccaaggagcucgccgccgaggucgagguccaggacggccccaacgaggacggcgagauguucaugcgccccggcaagcucuucgacuacuuccccaagcccuaccccaacuccgaggccgcccgcgccgccaacaacggcgcccucccccccgaccucuccuacaucguccgcgcccgccacggcggcgaggacuacgucuucucccuccucaccggcuacugcgagccccccaccggcgucucccuccgcgagggccucuacuucaaccccuacuuccccggccaggccaucgccauggccccccccaucuacaccgacguccucgaguucgacgacggcacccccgccaccaugucccagaucgccaaggacgucugcaccuuccuccgcugggccuccgagcccgagcacgaccaccgcaagcgcaugggccucaagaugcucaugaugauggcccuccucgucccccucgucuacaccaucaagcgccacaagugguccguccucaagucccgcaagcucgccuaccgcccccccaaguga

SEQ ID NO: 7253 - RNA, 978 nt, Artificial Sequence
  derived and/or modified sequence opt3 from Cytochrome_c__Homo_sapiens__AAV38601
auggccgcugcagccgcgagccugagaggcgugguccucgggcccaggggagcuggucuuccuggcgcccgggcacgcgggcuguugugcuccgcccgaccaggacaguuaccgcugcguacaccccaagcuguugcacuaucuucaaagaguggccucagcagagguaggaaagugaugcuguccgcccuugggaugcuggcugccggaggcgcgggcuuggcaauggcccuccacucugcuguaucggccucagaccuggagcugcauccuccaagcuaccccuggagucaccgggggcucuuauccucucuggaucauaccagcauccgcagaggauuccagguguauaagcaggucugugcauccugccacucaauggacuuuguggcuuacaggcaucuuguugguguguguuauacugaagaugaggccaaagaauuggcggccgaggucgaagugcaggacggcccuaacgaggauggggagauguucaugcggccaggaaagcuguuugacuacuuccccaaaccuuauccaaauagugaagcagcucgcgccgcuaacaauggcgcccuaccgcccgaucucagcuacauuguacgagcaagacacgguggggaggacuauguguuuucucugcuuacgggauacugcgaaccuccaaccggcguuucccugagggagggcuuguacuucaaccccuauuuuccugggcaagccauagcuauggcgccacccaucuacacagauguccucgaguucgacgauggaacuccggcaaccaugucacagauugccaaggacguguguacauuucugcggugggcuagcgaaccugagcacgaucaucguaagcgcauggguuuaaaaaugcugaugaugauggcccuccuugugccccuggucuauaccaucaagagacacaaauggaguguuuugaagucuaggaaacuagcauaccggccaccuaaguga

SEQ ID NO: 7254 - RNA, 978 nt, Artificial Sequence
  derived and/or modified sequence opt4 from Cytochrome_c__Homo_sapiens__AAV38601
auggccgccgccgccgccagccugagaggcguggugcugggccccagaggcgccggccugcccggcgccagagccagaggccugcugugcagcgccagacccggccagcugccccugagaaccccccaggccguggcccugagcagcaagagcggccugagcagaggcagaaaggugaugcugagcgcccugggcaugcuggccgccggcggcgccggccuggccauggcccugcacagcgccgugagcgccagcgaccuggagcugcacccccccagcuaccccuggagccacagaggccugcugagcagccuggaccacaccagcaucagaagaggcuuccagguguacaagcaggugugcgccagcugccacagcauggacuucguggccuacagacaccuggugggcgugugcuacaccgaggacgaggccaaggagcuggccgccgagguggaggugcaggacggccccaacgaggacggcgagauguucaugagacccggcaagcuguucgacuacuuccccaagcccuaccccaacagcgaggccgccagagccgccaacaacggcgcccugccccccgaccugagcuacaucgugagagccagacacggcggcgaggacuacguguucagccugcugaccggcuacugcgagccccccaccggcgugagccugagagagggccuguacuucaaccccuacuuccccggccaggccaucgccauggccccccccaucuacaccgacgugcuggaguucgacgacggcacccccgccaccaugagccagaucgccaaggacgugugcaccuuccugagaugggccagcgagcccgagcacgaccacagaaagagaaugggccugaagaugcugaugaugauggcccugcuggugccccugguguacaccaucaagagacacaaguggagcgugcugaagagcagaaagcuggccuacagaccccccaaguga

SEQ ID NO: 7255 - RNA, 978 nt, Artificial Sequence
  derived and/or modified sequence opt5 from Cytochrome_c__Homo_sapiens__AAV38601
auggccgcugccgcggcuagccugagaggcgugguccucgggccccggggagccggccugccuggggcccgcgcuagaggacuucugugcuccgcccggccgggccagcucccccugcgcaccccucaagcuguugcccuuucuagcaaguccgggcugucuagaggacggaaagugaugcucagcgcgcugggcaugcuggccgcuggcggggccggacucgcuauggcccugcacuccgcggugucugccagcgaccuugagcugcaucccccuuccuaccccuggagccaccgcggccuccugucuucccuugaucauacaagcaucagacggggguuccaggucuauaaacaggugugugcuucuugccacuccauggacuuuguugccuaccgccaucuggugggagucuguuauacggaagaugaggcuaaggaacucgccgccgagguggaaguucaggacggcccuaacgaggauggggagauguucaugagaccgggaaagcuguuugacuacuuccccaaaccuuaucccaauagcgaagcugcgcgggccgcuaacaauggcgcccugccucccgaucucucuuacauugugcgcgccagacacggcggggaggacuaugucuuuucccugcuuaccggauacugcgaaccgccuacaggcgugagccugcgggaggggcucuacuucaaccccuauuuuccuggacaagcuaucgccauggcgccucccauuuacaccgaugugcuggaguucgacgauggcacacccgcuaccaugucccagaucgccaaggacgucuguacauuucuucgcugggccucugaaccggagcacgaucauagaaagcggauggggcugaaaaugcucaugaugauggcucugcugguuccccucguguauaccauuaagagacacaaauggagcgugcugaagucccgcaaacuugccuaccggccucccaaguga

SEQ ID NO: 7256 - RNA, 978 nt, Artificial Sequence
  derived and/or modified sequence opt6 from Cytochrome_c__Homo_sapiens__AAV38601
auggcagcagcagcagcaucauuacguggaguaguacuaggaccuagaggagcaggauuaccaggagcuagagcaagaggauuauuauguucugcacgaccaggacaacuuccauuaagaacuccacaagccguugcauuaucaucaaaaucuggacuuucacgaggaagaaaaguaauguuaucagcacuaggaaugcuagccgcaggaggagcaggauuagcaauggccuuacauucagcaguaucagcuucagacuuagaacuacacccuccgucauauccauggagucaucgaggacuacuaaguucauuagaucauacaucaauaagaagaggauuucaaguauauaaacaaguaugugcaucaugucauucaauggauuuuguagccuacagacauuuaguuggaguauguuauacagaagacgaagcaaaagaauuagccgcagaaguugaaguacaagauggaccaaaugaagauggagaaauguuuaugagaccuggaaaauuauuugacuauuuuccaaaaccauacccaaauagcgaagcagcaagagccgcaaauaauggagcacuaccuccugaucuuucauauauugucagagcaagacaugguggugaagauuauguauuuucauuacuaacaggauauugugaaccaccuacaggaguaucauuaagagaaggauuauacuuuaacccauauuuuccaggacaagcaauagcuauggcaccaccaauauauacagauguauuagaauuugacgauggaacaccugcaacaaugucacaaauagcaaaagauguauguacauuuuuacgaugggcaucagaaccagaacaugaucaucguaaaagaaugggauuaaaaauguuaaugaugauggcauuauuaguuccuuuaguuuauacuauaaaacgacauaaauggaguguuuuaaaauccagaaaauuagcauauagaccuccaaaauaa

SEQ ID NO: 7257 - protein, 105 aa, Artificial Sequence; identical to SEQ ID NO: 7193
  Cytochrome_c__Homo_sapiens__P99999

SEQ ID NO: 7258 - RNA, 318 nt, Artificial Sequence; identical to SEQ ID NO: 7194
  Cytochrome_c__Homo_sapiens__AAA35732

SEQ ID NO: 7259 - RNA, 318 nt, Artificial Sequence; identical to SEQ ID NO: 7195
  derived and/or modified sequence opt1 from Cytochrome_c__Homo_sapiens__AAA35732

SEQ ID NO: 7260 - RNA, 318 nt, Artificial Sequence; identical to SEQ ID NO: 7196
  derived and/or modified sequence opt2 from Cytochrome_c__Homo_sapiens__AAA35732

SEQ ID NO: 7261 - RNA, 318 nt, Artificial Sequence; identical to SEQ ID NO: 7197
  derived and/or modified sequence opt3 from Cytochrome_c__Homo_sapiens__AAA35732

SEQ ID NO: 7262 - RNA, 318 nt, Artificial Sequence; identical to SEQ ID NO: 7198
  derived and/or modified sequence opt4 from Cytochrome_c__Homo_sapiens__AAA35732

SEQ ID NO: 7263 - RNA, 318 nt, Artificial Sequence; identical to SEQ ID NO: 7199
  derived and/or modified sequence opt5 from Cytochrome_c__Homo_sapiens__AAA35732

SEQ ID NO: 7264 - RNA, 318 nt, Artificial Sequence; identical to SEQ ID NO: 7200
  derived and/or modified sequence opt6 from Cytochrome_c__Homo_sapiens__AAA35732

SEQ ID NO: 7265 - protein, 83 aa, Artificial Sequence [sequence omitted]

SEQ ID NO: 7266 - RNA, 252 nt, Artificial Sequence
  Cytochrome_c__Homo_sapiens__AAI00853
augcuguggaaucugcuggcucuucgucagauugggcagaggacgauaagcacugcuucccgcaggcauuuuaaaaauaaaguuccggagaagcaaaaacuguuccaggaggaugaugaaauuccacuguaucuaaagggugggguagcugaugcccuccuguauagagccaccaugauucuuacaguugguggaacagcauaugccauauaugagcuggcuguggcuucauuucccaagaagcaggaguga

SEQ ID NO: 7267 - RNA, 252 nt, Artificial Sequence
  derived and/or modified sequence opt1 from Cytochrome_c__Homo_sapiens__AAI00853
augcuguggaaccuccuggcccugcgccagaucggccagcggaccaucagcaccgccucccgccggcacuucaagaacaaggugcccgagaagcagaagcuguuccaggaggacgacgagaucccgcucuaccugaagggcgggguggcggacgcccuccuguaccgcgccacgaugauccugaccgucgggggcaccgccuacgccaucuacgagcucgcgguggccagcuuccccaagaagcaggaguga

SEQ ID NO: 7268 - RNA, 252 nt, Artificial Sequence
  derived and/or modified sequence opt2 from Cytochrome_c__Homo_sapiens__AAI00853
augcucuggaaccuccucgcccuccgccagaucggccagcgcaccaucuccaccgccucccgccgccacuucaagaacaagguccccgagaagcagaagcucuuccaggaggacgacgagaucccccucuaccucaagggcggcgucgccgacgcccuccucuaccgcgccaccaugauccucaccgucggcggcaccgccuacgccaucuacgagcucgccgucgccuccuuccccaagaagcaggaguga

SEQ ID NO: 7269 - RNA, 252 nt, Artificial Sequence
  derived and/or modified sequence opt3 from Cytochrome_c__Homo_sapiens__AAI00853
augcuguggaaccuccuugcccugagacagaucggccaaaggaccauuagcacagcuucccggcgccacuucaagaauaaagugcccgagaagcagaaauuguuucaggaagacgaugagauaccuuuauaccugaaagggggagucgcagacgcccuacucuaucgagcgacuaugauccugacgguugguggcaccgcuuacgccauuuaugaacuugcaguggccucuuucccaaagaagcaggaguga

SEQ ID NO: 7270 - RNA, 252 nt, Artificial Sequence
  derived and/or modified sequence opt4 from Cytochrome_c__Homo_sapiens__AAI00853
augcuguggaaccugcuggcccugagacagaucggccagagaaccaucagcaccgccagcagaagacacuucaagaacaaggugcccgagaagcagaagcuguuccaggaggacgacgagaucccccuguaccugaagggcggcguggccgacgcccugcuguacagagccaccaugauccugaccgugggcggcaccgccuacgccaucuacgagcuggccguggccagcuuccccaagaagcaggaguga

SEQ ID NO: 7271 - RNA, 252 nt, Artificial Sequence
  derived and/or modified sequence opt5 from Cytochrome_c__Homo_sapiens__AAI00853
augcuguggaaccuccuggcccuuagacagaucggccaacggaccauuagcacagcuucccgcagacacuucaagaauaaagugcccgagaagcagaaacuguuucaggaagacgaugagaucccucucuaccugaaagggggagucgccgacgcgcuucuguaucgggcuacgaugauucucaccguuggcgggacagccuacgccaucuaugaacuggcuguggccucuuucccgaagaagcaggaguga

SEQ ID NO: 7272 - RNA, 252 nt, Artificial Sequence
  derived and/or modified sequence opt6 from Cytochrome_c__Homo_sapiens__AAI00853
augcuauggaaccuacuagcacuaagacaaauaggacaaagaacaauaucaacagcaagcagaagacacuucaaaaacaaaguaccagaaaaacaaaaacuauuccaagaagacgacgaaauaccacuauaccuaaaaggaggaguagcagacgcacuacuauacagagcaacaaugauacuaacaguaggaggaacagcauacgcaauauacgaacuagcaguagcaucauucccaaaaaaacaagaauaa

SEQ ID NO: 7273 - protein, 69 aa, Artificial Sequence
  Cytochrome_c__Homo_sapiens__Q53XN1
MSVLTPLLLRGLTGSARRLPVPRAKIHSLPPEGKLGIMELAVGLTSCFVTFLLPAGWILSHLETYRRPE

SEQ ID NO: 7274 - RNA, 210 nt, Artificial Sequence
  Cytochrome_c__Homo_sapiens__AAP88805
auguccguccugacgccgcugcugcugcggggcuugacaggcucggcccggcggcucccagugccgcgcgccaagauccauucguugccgccggaggggaagcuugggaucauggaauuggccguugggcuuaccuccugcuucgugaccuuccuccugccagcgggcuggauccugucacaccuggagaccuacaggaggccagaguag

SEQ ID NO: 7275 - RNA, 210 nt, Artificial Sequence
  derived and/or modified sequence opt1 from Cytochrome_c__Homo_sapiens__AAP88805
augagcgugcugacgccccuccugcugcgcggccucaccggguccgcccggcgccugccggucccccgggccaagauccacagccugccgcccgagggcaagcucgggaucauggagcuggcggugggccugaccuccugcuucgugaccuuccuccugcccgccggguggauccugagccaccucgagaccuaccgccggcccgaguga

SEQ ID NO: 7276 - RNA, 210 nt, Artificial Sequence
  derived and/or modified sequence opt2 from Cytochrome_c__Homo_sapiens__AAP88805
auguccguccucaccccccuccuccuccgcggccucaccggcuccgcccgccgccuccccgucccccgcgccaagauccacucccucccccccgagggcaagcucggcaucauggagcucgccgucggccucaccuccugcuucgucaccuuccuccuccccgccggcuggauccucucccaccucgagaccuaccgccgccccgaguga

SEQ ID NO: 7277 - RNA, 210 nt, Artificial Sequence
  derived and/or modified sequence opt3 from Cytochrome_c__Homo_sapiens__AAP88805
augagcgugcugacaccccuccuucugagaggcuugaccggguccgccaggcgguuaccugucccacgcgcuaagauccacucucugccgcccgagggaaaacuagguauuauggaacucgcaguuggccugacuucaugcuucgugacguuucuucugccugccggguggauauugagucaucucgagaccuaccgacguccagaauga

SEQ ID NO: 7278 - RNA, 210 nt, Artificial Sequence
  derived and/or modified sequence opt4 from Cytochrome_c__Homo_sapiens__AAP88805
augagcgugcugaccccccugcugcugagaggccugaccggcagcgccagaagacugcccgugcccagagccaagauccacagccugccccccgagggcaagcugggcaucauggagcuggccgugggccugaccagcugcuucgugaccuuccugcugcccgccggcuggauccugagccaccuggagaccuacagaagacccgaguga

SEQ ID NO: 7279 - RNA, 210 nt, Artificial Sequence
  derived and/or modified sequence opt5 from Cytochrome_c__Homo_sapiens__AAP88805
augagcgugcugacaccccuccugcuuagaggccugaccggguccgcccggcgccucccugucccgagagcuaagauccacucucugcccccugagggaaaacuuggcauuauggaacuggccguugggcucacgagcugcuucgugaccuuucugcugcccgcgggauggauccucucccaucuggagacauaccggcgcccugaauga

SEQ ID NO: 7280 - RNA, 210 nt, Artificial Sequence
  derived and/or modified sequence opt6 from Cytochrome_c__Homo_sapiens__AAP88805
augucaguacuaacaccacuacuacuaagaggacuaacaggaucagcaagaagacuaccaguaccaagagcaaaaauacacucacuaccaccagaaggaaaauuaggcauaauggaacuagcaguaggacuaacaucauguuucguaacauuccuacuaccagcaggauggauacuaucacaccuagaaacauacagaagaccagaauaa

SEQ ID NO: 7281 - protein, 114 aa, Artificial Sequence
  Cytochrome_c__Homo_sapiens__Q6FGA0
MYYKFSGFTQKLAGAWASEAYSPQGLKPVVSTEAPPIIFATPTKLTSDSTVYDYAGKNKVPELQKFFQKADGVPVYLKRGLPDQMLYRTTMALTVGGTIYCLIALYMASQPKNK

SEQ ID NO: 7282 - RNA, 345 nt, Artificial Sequence
  Cytochrome_c__Homo_sapiens__AAY15087
auguacuacaaguuuaguggcuucacgcagaaguuggcaggagcaugggcuucggaggccuauagcccgcagggauuaaagccugugguuuccacagaagcaccaccuaucauauuugccacaccaacuaaacugaccuccgauuccacaguguaugauuaugcugggaaaaacaaaguuccagagcuacaaaaguuuuuccagaaagcugauggugugcccgucuaccugaaacgaggccugccugaccaaaugcuuuaccggaccaccauggcgcugacugugggagggaccaucuacugccugaucgcccucuacauggcuucgcagcccaaaaacaaauga

SEQ ID NO: 7283 - RNA, 345 nt, Artificial Sequence
  derived and/or modified sequence opt1 from Cytochrome_c__Homo_sapiens__AAY15087
auguacuacaaguucagcggcuucacccagaagcuggccggggccugggcguccgaggccuacagcccccagggccucaagccgguggucuccaccgaggccccgcccaucaucuucgccacgcccaccaagcugaccagcgacuccaccguguacgacuacgccgggaagaacaaggugcccgagcugcagaaguucuuccagaaggcggacggcguccccguguaccucaagcgcgggcugcccgaccagaugcuguaccggacgaccauggcccucaccgugggcggcaccaucuacugccugaucgcccuguacauggccagccagcccaagaacaaguga

SEQ ID NO: 7284 - RNA, 345 nt, Artificial Sequence
  derived and/or modified sequence opt2 from Cytochrome_c__Homo_sapiens__AAY15087
auguacuacaaguucuccggcuucacccagaagcucgccggcgccugggccuccgaggccuacuccccccagggccucaagcccgucgucuccaccgaggccccccccaucaucuucgccacccccaccaagcucaccuccgacuccaccgucuacgacuacgccggcaagaacaagguccccgagcuccagaaguucuuccagaaggccgacggcguccccgucuaccucaagcgcggccuccccgaccagaugcucuaccgcaccaccauggcccucaccgucggcggcaccaucuacugccucaucgcccucuacauggccucccagcccaagaacaaguga

SEQ ID NO: 7285 - RNA, 345 nt, Artificial Sequence
  derived and/or modified sequence opt3 from Cytochrome_c__Homo_sapiens__AAY15087
auguacuauaaguucagcggcuuuacccagaaacuggccggggcuugggcauccgaggccuacucuccccaaggacucaagccuguggucucaacagaagcgccaccgaucauuuucgcuacucccacgaaacuuaccagugacagcacaguuuaugauuacgccgguaagaacaaagugccugagcugcagaaguuuuuccagaaggcagacggcguaccaguguauuugaaaagaggguuacccgaucagaugcuguacaggacuaccauggcccuaacagucggaggcaccauauauugccucaucgcucuguacauggcaucccaaccuaagaauaaauga

SEQ ID NO: 7286 - RNA, 345 nt, Artificial Sequence
  derived and/or modified sequence opt4 from Cytochrome_c__Homo_sapiens__AAY15087
auguacuacaaguucagcggcuucacccagaagcuggccggcgccugggccagcgaggccuacagcccccagggccugaagcccguggugagcaccgaggccccccccaucaucuucgccacccccaccaagcugaccagcgacagcaccguguacgacuacgccggcaagaacaaggugcccgagcugcagaaguucuuccagaaggccgacggcgugcccguguaccugaagagaggccugcccgaccagaugcuguacagaaccaccauggcccugaccgugggcggcaccaucuacugccugaucgcccuguacauggccagccagcccaagaacaaguga

SEQ ID NO: 7287 - RNA, 345 nt, Artificial Sequence
  derived and/or modified sequence opt5 from Cytochrome_c__Homo_sapiens__AAY15087
auguacuauaaguucagcggcuuuacccagaaacuggccggggcuugggccuccgaggcguacucuccccaaggacucaagccuguggucagcacagaagcuccgcccaucauuuucgccacgccuaccaaacugacauccgacucuaccguuuaugauuacgccggcaagaacaaagugcccgagcuucagaaguuuuuccagaaggcugacggggugccugucuaucugaaaagaggacuccccgaucagaugcuguaccggacaaccauggcccuuacagugggcgggaccaucuauugccugauugcucucuacauggccagccaaccuaagaauaaauga

SEQ ID NO: 7288 - RNA, 345 nt, Artificial Sequence
  derived and/or modified sequence opt6 from Cytochrome_c__Homo_sapiens__AAY15087
auguacuacaaauucucaggauucacacaaaaacuagcaggagcaugggcaucagaagcauacucaccacaaggacuaaaaccaguaguaucaacagaagcaccaccaauaauauucgcaacaccaacaaaacuaacaucagacucaacaguauacgacuacgcaggaaaaaacaaaguaccagaacuacaaaaauucuuccaaaaagcagacggaguaccaguauacuuaaaaagaggacuaccagaccaaaugcuauacagaacaacaauggcacuaacaguaggaggaacaauauacugccuaauagcacuauacauggcaucacaaccaaaaaacaaauaa

SEQ ID NO: 7289 - protein, 79 aa, Artificial Sequence
  Cytochrome_c__Homo_sapiens__Q6FGI7
MQALRVSQALIRSFSSTARNRFQNRVREKQKLFQEDNDIPLYLKGGIVDNILYRVTMTLCLGGTVYSLYSLGWASFPRN

SEQ ID NO: 7290 - RNA, 240 nt, Artificial Sequence
  Cytochrome_c__Homo_sapiens__AAP35570
augcaggcccuucgggugucccaggcgcugauccgcuccuucagcuccaccgcccggaaccgcuuucagaaccgagugcgcgagaaacagaagcucuuccaggaggacaaugacaucccguuguaccugaagggcggcaucguugacaacauccuguaccgagugacaaugacgcugugucugggcggcacugucuacagcuuguacucccuuggcugggccuccuuccccaggaauuag

SEQ ID NO: 7291 - RNA, 240 nt, Artificial Sequence
  derived and/or modified sequence opt1 from Cytochrome_c__Homo_sapiens__AAP35570
augcaggcccugcgcgugagccaggcccucauccgguccuucagcuccaccgcgcgcaaccgguuccagaaccgcguccgggagaagcagaagcuguuccaggaggacaacgacaucccccuguaccucaagggcgggaucguggacaacauccuguaccgcgugaccaugacgcugugccucggcgggaccgucuacagccuguacucccugggcugggccagcuucccgcggaacuga

SEQ ID NO: 7292 - RNA, 240 nt, Artificial Sequence
  derived and/or modified sequence opt2 from Cytochrome_c__Homo_sapiens__AAP35570
augcaggcccuccgcgucucccaggcccucauccgcuccuucuccuccaccgcccgcaaccgcuuccagaaccgcguccgcgagaagcagaagcucuuccaggaggacaacgacaucccccucuaccucaagggcggcaucgucgacaacauccucuaccgcgucaccaugacccucugccucggcggcaccgucuacucccucuacucccucggcugggccuccuucccccgcaacuga

SEQ ID NO: 7293 - RNA, 240 nt, Artificial Sequence
  derived and/or modified sequence opt3 from Cytochrome_c__Homo_sapiens__AAP35570
augcaggcccugagagugagccaagcucucaucagguccuucucuucaaccgcacggaaccgcuuucagaaucgaguccgugagaagcagaaacuuuuccaggaagacaacgauauuccccuguacuugaagggcgggauaguugacaauaucuuauauagagugacaaugacucugugccuaggagguacgguauacagucucuauagccugggcugggccuccuuuccuaggaacuga

SEQ ID NO: 7294 - RNA, 240 nt, Artificial Sequence
  derived and/or modified sequence opt4 from Cytochrome_c__Homo_sapiens__AAP35570
augcaggcccugagagugagccaggcccugaucagaagcuucagcagcaccgccagaaacagauuccagaacagagugagagagaagcagaagcuguuccaggaggacaacgacaucccccuguaccugaagggcggcaucguggacaacauccuguacagagugaccaugacccugugccugggcggcaccguguacagccuguacagccugggcugggccagcuuccccagaaacuga

SEQ ID NO: 7295 - RNA, 240 nt, Artificial Sequence
  derived and/or modified sequence opt5 from Cytochrome_c__Homo_sapiens__AAP35570
augcaggcccugagagugagccaagcucucauccgguccuucucuagcaccgcccgcaacagauuucagaaucggguccgcgagaagcagaaacuguuccaggaagacaacgauauuccccuuuaccugaagggcgggaucguugacaauauucucuauagagugacaaugacgcugugccuuggaggcaccguguacucccuguauucucucgggugggcgagcuuuccucggaacuga

SEQ ID NO: 7296 - RNA, 240 nt, Artificial Sequence
  derived and/or modified sequence opt6 from Cytochrome_c__Homo_sapiens__AAP35570
augcaagcacuaagaguaucacaagcacuaauaagaucauucucaucaacagcaagaaacagauuccaaaacagaguaagagaaaaacaaaaacuauuccaagaagacaacgacauaccacuauaccuaaaaggaggaauaguagacaacauacuauacagaguaacaaugacacuaugccuaggaggaacaguauacucacuauacucacuaggaugggcaucauucccaagaaacuaa

SEQ ID NO: 7297 - protein, 63 aa, Artificial Sequence
  Cytochrome_c__Homo_sapiens__Q71U45
MLGQSIRRFTTSVVRRSHYEEGPGKNLPFSVENKWRLLAMMTVYFGSGFAAPFFIVRHQLLKK

SEQ ID NO: 7298 - RNA, 192 nt, Artificial Sequence
  Cytochrome_c__Homo_sapiens__AAP97260
auguugggccagaguauccggagguucacgaccuccgugguccgucgcagccacuaugaggaggguccggggaagaauuugccauuuucaguggaaaacaaguggcgguugcuggcuaugaugaccguguacuuuggaucuggguuugccgcaccuuucuuuauaguaagacaccagcuacuuaaaaaauaa

SEQ ID NO: 7299 - RNA, 192 nt, Artificial Sequence
  derived and/or modified sequence opt1 from Cytochrome_c__Homo_sapiens__AAP97260
augcugggccagagcauccgccgguucaccaccuccgugguccgccggagccacuacgaggaggggcccggcaagaaccucccguucuccguggagaacaaguggcgccugcuggccaugaugacgguguacuucgggagcggcuucgccgcgcccuucuucaucguccggcaccagcuccugaagaaguga

SEQ ID NO: 7300 - RNA, 192 nt, Artificial Sequence
  derived and/or modified sequence opt2 from Cytochrome_c__Homo_sapiens__AAP97260
augcucggccaguccauccgccgcuucaccaccuccgucguccgccgcucccacuacgaggagggccccggcaagaaccuccccuucuccgucgagaacaaguggcgccuccucgccaugaugaccgucuacuucggcuccggcuucgccgcccccuucuucaucguccgccaccagcuccucaagaaguga

SEQ ID NO: 7301 - RNA, 192 nt, Artificial Sequence
  derived and/or modified sequence opt3 from Cytochrome_c__Homo_sapiens__AAP97260
augcugggccagagcaucagaagguucaccacauccgugguccggcgcucucacuacgaggaagggcccggaaagaaccucccuuuuucaguugagaauaaauggcgacuucuggccaugaugacuguguauuucgguaguggcuuugcugcaccauucuuuauuguacgucaucaauuguuaaagaaauga

SEQ ID NO: 7302 - RNA, 192 nt, Artificial Sequence
  derived and/or modified sequence opt4 from Cytochrome_c__Homo_sapiens__AAP97260
augcugggccagagcaucagaagauucaccaccagcguggugagaagaagccacuacgaggagggccccggcaagaaccugcccuucagcguggagaacaaguggagacugcuggccaugaugaccguguacuucggcagcggcuucgccgcccccuucuucaucgugagacaccagcugcugaagaaguga

SEQ ID NO: 7303 - RNA, 192 nt, Artificial Sequence
  derived and/or modified sequence opt5 from Cytochrome_c__Homo_sapiens__AAP97260
augcugggccagagcaucagacgguucaccacauccgugguccgcagaucucacuacgaggaagggcccggaaagaaccucccuuuuagcguugagaauaaauggcggcugcuugccaugaugacgguguauuucggcuccggguuugcugccccguucuuuauugugcgccaucaacugcucaagaaauga

SEQ ID NO: 7304 - RNA, 192 nt, Artificial Sequence
  derived and/or modified sequence opt6 from Cytochrome_c__Homo_sapiens__AAP97260
augcuaggacaaucaauaagaagauucacaacaucaguaguaagaagaucacacuacgaagaaggaccaggaaaaaaccuaccauucucaguagaaaacaaauggagacuacuagcaaugaugacaguauacuucggaucaggauucgcagcaccauucuucauaguaagacaccaacuacuaaaaaaauaa

SEQ ID NO: 7305 - protein, 83 aa, Artificial Sequence
  Cytochrome_c__Homo_sapiens__Q86WV2
MLATRVFSLVGKRAISTSVCVRAHESVVKSEDFSLPAYMDRRDHPLPEVAHVKHLSASQKALKEKEKASWSSLSMDEKVECGY

SEQ ID NO: 7306 - RNA, 252 nt, Artificial Sequence
  Cytochrome_c__Homo_sapiens__AAH47869
auguuggcuaccaggguauuuagccuaguuggcaagcgagcaauuuccaccucuguguguguacgagcucaugaaaguguugugaagagcgaagacuuuucgcucccagcuuauauggaucggcgugaccaccccuugccggagguggcccaugucaagcaccugucugccagccagaaggcacugaaggagaaggagaaggccuccuggagcagccucuccauggaugagaaagucgaguguggguauuga

SEQ ID NO: 7307 - RNA, 252 nt, Artificial Sequence
  derived and/or modified sequence opt1 from Cytochrome_c__Homo_sapiens__AAH47869
augcuggccacccgcguguucagccucgucggcaagcgggccaucuccaccagcgugugcgugcgcgcgcacgaguccgucgucaagagcgaggacuucucccugcccgccuacauggaccggcgcgaccacccgcugcccgagguggcccacgugaagcaccucagcgccucccagaaggcccugaaggagaaggagaaggcgagcugguccagccuguccauggacgagaagguggagugcggguacuga

SEQ ID NO: 7308 - RNA, 252 nt, Artificial Sequence
  derived and/or modified sequence opt2 from Cytochrome_c__Homo_sapiens__AAH47869
augcucgccacccgcgucuucucccucgucggcaagcgcgccaucuccaccuccgucugcguccgcgcccacgaguccgucgucaaguccgaggacuucucccuccccgccuacauggaccgccgcgaccacccccuccccgaggucgcccacgucaagcaccucuccgccucccagaaggcccucaaggagaaggagaaggccuccugguccucccucuccauggacgagaaggucgagugcggcuacuga

SEQ ID NO: 7309 - RNA, 252 nt, Artificial Sequence
  derived and/or modified sequence opt3 from Cytochrome_c__Homo_sapiens__AAH47869
augcuggccaccagaguguucagccucgucggcaagagggcuaucuccacaucuguuugcgugcgggcacacgagucaguagugaaaagugaagacuuuagccuucccgccuacauggaucgccgagaccauccucugccagaggucgcgcacgugaagcauuuguccgcuucucagaaagccuuaaaggaaaaagagaaggcaucguggucaagccugaguauggaugaaaagguugaguguggguauuga

SEQ ID NO: 7310 - RNA, 252 nt, Artificial Sequence
  derived and/or modified sequence opt4 from Cytochrome_c__Homo_sapiens__AAH47869
augcuggccaccagaguguucagccuggugggcaagagagccaucagcaccagcgugugcgugagagcccacgagagcguggugaagagcgaggacuucagccugcccgccuacauggacagaagagaccacccccugcccgagguggcccacgugaagcaccugagcgccagccagaaggcccugaaggagaaggagaaggccagcuggagcagccugagcauggacgagaagguggagugcggcuacuga

SEQ ID NO: 7311 - RNA, 252 nt, Artificial Sequence
  derived and/or modified sequence opt5 from Cytochrome_c__Homo_sapiens__AAH47869
augcuggccaccagaguguucagccucgucggcaagcgggcuaucuccacaucuguuugcgugcgcgcccacgagagcguggucaaauccgaagacuuuucucugcccgcguacauggauagacgggaccauccucuuccggagguggcucacguuaagcaucugagcgccucccagaaagcccucaaggaaaaagagaaggcuucuuggagcucccugagcauggaugaaaagguggaguguggguauuga

SEQ ID NO: 7312 - RNA, 252 nt, Artificial Sequence
  derived and/or modified sequence opt6 from Cytochrome_c__Homo_sapiens__AAH47869
augcuagcaacaagaguauuuagccuaguaggaaaaagagcaauaagcacaagcguaugcguaagagcacacgaaagcguaguaaaaagcgaagacuuuagcuuaccagcauacauggacagaagagaucacccacuaccagaaguagcacauguaaaacacuuaagcgcaagccaaaaagcacuaaaagaaaaagaaaaagcaucauggucaagcuuaagcauggacgaaaaaguagaauguggauauuaa

SEQ ID NO: 7313 - protein, 86 aa, Artificial Sequence
  Cytochrome_c__Homo_sapiens__Q9UEG9
MSSGAHGEEGSARMWKTLTFFVALPGVAVSMLNVYLKSHHGEHERPEFIAYPHLRIRTKPFPWGDGNHTLFHNPHVNPLPTGYEDE

SEQ ID NO: 7314 - RNA, 261 nt, Artificial Sequence
  Cytochrome_c__Homo_sapiens__AAD00554
augucgaguggcgcccauggcgaagagggcucagcucgcauguggaagacucucaccuucuucgucgcgcuccccgggguggcagucagcaugcugaauguguaccugaagucgcaccacggagagcacgagagacccgaguucaucgccuacccccaucuccgcaucaggaccaagccguuucccuggggagaugguaaccauacucuauuccauaacccucaugugaauccacuuccaacuggcuacgaagaugaauaa

SEQ ID NO: 7315 - RNA, 261 nt, Artificial Sequence
  derived and/or modified sequence opt1 from Cytochrome_c__Homo_sapiens__AAD00554
augagcagcggcgcccacggggaggagggcagcgcccgcauguggaagacccugaccuucuucguggcgcuccccggggucgccguguccaugcugaacguguaccugaagucccaccacggcgagcacgagcggccggaguucaucgccuacccccaccuccgcauccggacgaagcccuuccccuggggcgacgggaaccacacccuguuccacaacccgcacgucaacccccugcccaccggcuacgaggacgaguga

SEQ ID NO: 7316 - RNA, 261 nt, Artificial Sequence
  derived and/or modified sequence opt2 from Cytochrome_c__Homo_sapiens__AAD00554
auguccuccggcgcccacggcgaggagggcuccgcccgcauguggaagacccucaccuucuucgucgcccuccccggcgucgccgucuccaugcucaacgucuaccucaagucccaccacggcgagcacgagcgccccgaguucaucgccuacccccaccuccgcauccgcaccaagcccuuccccuggggcgacggcaaccacacccucuuccacaacccccacgucaacccccuccccaccggcuacgaggacgaguga

SEQ ID NO: 7317 - RNA, 261 nt, Artificial Sequence
  derived and/or modified sequence opt3 from Cytochrome_c__Homo_sapiens__AAD00554
augagcuccggcgcccacggggaggaaggaucugcuagaauguggaagacccugacauucuuuguggcacuccccggugucgccguuucaaugcuuaacguguaccugaaaagucaucacggcgagcaugaaaggccugaguucaucgcguauccacacuugcggauucgcacuaagccguuucccuggggagacgggaaucauacguuauuccacaacccucacguaaauccacugcccaccggcuacgaagaugaguga

SEQ ID NO: 7318 - RNA, 261 nt, Artificial Sequence
  derived and/or modified sequence opt4 from Cytochrome_c__Homo_sapiens__AAD00554
augagcagcggcgcccacggcgaggagggcagcgccagaauguggaagacccugaccuucuucguggcccugcccggcguggccgugagcaugcugaacguguaccugaagagccaccacggcgagcacgagagacccgaguucaucgccuacccccaccugagaaucagaaccaagcccuuccccuggggcgacggcaaccacacccuguuccacaacccccacgugaacccccugcccaccggcuacgaggacgaguga

SEQ ID NO: 7319 - RNA, 261 nt, Artificial Sequence
  derived and/or modified sequence opt5 from Cytochrome_c__Homo_sapiens__AAD00554
augagcuccggcgcccacggggaggaaggaucugcuagaauguggaagacccugacauucuuuguggcccuccccggcgucgcgguuagcaugcugaacguguaccuuaaaucccaucacggggagcaugaacggccugaguucaucgcuuauccgcaucugcgcauuagaacgaagcccuuuccuuggggagacggcaaucacacccucuuccacaacccccacgugaauccucugcccacaggguacgaagaugaguga

SEQ ID NO: 7320 - RNA, 261 nt, Artificial Sequence
  derived and/or modified sequence opt6 from Cytochrome_c__Homo_sapiens__AAD00554
augucaucaggagcacacggagaagaaggaucagcaagaauguggaaaacacuaacauucuucguagcacuaccaggaguagcaguaucaaugcuaaacguauaccuaaaaucacaccacggagaacacgaaagaccagaauucauagcauacccacaccuaagaauaagaacaaaaccauucccauggggagacggaaaccacacacuauuccacaacccacacguaaacccacuaccaacaggauacgaagacgaauaa

SEQ ID NO: 7321 - protein, 281 aa, Artificial Sequence
  FasL__Homo_sapiens__P48023
MQQPFNYPYPQIYWVDSSASSPWAPPGTVLPCPTSVPRRPGQRRPPPPPPPPPLPPPPPPPPLPPLPLPPLKKRGNHSTGLCLLVMFFMVLVALVGLGLGMFQLFHLQKELAELRESTSQMHTASSLEKQIGHPSPPPEKKELRKVAHLTGKSNSRSMPLEWEDTYGIVLLSGVKYKKGGLVINETGLYFVYSKVYFRGQSCNNLPLSHKVYMRNSKYPQDLVMMEGKMMSYCTTGQMWARSSYLGAVFNLTSADHLYVNVSELSLVNFEESQTFFGLYKL

SEQ ID NO: 7322 - RNA, 846 nt, Artificial Sequence
  FasL__Homo_sapiens__AAC50071
augcagcagcccuucaauuacccauauccccagaucuacuggguggacagcagugccagcucucccugggccccuccaggcacaguucuucccuguccaaccucugugcccagaaggccuggucaaaggaggccaccaccaccaccgccaccgccaccacuaccaccuccgccgccgccgccaccacugccuccacuaccgcugccaccccugaagaagagagggaaccacagcacaggccugugucuccuugugauguuuuucaugguucugguugccuugguaggauugggccuggggauguuucagcucuuccaccuacagaaggagcuggcagaacuccgagagucuaccagccagaugcacacagcaucaucuuuggagaagcaaauaggccaccccaguccacccccugaaaaaaaggagcugaggaaaguggcccauuuaacaggcaaguccaacucaagguccaugccucuggaaugggaagacaccuauggaauuguccugcuuucuggagugaaguauaagaaggguggccuugugaucaaugaaacugggcuguacuuuguauauuccaaaguauacuuccggggucaaucuugcaacaaccugccccugagccacaaggucuacaugaggaacucuaaguauccccaggaucuggugaugauggaggggaagaugaugagcuacugcacuacugggcagaugugggcccgcagcagcuaccugggggcaguguucaaucuuaccagugcugaucauuuauaugucaacguaucugagcucucucuggucaauuuugaggaaucucagacguuuuucggcuuauauaagcucuaa

SEQ ID NO: 7323 - RNA, 846 nt, Artificial Sequence
  derived and/or modified sequence opt1 from FasL__Homo_sapiens__AAC50071
augcagcagcccuucaacuacccguacccccagaucuacuggguggacagcuccgccagcucccccugggcccccccgggcaccguccugcccugccccaccagcgugccccgccggccggggcagcgccggcccccccccccgcccccccccccgccccucccccccccgcccccccccccgccccugcccccccugccgcuccccccccugaagaagcgcggcaaccacuccacggggcugugccuccuggugauguucuucaugguccugguggcgcucgugggccuggggcugggcauguuccagcucuuccaccugcagaaggagcuggccgagcuccgggagagcaccucccagaugcacaccgccagcucccuggagaagcagaucggccacccgagccccccccccgagaagaaggagcugcgcaaggucgcccaccucaccgggaaguccaacagccgguccaugccgcuggagugggaggacacguacggcaucgugcugcucagcggggugaaguacaagaagggcgggcuggucaucaacgagaccggccuguacuucguguacuccaagguguacuuccgcggccagagcugcaacaaccucccccugucccacaaggucuacaugcggaacagcaaguacccccaggaccuggugaugauggaggggaagaugauguccuacugcaccaccggccagaugugggcccgcagcagcuaccucggggcgguguucaaccugacguccgccgaccaccuguacgucaacgugagcgagcucucccuggugaacuucgaggagagccagaccuucuucggccuguacaagcucuga

SEQ ID NO: 7324 - RNA, 846 nt, Artificial Sequence
  derived and/or modified sequence opt2 from FasL__Homo_sapiens__AAC50071
augcagcagcccuucaacuaccccuacccccagaucuacugggucgacuccuccgccuccucccccugggccccccccggcaccguccuccccugccccaccuccgucccccgccgccccggccagcgccgcccccccccccccccccccccccccccccuccccccccccccccccccccccccccuccccccccucccccuccccccccucaagaagcgcggcaaccacuccaccggccucugccuccucgucauguucuucaugguccucgucgcccucgucggccucggccucggcauguuccagcucuuccaccuccagaaggagcucgccgagcuccgcgaguccaccucccagaugcacaccgccuccucccucgagaagcagaucggccaccccucccccccccccgagaagaaggagcuccgcaaggucgcccaccucaccggcaaguccaacucccgcuccaugccccucgagugggaggacaccuacggcaucguccuccucuccggcgucaaguacaagaagggcggccucgucaucaacgagaccggccucuacuucgucuacuccaaggucuacuuccgcggccaguccugcaacaaccucccccucucccacaaggucuacaugcgcaacuccaaguacccccaggaccucgucaugauggagggcaagaugauguccuacugcaccaccggccagaugugggcccgcuccuccuaccucggcgccgucuucaaccucaccuccgccgaccaccucuacgucaacgucuccgagcucucccucgucaacuucgaggagucccagaccuucuucggccucuacaagcucuga

SEQ ID NO: 7325 - RNA, 846 nt, Artificial Sequence
  derived and/or modified sequence opt3 from FasL__Homo_sapiens__AAC50071
augcagcaacccuucaacuacccuuauccacagaucuacuggguggacagcuccgccucuucaccgugggcucccccuggcaccguccugccaugccccacaaguguuccuagaaggccagggcagcggcgacccccuccaccgcccccuccacccccucucccacccccgccucccccaccuccccuuccaccccugccuuugccaccguuaaagaaacgcggaaaucacagcacuggucugugucuacucgugauguuuuucaugguacugguggcacuugucggccugggguugggaauguuucaacucuuccaucugcagaaggagcuggccgaacuccgugaguccacgucucagaugcacaccgcgucgucauuagaaaaacagauuggccaucccagcccuccacccgagaagaaagaacugagaaagguggcucaccuuacagguaagaguaacuccaggucuaugccuuuggagugggaggauacuuaugggauaguucugcuaagcggagugaaauacaagaaaggcggccucgucaucaaugaaaccgggcuguauuuuguguacuccaagguauauuuccggggacagucaugcaacaaucuuccacugagucauaaaguuuacaugcgcaacagcaaguacccccaagacuuggugaugauggaggguaagaugaugucuuauuguacaaccggccagaugugggccagauccucauaccucggggcagucuuuaaucugacuagcgccgaucacuuauaugugaacgugagugaacugucucucgucaauuucgaggagucccagacauuuuucggacuuuacaaacuguga

SEQ ID NO: 7326 - RNA, 846 nt, Artificial Sequence
  derived and/or modified sequence opt4 from FasL__Homo_sapiens__AAC50071
augcagcagcccuucaacuaccccuacccccagaucuacuggguggacagcagcgccagcagccccugggccccccccggcaccgugcugcccugccccaccagcgugcccagaagacccggccagagaagaccccccccccccccccccccccccccccugcccccccccccccccccccccccccugcccccccugccccugcccccccugaagaagagaggcaaccacagcaccggccugugccugcuggugauguucuucauggugcugguggcccuggugggccugggccugggcauguuccagcuguuccaccugcagaaggagcuggccgagcugagagagagcaccagccagaugcacaccgccagcagccuggagaagcagaucggccaccccagccccccccccgagaagaaggagcugagaaagguggcccaccugaccggcaagagcaacagcagaagcaugccccuggagugggaggacaccuacggcaucgugcugcugagcggcgugaaguacaagaagggcggccuggugaucaacgagaccggccuguacuucguguacagcaagguguacuucagaggccagagcugcaacaaccugccccugagccacaagguguacaugagaaacagcaaguacccccaggaccuggugaugauggagggcaagaugaugagcuacugcaccaccggccagaugugggccagaagcagcuaccugggcgccguguucaaccugaccagcgccgaccaccuguacgugaacgugagcgagcugagccuggugaacuucgaggagagccagaccuucuucggccuguacaagcuguga

SEQ ID NO: 7327 - RNA, 846 nt, Artificial Sequence
  derived and/or modified sequence opt5 from FasL__Homo_sapiens__AAC50071
augcagcaacccuucaacuacccuuauccgcagaucuacuggguggacagcuccgccucuagccccugggcuccucccggcaccguccugccuugccccacauccguuccuagacggccggggcagcgcagacccccucccccucccccgccucccccucugcccccucccccgcccccucccccucugcccccgcuuccucugcccccucucaagaaacggggaaaucacucuacgggccugugucuucuggugauguuuuucauggugcucgucgcccugguggggcucggacucggcauguuucagcuguuccaucuucaaaaggagcuggcggaacuccgcgagagcaccucccagaugcacacagcuucuagccuggaaaaacagauugggcaucccuccccucccccggagaagaaagaacuuagaaagguugcccaccugaccggaaagagcaacucucgguccaugccucucgagugggaggauacauauggcaucgugcugcugagcggcgucaaauacaagaaagggggacucgugauuaaugaaaccggccuguauuuuguuuacucuaagguguauuuccgcgggcaguccugcaacaaucuuccccugagccauaaagucuacaugagaaacucuaaguacccccaagaccucgugaugauggagggaaagaugauguccuauuguacaaccggccagaugugggcccggagcuccuaccugggggcuguguuuaaucuuacgucugccgaucaccuguaugucaacguuagcgaacucucccuggugaauuucgaggagagccagaccuuuuucggacuguacaaacucuga

SEQ ID NO: 7328 - RNA, 846 nt, Artificial Sequence
  derived and/or modified sequence opt6 from FasL__Homo_sapiens__AAC50071
augcaacaaccauucaacuacccauauccacaaauauacuggguagacucuucagcaucaucaccaugggcaccaccaggaacaguacucccuugcccaacaucuguaccaagaagaccaggacaaagaagacccccacccccaccaccaccaccaccucuuccaccccccccaccaccaccacccuuaccaccacuaccccuaccaccauuaaaaaaaagagguaaccacuccacaggccuaugcuuacuaguaauguucuucaugguacuagucgcccuuguaggacuaggacucggaauguuucaauuauuccacuuacaaaaagaacuagcagaacuaagagaaucuacaucacaaaugcacaccgccucaucacuagaaaaacaaauuggacacccaucaccaccaccagaaaaaaaagaacucagaaaagucgcacacuuaacaggaaaaucaaacuccagaucaaugccacuagaaugggaagacacauacggaauaguacuacuuucaggaguaaaauacaaaaaaggaggacuaguaauaaacgaaacaggauuauacuucguauacucaaaaguauacuuucgaggacaaucaugcaacaaccuaccacuaucacacaaaguauacaugagaaacucaaaauacccacaagaccuaguaaugauggaaggaaaaaugaugucauauugcacaacaggacaaaugugggcaagaucaucuuaccuaggagcagucuucaacuuaacaucagcugaccaccuauacguaaacguauccgaacuaucauuaguaaacuucgaagaaucacaaacuuucuucggacucuacaaacuauaa

SEQ ID NO: 7329 - protein, 235 aa, Artificial Sequence
  Granzyme_B__Homo_sapiens__J3KQ52
MQTFPSGEIIGGHEAKPHSRPYMAYLMIWDQKSLKRCGGFLIRDDFVLTAAHCWGSSINVTLGAHNIKEQEPTQQFIPVKRPIPHPAYNPKNFSNDIMLLQLERKAKRTRAVQPLRLPSNKAQVKPGQTCSVAGWGQTAPLGKHSHTLQEVKMTVQEDRKCESDLRHYYDSTIELCVGDPEIKKTSFKGDSGGPLVCNKVAQGIVSYGRNNGMPPRACTKVSSFVHWIKKTMKRY

SEQ ID NO: 7330 - RNA, 708 nt, Artificial Sequence
  Granzyme_B__Homo_sapiens__EAW66003
augcagacuuuuccuucaggggagaucaucgggggacaugaggccaagccccacucccgccccuacauggcuuaucuuaugaucugggaucagaagucucugaagaggugcgguggcuuccugauacgagacgacuucgugcugacagcugcucacuguuggggaagcuccauaaaugucaccuugggggcccacaauaucaaagaacaggagccgacccagcaguuuaucccugugaaaagacccaucccccauccagccuauaauccuaagaacuucuccaacgacaucaugcuacugcagcuggagagaaaggccaagcggaccagagcugugcagccccucaggcuaccuagcaacaaggcccaggugaagccagggcagacaugcaguguggccggcugggggcagacggccccccugggaaaacacucacacacacuacaagaggugaagaugacagugcaggaagaucgaaagugcgaaucugacuuacgccauuauuacgacaguaccauugaguugugcgugggggacccagagauuaaaaagacuuccuuuaagggggacucuggaggcccucuuguguguaacaagguggcccagggcauugucuccuauggacgaaacaauggcaugccuccacgagccugcaccaaagucucaagcuuuguacacuggauaaagaaaaccaugaaacgcuacuaa

SEQ ID NO: 7331 - RNA, 708 nt, Artificial Sequence
  derived and/or modified sequence opt1 from Granzyme_B__Homo_sapiens__EAW66003
augcagaccuuccccagcggcgagaucaucgggggccacgaggccaagccccacucccgccccuacauggccuaccugaugaucugggaccagaagucccucaagcggugcgggggcuuccugauccgcgacgacuucgugcugaccgcggcccacugcugggggagcagcaucaacgucacgcucggcgcccacaacaucaaggagcaggagcccacccagcaguucauccccgugaagcggccgaucccccaccccgccuacaaccccaagaacuucuccaacgacaucaugcugcugcagcucgagcgcaaggccaagcggacccgcgcggugcagccgcugcggcugcccagcaacaaggcccaggucaagcccggccagaccugcuccguggccggguggggccagacggcgccccucgggaagcacagccacacccugcaggaggugaagaugaccguccaggaggaccgcaagugcgaguccgaccugcggcacuacuacgacagcaccaucgagcucugcgugggcgacccggagaucaagaagacguccuucaagggggacagcggcggcccccuggugugcaacaaggucgcccaggggaucguguccuacggccgcaacaacgggaugccgccccgggccugcaccaaggugagcuccuucguccacuggaucaagaagaccaugaagcgcuacuga

SEQ ID NO: 7332 - RNA, 708 nt, Artificial Sequence
  derived and/or modified sequence opt2 from Granzyme_B__Homo_sapiens__EAW66003
augcagaccuuccccuccggcgagaucaucggcggccacgaggccaagccccacucccgccccuacauggccuaccucaugaucugggaccagaagucccucaagcgcugcggcggcuuccucauccgcgacgacuucguccucaccgccgcccacugcuggggcuccuccaucaacgucacccucggcgcccacaacaucaaggagcaggagcccacccagcaguucauccccgucaagcgccccaucccccaccccgccuacaaccccaagaacuucuccaacgacaucaugcuccuccagcucgagcgcaaggccaagcgcacccgcgccguccagccccuccgccuccccuccaacaaggcccaggucaagcccggccagaccugcuccgucgccggcuggggccagaccgccccccucggcaagcacucccacacccuccaggaggucaagaugaccguccaggaggaccgcaagugcgaguccgaccuccgccacuacuacgacuccaccaucgagcucugcgucggcgaccccgagaucaagaagaccuccuucaagggcgacuccggcggcccccucgucugcaacaaggucgcccagggcaucgucuccuacggccgcaacaacggcaugcccccccgcgccugcaccaaggucuccuccuucguccacuggaucaagaagaccaugaagcgcuacuga

SEQ ID NO: 7333 - RNA, 708 nt, Artificial Sequence
  derived and/or modified sequence opt3 from Granzyme_B__Homo_sapiens__EAW66003
augcagaccuuccccagcggcgagaucauugggggacacgaagccaagccucauuccagaccauacauggcuuaucugaugauaugggaccaaaaaucucucaagaggugcgguggcuuucuuauccgggaugacuucgugcugacagcagcccacuguugggggucaaguauuaacgucacuuugggagcgcauaauaucaaagagcaggaaccgacgcagcaguuuauucccguuaagcgcccuaucccacaccccgcuuacaacccuaaaaauuucagcaacgauauaauguuacugcaacuagagcgaaaggccaagcguaccagagcagugcagccacucaggcugcccuccaauaaagcccagguaaagccuggccagacaugcucuguggcugguugggggcaaacugcaccacuuggaaaacauucgcacacccugcaggaagucaagaugacagugcaggaggaccggaaaugugagucagauuugcgccacuauuacgacagcaccaucgaacucugcguuggcgauccggagauuaagaagacaaguuuuaaaggcgacuccgggggaccccugguguguaacaaggucgcccaggguaucgugucuuauggcagaaauaacgggaugccuccaagggcuugcacuaaaguaagcuccuucguucauuggauuaagaaaaccaugaagcgguacuga

SEQ ID NO: 7334 - RNA, 708 nt, Artificial Sequence
  derived and/or modified sequence opt4 from Granzyme_B__Homo_sapiens__EAW66003
augcagaccuuccccagcggcgagaucaucggcggccacgaggccaagccccacagcagacccuacauggccuaccugaugaucugggaccagaagagccugaagagaugcggcggcuuccugaucagagacgacuucgugcugaccgccgcccacugcuggggcagcagcaucaacgugacccugggcgcccacaacaucaaggagcaggagcccacccagcaguucauccccgugaagagacccaucccccaccccgccuacaaccccaagaacuucagcaacgacaucaugcugcugcagcuggagagaaaggccaagagaaccagagccgugcagccccugagacugcccagcaacaaggcccaggugaagcccggccagaccugcagcguggccggcuggggccagaccgccccccugggcaagcacagccacacccugcaggaggugaagaugaccgugcaggaggacagaaagugcgagagcgaccugagacacuacuacgacagcaccaucgagcugugcgugggcgaccccgagaucaagaagaccagcuucaagggcgacagcggcggcccccuggugugcaacaagguggcccagggcaucgugagcuacggcagaaacaacggcaugccccccagagccugcaccaaggugagcagcuucgugcacuggaucaagaagaccaugaagagauacuga

SEQ ID NO: 7335 - RNA, 708 nt, Artificial Sequence
  derived and/or modified sequence opt5 from Granzyme_B__Homo_sapiens__EAW66003
augcagaccuuccccagcggcgagaucauugggggacacgaagccaagccucauuccagaccguacauggcuuaucugaugaucugggaccaaaaaucucucaagcggugcggcggguuucugauucgcgaugacuucgugcuuacagccgcgcacuguuggggaagcuccaucaacgucacgcugggcgcucauaauauuaaagagcaggaacccacccagcaguuuaucccuguuaagagacccaucccucaccccgccuacaacccuaaaaauuucucuaacgauauuaugcuccugcaacuugagcggaaggccaagcgcacaagagcugugcagccgcugcggcuccccagcaauaaagcccaggugaagccugggcagaccugcuccgucgcuggauggggccaaacagcgccccugggcaaacauucucacacccugcaggaagugaagaugacaguucaggaggaccgcaaaugugagagcgaucucagacacuauuacgacuccaccaucgaacugugcgugggggauccugagauuaagaagacgagcuuuaaaggagacucuggcgggccccuugucuguaacaagguggcccagggaaucguuuccuauggccggaauaacgggaugccgccucgcgccugcaccaaagugagcucuuucguccauuggauuaagaaaacaaugaagagauacuga

SEQ ID NO: 7336 - RNA, 708 nt, Artificial Sequence
  derived and/or modified sequence opt6 from Granzyme_B__Homo_sapiens__EAW66003
augcaaacauucccaaguggagaaauaauaggaggacacgaagcaaaaccacacucacgaccauacauggcauaccuaaugaucugggaccaaaaaucacuaaaacgcugcggaggauuccuaauaagagacgacuucguacuaacagcagcacacugcuggggaucaucaauaaacgucacauuaggcgcccacaacauaaaagaacaagaaccaacacaacaauucauaccaguaaaaagaccaauaccacacccagcauacaacccaaaaaacuucagcaacgacaucauguuacuacaacuagaaagaaaagcaaaaagaacaagagcaguacaaccacuaagacuaccaucaaacaaagcacaaguaaaaccaggacaaacauguucaguagcaggauggggacaaacagcaccauuaggaaaacacucacacacacuacaagaaguaaaaaugacaguacaagaagacagaaaaugcgaaucagaucuaagacacuacuacgacucaacaauagaacuaugcguaggagacccagaaauaaaaaaaacaagcuucaaaggcgacucaggcggaccauuaguauguaacaaaguagcacaaggaauaguaagcuacggaagaaacaacggaaugccaccaagagcaugcacaaaaguaucaucauucguccacuggauaaaaaaaacaaugaaaagauacuaa

SEQ ID NO: 7337 - protein, 281 aa, Artificial Sequence
  Granzyme_B__Homo_sapiens__Q67BC3
MKSLSLLHLFPLPRAKREQGGNNSSSNQGSLPEKMQPILLLLAFLLLPRADAGEIIGGHEAKPHSRPYMAYLMIWDQKSLKRCGGFLIQDDFVLTAAHCWGSSINVTLGAHNIKEQEPTQQFIPVKRPIPHPAYNPKNFSNDIMLLQLERKAKRTRAVQPLRLPSNKAQVKPGQTCSVAGWGQTAPLGKHSHTLQEVKMTVQEDRKCESDLRHYYDSTIELCVGDPEIKKTSFKGDSGGPLVCNKVAQGIVSYGRNNGMPPRACTKVSSFVHWIKKTMKRY

SEQ ID NO: 7338 - RNA, 846 nt, Artificial Sequence
  Granzyme_B__Homo_sapiens__AAR23323
augaagucacugagccugcuccaccucuuuccucucccaagagcuaaaagagagcaaggaggaaacaacagcagcuccaaccagggcagccuuccugagaagaugcaaccaauccugcuucugcuggccuuccuccugcugcccagggcagaugcaggggagaucaucgggggacaugaggccaagccccacucccgccccuacauggcuuaucuuaugaucugggaucagaagucucugaagaggugcgguggcuuccugauacaagacgacuucgugcugacagcugcucacuguuggggaagcuccauaaaugucaccuugggggcccacaauaucaaagaacaggagccgacccagcaguuuaucccugugaaaagacccaucccccauccagccuauaauccuaagaacuucuccaacgacaucaugcuacugcagcuggagagaaaggccaagcggaccagagcugugcagccccucaggcuaccuagcaacaaggcccaggugaagccagggcagacaugcaguguggccggcugggggcagacggccccccugggaaaacacucacacacacuacaagaggugaagaugacagugcaggaagaucgaaagugcgaaucugacuuacgccauuauuacgacaguaccauugaguugugcgugggggacccagagauuaaaaagacuuccuuuaagggggacucuggaggcccucuuguguguaacaagguggcccagggcauugucuccuauggacgaaacaauggcaugccuccacgagccugcaccaaagucucaagcuuuguacacuggauaaagaaaaccaugaaacgcuacuaa

SEQ ID NO: 7339 - RNA, 846 nt, Artificial Sequence
  derived and/or modified sequence opt1 from Granzyme_B__Homo_sapiens__AAR23323
augaagucccugagccuccugcaccuguucccccucccccgcgccaagcgggagcagggcgggaacaacagcuccagcaaccagggcucccugcccgagaagaugcagcccauccugcuccugcuggccuuccuccugcugccccgcgcggacgccggggagaucaucggcgggcacgaggccaagccgcacagccggcccuacauggccuaccucaugaucugggaccagaagucccugaagcgcugcggcggcuuccugauccaggacgacuucgugcucaccgccgcgcacugcugggggagcuccaucaacgucacccugggcgcccacaacaucaaggagcaggagcccacgcagcaguucauccccgugaagcggccgaucccccaccccgccuacaaccccaagaacuucagcaacgacaucaugcugcuccagcuggagcgcaaggccaagcggacccgcgcggugcagccgcugcggcuccccuccaacaaggcccaggucaagcccgggcagaccugcagcguggccggcugggggcagaccgcgccccugggcaagcacucccacacgcugcaggaggugaagaugaccguccaggaggaccgcaagugcgagagcgaccuccggcacuacuacgacuccaccaucgagcugugcgugggcgacccggagaucaagaagaccagcuucaagggggacuccggcgggccccuggugugcaacaaggucgcccagggcaucgugagcuacggccgcaacaacgggaugccgccccgggccugcacgaagguguccagcuucguccacuggaucaagaagaccaugaagcgcuacuga

SEQ ID NO: 7340 - RNA, 846 nt, Artificial Sequence
  derived and/or modified sequence opt2 from Granzyme_B__Homo_sapiens__AAR23323
augaagucccucucccuccuccaccucuucccccucccccgcgccaagcgcgagcagggcggcaacaacuccuccuccaaccagggcucccuccccgagaagaugcagcccauccuccuccuccucgccuuccuccuccucccccgcgccgacgccggcgagaucaucggcggccacgaggccaagccccacucccgccccuacauggccuaccucaugaucugggaccagaagucccucaagcgcugcggcggcuuccucauccaggacgacuucguccucaccgccgcccacugcuggggcuccuccaucaacgucacccucggcgcccacaacaucaaggagcaggagcccacccagcaguucauccccgucaagcgccccaucccccaccccgccuacaaccccaagaacuucuccaacgacaucaugcuccuccagcucgagcgcaaggccaagcgcacccgcgccguccagccccuccgccuccccuccaacaaggcccaggucaagcccggccagaccugcuccgucgccggcuggggccagaccgccccccucggcaagcacucccacacccuccaggaggucaagaugaccguccaggaggaccgcaagugcgaguccgaccuccgccacuacuacgacuccaccaucgagcucugcgucggcgaccccgagaucaagaagaccuccuucaagggcgacuccggcggcccccucgucugcaacaaggucgcccagggcaucgucuccuacggccgcaacaacggcaugcccccccgcgccugcaccaaggucuccuccuucguccacuggaucaagaagaccaugaagcgcuacuga

SEQ ID NO: 7341 - RNA, 846 nt, Artificial Sequence
  derived and/or modified sequence opt3 from Granzyme_B__Homo_sapiens__AAR23323
augaaaagccugucccuccuucaccuguuccccuugccuagagccaaaagggagcagggcgggaacaauucuucaaguaaccaagguagcuuaccagaaaagaugcagccgauccugcuacuccuggcuuuucuucuguugccccgggcagacgccggagagauuauaggcgggcaugaagcgaaaccucacucccgcccauacauggcuuaucucaugaucugggaucagaagucucugaaacgaugcggaggcuuccugauucaggacgauuuugugcucaccgccgcacauuguugggguucgucaaucaaugucacauuaggggcccacaacauuaaggagcaagaacccacucagcaguucaucccuguuaagcguccaauaccccauccugcuuacaauccaaagaacuuuagcaaugacaucaugcugcuucaguuggagagaaaggcaaaaaggacgcgggccgugcaaccgcugcgccuacccaguaacaaggcucagguaaaaccuggacagaccugcuccguggccggcuggggccagacagcgccacucgggaagcacucucacacucugcaagaggucaagaugaccgugcaggaagauagaaaaugugagagcgaccuuaggcauuauuacgauuccacaauugaacugugcguuggagaccccgagaucaagaaaaccucauucaagggugauaguggcgggccuuugguguguaauaaagucgcacagggaauugugagcuauggccggaacaaugguaugccaccccgcgccugcacuaagguaucuuccuuuguucacuggaucaaaaagacaaugaagcgauacuga

SEQ ID NO: 7342 - RNA, 846 nt, Artificial Sequence
  derived and/or modified sequence opt4 from Granzyme_B__Homo_sapiens__AAR23323
augaagagccugagccugcugcaccuguucccccugcccagagccaagagagagcagggcggcaacaacagcagcagcaaccagggcagccugcccgagaagaugcagcccauccugcugcugcuggccuuccugcugcugcccagagccgacgccggcgagaucaucggcggccacgaggccaagccccacagcagacccuacauggccuaccugaugaucugggaccagaagagccugaagagaugcggcggcuuccugauccaggacgacuucgugcugaccgccgcccacugcuggggcagcagcaucaacgugacccugggcgcccacaacaucaaggagcaggagcccacccagcaguucauccccgugaagagacccaucccccaccccgccuacaaccccaagaacuucagcaacgacaucaugcugcugcagcuggagagaaaggccaagagaaccagagccgugcagccccugagacugcccagcaacaaggcccaggugaagcccggccagaccugcagcguggccggcuggggccagaccgccccccugggcaagcacagccacacccugcaggaggugaagaugaccgugcaggaggacagaaagugcgagagcgaccugagacacuacuacgacagcaccaucgagcugugcgugggcgaccccgagaucaagaagaccagcuucaagggcgacagcggcggcccccuggugugcaacaagguggcccagggcaucgugagcuacggcagaaacaacggcaugccccccagagccugcaccaaggugagcagcuucgugcacuggaucaagaagaccaugaagagauacuga

SEQ ID NO: 7343 - RNA, 846 nt, Artificial Sequence
  derived and/or modified sequence opt5 from Granzyme_B__Homo_sapiens__AAR23323
augaaaagccugucccuccugcaccuuuucccccugcccagagccaagcgggagcagggcgggaacaauucuagcuccaaccaaggaucucucccggaaaagaugcagcccauccugcuucugcucgcuuuucugcugcucccucgcgccgacgcgggcgagauuaucgggggacaugaagcuaaaccccacagcagaccuuacauggccuaucugaugauuugggaucagaagucccuuaaacggugcggcggguuccugauccaggacgauuuugugcucaccgccgcucauuguuggggaucuagcauuaaugucacacugggcgcccacaacaucaaggagcaagaacccacgcagcaguucaucccuguuaagcgcccgauuccccauccugcuuacaaucccaaaaacuuuuccaaugacaucaugcuucugcagcucgagagaaaggccaaacggacccgcgcggugcaaccucugagacugcccagcaacaaggcccaggugaaaccgggccagacaugcucugucgcuggguggggacagaccgccccucucggcaagcacucccacacacugcaagaggugaagaugaccguucaggaagaucggaaaugugagagcgaccuucgccauuauuacgauucuacaauugaacugugcgugggggaccccgagaucaagaaaaccuccuucaagggagauagcggcgggccucucgucuguaauaaaguggcucagggaauuguuucuuauggcagaaacaauggcaugccuccccgggccugcacgaagguguccagcuuuguccacuggaucaaaaagaccaugaagcgcuacuga

SEQ ID NO: 7344 - RNA, 846 nt, Artificial Sequence
  derived and/or modified sequence opt6 from Granzyme_B__Homo_sapiens__AAR23323
augaaaucacuaagccuacuccacuuauucccacuaccacgagcaaaaagagaacaaggaggaaacaacucaucuucuaaccaaggaucauuaccagaaaaaaugcaaccaauacuauuacuacucgcauucuuacuacuaccaagagcagacgccggagaaauaauaggaggacacgaagcaaaaccacacucaagaccauacauggcauacuuaaugauaugggaccaaaaaucacuaaaaagauguggugguuuucugauacaagacgacuucguacuaacagcagcacacugcugggguagcucaauaaacguaacacuaggagcacacaacauaaaagaacaagaaccaacacaacaauucauaccaguaaaaagaccaauaccacacccagcauauaacccaaaaaauuucucaaacgacauaauguuacuacaacuagaacgaaaagcaaaaagaacacgagcaguacaaccacuaagacuaccaucaaacaaagcacaaguaaaaccaggacaaacaugcucaguagcaggauggggacaaacugcaccacuaggaaaacacucacacacacuacaagaaguaaaaaugacaguacaagaagacagaaaaugcgaaucagaccuaagacacuauuacgacucaacaauagaacucugugucggagaccccgaaauaaaaaaaacaucauucaaaggagacucaggaggaccacuagucugcaacaaaguagcacaaggaauaguaaguuacggaagaaacaacggaaugccaccaagagcaugcacaaaaguaucaucauuuguacacuggauaaaaaaaacaaugaaaagauacuaa

SEQ ID NO: 7345 - protein, 152 aa, Artificial Sequence
  Granzyme_B__Homo_sapiens__Q6XGZ2
MQPILLLLAFLLLPRADQLERKAKRTRAVQPLRLPSNKAQVKPGQTCSVAGWGQTAPLGKHSHTLQEVKMTVQEDRKCESDLRHYYDSTIELCVGDPEIKKTSFKGDSGGPLVCNKVAQGIVSYGRNNGMPPRACTKVSSFVHWIKKTMKRY

SEQ ID NO: 7346 - RNA, 459 nt, Artificial Sequence
  Granzyme_B__Homo_sapiens__AAP70246
augcaaccaauccugcuucugcuggccuuccuccugcugcccagggcagaucagcuggagagaaaggccaagcggaccagagcugugcagccccucaggcuaccuagcaacaaggcccaggugaagccagggcagacaugcaguguggccggcugggggcagacggccccccugggaaaacacucacacacacuacaagaggugaagaugacagugcaggaagaucgaaagugcgaaucugacuuacgccauuauuacgacaguaccauugaguugugcgugggggacccagagauuaaaaagacuuccuuuaagggggacucuggaggcccucuuguguguaacaagguggcccagggcauugucuccuauggacgaaacaauggcaugccuccacgagccugcaccaaagucucaagcuuuguacacuggauaaagaaaaccaugaaacgcuacuaa

SEQ ID NO: 7347 - RNA, 459 nt, Artificial Sequence
  derived and/or modified sequence opt1 from Granzyme_B__Homo_sapiens__AAP70246
augcagcccauccugcuccugcuggccuuccuccugcugccgcgcgccgaccagcucgagcggaaggcgaagcgcacccgggccgugcagccccugcgccugcccagcaacaaggcccaggucaagcccggccagaccugcuccguggccggguggggccagacggccccgcucgggaagcacagccacacccugcaggaggugaagaugaccguccaggaggaccggaagugcgaguccgaccugcgccacuacuacgacagcaccaucgagcucugcgugggcgaccccgagaucaagaagacguccuucaagggggacagcggcggcccccuggugugcaacaaggucgcgcaggggaucguguccuacggccggaacaacgggaugcccccgcgcgccugcaccaaggugagcuccuucguccacuggaucaagaagaccaugaagcgguacuga

SEQ ID NO: 7348 - RNA, 459 nt, Artificial Sequence
  derived and/or modified sequence opt2 from Granzyme_B__Homo_sapiens__AAP70246
augcagcccauccuccuccuccucgccuuccuccuccucccccgcgccgaccagcucgagcgcaaggccaagcgcacccgcgccguccagccccuccgccuccccuccaacaaggcccaggucaagcccggccagaccugcuccgucgccggcuggggccagaccgccccccucggcaagcacucccacacccuccaggaggucaagaugaccguccaggaggaccgcaagugcgaguccgaccuccgccacuacuacgacuccaccaucgagcucugcgucggcgaccccgagaucaagaagaccuccuucaagggcgacuccggcggcccccucgucugcaacaaggucgcccagggcaucgucuccuacggccgcaacaacggcaugcccccccgcgccugcaccaaggucuccuccuucguccacuggaucaagaagaccaugaagcgcuacuga

SEQ ID NO: 7349 - RNA, 459 nt, Artificial Sequence
  derived and/or modified sequence opt3 from Granzyme_B__Homo_sapiens__AAP70246
augcagcccauccugcuccuucuggccuucuuguuacugccuagagcugaccaacuagagaggaaggcaaaacggacccgcgccgugcagccacuccgacugccgagcaacaaggcgcaggucaaacccggccagacaugcuccguugcuggguggggacaaacugccccucuugguaagcacucucauacgcugcaggaagugaaaaugaccguacaggaggaucguaagugugaaucagacuugagacacuacuaugauaguacaauugagcucugcgugggcgacccagaaauaaagaaaacuagcuuuaagggggauuccggaggcccccuggucuguaauaaaguggcacaggguaucguuucuuacgggaggaacaauggaaugccuccacgggccugcaccaaggugucgucauucguccauuggauuaaaaagacaaugaagcgcuauuga

SEQ ID NO: 7350 - RNA, 459 nt, Artificial Sequence
  derived and/or modified sequence opt4 from Granzyme_B__Homo_sapiens__AAP70246
augcagcccauccugcugcugcuggccuuccugcugcugcccagagccgaccagcuggagagaaaggccaagagaaccagagccgugcagccccugagacugcccagcaacaaggcccaggugaagcccggccagaccugcagcguggccggcuggggccagaccgccccccugggcaagcacagccacacccugcaggaggugaagaugaccgugcaggaggacagaaagugcgagagcgaccugagacacuacuacgacagcaccaucgagcugugcgugggcgaccccgagaucaagaagaccagcuucaagggcgacagcggcggcccccuggugugcaacaagguggcccagggcaucgugagcuacggcagaaacaacggcaugccccccagagccugcaccaaggugagcagcuucgugcacuggaucaagaagaccaugaagagauacuga

SEQ ID NO: 7351 - RNA, 459 nt, Artificial Sequence
  derived and/or modified sequence opt5 from Granzyme_B__Homo_sapiens__AAP70246
augcagcccauccugcuccugcuugccuuccugcuccugccuagagcugaccaacuugagcggaaggccaaacgcaccagagcggugcagccgcugcggcuccccagcaacaaggcucaggucaaaccuggccagacaugcuccguugccggguggggacaaacggcuccccugggcaagcacucucauacccugcaggaagugaaaaugacagugcaggaggaucgcaagugugaaagcgaccucagacacuacuaugauuccaccauugagcugugcgucggggacccugaaaucaagaaaacaucuuuuaagggagauagcggcgggccccuuguguguaauaaaguugcccagggaauuguguccuacggccggaacaauggcaugccuccgcgcgccugcaccaaggucucuagcuucgugcauuggaucaaaaagacaaugaagagauauuga

SEQ ID NO: 7352 - RNA, 459 nt, Artificial Sequence
  derived and/or modified sequence opt6 from Granzyme_B__Homo_sapiens__AAP70246
augcaaccaauacuacuacuacuagcauuccuacuauuaccaagagcagaccaacuagaacgaaaagcaaaaagaacaagagcaguacaaccacuaagacuaccaucaaacaaagcacaaguaaaaccaggacaaacaugcucaguagcaggauggggacaaacagcaccacuaggaaaacacucacacacauuacaagaaguaaaaaugacaguacaagaagacagaaaaugcgaaucagaccuaagacacuacuacgacucaacaauagaacuaugcguaggagacccagaaauaaaaaaaacaagcuucaaaggagacucaggaggaccauuaguaugcaacaaaguagcacaaggaauaguaagcuacggaagaaacaacggaaugccaccaagagcaugcacaaaaguaagcucauucguacacuggauaaaaaaaacaaugaaaagauacuaa

SEQ ID NO: 7353 - protein, 202 aa, Artificial Sequence
  Granzyme_B__Homo_sapiens__Q6XGZ3
MQPILLLLAFLLLPRADAGEIIGGHEAKPHSRPYMAYLMIWDQKSLKRCGGFLIRDDFVLTAAHCWGSLERKAKRTRAVQPLRLPSNKAQVKPGQTCSVAGWGQTAPLGKHSHTLQEVKMTVQEDRKCESDLRHYYDSTIELCVGDPEIKKTSFKGDSGGPLVCNKVAQGIVSYGRNNGMPPRACTKVSSFVHWIKKTMKRY

SEQ ID NO: 7354 - RNA, 609 nt, Artificial Sequence
  Granzyme_B__Homo_sapiens__AAP70245
augcaaccaauccugcuucugcuggccuuccuccugcugcccagggcagaugcaggggagaucaucgggggacaugaggccaagccccacucccgccccuacauggcuuaucuuaugaucugggaucagaagucucugaagaggugcgguggcuuccugauacgagacgacuucgugcugacagcugcucacuguuggggaagccuggagagaaaggccaagcggaccagagcugugcagccccucaggcuaccuagcaacaaggcccaggugaagccagggcagacaugcaguguggccggcugggggcagacggccccccugggaaaacacucacacacacuacaagaggugaagaugacagugcaggaagaucgaaagugcgaaucugacuuacgccauuauuacgacaguaccauugaguugugcgugggggacccagagauuaaaaagacuuccuuuaagggggacucuggaggcccucuuguguguaacaagguggcccagggcauugucuccuauggacgaaacaauggcaugccuccacgagccugcaccaaagucucaagcuuuguacacuggauaaagaaaaccaugaaacgcuacuaa

SEQ ID NO: 7355 - RNA, 609 nt, Artificial Sequence
  derived and/or modified sequence opt1 from Granzyme_B__Homo_sapiens__AAP70245
augcagcccauccugcuccugcuggccuuccuccugcugccccgcgccgacgcgggcgagaucaucgggggccacgaggccaagccccacagccggcccuacauggccuaccucaugaucugggaccagaagucccugaagcgcugcgggggcuuccugauccgggacgacuucgugcucaccgccgcccacugcugggggagccuggagcgcaaggcgaagcggacccgcgccguccagccccugcggcucccguccaacaaggcccaggugaagcccggccagacgugcagcguggccggcugggggcagaccgcgccccugggcaagcacucccacacccugcaggaggucaagaugaccgugcaggaggaccgcaagugcgagagcgaccuccggcacuacuacgacuccacgaucgagcugugcgugggggaccccgagaucaagaagaccagcuucaagggcgacuccgggggcccgcuggucugcaacaagguggcccagggcaucgugagcuacgggcgcaacaacggcaugccgccccgggccugcaccaaggucuccagcuucgugcacuggaucaagaagaccaugaagcgcuacuga

SEQ ID NO: 7356 - RNA, 609 nt, Artificial Sequence
  derived and/or modified sequence opt2 from Granzyme_B__Homo_sapiens__AAP70245
augcagcccauccuccuccuccucgccuuccuccuccucccccgcgccgacgccggcgagaucaucggcggccacgaggccaagccccacucccgccccuacauggccuaccucaugaucugggaccagaagucccucaagcgcugcggcggcuuccucauccgcgacgacuucguccucaccgccgcccacugcuggggcucccucgagcgcaaggccaagcgcacccgcgccguccagccccuccgccuccccuccaacaaggcccaggucaagcccggccagaccugcuccgucgccggcuggggccagaccgccccccucggcaagcacucccacacccuccaggaggucaagaugaccguccaggaggaccgcaagugcgaguccgaccuccgccacuacuacgacuccaccaucgagcucugcgucggcgaccccgagaucaagaagaccuccuucaagggcgacuccggcggcccccucgucugcaacaaggucgcccagggcaucgucuccuacggccgcaacaacggcaugcccccccgcgccugcaccaaggucuccuccuucguccacuggaucaagaagaccaugaagcgcuacuga

SEQ ID NO: 7357 - RNA, 609 nt, Artificial Sequence
  derived and/or modified sequence opt3 from Granzyme_B__Homo_sapiens__AAP70245
augcagcccauacugcuccuucuggccuucuuguuacugccuagagcugacgcaggcgagauuauagggggacacgaagccaagccacauagcaggccguacauggcguaucuaaugaucugggaucaaaaaucccucaagcggugcgguggcuuucugauucgcgacgauuucgugcuuaccgcugcccacuguugggggucucuggagcgaaaagcaaagcguacaagagccguccagcccuugaggcucccuucaaacaaagcucagguuaagccaggacagacuugcaguguggcaggcuggggucaaacggcuccccuggggaagcauagccacacccugcaggaaguaaaaaugacagugcaggaggaccggaagugugaauccgaucuccgccauuacuaugacucuacuaucgaguuaugcgucggagauccugagauuaaaaagaccucguuuaaaggcgacucaggcgggccacugguguguaauaagguugcccagggaaucgugagcuacgguagaaacaauggcaugcccccuagggccugcacaaaggucaguuccuucgugcacuggaucaaaaagaccaugaaacgguauuga

SEQ ID NO: 7358 - RNA, 609 nt, Artificial Sequence
  derived and/or modified sequence opt4 from Granzyme_B__Homo_sapiens__AAP70245
augcagcccauccugcugcugcuggccuuccugcugcugcccagagccgacgccggcgagaucaucggcggccacgaggccaagccccacagcagacccuacauggccuaccugaugaucugggaccagaagagccugaagagaugcggcggcuuccugaucagagacgacuucgugcugaccgccgcccacugcuggggcagccuggagagaaaggccaagagaaccagagccgugcagccccugagacugcccagcaacaaggcccaggugaagcccggccagaccugcagcguggccggcuggggccagaccgccccccugggcaagcacagccacacccugcaggaggugaagaugaccgugcaggaggacagaaagugcgagagcgaccugagacacuacuacgacagcaccaucgagcugugcgugggcgaccccgagaucaagaagaccagcuucaagggcgacagcggcggcccccuggugugcaacaagguggcccagggcaucgugagcuacggcagaaacaacggcaugccccccagagccugcaccaaggugagcagcuucgugcacuggaucaagaagaccaugaagagauacuga

SEQ ID NO: 7359 - RNA, 609 nt, Artificial Sequence
  derived and/or modified sequence opt5 from Granzyme_B__Homo_sapiens__AAP70245
augcagcccauccugcuccugcuugccuuccugcuccugccuagagcugacgccggcgagauuaucgggggacacgaagcgaagccgcauagccggcccuacauggcuuaucuuaugauuugggaucaaaaaucccugaagcgcugcggcggguuucucaucagagacgauuucgugcugaccgccgcccacuguuggggaucucuggagcggaaagcuaagcgcacaagagccguccagccucuccggcugcccagcaacaaagcucagguuaagccuggccagacgugcuccguggccggguggggacaaaccgcgccccuuggcaagcauucucacacacugcaggaagugaaaaugaccguccaggaggaccgcaagugugaaagcgaucucagacauuacuaugacuccacaauugagcugugcgugggcgauccugagaucaaaaagaccucuuuuaaaggggacagcggaggcccgcuuguuuguaauaagguggcccaggggaucgucuccuacggacggaacaauggcaugcccccucgcgcuugcacaaaggugagcucuuucguucacuggauuaaaaagaccaugaaaagauauuga

SEQ ID NO: 7360 - RNA, 609 nt, Artificial Sequence
  derived and/or modified sequence opt6 from Granzyme_B__Homo_sapiens__AAP70245
augcaaccaauauuauuacuacuagcauuccuauuacuaccaagagcagacgcaggagaaauaauaggcggacacgaagcaaaaccccauagcagaccauauauggcauacuuaaugauaugggaccaaaaaagccuaaaaagaugcggaggauuuuuaauaagagaugacuuuguauuaacagcagcacacuguuggggaucacucgaaagaaaagcaaaaagaacaagagcaguccaaccacuaagauuaccaucaaacaaagcacaaguaaaaccaggacaaacaugcucaguagcaggauggggacaaacagcgccauuaggaaaacacucacacacacuacaagaaguaaaaaugacaguacaagaagacagaaaaugugaaucagacuuaagacauuacuaugacucaacaauagaauuaugcguaggagacccagaaauaaaaaaaacaagcuuuaaaggagacucaggaggaccauuaguauguaacaaaguagcacaaggaauaguaagcuacggaagaaacaauggaaugccaccaagagcaugcacaaaaguaagcucauucguacacuggauaaaaaaaacaaugaaaagauauuaa

SEQ ID NO: 7361 - protein, 235 aa, Artificial Sequence [sequence omitted]

SEQ ID NO: 7362 - RNA, 708 nt, Artificial Sequence
  Granzyme_B__Homo_sapiens__AAP70244
augcagacuuuuccuucaggggagaucaucgggggacaugaggccaagccccacucccgccccuacauggcuuaucuuaugaucugggaucagaagucucugaagaggugcgguggcuuccugauacaagacgacuucgugcugacagcugcucacuguuggggaagcuccauaaaugucaccuugggggcccacaauaucaaagaacaggagccgacccagcaguuuaucccugugaaaagacccaucccccauccagccuauaauccuaagaacuucuccaacgacaucaugcuacugcagcuggagagaaaggccaagcggaccagagcugugcagccccucaggcuaccuagcaacaaggcccaggugaagccagggcagacaugcaguguggccggcugggggcagacggccccccugggaaaacacucacacacacuacaagaggugaagaugacagugcaggaagaucgaaagugcgaaucugacuuacgccauuauuacgacaguaccauugaguugugcgugggggacccagagauuaaaaagacuuccuuuaagggggacucuggaggcccucuuguguguaacaagguggcccagggcauugucuccuauggacgaaacaauggcaugccuccacgagccugcaccaaagucucaagcuuuguacacuggauaaagaaaaccaugaaacgcuacuaa

SEQ ID NO: 7363 - RNA, 708 nt, Artificial Sequence
  derived and/or modified sequence opt1 from Granzyme_B__Homo_sapiens__AAP70244
augcagaccuuccccagcggcgagaucaucgggggccacgaggccaagccccacucccgccccuacauggccuaccugaugaucugggaccagaagucccucaagcggugcgggggcuuccugauccaggacgacuucgugcugaccgcggcccacugcugggggagcagcaucaacgucacgcucggcgcccacaacaucaaggagcaggagcccacccagcaguucauccccgugaagcgcccgaucccccaccccgccuacaaccccaagaacuucuccaacgacaucaugcugcugcagcucgagcggaaggccaagcgcacccgggcggugcagccgcugcgccugcccagcaacaaggcccaggucaagcccggccagaccugcuccguggccggguggggccagacggcgccccucgggaagcacagccacacccugcaggaggugaagaugaccguccaggaggaccggaagugcgaguccgaccugcgccacuacuacgacagcaccaucgagcucugcgugggcgacccggagaucaagaagacguccuucaagggggacagcggcggcccccuggugugcaacaaggucgcccaggggaucguguccuacggccggaacaacgggaugccgccccgcgccugcaccaaggugagcuccuucguccacuggaucaagaagaccaugaagcgguacuga

SEQ ID NO: 7364 - RNA, 708 nt, Artificial Sequence
  derived and/or modified sequence opt2 from Granzyme_B__Homo_sapiens__AAP70244
augcagaccuuccccuccggcgagaucaucggcggccacgaggccaagccccacucccgccccuacauggccuaccucaugaucugggaccagaagucccucaagcgcugcggcggcuuccucauccaggacgacuucguccucaccgccgcccacugcuggggcuccuccaucaacgucacccucggcgcccacaacaucaaggagcaggagcccacccagcaguucauccccgucaagcgccccaucccccaccccgccuacaaccccaagaacuucuccaacgacaucaugcuccuccagcucgagcgcaaggccaagcgcacccgcgccguccagccccuccgccuccccuccaacaaggcccaggucaagcccggccagaccugcuccgucgccggcuggggccagaccgccccccucggcaagcacucccacacccuccaggaggucaagaugaccguccaggaggaccgcaagugcgaguccgaccuccgccacuacuacgacuccaccaucgagcucugcgucggcgaccccgagaucaagaagaccuccuucaagggcgacuccggcggcccccucgucugcaacaaggucgcccagggcaucgucuccuacggccgcaacaacggcaugcccccccgcgccugcaccaaggucuccuccuucguccacuggaucaagaagaccaugaagcgcuacuga

SEQ ID NO: 7365 - RNA, 708 nt, Artificial Sequence
  derived and/or modified sequence opt3 from Granzyme_B__Homo_sapiens__AAP70244
augcagaccuuccccagcggcgagaucauugggggacacgaagccaagccucauuccagaccauacauggcuuaucugaugauaugggaccaaaaaucucucaagaggugcgguggcuuucuuauccaggaugacuucgugcugacagcagcccacuguugggggucaaguauuaacgucacuuugggagcgcauaauaucaaagagcaggaaccgacgcagcaauuuauucccguuaagcggccuaucccacaccccgcuuacaacccuaaaaauuucagcaacgauauaauguuacugcagcuagagcgcaaggccaagcgaacccgugcagugcagccacucagacugcccuccaauaaagcccagguaaagccuggccaaacaugcucuguggcugguugggggcagacugcaccacuuggaaaacauucgcacacccugcaggaagucaagaugacagugcaggaggacaggaaaugugagucagauuugcggcacuauuacgacagcaccaucgaacucugcguuggcgauccggagauuaagaagacaaguuuuaaaggcgacuccgggggaccccugguguguaacaaggucgcccaagguaucgugucuuauggccgcaauaacgggaugccuccaagagcuugcacuaaaguaagcuccuucguucauuggauuaagaaaaccaugaagagguacuga

SEQ ID NO: 7366 - RNA, 708 nt, Artificial Sequence
  derived and/or modified sequence opt4 from Granzyme_B__Homo_sapiens__AAP70244
augcagaccuuccccagcggcgagaucaucggcggccacgaggccaagccccacagcagacccuacauggccuaccugaugaucugggaccagaagagccugaagagaugcggcggcuuccugauccaggacgacuucgugcugaccgccgcccacugcuggggcagcagcaucaacgugacccugggcgcccacaacaucaaggagcaggagcccacccagcaguucauccccgugaagagacccaucccccaccccgccuacaaccccaagaacuucagcaacgacaucaugcugcugcagcuggagagaaaggccaagagaaccagagccgugcagccccugagacugcccagcaacaaggcccaggugaagcccggccagaccugcagcguggccggcuggggccagaccgccccccugggcaagcacagccacacccugcaggaggugaagaugaccgugcaggaggacagaaagugcgagagcgaccugagacacuacuacgacagcaccaucgagcugugcgugggcgaccccgagaucaagaagaccagcuucaagggcgacagcggcggcccccuggugugcaacaagguggcccagggcaucgugagcuacggcagaaacaacggcaugccccccagagccugcaccaaggugagcagcuucgugcacuggaucaagaagaccaugaagagauacuga

SEQ ID NO: 7367 - RNA, 708 nt, Artificial Sequence
  derived and/or modified sequence opt5 from Granzyme_B__Homo_sapiens__AAP70244
augcagaccuuccccagcggcgagaucauugggggacacgaagccaagccucauuccagaccguacauggcuuaucugaugaucugggaccaaaaaucucucaagcggugcggcggguuucugauucaggaugacuucgugcuuacagccgcgcacuguuggggaagcuccaucaacgucacgcugggcgcucauaauauuaaagagcaggaacccacccagcaauuuaucccuguuaagcgccccaucccucaccccgccuacaacccuaaaaauuucucuaacgauauuaugcuccugcagcuugagagaaaggccaagcggacacgcgcugugcagccgcugagacuccccagcaauaaagcccaggugaagccugggcaaaccugcuccgucgcuggauggggccagacagcgccccugggcaaacauucucacacccugcaggaagugaagaugacaguucaggaggaccggaaaugugagagcgaucuccgccacuauuacgacuccaccaucgaacugugcgugggggauccugagauuaagaagacgagcuuuaaaggagacucuggcgggccccuugucuguaacaagguggcccaaggaaucguuuccuauggcagaaauaacgggaugccgccucgggccugcaccaaagugagcucuuucguccauuggauuaagaaaacaaugaagcgcuacuga

SEQ ID NO: 7368 - RNA, 708 nt, Artificial Sequence
  derived and/or modified sequence opt6 from Granzyme_B__Homo_sapiens__AAP70244
augcaaacauucccaucaggagaaauaauaggaggacaugaagcaaaaccacacucaagaccguacauggcauacuuaaugauaugggaucaaaaaucacuaaaaagaugcggaggauuucuaauccaagacgacuucguacuaacagcagcucacugcuggggaucaucaauaaacguaacacuaggagcacacaacauaaaagaacaagaacccacacaacaauuuauaccaguaaaaagaccaaucccacacccagcauacaacccaaaaaacuucucaaacgacauaauguuauuacaauuagaaagaaaagcaaaaagaacaagagcaguacaaccauuaagacuaccaucaaacaaagcacaagucaaaccaggacaaacaugcucaguagcuggauggggacaaacagcaccacuaggaaaacacagucacacacuacaagaaguaaaaaugaccguacaagaagacagaaaaugcgaaucagaccuaagacacuacuacgacucaacaauagaacuaugcguaggagacccagaaauaaaaaaaacaagcuucaaaggagacagcggagguccauuaguaugcaacaaaguagcucaaggaauaguaaguuacggaagaaacaacggaaugccacccagagcaugcacaaaagucucaucauucguacacuggauaaaaaaaacaaugaaaagauacuaa

SEQ ID NO: 7369 - protein, 233 aa, Artificial Sequence
  TNF__Homo_sapiens__P01375
MSTESMIRDVELAEEALPKKTGGPQGSRRCLFLSLFSFLIVAGATTLFCLLHFGVIGPQREEFPRDLSLISPLAQAVRSSSRTPSDKPVAHVVANPQAEGQLQWLNRRANALLANGVELRDNQLVVPSEGLYLIYSQVLFKGQGCPSTHVLLTHTISRIAVSYQTKVNLLSAIKSPCQRETPEGAEAKPWYEPIYLGGVFQLEKGDRLSAEINRPDYLDFAESGQVYFGIIAL

SEQ ID NO: 7370 - RNA, 702 nt, Artificial Sequence
  TNF__Homo_sapiens__AAA36758
augagcacugaaagcaugauccgggacguggagcuggccgaggaggcgcuccccaagaagacaggggggccccagggcuccaggcggugcuuguuccucagccucuucuccuuccugaucguggcaggcgccaccacgcucuucugccugcugcacuuuggagugaucggcccccagagggaagaguuccccagggaccucucucuaaucagcccucuggcccaggcagucagaucaucuucucgaaccccgagugacaagccuguagcccauguuguagcaaacccucaagcugaggggcagcuccaguggcugaaccgccgggccaaugcccuccuggccaauggcguggagcugagagauaaccagcugguggugccaucagagggccuguaccucaucuacucccagguccucuucaagggccaaggcugccccuccacccaugugcuccucacccacaccaucagccgcaucgccgucuccuaccagaccaaggucaaccuccucucugccaucaagagccccugccagagggagaccccagagggggcugaggccaagcccugguaugagcccaucuaucugggaggggucuuccagcuggagaagggugaccgacucagcgcugagaucaaucggcccgacuaucucgacuuugccgagucugggcaggucuacuuugggaucauugcccuguga

SEQ ID NO: 7371 - RNA, 702 nt, Artificial Sequence
  derived and/or modified sequence opt1 from TNF__Homo_sapiens__AAA36758
augagcaccgaguccaugauccgcgacguggagcuggccgaggaggcccuccccaagaagaccggcgggccgcagggcagccggcgcugccuguuccugucccucuucagcuuccugaucgucgcgggggccacgacccuguucugccuccugcacuucggcgugaucgggccccagcgggaggaguucccccgcgaccugucccucaucagcccccuggcccaggccgugcgguccagcucccgcaccccgagcgacaagcccgucgcccacgugguggcgaacccccaggccgagggccagcugcaguggcucaaccggcgcgccaacgcccugcuggcgaacggcgucgagcuccgggacaaccagcugguggugcccuccgaggggcuguaccucaucuacagccagguccuguucaagggccaggggugcccguccacccacgugcugcucacgcacaccaucagccgcaucgccguguccuaccagaccaaggucaaccugcugagcgccaucaagucccccugccagcgggagacccccgagggcgccgaggccaagcccugguacgagccgaucuaccucgggggcguguuccagcuggagaagggcgaccgccugagcgcggagaucaaccggcccgacuaccucgacuucgccgaguccggccagguguacuucgggaucaucgcccuguga

SEQ ID NO: 7372 - RNA, 702 nt, Artificial Sequence
  derived and/or modified sequence opt2 from TNF__Homo_sapiens__AAA36758
auguccaccgaguccaugauccgcgacgucgagcucgccgaggaggcccuccccaagaagaccggcggcccccagggcucccgccgcugccucuuccucucccucuucuccuuccucaucgucgccggcgccaccacccucuucugccuccuccacuucggcgucaucggcccccagcgcgaggaguucccccgcgaccucucccucaucuccccccucgcccaggccguccgcuccuccucccgcacccccuccgacaagcccgucgcccacgucgucgccaacccccaggccgagggccagcuccaguggcucaaccgccgcgccaacgcccuccucgccaacggcgucgagcuccgcgacaaccagcucgucguccccuccgagggccucuaccucaucuacucccagguccucuucaagggccagggcugccccuccacccacguccuccucacccacaccaucucccgcaucgccgucuccuaccagaccaaggucaaccuccucuccgccaucaagucccccugccagcgcgagacccccgagggcgccgaggccaagcccugguacgagcccaucuaccucggcggcgucuuccagcucgagaagggcgaccgccucuccgccgagaucaaccgccccgacuaccucgacuucgccgaguccggccaggucuacuucggcaucaucgcccucuga

SEQ ID NO: 7373 - RNA, 702 nt, Artificial Sequence
  derived and/or modified sequence opt3 from TNF__Homo_sapiens__AAA36758
augagcaccgaguccaugaucagagacguggaacuggccgaggaagcucuccccaagaaaacaggcgggccucagggaucuaggcggugccuuuuccugucauuguuuaguuucuuaauugucgccggugcaacuacgcuguuuugucuacuccacuucggcguuauagggccacaacgcgaggaauuuccgcgagaucugagccuuaucucuccccuggcgcaggcugugcguuccucgucaagaaccccuagcgacaagccaguagcccauguggucgcaaacccccaggccgagggacaguugcaauggcucaauaggcgggcuaacgcacugcuggccaauggcguggagcuccgcgauaaccaguuaguugugccuagugaaggucuguaccuuauuuauucccaggucuuguucaaagggcagggaugcccaucuacacacgugcugcuaacucauaccaucagcagaauugcuguauccuaccaaacaaagguuaaucuccugucagccaucaaaagucccugucagagggagaccccugaaggcgcggaggcaaagccaugguaugagccgauauaccuuggcgggguguuucagcuggaaaagggagaccgguugagcgccgagaucaaccgccccgauuaucucgacuucgcugaaucuggucaggucuacuuuggcauuaucgcccuguga

SEQ ID NO: 7374 - RNA, 702 nt, Artificial Sequence
  derived and/or modified sequence opt4 from TNF__Homo_sapiens__AAA36758
augagcaccgagagcaugaucagagacguggagcuggccgaggaggcccugcccaagaagaccggcggcccccagggcagcagaagaugccuguuccugagccuguucagcuuccugaucguggccggcgccaccacccuguucugccugcugcacuucggcgugaucggcccccagagagaggaguuccccagagaccugagccugaucagcccccuggcccaggccgugagaagcagcagcagaacccccagcgacaagcccguggcccacgugguggccaacccccaggccgagggccagcugcaguggcugaacagaagagccaacgcccugcuggccaacggcguggagcugagagacaaccagcugguggugcccagcgagggccuguaccugaucuacagccaggugcuguucaagggccagggcugccccagcacccacgugcugcugacccacaccaucagcagaaucgccgugagcuaccagaccaaggugaaccugcugagcgccaucaagagccccugccagagagagacccccgagggcgccgaggccaagcccugguacgagcccaucuaccugggcggcguguuccagcuggagaagggcgacagacugagcgccgagaucaacagacccgacuaccuggacuucgccgagagcggccagguguacuucggcaucaucgcccuguga

SEQ ID NO: 7375 - RNA, 702 nt, Artificial Sequence
  derived and/or modified sequence opt5 from TNF__Homo_sapiens__AAA36758
augagcaccgaguccaugaucagagacguggaacuggccgaggaagcucuccccaagaaaacaggcgggccucagggaucucggcgcugccuguuccuuagccuguuuuccuuccucauugucgccggcgcgacgacccuguuuugucuucugcacuucgggguuaucggaccgcaaagagaggaauuuccccgggaucucucucugauuagcccucuggcucaggccgugcgcuccucuagcagaacacccuccgacaagccuguggcccaugucguggcuaacccccaggccgagggccagcuccaauggcugaaucggcgcgcuaacgcccuucuggcgaaugggguugagcucagagauaaccagcugguggucccuagcgaaggacuuuaccugaucuauucucagguucucuucaaaggccagggcugcccguccacccacgugcugcugacacauaccauuagccggaucgccgugucuuaccaaacaaaggucaaucuccuguccgcuaucaaaagccccugucagcgcgagaccccugaaggggccgaggcuaagcccugguaugagccuauuuaccuuggaggcguguuucagcuggaaaagggggacagacucucugccgagaucaaccggcccgauuaucuggacuucgcggaauccggacagguguacuuuggcauuaucgcccuuuga

SEQ ID NO: 7376 - RNA, 702 nt, Artificial Sequence
  derived and/or modified sequence opt6 from TNF__Homo_sapiens__AAA36758
augucaacagaaucuaugauaagagacgucgaacuagcagaagaagcauuaccaaaaaaaaccggaggaccacaaggcucaagaagaugccuauuccuaucauuauucucauuccuaauaguagcaggcgcaacaacacuauuuugccuauuacauuucggaguaaucggaccacaaagagaagaauucccacgcgaccuaucauuaauaucuccacuagcacaagccguuagaucaucaucaagaacaccaucagacaaaccaguagcccacgucguagcaaacccccaagccgaaggacaacuacaauggcuaaaccgcagagcaaacgcacuauuagccaacggaguagaauuaagagacaaccaacuaguaguaccaucagaaggacuauaccuaauauacucacaaguacuauucaaaggacaaggcugcccaucaacccacguacuacuaacacacacaauaucaagaauagcaguaucauaccaaacaaaaguaaaccuacuaucagcaauaaaaucaccaugccaaagagaaacacccgaaggagcagaagccaaaccaugguacgaaccuauauaccuaggaggaguauuccaauuagaaaaaggagacagacuaucagcagaaauaaacagaccagauuaccuagauuucgcagaauccggacaaguauacuucggaauaauagcacuauaa

SEQ ID NO: 7377 - protein, 233 aa, Artificial Sequence; identical to SEQ ID NO: 7369
  TNF__Homo_sapiens__Q5STB3

SEQ ID NO: 7378 - RNA, 702 nt, Artificial Sequence
  TNF__Homo_sapiens__ADV31546
augagcacugaaagcaugauccgggacguggagcuggccgaggaggcgcuccccaagaagacaggggggccccagggcuccaggcggugcuuguuccucagccucuucuccuuccugaucguggcaggcgccaccacgcucuucugccugcugcacuuuggggugaucggcccccagagggaagaguuccccagggaccucucucuaaucagcccucuggcccaggcagucagaucaucuucucgaaccccgagugacaagccuguagcccauguuguagcaaacccucaagcugaggggcagcuccaguggcugaaccgccgggccaaugcccuccuggccaauggcguggagcugagagauaaccaguugguggugccaucagagggccuguaccucaucuacucccagguccucuucaagggccaaggcugccccuccacccaugugcuccucacccacaccaucagccgcaucgccgucuccuaccagaccaaggucaaccuccucucugccaucaagagccccugccagagggagaccccagagggggcugaggccaagcccugguaugagcccaucuaucugggaggggucuuccagcuggagaagggugaccgacucagcgcugagaucaaucggcccgacuaucucgacuuugccgagucugggcaggucuacuuugggaucauugcccuguga

SEQ ID NO: 7379 - RNA, 702 nt, Artificial Sequence; identical to SEQ ID NO: 7371
  derived and/or modified sequence opt1 from TNF__Homo_sapiens__ADV31546

SEQ ID NO: 7380 - RNA, 702 nt, Artificial Sequence; identical to SEQ ID NO: 7372
  derived and/or modified sequence opt2 from TNF__Homo_sapiens__ADV31546

SEQ ID NO: 7381 - RNA, 702 nt, Artificial Sequence; identical to SEQ ID NO: 7373
  derived and/or modified sequence opt3 from TNF__Homo_sapiens__ADV31546

SEQ ID NO: 7382 - RNA, 702 nt, Artificial Sequence; identical to SEQ ID NO: 7374
  derived and/or modified sequence opt4 from TNF__Homo_sapiens__ADV31546

SEQ ID NO: 7383 - RNA, 702 nt, Artificial Sequence; identical to SEQ ID NO: 7375
  derived and/or modified sequence opt5 from TNF__Homo_sapiens__ADV31546

SEQ ID NO: 7384 - RNA, 702 nt, Artificial Sequence
  derived and/or modified sequence opt6 from TNF__Homo_sapiens__ADV31546
augucaacagaaucaaugauaagagacguagaacuagcagaagaagcauuaccaaaaaaaacaggaggaccacaaggaagcagacgaugcuuauuccuaucacuauucucauuuuuaauaguagcaggagcaacaacacuauucugccuauuacauuucggagucauaggaccacaaagagaagaauucccuagagaccuaucacuaauaucaccacuagcacaagcaguaagaucaucaagcagaacaccaucagacaaaccaguagcccacguaguagcaaacccacaagcagaaggacaacuccaauggcuaaaccgaagagccaacgcauuacucgcaaacggaguagaauuaagagacaaccaauuaguaguaccaucagaaggccucuaucuaauauacucacaaguauuauucaaaggacaaggauguccaucaacccacguacuacuaacacacacaauaucaagaauagcaguaucauaccaaacaaaaguaaaccuacuaagcgcaauaaaaucacccugccaaagagaaacaccugaaggagccgaagcaaaaccaugguaugaaccaauauaccuaggaggaguauuccaauuagaaaaaggagaccgacuauccgcagaaauaaauagaccagacuaccuagacuucgcagaaucaggacaaguauacuucggaauaauagcacuauaa

SEQ ID NO: 7385 - protein, 496 aa, Artificial Sequence [sequence omitted]

SEQ ID NO: 7386 - RNA, 1491 nt, Artificial Sequence
  Angiopoietin-2__Homo_sapiens__BAG35440
auguggcagauuguuuucuuuacucugagcugugaucuugucuuggccgcagccuauaacaacuuucggaagagcauggacagcauaggaaagaagcaauaucagguccagcauggguccugcagcuacacuuuccuccugccagagauggacaacugccgcucuuccuccagccccuacguguccaaugcugugcagagggacgcgccgcucgaauacgaugacucggugcagaggcugcaagugcuggagaacaucauggaaaacaacacucaguggcuaaugaagcuugagaauuauauccaggacaacaugaagaaagaaaugguagagauacagcagaaugcaguacagaaccagacggcugugaugauagaaauagggacaaaccuguugaaccaaacagcggagcaaacgcggaaguuaacugauguggaagcccaaguauuaaaucagaccacgagacuugaacuucagcucuuggaacacucccucucgacaaacaaauugggaaaacagauuuuggaccagaccagugaaauaaacaaauuucaagauaagaacaguuuccuagaaaagaaggugcuagcuauggaagacaagcacaucauccaacuacagucaauaaaagaagagaaagaucagcuacagguguuaguauccaagcaaaauuccaucauugaagaacuagaaaaaaaaauagugacugccacugugaauaauucaguucuucagaagcagcaacaugaucucauggagacaguuaauaacuuacugacuaugauguccacaucaaacucagcuaaggaccccacuguugcuaaagaagaacaaaucagcuucagagacugugcugaaguauucaaaucaggacacaccacgaauggcaucuacacguuaacauucccuaauucuacagaagagaucaaggccuacugugacauggaagcuggaggaggcggguggacaauuauucagcgacgugaggauggcagcguugauuuucagaggacuuggaaagaauauaaagugggauuugguaacccuucaggagaauauuggcugggaaaugaguuuguuucgcaacugacuaaucagcaacgcuaugugcuuaaaauacaccuuaaagacugggaagggaaugaggcuuacucauuguaugaacauuucuaucucucaagugaagaacucaauuauaggauucaccuuaaaggacuuacagggacagccggcaaaauaagcagcaucagccaaccaggaaaugauuuuagcacaaaggauggagacaacgacaaauguauuugcaaauguucacaaaugcuaacaggaggcuggugguuugaugcaugugguccuuccaacuugaacggaauguacuauccacagaggcagaacacaaauaaguucaacggcauuaaaugguacuacuggaaaggcucaggcuauucgcucaaggccacaaccaugaugauccgaccagcagauuucuaa

SEQ ID NO: 7387 - RNA, 1491 nt, Artificial Sequence
  derived and/or modified sequence opt1 from Angiopoietin-2__Homo_sapiens__BAG35440
auguggcagaucguguucuucacccugagcugcgaccucguccuggccgccgcguacaacaacuuccgcaaguccauggacagcaucggcaagaagcaguaccaggugcagcacggguccugcagcuacaccuuccugcuccccgagauggacaacugccgguccagcuccagcccguacguguccaacgccguccagcgcgacgcgccccuggaguacgacgacagcgugcagcggcuccaggugcuggagaacaucauggagaacaacacgcaguggcugaugaagcuggagaacuacauccaggacaacaugaagaaggagauggucgagauccagcagaacgccgugcagaaccagaccgccgugaugaucgagaucggcaccaaccuccugaaccagaccgccgagcagacgcgcaagcugaccgacgucgaggcccaggugcucaaccagaccacccggcuggagcugcagcuccuggagcacucccugagcacgaacaagcucgggaagcagauccuggaccagaccuccgagaucaacaaguuccaggacaagaacagcuuccuggagaagaaggugcucgccauggaggacaagcacaucauccagcugcaguccaucaaggaggagaaggaccagcugcagguccucgugagcaagcagaacuccaucaucgaggagcuggagaagaagaucgugaccgccaccgucaacaacagcgugcugcagaagcagcagcacgaccucauggagacggugaacaaccugcugaccaugauguccaccagcaacagcgcgaaggaccccaccgucgccaaggaggagcagaucuccuuccgcgacugcgccgagguguucaagagcggccacacgaccaacgggaucuacacccucaccuuccccaacuccacggaggagaucaaggccuacugcgacauggaggccggcggcgggggcuggaccaucauccagcggcgcgaggacgggagcguggacuuccagcggaccuggaaggaguacaaggucggcuucgggaacccguccggcgaguacuggcugggcaacgaguucgugagccagcugaccaaccagcagcgcuacgugcucaagauccaccugaaggacugggaggggaacgaggcguacucccuguacgagcacuucuaccucagcuccgaggagcugaacuaccggauccaccugaagggccucacggggaccgccggcaagaucagcuccaucagccagcccggcaacgacuucuccaccaaggacggggacaacgacaagugcaucugcaagugcagccagaugcugaccggcggguggugguucgacgccugcggccccuccaaccugaacgggauguacuacccccagcgccagaacacgaacaaguucaacggcaucaagugguacuacuggaagggcagcggguacucccucaaggccaccaccaugaugauccggccggccgacuucuga

SEQ ID NO: 7388 - RNA, 1491 nt, Artificial Sequence
  derived and/or modified sequence opt2 from Angiopoietin-2__Homo_sapiens__BAG35440
auguggcagaucgucuucuucacccucuccugcgaccucguccucgccgccgccuacaacaacuuccgcaaguccauggacuccaucggcaagaagcaguaccagguccagcacggcuccugcuccuacaccuuccuccuccccgagauggacaacugccgcuccuccuccucccccuacgucuccaacgccguccagcgcgacgccccccucgaguacgacgacuccguccagcgccuccagguccucgagaacaucauggagaacaacacccaguggcucaugaagcucgagaacuacauccaggacaacaugaagaaggagauggucgagauccagcagaacgccguccagaaccagaccgccgucaugaucgagaucggcaccaaccuccucaaccagaccgccgagcagacccgcaagcucaccgacgucgaggcccagguccucaaccagaccacccgccucgagcuccagcuccucgagcacucccucuccaccaacaagcucggcaagcagauccucgaccagaccuccgagaucaacaaguuccaggacaagaacuccuuccucgagaagaagguccucgccauggaggacaagcacaucauccagcuccaguccaucaaggaggagaaggaccagcuccagguccucgucuccaagcagaacuccaucaucgaggagcucgagaagaagaucgucaccgccaccgucaacaacuccguccuccagaagcagcagcacgaccucauggagaccgucaacaaccuccucaccaugauguccaccuccaacuccgccaaggaccccaccgucgccaaggaggagcagaucuccuuccgcgacugcgccgaggucuucaaguccggccacaccaccaacggcaucuacacccucaccuuccccaacuccaccgaggagaucaaggccuacugcgacauggaggccggcggcggcggcuggaccaucauccagcgccgcgaggacggcuccgucgacuuccagcgcaccuggaaggaguacaaggucggcuucggcaaccccuccggcgaguacuggcucggcaacgaguucgucucccagcucaccaaccagcagcgcuacguccucaagauccaccucaaggacugggagggcaacgaggccuacucccucuacgagcacuucuaccucuccuccgaggagcucaacuaccgcauccaccucaagggccucaccggcaccgccggcaagaucuccuccaucucccagcccggcaacgacuucuccaccaaggacggcgacaacgacaagugcaucugcaagugcucccagaugcucaccggcggcuggugguucgacgccugcggccccuccaaccucaacggcauguacuacccccagcgccagaacaccaacaaguucaacggcaucaagugguacuacuggaagggcuccggcuacucccucaaggccaccaccaugaugauccgccccgccgacuucuga

SEQ ID NO: 7389 - RNA, 1491 nt, Artificial Sequence
  derived and/or modified sequence opt3 from Angiopoietin-2__Homo_sapiens__BAG35440
auguggcagaucguguucuuuacccugagcugcgaccucguccuugccgcugcauacaacaauuucagaaaguccauggauucuauuggcaaaaagcaauaucagguucagcacgggucauguaguuacacauuucuguugcccgagauggacaacugcaggagcuccucuucgccuuaugugucaaaugccguacagcgggaugcgccauuagaauacgacgauagcgugcaacgccugcagguccuagagaacauaauggaaaauaacacucaguggcucaugaaacuggagaauuauauccaggacaacaugaagaaagaaaugguggagauucaacagaaugcuguucagaaccagacggccgugaugaucgagauuggaaccaaucuucugaaccaaacagcagaacagacucgaaaguugaccgaugucgaggcccaggugcucaaucaaacaacccgucuggaacugcagcucuuagagcauagucuguccacuaacaaacuugguaagcagaucuuggaccagacaucugagauaaauaaguuccaagauaaaaacagcuuucuggaaaagaaaguacuagcuauggaggacaagcacaucauucagcuccaguccaucaaggaagagaaagaucagcugcaaguucuugugucaaagcagaacaguauuaucgaagaacuggagaaaaagauagucaccgcaacggugaauaacagcguguugcagaaacagcaacaugaccucauggaaacugucaauaaccuguuaaccaugaugucuacauccaauucagccaaggauccgacuguugcuaaagaggaacagauuagcuucagagacugugccgagguguuuaagaguggccacaccacaaacgggaucuacacccugacguuccccaauucuacugaagagauuaaggcguauugcgacauggaggcaggaggcgguggguggacaaucauccagaggcgggaagauggauccguagacuuucagcgcaccuggaaagaguacaaggugggcuucggcaacccuagcggggaauacuggcucggaaaugaguuugucucgcaacuuacuaaccagcagagauaugugcugaaaauucauuugaaggauugggaagguaaugaggccuacucucuauaugagcacuucuaccuguccucagaggagcucaacuauaggauacaccugaaaggccuuacagggaccgcuggaaagaucaguagcauuucccaaccaggcaaugacuuuucuacgaaggauggugacaacgauaaauguaucugcaaguguagccagaugcugaccgggggauggugguucgacgccugcggccccucaaauuugaacggcauguacuauccucagcggcagaacacaaauaaauucaacgggauaaagugguacuacuggaaaggaagugguuauucccucaaggcaacuaccaugaugauucgcccagcugauuuuuga

SEQ ID NO: 7390 - RNA, 1491 nt, Artificial Sequence
  derived and/or modified sequence opt4 from Angiopoietin-2__Homo_sapiens__BAG35440
auguggcagaucguguucuucacccugagcugcgaccuggugcuggccgccgccuacaacaacuucagaaagagcauggacagcaucggcaagaagcaguaccaggugcagcacggcagcugcagcuacaccuuccugcugcccgagauggacaacugcagaagcagcagcagccccuacgugagcaacgccgugcagagagacgccccccuggaguacgacgacagcgugcagagacugcaggugcuggagaacaucauggagaacaacacccaguggcugaugaagcuggagaacuacauccaggacaacaugaagaaggagaugguggagauccagcagaacgccgugcagaaccagaccgccgugaugaucgagaucggcaccaaccugcugaaccagaccgccgagcagaccagaaagcugaccgacguggaggcccaggugcugaaccagaccaccagacuggagcugcagcugcuggagcacagccugagcaccaacaagcugggcaagcagauccuggaccagaccagcgagaucaacaaguuccaggacaagaacagcuuccuggagaagaaggugcuggccauggaggacaagcacaucauccagcugcagagcaucaaggaggagaaggaccagcugcaggugcuggugagcaagcagaacagcaucaucgaggagcuggagaagaagaucgugaccgccaccgugaacaacagcgugcugcagaagcagcagcacgaccugauggagaccgugaacaaccugcugaccaugaugagcaccagcaacagcgccaaggaccccaccguggccaaggaggagcagaucagcuucagagacugcgccgagguguucaagagcggccacaccaccaacggcaucuacacccugaccuuccccaacagcaccgaggagaucaaggccuacugcgacauggaggccggcggcggcggcuggaccaucauccagagaagagaggacggcagcguggacuuccagagaaccuggaaggaguacaaggugggcuucggcaaccccagcggcgaguacuggcugggcaacgaguucgugagccagcugaccaaccagcagagauacgugcugaagauccaccugaaggacugggagggcaacgaggccuacagccuguacgagcacuucuaccugagcagcgaggagcugaacuacagaauccaccugaagggccugaccggcaccgccggcaagaucagcagcaucagccagcccggcaacgacuucagcaccaaggacggcgacaacgacaagugcaucugcaagugcagccagaugcugaccggcggcuggugguucgacgccugcggccccagcaaccugaacggcauguacuacccccagagacagaacaccaacaaguucaacggcaucaagugguacuacuggaagggcagcggcuacagccugaaggccaccaccaugaugaucagacccgccgacuucuga

SEQ ID NO: 7391 - RNA, 1491 nt, Artificial Sequence
  derived and/or modified sequence opt5 from Angiopoietin-2__Homo_sapiens__BAG35440
auguggcagaucguguucuuuacccugagcugcgaccucguccuggccgcugccuacaacaauuucagaaaguccauggauucuauuggcaaaaagcaauaucagguucagcacgggagcuguuccuacacauuucuucugcccgagauggacaacugccggucuagcuccucuccuuaugugagcaaugcggugcagcgcgaugcuccgcucgaauacgacgauuccguccaaagacuucaggugcuggagaacaucauggaaaauaacacgcaguggcugaugaaacucgagaauuauauucaggacaacaugaagaaagaaaugguugagauccaacagaaugccgugcagaaccagaccgccgucaugauugagaucggaacaaaucugcugaaccaaaccgcugaacagacacggaagcucaccgauguggaggcccagguucugaaucaaacaacccgccuugaacugcagcuccuggagcauagccuuucuacgaacaagcugggcaaacagauccucgaccagaccuccgagauuaauaaguuccaagauaaaaacagcuuucuggaaaagaaagugcuggcuauggaggacaagcacaucauucagcuccagucuaucaaggaagagaaagaucagcugcaaguccuuguguccaagcagaacagcauuaucgaagaacuggagaaaaagauugugacagccaccgucaauaacucuguucuccagaaacagcaacaugaccugauggaaacagugaauaaccuucugaccaugauguccacgagcaauuccgcgaaggaucccacaguggccaaagaggaacagaucucuuucagagacugugcugaggucuuuaagagcgggcacaccacaaacggaaucuacacccucaccuucccuaauuccacagaagagauuaaggccuauugcgacauggaggcuggcgggggaggcuggacgaucauucagcggcgcgaagauggcagcguggacuuucagagaaccuggaaagaguacaagguuggguucggaaaccccucuggcgaauacuggcuggggaaugaguuugugucccaacugacaaaccagcagcgguauguccucaaaauccaucugaaggauugggaaggaaaugaggccuacagccuuuaugagcacuucuaccugucuagcgaggagcucaacuaucgcauucaccugaaaggccuuaccgggacagcgggaaagaucuccucuaucagccaaccuggcaaugacuuuuccaccaaggauggcgacaacgauaaauguauuugcaaguguagccagaugcugacagggggauggugguucgacgccugcggccccucuaaucucaacgggauguacuauccucagagacagaacacgaauaaauucaacggaaucaagugguacuacuggaaaggcuccggguauagccugaaggcuaccaccaugaugauucggccggccgauuuuuga

SEQ ID NO: 7392 - RNA, 1491 nt, Artificial Sequence
  derived and/or modified sequence opt6 from Angiopoietin-2__Homo_sapiens__BAG35440
auguggcaaauaguauucuuuaccuuaucuugcgauuuaguauuagccgccgcauauaacaacuuuagaaaaagcauggacucaaucggaaaaaaacaauaucaagugcaacacggaucaugcagcuauacauuucuacucccagaaauggacaacugcagaucaagcagcucaccauaugucucaaacgccguccaaagagacgcaccacuagaauaugacgacucaguacaaagauuacaaguauuagagaauauaauggaaaacaauacacaauggcuaaugaaacuagaaaauuacauacaagacaauaugaaaaaagaaaugguagaaauacaacaaaacgcaguccaaaaccaaacagcaguaaugaucgaaauaggaaccaacuuacuuaaccaaacagcagaacaaacaagaaaacuaacagacguagaagcacaaguccuaaaucaaacuacaagacuugaauuacaacuucuagaacauucauuaucaacaaacaaacucggaaaacaaauacucgaccaaacaucagaaauaaauaaauuucaagacaaaaauucauuccucgaaaaaaaaguauuagccauggaagacaaacacauaauacaacuucaaagcauaaaggaagaaaaagaccaacuacaaguccuaguaucaaaacaaaauucaauaauagaagaauuagaaaaaaaaauaguaacagcaacaguaaacaacucaguauuacagaaacaacaacacgaccuaauggaaacagucaacaacuuauuaacaaugauguccacaucaaacucagcaaaagaucccacaguagcaaaagaagaacaaaucucauuuagagacugugcagaaguuuucaaauccggacacacaacaaacggcauauauaccuuaacuuucccaaauucaacugaagaaauaaaagcauacugugauauggaagcaggaggaggcggauggacaauaauacaacgaagagaagacgguucuguagauuuccaaagaacauggaaagaauacaaaguagguuucggaaauccaagcggagaauacuggcuagguaaugaauucguaucacaacuaacaaaccaacaaagauacguacuaaaaauacacuuaaaagacugggaaggcaaugaagcauacucacuauacgaacacuuuuacuuaucaucagaagagcuaaauuauagaauucaccugaaaggccucacaggcaccgcaggaaaaauauccucaaucucacaaccagguaacgacuucucaacaaaagacggagacaacgacaaaugcauaugcaaaugcucucaaaugcuaacaggcgguuggugguucgacgcaugcggaccgagcaaucuaaacggaauguacuauccccaaagacaaaauacaaacaaauucaacggaaucaaaugguauuacuggaaaggcuccggauauagccuaaaagcaacaacaaugaugauaagaccugcagacuuuuaa

SEQ ID NO: 7393 - protein, 496 aa, Artificial Sequence
  Angiopoietin-2__Homo_sapiens__O15123
MWQIVFFTLSCDLVLAAAYNNFRKSMDSIGKKQYQVQHGSCSYTFLLPEMDNCRSSSSPYVSNAVQRDAPLEYDDSVQRLQVLENIMENNTQWLMKLENYIQDNMKKEMVEIQQNAVQNQTAVMIEIGTNLLNQTAEQTRKLTDVEAQVLNQTTRLELQLLEHSLSTNKLEKQILDQTSEINKLQDKNSFLEKKVLAMEDKHIIQLQSIKEEKDQLQVLVSKQNSIIEELEKKIVTATVNNSVLQKQQHDLMETVNNLLTMMSTSNSAKDPTVAKEEQISFRDCAEVFKSGHTTNGIYTLTFPNSTEEIKAYCDMEAGGGGWTIIQRREDGSVDFQRTWKEYKVGFGNPSGEYWLGNEFVSQLTNQQRYVLKIHLKDWEGNEAYSLYEHFYLSSEELNYRIHLKGLTGTAGKISSISQPGNDFSTKDGDNDKCICKCSQMLTGGWWFDACGPSNLNGMYYPQRQNTNKFNGIKWYYWKGSGYSLKATTMMIRPADF

SEQ ID NO: 7394 - RNA, 1491 nt, Artificial Sequence
  Angiopoietin-2__Homo_sapiens__AAB63190
auguggcagauuguuuucuuuacucugagcugugaucuugucuuggccgcagccuauaacaacuuucggaagagcauggacagcauaggaaagaagcaauaucagguccagcauggguccugcagcuacacuuuccuccugccagagauggacaacugccgcucuuccuccagccccuacguguccaaugcugugcagagggacgcgccgcucgaauacgaugacucggugcagaggcugcaagugcuggagaacaucauggaaaacaacacucaguggcuaaugaagcuugagaauuauauccaggacaacaugaagaaagaaaugguagagauacagcagaaugcaguacagaaccagacggcugugaugauagaaauagggacaaaccuguugaaccaaacagcugagcaaacgcggaaguuaacugauguggaagcccaaguauuaaaucagaccacgagacuugaacuucagcucuuggaacacucccucucgacaaacaaauuggaaaaacagauuuuggaccagaccagugaaauaaacaaauugcaagauaagaacaguuuccuagaaaagaaggugcuagcuauggaagacaagcacaucauccaacuacagucaauaaaagaagagaaagaucagcuacagguguuaguauccaagcaaaauuccaucauugaagaacuagaaaaaaaaauagugacugccacggugaauaauucaguucuucaaaagcagcaacaugaucucauggagacaguuaauaacuuacugacuaugauguccacaucaaacucagcuaaggaccccacuguugcuaaagaagaacaaaucagcuucagagacugugcugaaguauucaaaucaggacacaccacaaauggcaucuacacguuaacauucccuaauucuacagaagagaucaaggccuacugugacauggaagcuggaggaggcggguggacaauuauucagcgacgugaggauggcagcguugauuuucagaggacuuggaaagaauauaaagugggauuugguaacccuucaggagaauauuggcugggaaaugaguuuguuucgcaacugacuaaucagcaacgcuaugugcuuaaaauacaccuuaaagacugggaagggaaugaggcuuacucauuguaugaacauuucuaucucucaagugaagaacucaauuauaggauucaccuuaaaggacuuacagggacagccggcaaaauaagcagcaucagccaaccaggaaaugauuuuagcacaaaggauggagacaacgacaaauguauuugcaaauguucacaaaugcuaacaggaggcuggugguuugaugcaugugguccuuccaacuugaacggaauguacuauccacagaggcagaacacaaauaaguucaacggcauuaaaugguacuacuggaaaggcucaggcuauucgcucaaggccacaaccaugaugauccgaccagcagauuucuaa

SEQ ID NO: 7395 - RNA, 1491 nt, Artificial Sequence
  derived and/or modified sequence opt1 from Angiopoietin-2__Homo_sapiens__AAB63190
auguggcagaucguguucuucacccugagcugcgaccucguccuggccgccgcguacaacaacuuccgcaaguccauggacagcaucggcaagaagcaguaccaggugcagcacggguccugcagcuacaccuuccugcuccccgagauggacaacugccgguccagcuccagcccguacguguccaacgccguccagcgcgacgcgccccuggaguacgacgacagcgugcagcggcuccaggugcuggagaacaucauggagaacaacacgcaguggcugaugaagcuggagaacuacauccaggacaacaugaagaaggagauggucgagauccagcagaacgccgugcagaaccagaccgccgugaugaucgagaucggcaccaaccuccugaaccagaccgccgagcagacgcgcaagcugaccgacgucgaggcccaggugcucaaccagaccacccggcuggagcugcagcuccuggagcacucccugagcacgaacaagcucgagaagcagauccuggaccagaccuccgagaucaacaagcugcaggacaagaacagcuuccucgagaagaaggugcuggccauggaggacaagcacaucauccagcugcaguccaucaaggaggagaaggaccagcuccagguccuggugagcaagcagaacuccaucaucgaggagcuggagaagaagaucgugaccgccaccgucaacaacagcgugcuccagaagcagcagcacgaccugauggagacggugaacaaccugcucaccaugauguccaccagcaacagcgcgaaggaccccaccgucgccaaggaggagcagaucuccuuccgcgacugcgccgagguguucaagagcgggcacacgaccaacggcaucuacacccugaccuuccccaacuccacggaggagaucaaggccuacugcgacauggaggccgggggcggcggguggaccaucauccagcggcgcgaggacggcagcguggacuuccagcggaccuggaaggaguacaaggucggguucggcaacccguccggggaguacuggcugggcaacgaguucgugagccagcucaccaaccagcagcgcuacgugcugaagauccaccugaaggacugggagggcaacgaggcguacucccucuacgagcacuucuaccugagcuccgaggagcugaacuaccggauccaccucaaggggcugacgggcaccgccgggaagaucagcuccaucagccagcccggcaacgacuucuccaccaaggacggcgacaacgacaagugcaucugcaagugcagccagaugcugaccgggggcuggugguucgacgccugcgggcccuccaaccucaacggcauguacuacccccagcgccagaacacgaacaaguucaacgggaucaagugguacuacuggaagggcagcggcuacucccugaaggccaccaccaugaugauccggccggccgacuucuga

SEQ ID NO: 7396 - RNA, 1491 nt, Artificial Sequence
  derived and/or modified sequence opt2 from Angiopoietin-2__Homo_sapiens__AAB63190
auguggcagaucgucuucuucacccucuccugcgaccucguccucgccgccgccuacaacaacuuccgcaaguccauggacuccaucggcaagaagcaguaccagguccagcacggcuccugcuccuacaccuuccuccuccccgagauggacaacugccgcuccuccuccucccccuacgucuccaacgccguccagcgcgacgccccccucgaguacgacgacuccguccagcgccuccagguccucgagaacaucauggagaacaacacccaguggcucaugaagcucgagaacuacauccaggacaacaugaagaaggagauggucgagauccagcagaacgccguccagaaccagaccgccgucaugaucgagaucggcaccaaccuccucaaccagaccgccgagcagacccgcaagcucaccgacgucgaggcccagguccucaaccagaccacccgccucgagcuccagcuccucgagcacucccucuccaccaacaagcucgagaagcagauccucgaccagaccuccgagaucaacaagcuccaggacaagaacuccuuccucgagaagaagguccucgccauggaggacaagcacaucauccagcuccaguccaucaaggaggagaaggaccagcuccagguccucgucuccaagcagaacuccaucaucgaggagcucgagaagaagaucgucaccgccaccgucaacaacuccguccuccagaagcagcagcacgaccucauggagaccgucaacaaccuccucaccaugauguccaccuccaacuccgccaaggaccccaccgucgccaaggaggagcagaucuccuuccgcgacugcgccgaggucuucaaguccggccacaccaccaacggcaucuacacccucaccuuccccaacuccaccgaggagaucaaggccuacugcgacauggaggccggcggcggcggcuggaccaucauccagcgccgcgaggacggcuccgucgacuuccagcgcaccuggaaggaguacaaggucggcuucggcaaccccuccggcgaguacuggcucggcaacgaguucgucucccagcucaccaaccagcagcgcuacguccucaagauccaccucaaggacugggagggcaacgaggccuacucccucuacgagcacuucuaccucuccuccgaggagcucaacuaccgcauccaccucaagggccucaccggcaccgccggcaagaucuccuccaucucccagcccggcaacgacuucuccaccaaggacggcgacaacgacaagugcaucugcaagugcucccagaugcucaccggcggcuggugguucgacgccugcggccccuccaaccucaacggcauguacuacccccagcgccagaacaccaacaaguucaacggcaucaagugguacuacuggaagggcuccggcuacucccucaaggccaccaccaugaugauccgccccgccgacuucuga

SEQ ID NO: 7397 - RNA, 1491 nt, Artificial Sequence
  derived and/or modified sequence opt3 from Angiopoietin-2__Homo_sapiens__AAB63190
auguggcagaucguguucuuuacccugagcugcgaccucguccuugccgcugcauacaacaauuucagaaaguccauggauucuauuggcaaaaagcaauaucagguucagcacgggucauguaguuacacauuucuguugcccgagauggacaacugcaggagcuccucuucgccuuaugugucaaaugccguacagcgggaugcgccauuagaauacgacgauagcgugcaacgccugcagguccuagagaacauaauggaaaauaacacucaguggcucaugaaacuggagaauuauauccaggacaacaugaagaaagaaaugguggagauucaacagaaugcuguucagaaccagacggccgugaugaucgagauuggaaccaaucuucugaaccaaacagcagaacagacucgaaaguugaccgaugucgaggcccaggugcucaaucaaacaacccgucuggaacugcagcucuuagagcauagucuguccacuaacaaacuugagaaacagaucuuggaccagacaucugaaauaaauaagcugcaagauaaaaacagcuuccuagagaagaaaguacucgcuauggaagacaagcacaucauucagcugcaguccaucaaggaggaaaaagaucagcuucaaguucuggugucaaagcagaacaguauuaucgaggaguuggaaaagaagauagucaccgcaacggugaauaacagcgugcuccagaaacagcaacaugaccugauggagacugucaauaacuuacugaccaugaugucuacauccaauucagccaaggauccgacuguugcuaaagaagaacagauuagcuuuagagacugugccgaaguguucaagaguggucacaccacaaacggcaucuacacccucacguuucccaauucuacugaggagauuaaggcguauugcgacauggaagcagggggaggcgguuggacaaucauccagaggcgggaggauggguccguagacuuccagcgcaccuggaaagaauacaaggugggauuuggcaacccuagcggcgaguacuggcuugggaaugaguucgucucgcaacugacuaaccagcagagauauguguugaaaauucaucuaaaggauugggagggaaaugaggccuacucucuguaugaacacuuuuaccucuccucagaggaacugaacuauaggauacaccuuaaaggucugacaggcaccgcugggaagaucaguagcauuucccaaccaggaaaugacuucucuacgaaggauggcgacaacgauaaauguaucugcaaguguagccagauguugaccgguggguggugguuugacgccugcggacccucaaaucucaacggcauguacuauccucagcggcagaacacaaauaaauucaacggcauaaagugguacuacuggaaagggaguggauauucccugaaggcaacuaccaugaugauucgcccagcugauuucuga

SEQ ID NO: 7398 - RNA, 1491 nt, Artificial Sequence
  derived and/or modified sequence opt4 from Angiopoietin-2__Homo_sapiens__AAB63190
auguggcagaucguguucuucacccugagcugcgaccuggugcuggccgccgccuacaacaacuucagaaagagcauggacagcaucggcaagaagcaguaccaggugcagcacggcagcugcagcuacaccuuccugcugcccgagauggacaacugcagaagcagcagcagccccuacgugagcaacgccgugcagagagacgccccccuggaguacgacgacagcgugcagagacugcaggugcuggagaacaucauggagaacaacacccaguggcugaugaagcuggagaacuacauccaggacaacaugaagaaggagaugguggagauccagcagaacgccgugcagaaccagaccgccgugaugaucgagaucggcaccaaccugcugaaccagaccgccgagcagaccagaaagcugaccgacguggaggcccaggugcugaaccagaccaccagacuggagcugcagcugcuggagcacagccugagcaccaacaagcuggagaagcagauccuggaccagaccagcgagaucaacaagcugcaggacaagaacagcuuccuggagaagaaggugcuggccauggaggacaagcacaucauccagcugcagagcaucaaggaggagaaggaccagcugcaggugcuggugagcaagcagaacagcaucaucgaggagcuggagaagaagaucgugaccgccaccgugaacaacagcgugcugcagaagcagcagcacgaccugauggagaccgugaacaaccugcugaccaugaugagcaccagcaacagcgccaaggaccccaccguggccaaggaggagcagaucagcuucagagacugcgccgagguguucaagagcggccacaccaccaacggcaucuacacccugaccuuccccaacagcaccgaggagaucaaggccuacugcgacauggaggccggcggcggcggcuggaccaucauccagagaagagaggacggcagcguggacuuccagagaaccuggaaggaguacaaggugggcuucggcaaccccagcggcgaguacuggcugggcaacgaguucgugagccagcugaccaaccagcagagauacgugcugaagauccaccugaaggacugggagggcaacgaggccuacagccuguacgagcacuucuaccugagcagcgaggagcugaacuacagaauccaccugaagggccugaccggcaccgccggcaagaucagcagcaucagccagcccggcaacgacuucagcaccaaggacggcgacaacgacaagugcaucugcaagugcagccagaugcugaccggcggcuggugguucgacgccugcggccccagcaaccugaacggcauguacuacccccagagacagaacaccaacaaguucaacggcaucaagugguacuacuggaagggcagcggcuacagccugaaggccaccaccaugaugaucagacccgccgacuucuga

SEQ ID NO: 7399 - RNA, 1491 nt, Artificial Sequence
  derived and/or modified sequence opt5 from Angiopoietin-2__Homo_sapiens__AAB63190
auguggcagaucguguucuuuacccugagcugcgaccucguccuggccgcugccuacaacaauuucagaaaguccauggauucuauuggcaaaaagcaauaucagguucagcacgggagcuguuccuacacauuucuucugcccgagauggacaacugccggucuagcuccucuccuuaugugagcaaugcggugcagcgcgaugcuccgcucgaauacgacgauuccguccaaagacuucaggugcuggagaacaucauggaaaauaacacgcaguggcugaugaaacucgagaauuauauucaggacaacaugaagaaagaaaugguugagauccaacagaaugccgugcagaaccagaccgccgucaugauugagaucggaacaaaucugcugaaccaaaccgcugaacagacacggaagcucaccgauguggaggcccagguucugaaucaaacaacccgccuugaacugcagcuccuggagcauagccuuucuacgaacaagcuggagaaacagauccucgaccagaccuccgaaauuaauaagcugcaagauaaaaacagcuuccuggagaagaaagugcucgcuauggaagacaagcacaucauucagcugcagucuaucaaggaggaaaaagaucagcuucaaguccugguguccaagcagaacagcauuaucgaggagcucgagaaaaagauugugacagccaccgucaauaacucuguucugcagaaacagcaacaugaccuuauggagacagugaauaaccugcucaccaugauguccacgagcaauuccgcgaaggaucccacaguggccaaagaagaacagaucucuuuuagagacugugcugaagucuucaagagcggccacaccacaaacgggaucuacacccugaccuuuccuaauuccacagaggagauuaaggccuauugcgacauggaagcuggaggcgggggauggacgaucauucagcggcgcgaggauggcagcguggacuuccagagaaccuggaaagaauacaagguuggcuuugggaaccccucuggagaguacuggcugggcaaugaguucgugucccaacucacaaaccagcagcgguauguccugaaaauccaucuuaaggauugggaagggaaugaggccuacagccuguaugaacacuuuuaccucucuagcgaggaacugaacuaucgcauucaccuuaaaggacugaccggcacagcggggaagaucuccucuaucagccaaccuggaaaugacuucuccaccaaggauggcgacaacgauaaauguauuugcaaguguagccagaugcucacgggcggguggugguuugacgccugcggacccucuaaucugaacggcauguacuauccucagagacagaacacaaauaaauucaacgggaucaagugguacuacuggaaaggauccggcuauagccugaaggcuaccaccaugaugauucggccggccgauuucuga

SEQ ID NO: 7400 - RNA, 1491 nt, Artificial Sequence
  derived and/or modified sequence opt6 from Angiopoietin-2__Homo_sapiens__AAB63190
auguggcaaauagucuuuuucacucuaucaugugaccuaguacuagcagcagcauauaacaauuuuagaaaaucaauggacaguauaggaaaaaaacaauaccaaguacaacacgguuccugcuccuauacauucuuacuaccagaaauggacaauugcagaagcucaaguucaccauacguaucuaacgcaguacaaagagacgcaccauuagaauacgacgacucaguacaacgacuacaaguacuagaaaacauaauggaaaacaauacacaauggcuaaugaaauuagaaaauuauauccaagacaacaugaaaaaagaaaugguagaaauacaacaaaacgcaguccaaaaccaaacagcaguaaugauagaaaucggaacaaaccuacuaaaccaaacagcagaacaaacaagaaaacuuacagacguagaagcucaaguauuaaaccaaacaacaagacuagaacuacaacuacuagaacacucacuaaguacaaauaaacucgaaaaacaaauauuagaucaaacaagcgaaauaaauaaauuacaggauaaaaacucauuccucgagaaaaaaguauuagcaauggaagauaaacacauaauacaacuacaaucaauaaaagaagaaaaagaccaacuccaaguauuaguaaguaaacaaaauagcauaauagaagaauuagaaaaaaaaauaguaacugcaacaguaaacaacucaguacuacaaaaacaacaacacgaccuaauggaaacaguaaacaacuuacuaacaaugaugagcacaucaaacucagcaaaagacccaaccguagcaaaagaagaacaaaucucauuccgugauugcgccgaaguauucaaaucaggccacacaacaaacggcaucuauacauuaacauucccaaacucaacugaagaaauaaaagcauacugcgauauggaagccggaggaggcggauggaccauaauacaaagaagagaagacggaagcguagauuuucaaaggacauggaaagaauacaaaguaggauucgguaacccaaguggagaauacugguuaggaaacgaauucguaagccaacuaacaaaccaacaaagguacguacucaaaauacaccuuaaagauugggaaggaaacgaagcauauucccuauacgaacacuucuacuuaagcuccgaagaacuaaauuaucgaauacauuuaaaagggcuaacaggcacagccggaaaaauaucaaguauaagucaaccaggaaacgacuucucaacaaaagacggagacaacgacaaaugcauaugcaaaugcucacaaaugcuaaccggaggauggugguucgacgcaugcggaccaucaaaccucaacggaauguacuauccccagagacaaaacacaaacaaauuuaacggaauaaaaugguauuacuggaaaggaucaggauacagucucaaagcuacaacaaugaugauuagaccagcagauuucuaa

SEQ ID NO: 7401 - protein, 809 aa, Artificial Sequence [sequence omitted]

SEQ ID NO: 7402 - RNA, 2430 nt, Artificial Sequence
  Angiostatin__Homo_sapiens__AKG50977
auggaccauaaagagguaguucuucuccuucuuuuauuucugaaaucaggucucggggacucucuggaugacuacgucaauacucagggagcuuuccuguucaguuugucucggaagcagguggcagccaggagcguggaagaaugugcagccaagugugaggcggaaacaaacuucauuugcagggcuuuccaguaucacaguaaagaucagcaguguguggugauggcugagaacagcaagaccucccccaucgcuaggaugagagacgugguucuauucgagaagagaaucuaucucuccgagugcaagacuggaaaugggaagaacuacagagggaccacguccaaaacgaaaaguggugucaucugucaaaaauggagugucagcucuccgcacauacccaaguauucaccugaaaaguuuccuuuagcgggacuggaggagaacuacugcaggaacccagacaacgaugaaaagggacccugguguuacaccacugacccagagacccgauucgacuacugcgacaucccugagugugaagaugaaugcaugcacugcaguggagaacauuaugagggcaaaauuuccaagaccaugucggggauugaaugccagucuuggggcucucagagcccacaugcucacggauaccuuccuuccaaauuuccaaacaagaaucugaagaugaauuacugccguaacccggauggggagccccgcccauggugcuucaccacggaucccaacaaacgcugggaauucugugacaucccgagaugcaccacacccccaccaacuuccgggccaacguaucagugucugaagggaagaggugaaaacuaccgagggacagugucugucacugcaucugggcacaccugucaacgcuggagugcgcagagcccccacaagcacaacaggacccccgaaaacuuucccugcaaaaaucuggaggagaacuacugccguaacccugauggagaaacggcuccguggugcuacacaaccgacagcgaggugaggugggauuacugcaagauaccguccuguggguccuccacgacauccacggagcaucuggaugcccccgugccacccgagcaaaccccugucgcccaggacugcuacagaggcaauggggagaguuaccgaggcacgucuuccacaaccaucacgggaagaaaaugucaguccuggguauccaugacgccacaucggcaugagaagaccccaggaaacuucccaaaugcuggcuugacaaugaacuacugcaggaacccagacgcugauaaaagcccuuggugcuacaccacugauccaagagugagaugggaguacugcaaccugaagaaaugcucagagacagaacagcaggucacaaacuuuccagcuauugcgcagguucccaguguagaggaucuuucggaagacugcauguucgggaaugggaaaagguaccggggcaagagggccaccacgguggccggcguccccugccaggagugggcugcccaggagccccacagacacagcaucuucacuccagagacaaauccacgggcaggucuggagaaaaauuacugccguaauccugacggcgacgacaacggucccuggugcuacacgacaaacccacaaaagcucuuugacuacugcgacgucccucaguguguaaccucuucauuugauugcgggaagcccaagguggagccaaagaaguguccugcgagggugguagguggguguguguccaucccacacuccuggcccuggcaaauuagccuucgauacagguacagagggcacuucugcggaggcacuuuaauauccccggagugggugcugacugcuaagcacugccuggaaaaguccucaaguccuucaucauacaaggucauuuugggugcacacgaagaguaccaccuuggagaaggaguucaggagauagacguguccaagcuguucaaggagcccucuggggcggacauagccuugcucaagcugagcagcccugccgucaucacugacaagguaaucccggcuugucugccaaccccgaacuauguggucgccgaccggacagcguguuacaucacuggcuggggagaaaccaaaggcacguacggcgcuggcuuacuuaaggaagcccggcugcccgugauugagaacaaaguguguaaucgcuacgaguaucugggcgggaaggucagccccaacgagcugugugcggggcaucuggcuggaggcaucgacagcugccagggugacagcggagggccucuggugugcuuugagaaggacaaauacauuuuacaaggagucacuucuuggggucuuggcugugcgcuccccaauaagccugguguguauguccguguuucaagguuuguuacuuggauugaggaaauaaugagaagaaauuaa

SEQ ID NO: 7403 - RNA, 2430 nt, Artificial Sequence
  derived and/or modified sequence opt1 from Angiostatin__Homo_sapiens__AKG50977
auggaccacaaggaggugguccugcuccugcuccuguuccucaagagcggccugggggacucccuggacgacuacgugaacacccagggcgccuuccuguucagccugucccgcaagcaggucgccgcgcggagcguggaggagugcgccgccaagugcgaggccgagaccaacuucaucugccgcgccuuccaguaccacuccaaggaccagcagugcguggugauggcggagaacagcaagacgucccccaucgcccggaugcgcgacgucguccucuucgagaagcggaucuaccugagcgagugcaagaccgggaacggcaagaacuaccgcgggaccaccuccaagaccaagagcggcgugaucugccagaagugguccgugagcuccccgcacauccccaaguacagccccgagaaguucccccuggccggccucgaggagaacuacugccggaacccggacaacgacgagaaggggcccuggugcuacaccaccgaccccgagacccgcuucgacuacugcgacauccccgagugcgaggacgagugcaugcacugcuccggcgagcacuacgaggggaagaucagcaagacgauguccggcaucgagugccagagcugggggucccagagcccgcacgcccacggcuaccugcccagcaaguuccccaacaagaaccugaagaugaacuacugccggaaccccgacggcgagccgcgccccuggugcuucaccaccgaccccaacaagcggugggaguucugcgacaucccccgcugcaccacgccgccgcccaccuccgggcccaccuaccagugccucaagggccgcggggagaacuaccggggcaccgugagcgugacggcguccggccacacgugccagcgguggagcgcccagagcccccacaagcacaaccgcacccccgagaacuuccccugcaagaaccuggaggagaacuacugccggaaccccgacggggagaccgccccguggugcuacacgaccgacuccgagguccgcugggacuacugcaagauccccuccugcggcagcuccaccaccagcacggagcaccuggacgcccccgugcccccggagcagacccccguggcccaggacugcuaccgggggaacggcgaguccuaccgcgggaccagcuccaccacgaucaccggccggaagugccagagcugggucuccaugacgccccaccgccacgagaagaccccgggcaacuuccccaacgcggggcucaccaugaacuacugccgcaaccccgacgccgacaagagccccuggugcuacaccaccgacccgcgggugcgcugggaguacugcaaccugaagaagugcuccgagaccgagcagcaggucacgaacuuccccgccaucgcccaggugcccagcguggaggaccuguccgaggacugcauguucggcaacgggaagcgguaccgcggcaagcgggccaccaccguggcggggguccccugccaggagugggccgcccaggagccgcaccgccacagcaucuucacccccgagaccaacccccgggccggccucgagaagaacuacugccgcaaccccgacggcgacgacaacgggccguggugcuacacgaccaacccccagaagcuguucgacuacugcgacgugccccagugcgugaccagcuccuucgacugcggcaagcccaaggucgagccgaagaagugccccgcccggguggucgggggcugcgugagcaucccccacuccuggcccuggcagaucagccugcgcuaccgguaccgcgggcacuucugcggcggcacccucaucuccccggagugggugcugacggcgaagcacugccuggagaaguccagcagccccuccagcuacaaggucauccucggggcccacgaggaguaccaccugggcgagggggugcaggagaucgacguguccaagcuguucaaggagcccagcggcgccgacaucgcccuccugaagcuguccagccccgccgucaucaccgacaaggugaucccggcgugccuccccacccccaacuacguggucgccgaccggaccgccugcuacaucacgggcuggggcgagaccaaggggaccuacggggccggccugcugaaggaggcgcgccucccggugaucgagaacaaggugugcaaccgguacgaguaccucgggggcaaggucucccccaacgagcugugcgccggccaccuggccgggggcaucgacagcugccagggggacuccggcgggccccuggugugcuucgagaaggacaaguacauccugcagggcgugaccagcuggggccucgggugcgcccugcccaacaagccgggcgucuacgugcgcgugagccgguucgucacguggaucgaggagaucaugcgccggaacuga

SEQ ID NO: 7404 - RNA, 2430 nt, Artificial Sequence
  derived and/or modified sequence opt2 from Angiostatin__Homo_sapiens__AKG50977
auggaccacaaggaggucguccuccuccuccuccucuuccucaaguccggccucggcgacucccucgacgacuacgucaacacccagggcgccuuccucuucucccucucccgcaagcaggucgccgcccgcuccgucgaggagugcgccgccaagugcgaggccgagaccaacuucaucugccgcgccuuccaguaccacuccaaggaccagcagugcgucgucauggccgagaacuccaagaccucccccaucgcccgcaugcgcgacgucguccucuucgagaagcgcaucuaccucuccgagugcaagaccggcaacggcaagaacuaccgcggcaccaccuccaagaccaaguccggcgucaucugccagaagugguccgucuccuccccccacauccccaaguacucccccgagaaguucccccucgccggccucgaggagaacuacugccgcaaccccgacaacgacgagaagggccccuggugcuacaccaccgaccccgagacccgcuucgacuacugcgacauccccgagugcgaggacgagugcaugcacugcuccggcgagcacuacgagggcaagaucuccaagaccauguccggcaucgagugccaguccuggggcucccaguccccccacgcccacggcuaccuccccuccaaguuccccaacaagaaccucaagaugaacuacugccgcaaccccgacggcgagccccgccccuggugcuucaccaccgaccccaacaagcgcugggaguucugcgacaucccccgcugcaccacccccccccccaccuccggccccaccuaccagugccucaagggccgcggcgagaacuaccgcggcaccgucuccgucaccgccuccggccacaccugccagcgcugguccgcccaguccccccacaagcacaaccgcacccccgagaacuuccccugcaagaaccucgaggagaacuacugccgcaaccccgacggcgagaccgcccccuggugcuacaccaccgacuccgagguccgcugggacuacugcaagauccccuccugcggcuccuccaccaccuccaccgagcaccucgacgcccccgucccccccgagcagacccccgucgcccaggacugcuaccgcggcaacggcgaguccuaccgcggcaccuccuccaccaccaucaccggccgcaagugccaguccugggucuccaugaccccccaccgccacgagaagacccccggcaacuuccccaacgccggccucaccaugaacuacugccgcaaccccgacgccgacaagucccccuggugcuacaccaccgacccccgcguccgcugggaguacugcaaccucaagaagugcuccgagaccgagcagcaggucaccaacuuccccgccaucgcccagguccccuccgucgaggaccucuccgaggacugcauguucggcaacggcaagcgcuaccgcggcaagcgcgccaccaccgucgccggcguccccugccaggagugggccgcccaggagccccaccgccacuccaucuucacccccgagaccaacccccgcgccggccucgagaagaacuacugccgcaaccccgacggcgacgacaacggccccuggugcuacaccaccaacccccagaagcucuucgacuacugcgacgucccccagugcgucaccuccuccuucgacugcggcaagcccaaggucgagcccaagaagugccccgcccgcgucgucggcggcugcgucuccaucccccacuccuggcccuggcagaucucccuccgcuaccgcuaccgcggccacuucugcggcggcacccucaucucccccgaguggguccucaccgccaagcacugccucgagaaguccuccucccccuccuccuacaaggucauccucggcgcccacgaggaguaccaccucggcgagggcguccaggagaucgacgucuccaagcucuucaaggagcccuccggcgccgacaucgcccuccucaagcucuccucccccgccgucaucaccgacaaggucauccccgccugccuccccacccccaacuacgucgucgccgaccgcaccgccugcuacaucaccggcuggggcgagaccaagggcaccuacggcgccggccuccucaaggaggcccgccuccccgucaucgagaacaaggucugcaaccgcuacgaguaccucggcggcaaggucucccccaacgagcucugcgccggccaccucgccggcggcaucgacuccugccagggcgacuccggcggcccccucgucugcuucgagaaggacaaguacauccuccagggcgucaccuccuggggccucggcugcgcccuccccaacaagcccggcgucuacguccgcgucucccgcuucgucaccuggaucgaggagaucaugcgccgcaacuga

SEQ ID NO: 7405 - RNA, 2430 nt, Artificial Sequence
  derived and/or modified sequence opt3 from Angiostatin__Homo_sapiens__AKG50977
auggaccacaaggaggugguccugcuccuucuguuguucuuaaaaagcggccugggggauucccuagacgauuacguuaacacccagggagccuuucucuucucucugucaagaaagcaaguggcugcaaggaguguagaagagugcgccgcgaaaugugaagcugagacaaauuuuaucugccgggccuuccaguaucauagcaaggaccagcaguguguggucauggcagaaaacuccaaaacuucucccauugcccgcaugcgagaugugguucuuuuugagaagcguauauaccugucggagugcaagacggguaauggcaaaaacuauagagggaccacaucaaagacuaaaagcggagugaucugucaaaaguggagugucuccucuccucacauuccaaaauacagcccggaaaaguuccccuuggcuggccucgaggaaaauuauugcaggaacccugacaaugaugagaaggguccaugguguuacaccacagaccccgagacccgguuugauuauugcgacaucccugaaugugaggaugaaugcaugcauuguuccggggagcacuacgaaggaaaaauuucaaagacuaugaguggcaucgagugccagagcuggggcucucaguccccacaugcacacggguaccugcccucaaaauucccuaacaagaaucugaaaaugaacuauugccgcaauccagacggagagccgagacccugguguuuuacaaccgauccuaacaagaggugggaguucugcgacauaccacgguguacgacucccccuccaaccagcggucccacauaccagugccucaaaggccgcggggaaaauuaucgaggaacugugaguguaaccgccucuggccacacaugucaaagaugguccgcucagagcccgcauaagcacaacaggaccccugaaaauuuucccugcaagaacuuagaggaaaacuacugucggaauccagacggugagacggccccuuggugcuauacuacagauucggagguucguugggacuacuguaaaauccccucuugcggguccucaaccacaaguacugaacaucuggaugcgccagugcccccugagcagaccccagucgcacaggacuguuaucgcggaaacggcgaaagcuacagaggcacguccucuaccacaauuacugggaggaagugccaaagcugggugucaaugaccccgcaccggcacgagaaaacacccggaaauuucccuaacgccggucuuacuaugaauuacugccgaaacccagaugcugacaagagucccugguguuauaccacagauccucgcgugagaugggaauacugcaauuugaaaaaguguuccgagaccgagcagcaggucacuaacuuuccagccaucgcacaaguucccagcguggaagaccugucugaggauugcauguucggcaaugggaagagguaucggggaaaacgcgcuacgacaguagccggcgugccgugucaggaaugggcggcccaggagccucauagacacucaauuuucaccccagagacuaaccccagggcaggucuagaaaagaauuacugccguaacccugacggggaugacaauggccccugguguuauaccacaaacccacagaaacucuuugacuacugcgaugucccucaaugugugaccaguagcuucgacugcggaaagcccaaaguugagccaaagaaguguccggcucggguggucggcgggugcguguccaucccucauucuuggcccuggcagauaucgcugcgauauagauacaggggacacuuuugcgguggcacucuuauuagcccagaauggguacugacagccaaacauuguuuggagaaguccucaagucccucuagcuacaaaguuauccucggggcucacgaagaguaucaccugggagagggcgugcaggaaauugaugucuccaaguuauucaaagagccuucaggugccgacaucgcacugcucaaacuuagcucuccagccgugaucacggauaaggucauucccgcuugccugccuaccccgaauuacgugguugcggaccgcacugcauguuauauaacaggguggggcgaaaccaagggaacauacggcgccggguugcuaaaggaggcucggcugccagugaucgaaaacaaaguaugcaacagauaugaguaccucggagguaaggucucccccaaugagcugugugccggccaucuugcagggggaauugauaguugccagggcgacagcggugggccucugguguguuuugaaaaagauaaguauaucuugcaaggcguuacuucuuggggacucggcugcgcccugccaaacaaacccgggguguacgucagggugucccgcuucguaaccuggauagaggaaauuaugcgacggaauuga

SEQ ID NO: 7406 - RNA, 2430 nt, Artificial Sequence
  derived and/or modified sequence opt4 from Angiostatin__Homo_sapiens__AKG50977
auggaccacaaggagguggugcugcugcugcugcuguuccugaagagcggccugggcgacagccuggacgacuacgugaacacccagggcgccuuccuguucagccugagcagaaagcagguggccgccagaagcguggaggagugcgccgccaagugcgaggccgagaccaacuucaucugcagagccuuccaguaccacagcaaggaccagcagugcguggugauggccgagaacagcaagaccagccccaucgccagaaugagagacguggugcuguucgagaagagaaucuaccugagcgagugcaagaccggcaacggcaagaacuacagaggcaccaccagcaagaccaagagcggcgugaucugccagaaguggagcgugagcagcccccacauccccaaguacagccccgagaaguucccccuggccggccuggaggagaacuacugcagaaaccccgacaacgacgagaagggccccuggugcuacaccaccgaccccgagaccagauucgacuacugcgacauccccgagugcgaggacgagugcaugcacugcagcggcgagcacuacgagggcaagaucagcaagaccaugagcggcaucgagugccagagcuggggcagccagagcccccacgcccacggcuaccugcccagcaaguuccccaacaagaaccugaagaugaacuacugcagaaaccccgacggcgagcccagacccuggugcuucaccaccgaccccaacaagagaugggaguucugcgacauccccagaugcaccacccccccccccaccagcggccccaccuaccagugccugaagggcagaggcgagaacuacagaggcaccgugagcgugaccgccagcggccacaccugccagagauggagcgcccagagcccccacaagcacaacagaacccccgagaacuuccccugcaagaaccuggaggagaacuacugcagaaaccccgacggcgagaccgcccccuggugcuacaccaccgacagcgaggugagaugggacuacugcaagauccccagcugcggcagcagcaccaccagcaccgagcaccuggacgcccccgugccccccgagcagacccccguggcccaggacugcuacagaggcaacggcgagagcuacagaggcaccagcagcaccaccaucaccggcagaaagugccagagcugggugagcaugaccccccacagacacgagaagacccccggcaacuuccccaacgccggccugaccaugaacuacugcagaaaccccgacgccgacaagagccccuggugcuacaccaccgaccccagagugagaugggaguacugcaaccugaagaagugcagcgagaccgagcagcaggugaccaacuuccccgccaucgcccaggugcccagcguggaggaccugagcgaggacugcauguucggcaacggcaagagauacagaggcaagagagccaccaccguggccggcgugcccugccaggagugggccgcccaggagccccacagacacagcaucuucacccccgagaccaaccccagagccggccuggagaagaacuacugcagaaaccccgacggcgacgacaacggccccuggugcuacaccaccaacccccagaagcuguucgacuacugcgacgugccccagugcgugaccagcagcuucgacugcggcaagcccaagguggagcccaagaagugccccgccagaguggugggcggcugcgugagcaucccccacagcuggcccuggcagaucagccugagauacagauacagaggccacuucugcggcggcacccugaucagccccgagugggugcugaccgccaagcacugccuggagaagagcagcagccccagcagcuacaaggugauccugggcgcccacgaggaguaccaccugggcgagggcgugcaggagaucgacgugagcaagcuguucaaggagcccagcggcgccgacaucgcccugcugaagcugagcagccccgccgugaucaccgacaaggugauccccgccugccugcccacccccaacuacgugguggccgacagaaccgccugcuacaucaccggcuggggcgagaccaagggcaccuacggcgccggccugcugaaggaggccagacugcccgugaucgagaacaaggugugcaacagauacgaguaccugggcggcaaggugagccccaacgagcugugcgccggccaccuggccggcggcaucgacagcugccagggcgacagcggcggcccccuggugugcuucgagaaggacaaguacauccugcagggcgugaccagcuggggccugggcugcgcccugcccaacaagcccggcguguacgugagagugagcagauucgugaccuggaucgaggagaucaugagaagaaacuga

SEQ ID NO: 7407 - RNA, 2430 nt, Artificial Sequence
  derived and/or modified sequence opt5 from Angiostatin__Homo_sapiens__AKG50977
auggaccacaaggaggugguccugcuccugcuucuguuccucaaaagcggccugggggauucccuugacgauuacguuaacacccagggagccuuucuguucucucucagcagaaagcaaguggcugcccgguccguggaagagugcgcggcuaaaugugaagccgagacaaauuuuaucugccgcgccuuccaguaucauucuaaggaccagcagugugucgugauggcugaaaacagcaaaacgucccccauugccagaaugcgggauguugugcuguuugagaagcgcaucuaccugucugagugcaagaccggcaaugggaaaaacuauagaggaacaaccagcaagacaaaauccggcgucauuugucaaaaguggagcgugucuuccccucacaucccgaaauacagccccgaaaaguucccucucgcugggcuggaggaaaauuauugccggaaccccgacaaugaugagaagggaccuugguguuacaccacagaccccgagacccgcuuugauuauugcgacauuccugaaugugaggaugaaugcaugcauuguucuggcgagcacuacgaaggcaaaaucuccaagacgaugagcgggaucgagugccagucuuggggaucccagagcccgcaugcccacggcuaccuucccuccaaauucccuaacaagaaucugaaaaugaacuauugcagaaaucccgacggggagccucggcccugguguuuuaccacagauccgaacaagcgcugggaguucugcgacauuccuagauguaccacacccccucccaccucuggacccacguaccagugccucaaaggccgcggggaaaauuaucggggaacaguuagcgugaccgcguccggccacacaugucaaagauggagcgcccagucuccucauaagcacaaccggaccccggaaaauuuucccugcaagaaccuggaggaaaacuacugucgcaauccugacggcgagaccgcucccuggugcuauacaacggauuccgaggucagaugggacuacuguaaaaucccuagcugcgggucuagcaccacauccaccgaacaucuugaugcccccgugccgccugagcagacacccguggcucaggacuguuaucggggaaacggcgaaucuuacagagggaccagcuccacgacaauuaccggacgcaagugccaaagcugggucucuaugaccccucaccggcacgagaaaacacccggcaauuucccuaacgccgggcugaccaugaauuacugcagaaaccccgaugcggacaaguccccgugguguuauacaacggauccucgcguucggugggaauacugcaaucucaaaaaguguagcgagaccgagcaacaggugacaaacuuucccgccaucgcucaggugcccucugucgaagaccuguccgaggauugcauguucggaaauggcaagagauaucgcggcaaacgggccaccacaguggcugggguuccuugucaggaaugggccgcccaggagccgcauagacacagcauuuucacccccgagacgaacccucgcgcuggacuggaaaagaauuacugccggaaccccgacggcgaugacaaugggccuugguguuauaccacaaacccccagaaacucuuugacuacugcgaugugccucaaugugucaccuccucuuucgacugcggaaagcccaaaguggagccgaagaaguguccugcgagaguugugggcgggugcgucagcaucccccauuccuggccuuggcagauuucucugcgcuaucgguacagaggccacuuuugcggaggcacacuuaucagccccgaaugggugcugaccgccaaacauugucucgagaaguccagcucuccguccagcuacaaagucauccugggggcucacgaagaguaucaccuuggagagggcgugcaggaaauugauguuucuaagcuguucaaagagccuuccggggccgacaucgcccuccugaagcugagcucucccgcugugauuacggauaaggucaucccugccugccuccccacacccaauuacgugguugcggaccggaccgcuuguuauauuacaggauggggcgaaaccaaagggaccuacggcgccggacugcuuaaggaggcccgccugccugugaucgaaaacaaagucugcaacagauaugaguaccucggcgggaaggugagcccgaaugagcugugugcuggacaucuugccggcgggaucgauuccugccagggagacagcggcgggccccugguguguuuugaaaaagauaaguauauucuccaaggcguuacaucuuggggacugggcugcgcucugccuaacaaacccggggucuacgugcggguguccagauucgucacguggaucgaggaaauuaugcgccggaauuga

SEQ ID NO: 7408 - RNA, 2430 nt, Artificial Sequence
  derived and/or modified sequence opt6 from Angiostatin__Homo_sapiens__AKG50977
auggaucauaaagagguaguauuacuauuguuacuauuuuuaaaauccggacuaggagacagucucgacgacuauguaaauacccagggugcauuucuauuuucauuaucaagaaaacaaguagcagcacgaagcguggaagaaugcgcagcuaaaugugaggcugaaacaaauuuuauauguagagcauuccaauaucauagcaaagaucaacaaugcguuguaauggccgaaaacucaaaaacaaguccuaucgcgagaaugagagauguaguacuuuucgaaaaaagaauuuaucuuagcgaauguaaaaccggaaauggcaaaaauuacagaggaacaacaucaaaaaccaaaagugguguuaucugucaaaaauggucuguaucuagcccacauauuccaaaauauucaccugaaaaauucccguuagcaggucuagaagagaauuauuguagaaauccugauaacgaugaaaaagguccauggugcuacacgacagaucccgaaacuagauucgauuacugugauauaccugaaugcgaagaugaguguaugcacugcucaggugaacauuacgaaggcaaaauuucaaaaacaaugucagguauagaaugucaaucauggggaucucaaucaccacacgcacaugguuauuuacccaguaaauucccaaauaaaaaucuaaaaaugaacuauuguagaaacccggacggugaacccagaccaugguguuuuacuacagauccaaacaaaagaugggaauuuugugauauaccaagauguacaacaccucccccuacaucaggaccuacauaucaauguuuaaaagggagaggagaaaacuauagagguacagucucaguaacagcaaguggacauacaugucaaagauggucagcacaaaguccccauaaacauaauagaacucccgaaaauuucccuugcaaaaaucuagaagaaaacuauugcagaaacccagacggagaaacagcaccguggugcuacacuacagacagugaaguaagaugggauuacuguaagauaccuucauguggaagcucaacuacaaguacagaacaccuagacgcaccuguuccaccugaacaaacuccggucgcacaagauuguuaucgcgguaauggagaaucauacagggguacaagcucaacuaccauaacaggcagaaaaugccaaaguuggguaaguaugacuccucaucgacacgaaaaaaccccaggaaauuuuccaaacgcaggacugacaaugaacuacugcagaaacccagaugccgauaaauccccaugguguuacacaacagauccgagaguacgaugggaguauuguaaccuuaaaaaauguagugaaacagaacaacaaguaacaaauuucccagcaauugcacaaguuccuucuguagaagaccuaucagaagauuguauguuuggcaacggaaaaagauaucgcgguaaaagagcaacaacaguagcaggcguaccaugucaagaaugggcugcucaagaaccacaccgacauaguauauucacgccagaaacaaaucccagagcuggcuuagagaaaaauuauuguagaaauccagauggagacgauaaugggcccugguguuauacaacaaauccucaaaaacuuuucgauuacugcgauguaccacaaugcguuacaucaucauuugacuguggaaaaccaaaaguggaaccuaagaaauguccagcaagaguaguaggaggcuguguaucgauaccacacucauggccauggcagauuagucuaagauauagguacagaggucauuucuguggaggaacccuaauuaguccagaauggguccuaacagcaaaacauugucuggaaaaaucuagcagucccucuagcuacaaaguaauacucggugcccacgaagaauaucacuuaggagaagguguccaagaaauugauguaucaaaacuauucaaagaaccaagcggcgcagauauagcauuauuaaaacuaaguagcccugcagucauaaccgauaaagucauaccugcaugucuaccaaccccaaauuauguaguagcagauagaacugcuuguuacauaacaggcuggggugaaaccaaaggaacauauggagccggacuacuaaaagaagccagguuaccaguaauugaaaauaaaguauguaacagauaugaauaucuaggaggaaaaguaucaccaaacgaauuaugugcaggacaccuagcgggaggaauugauucaugccaaggugauucagguggaccauuaguauguuucgaaaaagauaaauacauauuacaaggaguaacaucauggggucugggaugcgcauuaccaaauaagccagguguuuaugucagagucucucgcuuuguaacuuggauagaagaaauaaugaggagaaauuaa

SEQ ID NO: 7409 - protein, 810 aa, Artificial Sequence
  Angiostatin__Homo_sapiens__P00747
MEHKEVVLLLLLFLKSGQGEPLDDYVNTQGASLFSVTKKQLGAGSIEECAAKCEEDEEFTCRAFQYHSKEQQCVIMAENRKSSIIIRMRDVVLFEKKVYLSECKTGNGKNYRGTMSKTKNGITCQKWSSTSPHRPRFSPATHPSEGLEENYCRNPDNDPQGPWCYTTDPEKRYDYCDILECEEECMHCSGENYDGKISKTMSGLECQAWDSQSPHAHGYIPSKFPNKNLKKNYCRNPDRELRPWCFTTDPNKRWELCDIPRCTTPPPSSGPTYQCLKGTGENYRGNVAVTVSGHTCQHWSAQTPHTHNRTPENFPCKNLDENYCRNPDGKRAPWCHTTNSQVRWEYCKIPSCDSSPVSTEQLAPTAPPELTPVVQDCYHGDGQSYRGTSSTTTTGKKCQSWSSMTPHRHQKTPENYPNAGLTMNYCRNPDADKGPWCFTTDPSVRWEYCNLKKCSGTEASVVAPPPVVLLPDVETPSEEDCMFGNGKGYRGKRATTVTGTPCQDWAAQEPHRHSIFTPETNPRAGLEKNYCRNPDGDVGGPWCYTTNPRKLYDYCDVPQCAAPSFDCGKPQVEPKKCPGRVVGGCVAHPHSWPWQVSLRTRFGMHFCGGTLISPEWVLTAAHCLEKSPRPSSYKVILGAHQEVNLEPHVQEIEVSRLFLEPTRKDIALLKLSSPAVITDKVIPACLPSPNYVVADRTECFITGWGETQGTFGAGLLKEAQLPVIENKVCNRYEFLNGRVQSTELCAGHLAGGTDSCQGDSGGPLVCFEKDKYILQGVTSWGLGCARPNKPGVYVRVSRFVTWIEGVMRNN

SEQ ID NO: 7410 - RNA, 2433 nt, Artificial Sequence
  Angiostatin__Homo_sapiens__AAN85555
auggaacauaaggaagugguucuucuacuucuuuuauuucugaaaucaggucaaggagagccucuggaugacuaugugaauacccagggggcuucacuguucagugucacuaagaagcagcugggagcaggaaguauagaagaaugugcagcaaaaugugaggaggacgaagaauucaccugcagggcauuccaauaucacaguaaagagcaacaaugugugauaauggcugaaaacaggaaguccuccauaaucauuaggaugagagauguaguuuuauuugaaaagaaaguguaucucucagagugcaagacugggaauggaaagaacuacagagggacgauguccaaaacaaaaaauggcaucaccugucaaaaauggaguuccacuucuccccacagaccuagauucucaccugcuacacaccccucagagggacuggaggagaacuacugcaggaauccagacaacgauccgcaggggcccuggugcuauacuacugauccagaaaagagauaugacuacugcgacauucuugagugugaagaggaauguaugcauugcaguggagaaaacuaugacggcaaaauuuccaagaccaugucuggacuggaaugccaggccugggacucucagagcccacacgcucauggauacauuccuuccaaauuuccaaacaagaaccugaagaagaauuacugucguaaccccgauagggagcugcggccuugguguuucaccaccgaccccaacaagcgcugggaacuuugcgacaucccccgcugcacaacaccuccaccaucuucuggucccaccuaccagugucugaagggaacaggugaaaacuaucgcgggaauguggcuguuaccguguccgggcacaccugucagcacuggagugcacagaccccucacacacauaacaggacaccagaaaacuuccccugcaaaaauuuggaugaaaacuacugccgcaauccugacggaaaaagggccccauggugccauacaaccaacagccaagugcggugggaguacuguaagauaccguccugugacuccuccccaguauccacggaacaauuggcucccacagcaccaccugagcuaaccccugugguccaggacugcuaccauggugauggacagagcuaccgaggcacauccuccaccaccaccacaggaaagaagugucagucuuggucaucuaugacaccacaccggcaccagaagaccccagaaaacuacccaaaugcuggccugacaaugaacuacugcaggaauccagaugccgauaaaggccccugguguuuuaccacagaccccagcgucaggugggaguacugcaaccugaaaaaaugcucaggaacagaagcgaguguuguagcaccuccgccuguuguccugcuuccagauguagagacuccuuccgaagaagacuguauguuugggaaugggaaaggauaccgaggcaagagggcgaccacuguuacugggacgccaugccaggacugggcugcccaggagccccauagacacagcauuuucacuccagagacaaauccacgggcgggucuggaaaaaaauuacugccguaacccugauggugauguagguggucccuggugcuacacgacaaauccaagaaaacuuuacgacuacugugaugucccucagugugcggccccuucauuugauugugggaagccucaaguggagccgaagaaauguccuggaaggguuguagggggguguguggcccacccacauuccuggcccuggcaagucagucuuagaacaagguuuggaaugcacuucuguggaggcaccuugauauccccagaguggguguugacugcugcccacugcuuggagaaguccccaaggccuucauccuacaaggucauccugggugcacaccaagaagugaaucucgaaccgcauguucaggaaauagaagugucuaggcuguucuuggagcccacacgaaaagauauugccuugcuaaagcuaagcaguccugccgucaucacugacaaaguaaucccagcuugucugccauccccaaauuauguggucgcugaccggaccgaauguuucaucacuggcuggggagaaacccaagguacuuuuggagcuggccuucucaaggaagcccagcucccugugauugagaauaaagugugcaaucgcuaugaguuucugaauggaagaguccaauccaccgaacucugugcugggcauuuggccggaggcacugacaguugccagggugacaguggagggccucugguuugcuucgagaaggacaaauacauuuuacaaggagucacuucuuggggucuuggcugugcacgccccaauaagccuggugucuauguucguguuucaagguuuguuacuuggauugagggagugaugagaaauaauuaa

SEQ ID NO: 7411 - RNA, 2433 nt, Artificial Sequence
  derived and/or modified sequence opt1 from Angiostatin__Homo_sapiens__AAN85555
auggagcacaaggaggugguccugcuccugcugcuguuccucaagagcggccagggggagccccuggacgacuacgugaacacccagggcgccucccucuucagcgugaccaagaagcagcugggggccggcuccaucgaggagugcgcggccaagugcgaggaggacgaggaguucacgugccgcgccuuccaguaccacagcaaggagcagcagugcgucaucauggccgagaaccggaaguccagcaucaucauccgcaugcgggacguggugcuguucgagaagaaggucuaccucuccgagugcaagaccgggaacggcaagaacuaccgcggcaccaugagcaagaccaagaacgggaucacgugccagaagugguccagcaccuccccgcaccggccccgcuucagccccgccacccaccccuccgagggccuggaggagaacuacugccggaacccggacaacgacccccaggggcccuggugcuacaccacggaccccgagaagcgcuacgacuacugcgacauccuggagugcgaggaggagugcaugcacugcagcggcgagaacuacgacgggaagaucuccaagaccaugagcggccucgagugccaggcgugggacucccagagcccgcacgcccacggcuacauccccuccaaguuccccaacaagaaccugaagaagaacuacugccggaaccccgaccgcgagcugcggccguggugcuucaccaccgaccccaacaagcgcugggagcucugcgacaucccccggugcacgacgcccccgcccagcagcgggcccaccuaccagugccucaagggcaccggggagaacuaccgcggcaacguggccgugaccgucuccggccacacgugccagcacuggagcgcccagacgccccacacccacaaccggaccccggagaacuuccccugcaagaaccuggacgagaacuacugccgcaaccccgacgggaagcgggcgcccuggugccacaccaccaacucccaggugcgcugggaguacugcaagaucccgagcugcgacuccagccccguguccaccgagcagcuggcccccaccgcgcccccggagcugacccccgucgugcaggacugcuaccacggcgacgggcagagcuaccggggcaccuccagcaccacgaccaccgggaagaagugccaguccuggagcuccaugacgccccaccgccaccagaagaccccggagaacuaccccaacgccggccugaccaugaacuacugccggaaccccgacgccgacaagggccccuggugcuucaccaccgacccgagcgugcgcugggaguacugcaaccucaagaagugcuccgggacggaggccagcgucguggccccgccgcccgugguccugcugcccgacguggagacccccuccgaggaggacugcauguucggcaacgggaagggcuaccgcgggaagcgggccaccaccgugaccggcacgcccugccaggacugggccgcccaggagccccaccgccacagcaucuucacccccgagaccaacccccgggcgggccucgagaagaacuacugccgcaaccccgacggggacgucggcgggcccuggugcuacaccacgaacccgcggaagcuguacgacuacugcgacgugccccagugcgccgcccccuccuucgacugcggcaagccccagguggagccgaagaagugccccgggcgcgucgugggcggcugcgucgcccacccccacagcuggcccuggcaggucagccugcggacccgcuucgggaugcacuucugcggcgggacccucaucuccccggagugggugcugaccgccgcgcacugccuggagaaguccccgcggcccagcagcuacaaggugauccucggcgcccaccaggaggugaaccuggagccccacgugcaggagaucgaggucucccgccuguuccucgagcccacgcggaaggacaucgcccugcugaagcucagcucccccgccgugaucaccgacaaggugauccccgccugccugccgagccccaacuacgucguggcggaccgcaccgagugcuucaucaccggcuggggcgagacgcaggggaccuucggggccggccugcucaaggaggcccagcugcccgugaucgagaacaaggucugcaaccgguacgaguuccugaacgggcgcgugcaguccaccgagcucugcgccggccaccuggcgggcgggaccgacagcugccagggcgacuccgggggcccccuggugugcuucgagaaggacaaguacauccuccagggggucacgagcuggggccugggcugcgcccggccgaacaagcccgggguguacgugcgcgucucccgguucgugaccuggaucgagggcgugaugcgcaacaacuga

SEQ ID NO: 7412 - RNA, 2433 nt, Artificial Sequence
  derived and/or modified sequence opt2 from Angiostatin__Homo_sapiens__AAN85555
auggagcacaaggaggucguccuccuccuccuccucuuccucaaguccggccagggcgagccccucgacgacuacgucaacacccagggcgccucccucuucuccgucaccaagaagcagcucggcgccggcuccaucgaggagugcgccgccaagugcgaggaggacgaggaguucaccugccgcgccuuccaguaccacuccaaggagcagcagugcgucaucauggccgagaaccgcaaguccuccaucaucauccgcaugcgcgacgucguccucuucgagaagaaggucuaccucuccgagugcaagaccggcaacggcaagaacuaccgcggcaccauguccaagaccaagaacggcaucaccugccagaagugguccuccaccuccccccaccgcccccgcuucucccccgccacccaccccuccgagggccucgaggagaacuacugccgcaaccccgacaacgacccccagggccccuggugcuacaccaccgaccccgagaagcgcuacgacuacugcgacauccucgagugcgaggaggagugcaugcacugcuccggcgagaacuacgacggcaagaucuccaagaccauguccggccucgagugccaggccugggacucccaguccccccacgcccacggcuacauccccuccaaguuccccaacaagaaccucaagaagaacuacugccgcaaccccgaccgcgagcuccgccccuggugcuucaccaccgaccccaacaagcgcugggagcucugcgacaucccccgcugcaccacccccccccccuccuccggccccaccuaccagugccucaagggcaccggcgagaacuaccgcggcaacgucgccgucaccgucuccggccacaccugccagcacugguccgcccagaccccccacacccacaaccgcacccccgagaacuuccccugcaagaaccucgacgagaacuacugccgcaaccccgacggcaagcgcgcccccuggugccacaccaccaacucccagguccgcugggaguacugcaagauccccuccugcgacuccucccccgucuccaccgagcagcucgcccccaccgccccccccgagcucacccccgucguccaggacugcuaccacggcgacggccaguccuaccgcggcaccuccuccaccaccaccaccggcaagaagugccaguccugguccuccaugaccccccaccgccaccagaagacccccgagaacuaccccaacgccggccucaccaugaacuacugccgcaaccccgacgccgacaagggccccuggugcuucaccaccgaccccuccguccgcugggaguacugcaaccucaagaagugcuccggcaccgaggccuccgucgucgcccccccccccgucguccuccuccccgacgucgagacccccuccgaggaggacugcauguucggcaacggcaagggcuaccgcggcaagcgcgccaccaccgucaccggcacccccugccaggacugggccgcccaggagccccaccgccacuccaucuucacccccgagaccaacccccgcgccggccucgagaagaacuacugccgcaaccccgacggcgacgucggcggccccuggugcuacaccaccaacccccgcaagcucuacgacuacugcgacgucccccagugcgccgcccccuccuucgacugcggcaagccccaggucgagcccaagaagugccccggccgcgucgucggcggcugcgucgcccacccccacuccuggcccuggcaggucucccuccgcacccgcuucggcaugcacuucugcggcggcacccucaucucccccgaguggguccucaccgccgcccacugccucgagaaguccccccgccccuccuccuacaaggucauccucggcgcccaccaggaggucaaccucgagccccacguccaggagaucgaggucucccgccucuuccucgagcccacccgcaaggacaucgcccuccucaagcucuccucccccgccgucaucaccgacaaggucauccccgccugccuccccucccccaacuacgucgucgccgaccgcaccgagugcuucaucaccggcuggggcgagacccagggcaccuucggcgccggccuccucaaggaggcccagcuccccgucaucgagaacaaggucugcaaccgcuacgaguuccucaacggccgcguccaguccaccgagcucugcgccggccaccucgccggcggcaccgacuccugccagggcgacuccggcggcccccucgucugcuucgagaaggacaaguacauccuccagggcgucaccuccuggggccucggcugcgcccgccccaacaagcccggcgucuacguccgcgucucccgcuucgucaccuggaucgagggcgucaugcgcaacaacuga

SEQ ID NO: 7413 - RNA, 2433 nt, Artificial Sequence
  derived and/or modified sequence opt3 from Angiostatin__Homo_sapiens__AAN85555
auggagcacaaggaagugguccugcuccuucuguuguucuuaaaaagcggccagggggagccccuggacgauuacguuaacacccaaggagccucccuauuuucugugacaaagaaacagcucggugcuggcucaaucgaagagugcgcagccaagugugaagaggacgaggaguucacuugcagagcguuucaguaucauaguaaagaacagcaauguguaauuauggcugaaaauaggaaaagcuccauaaucauucggaugcgcgaugugguccuguucgagaagaaaguguaccuuucugagugcaagacggggaacggaaagaauuaucgaggcaccaugucgaagaccaaaaacgguaucacuugucagaaguggucaagcaccaguccucaccguccaagauuuuccccggccacacaucccucugaagggcuggaggaaaauuacugcaggaacccugacaaugauccacagggacccugguguuauaccacugacccugagaagcgguacgauuauugcgacauuuuggaaugugaggaggaaugcaugcacuguagcggcgagaacuacgauggcaaaaucuccaagacaaugucagggcucgaaugccaggcaugggacagucaaagcccacaugcccacggauacauacccucuaaauucccuaauaagaaccugaaaaagaauuauugccgcaacccagauagagagcugaggccgugguguuuuaccacggaccccaauaaacggugggaacucugcgauaucccucgcuguacuaccccacccccuuccucagguccaacauaccagugcuuaaagggcacuggggagaacuaucgaggaaauguugcugugaccgucagcggccacacaugucagcauuggagugcacagacaccccacacgcauaacagaacuccggagaacuucccuugcaagaaucuggacgaaaacuacuguaggaaucccgacgguaaacgggccccauggugccacacaaccaacucucaagugcguugggaguauuguaagauuccuuccugcgauagcucgcccguaucuacugaacagcuugcuccaacagccccuccugaguugaccccaguugugcaggacuguuaccacggggauggacaauccuaucgcggcacgucaaguaccacaacuaccggcaaaaagugccagagcugguccucuaugacaccgcauagacaccagaaaacucccgaaaauuacccuaacgcggggcugaccaugaauuacugcaggaacccagacgcagauaagggacccugguguuuuacaaccgacccuagcguccggugggaguauugcaaucuaaagaaauguucagguacugaggccagugugguggcuccacccccggucguucuccugccugauguggaaacgccauccgaggaagacugcauguucggcaacgggaagggauaccgaggcaaacgcgccacaaccguaacugguacccccugucaggauugggcagcucaagagccucauagacacagcaucuuuacacccgagaccaauccaagggccgggcuugaaaagaacuauugccggaauccugacggcgaugugggaggccccugguguuacacuacaaacccacgcaaacuguaugacuacugcgacgucccgcagugugcggccccuucuuucgauugcgggaagccccagguggagccaaagaaaugucccggaagaguuguggguggcugcgucgcacauccucacucauggccauggcaagugaguuugaggacgcguuuugggaugcacuucugcggaggcacccucauuagccccgaauggguacugacugcugcccauuguuuagagaaguccccucggccgucuucguauaaaguuauccugggugcucaccaggaagugaaucucgagccacauguccaggagauagaagugagccgacuuuuccuggagcccacaagaaaggacauugccuugcuaaaacuguccucacccgcagucaucaccgauaaggugauuccagccugccuccccaguccuaacuacguuguggcugacaggacagaauguuuuaucacuggguggggcgagacccagggaacguucggcgcggggcugcuuaaggaagcacagcugccgguaaucgagaacaaagucugcaaucgcuacgaguuuuugaacggacgggugcaaucuaccgaacucugugccggucaccuggcuggcgggacagauagcugccagggagacuccggcggucccuuaguuuguuucgagaaggauaaauauauucugcagggggugacuucauggggccuaggaugcgccagaccaaauaagccuggcgucuacgugaggguaagccgcuuugugaccuggauagaagggguuaugcgaaacaauuga

SEQ ID NO: 7414 - RNA, 2433 nt, Artificial Sequence
  derived and/or modified sequence opt4 from Angiostatin__Homo_sapiens__AAN85555
auggagcacaaggagguggugcugcugcugcugcuguuccugaagagcggccagggcgagccccuggacgacuacgugaacacccagggcgccagccuguucagcgugaccaagaagcagcugggcgccggcagcaucgaggagugcgccgccaagugcgaggaggacgaggaguucaccugcagagccuuccaguaccacagcaaggagcagcagugcgugaucauggccgagaacagaaagagcagcaucaucaucagaaugagagacguggugcuguucgagaagaagguguaccugagcgagugcaagaccggcaacggcaagaacuacagaggcaccaugagcaagaccaagaacggcaucaccugccagaaguggagcagcaccagcccccacagacccagauucagccccgccacccaccccagcgagggccuggaggagaacuacugcagaaaccccgacaacgacccccagggccccuggugcuacaccaccgaccccgagaagagauacgacuacugcgacauccuggagugcgaggaggagugcaugcacugcagcggcgagaacuacgacggcaagaucagcaagaccaugagcggccuggagugccaggccugggacagccagagcccccacgcccacggcuacauccccagcaaguuccccaacaagaaccugaagaagaacuacugcagaaaccccgacagagagcugagacccuggugcuucaccaccgaccccaacaagagaugggagcugugcgacauccccagaugcaccacccccccccccagcagcggccccaccuaccagugccugaagggcaccggcgagaacuacagaggcaacguggccgugaccgugagcggccacaccugccagcacuggagcgcccagaccccccacacccacaacagaacccccgagaacuuccccugcaagaaccuggacgagaacuacugcagaaaccccgacggcaagagagcccccuggugccacaccaccaacagccaggugagaugggaguacugcaagauccccagcugcgacagcagccccgugagcaccgagcagcuggcccccaccgccccccccgagcugacccccguggugcaggacugcuaccacggcgacggccagagcuacagaggcaccagcagcaccaccaccaccggcaagaagugccagagcuggagcagcaugaccccccacagacaccagaagacccccgagaacuaccccaacgccggccugaccaugaacuacugcagaaaccccgacgccgacaagggccccuggugcuucaccaccgaccccagcgugagaugggaguacugcaaccugaagaagugcagcggcaccgaggccagcgugguggcccccccccccguggugcugcugcccgacguggagacccccagcgaggaggacugcauguucggcaacggcaagggcuacagaggcaagagagccaccaccgugaccggcacccccugccaggacugggccgcccaggagccccacagacacagcaucuucacccccgagaccaaccccagagccggccuggagaagaacuacugcagaaaccccgacggcgacgugggcggccccuggugcuacaccaccaaccccagaaagcuguacgacuacugcgacgugccccagugcgccgcccccagcuucgacugcggcaagccccagguggagcccaagaagugccccggcagaguggugggcggcugcguggcccacccccacagcuggcccuggcaggugagccugagaaccagauucggcaugcacuucugcggcggcacccugaucagccccgagugggugcugaccgccgcccacugccuggagaagagccccagacccagcagcuacaaggugauccugggcgcccaccaggaggugaaccuggagccccacgugcaggagaucgaggugagcagacuguuccuggagcccaccagaaaggacaucgcccugcugaagcugagcagccccgccgugaucaccgacaaggugauccccgccugccugcccagccccaacuacgugguggccgacagaaccgagugcuucaucaccggcuggggcgagacccagggcaccuucggcgccggccugcugaaggaggcccagcugcccgugaucgagaacaaggugugcaacagauacgaguuccugaacggcagagugcagagcaccgagcugugcgccggccaccuggccggcggcaccgacagcugccagggcgacagcggcggcccccuggugugcuucgagaaggacaaguacauccugcagggcgugaccagcuggggccugggcugcgccagacccaacaagcccggcguguacgugagagugagcagauucgugaccuggaucgagggcgugaugagaaacaacuga

SEQ ID NO: 7415 - RNA, 2433 nt, Artificial Sequence
  derived and/or modified sequence opt5 from Angiostatin__Homo_sapiens__AAN85555
auggagcacaaggaagugguccugcuccugcuucuguuccucaaaagcggccagggggagccccuggacgauuacguuaacacccaaggagccucccucuuuucugugacaaagaaacagcugggcgcugggagcaucgaagagugcgccgcgaagugugaagaggacgaggaguucacgugcagagcuuuucaguaucauuccaaagagcagcaaugugugauuauggccgaaaaucggaagucuagcaucauuauccgcaugagagaugucgugcuuuucgagaagaaaguuuaccuguccgagugcaagaccggaaacggcaaaaauuaucgggggacaaugucuaagaccaaaaacggaauuacaugucagaaguggagcuccaccagcccucaccgcccgagauuuucucccgccacacauccuuccgaaggccuggaggaaaauuacugccggaaccccgacaaugauccucagggccccugguguuauaccacggacccugagaagcgcuacgauuauugcgacauccucgaaugugaggaggaaugcaugcacuguagcggggagaacuacgauggaaaaaucucuaagaccauguccggccuggaaugccaggcuugggacagccaaucuccgcaugcccacggguacauucccuccaaauucccuaauaagaaccuuaaaaagaauuauugcagaaaccccgaucgggagcugcgcccuugguguuuuacaaccgaccccaauaaaagaugggaacucugcgauaucccgcgguguacaaccccucccccuagcuccggacccacguaccagugccugaagggcacaggggagaacuaucgcggaaauguggcugucaccgugucuggccacacaugucagcauuggagcgcccagacaccccacacccauaacagaaccccugagaacuucccgugcaagaaucuugacgaaaacuacugucggaaucccgacggcaaacgcgcgccuuggugccacacgaccaacucccaaguuagaugggaguauuguaagauucccagcugcgauucuuccccugugagcacagaacagcuggcccccaccgcuccgccugagcucacacccgucgugcaggacuguuaccacggggauggacaaucuuaucggggcaccagcuccacgacaaccaccgggaaaaagugccagucuuggagcuccaugacaccucauagacaccagaaaacccccgaaaauuacccuaacgccggacugacaaugaauuacugccgcaaccccgacgcugauaagggcccgugguguuuuacgaccgacccuagcgugcggugggaguauugcaaucugaagaaauguucugggacagaggccuccgucguugcgcccccucccguggugcuccugccggaugucgaaacccccagcgaggaagacugcauguucggaaacggcaagggcuacagagggaaacgcgccacaaccgugacgggaaccccuugucaggauugggcugcccaagagccccaucggcacucuaucuuuacaccugagaccaaucccagagcuggccuugaaaagaacuauugccgcaauccugacggggauguuggaggccccugguguuacacaaccaacccgcggaaacuguaugacuacugcgacgugccucagugugccgcccccuccuucgauugcgggaagccucaggucgagcccaagaaauguccgggcagagugguuggaggcugcguggcucauccucacagcuggcccuggcaggucucccuccgcacgcgguuugggaugcacuucugcggaggcacacugauuucuccugaaugggugcuuaccgcggcccauugucuggaaaagagccccagacccuccucuuauaaagucauccucggggcucaccaagaagugaaucuggagccucauguucaggagauugaagugagccgccuguuccucgagccgacacggaaggacaucgcccugcuuaaacuguccagccccgccgucaucaccgauaaggugauuccugcuugccuccccucuccuaacuacguuguggccgacagaaccgaauguuuuaucacaggauggggcgagacgcaggggaccuucggcgcgggacugcuuaaggaagcucagcugcccgucauugagaacaaagugugcaaucgguacgaguuucucaacggccgcgugcaauccacagaacugugugccgggcaccuggccggaggcaccgauagcugccagggggacucuggaggcccucucguuuguuucgagaaggauaaauauauccugcagggggucacauccuggggccuuggaugcgcuagaccgaauaagcccggcguguacgugcgggucagcagauuugugaccuggauugaagggguuaugcgcaacaauuga

SEQ ID NO: 7416 - RNA, 2433 nt, Artificial Sequence
  derived and/or modified sequence opt6 from Angiostatin__Homo_sapiens__AAN85555
auggaacauaaagaaguuguauuauuacuauuauuauuuuuaaaaucuggucaaggagaaccauuagacgauuauguaaauacccagggagcuucauuauucagugucacgaaaaaacaacuuggagcaggcucaauagaagaaugcgcugcuaaaugcgaagaagacgaagaauuuacaugcagggcauuucaauaucauagcaaagaacaacaauguguaaucauggcagaaaaucgaaaaucuucaauaauaauaagaaugagagauguaguauuauucgaaaaaaaaguauacuuauccgaaugcaaaaccggaaacggaaaaaauuacagaggaacaaugaguaaaacuaaaaacgguauuacaugucaaaaauggucuaguaccucaccacauagacccagauuuaguccagcaacacacccaucagaaggccuagaagaaaauuacugcagaaaucccgauaaugacccucaaggcccuuggugcuacacaacugacccugaaaaacgauacgauuauugcgacauacucgaaugcgaagaagaauguaugcauugcuccggagaaaacuaugaugguaaaauaucaaagacaaugucuggguuagaaugccaagcaugggauucacaauccccucaugcacauggauauauaccaaguaaauucccuaacaaaaaucuaaagaaaaacuacuguagaaauccagacagagaguuaagaccaugguguuuuacuacagauccuaauaaaagaugggaauuaugcgauauaccuagaugcacaacaccaccucccaguucugguccaacuuaccaaugcuuaaaaggaacaggugaaaacuacagagguaauguagcuguuacaguaucaggacauacaugucaacacuggagcgcucaaacuccacauacucauaacagaacaccugaaaauuuuccuuguaaaaaucuagaugaaaauuauuguaggaaucccgauggaaaacgagcuccguggugucacacaaccaauucacaagugagaugggaauauugcaaaauaccgucaugugauucauccccaguaucuacugaacaacuagcgccuacagcccccccagaauuaacuccagucguacaagauuguuaucacggagaugggcaaucauacagaggaacaucaaguacaacaaccaccggcaaaaaaugucaaucauggucuucaaugaccccgcauagacaucaaaagacgccagaaaauuacccaaaugccggauuaaccaugaauuauugcagaaaucccgaugcugauaaagguccauggugcuucacaacagauccaucaguacgaugggaauacuguaaucuaaagaaaugcaguggaaccgaagccucgguuguagcaccaccaccagugguauuacuaccugauguugaaacaccuagcgaagaagauuguauguuuggaaauggaaaaggcuaucgaggaaaaagagcgacaacuguaacaggaacuccgugucaagauugggcugcacaggaaccacauagacacucaauuuuuacaccugaaacaaauccaagagcaggcuuagaaaaaaauuacuguagaaacccugacggugauguaggaggaccaugguguuauacaacuaauccucgaaaacuauacgacuacugugacguuccucaaugcgcugcucccucauucgacuguggaaaaccacaaguagaaccaaaaaaauguccaggcagaguagucggagguugcguagcacacccgcacucauggccuuggcaaguaucauuaagaacaagauuuggcaugcacuuuuguggugggacauuaauauccccagaauggguauuaacagcugcccauugcuuagagaaaucuccaagaccaucaucauacaaggugauauuaggugcacaucaagaaguaaaucucgagccacacgugcaagagauagaaguaaguagacuauuuuuagaaccaacaagaaaagauauagcacuauuaaaacucucuucgccagccgucauuaccgauaaaguuauaccugcuuguuuaccaagucccaauuauguagucgcagauagaacugaauguuuuauuacaggauggggggaaacacaagguacuuuuggugcugggcuacuuaaagaagcucaacuuccaguuauagaaaauaaaguauguaaucgauaugaauuucuuaauggaagaguacaaucaacagaauuaugcgcaggucaucuagcaggcggaacagacucaugccaaggagacaguggcgguccacucguauguuuugaaaaagauaaauauauacuucaaggugucacaucauggggauugggaugugcucgaccaaauaaaccagguguauaugucagaguauccagauucguaacauggauagaaggugucaugagaaauaacuaa

SEQ ID NO: 7417 - protein, 136 aa, Artificial Sequence
  Angiostatin__Homo_sapiens__Q5TEH5
MEHKEVVLLLLLFLKSGQGEPLDDYVNTQGASLFSVTKKQLGAGSIEECAAKCEEDEEFTCRAFQYHSKEQQCVIMAENRKSSIIIRMRDVVLFEKKVYLSECKTGNGKNYRGTMSKTKNGITCQKWSSTSPHRPR

SEQ ID NO: 7418 - RNA, 411 nt, Artificial Sequence
  Angiostatin__Homo_sapiens__EAW47592
auggaacauaaggaagugguucuucuacuucuuuuauuucugaaaucaggucaaggagagccucuggaugacuaugugaauacccagggggcuucacuguucagugucacuaagaagcagcugggagcaggaaguauagaagaaugugcagcaaaaugugaggaggacgaagaauucaccugcagggcauuccaauaucacaguaaagagcaacaaugugugauaauggcugaaaacaggaaguccuccauaaucauuaggaugagagauguaguuuuauuugaaaagaaaguguaucucucagagugcaagacugggaauggaaagaacuacagagggacgauguccaaaacaaaaaauggcaucaccugucaaaaauggaguuccacuucuccccacagaccuagguaa

SEQ ID NO: 7419 - RNA, 411 nt, Artificial Sequence
  derived and/or modified sequence opt1 from Angiostatin__Homo_sapiens__EAW47592
auggagcacaaggaggugguccugcuccugcugcuguuccucaagagcggccagggggagccccuggacgacuacgugaacacccagggcgccucccucuucagcgugaccaagaagcagcugggggccggcuccaucgaggagugcgcggccaagugcgaggaggacgaggaguucacgugccgcgccuuccaguaccacagcaaggagcagcagugcgucaucauggccgagaaccggaaguccagcaucaucauccgcaugcgggacguggugcuguucgagaagaaggucuaccucuccgagugcaagaccgggaacggcaagaacuaccgcggcaccaugagcaagaccaagaacgggaucacgugccagaagugguccagcaccuccccgcaccggccccgcuga

SEQ ID NO: 7420 - RNA, 411 nt, Artificial Sequence
  derived and/or modified sequence opt2 from Angiostatin__Homo_sapiens__EAW47592
auggagcacaaggaggucguccuccuccuccuccucuuccucaaguccggccagggcgagccccucgacgacuacgucaacacccagggcgccucccucuucuccgucaccaagaagcagcucggcgccggcuccaucgaggagugcgccgccaagugcgaggaggacgaggaguucaccugccgcgccuuccaguaccacuccaaggagcagcagugcgucaucauggccgagaaccgcaaguccuccaucaucauccgcaugcgcgacgucguccucuucgagaagaaggucuaccucuccgagugcaagaccggcaacggcaagaacuaccgcggcaccauguccaagaccaagaacggcaucaccugccagaagugguccuccaccuccccccaccgcccccgcuga

SEQ ID NO: 7421 - RNA, 411 nt, Artificial Sequence
  derived and/or modified sequence opt3 from Angiostatin__Homo_sapiens__EAW47592
auggagcacaaggaagugguccugcuccuucuguuguucuuaaaaagcggccagggggagccccuggacgauuacguuaacacccaaggagccucccuauuuucugugacaaagaaacagcucggugcuggcucaaucgaagagugcgcagccaagugugaagaggacgaggaguucacuugcagagcguuucaguaucauaguaaagaacagcaauguguaauuauggcugaaaauaggaaaagcuccauaaucauucggaugcgcgaugugguccuguucgagaagaaaguguaccuuucugagugcaagacggggaacggaaagaauuaucgaggcaccaugucgaagacuaaaaacgguaucacaugucagaaguggucaagcaccaguccucaccguccaagauga

SEQ ID NO: 7422 - RNA, 411 nt, Artificial Sequence
  derived and/or modified sequence opt4 from Angiostatin__Homo_sapiens__EAW47592
auggagcacaaggagguggugcugcugcugcugcuguuccugaagagcggccagggcgagccccuggacgacuacgugaacacccagggcgccagccuguucagcgugaccaagaagcagcugggcgccggcagcaucgaggagugcgccgccaagugcgaggaggacgaggaguucaccugcagagccuuccaguaccacagcaaggagcagcagugcgugaucauggccgagaacagaaagagcagcaucaucaucagaaugagagacguggugcuguucgagaagaagguguaccugagcgagugcaagaccggcaacggcaagaacuacagaggcaccaugagcaagaccaagaacggcaucaccugccagaaguggagcagcaccagcccccacagacccagauga

SEQ ID NO: 7423 - RNA, 411 nt, Artificial Sequence
  derived and/or modified sequence opt5 from Angiostatin__Homo_sapiens__EAW47592
auggagcacaaggaagugguccugcuccugcuucuguuccucaaaagcggccagggggagccccuggacgauuacguuaacacccaaggagccucccuuuucucugugacaaagaaacagcugggcgcugggagcaucgaagagugcgccgcgaagugugaagaggacgaggaauuuacgugcagagcuuuucaguaucauuccaaagagcagcaaugugugauuauggccgaaaaucggaagucuagcaucauuauccgcaugagagaugucguucucuucgagaagaaaguguaccuguccgagugcaagaccggaaacggcaaaaauuaucgggggacaaugucuaagaccaaaaacggaauuacaugucagaaguggagcuccaccagcccucaccgcccgagauga

SEQ ID NO: 7424 - RNA, 411 nt, Artificial Sequence
  derived and/or modified sequence opt6 from Angiostatin__Homo_sapiens__EAW47592
auggaacacaaagaaguaguacuacuacuacuauuauuccuaaaaucaggacaaggagaaccacuagacgacuacguaaacacacaaggagcaucacuauucagcguaacaaaaaaacaacuaggagcaggaagcauagaagaaugcgcagcaaaaugcgaagaagacgaagaauucacaugcagagcauuccaauaccacucaaaagaacaacaaugcguaauaauggcagaaaacagaaaaagcagcauaauaauaagaaugagagacguaguauuauucgaaaaaaaaguauaccuaagcgaaugcaaaacaggaaacggaaaaaacuacagaggaacaaugucaaaaacaaaaaacggaauaacaugccaaaaauggucaagcacaagcccacacagaccaagauaa

SEQ ID NO: 7425 - protein, 1712 aa, Artificial Sequence
  Canstatin__Homo_sapiens__P08572
MGRDQRAVAGPALRRWLLLGTVTVGFLAQSVLAGVKKFDVPCGGRDCSGGCQCYPEKGGRGQPGPVGPQGYNGPPGLQGFPGLQGRKGDKGERGAPGVTGPKGDVGARGVSGFPGADGIPGHPGQGGPRGRPGYDGCNGTQGDSGPQGPPGSEGFTGPPGPQGPKGQKGEPYALPKEERDRYRGEPGEPGLVGFQGPPGRPGHVGQMGPVGAPGRPGPPGPPGPKGQQGNRGLGFYGVKGEKGDVGQPGPNGIPSDTLHPIIAPTGVTFHPDQYKGEKGSEGEPGIRGISLKGEEGIMGFPGLRGYPGLSGEKGSPGQKGSRGLDGYQGPDGPRGPKGEAGDPGPPGLPAYSPHPSLAKGARGDPGFPGAQGEPGSQGEPGDPGLPGPPGLSIGDGDQRRGLPGEMGPKGFIGDPGIPALYGGPPGPDGKRGPPGPPGLPGPPGPDGFLFGLKGAKGRAGFPGLPGSPGARGPKGWKGDAGECRCTEGDEAIKGLPGLPGPKGFAGINGEPGRKGDRGDPGQHGLPGFPGLKGVPGNIGAPGPKGAKGDSRTITTKGERGQPGVPGVPGMKGDDGSPGRDGLDGFPGLPGPPGDGIKGPPGDPGYPGIPGTKGTPGEMGPPGLGLPGLKGQRGFPGDAGLPGPPGFLGPPGPAGTPGQIDCDTDVKRAVGGDRQEAIQPGCIGGPKGLPGLPGPPGPTGAKGLRGIPGFAGADGGPGPRGLPGDAGREGFPGPPGFIGPRGSKGAVGLPGPDGSPGPIGLPGPDGPPGERGLPGEVLGAQPGPRGDAGVPGQPGLKGLPGDRGPPGFRGSQGMPGMPGLKGQPGLPGPSGQPGLYGPPGLHGFPGAPGQEGPLGLPGIPGREGLPGDRGDPGDTGAPGPVGMKGLSGDRGDAGFTGEQGHPGSPGFKGIDGMPGTPGLKGDRGSPGMDGFQGMPGLKGRPGFPGSKGEAGFFGIPGLKGLAGEPGFKGSRGDPGPPGPPPVILPGMKDIKGEKGDEGPMGLKGYLGAKGIQGMPGIPGLSGIPGLPGRPGHIKGVKGDIGVPGIPGLPGFPGVAGPPGITGFPGFIGSRGDKGAPGRAGLYGEIGATGDFGDIGDTINLPGRPGLKGERGTTGIPGLKGFFGEKGTEGDIGFPGITGVTGVQGPPGLKGQTGFPGLTGPPGSQGELGRIGLPGGKGDDGWPGAPGLPGFPGLRGIRGLHGLPGTKGFPGSPGSDIHGDPGFPGPPGERGDPGEANTLPGPVGVPGQKGDQGAPGERGPPGSPGLQGFPGITPPSNISGAPGDKGAPGIFGLKGYRGPPGPPGSAALPGSKGDTGNPGAPGTPGTKGWAGDSGPQGRPGVFGLPGEKGPRGEQGFMGNTGPTGAVGDRGPKGPKGDPGFPGAPGTVGAPGIAGIPQKIAVQPGTVGPQGRRGPPGAPGEMGPQGPPGEPGFRGAPGKAGPQGRGGVSAVPGFRGDEGPIGHQGPIGQEGAPGRPGSPGLPGMPGRSVSIGYLLVKHSQTDQEPMCPVGMNKLWSGYSLLYFEGQEKAHNQDLGLAGSCLARFSTMPFLYCNPGDVCYYASRNDKSYWLSTTAPLPMMPVAEDEIKPYISRCSVCEAPAIAIAVHSQDVSIPHCPAGWRSLWIGYSFLMHTAAGDEGGGQSLVSPGSCLEDFRATPFIECNGGRGTCHYYANKYSFWLTTIPEQSFQGSPSADTLKAGLIRTHISRCQVCMKNL

SEQ ID NO: 7426 - RNA, 5139 nt, Artificial Sequence
  Canstatin__Homo_sapiens__CCDS41907.1
auggggagagaccagcgcgcgguggccggcccugcccuacggcgguggcugcugcuggggacagugaccgugggguuccucgcccagagcgucuuggcgggugugaagaaguuugaugugccguguggaggaagagauugcagugggggcugccagugcuacccugagaaagguggacguggucagccugggccagugggcccccagggguacaaugggccaccaggauuacaaggauucccgggacugcagggacguaaaggagacaagggugaaaggggagcccccggaguaacgggacccaagggcgacgugggagcaagaggcguuucuggauucccuggugccgauggaauuccuggacacccggggcaaggugggcccaggggaaggccgggcuacgauggcugcaacggaacccagggagacucagguccacaggggccccccggcucugagggguucaccgggccucccgggccccaaggaccaaaagggcagaaaggugagccuuaugcacugccuaaagaggagcgcgacagauaucggggugaaccuggagagccuggauuggucgguuuccagggaccucccggccgcccugggcaugugggacagauggguccaguuggagcuccagggagaccaggaccaccuggacccccuggaccaaaaggacagcaaggcaacagaggacuugguuucuacggaguuaagggugaaaagggugacguagggcagccgggacccaacgggauuccaucagacacccuccaccccaucaucgcgcccacaggagucaccuuccacccagaucaguacaagggugaaaaaggcagugagggggaaccaggaauaagaggcauuuccuugaagggagaagaaggaaucaugggcuuuccuggacugagggguuacccuggcuugaguggugaaaaaggaucaccaggacagaagggaagccgaggccuggauggcuaucaagggccugauggaccccggggacccaagggagaagccggagacccagggcccccuggacuaccugccuacuccccucacccuucccuagcaaaaggugccagaggugacccgggauucccaggggcccaaggggagccaggaagccagggugagccaggagacccgggccucccaggucccccuggccucuccaucggagauggagaucagaggagaggccugccgggugagaugggacccaagggcuucaucggagaccccggcaucccugcgcucuacgggggcccaccuggaccugauggaaagcgagggccuccaggaccccccgggcucccuggaccaccuggaccugauggcuuccuguuugggcugaaaggagcaaaaggaagagcaggcuucccugggcuucccggcuccccuggagcccgcggaccaaagggguggaaaggugacgcuggggaaugcagauguacagaaggcgacgaagcuaucaaaggucuuccgggacugccaggacccaagggcuucgcaggcaucaacggggagccggggaggaaaggggacagaggagaccccggccaacacggccucccuggguucccagggcucaagggagugccuggcaacauuggugcucccggacccaaaggagcaaaaggagauuccagaacaaucacaaccaaaggugagcggggacagcccggcgucccaggugugcccgggaugaaaggugacgauggcagcccaggccgcgaugggcucgauggauuccccggccucccaggcccucccggugauggcaucaagggcccuccaggggacccaggcuauccaggaauaccuggaacgaaggguacuccaggagaaaugggccccccaggacugggccuucccggccucaaaggccaacgugguuucccuggagacgccggcuuaccuggaccaccaggcuuccugggcccuccuggccccgcagggaccccaggacaaauagauugugacacagaugugaaaagggccguuggaggugacagacaggaggccauccagccagguugcauaggagggcccaagggauugccaggccugccaggacccccaggccccacaggugccaaaggccuccgaggaaucccaggcuucgcaggagcugauggaggaccagggcccaggggcuugccaggagacgcaggucgugaaggguucccaggacccccaggguucauaggaccccgaggauccaaaggugcagugggccucccuggcccagauggauccccaggucccaucggccugccagggccagaugggcccccuggggaaaggggccucccuggagaaguccugggagcucagcccgggccacggggagaugcuggugugccuggacagccugggcuuaaaggccuucccggagacagaggccccccuggauucagaggaagccaagggaugccugggaugccagggcugaagggccagccaggccucccaggaccuuccggccagccaggccuguaugggccuccaggacugcauggauucccaggagcuccuggccaagaggggcccuuggggcugccaggaaucccaggccgugaaggucugccuggugauagaggggacccuggggacacaggcgcuccuggcccugugggcaugaaaggucucucuggugacagaggagaugcuggcuucacaggggagcaaggccauccaggaagcccuggauuuaaaggaauugauggaaugccugggacccccgggcuaaaaggagauagaggcucaccugggauggaugguuuccaaggcaugccuggacucaaagggagacccggguuuccagggagcaaaggcgaggcuggauuuuucggaauacccggucugaagggucuggcuggugagccagguuuuaaaggcagccgaggggacccugggcccccaggaccaccuccugucauccugccaggaaugaaagacauuaaaggagagaaaggagaugaagggccuauggggcugaaaggauaccugggcgcaaaagguauccaaggaaugccaggcaucccagggcugucaggaaucccugggcugccugggaggcccggccacaucaaaggagucaagggagacaucggaguccccggcauccccgguuugccaggauucccugggguggcuggccccccuggaauuacgggauucccaggauucauaggaagccggggugacaaaggugccccagggagagcaggccuguauggcgagauuggcgcgacuggugauuucggugacaucggggacacuauaaauuuaccaggaagaccaggccugaagggggagcggggcaccacuggaauaccaggucugaagggauucuuuggagagaagggaacagaaggugacaucggcuucccugggauaacaggcgugacuggaguccaaggcccuccuggacuuaaaggacaaacaggcuuuccagggcugacugggccuccagggucgcagggagagcuggggcggauuggacugccugguggcaaaggagaugauggcuggccgggagcuccgggcuuaccagguuuuccgggacuccgugggauccgcggcuuacacggcuugccaggcaccaagggcuuuccaggauccccagguucugacauccacggagacccaggcuucccaggcccuccuggggaaagaggugacccaggagaggccaacacccuuccaggcccugugggagucccaggacagaaaggagaccaaggagcuccaggggaacgaggcccaccugggagcccaggacuucagggguucccugguaucacacccccuuccaacaucucuggggcaccuggugacaaaggggcgccagggauauuuggccugaaagguuaucggggcccaccagggccaccagguucugcugcucuuccuggaagcaaaggugacacagggaacccaggagcuccaggaaccccagggaccaaaggaugggccggggacuccgggccccagggcaggccugguguguuuggucucccaggagaaaaagggcccaggggugaacaaggcuucauggggaacacuggacccacuggggcggugggcgacagaggccccaagggacccaagggagacccaggauucccuggugcccccgggacugugggagcccccgggauugcaggaaucccccagaagauugccguccaaccagggacaguggguccccaggggaggcgaggccccccuggggcaccgggggagauggggccccagggcccccccggagaaccagguuuccguggggcuccagggaaagcugggccccaaggaagagguggugugucugcuguucccggcuuccggggagaugaaggacccauaggccaccaggggccgauuggccaagaaggugcaccaggccguccagggagcccgggccugccggguaugccaggccgcagcgucagcaucggcuaccuccuggugaagcacagccagacggaccaggagcccaugugcccagugggcaugaacaaacucuggaguggauacagccugcuguacuucgagggccaggagaaggcgcacaaccaggaccuggggcuggcgggcuccugccuggcgcgguucagcaccaugcccuuccuguacugcaacccuggugaugucugcuacuaugccagccggaacgacaaguccuacuggcucucuaccacugcgccgcugcccaugaugcccguggccgaggacgagaucaagcccuacaucagccgcuguucugugugugaggccccggccaucgccaucgcgguccacagucaggaugucuccaucccacacugcccagcuggguggcggaguuuguggaucggauauuccuuccucaugcacacggcggcgggagacgaaggcgguggccaaucacuggugucaccgggcagcugucuagaggacuuccgcgccacaccauucaucgaaugcaauggaggccgcggcaccugccacuacuacgccaacaaguacagcuucuggcugaccaccauucccgagcagagcuuccagggcucgcccuccgccgacacgcucaaggccggccucauccgcacacacaucagccgcugccaggugugcaugaagaaccuguga

SEQ ID NO: 7427 - RNA, 5139 nt, Artificial Sequence
  derived and/or modified sequence opt1 from Canstatin__Homo_sapiens__CCDS41907.1
augggccgcgaccagcgggccguggccgggcccgcgcugcgccgguggcuccugcugggcaccgucaccgugggguuccucgcccagagcgugcuggccggcgucaagaaguucgacgugccgugcgggggccgcgacugcuccggcgggugccagugcuaccccgagaagggcgggcggggccagcccgggcccgugggcccgcagggcuacaacgggccgcccggccugcagggguuccccggccuccagggccgcaagggggacaagggcgagcgcggggcccccggcgucacggggcccaagggcgacgugggcgcccggggcgugagcggcuuccccggggcggacggcauccccgggcacccgggccagggcgggccccggggccgccccggguacgacggcugcaacgggacccagggcgacuccggcccccaggggccgcccggcagcgagggguucaccggcccgcccggcccccaggggcccaagggccagaagggggagcccuacgcccugcccaaggaggagcgggaccgcuaccggggcgagccgggggagcccggccuggucggcuuccaggggccgcccggccgccccgggcacgugggccagauggggcccgugggcgcccccggccggccggggccgcccggcccgcccgggcccaagggccagcaggggaaccgcggccucggcuucuacggggucaagggcgagaagggggacgugggccagcccgggcccaacggcauccccuccgacacccugcaccccaucaucgcccccacgggcgugaccuuccaccccgaccaguacaagggggagaagggcagcgagggggagccgggcauccggggcaucucccugaagggggaggagggcaucaugggguuccccggccuccgcggguaccccggccugagcggcgagaaggggucccccggccagaaggggagccggggccuggacggguaccagggcccggacggcccccgcgggcccaagggcgaggcgggggaccccggcccgcccgggcuccccgccuacagcccccacccgucccuggccaagggcgcccggggcgaccccggguuccccggcgcccagggggagccgggcucccagggcgagcccggggaccccggccugcccgggccgcccggccucagcaucggggacggcgaccagcgccgcggccugcccggggagaugggccccaagggguucaucggcgacccggggauccccgcgcuguacggcggcccgcccgggcccgacggcaagcgggggccgcccggcccgcccgggcuccccggcccgcccggccccgacggguuccuguucggccugaagggggccaagggccgcgccggguuccccggccuccccggcucccccggggcccggggccccaagggguggaagggcgacgccggcgagugccgcugcaccgagggggacgaggcgaucaagggccugcccgggcugcccggccccaagggguucgccggcaucaacggcgagccggggcggaagggcgaccgcggggaccccggccagcacgggcuccccggcuucccgggccugaaggggguccccggcaacaucggggcccccggccccaagggggccaagggcgacagccggaccaucacgaccaagggcgagcgcgggcagccgggcgugcccggggugcccggcaugaagggggacgacggcucccccggccgggacgggcuggacggcuucccggggcuccccggcccgcccggcgacgggaucaagggcccgcccggggaccccggcuaccccgggauccccggcaccaagggcacccccggggagaugggcccgcccgggcugggccugcccgggcucaagggccagcgcggcuuccccggggacgccggccugcccgggcccccgggcuuccuggggccgcccggccccgcgggcacgcccgggcagaucgacugcgacaccgacgucaagcgggccgugggcggggaccgccaggaggccauccagcccggcugcaucggcgggcccaagggccucccggggcugcccggcccgcccgggcccaccggcgccaagggccugcgggggauccccggcuucgccggggcggacggcgggcccggcccccgcggccucccgggggacgccggccgggagggguuccccggcccgcccggguucaucggcccccgcggcagcaagggggccgugggccugcccgggcccgacggcucccccgggccgaucggccugcccggccccgacgggcccccgggcgagcgggggcuccccggcgagguccugggcgcccagcccgggccccgcggcgacgcgggggugccgggccagcccgggcugaagggccuccccggcgaccgggggccgcccggcuuccgcgggagccagggcaugcccgggaugcccggccugaagggccagccggggcugcccggccccagcgggcagcccggccucuacgggccgcccggccugcacggcuuccccggggcccccggccaggaggggccgcugggccugcccggcauccccgggcgcgagggccuccccggggaccggggcgacccgggggacaccggcgcccccggccccguggggaugaagggccuguccggggaccgcggcgacgccggguucacgggcgagcagggccaccccgggagcccgggcuucaaggggaucgacggcaugcccgggacccccggccugaagggcgaccgggggucccccggcauggacggguuccagggcaugccggggcucaagggccgccccggcuuccccgggagcaagggcgaggccggguucuucggcauccccggccugaaggggcuggcgggcgagccgggguucaagggcucccgcggggaccccgggcccccggggcccccgcccgucauccuccccggcaugaaggacaucaagggcgagaagggggacgagggccccauggggcugaagggcuaccugggcgccaaggggauccagggcaugcccgggauccccggccucagcgggaucccgggccugcccggccggcccgggcacaucaagggcgugaagggggacaucggcguccccggcaucccggggcugcccggcuuccccgggguggccgggcccccgggcaucaccggcuuccccggcuucaucgggucccggggcgacaagggggcccccggccgcgccgggcucuacggcgagaucggcgcgaccggggacuucggcgacaucggggacacgaucaaccugcccggccggccggggcugaagggcgagcgcggcaccaccgggauccccggccucaagggguucuucggcgagaaggggaccgagggcgacaucggcuuccccgggaucacgggcgugaccgggguccaggggcccccgggccugaagggccagaccggcuuccccgggcugaccggcccgcccgggagccagggcgagcucggccggaucgggcugcccggcgggaagggcgacgacggguggcccggcgcccccggccugccgggguuccccggccuccgcgggauccggggccugcacgggcugcccggcacgaagggcuuccccggguccccgggcagcgacauccacggggaccccggcuuccccgggcccccgggcgagcgcggcgaccccggggaggccaacacccuccccggccccgugggggugccgggccagaagggcgaccagggggcccccggcgagcgggggccgcccggcucccccgggcugcagggcuuccccggcaucaccccgcccagcaacaucuccggggcccccggcgacaagggggcgcccggcaucuucgggcugaagggcuaccgcggcccgcccgggccgcccggcagcgccgcccuccccggguccaagggcgacaccgggaaccccggcgcccccggcacgcccgggaccaagggcugggcgggggacagcggcccccagggccggccgggggucuucggccugcccggggagaagggcccccgcggggagcagggcuucaugggcaacaccgggcccaccggcgccgugggggaccggggcccgaaggggcccaagggcgaccccggcuuccccggggccccgggcacggugggggcccccggcaucgccgggaucccccagaagaucgcgguccagcccggcaccgugggcccgcaggggcgccggggcccgcccggggcccccggcgagauggggccccagggcccgcccggcgagcccggguuccgcggcgcccccgggaaggccggcccccagggccgcgggggcguguccgccguccccggguuccggggcgacgaggggcccaucggccaccagggcccgaucgggcaggagggcgcgcccgggcgccccggcagcccggggcugcccggcaugcccggccgguccgugagcaucggguaccuccuggugaagcacagccagaccgaccaggagcccaugugcccggucggcaugaacaagcugugguccggguacagccuccuguacuucgagggccaggagaaggcccacaaccaggaccuggggcucgccggcuccugccuggcccgcuucagcaccaugcccuuccuguacugcaaccccggcgacgugugcuacuacgccucccggaacgacaagagcuacuggcucuccaccacggcgccccugccgaugaugcccguggccgaggacgagaucaagcccuacaucagccgcugcuccgucugcgaggcccccgccaucgcgaucgccgugcacagccaggacguguccaucccgcacugccccgccggguggcggagccuguggaucggcuacuccuuccucaugcacaccgccgccggggacgagggcggcgggcagagccuggucucccccggcagcugccuggaggacuuccgcgcgacccccuucaucgagugcaacgggggccgggggaccugccacuacuacgccaacaaguacuccuucuggcucacgaccaucccggagcagagcuuccagggcagccccuccgccgacacccugaaggccggccugauccgcacccacaucagccggugccaggugugcaugaagaaccucuga

SEQ ID NO: 7428 - RNA, 5139 nt, Artificial Sequence
  derived and/or modified sequence opt2 from Canstatin__Homo_sapiens__CCDS41907.1
augggccgcgaccagcgcgccgucgccggccccgcccuccgccgcuggcuccuccucggcaccgucaccgucggcuuccucgcccaguccguccucgccggcgucaagaaguucgacguccccugcggcggccgcgacugcuccggcggcugccagugcuaccccgagaagggcggccgcggccagcccggccccgucggcccccagggcuacaacggcccccccggccuccagggcuuccccggccuccagggccgcaagggcgacaagggcgagcgcggcgcccccggcgucaccggccccaagggcgacgucggcgcccgcggcgucuccggcuuccccggcgccgacggcauccccggccaccccggccagggcggcccccgcggccgccccggcuacgacggcugcaacggcacccagggcgacuccggcccccagggcccccccggcuccgagggcuucaccggcccccccggcccccagggccccaagggccagaagggcgagcccuacgcccuccccaaggaggagcgcgaccgcuaccgcggcgagcccggcgagcccggccucgucggcuuccagggcccccccggccgccccggccacgucggccagaugggccccgucggcgcccccggccgccccggcccccccggcccccccggccccaagggccagcagggcaaccgcggccucggcuucuacggcgucaagggcgagaagggcgacgucggccagcccggccccaacggcauccccuccgacacccuccaccccaucaucgcccccaccggcgucaccuuccaccccgaccaguacaagggcgagaagggcuccgagggcgagcccggcauccgcggcaucucccucaagggcgaggagggcaucaugggcuuccccggccuccgcggcuaccccggccucuccggcgagaagggcucccccggccagaagggcucccgcggccucgacggcuaccagggccccgacggcccccgcggccccaagggcgaggccggcgaccccggcccccccggccuccccgccuacuccccccaccccucccucgccaagggcgcccgcggcgaccccggcuuccccggcgcccagggcgagcccggcucccagggcgagcccggcgaccccggccuccccggcccccccggccucuccaucggcgacggcgaccagcgccgcggccuccccggcgagaugggccccaagggcuucaucggcgaccccggcauccccgcccucuacggcggcccccccggccccgacggcaagcgcggcccccccggcccccccggccuccccggcccccccggccccgacggcuuccucuucggccucaagggcgccaagggccgcgccggcuuccccggccuccccggcucccccggcgcccgcggccccaagggcuggaagggcgacgccggcgagugccgcugcaccgagggcgacgaggccaucaagggccuccccggccuccccggccccaagggcuucgccggcaucaacggcgagcccggccgcaagggcgaccgcggcgaccccggccagcacggccuccccggcuuccccggccucaagggcguccccggcaacaucggcgcccccggccccaagggcgccaagggcgacucccgcaccaucaccaccaagggcgagcgcggccagcccggcguccccggcguccccggcaugaagggcgacgacggcucccccggccgcgacggccucgacggcuuccccggccuccccggcccccccggcgacggcaucaagggcccccccggcgaccccggcuaccccggcauccccggcaccaagggcacccccggcgagaugggcccccccggccucggccuccccggccucaagggccagcgcggcuuccccggcgacgccggccuccccggcccccccggcuuccucggcccccccggccccgccggcacccccggccagaucgacugcgacaccgacgucaagcgcgccgucggcggcgaccgccaggaggccauccagcccggcugcaucggcggccccaagggccuccccggccuccccggcccccccggccccaccggcgccaagggccuccgcggcauccccggcuucgccggcgccgacggcggccccggcccccgcggccuccccggcgacgccggccgcgagggcuuccccggcccccccggcuucaucggcccccgcggcuccaagggcgccgucggccuccccggccccgacggcucccccggccccaucggccuccccggccccgacggcccccccggcgagcgcggccuccccggcgagguccucggcgcccagcccggcccccgcggcgacgccggcguccccggccagcccggccucaagggccuccccggcgaccgcggcccccccggcuuccgcggcucccagggcaugcccggcaugcccggccucaagggccagcccggccuccccggccccuccggccagcccggccucuacggcccccccggccuccacggcuuccccggcgcccccggccaggagggcccccucggccuccccggcauccccggccgcgagggccuccccggcgaccgcggcgaccccggcgacaccggcgcccccggccccgucggcaugaagggccucuccggcgaccgcggcgacgccggcuucaccggcgagcagggccaccccggcucccccggcuucaagggcaucgacggcaugcccggcacccccggccucaagggcgaccgcggcucccccggcauggacggcuuccagggcaugcccggccucaagggccgccccggcuuccccggcuccaagggcgaggccggcuucuucggcauccccggccucaagggccucgccggcgagcccggcuucaagggcucccgcggcgaccccggcccccccggccccccccccgucauccuccccggcaugaaggacaucaagggcgagaagggcgacgagggccccaugggccucaagggcuaccucggcgccaagggcauccagggcaugcccggcauccccggccucuccggcauccccggccuccccggccgccccggccacaucaagggcgucaagggcgacaucggcguccccggcauccccggccuccccggcuuccccggcgucgccggcccccccggcaucaccggcuuccccggcuucaucggcucccgcggcgacaagggcgcccccggccgcgccggccucuacggcgagaucggcgccaccggcgacuucggcgacaucggcgacaccaucaaccuccccggccgccccggccucaagggcgagcgcggcaccaccggcauccccggccucaagggcuucuucggcgagaagggcaccgagggcgacaucggcuuccccggcaucaccggcgucaccggcguccagggcccccccggccucaagggccagaccggcuuccccggccucaccggcccccccggcucccagggcgagcucggccgcaucggccuccccggcggcaagggcgacgacggcuggcccggcgcccccggccuccccggcuuccccggccuccgcggcauccgcggccuccacggccuccccggcaccaagggcuuccccggcucccccggcuccgacauccacggcgaccccggcuuccccggcccccccggcgagcgcggcgaccccggcgaggccaacacccuccccggccccgucggcguccccggccagaagggcgaccagggcgcccccggcgagcgcggcccccccggcucccccggccuccagggcuuccccggcaucaccccccccuccaacaucuccggcgcccccggcgacaagggcgcccccggcaucuucggccucaagggcuaccgcggcccccccggcccccccggcuccgccgcccuccccggcuccaagggcgacaccggcaaccccggcgcccccggcacccccggcaccaagggcugggccggcgacuccggcccccagggccgccccggcgucuucggccuccccggcgagaagggcccccgcggcgagcagggcuucaugggcaacaccggccccaccggcgccgucggcgaccgcggccccaagggccccaagggcgaccccggcuuccccggcgcccccggcaccgucggcgcccccggcaucgccggcaucccccagaagaucgccguccagcccggcaccgucggcccccagggccgccgcggcccccccggcgcccccggcgagaugggcccccagggcccccccggcgagcccggcuuccgcggcgcccccggcaaggccggcccccagggccgcggcggcgucuccgccguccccggcuuccgcggcgacgagggccccaucggccaccagggccccaucggccaggagggcgcccccggccgccccggcucccccggccuccccggcaugcccggccgcuccgucuccaucggcuaccuccucgucaagcacucccagaccgaccaggagcccaugugccccgucggcaugaacaagcucugguccggcuacucccuccucuacuucgagggccaggagaaggcccacaaccaggaccucggccucgccggcuccugccucgcccgcuucuccaccaugcccuuccucuacugcaaccccggcgacgucugcuacuacgccucccgcaacgacaaguccuacuggcucuccaccaccgccccccuccccaugaugcccgucgccgaggacgagaucaagcccuacaucucccgcugcuccgucugcgaggcccccgccaucgccaucgccguccacucccaggacgucuccaucccccacugccccgccggcuggcgcucccucuggaucggcuacuccuuccucaugcacaccgccgccggcgacgagggcggcggccagucccucgucucccccggcuccugccucgaggacuuccgcgccacccccuucaucgagugcaacggcggccgcggcaccugccacuacuacgccaacaaguacuccuucuggcucaccaccauccccgagcaguccuuccagggcucccccuccgccgacacccucaaggccggccucauccgcacccacaucucccgcugccaggucugcaugaagaaccucuga

SEQ ID NO: 7429 - RNA, 5139 nt, Artificial Sequence
  derived and/or modified sequence opt3 from Canstatin__Homo_sapiens__CCDS41907.1
augggcagagaccagagggccguggcugggcccgcacugcggcgcuggcuccuucugggaaccgucacaguugguuucuuggcccaaagcguguuagcgggcguaaagaaauuugaugugccuugcgggggacgagacuguuccggcgguugccaguguuacccagagaagggaggacguggccagccgggccccgucgggccucagggauauaacgguccacccggccugcaaggguucccuggacuacagggcagaaaaggugauaagggggaaaggggagcuccaggcgugacuggccccaaaggggacguuggagcccggggugugucuggcuuuccuggggcagauggaaucccaggccacccgggucagggcggcccccgcggaagaccuggcuacgacgggugcaauggaacgcagggugauucaggcccacaagggcccccuggaagugagggcuucaccgguccacccgggccgcagggcccuaagggacagaagggcgaacccuaugcccucccaaaagaggaaagggaccgguaccgcggggagccuggagagcccggucuggucggcuuucaggggccacccggacgaccuggccaugugggucaaauggggccaguaggcgcuccgggaagacccggcccuccagggcccccuggaccaaagggccagcaggguaacagggggcuuggauucuauggcguuaaaggugaaaagggcgauguggggcaacccggaccgaauggcauuccuagcgacacacugcacccaauaaucgcacccacuggggucaccuuucauccugaucaguacaaaggagagaagggcuccgaaggugagcccgggauucggggaaucucuuugaagggcgaggaagguauuaugggcuucccagggcuccguggauauccuggccugucgggggagaaaggaucacccggccagaaggguagccgcgggcuggacggauaccagggcccagaugguccgagaggcccuaaaggggaagccggagaccccggcccacccgggcucccugcuuacaguccacaccccuccuuagccaagggagcgaggggcgacccugguuuuccgggggcacaaggagagccaggcucucagggcgaacccggggauccuggacugccaggucccccuggccuuagcaucggggacggagaucagcggcgaggcuugccgggugagauggggcccaaaggauucauaggcgacccaggcaucccugcccuguaugggggacccccagguccugauggcaagcgcgggcccccaggaccgccuggccuacccgguccacccgggccugacggauuucucuucggccugaaaggcgcuaaggggagagccggauuuccaggucuucccggcuccccuggggcaaggggaccgaagggcuggaaaggugaugcuggggagugucggugcacagaaggagacgaggccauuaagggccugccaggcuugcccgggccuaaaggauucgcggguaucaacggcgaacccgggcgcaagggagauagaggcgacccaggucagcaugggcucccuggauuccccggccugaaaggcgugccagggaauauuggagccccugguccgaagggcgcaaagggggauucaaggaccaucacuacaaaaggagagcguggccaacccggugugccaggggucccuggcaugaagggagacgacggcagucccgggcgggauggauuagacgguuuuccaggccugccugggcccccgggagauggcauaaaagguccaccuggggaccccggcuacccagggauucccggcaccaaggggacgccuggagaaauggguccgcccggccucgggcuuccaggacugaaaggccagcgagguuucccuggggaugcuggcuugcccggaccuccaggcuuucuagggcccccuggaccagccggcacucccggucagaucgacugugauaccgacguuaagagagcuguagggggagauaggcaggaggccauucaaccgggcugcaucgguggcccuaaggggcugccaggacuccccggcccuccagggcccacaggagcaaaaggccugcgcgguaucccgggguucgccggagcugacggcgguccuggcccccgggggcuuccaggagaugcgggcagagagggguuuccuggacccccaggcuucauuggucccagggggagcaagggagcagugggccugccuggcccagacgggucuccgggacccauagguuugccuggcccagaugggcccccuggagaacgcggccucccaggugaggugcugggggcccagcccggaccucgaggcgacgcuggcgucccggggcagccaggauuaaaaggucugcccggcgaccgggggccucccggauuucguggcucccaggguaugccagggaugccuggacuaaagggccaacccggccucccagggccgucaggacagccuggucuguaugggcccccagggcuucacggauuccccggcgccccuggucaggaagggccauugggacugcccggcaucccuggcagagaggggcucccgggagauaggggugacccaggcgauacuggggcacccggaccugugggcaugaaaggucugagcggggaccgcggagaugccggcuuuaccggcgaacaagggcacccaggaagucccgguuucaagggcauugacgggaugccuggaacacccggccuuaagggugaucgggggucuccaggaauggacggcuuucagggcaugccggggcugaaaggaagaccugguuuccccggcuccaagggggaggcuggauuuuucggcaucccagguuugaaagggcucgccggcgagccuggauucaagggcagccgaggggaucccggaccaccuggucccccgccaguuauacugccuggcaugaaagacauuaagggggaaaaaggagaugagggccccauggguuuaaagggguaccugggcgcaaagggaauccagggcaugccagggauccccggacuaucggguauuccuggccucccggggaggccaggacauaucaaaggcgugaagggugacauuggcguccccgggauaccuggacugcccggcuuuccagggguggcgggaccucccggcaucaccgguuucccaggguuuauuggaucucgcggcgauaaaggugcuccuggccgggccgggcuuuauggagaaaucggcgcaacgggggacuucggagacaucggcgauacuauuaacuugccggguagacccgggcugaagggagagaggggcacaaccgguauaccaggccucaaaggguuuuucggagagaagggcacugaaggggacaucggauuuccuggcauuacagguguaaccgggguucagggacccccaggccugaagggccaaacgggguucccuggauuaaccggucccccgggcucccagggggagcugggacguaucggccuuccaggugggaaaggagaugacggcuggccuggcgcccccggguugccaggauuucccggucuccgcggcauucgggggcugcacggacuaccuggcacaaaggguuuccccgggucaccaggaagugauauccauggcgacccuggcuuuccggggcccccaggagaaagaggugauccuggcgaggcuaauacucugcccgggccagugggagucccuggccagaaaggugaccagggggcccccggagaaaggggcccgccuggcagcccagggcuccaaggauuccccgguauaaccccuccauccaacaucucuggcgcacccggggauaagggagcuccuggcauuuuuggucugaaaggguaccgaggaccacccggcccgccuggcagcgccgcgcuucccgggucaaagggagacacagguaauccaggcgcccccgggacuccuggaaccaagggcugggcuggugauagugggccacagggccggcccggaguguucggcuugccuggggagaaaggaccacgcggugagcagggcuucauggggaacacaggaccgaccggcgcagucggugacagagggcccaagggcccuaaaggagacccaggcuuucccggggccccuggaacugugggugcuccaggcaucgccgggauuccccagaagaucgcaguucaaccgggaacggugggcccucaggguaggcgggggccacccggcgcgccuggagaaaugggcccccaggggccaccgggagagccugguuuccgaggcgcccccgggaaagcuggaccacaaggcagagguggcguauccgccguccccggguuucgcggagaugaaggcccuauagggcaccagggaccaauuggccaggagggugcacccgggaggccuggaagcccaggccugccggguaugcccggccguucugugucaaucggguauuuacucguuaagcacagucagacagaccaagaaccuauguguccagugggaaugaauaagcuguggagcggcuacucccuucuguacuucgaggggcaggagaaagcucauaaccaggauuugggacucgccggcucuugccuggcacgguuuucgaccaugcccuuccuauauuguaauccuggugacgucugcuacuaugccagcagaaacgauaaguccuacuggcugucaacuaccgcuccacuccccaugaugccuguggcggaagacgagauuaaaccguauaucaguaggugcucuguaugugaagcccccgcaauagcuaucgccgugcacagccaggauguuuccauuccacauugcccugccggguggcgcucacuguggaucggauacagcuuucuuaugcacacagcugcaggcgacgaggguggcgggcaaucuuuggucucccccggaaguugucuggaagauuuccgagccaccccauuuauugagugcaauggcgggagaggaacuugucauuauuacgcgaacaaguacagcuucugguuaacaacgaucccugagcagucuuuucagggcucccccucagcugacacccucaaagccggucugauacggacucacauuaguaggugccagguguguaugaagaaccuuuga

SEQ ID NO: 7430 - RNA, 5139 nt, Artificial Sequence
  derived and/or modified sequence opt4 from Canstatin__Homo_sapiens__CCDS41907.1
augggcagagaccagagagccguggccggccccgcccugagaagauggcugcugcugggcaccgugaccgugggcuuccuggcccagagcgugcuggccggcgugaagaaguucgacgugcccugcggcggcagagacugcagcggcggcugccagugcuaccccgagaagggcggcagaggccagcccggccccgugggcccccagggcuacaacggcccccccggccugcagggcuuccccggccugcagggcagaaagggcgacaagggcgagagaggcgcccccggcgugaccggccccaagggcgacgugggcgccagaggcgugagcggcuuccccggcgccgacggcauccccggccaccccggccagggcggccccagaggcagacccggcuacgacggcugcaacggcacccagggcgacagcggcccccagggcccccccggcagcgagggcuucaccggcccccccggcccccagggccccaagggccagaagggcgagcccuacgcccugcccaaggaggagagagacagauacagaggcgagcccggcgagcccggccuggugggcuuccagggcccccccggcagacccggccacgugggccagaugggccccgugggcgcccccggcagacccggcccccccggcccccccggccccaagggccagcagggcaacagaggccugggcuucuacggcgugaagggcgagaagggcgacgugggccagcccggccccaacggcauccccagcgacacccugcaccccaucaucgcccccaccggcgugaccuuccaccccgaccaguacaagggcgagaagggcagcgagggcgagcccggcaucagaggcaucagccugaagggcgaggagggcaucaugggcuuccccggccugagaggcuaccccggccugagcggcgagaagggcagccccggccagaagggcagcagaggccuggacggcuaccagggccccgacggccccagaggccccaagggcgaggccggcgaccccggcccccccggccugcccgccuacagcccccaccccagccuggccaagggcgccagaggcgaccccggcuuccccggcgcccagggcgagcccggcagccagggcgagcccggcgaccccggccugcccggcccccccggccugagcaucggcgacggcgaccagagaagaggccugcccggcgagaugggccccaagggcuucaucggcgaccccggcauccccgcccuguacggcggcccccccggccccgacggcaagagaggcccccccggcccccccggccugcccggcccccccggccccgacggcuuccuguucggccugaagggcgccaagggcagagccggcuuccccggccugcccggcagccccggcgccagaggccccaagggcuggaagggcgacgccggcgagugcagaugcaccgagggcgacgaggccaucaagggccugcccggccugcccggccccaagggcuucgccggcaucaacggcgagcccggcagaaagggcgacagaggcgaccccggccagcacggccugcccggcuuccccggccugaagggcgugcccggcaacaucggcgcccccggccccaagggcgccaagggcgacagcagaaccaucaccaccaagggcgagagaggccagcccggcgugcccggcgugcccggcaugaagggcgacgacggcagccccggcagagacggccuggacggcuuccccggccugcccggcccccccggcgacggcaucaagggcccccccggcgaccccggcuaccccggcauccccggcaccaagggcacccccggcgagaugggcccccccggccugggccugcccggccugaagggccagagaggcuuccccggcgacgccggccugcccggcccccccggcuuccugggcccccccggccccgccggcacccccggccagaucgacugcgacaccgacgugaagagagccgugggcggcgacagacaggaggccauccagcccggcugcaucggcggccccaagggccugcccggccugcccggcccccccggccccaccggcgccaagggccugagaggcauccccggcuucgccggcgccgacggcggccccggccccagaggccugcccggcgacgccggcagagagggcuuccccggcccccccggcuucaucggccccagaggcagcaagggcgccgugggccugcccggccccgacggcagccccggccccaucggccugcccggccccgacggcccccccggcgagagaggccugcccggcgaggugcugggcgcccagcccggccccagaggcgacgccggcgugcccggccagcccggccugaagggccugcccggcgacagaggcccccccggcuucagaggcagccagggcaugcccggcaugcccggccugaagggccagcccggccugcccggccccagcggccagcccggccuguacggcccccccggccugcacggcuuccccggcgcccccggccaggagggcccccugggccugcccggcauccccggcagagagggccugcccggcgacagaggcgaccccggcgacaccggcgcccccggccccgugggcaugaagggccugagcggcgacagaggcgacgccggcuucaccggcgagcagggccaccccggcagccccggcuucaagggcaucgacggcaugcccggcacccccggccugaagggcgacagaggcagccccggcauggacggcuuccagggcaugcccggccugaagggcagacccggcuuccccggcagcaagggcgaggccggcuucuucggcauccccggccugaagggccuggccggcgagcccggcuucaagggcagcagaggcgaccccggcccccccggccccccccccgugauccugcccggcaugaaggacaucaagggcgagaagggcgacgagggccccaugggccugaagggcuaccugggcgccaagggcauccagggcaugcccggcauccccggccugagcggcauccccggccugcccggcagacccggccacaucaagggcgugaagggcgacaucggcgugcccggcauccccggccugcccggcuuccccggcguggccggcccccccggcaucaccggcuuccccggcuucaucggcagcagaggcgacaagggcgcccccggcagagccggccuguacggcgagaucggcgccaccggcgacuucggcgacaucggcgacaccaucaaccugcccggcagacccggccugaagggcgagagaggcaccaccggcauccccggccugaagggcuucuucggcgagaagggcaccgagggcgacaucggcuuccccggcaucaccggcgugaccggcgugcagggcccccccggccugaagggccagaccggcuuccccggccugaccggcccccccggcagccagggcgagcugggcagaaucggccugcccggcggcaagggcgacgacggcuggcccggcgcccccggccugcccggcuuccccggccugagaggcaucagaggccugcacggccugcccggcaccaagggcuuccccggcagccccggcagcgacauccacggcgaccccggcuuccccggcccccccggcgagagaggcgaccccggcgaggccaacacccugcccggccccgugggcgugcccggccagaagggcgaccagggcgcccccggcgagagaggcccccccggcagccccggccugcagggcuuccccggcaucaccccccccagcaacaucagcggcgcccccggcgacaagggcgcccccggcaucuucggccugaagggcuacagaggcccccccggcccccccggcagcgccgcccugcccggcagcaagggcgacaccggcaaccccggcgcccccggcacccccggcaccaagggcugggccggcgacagcggcccccagggcagacccggcguguucggccugcccggcgagaagggccccagaggcgagcagggcuucaugggcaacaccggccccaccggcgccgugggcgacagaggccccaagggccccaagggcgaccccggcuuccccggcgcccccggcaccgugggcgcccccggcaucgccggcaucccccagaagaucgccgugcagcccggcaccgugggcccccagggcagaagaggcccccccggcgcccccggcgagaugggcccccagggcccccccggcgagcccggcuucagaggcgcccccggcaaggccggcccccagggcagaggcggcgugagcgccgugcccggcuucagaggcgacgagggccccaucggccaccagggccccaucggccaggagggcgcccccggcagacccggcagccccggccugcccggcaugcccggcagaagcgugagcaucggcuaccugcuggugaagcacagccagaccgaccaggagcccaugugccccgugggcaugaacaagcuguggagcggcuacagccugcuguacuucgagggccaggagaaggcccacaaccaggaccugggccuggccggcagcugccuggccagauucagcaccaugcccuuccuguacugcaaccccggcgacgugugcuacuacgccagcagaaacgacaagagcuacuggcugagcaccaccgccccccugcccaugaugcccguggccgaggacgagaucaagcccuacaucagcagaugcagcgugugcgaggcccccgccaucgccaucgccgugcacagccaggacgugagcaucccccacugccccgccggcuggagaagccuguggaucggcuacagcuuccugaugcacaccgccgccggcgacgagggcggcggccagagccuggugagccccggcagcugccuggaggacuucagagccacccccuucaucgagugcaacggcggcagaggcaccugccacuacuacgccaacaaguacagcuucuggcugaccaccauccccgagcagagcuuccagggcagccccagcgccgacacccugaaggccggccugaucagaacccacaucagcagaugccaggugugcaugaagaaccuguga

SEQ ID NO: 7431 - RNA, 5139 nt, Artificial Sequence
  derived and/or modified sequence opt5 from Canstatin__Homo_sapiens__CCDS41907.1
augggcagagaccagcgggccguggcugggcccgcccugcgcagauggcuccugcuuggaaccgucacaguuggcuuccuggcgcaaagcgugcucgcuggggugaagaaauuugaugucccuugcggaggccgggacuguuccgggggaugccaguguuacccggagaagggcggccgcgggcagcccggaccugugggcccccagggguauaacggaccucccggccugcaaggguucccuggacuucagggcagaaaaggcgauaagggggaacggggagccccgggcguuacggggcccaaaggagacgugggcgcccgcggggucucuggauuuccuggcgcugauggcauccccgggcacccuggacagggcgggcccagaggacggccgggcuacgacgggugcaauggcacccagggagauagcggcccucaagggcccccuggauccgagggcuucacagggccucccggaccccagggcccgaaggggcagaagggcgaacccuaugcccugccuaaagaggaacgcgacagauaccggggagagcccggcgagccugggcucgugggauuucagggacccccggggcgcccuggacauguuggccaaauggggcccgugggcgcuccuggaagacccggcccucccgggccgccuggacccaagggccagcaggggaaccggggacugggcuucuauggggucaaaggcgaaaagggagaugugggccaacccgggccuaauggcauuccgucugacacccugcaccccaucauugccccuacaggcgugaccuuucaucccgaucaguacaaaggggagaagggaagcgaaggcgagccuggcauccgcgggauuucccucaagggagaggaaggcaucaugggguuccccggacugagaggcuauccugggcuuucuggagagaaaggcagccccggccagaaggggucccggggacuggacggcuaccaggggccggauggaccuagaggccccaaaggggaagcgggagacccugggcccccgggccucccugccuacagcccccacccuucucuggcuaagggcgcccgcggagaccccggcuuucccggggcucaaggagagccuggcucccagggggaaccgggagaucccggccuuccugggcccccuggccugagcaucggagacggcgaucagcggagagggcuccccggagagaugggcccuaaaggguucauuggagacccgggcauccccgcccuguauggcgggccucccggaccugauggcaagcgcgggcccccgggaccucccggccugcccgggccucccggaccugacggcuuucucuucggccugaaaggggcgaagggacgggccggcuuuccggggcuucccggaucuccuggcgcuagagggcccaagggauggaaaggcgaugccggcgagugucgcugcacagaaggggacgaggcuauuaagggacugccuggccuccccgggccgaaaggauucgccggcaucaacggggaaccuggccggaagggagauagaggcgaccccgggcagcauggacugccuggcuuccccgggcuuaaaggagucccuggcaauauuggggcccccggcccgaagggagcuaagggcgauucccgcaccaucacgaccaaaggggagcggggacaaccuggcguucccggggugcccggaaugaagggcgacgacgggagcccuggcagagauggacuggacggcuuuccggggcuccccggaccucccggcgaugggauuaaaggaccucccggcgacccuggcuacccggggauccccggaacaaagggcaccccuggggaaaugggacccccuggccuggggcugcccggacucaaaggccagcgcggcuucccgggggaugcgggacugccuggcccucccggguuucuuggaccucccggccccgccgggacaccgggacagaucgacugugauaccgacgugaagcgggcugucggcggcgauagacaggaggccauucaacccgggugcaucggaggcccuaaggggcugcccggacucccugggcccccgggcccuacgggagccaaaggccugcggggcauucccggguucgcuggagccgacggcgggccuggaccccgcggccuuccuggggaugcgggaagagagggcuuucccggcccgccuggguucaucggaccccggggcucuaagggggcugugggacugcccggcccugacggguccccgggacccauuggccucccuggccccgaugggccucccggagaaagaggccugccuggggagguucugggagcccagcccggcccgcgcggggacgccggagugccuggccagcccggccucaaagggcugccuggagaccgggggcccccgggcuuuagaggaagccagggcaugccugggaugcccggccuuaagggacaacccggccugccugggcccuccggacagccuggccucuaugggccgcccggacugcacggcuucccuggggcucccggccaggaaggaccucugggccuucccgggaucccuggacgcgagggccucccgggggauagaggagaccccggcgauacaggggccccuggccccgucggaaugaaaggccugucuggggaccggggagaugcuggcuuuaccggggaacaaggacacccuggcagccccggguucaagggcaucgacggaaugccgggcacaccugggcugaagggagaucgcggcucccccgggauggacggauuucagggcaugcccggccucaaagggagaccuggauuccccggcagcaagggggaggccggauuuuucggcauuccugggcugaaaggacuugcgggcgagccgggcuucaaggggucucggggagaucccggcccucccgggccucccccggugauccugccuggaaugaaagacauuaagggcgaaaaaggggaugagggacccaugggccucaagggcuaccugggggccaagggaauccagggcaugccugggauucccggacuguccggcaucccggggcuuccuggacgccccggccauaucaaaggcguuaagggggacauuggagugcccggcaucccugggcuccccggauuuccuggcgucgcugggccgcccggaauuaccggcuucccuggcuuuaucgggagcagaggagauaaaggcgcccccgggcgggcuggacuguauggcgaaauuggggccaccggagacuucggcgacaucggcgauacaauuaaccugccugggcgccccggacucaagggcgagagagggacgaccggaaucccuggccugaaaggguuuuucggagagaagggcacagaaggcgacaucggguuuccgggaauuaccggcgugacagggguccagggacccccuggccuuaaggggcaaaccggcuuccccggacugacgggcccucccgggucucagggagagcucggccggaucgggcugccgggaggcaaaggggaugacggcuggccuggagcgcccggccugcccggguuuccuggacuucgcggcauuagagggcuccacggacugcccggcacaaagggguucccuggcagcccgggauccgauauccauggcgaccccggguuuccuggacccccuggcgaaagaggggaucccggagaggccaauacccugccgggcccuguggggguucccggccagaaaggagaccagggcgcuccuggggaacggggacccccuggcucucccgggcuccaaggauucccgggcauuacacccccuagcaacaucuccggcgcccccggggauaagggagcuccuggcaucuuugggcugaaaggauaccgcggcccgcccgggccucccggaagcgccgcccuuccuggcucuaagggcgacaccgggaaucccggagcuccuggcacccccgggacaaagggaugggcgggcgauuccgggccgcagggacggccuggcguguucggccugcccggggagaaaggaccuagaggcgagcagggguucaugggaaacacgggccccaccggggccgucggagaccgcggcccgaagggcccuaaaggggaccccggauuucccggcgcuccugggacagugggagcccccggcauugccgggaucccucagaagauugcuguucaaccgggaaccgugggcccccagggccggagagggccucccggagccccuggcgaaauggggccccagggaccgccuggcgagcccggguuccgcggagcgccuggcaaagcuggcccccaagggcggggaggcgucagcgccgugccuggguuuagaggagaugaaggccccaucgggcaccagggaccgauuggccaggagggcgcccccgggcgcccuggaucucccggccucccugggaugcccggacgguccgugagcaucggcuaucugcugguuaagcacucccagacagaccaagaaccuauguguccggucgggaugaauaaacuuuggucuggcuacagccuccuguacuucgagggacaggagaaggcucauaaccaggaucugggccucgccggguccugccuggcgagauuuucuaccaugcccuuccuuuauuguaauccuggagacgugugcuacuaugcuagccggaacgauaaguccuacuggcugagcacgaccgcuccccucccuaugaugcccguggccgaagacgagaucaaaccguauauuucucgcugcuccgucugugaagccccugccaucgcuauugccgugcacagccaggauguuucuaucccccauugcccugcgggcuggagaucccuguggauuggguacagcuuucugaugcacacagccgcuggagacgagggcgggggccaaucucuugugagccccggauccugucuggaagauuuccgggccaccccguuuaucgagugcaauggcgggcgcggaacaugucauuauuacgcuaacaaguacagcuucuggcucaccacgaucccugagcagucuuuucagggcucccccagcgccgacacacugaaagccgggcucauuagaacccacaucucccggugccaggucuguaugaagaaccuguga

SEQ ID NO: 7432 - RNA, 5139 nt, Artificial Sequence
  derived and/or modified sequence opt6 from Canstatin__Homo_sapiens__CCDS41907.1
augggaagagaucaaagggcaguggcgggaccugcacuacgaagaugguuauuauuaggaacaguuacaguaggauucuuggcacaaucuguacuugcagggguaaaaaaauuugauguacccugcggaggacgugauuguaguggcgguugccaauguuacccagaaaaaggugguaggggucaaccgggaccaguuggaccacaaggauauaauggaccaccaggacuacaaggauuuccuggcuuacaggguagaaaaggcgauaagggggaaagaggagcuccaggugucacagguccaaaaggcgacguuggagcaagagggguuuccggauuucccggggcagauggaaucccgggacauccaggucaaggagguccucgcggucgaccaggauaugacggaugcaacgguacucagggugacaguggaccucaagguccaccagggagugagggauuuacuggaccuccggguccgcaagggccgaaaggacagaagggagaaccauacgcguuaccaaaagaggaaagggaucgcuauagaggggaaccaggggaaccaggcuuagugggauuucaaggaccaccuggacgcccaggccauguaggacaaaugggaccuguaggagccccuggaagacccgguccgccaggaccaccagguccaaaaggacaacaggggaaucgcggcuuagguuucuauggaguaaaaggugaaaaaggagauguuggucaacccggucccaauggaauaccuucagauacacuacauccaauaauagccccaacaggcguaacauuucaucccgaccaauauaaaggagaaaaagguagugaaggggaaccuggaauccgcgguauauccuuaaaaggagaggaaggaaucaugggauuuccaggacuccgagguuauccuggcuuaagcggagaaaaagggucuccgggacaaaaaggaucgagaggacuagacggauaucaaggaccggacgguccuagagggccaaagggagaagcaggcgacccggggccaccaggacucccagcauauucaccacaucccagcuuagccaaaggagcacguggggacccgggguucccaggagcgcaaggagaaccaggaagucaaggugaaccaggugauccugguuuaccuggaccaccugguuuaaguauaggagauggugaucaaaggcgaggauugcccggugaaauggggccuaagggauuuauaggagauccaggaauaccagcacuauauggagggccucccgguccagauggaaaaagaggaccaccgggcccuccggggcuaccuggaccaccaggcccugaugguuucuuauuugguuuaaaaggagcaaagggcagagcagguuuccccggacuuccaggaaguccuggagccagagggccuaagggauggaaaggagaugccggugaauguagaugcacugaaggcgaugaagcaauaaaaggucuuccugguuuaccuggcccgaagggauuugcugguauuaauggagagccuggaagaaaaggagauagaggggauccaggacaacacgguuuaccuggauuuccaggccuaaaaggagucccaggaaauaucggcgcaccaggucccaaaggagcaaaaggggauaguagaacaauuacaacuaagggagaaaggggucaaccaggaguaccgggaguaccaggaaugaagggugacgauggaagucccgggagagacggccuagauggauuuccagguuugccgggaccuccaggggacggaauaaaagguccuccaggagauccagguuaucccggcauaccagguaccaaaggaacgccuggcgagauggguccaccaggcuuagguuuaccaggauuaaaaggacaaaggggauucccaggcgaugcaggguuaccgggucccccaggguucuuaggaccaccgggaccggcagguacuccagggcaaauugacugugauacagauguaaagagagcaguugguggagacaggcaagaagcuauacagccugguuguauuggugguccuaaagggcuaccgggacucccagggcccccaggaccuacaggcgcaaaggguuuacgagguauuccuggcuuugccggagcugacggaggaccugguccgaggggguuaccgggugaugcugguagagaaggauuuccaggcccaccaggcuucauugguccuagagguucgaaaggggcagugggacugccggguccugacggaaguccugggccaauuggacugccugguccugaugggccuccaggggagagaggacuaccaggcgaaguucuuggagcgcaaccggguccgaggggggacgccggagugcccggacaaccaggacuuaaaggucuaccuggugacagaggcccuccugguuucagaggaagucaaggcaugcccgggaugccaggauugaaaggccaaccaggccucccaggaccuagcggucaacccgggcuauaugguccucccggauuacauggauuccccggagcaccggggcaggaagguccauuaggauuaccagguauaccuggccgugagggucuuccaggagacagaggugacccaggagauacgggggcgccuggaccgguagguaugaaagguuuaaguggagaucgaggugaugcagguuuuaccggcgaacaaggucauccuggcagucccggguuuaaagguauugaugguaugccgggaacucccggauuaaagggagaucgaggguccccgggaauggauggauuccaaggaaugcccggauuaaaggggaggccgggcuucccaggaucuaaaggagaagcaggguuuuucggaauaccaggcuuaaaaggacuggcgggagagccaggguucaaagguaguagaggggauccgggaccaccugggccaccaccagugauauugccugguaugaaggauauaaaaggggagaagggggaugagggacccaugggacuaaaaggauacuuaggagcuaaagggauacagggaaugcccgguauaccgggcuugucaggaauaccuggucucccuggcaggccgggacauauuaaaggaguaaaaggagauauagggguuccaggaauacccggauuaccuggauuuccugguguugcuggaccacccggaauaaccggcuuuccagguuuuauuggcaguagaggagauaaaggagcgccuggacgugccggacuuuauggagaaauaggugccacgggugauuuuggagauaucggagauacaauaaauuuaccuggaagaccuggucuaaaaggugaaagggggacuacaggaauacccggccuuaagggauuuuuuggggaaaaggguacagagggagauauagguuuuccaggaauuacuggagucacaggcguccaggggccgcccgguuuaaagggacaaacaggauuuccaggacuaacgggcccuccugguagucaaggagaacugggaagaauaggacuaccaggcggcaagggugacgauggauggccaggagcaccaggucuacccggcuuuccaggacuuagagggauaagaggacuucauggucuaccuggaacuaaaggauuuccaggaagucccggaucagacauacauggcgauccugguuuuccagguccaccgggagaacgaggggacccaggagaagcaaauacguugccuggaccggucgguguuccaggucaaaaaggugaucaaggggcuccaggagagcgaggaccaccagguucacccggauuacaaggguuuccuggcauuaccccgccaucuaauauaaguggugcaccaggagauaaaggugccccagguauauucggguugaaaggcuauagagggccaccagguccaccaggcuccgccgcauuaccaggcucaaaaggugauacuggaaacccuggugcaccgggaacuccaggcacgaaggguugggcgggggauagugguccgcaagguagaccaggaguguuuggucuuccaggagaaaaaggaccacguggagaacaaggauuuaugggaaacacaggucccacuggagcugugggagauagagguccaaaaggacccaaaggggacccuggauuuccaggggcuccgggaacggugggggcuccugguauagcaggcauuccucagaaaauagcgguccaaccaggaacaguaggaccucaaggucgcagaggaccaccaggugcaccaggugaaaugggaccgcaaggccccccaggcgaaccuggauuuagaggagcuccugguaaagcagggccacaaggccgugguggaguuagugcaguuccaggcuuccgaggagaugaagguccuauagggcaucaaggaccgauaggacaggaaggagcuccaggacgcccugguaguccuggauuaccggguaugccaggucguucgguaaguauuggauaccuauuaguaaagcauucucaaacagaucaagagcccaugugucccguuggaaugaauaaauuguggaguggguacagcuuauuauauuucgagggucaagaaaaagcacauaaucaggauuuaggauuagccggguccuguuuagcaagauucucgaccaugccuuucuuguacugcaauccgggugauguuugcuauuaugcaucacgcaacgauaagucauauugguuaaguacaacugcuccuuugcccaugaugccaguagcugaggaugaaauaaaaccauauauauccagauguagugucugcgaagcaccggcuauagccauagcgguacauucacaagacgucagcaucccacauuguccagcgggauggagaucauuguggauaggauacucauuucuaaugcacaccgcggcaggagaugaaggcgguggacaaagcuuaguuucgccaggaucuugccuagaagacuuuagagcuacuccguuuauagaaugcaacgggggaaggggaaccugucauuauuaugcaaauaaguauagcuuuugguuaacuacgauuccagaacaaaguuuccaaggcucuccaagcgcagacaccuugaaagcaggguugaucagaacucacauuucacgaugucaaguauguaugaagaauuuauag

SEQ ID NO: 7433 - protein, 184 aa, Artificial Sequence
  Endostatin__Homo_sapiens__Endostatin__Homo_sapiens_
MHSHRDFQPVLHLVALNSPLSGGMRGIRGADFQCFQQARAVGLAGTFRAFLSSRLQDLYSIVRRADRAAVPIVNLKDELLFPSWEALFSGSEGPLKPGARIFSFDGKDVLRHPTWPQKSVWHGSDPNGRRLTESYCETWRTEAPSATGQASSLLGGRLLGQSAASCHHAYIVLCIENSFMTASK

SEQ ID NO: 7434 - RNA, 555 nt, Artificial Sequence
  Endostatin__Homo_sapiens__NM_030582.3
augcacagccaccgcgacuuccagccggugcuccaccugguugcgcucaacagcccccugucaggcggcaugcggggcauccgcggggccgacuuccagugcuuccagcaggcgcgggccguggggcuggcgggcaccuuccgcgccuuccuguccucgcgccugcaggaccuguacagcaucgugcgccgugccgaccgcgcagccgugcccaucgucaaccucaaggacgagcugcuguuucccagcugggaggcucuguucucaggcucugaggguccgcugaagcccggggcacgcaucuucuccuuugacggcaaggacguccugaggcaccccaccuggccccagaagagcguguggcauggcucggaccccaacgggcgcaggcugaccgagagcuacugugagacguggcggacggaggcucccucggccacgggccaggccuccucgcugcuggggggcaggcuccuggggcagagugccgcgagcugccaucacgccuacaucgugcucugcauugagaacagcuucaugacugccuccaaguag

SEQ ID NO: 7435 - RNA, 555 nt, Artificial Sequence
  derived and/or modified sequence opt1 from Endostatin__Homo_sapiens__NM_030582.3
augcacagccaccgcgacuuccagcccgugcugcaccucgucgcccugaacuccccgcugagcggcgggaugcggggcauccgcggggccgacuuccagugcuuccagcaggcgcgggccgugggccucgccgggaccuuccgcgccuuccuguccagccggcugcaggaccucuacuccaucgugcgccgggccgaccgcgcggccguccccaucgugaaccugaaggacgagcuccuguuccccagcugggaggcccuguucuccggcagcgagggcccccugaagccgggggcccggaucuucuccuucgacggcaaggacgugcuccgccaccccaccuggccccagaaguccgucuggcacgggagcgaccccaacggccggcgccugacggagagcuacugcgagaccuggcggaccgaggcgccguccgccaccgggcaggccagcucccugcucggcggccgccugcuggggcagagcgccgccuccugccaccacgcguacaucgugcucugcaucgagaacagcuucaugacggccuccaaguga

SEQ ID NO: 7436 - RNA, 555 nt, Artificial Sequence
  derived and/or modified sequence opt2 from Endostatin__Homo_sapiens__NM_030582.3
augcacucccaccgcgacuuccagcccguccuccaccucgucgcccucaacuccccccucuccggcggcaugcgcggcauccgcggcgccgacuuccagugcuuccagcaggcccgcgccgucggccucgccggcaccuuccgcgccuuccucuccucccgccuccaggaccucuacuccaucguccgccgcgccgaccgcgccgccguccccaucgucaaccucaaggacgagcuccucuuccccuccugggaggcccucuucuccggcuccgagggcccccucaagcccggcgcccgcaucuucuccuucgacggcaaggacguccuccgccaccccaccuggccccagaaguccgucuggcacggcuccgaccccaacggccgccgccucaccgaguccuacugcgagaccuggcgcaccgaggcccccuccgccaccggccaggccuccucccuccucggcggccgccuccucggccaguccgccgccuccugccaccacgccuacaucguccucugcaucgagaacuccuucaugaccgccuccaaguga

SEQ ID NO: 7437 - RNA, 555 nt, Artificial Sequence
  derived and/or modified sequence opt3 from Endostatin__Homo_sapiens__NM_030582.3
augcacagccauagagacuuccagcccgugcugcaccucgucgcccuuaacuccccucugucuggcgggaugaggggaauccggggugcugauuuucaaugcuuccagcaggcacgcgccguuggcuuggcggggaccuuucgagcuuucuuaucaagucgucugcaggaccuauacagcauugugagaagggccgaucgggcagccguaccaauagugaaucucaaggacgagcugcuuuuuccguccugggaagcucuguucucuggaucggagggccccuugaaaccuggugcacgcaucuuuucauucgaugggaaggacguccucagacauccaacauggccccagaaaagcguguggcacggaagugauccuaacggcaggcggcugacugaauccuauugugagacguggcgcaccgaagccccaucugcuacaggccaagccagcucccugcucgggggacgauuacugggucagucagcggcaaguugccaucacgccuacauuguucuuuguaucgagaauagcuuuaugacugcuucuaaguga

SEQ ID NO: 7438 - RNA, 555 nt, Artificial Sequence
  derived and/or modified sequence opt4 from Endostatin__Homo_sapiens__NM_030582.3
augcacagccacagagacuuccagcccgugcugcaccugguggcccugaacagcccccugagcggcggcaugagaggcaucagaggcgccgacuuccagugcuuccagcaggccagagccgugggccuggccggcaccuucagagccuuccugagcagcagacugcaggaccuguacagcaucgugagaagagccgacagagccgccgugcccaucgugaaccugaaggacgagcugcuguuccccagcugggaggcccuguucagcggcagcgagggcccccugaagcccggcgccagaaucuucagcuucgacggcaaggacgugcugagacaccccaccuggccccagaagagcguguggcacggcagcgaccccaacggcagaagacugaccgagagcuacugcgagaccuggagaaccgaggcccccagcgccaccggccaggccagcagccugcugggcggcagacugcugggccagagcgccgccagcugccaccacgccuacaucgugcugugcaucgagaacagcuucaugaccgccagcaaguga

SEQ ID NO: 7439 - RNA, 555 nt, Artificial Sequence
  derived and/or modified sequence opt5 from Endostatin__Homo_sapiens__NM_030582.3
augcacagccauagagacuuccagcccgugcugcaccucgucgcccugaacuccccucuuucuggcgggaugcggggaauccgcggcgcugauuuucaaugcuuccagcaggccagagcgguugggcuggcuggaaccuuucgggccuuccucagcucccgccugcaggaccuuuacucuauugugagacgggccgaucgcgcugccgugccgaucgucaaucugaaggacgagcuccuguuucccagcugggaggcucuguucuccggcucugaggggccucucaaacccggagccagaauuuuuagcuucgauggcaaggacgugcugcggcauccuacauggccccaaaaauccguuuggcacggcagcgauccuaacgggcgcagacuuacggaaucuuauugugagaccuggcggacagaagcgccguccgccaccggacaggcuagcucucugcucggcgggcgccugcuuggacaguccgccgcuagcugccaucacgccuacaucgugcuguguauugaaaauucuuuuaugacagcguccaaguga

SEQ ID NO: 7440 - RNA, 555 nt, Artificial Sequence
  derived and/or modified sequence opt6 from Endostatin__Homo_sapiens__NM_030582.3
augcauucacauagagauuuccaacccguacuacauuuaguagcauuaaauucaccauuaucaggaggaaugagaggaauaagaggagcagacuuucaauguuuccaacaagcaagagcuguaggacuagcuggaacauucagagcauuuuuaagcucaagacuacaagacuuauacaguauaguaagacgagcugauagagcagcaguaccaauaguaaauuuaaaagacgaacuauuauuuccaucaugggaagcacuauuuucaggaucagaaggaccauuaaaaccaggagcaagaauauuuucauuugacggaaaagacguauuaagacaucccacauggccacaaaaaagcguauggcauggaucagacccaaacggaagaagacuaacagaaucauacugugaaacauggagaacagaagcaccaucagcaacaggacaagcaucaucauuauuaggaggaagacuauuaggacaaucagcagcaucaugucaccaugcauauauaguacuauguauagaaaacucauucaugacagcaagcaaauaa

SEQ ID NO: 7441 - protein, 1356 aa, Artificial Sequence
  FLK-1__Homo_sapiens__P35968
MQSKVLLAVALWLCVETRAASVGLPSVSLDLPRLSIQKDILTIKANTTLQITCRGQRDLDWLWPNNQSGSEQRVEVTECSDGLFCKTLTIPKVIGNDTGAYKCFYRETDLASVIYVYVQDYRSPFIASVSDQHGVVYITENKNKTVVIPCLGSISNLNVSLCARYPEKRFVPDGNRISWDSKKGFTIPSYMISYAGMVFCEAKINDESYQSIMYIVVVVGYRIYDVVLSPSHGIELSVGEKLVLNCTARTELNVGIDFNWEYPSSKHQHKKLVNRDLKTQSGSEMKKFLSTLTIDGVTRSDQGLYTCAASSGLMTKKNSTFVRVHEKPFVAFGSGMESLVEATVGERVRIPAKYLGYPPPEIKWYKNGIPLESNHTIKAGHVLTIMEVSERDTGNYTVILTNPISKEKQSHVVSLVVYVPPQIGEKSLISPVDSYQYGTTQTLTCTVYAIPPPHHIHWYWQLEEECANEPSQAVSVTNPYPCEEWRSVEDFQGGNKIEVNKNQFALIEGKNKTVSTLVIQAANVSALYKCEAVNKVGRGERVISFHVTRGPEITLQPDMQPTEQESVSLWCTADRSTFENLTWYKLGPQPLPIHVGELPTPVCKNLDTLWKLNATMFSNSTNDILIMELKNASLQDQGDYVCLAQDRKTKKRHCVVRQLTVLERVAPTITGNLENQTTSIGESIEVSCTASGNPPPQIMWFKDNETLVEDSGIVLKDGNRNLTIRRVRKEDEGLYTCQACSVLGCAKVEAFFIIEGAQEKTNLEIIILVGTAVIAMFFWLLLVIILRTVKRANGGELKTGYLSIVMDPDELPLDEHCERLPYDASKWEFPRDRLKLGKPLGRGAFGQVIEADAFGIDKTATCRTVAVKMLKEGATHSEHRALMSELKILIHIGHHLNVVNLLGACTKPGGPLMVIVEFCKFGNLSTYLRSKRNEFVPYKTKGARFRQGKDYVGAIPVDLKRRLDSITSSQSSASSGFVEEKSLSDVEEEEAPEDLYKDFLTLEHLICYSFQVAKGMEFLASRKCIHRDLAARNILLSEKNVVKICDFGLARDIYKDPDYVRKGDARLPLKWMAPETIFDRVYTIQSDVWSFGVLLWEIFSLGASPYPGVKIDEEFCRRLKEGTRMRAPDYTTPEMYQTMLDCWHGEPSQRPTFSELVEHLGNLLQANAQQDGKDYIVLPISETLSMEEDSGLSLPTSPVSCMEEEEVCDPKFHYDNTAGISQYLQNSKRKSRPVSVKTFEDIPLEEPEVKVIPDDNQTDSGMVLASEELKTLEDRTKLSPSFGGMVPSKSRESVASEGSNQTSGYQSGYHSDDTDTTVYSSEEAELLKLIEIGVQTGSTAQILQPDSGTTLSSPPV

SEQ ID NO: 7442 - RNA, 4071 nt, Artificial Sequence
  FLK-1__Homo_sapiens__AAB88005
augcagagcaaggugcugcuggccgucgcccuguggcucugcguggagacccgggccgccucuguggguuugccuaguguuucucuugaucugcccaggcucagcauacaaaaagacauacuuacaauuaaggcuaauacaacucuucaaauuacuugcaggggacagagggacuuggacuggcuuuggcccaauaaucagaguggcagugagcaaaggguggaggugacugagugcagcgauggccucuucuguaagacacucacaauuccaaaagugaucggaaaugacacuggagccuacaagugcuucuaccgggaaacugacuuggccucggucauuuaugucuauguucaagauuacagaucuccauuuauugcuucuguuagugaccaacauggagucguguacauuacugagaacaaaaacaaaacuguggugauuccaugucucggguccauuucaaaucucaacgugucacuuugugcaagauacccagaaaagagauuuguuccugaugguaacagaauuuccugggacagcaagaagggcuuuacuauucccagcuacaugaucagcuaugcuggcauggucuucugugaagcaaaaauuaaugaugaaaguuaccagucuauuauguacauaguugucguuguaggguauaggauuuaugaugugguucugaguccgucucauggaauugaacuaucuguuggagaaaagcuugucuuaaauuguacagcaagaacugaacuaaauguggggauugacuucaacugggaauacccuucuucgaagcaucagcauaagaaacuuguaaaccgagaccuaaaaacccagucugggagugagaugaagaaauuuuugagcaccuuaacuauagaugguguaacccggagugaccaaggauuguacaccugugcagcauccagugggcugaugaccaagaagaacagcacauuugucaggguccaugaaaaaccuuuuguugcuuuuggaaguggcauggaaucucugguggaagccacggugggggagcgugucagaaucccugcgaaguaccuugguuacccacccccagaaauaaaaugguauaaaaauggaauaccccuugaguccaaucacacaauuaaagcggggcauguacugacgauuauggaagugagugaaagagacacaggaaauuacacugucauccuuaccaaucccauuucaaaggagaagcagagccauguggucucucugguuguguaugucccaccccagauuggugagaaaucucuaaucucuccuguggauuccuaccaguacggcaccacucaaacgcugacauguacggucuaugccauuccucccccgcaucacauccacugguauuggcaguuggaggaagagugcgccaacgagcccagccaagcugucucagugacaaacccauacccuugugaagaauggagaaguguggaggacuuccagggaggaaauaaaauugaaguuaauaaaaaucaauuugcucuaauugaaggaaaaaacaaaacuguaaguacccuuguuauccaagcggcaaaugugucagcuuuguacaaaugugaagcggucaacaaagucgggagaggagagagggugaucuccuuccacgugaccagggguccugaaauuacuuugcaaccugacaugcagcccacugagcaggagagcgugucuuuguggugcacugcagacagaucuacguuugagaaccucacaugguacaagcuuggcccacagccucugccaauccaugugggagaguugcccacaccuguuugcaagaacuuggauacucuuuggaaauugaaugccaccauguucucuaauagcacaaaugacauuuugaucauggagcuuaagaaugcauccuugcaggaccaaggagacuaugucugccuugcucaagacaggaagaccaagaaaagacauugcguggucaggcagcucacaguccuagagcguguggcacccacgaucacaggaaaccuggagaaucagacgacaaguauuggggaaagcaucgaagucucaugcacggcaucugggaaucccccuccacagaucaugugguuuaaagauaaugagacccuuguagaagacucaggcauuguauugaaggaugggaaccggaaccucacuauccgcagagugaggaaggaggacgaaggccucuacaccugccaggcaugcaguguucuuggcugugcaaaaguggaggcauuuuucauaauagaaggugcccaggaaaagacgaacuuggaaaucauuauucuaguaggcacggcggugauugccauguucuucuggcuacuucuugucaucauccuacggaccguuaagcgggccaauggaggggaacugaagacaggcuacuuguccaucgucauggauccagaugaacucccauuggaugaacauugugaacgacugccuuaugaugccagcaaaugggaauuccccagagaccggcugaagcuagguaagccucuuggccguggugccuuuggccaagugauugaagcagaugccuuuggaauugacaagacagcaacuugcaggacaguagcagucaaaauguugaaagaaggagcaacacacagugagcaucgagcucucaugucugaacucaagauccucauucauauuggucaccaucucaauguggucaaccuucuaggugccuguaccaagccaggagggccacucauggugauuguggaauucugcaaauuuggaaaccuguccacuuaccugaggagcaagagaaaugaauuuguccccuacaagaccaaaggggcacgauuccgucaagggaaagacuacguuggagcaaucccuguggaucugaaacggcgcuuggacagcaucaccaguagccagagcucagccagcucuggauuuguggaggagaagucccucagugauguagaagaagaggaagcuccugaagaucuguauaaggacuuccugaccuuggagcaucucaucuguuacagcuuccaaguggcuaagggcauggaguucuuggcaucgcgaaaguguauccacagggaccuggcggcacgaaauauccucuuaucggagaagaacgugguuaaaaucugugacuuuggcuuggcccgggauauuuauaaagauccagauuaugucagaaaaggagaugcucgccucccuuugaaauggauggccccagaaacaauuuuugacagaguguacacaauccagagugacgucuggucuuuugguguuuugcugugggaaauauuuuccuuaggugcuucuccauauccugggguaaagauugaugaagaauuuuguaggcgauugaaagaaggaacuagaaugagggccccugauuauacuacaccagaaauguaccagaccaugcuggacugcuggcacggggagcccagucagagacccacguuuucagaguugguggaacauuugggaaaucucuugcaagcuaaugcucagcaggauggcaaagacuacauuguucuuccgauaucagagacuuugagcauggaagaggauucuggacucucucugccuaccucaccuguuuccuguauggaggaggaggaaguaugugaccccaaauuccauuaugacaacacagcaggaaucagucaguaucugcagaacaguaagcgaaagagccggccugugaguguaaaaacauuugaagauaucccguuagaagaaccagaaguaaaaguaaucccagaugacaaccagacggacagugguaugguucuugccucagaagagcugaaaacuuuggaagacagaaccaaauuaucuccaucuuuugguggaauggugcccagcaaaagcagggagucuguggcaucugaaggcucaaaccagacaagcggcuaccaguccggauaucacuccgaugacacagacaccaccguguacuccagugaggaagcagaacuuuuaaagcugauagagauuggagugcaaaccgguagcacagcccagauucuccagccugacucggggaccacacugagcucuccuccuguuuaa

SEQ ID NO: 7443 - RNA, 4071 nt, Artificial Sequence
  derived and/or modified sequence opt1 from FLK-1__Homo_sapiens__AAB88005
augcagagcaaggugcugcucgccgucgcccuguggcugugcguggagacccgcgcggccuccgugggccuccccagcgucucccuggaccugccccggcucagcauccagaaggacauccugaccaucaaggccaacacgacccugcagaucacgugccgcgggcagcgggaccucgacuggcuguggcccaacaaccaguccggcagcgagcagcgcguggaggugaccgagugcuccgacgggcuguucugcaagacccucaccauccccaaggucaucggcaacgacaccggggccuacaagugcuucuaccgggagaccgaccuggccagcgugaucuacguguacguccaggacuaccgcucccccuucaucgcgagcguguccgaccagcacggcguggucuacaucacggagaacaagaacaagaccguggugaucccgugccugggcagcaucuccaaccucaacgucagccugugcgcccgguaccccgagaagcgcuucgugcccgacgggaaccggaucuccugggacagcaagaagggcuucaccauccccuccuacaugaucagcuacgccgggaugguguucugcgaggccaagaucaacgacgaguccuaccagagcaucauguacaucgucgugguggucggcuaccgcaucuacgacguggugcugagcccgucccacgggaucgagcucagcgucggcgagaagcuggugcugaacugcaccgcgcggacggagcucaacgucggcaucgacuucaacugggaguaccccuccagcaagcaccagcacaagaagcuggugaaccgcgaccugaagacccaguccgggagcgagaugaagaaguuccucuccacccugaccaucgacggcgugacgcggagcgaccaggggcuguacacgugcgccgccuccagcggccucaugaccaagaagaacuccaccuucguccgcgugcacgagaagcccuucguggccuucggcagcgggauggagucccuggucgaggccaccgugggcgagcgggugcgcauccccgcgaaguaccugggguacccgccgcccgagaucaagugguacaagaacggcaucccccucgagagcaaccacaccaucaaggccgggcacguccugaccaucauggagguguccgagcgggacaccggcaacuacacggugauccugaccaacccgaucagcaaggagaagcagucccacgucgugagccucguggucuacgugccgccccagaucggcgagaagucccugaucagccccguggacagcuaccaguacgggaccacccagacgcugaccugcaccgucuacgccaucccgccgccccaccacauccacugguacuggcagcucgaggaggagugcgccaacgagcccucccaggccgugagcgugaccaaccccuaccccugcgaggaguggcgcuccgucgaggacuuccagggcgggaacaagaucgaggugaacaagaaccaguucgcgcugaucgagggcaagaacaagacggugagcacccuggucauccaggccgccaacguguccgcccucuacaagugcgaggccgugaacaaggucgggcggggcgagcgcgugaucagcuuccacgugacccggggccccgagaucacccugcagcccgacaugcagcccacggagcaggaguccgucagccuguggugcaccgcggaccgcuccaccuucgagaaccucaccugguacaagcuggggccccagccccugccgauccacgugggcgagcuccccacccccgugugcaagaaccuggacacgcuguggaagcucaacgccaccauguucagcaacuccaccaacgacauccugaucauggagcugaagaacgccagccugcaggaccagggggacuacgucugccucgcccaggaccgcaagaccaagaagcggcacugcguggugcgccagcugacgguccuggagcggguggcccccaccaucaccggcaaccucgagaaccagaccacguccaucggggagagcaucgagguguccugcaccgcgagcggcaacccgccgccccagaucaugugguucaaggacaacgagacccuggucgaggacuccggcaucgugcugaaggacgggaaccgcaaccucaccauccggcgcgugcggaaggaggacgagggccuguacacgugccaggccugcagcguccuggggugcgccaagguggaggccuucuucaucaucgagggcgcgcaggagaagaccaaccucgagaucaucauccuggugggcaccgccgucaucgccauguucuucuggcugcuccuggugaucauccugcgcaccgugaagcgggccaacgggggcgagcucaagacgggguaccugagcaucgucauggaccccgacgagcugccccucgacgagcacugcgagcgccugcccuacgacgccuccaagugggaguucccccgggaccgccugaagcucggcaagccccuggggcggggcgcguucggccaggugaucgaggccgacgccuucgggaucgacaagaccgcgaccugccgcaccguggccgucaagaugcugaaggagggcgccacgcacagcgagcaccgggcccucauguccgagcugaagauccugauccacaucgggcaccaccucaacguggucaaccugcugggcgccugcaccaagcccgggggcccccucauggugaucguggaguucugcaaguucggcaaccugagcaccuaccugcgcuccaagcggaacgaguucguccccuacaagaccaagggggcccgcuuccggcagggcaaggacuacgugggggccauccccguggaccucaagcgccgccuggacagcaucacguccagccaguccagcgcguccagcggcuucgucgaggagaagucccugagcgacguggaggaggaggaggccccggaggaccucuacaaggacuuccugacccuggagcaccucaucugcuacuccuuccagguggccaaggggauggaguuccuggccagccggaagugcauccaccgcgaccuggcggcccggaacauccuccuguccgagaagaacgucgugaagaucugcgacuucggccuggcccgcgacaucuacaaggaccccgacuacgugcggaagggcgacgcccgccucccccugaaguggauggcccccgagaccaucuucgaccgggucuacaccauccagagcgacgugugguccuucggggugcugcucugggagaucuucagccugggcgcgagcccguaccccggggucaagaucgacgaggaguucugccgccggcugaaggagggcacgcgcaugcgggcccccgacuacaccacccccgagauguaccagaccaugcucgacugcuggcacggggagccgucccagcgccccacguucagcgagcugguggagcaccugggcaaccuccugcaggccaacgcccagcaggacggcaaggacuacaucgugcugcccaucuccgagacccucagcauggaggaggacuccgggcugagccugccgaccucccccgucagcugcauggaggaggaggaggugugcgaccccaaguuccacuacgacaacaccgccggcaucucccaguaccuccagaacagcaagcggaagucccgccccgugagcgucaagacguucgaggacaucccgcuggaggagcccgaggugaaggugauccccgacgacaaccagaccgacuccgggaugguccuggcgagcgaggagcucaagacccuggaggaccggaccaagcugucccccagcuucggcggcauggugccguccaagagccgcgaguccguggccagcgaggggagcaaccagaccuccggcuaccagagcggguaccacuccgacgacacggacaccaccgucuacagcuccgaggaggccgagcuccugaagcugaucgagaucggcgugcagaccgggagcacggcccagauccuccagcccgacuccggcaccacccugagcuccccgcccguguga

SEQ ID NO: 7444 - RNA, 4071 nt, Artificial Sequence
  derived and/or modified sequence opt2 from FLK-1__Homo_sapiens__AAB88005
augcaguccaagguccuccucgccgucgcccucuggcucugcgucgagacccgcgccgccuccgucggccuccccuccgucucccucgaccucccccgccucuccauccagaaggacauccucaccaucaaggccaacaccacccuccagaucaccugccgcggccagcgcgaccucgacuggcucuggcccaacaaccaguccggcuccgagcagcgcgucgaggucaccgagugcuccgacggccucuucugcaagacccucaccauccccaaggucaucggcaacgacaccggcgccuacaagugcuucuaccgcgagaccgaccucgccuccgucaucuacgucuacguccaggacuaccgcucccccuucaucgccuccgucuccgaccagcacggcgucgucuacaucaccgagaacaagaacaagaccgucgucauccccugccucggcuccaucuccaaccucaacgucucccucugcgcccgcuaccccgagaagcgcuucguccccgacggcaaccgcaucuccugggacuccaagaagggcuucaccauccccuccuacaugaucuccuacgccggcauggucuucugcgaggccaagaucaacgacgaguccuaccaguccaucauguacaucgucgucgucgucggcuaccgcaucuacgacgucguccucucccccucccacggcaucgagcucuccgucggcgagaagcucguccucaacugcaccgcccgcaccgagcucaacgucggcaucgacuucaacugggaguaccccuccuccaagcaccagcacaagaagcucgucaaccgcgaccucaagacccaguccggcuccgagaugaagaaguuccucuccacccucaccaucgacggcgucacccgcuccgaccagggccucuacaccugcgccgccuccuccggccucaugaccaagaagaacuccaccuucguccgcguccacgagaagcccuucgucgccuucggcuccggcauggagucccucgucgaggccaccgucggcgagcgcguccgcauccccgccaaguaccucggcuaccccccccccgagaucaagugguacaagaacggcaucccccucgaguccaaccacaccaucaaggccggccacguccucaccaucauggaggucuccgagcgcgacaccggcaacuacaccgucauccucaccaaccccaucuccaaggagaagcagucccacgucgucucccucgucgucuacguccccccccagaucggcgagaagucccucaucucccccgucgacuccuaccaguacggcaccacccagacccucaccugcaccgucuacgccaucccccccccccaccacauccacugguacuggcagcucgaggaggagugcgccaacgagcccucccaggccgucuccgucaccaaccccuaccccugcgaggaguggcgcuccgucgaggacuuccagggcggcaacaagaucgaggucaacaagaaccaguucgcccucaucgagggcaagaacaagaccgucuccacccucgucauccaggccgccaacgucuccgcccucuacaagugcgaggccgucaacaaggucggccgcggcgagcgcgucaucuccuuccacgucacccgcggccccgagaucacccuccagcccgacaugcagcccaccgagcaggaguccgucucccucuggugcaccgccgaccgcuccaccuucgagaaccucaccugguacaagcucggcccccagccccuccccauccacgucggcgagcuccccacccccgucugcaagaaccucgacacccucuggaagcucaacgccaccauguucuccaacuccaccaacgacauccucaucauggagcucaagaacgccucccuccaggaccagggcgacuacgucugccucgcccaggaccgcaagaccaagaagcgccacugcgucguccgccagcucaccguccucgagcgcgucgcccccaccaucaccggcaaccucgagaaccagaccaccuccaucggcgaguccaucgaggucuccugcaccgccuccggcaacccccccccccagaucaugugguucaaggacaacgagacccucgucgaggacuccggcaucguccucaaggacggcaaccgcaaccucaccauccgccgcguccgcaaggaggacgagggccucuacaccugccaggccugcuccguccucggcugcgccaaggucgaggccuucuucaucaucgagggcgcccaggagaagaccaaccucgagaucaucauccucgucggcaccgccgucaucgccauguucuucuggcuccuccucgucaucauccuccgcaccgucaagcgcgccaacggcggcgagcucaagaccggcuaccucuccaucgucauggaccccgacgagcucccccucgacgagcacugcgagcgccuccccuacgacgccuccaagugggaguucccccgcgaccgccucaagcucggcaagccccucggccgcggcgccuucggccaggucaucgaggccgacgccuucggcaucgacaagaccgccaccugccgcaccgucgccgucaagaugcucaaggagggcgccacccacuccgagcaccgcgcccucauguccgagcucaagauccucauccacaucggccaccaccucaacgucgucaaccuccucggcgccugcaccaagcccggcggcccccucauggucaucgucgaguucugcaaguucggcaaccucuccaccuaccuccgcuccaagcgcaacgaguucguccccuacaagaccaagggcgcccgcuuccgccagggcaaggacuacgucggcgccauccccgucgaccucaagcgccgccucgacuccaucaccuccucccaguccuccgccuccuccggcuucgucgaggagaagucccucuccgacgucgaggaggaggaggcccccgaggaccucuacaaggacuuccucacccucgagcaccucaucugcuacuccuuccaggucgccaagggcauggaguuccucgccucccgcaagugcauccaccgcgaccucgccgcccgcaacauccuccucuccgagaagaacgucgucaagaucugcgacuucggccucgcccgcgacaucuacaaggaccccgacuacguccgcaagggcgacgcccgccucccccucaaguggauggcccccgagaccaucuucgaccgcgucuacaccauccaguccgacgucugguccuucggcguccuccucugggagaucuucucccucggcgccucccccuaccccggcgucaagaucgacgaggaguucugccgccgccucaaggagggcacccgcaugcgcgcccccgacuacaccacccccgagauguaccagaccaugcucgacugcuggcacggcgagcccucccagcgccccaccuucuccgagcucgucgagcaccucggcaaccuccuccaggccaacgcccagcaggacggcaaggacuacaucguccuccccaucuccgagacccucuccauggaggaggacuccggccucucccuccccaccucccccgucuccugcauggaggaggaggaggucugcgaccccaaguuccacuacgacaacaccgccggcaucucccaguaccuccagaacuccaagcgcaagucccgccccgucuccgucaagaccuucgaggacaucccccucgaggagcccgaggucaaggucauccccgacgacaaccagaccgacuccggcaugguccucgccuccgaggagcucaagacccucgaggaccgcaccaagcucucccccuccuucggcggcaugguccccuccaagucccgcgaguccgucgccuccgagggcuccaaccagaccuccggcuaccaguccggcuaccacuccgacgacaccgacaccaccgucuacuccuccgaggaggccgagcuccucaagcucaucgagaucggcguccagaccggcuccaccgcccagauccuccagcccgacuccggcaccacccucuccuccccccccgucuga

SEQ ID NO: 7445 - RNA, 4071 nt, Artificial Sequence
  derived and/or modified sequence opt3 from FLK-1__Homo_sapiens__AAB88005
augcagagcaaggugcugcucgccgucgcucuuuggcugugcguugagaccagagcagccuccgugggcuugcccucuguaucauuagaccugccuaggcuaaguauccaaaaagauauucucacaauaaaggcgaacacuacgcugcagaucaccugucgggggcagcgcgaccuugauuggcuguggccaaauaaccagagcggauccgaacaacgaguggaggucacagaaugcucugacgguuuguucuguaaaacucucaccauuccgaaggugaucggcaaugauacaggggcuuacaaaugcuuuuaucgugagaccgaccuggccucgguuauuuacguguauguccaggauuacagaucacccuucaucgcaagcgugagugaccagcacggaguaguuuauauaacugaaaacaagaauaagacaguggucaucccuugucugggcuccauuucuaaccucaaugugagcuuaugcgccagguacccagagaaacgguuugugcccgaugguaaccgcaucuccugggacucaaagaaaggguucaccauuccuaguuauaugaucagcuacgcuggaauggucuuuugugaggcaaagauaaaugaugaaucuuaccaguccauuauguauaucguugugguagugggcuacagaauuuaugacgucgugcugucaccaagccauggcaucgagcuuaguguuggggaaaaauuggugcugaacugcacggccaggacugagcuaaaugucggaaucgauuucaacugggaguaccccucuuccaagcaccaacauaagaaacucgugaaucgggaccugaagacccagagcgguucggaaaugaaaaaguuucuuucuacacugacuauugacggcguaacccgcuccgaucagggguuguauacaugugcugccucaaguggacucaugaccaaaaagaacagcacguucguucgagugcacgagaaaccuuuugucgcguucggcuccgguauggaaucucugguggaggcaacugucggggaaagagugaggauaccagccaaguacuuaggauauccgcccccugagaucaagugguacaaaaauggcauuccacuggagagcaaccauacaaucaaggcuggccacguucucaccauaauggaagugucagagcgggacacugggaacuacacaguaauucuuaccaaucccaucaguaaagaaaagcagucccacgucgugagccugguuguguaugucccuccacaaaucggagagaaaucuuugauuucacccguggauaguuaccaguaugguacgacccagacacuaacuugcaccguauacgccaucccgccuccccaucacauucauugguauuggcaacuggaagaggagugugcaaacgaaccaagccaggcuguguccguuacaaauccuuaccccugcgaggaauggcguucugucgaggacuuucagggcgggaacaagauagaagugaauaagaaccaguucgcccucaucgagggcaaaaauaagacugugucgacccuggucauucaagcggccaacguuagcgcacuuuauaaaugcgaggcugugaauaaggugggacgcggugaaagaguaaucuccuuucacgucacaagggggccagagaucacccugcagcccgauaugcagccuacugaacaggagucagugaguuugugguguacggccgaccggucuacauucgagaaccucaccugguacaaacugggcccacaaccguuacccauucacguuggagaacugccuacuccagugugcaagaaucuagauacccucuggaagcugaacgcuacaauguucagcaauuccaccaacgacauacuuaucauggaguugaaaaaugccucacugcaggaucagggcgacuacgucugucucgcacaggaucgaaagacuaaaaagcgccauugcgugguuagacaacugacagugcuugaaaggguagcccccacgauuaccgggaaccuggagaaccagacuacaagcaucggagaaucuauugaggucuccuguaccgcuagugguaauccuccaccccagaucaugugguuuaaagacaacgagacauugguggaagacagcggcauagugcucaaggaugggaaucggaaccugacuauccgcagagucaggaaggaggacgaaggauuauauaccugccaggcguguucuguucugggcugcgcaaaaguggaggccuucuuuauuaucgaaggugcucaagagaagacgaaucuagagauuaucauacucguagggaccgccgugauugcaauguucuuuuggcugcuuuuggucaucauucugcguacagugaaacgggccaacggcggagaacucaagacuggcuaccuguccaucguuauggauccggacgaguuaccucuggaugaacacugugagcgacuuccauaugacgcuucaaaaugggaauuucccagagauagguugaagcucgggaaaccucugggacgcggugccuuuggccaggugauagaggcagacgcguucgggaucgauaagaccgcuacaugccggacugucgccgugaagaugcuaaaagagggagcaacccauagugaacacagagcccugaugagcgagcucaagauucugauccauauuggccaccaccuuaauguugugaacuugcugggugcuuguacgaaacccgggggcccauuaauggucaucguagaauuuugcaaguucggaaaucucucgacauaccugagguccaaacgcaacgaguuugugccuuauaagaccaagggcgcccgauuccggcaggggaaagacuacguuggagcaauacccguggaucuuaagcguagacuggacucuauuacuagcucacaaaguuccgcuucuagcggcuuugucgaggaaaaauccuugucagauguggaggaagaggaagccccagaggaccucuauaaggacuuccugacacuagagcaucugaucugcuacagcuuccagguagcgaaagguauggaauuucucgccaguaggaaguguauccaccgcgaucuggcugcacggaauauucuuuugucugagaagaacguggucaaaaucugcgacuucgggcuggccagagauauuuacaaggacccggauuauguuaggaaaggagacgcucgauuaccucucaaguggauggcccccgaaaccauauuugaucgcguguacacuauccaguccgacguguggagcuucggcguccugcuuugggagauuuucucgcugggugcaucaccauaucccggcgugaaaaucgaugaagaguucugucggagacuaaaggaggggaccaggaugcgugcgccugacuacacaacgccagaaauguaucagaccaugcucgauugcuggcauggagagcccucucaacgcccuacuuuuagugaacugguugagcacuugggcaaucuguuacaggccaacgcucagcaggacgggaaggauuacauuguacucccgaucuccgaaacacugagcauggaggaggacucuggacuuagccugccaaccucccccgugucauguauggaagaggaagaggucugcgacccuaaauuccacuaugauaauacagccggcauaagucaauacuugcagaacagcaagcggaaaucuagaccaguguccguuaagacuuuugaggacaucccccucgaggaaccugaagugaaagucauuccggaugacaaccagaccgauucagguauggugcuggcaagugaggaacuaaagacgcuggaggacaggacaaaacuuagccccuccuucgggggaaugguaccaucuaagucgcgagagagcgucgcuucagaaggcuccaaucagaccagugguuaccaaucuggcuaucauagcgaugacacugauaccacaguguacuccucagaggaagccgagcuccugaaguugaucgaaauugggguucagacuggaucuaccgcacagauccugcaaccugacagcggcacaacguuaaguuccccacccguguga

SEQ ID NO: 7446 - RNA, 4071 nt, Artificial Sequence
  derived and/or modified sequence opt4 from FLK-1__Homo_sapiens__AAB88005
augcagagcaaggugcugcuggccguggcccuguggcugugcguggagaccagagccgccagcgugggccugcccagcgugagccuggaccugcccagacugagcauccagaaggacauccugaccaucaaggccaacaccacccugcagaucaccugcagaggccagagagaccuggacuggcuguggcccaacaaccagagcggcagcgagcagagaguggaggugaccgagugcagcgacggccuguucugcaagacccugaccauccccaaggugaucggcaacgacaccggcgccuacaagugcuucuacagagagaccgaccuggccagcgugaucuacguguacgugcaggacuacagaagccccuucaucgccagcgugagcgaccagcacggcgugguguacaucaccgagaacaagaacaagaccguggugauccccugccugggcagcaucagcaaccugaacgugagccugugcgccagauaccccgagaagagauucgugcccgacggcaacagaaucagcugggacagcaagaagggcuucaccauccccagcuacaugaucagcuacgccggcaugguguucugcgaggccaagaucaacgacgagagcuaccagagcaucauguacaucguggugguggugggcuacagaaucuacgacguggugcugagccccagccacggcaucgagcugagcgugggcgagaagcuggugcugaacugcaccgccagaaccgagcugaacgugggcaucgacuucaacugggaguaccccagcagcaagcaccagcacaagaagcuggugaacagagaccugaagacccagagcggcagcgagaugaagaaguuccugagcacccugaccaucgacggcgugaccagaagcgaccagggccuguacaccugcgccgccagcagcggccugaugaccaagaagaacagcaccuucgugagagugcacgagaagcccuucguggccuucggcagcggcauggagagccugguggaggccaccgugggcgagagagugagaauccccgccaaguaccugggcuaccccccccccgagaucaagugguacaagaacggcaucccccuggagagcaaccacaccaucaaggccggccacgugcugaccaucauggaggugagcgagagagacaccggcaacuacaccgugauccugaccaaccccaucagcaaggagaagcagagccacguggugagccuggugguguacgugcccccccagaucggcgagaagagccugaucagccccguggacagcuaccaguacggcaccacccagacccugaccugcaccguguacgccaucccccccccccaccacauccacugguacuggcagcuggaggaggagugcgccaacgagcccagccaggccgugagcgugaccaaccccuaccccugcgaggaguggagaagcguggaggacuuccagggcggcaacaagaucgaggugaacaagaaccaguucgcccugaucgagggcaagaacaagaccgugagcacccuggugauccaggccgccaacgugagcgcccuguacaagugcgaggccgugaacaaggugggcagaggcgagagagugaucagcuuccacgugaccagaggccccgagaucacccugcagcccgacaugcagcccaccgagcaggagagcgugagccuguggugcaccgccgacagaagcaccuucgagaaccugaccugguacaagcugggcccccagccccugcccauccacgugggcgagcugcccacccccgugugcaagaaccuggacacccuguggaagcugaacgccaccauguucagcaacagcaccaacgacauccugaucauggagcugaagaacgccagccugcaggaccagggcgacuacgugugccuggcccaggacagaaagaccaagaagagacacugcguggugagacagcugaccgugcuggagagaguggcccccaccaucaccggcaaccuggagaaccagaccaccagcaucggcgagagcaucgaggugagcugcaccgccagcggcaacccccccccccagaucaugugguucaaggacaacgagacccugguggaggacagcggcaucgugcugaaggacggcaacagaaaccugaccaucagaagagugagaaaggaggacgagggccuguacaccugccaggccugcagcgugcugggcugcgccaagguggaggccuucuucaucaucgagggcgcccaggagaagaccaaccuggagaucaucauccuggugggcaccgccgugaucgccauguucuucuggcugcugcuggugaucauccugagaaccgugaagagagccaacggcggcgagcugaagaccggcuaccugagcaucgugauggaccccgacgagcugccccuggacgagcacugcgagagacugcccuacgacgccagcaagugggaguuccccagagacagacugaagcugggcaagccccugggcagaggcgccuucggccaggugaucgaggccgacgccuucggcaucgacaagaccgccaccugcagaaccguggccgugaagaugcugaaggagggcgccacccacagcgagcacagagcccugaugagcgagcugaagauccugauccacaucggccaccaccugaacguggugaaccugcugggcgccugcaccaagcccggcggcccccugauggugaucguggaguucugcaaguucggcaaccugagcaccuaccugagaagcaagagaaacgaguucgugcccuacaagaccaagggcgccagauucagacagggcaaggacuacgugggcgccauccccguggaccugaagagaagacuggacagcaucaccagcagccagagcagcgccagcagcggcuucguggaggagaagagccugagcgacguggaggaggaggaggcccccgaggaccuguacaaggacuuccugacccuggagcaccugaucugcuacagcuuccagguggccaagggcauggaguuccuggccagcagaaagugcauccacagagaccuggccgccagaaacauccugcugagcgagaagaacguggugaagaucugcgacuucggccuggccagagacaucuacaaggaccccgacuacgugagaaagggcgacgccagacugccccugaaguggauggcccccgagaccaucuucgacagaguguacaccauccagagcgacguguggagcuucggcgugcugcugugggagaucuucagccugggcgccagccccuaccccggcgugaagaucgacgaggaguucugcagaagacugaaggagggcaccagaaugagagcccccgacuacaccacccccgagauguaccagaccaugcuggacugcuggcacggcgagcccagccagagacccaccuucagcgagcugguggagcaccugggcaaccugcugcaggccaacgcccagcaggacggcaaggacuacaucgugcugcccaucagcgagacccugagcauggaggaggacagcggccugagccugcccaccagccccgugagcugcauggaggaggaggaggugugcgaccccaaguuccacuacgacaacaccgccggcaucagccaguaccugcagaacagcaagagaaagagcagacccgugagcgugaagaccuucgaggacaucccccuggaggagcccgaggugaaggugauccccgacgacaaccagaccgacagcggcauggugcuggccagcgaggagcugaagacccuggaggacagaaccaagcugagccccagcuucggcggcauggugcccagcaagagcagagagagcguggccagcgagggcagcaaccagaccagcggcuaccagagcggcuaccacagcgacgacaccgacaccaccguguacagcagcgaggaggccgagcugcugaagcugaucgagaucggcgugcagaccggcagcaccgcccagauccugcagcccgacagcggcaccacccugagcagcccccccguguga

SEQ ID NO: 7447 - RNA, 4071 nt, Artificial Sequence
  derived and/or modified sequence opt5 from FLK-1__Homo_sapiens__AAB88005
augcagagcaaggugcugcucgccgucgcucuguggcuuugcguugagaccagagccgcguccgugggccugcccucugugagccucgaccugccucggcuuuccauccaaaaagauauucugacaaucaaggcuaacacgacccuccagauuacaugucgcgggcagagagaccuggauuggcuguggccgaauaaccagucuggaagcgaacaacgggucgaggugaccgaaugcuccgacggccucuucuguaaaacacugaccauccccaagguuauugggaaugauacaggagccuacaaaugcuuuuaucgcgagaccgaccuugccucugugaucuacgucuaugugcaggauuacagaagcccuuucaucgcuuccguuagcgaccagcacggcguggucuauauuacggaaaacaagaauaagaccguggugauccccugucuggggucuauuuccaaccucaaugucagccugugcgcccgguacccugagaaacgcuuuguucccgauggaaacagaaucucuugggacuccaagaaaggcuucacaauuccuagcuauaugaucucuuacgcuggcaugguguuuugugaggccaagauuaaugaugaauccuaccagagcaucauguauaucguggucgugguuggguaccggauuuaugacgugguccuuuccccgucucauggaaucgagcugagcgugggcgaaaaacucguucugaacugcaccgcgcgcacagagcugaauguggggauugauuucaacugggaguaccccuccagcaagcaccaacauaagaaacucgucaauagagaccugaagacccagucuggauccgaaaugaaaaaguuucuuagcacgcugacaaucgacggcgugacccggucugaucaggggcucuauacaugugccgcuagcuccggacugaugaccaaaaagaacucuaccuucguccgcgugcacgagaaaccuuuuguugccuucggcagcggcauggaaucccuuguggaggcuacagucggggaaagagugcggauucccgccaaguaccugggauauccucccccggagaucaagugguacaaaaauggcaucccucucgagagcaaccauacgauuaaggcggggcacguucugaccaucauggaagugucugagcgcgacacaggaaacuacaccgucauucugacaaaucccaucuccaaagaaaagcagagccacguggugucucucguugucuaugugccuccccaaauuggcgagaaaucccugaucagccccguggauuccuaccaguaugggaccacgcagacacuuaccugcaccgucuacgccaucccuccgccccaucacauucauugguauuggcaacuggaagaggagugugcuaacgaaccuucucaggccgugagcguuacaaaucccuacccuugcgaggaauggagauccguggaggacuuucagggaggcaacaagaucgaagucaauaagaaccaguucgcucucauugagggcaaaaauaagaccgugucuacacugguuauccaagccgccaacgugagcgcucuuuauaaaugcgaggcggucaauaagguggggcggggagaaagaguuauuuccuuucacgugacgcgcggccccgagaucacccugcagccggauaugcagccuacagaacaggagagcgucucucucugguguaccgccgaccgguccacauucgagaaccugaccugguacaaacuggggccccaaccucuccccauucacgugggagaacugccuacgcccgugugcaagaaucuugauacccuguggaagcucaacgcuacaauguucagcaauucuaccaacgacauccugaucauggagcugaaaaaugccucccuucaggaucagggcgacuacgucugucucgcccaggauagaaagacaaagaagcgccauugcguugugcggcaacugaccgugcuggaaagagucgcuccgacgauuacagggaaccucgagaaccagaccacaagcaucggcgaaucuauugaggugagcuguaccgccuccggaaauccuccuccccagaucaugugguuuaaagacaacgagacccugguugaagacagcggcauugugcuuaaggaugggaaucgcaaccugacaauccggagaguccgcaaggaggacgaaggacucuauacgugccaggcguguucugugcugggcugcgcuaaaguugaggccuucuuuaucauugaaggggcccaagagaagaccaaucuggagaucauuauccuugugggaacagcugucauugccauguucuuuuggcuccugcuggugaucauccuccggaccguuaaaagagcuaacggcggggaacugaagacaggcuaccuuuccauugugauggaucccgacgagcugccgcucgaugaacacugugagcgccugcccuaugacgccagcaaaugggaauuuccucgggauagacugaaacuuggaaaaccccucggccgcggggcguuuggacaggucaucgaggccgacgcuuucggcauugauaagaccgccacgugccggacaguggcugugaagaugcugaaagagggggccacccauuccgaacacagagcgcugaugucugagcucaagauccugauucauaucggacaccaccuuaaugucguuaaccugcucggcgccuguaccaaaccugggggcccccugauggugaucguggaauuuugcaaguucggaaaucugagcacauaccuucgguccaaaagaaacgaguuugucccuuauaagaccaagggcgcucgcuuccggcaggggaaagacuacgugggagccauucccguugaucucaagagacgccuggacucuaucacaagcucccaaucuagcgcuuccagcggcuuuguggaggaaaaaucucuguccgaugucgaggaagaggaagccccggaggaccucuauaaggacuuccugacgcuugagcaucugauuugcuacagcuuccagguggccaaagggauggaauuucucgcuucuagaaaguguauccaccgggaucuggcggcccgcaauauucugcuuuccgagaagaacguugugaaaaucugcgacuucggacuggcuagagauauuuacaaggacccugauuauguccggaaaggcgacgcccgccucccccugaaguggauggccccugaaaccaucuuugauagaguguacacaauccagagcgacgucuggucuuucggggugcuccugugggagauuuucucccuuggcgcuagccccuauccgggaguuaaaaucgaugaagaguucugucggcgccugaaggagggcaccagaaugcgggccccugacuacacaacccccgaaauguaucagacgaugcucgauugcuggcauggggagccuucccaacgccccaccuuuagcgaacugguggagcaccugggaaaucuucugcaggcgaacgcucagcaggacggcaaggauuacauuguccuccccaucucugaaacacugagcauggaggaggacuccgggcucucucugccuaccagcccgguguccuguauggaagaggaagagguuugcgaccccaaauuccacuaugauaauacagccggaauuucucaauaccuucagaacagcaagagaaaaucccggccugugucugucaagaccuuugaggacaucccccuggaggaaccugaagugaaagugauccccgaugacaaccagacagauagcggcaugguucucgccuccgaggaacugaagacccuggaggacagaacgaaacuuagcccuucuuucggcgggauggucccguccaagagccgcgagucuguggcuuccgaaggaagcaaucagacauccggcuaccaaucuggguaucauagcgaugacaccgauaccacaguguacuccagcgaggaagccgagcugcucaagcugauugaaaucggaguccagaccggcucuacggcgcagauucuccaacccgacuccgggacaacccugagcucuccucccguguga

SEQ ID NO: 7448 - RNA, 4071 nt, Artificial Sequence
  derived and/or modified sequence opt6 from FLK-1__Homo_sapiens__AAB88005
augcaauccaaagugcuacuugccgucgcuuuguggcuauguguagaaacacgagcagcaucuguuggcuuacccuccgucucacuagaccugccaagacuauccauacagaaagauauauuaacaauaaaagcuaacacaacccuucaaaucacuugucgaggacaaagagaucuagacuggcuguggccuaauaaucaauccgguagugaacaaagagucgaaguaacggagugcucagauggacuauucuguaaaacucuaacgauaccaaaaguaauaggaaaugauacuggugcauauaaauguuuuuauagagaaacugacuuagcaucgguaauauauguauacguacaagauuauagaucgccauucauagcuucuguuucagaccagcauggagucguauauauaacugagaauaaaaauaaaaccgucgucauaccuugccuaggaucaauuaguaauuuaaacguuagccuuugugcaagauaucccgaaaaacgcuucgucccagauggaaaucgaauaaguugggauucuaaaaaaggauuuacaauaccgagcuacaugauaucuuacgcaggaaugguauuuugugaagcaaaaaucaaugaugaaucuuaccaaucaauuauguauauagugguaguaguuggcuacaggauauaugauguaguucuaucacccucccaugguauagaauuaucgguaggagaaaaauuaguacuuaauuguaccgcaagaacagaacuaaauguugggauagacuucaauugggaauacccguccaguaagcaucaacacaaaaaacuaguuaauagagaccucaaaacacaaucggguuccgagaugaaaaaguucuugucaacacucacgauugacggaguuacaaggucggaccaaggucucuauacaugcgcagcaaguucaggcuuaaugaccaaaaaaaacucuacauuuguuagaguucaugaaaaaccuuuuguugcauuuggaucgggcauggaaagccuaguagaagcaacuguaggggaacggguaagaauacccgcuaaguacuuaggauacccacccccugaaauaaaaugguauaaaaacggaauaccauuagaauccaaucauacaauuaaagcaggacacguacucacaauaauggaaguaagugaaagagauacaggaaauuacaccgucauccuaacuaaccccauaucaaaagaaaaacaaucucacguagucucacugguuguuuauguaccaccacaaauaggagaaaaaucacuaaucucaccugucgauucauaucaguauggaacaacccaaacauuaaccuguacaguuuaugccauaccaccuccacaccacauacauugguacuggcaauuagaagaagaaugugccaaugaaccuucacaagcugugagcgugacaaauccuuauccgugugaagaguggcguucaguagaggacuuucaaggugguaacaaaauugagguaaauaaaaaccaauuugcauuaauugaaggcaaaaacaaaacaguuucuacucuaguuauacaagcugcaaaugucuccgcacuauauaagugcgaagcaguaaauaagguaggucgcggagaaaggguaaucuccuuucacguaacacguggaccagaaauuacccuacaaccggauaugcaaccuacagaacaggaaucgguuucacuaugguguacagcagacagaucuacuuucgagaaccucacaugguacaaacuaggcccacaaccauuacccauucacguaggugaauuaccgacaccaguauguaaaaaucuagacacauuauggaaacuaaacgcuaccauguuuuccaauucaacaaaugacauacucauuauggaguuaaaaaacgcaucauuacaagaucaaggagauuacguuugccuagcacaagacaggaaaacuaaaaaaaggcacugcguggucagacaacuuacaguccuagaaagaguagcuccaacaauuacaggaaaucuggaaaaucagacaacaucuaucggugaaagcauagaagucucaugcacagcaucuggaaaccccccaccacagauuaugugguuuaaagacaaugaaacauuaguagaggauucaggaauugucuuaaaggacgggaauagaaaucuaacaaucaggagaguuaggaaagaagaugaaggauuauacacaugucaagcauguucaguauuaggaugugcaaagguagaagcuuuuuucaucaucgaaggagcccaagaaaaaacaaaucuugaaauaauaauauuaguuggaacagcaguaauugcuauguuuuucugguuacuccuuguaauaauacuucguacaguaaaaagagcuaauggaggagaacucaaaacugguuauuuaaguauaguaauggauccagaugagcuaccccuagaugaacauugugaacgucuaccauacgaugccucuaaaugggaauuucccagagaccgguuaaaacuaggaaaacccuuaggacgcggcgcauucggacagguuauagaagcagaugcuuuugguauagauaaaaccgcaacaugcagaacaguugcggugaaaauguuaaaagaaggcgccacacacucggaacacagagcauuaaugucagaacuaaaaauccuuauccauauuggucaccaccuaaacguaguaaacuuacuaggagcguguacuaagccuggcggaccauuaaugguaauugucgaauuuugcaaauuuggaaauuuaucaacuuauuuaagaucuaaacgaaaugaauuuguaccauacaaaacaaaaggagcacgcuuuagacaaggaaaagauuauguaggagcaauaccaguagaccuaaaaaggagacucgauuccauaacaaguagucaaucaagcgcauccaguggauucguggaagaaaaaagccuaucagauguagaagaggaagaagcaccagaagaccuauauaaagauuuucuaaccuuagaacaucuuauauguuacuccuuucaaguugcaaaagguauggaauuucuagcuucacguaaaugcauacaucgagaucuugcggcaagaaacauauuacuaucggaaaaaaauguagucaaaauaugugauuucggucucgcuagggauauauacaaagacccugacuauguacgaaaaggagaugcaagacuaccacuaaaauggauggcacccgaaacgauuuucgacaggguauacacaauccaaucagauguaugguccuuugguguauuacugugggaaauuuuuucucuaggcgcaagcccuuauccgggcgucaaaaucgacgaagaauuuugcagaagauuaaaagaggggacacggaugcgugcuccagauuauacaacaccagaaauguaccagacaauguuggacugcuggcacggagagcccagucaaagacccacuuucucagaguugguugagcaccuuggaaaucuuuugcaagcuaaugcucaacaagauggaaaggauuacauaguacuaccuauaagugaaacuuuauccauggaagaagacaguggguuaucacuaccaaccaguccaguaucuugcauggaggaagaagaagucugugauccuaaauuucacuaugacaacacagcuggaaucucacaguaucuacaaaauucaaaaagaaaaucacgaccuguguccgucaaaacauuugaggauauaccucuagaagaacccgaaguaaagguaauaccagacgauaaucagacagauucgggaaugguucucgcaucagaagaauuaaaaacauuagaagaucguaccaaacuaucuccaagcuuuggcgguaugguaccuucaaaaucccgcgaaucuguagcaucagaaggaucgaaccaaacuucaggcuaccaaucaggguaccauucagacgauacagauacaacgguauacucaagcgaggaagcagaacuacuaaaauuaauagaaauaggaguccaaacgggcucaaccgcacaaauuuuacaaccggacagcgguacaacguuaaguagcccaccuguguaa

SEQ ID NO: 7449 - protein, 749 aa, Artificial Sequence
  PEX__Homo_sapiens__P78562
MEAETGSSVETGKKANRGTRIALVVFVGGTLVLGTILFLVSQGLLSLQAKQEYCLKPECIEAAAAILSKVNLSVDPCDNFFRFACDGWISNNPIPEDMPSYGVYPWLRHNVDLKLKELLEKSISRRRDTEAIQKAKILYSSCMNEKAIEKADAKPLLHILRHSPFRWPVLESNIGPEGVWSERKFSLLQTLATFRGQYSNSVFIRLYVSPDDKASNEHILKLDQATLSLAVREDYLDNSTEAKSYRDALYKFMVDTAVLLGANSSRAEHDMKSVLRLEIKIAEIMIPHENRTSEAMYNKMNISELSAMIPQFDWLGYIKKVIDTRLYPHLKDISPSENVVVRVPQYFKDLFRILGSERKKTIANYLVWRMVYSRIPNLSRRFQYRWLEFSRVIQGTTTLLPQWDKCVNFIESALPYVVGKMFVDVYFQEDKKEMMEELVEGVRWAFIDMLEKENEWMDAGTKRKAKEKARAVLAKVGYPEFIMNDTHVNEDLKAIKFSEADYFGNVLQTRKYLAQSDFFWLRKAVPKTEWFTNPTTVNAFYSASTNQIRFPAGELQKPFFWGTEYPRSLSYGAIGVIVGHEFTHGFDNNGRKYDKNGNLDPWWSTESEEKFKEKTKCMINQYSNYYWKKAGLNVKGKRTLGENIADNGGLREAFRAYRKWINDRRQGLEEPLLPGITFTNNQLFFLSYAHVRCNSYRPEAAREQVQIGAHSPPQFRVNGAISNFEEFQKAFNCPPNSTMNRGMDSCRLW

SEQ ID NO: 7450 - RNA, 2250 nt, Artificial Sequence
  PEX__Homo_sapiens__AAB47562
auggaagcagaaacagggagcagcguggagacuggaaagaaggccaacagaggcacucgaauugcccuggucguguuugucgguggcacccuaguucugggcacgauccucuuucuagugagucaaggucucuuaagucuccaagcuaaacaggaguacugccugaagccagaaugcaucgaagcggcugcugccaucuuaaguaaaguaaaucugucuguggauccuugugauaauuucuuccgguucgcuugugauggcuggauaagcaauaauccaauucccgaagauaugccaagcuaugggguuuauccuuggcugagacauaauguugaccucaaguugaaggaacuuuuggagaaaucaaucaguagaaggcgggacaccgaagccauacagaaagccaaaauccuuuauucauccugcaugaaugagaaagcgauugaaaaagcagaugccaagccacugcuacacauccuacggcauucaccuuuccgcuggcccgugcuugaaucuaauauuggcccugaagggguuuggucagagagaaaguucagccuucugcagacacuugcaacguuucguggucaauacagcaauucuguguucauccguuuguauguguccccugaugacaaagcauccaaugaacauaucuugaagcuggaccaagcaacacucucccuggccgugagggaagacuaccuugauaacaguacagaagccaagucuuaucgggaugcccuuuacaaguucaugguggauacugccgugcuuuuaggagcuaacaguuccagagcagagcaugacaugaagucagugcucagauuggaaauuaagauagcugagauaaugauuccacaugaaaaccgaaccagcgaggccauguacaacaaaaugaacauuucugaacugagugcuaugauuccccaguucgacuggcugggcuacaucaagaaggucauugacaccagacucuacccccaucugaaagacaucagccccuccgagaauguggugguccgcgucccgcaguacuuuaaagauuuguuuaggauauuagggucugagagaaagaagaccauugccaacuauuugguguggagaaugguuuauuccagaauuccaaaccuuagcaggcgcuuucaguauagauggcuggaauucucaaggguaauccaggggaccacaacuuugcugccucaaugggacaaauguguaaacuuuauugaaagugcccucccuuauguuguuggaaagauguuuguagauguguacuuccaggaagauaagaaggaaaugauggaggaauugguugagggcguucgcugggccuuuauugacaugcuagagaaagaaaaugaguggauggaugcaggaacgaaaaggaaagccaaagaaaaggcgagagcuguuuuggcaaaaguuggcuauccagaguuuauaaugaaugauacucauguuaaugaagaccucaaagcuaucaaguuuucagaagccgacuacuuuggcaacguccuacaaacucgcaaguauuuagcacagucugauuucuucuggcuaagaaaagccguuccaaaaacagagugguuuacaaauccgacgacugucaaugccuucuacagugcauccaccaaccagauccgauuuccagcaggagagcuccagaagccuuucuuuuggggaacagaauauccucgaucucugaguuauggugcuauaggaguaauugucggacaugaauuuacacauggauucgauaauaaugguagaaaauaugauaaaaauggaaaccuggauccuugguggucuacugaaucagaagaaaaguuuaaggaaaaaacaaaaugcaugauuaaccaguauagcaacuauuauuggaagaaagcuggcuuaaaugucaaggggaagaggacccugggagaaaauauugcugauaauggaggccugcgggaagcuuuuagggcuuacaggaaauggauaaaugacagaaggcagggacuugaggagccucuucuaccaggcaucacauucaccaacaaccagcucuucuuccugaguuaugcucaugugaggugcaauuccuacagaccagaagcugcccgagaacaaguccaaauuggugcucacagucccccucaguuuagggucaauggugcaauuaguaacuuugaagaauuccagaaagcuuuuaacuguccacccaauuccacgaugaacagaggcauggacuccugccgacucugguag

SEQ ID NO: 7451 - RNA, 2250 nt, Artificial Sequence
  derived and/or modified sequence opt1 from PEX__Homo_sapiens__AAB47562
auggaggccgagaccggcagcuccguggagaccgggaagaaggccaaccgcggcacgcggaucgcgcuggugguguucgucgggggcacccucgugcuggggaccauccuguuccucgugagccagggccugcugucccuccaggccaagcaggaguacugccugaagcccgagugcaucgaggccgccgccgcgauccugagcaaggugaaccucuccgucgacccgugcgacaacuucuuccgcuucgccugcgacggcuggaucagcaacaaccccauccccgaggacaugcccuccuacgggguguacccguggcugcggcacaacguggaccugaagcucaaggagcugcuggagaaguccaucagccgccggcgcgacaccgaggccauccagaaggccaagauccucuacagcuccugcaugaacgagaaggcgaucgagaaggccgacgccaagccccugcugcacauccuccggcacagccccuuccgcuggcccguccuggaguccaacaucggcccggaggggguguggagcgagcggaaguucucccugcuccagacgcuggccaccuuccgcggccaguacagcaacuccguguucauccggcuguacgucagccccgacgacaaggccuccaacgagcacauccucaagcuggaccaggcgacccugagccucgccgugcgcgaggacuaccuggacaacagcaccgaggccaaguccuaccgggacgcccuguacaaguucaugguggacacggccguccuccugggggcgaacagcucccgcgccgagcacgacaugaaguccgugcugcggcucgagaucaagaucgccgagaucaugaucccccacgagaaccgcaccagcgaggccauguacaacaagaugaacaucagcgagcuguccgccaugaucccccaguucgacuggcugggcuacaucaagaaggugaucgacacccggcucuacccgcaccugaaggacaucagccccuccgagaacgucguggugcgcgucccccaguacuucaaggaccuguuccggauccucggcagcgagcgcaagaagaccaucgcgaacuaccugguguggcggaugguguacucccgcauccccaaccugagccgccgguuccaguaccgcuggcucgaguucucccgggucauccaggggacgaccacccugcugccgcagugggacaagugcgugaacuucaucgagagcgcccuccccuacgucgugggcaagauguucguggacgucuacuuccaggaggacaagaaggagaugauggaggagcugguggagggggugcgcugggccuucaucgacaugcuggagaaggagaacgaguggauggacgccggcaccaagcggaaggccaaggagaaggcgcgcgccguccucgccaaggugggcuaccccgaguucaucaugaacgacacgcacgugaacgaggaccugaaggccaucaaguucuccgaggcggacuacuucgggaacguccugcagacccggaaguaccuggcccagagcgacuucuucuggcuccgcaaggccgugcccaagaccgagugguucaccaacccgacgaccgugaacgccuucuacuccgccagcaccaaccagauccgguuccccgcgggcgagcugcagaagcccuucuucugggggaccgaguacccccgcucccugagcuacggcgccaucggggucaucgugggccacgaguucacgcacggcuucgacaacaacgggcggaaguacgacaagaacggcaaccucgacccgugguggagcaccgaguccgaggagaaguucaaggagaagaccaagugcaugaucaaccaguacagcaacuacuacuggaagaaggccgggcugaacgugaagggcaagcgcacccugggggagaacaucgccgacaacggcggccuccgggaggccuuccgcgcguaccggaaguggaucaacgaccgccggcaggggcuggaggagccccugcuccccggcaucacguucaccaacaaccagcuguucuuccuguccuacgcccacguccgcugcaacagcuaccggcccgaggccgcccgcgagcagguccagaucggggcccacuccccgccccaguuccgcgugaacggcgcgaucagcaacuucgaggaguuccagaaggccuucaacugcccgcccaacuccaccaugaaccgggggauggacagcugccgccucugguga

SEQ ID NO: 7452 - RNA, 2250 nt, Artificial Sequence
  derived and/or modified sequence opt2 from PEX__Homo_sapiens__AAB47562
auggaggccgagaccggcuccuccgucgagaccggcaagaaggccaaccgcggcacccgcaucgcccucgucgucuucgucggcggcacccucguccucggcaccauccucuuccucgucucccagggccuccucucccuccaggccaagcaggaguacugccucaagcccgagugcaucgaggccgccgccgccauccucuccaaggucaaccucuccgucgaccccugcgacaacuucuuccgcuucgccugcgacggcuggaucuccaacaaccccauccccgaggacaugcccuccuacggcgucuaccccuggcuccgccacaacgucgaccucaagcucaaggagcuccucgagaaguccaucucccgccgccgcgacaccgaggccauccagaaggccaagauccucuacuccuccugcaugaacgagaaggccaucgagaaggccgacgccaagccccuccuccacauccuccgccacucccccuuccgcuggcccguccucgaguccaacaucggccccgagggcgucugguccgagcgcaaguucucccuccuccagacccucgccaccuuccgcggccaguacuccaacuccgucuucauccgccucuacgucucccccgacgacaaggccuccaacgagcacauccucaagcucgaccaggccacccucucccucgccguccgcgaggacuaccucgacaacuccaccgaggccaaguccuaccgcgacgcccucuacaaguucauggucgacaccgccguccuccucggcgccaacuccucccgcgccgagcacgacaugaaguccguccuccgccucgagaucaagaucgccgagaucaugaucccccacgagaaccgcaccuccgaggccauguacaacaagaugaacaucuccgagcucuccgccaugaucccccaguucgacuggcucggcuacaucaagaaggucaucgacacccgccucuacccccaccucaaggacaucucccccuccgagaacgucgucguccgcgucccccaguacuucaaggaccucuuccgcauccucggcuccgagcgcaagaagaccaucgccaacuaccucgucuggcgcauggucuacucccgcauccccaaccucucccgccgcuuccaguaccgcuggcucgaguucucccgcgucauccagggcaccaccacccuccucccccagugggacaagugcgucaacuucaucgaguccgcccuccccuacgucgucggcaagauguucgucgacgucuacuuccaggaggacaagaaggagaugauggaggagcucgucgagggcguccgcugggccuucaucgacaugcucgagaaggagaacgaguggauggacgccggcaccaagcgcaaggccaaggagaaggcccgcgccguccucgccaaggucggcuaccccgaguucaucaugaacgacacccacgucaacgaggaccucaaggccaucaaguucuccgaggccgacuacuucggcaacguccuccagacccgcaaguaccucgcccaguccgacuucuucuggcuccgcaaggccguccccaagaccgagugguucaccaaccccaccaccgucaacgccuucuacuccgccuccaccaaccagauccgcuuccccgccggcgagcuccagaagcccuucuucuggggcaccgaguacccccgcucccucuccuacggcgccaucggcgucaucgucggccacgaguucacccacggcuucgacaacaacggccgcaaguacgacaagaacggcaaccucgaccccuggugguccaccgaguccgaggagaaguucaaggagaagaccaagugcaugaucaaccaguacuccaacuacuacuggaagaaggccggccucaacgucaagggcaagcgcacccucggcgagaacaucgccgacaacggcggccuccgcgaggccuuccgcgccuaccgcaaguggaucaacgaccgccgccagggccucgaggagccccuccuccccggcaucaccuucaccaacaaccagcucuucuuccucuccuacgcccacguccgcugcaacuccuaccgccccgaggccgcccgcgagcagguccagaucggcgcccacucccccccccaguuccgcgucaacggcgccaucuccaacuucgaggaguuccagaaggccuucaacugcccccccaacuccaccaugaaccgcggcauggacuccugccgccucugguga

SEQ ID NO: 7453 - RNA, 2250 nt, Artificial Sequence
  derived and/or modified sequence opt3 from PEX__Homo_sapiens__AAB47562
auggaagccgaaaccggcagcuccguggagacagggaagaaagcuaacagaggaacuaggaucgcacuggucguuuucguggguggcacgcucguacuugggaccauucuguuuuuggugucucagggauuacugucacuacaagccaagcaggaauacugccucaaacccgaguguauagaagcggcugccgcaauccugaguaaggucaaucuuagcguggacccuugcgauaacuucuuucgguucgccugugacggcuggauuuccaauaacccaaucccggaggauaugcccucuuaugguguuuacccuuggcugcgccacaauguggacuugaaacucaaggagcugcuggaaaagucgauuucacgacguagagauacagaggcuauccagaaagcaaagauacucuauagcaguugcaugaacgaaaaagccaucgagaaggcugacgccaaaccauuacugcauauucuuaggcacucccccuuucgguggccugucuuggagucuaauaucgggccagaaggaguguggagcgagcgcaaguucucccugcuacagacucucgcgaccuuuagaggccaauacucaaacaguguauucauuaggcuguauguuagccccgaugacaaggcaucuaaugaacauauccuuaaacuggaucaggccacauugucccucgcugugcgggaggacuaccuggauaacucaaccgaagccaagagcuaucgcgacgcauuauacaaauuuauggucgauacugcugugcugcucggcgccaauaguucucgagcggagcacgacaugaaguccgugcuuagacuggagauaaaaauugccgaaaucaugauuccucaugagaacaggacaagcgaagcaauguacaauaagaugaacaucucggaguugucugcuaugaucccacaguucgacuggcuaggguauauuaaaaaggucauagauacccggcuguacccgcaccucaaggacaucucccccucagaaaauguugugguacgugugccucaguauuuuaaagaucuguuccgcauucuuggaagugagagaaagaaaacgaucgccaacuaccuggucuggaggaugguguauagccggauaccaaacuugucccgacgcuuucaauacagauggcucgaguucucuaggguuauucaggguacuaccacacuguuaccccagugggacaagugugugaauuucaucgaaagcgcucugccuuaugucgugggcaaaauguuuguagauguuuacuuccaggaggacaagaaggaaaugauggaggaacucguggaggggguccggugggccuuuaucgauaugcucgagaaagaaaacgaguggauggacgcaggaacuaagcgcaaagccaaggaaaaagcuagagcggugcuggcaaaggucggcuacccagaguucauuaugaaugauacccacgugaacgaggaccuuaaggccaucaaauuuucagaagcugauuauuucgguaauguuuugcaaacaaggaaguaccuggcccagagugacuuuuucuggcuccguaaagcagugcccaagaccgagugguuuacgaacccgacuacaguaaaugccuucuauuccgcuagcaccaaccagauucgguuuccugccggggaacugcaaaaacccuucuuuuggggaacugaguacccacgaucucuuucauauggcgcaauaggcgucaucguggggcaugaguucacacacggauucgacaauaacgguagaaaguacgauaagaauggcaaccuggacccuugguggaguaccgagagcgaggaaaaauuuaaggagaaaacgaagugcaugauuaaucaguauuccaacuacuacuggaaaaaggcgggguugaauguuaaaggaaagaggacccucggcgaaaacaucgcugauaacggugggcugcgcgaggccuuccgggcauauagaaaguggaucaaugacaggcgccagggcuuagaagaaccccugcuaccaggaauuacauuuacuaacaaucagcuauucuuucugucuuacgcccaugugcgauguaacucguaucggcccgaggcugcccgugaacaaguccagauaggcgcacacagcccuccacaguucagagugaauggggcuaucuccaacuuugaggaguuccagaaagccuuuaauugcccgcccaacucaaccaugaauaggggaauggauaguugucgccuuugguga

SEQ ID NO: 7454 - RNA, 2250 nt, Artificial Sequence
  derived and/or modified sequence opt4 from PEX__Homo_sapiens__AAB47562
auggaggccgagaccggcagcagcguggagaccggcaagaaggccaacagaggcaccagaaucgcccuggugguguucgugggcggcacccuggugcugggcaccauccuguuccuggugagccagggccugcugagccugcaggccaagcaggaguacugccugaagcccgagugcaucgaggccgccgccgccauccugagcaaggugaaccugagcguggaccccugcgacaacuucuucagauucgccugcgacggcuggaucagcaacaaccccauccccgaggacaugcccagcuacggcguguaccccuggcugagacacaacguggaccugaagcugaaggagcugcuggagaagagcaucagcagaagaagagacaccgaggccauccagaaggccaagauccuguacagcagcugcaugaacgagaaggccaucgagaaggccgacgccaagccccugcugcacauccugagacacagccccuucagauggcccgugcuggagagcaacaucggccccgagggcguguggagcgagagaaaguucagccugcugcagacccuggccaccuucagaggccaguacagcaacagcguguucaucagacuguacgugagccccgacgacaaggccagcaacgagcacauccugaagcuggaccaggccacccugagccuggccgugagagaggacuaccuggacaacagcaccgaggccaagagcuacagagacgcccuguacaaguucaugguggacaccgccgugcugcugggcgccaacagcagcagagccgagcacgacaugaagagcgugcugagacuggagaucaagaucgccgagaucaugaucccccacgagaacagaaccagcgaggccauguacaacaagaugaacaucagcgagcugagcgccaugaucccccaguucgacuggcugggcuacaucaagaaggugaucgacaccagacuguacccccaccugaaggacaucagccccagcgagaacgugguggugagagugccccaguacuucaaggaccuguucagaauccugggcagcgagagaaagaagaccaucgccaacuaccugguguggagaaugguguacagcagaauccccaaccugagcagaagauuccaguacagauggcuggaguucagcagagugauccagggcaccaccacccugcugccccagugggacaagugcgugaacuucaucgagagcgcccugcccuacguggugggcaagauguucguggacguguacuuccaggaggacaagaaggagaugauggaggagcugguggagggcgugagaugggccuucaucgacaugcuggagaaggagaacgaguggauggacgccggcaccaagagaaaggccaaggagaaggccagagccgugcuggccaaggugggcuaccccgaguucaucaugaacgacacccacgugaacgaggaccugaaggccaucaaguucagcgaggccgacuacuucggcaacgugcugcagaccagaaaguaccuggcccagagcgacuucuucuggcugagaaaggccgugcccaagaccgagugguucaccaaccccaccaccgugaacgccuucuacagcgccagcaccaaccagaucagauuccccgccggcgagcugcagaagcccuucuucuggggcaccgaguaccccagaagccugagcuacggcgccaucggcgugaucgugggccacgaguucacccacggcuucgacaacaacggcagaaaguacgacaagaacggcaaccuggaccccugguggagcaccgagagcgaggagaaguucaaggagaagaccaagugcaugaucaaccaguacagcaacuacuacuggaagaaggccggccugaacgugaagggcaagagaacccugggcgagaacaucgccgacaacggcggccugagagaggccuucagagccuacagaaaguggaucaacgacagaagacagggccuggaggagccccugcugcccggcaucaccuucaccaacaaccagcuguucuuccugagcuacgcccacgugagaugcaacagcuacagacccgaggccgccagagagcaggugcagaucggcgcccacagccccccccaguucagagugaacggcgccaucagcaacuucgaggaguuccagaaggccuucaacugcccccccaacagcaccaugaacagaggcauggacagcugcagacugugguga

SEQ ID NO: 7455 - RNA, 2250 nt, Artificial Sequence
  derived and/or modified sequence opt5 from PEX__Homo_sapiens__AAB47562
auggaagccgaaaccggcagcuccguggagacagggaagaaagcuaacagaggaacgcggaucgcccuggucguuuucgugggcgggacccucgugcugggaacaauucuuuuucuggucucucagggccuccugagccuucaagcgaagcaggaauacugccugaaacccgaguguaucgaagcugccgccgcuauucucuccaaggugaaucugucuguugacccuugcgauaacuucuuucgcuucgccugugacggguggaucagcaauaacccgauucccgaggauaugccuuccuauggaguguaccccuggcugagacacaaugucgaccucaaacugaaggagcuucuggaaaagucuaucagccggcgcagagauaccgaggcuauccagaaagccaagauucucuauuccagcugcaugaacgaaaaagcgaucgagaaggccgacgcuaaaccucugcuucauauucugcggcacucucccuuucgcuggccugugcucgaguccaauaucggcccggaaggcguuuggagcgagagaaaguucucucugcugcagacacucgccaccuuucgggggcaauacuccaacagcguguucauucgccuguaugucucucccgaugacaaggcuuccaaugaacauauccuuaaacuggaucaggccacacucagccuggcggugagagaggacuaccuugauaacuccaccgaagccaagucuuaucgggacgcucuguacaaauuuaugguggauacggccguccuccugggagcuaauagcucccgcgccgagcacgacaugaaaagcguucugagacucgagauuaagaucgccgaaaucaugauuccucaugagaaccggaccucugaagcuauguacaauaagaugaacaucuccgagcugagcgcgaugauuccccaguucgacuggcuuggcuauaucaaaaaggugauugauacacgccuguacccucaccucaaggacaucucucccagcgaaaauguggucgugagaguuccgcaguauuuuaaagaucuguuccggauccuuggguccgagagaaagaaaaccauugccaacuaccugguguggcgcauggucuauucucggaucccuaaccucagcagacgcuuucaauaccgguggcuggaguucuccagagugauucagggaacaaccacgcugcucccccagugggacaaguguguuaauuucaucgaaagcgcucugccuuauguggucggcaaaauguuuguggaugucuacuuccaggaggacaagaaggaaaugauggaggaacuuguggaggggguucgcugggccuuuauugauaugcuggagaaagaaaacgaguggauggacgccggaacaaagcggaaagcuaaggaaaaagccagagcggugcucgcuaaggucggcuaccccgaguucaucaugaaugauacccacgugaacgaggaccugaaggccaucaaauuuucugaagccgauuauuucggcaauguucugcaaacacgcaaguaccuugcucaguccgacuuuuucuggcuccggaaagccgugcccaagaccgagugguuuaccaacccuacaacggucaaugcuuucuauagcgccucuaccaaccagauuagauuuccggcgggggaacugcaaaaacccuucuuuuggggaacagaguacccucgcucccugagcuauggcgccaucggggugauugugggacaugaguucacccacggcuucgacaauaacgggcggaaguacgauaagaauggaaaccucgaccccuggugguccacagagucugaggaaaaauuuaaggagaaaaccaagugcaugaucaaucaguauagcaacuacuacuggaaaaaggcuggccugaauguuaaaggcaagagaacgcuuggggaaaacauugccgauaacggaggccugcgggaggcuuuccgcgccuauagaaaguggaucaaugaccggagacaggggcucgaagaaccucugcugcccggaauuacauuuaccaacaaucagcuuuucuuucucuccuacgcgcauguccgcuguaacucuuaucggccggaggccgcuagagaacaagugcagaucggcgcccacagcccuccccaguuccgcgugaauggggcuaucuccaacuuugaggaguuccagaaagccuuuaauugcccucccaacagcaccaugaauagaggcauggauucuugucggcugugguga

SEQ ID NO: 7456 - RNA, 2250 nt, Artificial Sequence
  derived and/or modified sequence opt6 from PEX__Homo_sapiens__AAB47562
auggaagcagaaaccggcucaagcguagaaacagguaaaaaagcaaauagaggaacaagaauagcauuaguaguauucguaggaggaacauuaguauuaggcaccauacuauuccuaguaagucagggacuccuuagccuucaagccaaacaagaauacuguuuaaaaccagaauguauugaagcagcagcagcaauauuaucaaaaguaaacuuaucaguagacccaugcgacaacuucuuccgcuuugcaugcgauggauggauuagcaauaaucccauacccgaagacaugccgagcuauggcguauauccauggcuuagacauaacguagacuuaaaauuaaaagaacuucucgaaaaaucaauaucaagaagaagagacacagaagcaauacaaaaagcaaaaauucucuacucuucauguaugaaugaaaaagcuauagaaaaagcugaugcaaaaccuuuacuacacauauuaagacauucaccauuucgcuggcccguacuagaaagcaacauagggccggaaggcguauggucagaaagaaaauuuucccuucuacaaacuuuagcaacauuuagaggacaguacucuaacagcguauuuauaagauuauacguuucaccagaugacaaagcaucaaacgaacacauacuaaaacuagaucaagcaaccuuaucauuagcaguaagagaagacuacuuagauaacucaacagaagccaaaagcuauagagacgcauuauauaaauucaugguagacacagcaguuuuguuaggugcaaauaguucgagagccgaacacgacaugaaaucaguacuaagacuugaaaucaaaauugcugaaaucaugauaccacacgaaaacagaacuucagaagcuauguauaauaaaaugaacaucucagaacucucugcaaugauaccacaauucgacugguuagguuacauuaaaaaagugauagacacccgauuauacccucaucuuaaagauaucagcccaagcgaaaacgucguaguacguguaccucaauacuuuaaagaccuguucaggauauuaggaagcgaaagaaaaaaaacgauugcaaauuauuuagucuggcguaugguuuauucgagaauaccaaaccuuagcagaagauuccaauauagauggcucgaauucaguagagucauacaaggaacaacaacauuacuaccacaaugggacaaauguguaaauuucaucgaauccgcauuacccuauguaguaggaaaaauguucguagauguauauuuucaagaagacaaaaaagaaaugauggaagaacuagucgaaggaguaagaugggcauuuauagacaugcuugaaaaagaaaaugaauggauggaugcaggcacaaaacgaaaagcaaaagaaaaagcaagagcaguauuagcaaaaguaggauauccugaauucauaaugaacgacacacauguaaaugaagaucuaaaagcaauaaaauuuagcgaggccgacuacuuugguaacguacuacaaacuagaaaauacuuggcacaaucagauuuuuuuuggcuacgaaaagcuguaccaaaaacggaaugguuuaccaauccuacaacaguaaacgcuuucuauucagcaucaacaaaucaaauaagguucccagccggagaauuacaaaaaccauuuuucugggguacugaauaccccagaagucuuuccuauggagccauuggaguaauaguaggccacgaauucacacauggcuucgauaacaauggucgaaaauaugacaaaaauggaaaucuggauccauggugguccacagaaucugaagaaaaauuuaaagaaaaaacaaaauguaugauaaaucaauacucuaacuauuacuggaaaaaagcuggauuaaauguaaaaggaaaaagaacccuaggagaaaacauagcagacaauggaggucucagggaagcuuuucgagcuuaucgaaaauggauuaacgauagaaggcaaggacuugaagaaccacuauugccaggaauaacauuuacaaauaaucaauuauuuuuucuuagcuaugcacacguaagauguaauucauacagaccagaagcagcaagagaacaaguacaaauaggcgcacacaguccaccucaauucagagucaacggcgcaauaucaaauuucgaggaauuucaaaaagcauucaacugucccccgaacucaaccaugaaccgagguauggacucaugcagacuaugguaa

SEQ ID NO: 7457 - protein, 227 aa, Artificial Sequence
  PRL__Homo_sapiens__P01236
MNIKGSPWKGSLLLLLVSNLLLCQSVAPLPICPGGAARCQVTLRDLFDRAVVLSHYIHNLSSEMFSEFDKRYTHGRGFITKAINSCHTSSLATPEDKEQAQQMNQKDFLSLIVSILRSWNEPLYHLVTEVRGMQEAPEAILSKAVEIEEQTKRLLEGMELIVSQVHPETKENEIYPVWSGLPSLQMADEESRLSAYYNLLHCLRRDSHKIDNYLKLLKCRIIHNNNC

SEQ ID NO: 7458 - RNA, 684 nt, Artificial Sequence
  PRL__Homo_sapiens__AAH15850
augaacaucaaaggaucgccauggaaagggucccuccugcugcugcuggugucaaaccugcuccugugccagagcguggcccccuugcccaucugucccggcggggcugcccgaugccaggugacccuucgagaccuguuugaccgcgccgucguccugucccacuacauccauaaccucuccucagaaauguucagcgaauucgauaaacgguauacccauggccggggguucauuaccaaggccaucaacagcugccacacuucuucccuugccacccccgaagacaaggagcaagcccaacagaugaaucaaaaagacuuucugagccugauagucagcauauugcgauccuggaaugagccucuguaucaucuggucacggaaguacgugguaugcaagaagccccggaggcuauccuauccaaagcuguagagauugaggagcaaaccaaacggcuucuagagggcauggagcugauagucagccagguucauccugaaaccaaagaaaaugagaucuacccugucuggucgggacuuccaucccugcagauggcugaugaagagucucgccuuucugcuuauuauaaccugcuccacugccuacgcagggauucacauaaaaucgacaauuaucucaagcuccugaagugccgaaucauccacaacaacaacugcuaa

SEQ ID NO: 7459 - RNA, 684 nt, Artificial Sequence
  derived and/or modified sequence opt1 from PRL__Homo_sapiens__AAH15850
augaacaucaagggcagccccuggaaggggucccugcuccugcugcucgugagcaaccugcugcucugccaguccgucgccccgcugcccaucugccccggcggggccgcgcgcugccaggugacccugcgggaccucuucgaccgcgccgugguccugagccacuacauccacaaccuguccagcgagauguucuccgaguucgacaagcgguacacccacggccgcggguucaucacgaaggccaucaacagcugccacaccuccagccucgccacccccgaggacaaggagcaggcccagcagaugaaccagaaggacuuccugucccugaucgugagcauccuccgguccuggaacgagccgcuguaccaccuggugaccgagguccgcggcaugcaggaggcgcccgaggccauccucagcaaggccguggagaucgaggagcagacgaagcggcugcuggagggcauggagcucaucgugucccagguccaccccgagaccaaggagaacgagaucuaccccguguggagcgggcugccgucccugcagauggccgacgaggagagccgccucuccgcguacuacaaccugcugcacugccuccggcgcgacagccacaagaucgacaacuaccugaagcugcucaagugccggaucauccacaacaacaacugcuga

SEQ ID NO: 7460 - RNA, 684 nt, Artificial Sequence
  derived and/or modified sequence opt2 from PRL__Homo_sapiens__AAH15850
augaacaucaagggcucccccuggaagggcucccuccuccuccuccucgucuccaaccuccuccucugccaguccgucgccccccuccccaucugccccggcggcgccgcccgcugccaggucacccuccgcgaccucuucgaccgcgccgucguccucucccacuacauccacaaccucuccuccgagauguucuccgaguucgacaagcgcuacacccacggccgcggcuucaucaccaaggccaucaacuccugccacaccuccucccucgccacccccgaggacaaggagcaggcccagcagaugaaccagaaggacuuccucucccucaucgucuccauccuccgcuccuggaacgagccccucuaccaccucgucaccgagguccgcggcaugcaggaggcccccgaggccauccucuccaaggccgucgagaucgaggagcagaccaagcgccuccucgagggcauggagcucaucgucucccagguccaccccgagaccaaggagaacgagaucuaccccgucugguccggccuccccucccuccagauggccgacgaggagucccgccucuccgccuacuacaaccuccuccacugccuccgccgcgacucccacaagaucgacaacuaccucaagcuccucaagugccgcaucauccacaacaacaacugcuga

SEQ ID NO: 7461 - RNA, 684 nt, Artificial Sequence
  derived and/or modified sequence opt3 from PRL__Homo_sapiens__AAH15850
augaacaucaagggcagccccuggaaagggucccugcuccuucuguuggugucuaauuuacugcuaugccagucagucgccccucucccaauuuguccgggaggugcugcaagaugccaaguuacccugagggaccuuuucgaucgggccgugguacugagucacuacauacauaacuugagcuccgagauguuuucugaguucgacaagcgcuauacacacggccgaggguuuaucacuaaagcgauuaauucgugucauacgucaagccucgcuacccccgaagauaaggaacaggcccagcagaugaaccaaaaagacuuccugagucugaucguguccauucuccguucuuggaaugagccuuuauaccaccuggucacagaagugagaggaaugcaggaggcaccagaggccauccuuagcaaggcuguugaaauagaggaacagacuaagagguugcuggagggcauggagcuaaucgugucccagguccaucccgaaaccaaagagaacgaaauuuauccuguguggucaggucucccaagucugcaaauggcagaugaggaaagccggcuuucugccuacuauaaucuguugcacugccuccgcagagacucccacaagaucgauaacuaccugaaauuacugaaguguaggauuauccauaauaacaauugcuga

SEQ ID NO: 7462 - RNA, 684 nt, Artificial Sequence
  derived and/or modified sequence opt4 from PRL__Homo_sapiens__AAH15850
augaacaucaagggcagccccuggaagggcagccugcugcugcugcuggugagcaaccugcugcugugccagagcguggccccccugcccaucugccccggcggcgccgccagaugccaggugacccugagagaccuguucgacagagccguggugcugagccacuacauccacaaccugagcagcgagauguucagcgaguucgacaagagauacacccacggcagaggcuucaucaccaaggccaucaacagcugccacaccagcagccuggccacccccgaggacaaggagcaggcccagcagaugaaccagaaggacuuccugagccugaucgugagcauccugagaagcuggaacgagccccuguaccaccuggugaccgaggugagaggcaugcaggaggcccccgaggccauccugagcaaggccguggagaucgaggagcagaccaagagacugcuggagggcauggagcugaucgugagccaggugcaccccgagaccaaggagaacgagaucuaccccguguggagcggccugcccagccugcagauggccgacgaggagagcagacugagcgccuacuacaaccugcugcacugccugagaagagacagccacaagaucgacaacuaccugaagcugcugaagugcagaaucauccacaacaacaacugcuga

SEQ ID NO: 7463 - RNA, 684 nt, Artificial Sequence
  derived and/or modified sequence opt5 from PRL__Homo_sapiens__AAH15850
augaacaucaagggcagccccuggaaagggucccugcuccugcuucuggugucuaaucuccugcuuugccagagcgucgccccucugccgauuugucccggaggcgcugccagaugccaaguuacccuccgggaccuguucgaucgcgcgguggugcugucccacuacauccauaaccucucuagcgagauguuuuccgaguucgacaagagauauacacacgggcggggauuuauuacgaaagcuaucaauucuugucauaccagcucccuggccacaccugaagauaaggaacaggcccagcagaugaaccaaaaagacuuccuuagccugauugucucuauccuccgcuccuggaaugagccccuguaccaccuugugaccgaaguuagaggcaugcaggaggcuccugaggccauccugagcaaggcuguggaaauugaggaacagacaaagcggcuccuggaggggauggagcugaucgucucucaggugcaucccgaaaccaaagagaacgaaauuuauccuguuugguccggacucccgagccugcaaauggccgaugaggaaucucgccuuuccgcguacuauaaucugcuccacugccugagacgggacagccacaagaucgauaacuaccuuaaacugcucaagugucgcauuauccauaauaacaauugcuga

SEQ ID NO: 7464 - RNA, 684 nt, Artificial Sequence
  derived and/or modified sequence opt6 from PRL__Homo_sapiens__AAH15850
augaauauaaaaggaucaccauggaaaggaucacuacuacuacuacuaguaucaaaccuacuacuaugccaaucaguagcaccacuaccaaucugcccaggaggagcagcaagaugccaaguaacacuaagagaccuauucgacagagcaguaguacuaucacacuacauacacaaccuaucaucagaaauguucucagaauucgacaaaagauacacacacggaagaggauucauaacaaaagcaauaaacucaugucauacaucaucacuagcuacaccagaagacaaagaacaagcacaacaaaugaaccaaaaagacuuccuaucauuaauaguaucaauacuaagaucauggaacgaaccucuauaccaucuaguaacagaaguccgaggaaugcaagaagcaccagaagcaauacuaucaaaagcaguagaaauagaagaacaaacaaaaagacuauuagaaggaauggaauuaauaguaucacaaguacauccagaaacaaaagaaaacgaaauauacccaguauggucaggccuaccuagccuucaaauggcagacgaagaaucacgacuaucagcauacuauaaccuacuacacugucuaagaagagacucacacaaaauagacaacuaccuaaaacuauuaaaaugcagaauaauacacaauaacaacugcuaa

SEQ ID NO: 7465 - protein, 375 aa, Artificial Sequence
  SERPINB5__Homo_sapiens__P36952
MDALQLANSAFAVDLFKQLCEKEPLGNVLFSPICLSTSLSLAQVGAKGDTANEIGQVLHFENVKDVPFGFQTVTSDVNKLSSFYSLKLIKRLYVDKSLNLSTEFISSTKRPYAKELETVDFKDKLEETKGQINNSIKDLTDGHFENILADNSVNDQTKILVVNAAYFVGKWMKKFSESETKECPFRVNKTDTKPVQMMNMEATFCMGNIDSINCKIIELPFQNKHLSMFILLPKDVEDESTGLEKIEKQLNSESLSQWTNPSTMANAKVKLSIPKFKVEKMIDPKACLENLGLKHIFSEDTSDFSGMSETKGVALSNVIHKVCLEITEDGGDSIEVPGARILQHKDELNADHPFIYIIRHNKTRNIIFFGKFCSP

SEQ ID NO: 7466 - RNA, 1128 nt, Artificial Sequence
  SERPINB5__Homo_sapiens__CCDS32839.1
auggaugcccugcaacuagcaaauucggcuuuugccguugaucuguucaaacaacuaugugaaaaggagccacugggcaauguccucuucucuccaaucugucucuccaccucucugucacuugcucaagugggugcuaaaggugacacugcaaaugaaauuggacagguucuucauuuugaaaaugucaaagauguacccuuuggauuucaaacaguaacaucggauguaaacaaacuuaguuccuuuuacucacugaaacuaaucaagcggcucuacguagacaaaucucugaaucuuucuacagaguucaucagcucuacgaagagaccguaugcaaaggaauuggaaacuguugacuucaaagauaaauuggaagaaacgaaaggucagaucaacaacucaauuaaggaucucacagauggccacuuugagaacauuuuagcugacaacagugugaacgaccagaccaaaauccuugugguuaaugcugccuacuuuguuggcaaguggaugaagaaauuuucugaaucagaaacaaaagaauguccuuucagagucaacaagacagacaccaaaccagugcagaugaugaacauggaggccacguucuguaugggaaacauugacaguaucaauuguaagaucauagagcuuccuuuucaaaauaagcaucucagcauguucauccuacuacccaaggauguggaggaugaguccacaggcuuggagaagauugaaaaacaacucaacucagagucacugucacaguggacuaaucccagcaccauggccaaugccaaggucaaacucuccauuccaaaauuuaagguggaaaagaugauugaucccaaggcuugucuggaaaaucuagggcugaaacauaucuucagugaagacacaucugauuucucuggaaugucagagaccaagggaguggcccuaucaaauguuauccacaaagugugcuuagaaauaacugaagaugguggggauuccauagaggugccaggagcacggauccugcagcacaaggaugaauugaaugcugaccaucccuuuauuuacaucaucaggcacaacaaaacucgaaacauuauuuucuuuggcaaauucuguucuccuuaa

SEQ ID NO: 7467 - RNA, 1128 nt, Artificial Sequence
  derived and/or modified sequence opt1 from SERPINB5__Homo_sapiens__CCDS32839.1
auggacgcccugcagcucgccaacagcgcguucgccguggaccuguucaagcagcugugcgagaaggagccccucggcaacguccuguucuccccgaucugccugagcaccucccucagccuggcccaggugggggccaagggcgacaccgccaacgagaucggccaggugcugcacuucgagaacgucaaggacgugcccuucggguuccagacggugaccuccgacgucaacaagcucagcuccuucuacagccugaagcugaucaagcgccucuacguggacaagucccugaaccugagcaccgaguucaucuccagcaccaagcggcccuacgcgaaggagcucgagacgguggacuucaaggacaagcuggaggagaccaaggggcagaucaacaacuccaucaaggaccugaccgacggccacuucgagaacauccucgccgacaacagcgucaacgaccagaccaagauccugguggugaacgccgccuacuucgucggcaaguggaugaagaaguucuccgagagcgagacgaaggagugccccuuccgcgugaacaagaccgacaccaagccggugcagaugaugaacauggaggcgaccuucugcauggggaacaucgacuccaucaacugcaagaucaucgagcugcccuuccagaacaagcaccucagcauguucauccugcugcccaaggacgucgaggacgaguccacgggccucgagaagaucgagaagcagcugaacagcgagagccugucccaguggaccaaccccagcaccauggccaacgccaaggugaagcucuccaucccgaaguucaagguggagaagaugaucgaccccaaggccugccuggagaaccuggggcucaagcacaucuucagcgaggacaccuccgacuucagcggcauguccgagacgaagggggucgcccugagcaacgugauccacaaggugugccuggagaucaccgaggacggcggcgacuccaucgagguccccggggcgcggauccuccagcacaaggacgagcugaacgccgaccaccccuucaucuacaucauccgccacaacaagacccggaacaucaucuucuucggcaaguucugcagcccguga

SEQ ID NO: 7468 - RNA, 1128 nt, Artificial Sequence
  derived and/or modified sequence opt2 from SERPINB5__Homo_sapiens__CCDS32839.1
auggacgcccuccagcucgccaacuccgccuucgccgucgaccucuucaagcagcucugcgagaaggagccccucggcaacguccucuucucccccaucugccucuccaccucccucucccucgcccaggucggcgccaagggcgacaccgccaacgagaucggccagguccuccacuucgagaacgucaaggacguccccuucggcuuccagaccgucaccuccgacgucaacaagcucuccuccuucuacucccucaagcucaucaagcgccucuacgucgacaagucccucaaccucuccaccgaguucaucuccuccaccaagcgccccuacgccaaggagcucgagaccgucgacuucaaggacaagcucgaggagaccaagggccagaucaacaacuccaucaaggaccucaccgacggccacuucgagaacauccucgccgacaacuccgucaacgaccagaccaagauccucgucgucaacgccgccuacuucgucggcaaguggaugaagaaguucuccgaguccgagaccaaggagugccccuuccgcgucaacaagaccgacaccaagcccguccagaugaugaacauggaggccaccuucugcaugggcaacaucgacuccaucaacugcaagaucaucgagcuccccuuccagaacaagcaccucuccauguucauccuccuccccaaggacgucgaggacgaguccaccggccucgagaagaucgagaagcagcucaacuccgagucccucucccaguggaccaaccccuccaccauggccaacgccaaggucaagcucuccauccccaaguucaaggucgagaagaugaucgaccccaaggccugccucgagaaccucggccucaagcacaucuucuccgaggacaccuccgacuucuccggcauguccgagaccaagggcgucgcccucuccaacgucauccacaaggucugccucgagaucaccgaggacggcggcgacuccaucgagguccccggcgcccgcauccuccagcacaaggacgagcucaacgccgaccaccccuucaucuacaucauccgccacaacaagacccgcaacaucaucuucuucggcaaguucugcucccccuga

SEQ ID NO: 7469 - RNA, 1128 nt, Artificial Sequence
  derived and/or modified sequence opt3 from SERPINB5__Homo_sapiens__CCDS32839.1
auggacgcccugcagcucgcuaacagcgcauucgccguggaucuuuuuaagcaacugugcgagaaagaacccuugggcaaugucuuauucuccccuaucugucugucuaccucacuaagucucgcgcagguuggggcuaagggagacacagccaacgagauuggucaggugcugcacuuugaaaauguaaaagaugugccauucggcuuucagacugucacgagcgacgugaacaaacuuuccucuuucuacucgcugaaauugauaaagagacucuauguugauaagucacugaaucugagcaccgaguuuaucaguuccacaaaaaggccguacgcaaaggaacucgagacuguggacuucaaagauaaguuagaggaaaccaaagggcaaauuaacaauucuaucaaggaccugacagauggacauuuugagaacauucuugccgacaauagcgucaacgaucagaccaagaucuuggugguaaaugcugcauauuucguuggcaaauggaugaagaaauuuuccgaaucagagacuaaggagugccccuuccgggugaacaaaacagacaccaagccuguccagaugaugaauauggaagccacguuuuguauggguaacauagauaguaucaauugcaaaauuaucgagcugccauuccagaacaagcaccuaagcauguucauucuccugcccaaggacguggaagacgagucuacugggcuugaaaagaucgagaagcaacugaacuccgagucauugagccaguggaccaauccuaguacaauggcuaacgccaaagugaagcucucuauaccaaaauuuaaggucgaaaagaugauugaucccaaagcgugucuggagaauuuaggacugaagcauaucuucuccgaagacacuagcgauuuuucgggcaugucugagaccaaaggcguugcacucuccaacgugauucacaagguaugccuugaaaucacagaggacgggggagauucaaucgaggugccuggugcccgcauucugcagcauaaagacgaauugaaugcugaucacccauucauauacaucauucgacacaacaagacccguaauaucauauuuuucggcaaguuuuguaguccguga

SEQ ID NO: 7470 - RNA, 1128 nt, Artificial Sequence
  derived and/or modified sequence opt4 from SERPINB5__Homo_sapiens__CCDS32839.1
auggacgcccugcagcuggccaacagcgccuucgccguggaccuguucaagcagcugugcgagaaggagccccugggcaacgugcuguucagccccaucugccugagcaccagccugagccuggcccaggugggcgccaagggcgacaccgccaacgagaucggccaggugcugcacuucgagaacgugaaggacgugcccuucggcuuccagaccgugaccagcgacgugaacaagcugagcagcuucuacagccugaagcugaucaagagacuguacguggacaagagccugaaccugagcaccgaguucaucagcagcaccaagagacccuacgccaaggagcuggagaccguggacuucaaggacaagcuggaggagaccaagggccagaucaacaacagcaucaaggaccugaccgacggccacuucgagaacauccuggccgacaacagcgugaacgaccagaccaagauccugguggugaacgccgccuacuucgugggcaaguggaugaagaaguucagcgagagcgagaccaaggagugccccuucagagugaacaagaccgacaccaagcccgugcagaugaugaacauggaggccaccuucugcaugggcaacaucgacagcaucaacugcaagaucaucgagcugcccuuccagaacaagcaccugagcauguucauccugcugcccaaggacguggaggacgagagcaccggccuggagaagaucgagaagcagcugaacagcgagagccugagccaguggaccaaccccagcaccauggccaacgccaaggugaagcugagcauccccaaguucaagguggagaagaugaucgaccccaaggccugccuggagaaccugggccugaagcacaucuucagcgaggacaccagcgacuucagcggcaugagcgagaccaagggcguggcccugagcaacgugauccacaaggugugccuggagaucaccgaggacggcggcgacagcaucgaggugcccggcgccagaauccugcagcacaaggacgagcugaacgccgaccaccccuucaucuacaucaucagacacaacaagaccagaaacaucaucuucuucggcaaguucugcagccccuga

SEQ ID NO: 7471 - RNA, 1128 nt, Artificial Sequence
  derived and/or modified sequence opt5 from SERPINB5__Homo_sapiens__CCDS32839.1
auggacgcccugcagcucgcuaacagcgccuucgcgguggaucuguuuaagcaacuuugcgagaaagaaccccugggcaauguccucuucuccccuaucugucugucuaccagccuuucccuggcucagguuggggccaagggagacacagccaacgagauuggccaggugcuccacuuugaaaaugugaaagaugucccguucggguuucagacggugaccucugacguuaacaagcugagcuccuucuacucucugaaacucaucaagagacuguauguggauaagagccuuaaucuguccacagaguuuauuagcucuaccaaacggcccuacgcuaaggaacucgagacagucgacuucaaagauaagcuggaggaaaccaaaggacaaaucaacaauuccauuaaggaccuuacagauggccauuuugagaacauccuggccgacaauagcgugaacgaucagaccaagauccucguugugaaugcugccuauuucgucgggaaauggaugaagaaauuuucugaauccgagacgaaggagugcccuuuccgcgugaacaaaaccgacacaaagcccgugcagaugaugaauauggaagcgaccuuuuguaugggaaacauugauagcaucaauugcaaaauuaucgagcugccuuuccagaacaagcaccugucuauguucauucuccugcccaaggacgucgaagacgaguccacaggccuugagaaaaucgaaaagcaacugaacagcgagucccucucucaguggaccaauccuagcacgauggccaacgcuaaaguuaagcuguccauuccgaaauuuaagguggaaaagaugaucgaucccaaagccugucuugagaaucugggccucaagcauaucuucagcgaagacacaucugauuuuuccgggaugagcgagaccaaaggaguggcucugucuaacgucauucacaaggugugccuggaaaucacagaggacggcggggauagcauugagguuccuggagccagaauccuccagcauaaagacgaacugaaugcggaucaccccuucauuuacaucauccggcacaacaagacccgcaauauuaucuuuuucggcaaguuuuguuccccuuga

SEQ ID NO: 7472 - RNA, 1128 nt, Artificial Sequence
  derived and/or modified sequence opt6 from SERPINB5__Homo_sapiens__CCDS32839.1
auggacgcacuucaacucgcaaacucagcauucgccguagaccuauucaaacaauuaugcgaaaaagaaccauuaggcaacguccuauucucaccaauaugccuaaguacaagccuaucccucgcccaagucggagccaaaggagauacagcaaaugaaauaggacaaguacuccacuucgaaaacguaaaagaugucccauucggauuucaaacagucacaucagacgucaacaaacuaucaucauucuacucacucaaacuaauaaaaagacuauacgucgauaaaucccuaaaccuauccacagaauucauaucaucaacaaaaagaccauaugcaaaagaacuagaaacuguugauuucaaagacaaauuagaagaaacaaaaggacaaauaaacaacucaaucaaagaccuaacagacggacacuuugaaaacauacucgccgacaauagcguaaaugaccaaacaaaaauauuaguagucaacgcagcauacuucguagguaaauggaugaaaaaauucucagaaucagaaacaaaagaaugcccauucagaguaaacaaaaccgauacaaaaccaguccaaaugaugaacauggaagcaacauucuguaugggaaacauagacucaauaaacugcaaaauaauagaacuaccauuccaaaauaaacaucucaguauguucauacuacuaccaaaagacgucgaagacgaauccacaggacuagaaaaaaucgaaaaacaacuaaacucagaaucacucucccaauggacaaacccaucaacaauggcaaaugcaaaaguaaaacuaucaauaccaaaauucaaaguagaaaaaaugauagacccaaaagcuugccuagaaaaccuaggacuaaaacacauuuucucugaagacacuucagacuucucaggaaugucagaaacaaaaggaguagcacuaagcaauguaauucacaaagucugcuuagaaauaacagaagacggaggagacucaauagaaguaccuggagccagaauacuccaacacaaagacgaacuaaaugcagaucacccauucauauacauaauacgacauaacaaaacuagaaacauaauauucuucggcaaauucuguucaccauaa

SEQ ID NO: 7473 - protein, 433 aa, Artificial Sequence
  sFLT-1__Homo_sapiens__H9N1E7
MVIVEYCKYGNLSNYLKSKRDLFFLNKDAALHMEPKKEKMEPGLEQGKKPRLDSVTSSESFASSGFQEDKSLSDVEEEEDSDGFYKEPITMEDLISYSFQVARGMEFLSSRKCIHRDLAARNILLSENNVVKICDFGLARDIYKNPDYVRKGDTRLPLKWMAPESIFDKIYSTKSDVWSYGVLLWEIFSLGGSPYPGVQMDEDFCSRLREGMRMRAPEYSTPEIYQIMLDCWHRDPKERPRFAELVEKLGDLLQANVQQDGKDYIPINAILTGNSGFTYSTPAFSEDFFKESISAPKFNSGSSDDVRYVNAFKFMSLERIKTFEELLPNATSMFDDYQGDSSTLLASPMLKRFTWTDSKPKASLKIDLRVTSKSKESGLSDVSRPSFCHSSCGHVSEGKRRFTYDHAELERKIACCSPPPDYNSVVLYSTPPI

SEQ ID NO: 7474 - RNA, 1302 nt, Artificial Sequence
  sFLT-1__Homo_sapiens__AFC77954
auggugauuguugaauacugcaaauauggaaaucucuccaacuaccucaagagcaaacgugacuuauuuuuucucaacaaggaugcagcacuacacauggagccuaagaaagaaaaaauggagccaggccuggaacaaggcaagaaaccaagacuagauagcgucaccagcagcgaaagcuuugcgagcuccggcuuucaggaagauaaaagucugagugauguugaggaagaggaggauucugacgguuucuacaaggagcccaucacuauggaagaucugauuucuuacaguuuucaaguggccagaggcauggaguuccugucuuccagaaagugcauucaucgggaccuggcagcgagaaacauucuuuuaucugagaacaacguggugaagauuugugauuuuggccuugcccgggauauuuauaagaaccccgauuaugugagaaaaggagauacucgacuuccucugaaauggauggcuccugaaucuaucuuugacaaaaucuacagcaccaagagcgacguguggucuuacggaguauugcugugggaaaucuucuccuuaggugggucuccauacccaggaguacaaauggaugaggacuuuugcagucgccugagggaaggcaugaggaugagagcuccugaguacucuacuccugaaaucuaucagaucaugcuggacugcuggcacagagacccaaaagaaaggccaagauuugcagaacuuguggaaaaacuaggugauuugcuucaagcaaauguacaacaggaugguaaagacuacaucccaaucaaugccauacugacaggaaauaguggguuuacauacucaacuccugccuucucugaggacuucuucaaggaaaguauuucagcuccgaaguuuaauucaggaagcucugaugaugucagauauguaaaugcuuucaaguucaugagccuggaaagaaucaaaaccuuugaagaacuuuuaccgaaugccaccuccauguuugaugacuaccagggcgacagcagcacucuguuggccucucccaugcugaagcgcuucaccuggacugacagcaaacccaaggccucgcucaagauugacuugagaguaaccaguaaaaguaaggagucggggcugucugaugucagcaggcccaguuucugccauuccagcugugggcacgucagcgaaggcaagcgcagguucaccuacgaccacgcugagcuggaaaggaaaaucgcgugcugcuccccgcccccagacuacaacucggugguccuguacuccaccccacccaucuag

SEQ ID NO: 7475 - RNA, 1302 nt, Artificial Sequence
  derived and/or modified sequence opt1 from sFLT-1__Homo_sapiens__AFC77954
auggugaucgucgaguacugcaaguacggcaaccugagcaacuaccucaaguccaagcgcgaccuguucuuccugaacaaggacgccgcccuccacauggagcccaagaaggagaagauggagcccgggcuggagcagggcaagaagccccggcuggacagcgugaccuccagcgaguccuucgcgagcuccggguuccaggaggacaagagccucuccgacguggaggaggaggaggacagcgacggcuucuacaaggagcccaucaccauggaggaccugaucuccuacagcuuccaggucgcccgcgggauggaguuccuguccagccggaagugcauccaccgcgaccucgccgcccggaacauccugcuguccgagaacaacguggugaagaucugcgacuucggccucgcccgcgacaucuacaagaaccccgacuacguccggaagggcgacacgcgccugccccugaaguggauggcgcccgagagcaucuucgacaagaucuacuccaccaagagcgacgugugguccuacggggugcuccugugggagaucuucagccugggcgggagccccuaccccggcguccagauggacgaggacuucugcucccggcuccgcgaggggaugcggaugcgcgccccggaguacagcacccccgagaucuaccagaucaugcuggacugcuggcaccgggaccccaaggagcgcccccgguucgccgagcugguggagaagcucggcgaccugcugcaggccaacgugcagcaggacggcaaggacuacaucccgaucaacgcgauccucaccgggaacuccggcuucacguacagcacccccgccuucuccgaggacuucuucaaggagagcaucuccgcccccaaguucaacagcggguccagcgacgacguccgcuacgugaacgccuucaaguucaugucccuggagcggaucaagaccuucgaggagcugcuccccaacgccaccagcauguucgacgacuaccagggcgacuccagcacgcugcuggcguccccgaugcucaagcgcuucaccuggaccgacagcaagcccaaggccucccugaagaucgaccugcgggugaccagcaaguccaaggagagcggccucagcgacgucucccgccccagcuucugccacuccagcugcgggcacguguccgagggcaagcggcgcuucacguacgaccacgccgagcuggagcgcaagaucgccugcugcagcccgccgcccgacuacaacuccgugguccuguacagcaccccgcccaucuga

SEQ ID NO: 7476 - RNA, 1302 nt, Artificial Sequence
  derived and/or modified sequence opt2 from sFLT-1__Homo_sapiens__AFC77954
auggucaucgucgaguacugcaaguacggcaaccucuccaacuaccucaaguccaagcgcgaccucuucuuccucaacaaggacgccgcccuccacauggagcccaagaaggagaagauggagcccggccucgagcagggcaagaagccccgccucgacuccgucaccuccuccgaguccuucgccuccuccggcuuccaggaggacaagucccucuccgacgucgaggaggaggaggacuccgacggcuucuacaaggagcccaucaccauggaggaccucaucuccuacuccuuccaggucgcccgcggcauggaguuccucuccucccgcaagugcauccaccgcgaccucgccgcccgcaacauccuccucuccgagaacaacgucgucaagaucugcgacuucggccucgcccgcgacaucuacaagaaccccgacuacguccgcaagggcgacacccgccucccccucaaguggauggcccccgaguccaucuucgacaagaucuacuccaccaaguccgacgucugguccuacggcguccuccucugggagaucuucucccucggcggcucccccuaccccggcguccagauggacgaggacuucugcucccgccuccgcgagggcaugcgcaugcgcgcccccgaguacuccacccccgagaucuaccagaucaugcucgacugcuggcaccgcgaccccaaggagcgcccccgcuucgccgagcucgucgagaagcucggcgaccuccuccaggccaacguccagcaggacggcaaggacuacauccccaucaacgccauccucaccggcaacuccggcuucaccuacuccacccccgccuucuccgaggacuucuucaaggaguccaucuccgcccccaaguucaacuccggcuccuccgacgacguccgcuacgucaacgccuucaaguucaugucccucgagcgcaucaagaccuucgaggagcuccuccccaacgccaccuccauguucgacgacuaccagggcgacuccuccacccuccucgccucccccaugcucaagcgcuucaccuggaccgacuccaagcccaaggccucccucaagaucgaccuccgcgucaccuccaaguccaaggaguccggccucuccgacgucucccgccccuccuucugccacuccuccugcggccacgucuccgagggcaagcgccgcuucaccuacgaccacgccgagcucgagcgcaagaucgccugcugcucccccccccccgacuacaacuccgucguccucuacuccaccccccccaucuga

SEQ ID NO: 7477 - RNA, 1302 nt, Artificial Sequence
  derived and/or modified sequence opt3 from sFLT-1__Homo_sapiens__AFC77954
auggugaucgucgaguacugcaaguauggcaaccugagcaauuaccucaaauccaagagagaccuuuucuuucugaacaaagaugccgcuuugcacauggaacccaagaaagagaagauggaaccuggguuagagcagggaaagaaaccaaggcuggacucuguuaccucaagugagagcuucgcauccucugguuuucaagaagauaagucgcuaucagacguggaggaagaggaagauagcgacggcuucuauaaagagccgauuaccauggaggaucucauaaguuacuccuuucagguagcccgggggauggaguuccugucuagccgcaaguguauccaucgagaccuugcggcucguaauauucuguuguccgaaaacaauguggucaaaaucugcgauuuuggacucgccagagacauuuauaagaaccccgauuacgugaggaagggcgacacucggcugccucugaaauggauggcaccagaaucaaucuucgauaagauauauaguacgaaaagcgacguuuggucuuacggugugcucuuaugggagaucuuuucccuugggggaucacccuacccuggcguccagauggacgaagauuucuguagccgccugagagagggcaugaggaugcgggccccagaguauaguacccccgaaauuuaccagaucauguuggacugcuggcaccgcgauccuaaggagcgaccaagauuugcugaacugguggagaaacuaggggaccuccugcaagcaaauguacagcaggauggaaaggacuauauuccgaucaacgccauacuuacagguaauucuggcuucacuuacuccacccccgcuuuuagcgaagauuucuucaaagagucgauuucugccccuaaguuuaacuccgggucaagugacgauguuagguaugugaaugcguucaaguuuaugagccuggagcggaucaaaacauucgaagaguugcucccaaacgcaaccuccauguuugacgauuaccagggagacucuagcacucuguuagccucacccaugcugaagcguuucacauggaccgacaguaaaccuaaggcuucccucaaaauugaucuucgcgucacgagcaagucuaaggaaucaggccugagugacgugagcagaccauccuuuugucauucuucgugcggucacgugagcgaggggaaaaggcgguucacuuaugaucaugccgaauuggagcgaaagaucgcauguugcucacccccgccugacuacaauuccgucguucuauacaguacacccccaaucuga

SEQ ID NO: 7478 - RNA, 1302 nt, Artificial Sequence
  derived and/or modified sequence opt4 from sFLT-1__Homo_sapiens__AFC77954
auggugaucguggaguacugcaaguacggcaaccugagcaacuaccugaagagcaagagagaccuguucuuccugaacaaggacgccgcccugcacauggagcccaagaaggagaagauggagcccggccuggagcagggcaagaagcccagacuggacagcgugaccagcagcgagagcuucgccagcagcggcuuccaggaggacaagagccugagcgacguggaggaggaggaggacagcgacggcuucuacaaggagcccaucaccauggaggaccugaucagcuacagcuuccagguggccagaggcauggaguuccugagcagcagaaagugcauccacagagaccuggccgccagaaacauccugcugagcgagaacaacguggugaagaucugcgacuucggccuggccagagacaucuacaagaaccccgacuacgugagaaagggcgacaccagacugccccugaaguggauggcccccgagagcaucuucgacaagaucuacagcaccaagagcgacguguggagcuacggcgugcugcugugggagaucuucagccugggcggcagccccuaccccggcgugcagauggacgaggacuucugcagcagacugagagagggcaugagaaugagagcccccgaguacagcacccccgagaucuaccagaucaugcuggacugcuggcacagagaccccaaggagagacccagauucgccgagcugguggagaagcugggcgaccugcugcaggccaacgugcagcaggacggcaaggacuacauccccaucaacgccauccugaccggcaacagcggcuucaccuacagcacccccgccuucagcgaggacuucuucaaggagagcaucagcgcccccaaguucaacagcggcagcagcgacgacgugagauacgugaacgccuucaaguucaugagccuggagagaaucaagaccuucgaggagcugcugcccaacgccaccagcauguucgacgacuaccagggcgacagcagcacccugcuggccagccccaugcugaagagauucaccuggaccgacagcaagcccaaggccagccugaagaucgaccugagagugaccagcaagagcaaggagagcggccugagcgacgugagcagacccagcuucugccacagcagcugcggccacgugagcgagggcaagagaagauucaccuacgaccacgccgagcuggagagaaagaucgccugcugcagccccccccccgacuacaacagcguggugcuguacagcaccccccccaucuga

SEQ ID NO: 7479 - RNA, 1302 nt, Artificial Sequence
  derived and/or modified sequence opt5 from sFLT-1__Homo_sapiens__AFC77954
auggugaucgucgaguacugcaaguauggcaaccugagcaauuaccucaaauccaagagagaccuguucuuucuuaacaaagaugccgcucugcacauggaacccaagaaagagaagauggaaccugggcucgagcagggaaagaaaccgcggcuggacucuguuaccagcuccgaaucuuucgccagcuccggcuuucaagaggauaagucucuuagcgacguggaggaagaggaagauuccgacggguucuauaaagagcccauuaccauggaggaucugaucagcuacucuuuucagguggcgcgcggaauggaguuccucuccagcagaaaguguauucaucgggaccuggcugcccgcaauauccugcucucugagaacaaugucgugaaaauuugcgauuuuggccuggccagagacaucuauaagaacccugauuacguucggaagggggacacgcgccuuccccugaaauggauggcuccugaauccaucuucgauaagauuuauagcaccaaaucugacgugugguccuacggaguccuccugugggagaucuuuagccuuggcggcucccccuacccuggggugcagauggacgaagauuucuguucuagacugcgggagggaaugcgcaugagagccccggaguauagcacacccgaaauuuaccagaucaugcucgacugcuggcaccgggauccuaaggagcgccccagauuugcugaacugguugagaaacugggcgaccuccugcaagccaaugugcagcaggaugggaaggacuauauuccuaucaacgcgauucuuaccggaaauuccggcuucacauacagcacccccgccuuuucugaagauuucuucaaagaguccaucagcgcuccgaaguuuaacucugggagcuccgacgauguccgguaugugaaugccuucaaguuuaugucucuggagcgcaucaaaacauucgaagaacuccugccuaacgcuaccagcauguuugacgauuaccagggagacuccagcacgcuucuggccucucccaugcucaagagauucaccuggacagacuccaaaccuaaggcgagccugaaaauugaucugcgggugaccucuaaguccaaggaaagcggccucuccgacgucucuagacccagcuuuugucauuccucuugcggccacguuagcgaggggaaacgccgguucacauaugaucaugccgaacuggagagaaagaucgcuuguugcuccccucccccggacuacaauagcguggugcuuuacucuacacccccuauuuga

SEQ ID NO: 7480 - RNA, 1302 nt, Artificial Sequence
  derived and/or modified sequence opt6 from sFLT-1__Homo_sapiens__AFC77954
augguaauaguagaauauugcaaauauggaaacuuauccaacuaccuaaaaaguaaaagagaucuauuuuuccuaaauaaagacgcagcuuuacauauggaaccaaaaaaagaaaaaauggaaccaggacuagaacaaggaaaaaaaccaagacucgauaguguuacaucauccgaaucauucgcaagcucaggauuucaggaagauaaaucauuaagcgacguagaagaagaagaagacuccgacgguuucuacaaagaaccaauaacuauggaagacuuaauaucauacucauuccaagucgcgagaggcauggaauucuuaucaagccgaaaaugcauacacagagaccuagcagcaagaaacauacuacuuucagaaaauaacguaguaaaaauaugugacuucggacuagcaagagauauauacaaaaauccagacuauguaaggaaaggagacacaagacuaccacuaaaauggauggcacccgaaagcauauucgacaaaauauauucaacaaaaucagauguauggucauacggaguacuacuaugggaaauauuuagcuuaggaggcucaccauaccccggaguacaaauggacgaagacuuuuguucaagauuaagagaaggaaugagaaugagagcaccagaauacaguacuccagaaauauaccaaauaaugcuagacuguuggcacagagauccuaaagaacgaccaagauuugcagaacuuguagaaaaauuaggagaucuccuacaagcaaauguccaacaagacggaaaagacuacauaccaauaaacgcaauccuaacaggcaacagcggauucacauacagcacaccagcauucucagaagacuucuucaaagaaucaauaucagcaccaaaauucaacucaggaaguucagacgacgucagauaugucaacgcauuuaaauucaugucacuagaacgaauaaaaacauuugaagaguuacuaccaaacgcaacaucaauguuugacgauuaccaaggagacucaucaacauuacuagccucaccaaugcucaaaagauucacauggacagacucaaaaccaaaagcaucacuaaaaaucgauuuaagaguuacaucaaaauccaaagaaucaggccuaucagacguaucaagaccaagcuuuugccauucaucaugcggacauguaucagaaggaaaaagaagauuuaccuacgaccacgcagaacucgaacgcaaaauagcaugcugcucaccaccaccagacuacaacaguguaguauuauacucaacaccaccaauauaa

SEQ ID NO: 7481 - protein, 85 aa, Artificial Sequence
  sFLT-1__Homo_sapiens__H9N1E8
MLKRFTWTDSKPKASLKIDLRVTSKSKESGLSDVSRPSFCHSSCGHVSEGKRRFTYDHAELERKIACCSPPPDYNSVVLYSTPPI

SEQ ID NO: 7482 - RNA, 258 nt, Artificial Sequence
  sFLT-1__Homo_sapiens__AFC77955
augcugaagcgcuucaccuggacugacagcaaacccaaggccucgcucaagauugacuugagaguaaccaguaaaaguaaggagucggggcugucugaugucagcaggcccaguuucugccauuccagcugugggcacgucagcgaaggcaagcgcagguucaccuacgaccacgcugagcuggaaaggaaaaucgcgugcugcuccccgcccccagacuacaacucggugguccuguacuccaccccacccaucuag

SEQ ID NO: 7483 - RNA, 258 nt, Artificial Sequence
  derived and/or modified sequence opt1 from sFLT-1__Homo_sapiens__AFC77955
augcugaagcgcuucaccuggaccgacagcaagcccaaggccucccucaagaucgaccugcgggugacgagcaaguccaaggagagcggccuguccgacgucagccgcccguccuucugccacagcuccugcgggcacgugagcgagggcaagcggcgcuucaccuacgaccacgccgagcucgagcggaagaucgcgugcugcucccccccccccgacuacaacagcgugguccuguacuccaccccgcccaucuga

SEQ ID NO: 7484 - RNA, 258 nt, Artificial Sequence
  derived and/or modified sequence opt2 from sFLT-1__Homo_sapiens__AFC77955
augcucaagcgcuucaccuggaccgacuccaagcccaaggccucccucaagaucgaccuccgcgucaccuccaaguccaaggaguccggccucuccgacgucucccgccccuccuucugccacuccuccugcggccacgucuccgagggcaagcgccgcuucaccuacgaccacgccgagcucgagcgcaagaucgccugcugcucccccccccccgacuacaacuccgucguccucuacuccaccccccccaucuga

SEQ ID NO: 7485 - RNA, 258 nt, Artificial Sequence
  derived and/or modified sequence opt3 from sFLT-1__Homo_sapiens__AFC77955
augcugaagagauucaccuggacagacagcaaacccaaggccucccucaaaaucgaucuuagggugacuucuaagucaaaagagaguggccugagcgacgucucccggccuucuuuuugccacucgucaugugggcauguuagcgaaggaaagcgccgauucacguacgaucacgcugaguuggaacguaagauugcaugcuguaguccaccgcccgacuauaacuccgugguauuauacucuaccccuccaauauga

SEQ ID NO: 7486 - RNA, 258 nt, Artificial Sequence
  derived and/or modified sequence opt4 from sFLT-1__Homo_sapiens__AFC77955
augcugaagagauucaccuggaccgacagcaagcccaaggccagccugaagaucgaccugagagugaccagcaagagcaaggagagcggccugagcgacgugagcagacccagcuucugccacagcagcugcggccacgugagcgagggcaagagaagauucaccuacgaccacgccgagcuggagagaaagaucgccugcugcagccccccccccgacuacaacagcguggugcuguacagcaccccccccaucuga

SEQ ID NO: 7487 - RNA, 258 nt, Artificial Sequence
  derived and/or modified sequence opt5 from sFLT-1__Homo_sapiens__AFC77955
augcugaagagauucaccuggacagacagcaaacccaaggccucccucaaaaucgaucugcgggugacgucuaagagcaaagaguccggccuuucugacgucagccgcccuuccuuuugccacucuagcugugggcauguuuccgaaggaaagagacgguucaccuacgaucacgcugagcuggaacgcaagauugccugcuguagcccgcccccugacuauaacucuguggugcucuacuccacacccccuaucuga

SEQ ID NO: 7488 - RNA, 258 nt, Artificial Sequence
  derived and/or modified sequence opt6 from sFLT-1__Homo_sapiens__AFC77955
augcuaaaaagauucacauggacagacucaaaaccaaaagcaucacuaaaaauagaccuaagaguaacaucaaaaucaaaagaaucaggacuaucagacguaucaagaccaucauucugccacucaucaugcggacacguaucagaaggaaaaagaagauucacauacgaccacgcagaacuagaaagaaaaauagcaugcugcucaccaccaccagacuacaacucaguaguacuauacucaacaccaccaauauaa

SEQ ID NO: 7489 - protein, 1338 aa, Artificial Sequence
  sFLT-1__Homo_sapiens__L7RSL3
MVSYWDTGVLLCALLSCLLLTGSSSGSKLKDPELSLKGTQHIMQAGQTLHLQCRGEAAHKWSLPEMVSKESERLSITKSACGRNGKQFCSTLTLNTAQANHTGFYSCKYLAVPTSKKKETESAIYIFISDTGRPFVEMYSEIPEIIHMTEGRELVIPCRVTSPNITVTLKKFPLDTLIPDGKRIIWDSRKGFIISNATYKEIGLLTCEATVNGHLYKTNYLTHRQTNTIIDVQISTPRPVKLLRGHTLVLNCTATTPLNTRVQMTWSYPDEKNKRASVRRRIDQSNSHANIFYSVLTIDKMQNKDKGLYTCRVRSGPSFKSVNTSVHIYDKAFITVKHRKQQVLETVAGKRSYRLSMKVKAFPSPEVVWLKDGLPATEKSARYLTRGYSLIIKDVTEEDAGNYTILLSIKQSNVFKNLTATLIVNVKPQIYEKAVSSFPDPALYPLGSRQILTCTAYGIPQPTIKWFWHPCNHNHSEARCDFCSNNEESFILDADSNMGNRIESITQRMAIIEGKNKMASTLVVADSRISGIYICIASNKVGTVGRNISFYITDVPNGFHVNLEKMPTEGEDLKLSCTVNKFLYRDVTWILLRTVNNRTMHYSISKQKMAITKEHSITLNLTIMNVSLQDSGTYACRARNVYTGEEILQKKEITIRDQEAPYLLRNLSDHTVAISSSTTLDCHANGVPEPQITWFKNNHKIQQEPGIILGPGSSTLFIERVTEEDEGVYHCKATNQKGSVESSAYLTVQGTSDKSNLELITLTCTCVAATLFWLLLTLFIRKMKRSSSEIKTDYLSIIMDPDEVPLDEQCERLPYDASKWEFARERLKLGKSLGRGAFGKVVQASAFGIKKSPTCRTVAVKMLKEGATASEYKALMTELKILTHIGHHLNVVNLLGACTKQGGPLMVIVEYCKYGNLSNYLKSKRDLFFLNKDAALHMEPKKEKMEPGLEQGKKPRLDSVTSSESFASSGFQEDKSLSDVEEEEDSDGFYKEPITMEDLISYSFQVARGMEFLSSRKCIHRDLAARNILLSENNVVKICDFGLARDIYKNPDYVRKGDTRLPLKWMAPESIFDKIYSTKSDVWSYGVLLWEIFSLGGSPYPGVQMDEDFCSRLREGMRMRAPEYSTPEIYQIMLDCWHRDPKERPRFAELVEKLGDLLQANVQQDGKDYIPINAILTGNSGFTYSTPAFSEDFFKESISAPKFNSGSSDDVRYVNAFKFMSLERIKTFEELLPNATSMFDDYQGDSSTLLASPMLKRFTWTDSKPKASLKIDLRVTSKSKESGLSDVSRPSFCHSSCGHVSEGKRRFTYDHAELERKIACCSPPPDYNSVVLYSTPPI

SEQ ID NO: 7490 - RNA, 4017 nt, Artificial Sequence
  sFLT-1__Homo_sapiens__AGC09589
auggucagcuacugggacaccgggguccugcugugcgcgcugcucagcugucugcuucucacaggaucuaguucagguucaaaauuaaaagauccugaacugaguuuaaaaggcacccagcacaucaugcaagcaggccagacacugcaucuccaaugcaggggggaagcagcccauaaauggucuuugccugaaauggugaguaaggaaagcgaaaggcugagcauaacuaaaucugccuguggaagaaauggcaaacaauucugcaguacuuuaaccuugaacacagcucaagcaaaccacacuggcuucuacagcugcaaauaucuagcuguaccuacuucaaagaagaaggaaacagaaucugcaaucuauauauuuauuagugauacagguagaccuuucguagagauguacagugaaauccccgaaauuauacacaugacugaaggaagggagcucgucauucccugccggguuacgucaccuaacaucacuguuacuuuaaaaaaguuuccacuugacacuuugaucccugauggaaaacgcauaaucugggacaguagaaagggcuucaucauaucaaaugcaacguacaaagaaauagggcuucugaccugugaagcaacagucaaugggcauuuguauaagacaaacuaucucacacaucgacaaaccaauacaaucauagauguccaaauaagcacaccacgcccagucaaauuacuuagaggccauacucuuguccucaauuguacugcuaccacucccuugaacacgagaguucaaaugaccuggaguuacccugaugaaaaaaauaagagagcuuccguaaggcgacgaauugaccaaagcaauucccaugccaacauauucuacaguguucuuacuauugacaaaaugcagaacaaagacaaaggacuuuauacuugucguguaaggaguggaccaucauucaaaucuguuaacaccucagugcauauauaugauaaagcauucaucacugugaaacaucgaaaacagcaggugcuugaaaccguagcuggcaagcggucuuaccggcucucuaugaaagugaaggcauuucccucgccggaaguuguaugguuaaaagauggguuaccugcgacugagaaaucugcucgcuauuugacucguggcuacucguuaauuaucaaggacguaacugaagaggaugcagggaauuauacaaucuugcugagcauaaaacagucaaauguguuuaaaaaccucacugccacucuaauugucaaugugaaaccccagauuuacgaaaaggccgugucaucguuuccagacccggcucucuacccacugggcagcagacaaauccugacuuguaccgcauaugguaucccucaaccuacaaucaagugguucuggcaccccuguaaccauaaucauuccgaagcaaggugugacuuuuguuccaauaaugaagaguccuuuauccuggaugcugacagcaacaugggaaacagaauugagagcaucacucagcgcauggcaauaauagaaggaaagaauaagauggcuagcaccuugguuguggcugacucuagaauuucuggaaucuacauuugcauagcuuccaauaaaguugggacugugggaagaaacauaagcuuuuauaucacagaugugccaaauggguuucauguuaacuuggaaaaaaugccgacggaaggagaggaccugaaacugucuugcacaguuaacaaguucuuauacagagacguuacuuggauuuuacugcggacaguuaauaacagaacaaugcacuacaguauuagcaagcaaaaaauggccaucacuaaggagcacuccaucacucuuaaucuuaccaucaugaauguuucccugcaagauucaggcaccuaugccugcagagccaggaauguauacacaggggaagaaauccuccagaagaaagaaauuacaaucagagaucaggaagcaccauaccuccugcgaaaccucagugaucacacaguggccaucagcaguuccaccacuuuagacugucaugcuaaugguguccccgagccucagaucacuugguuuaaaaacaaccacaaaauacaacaagagccuggaauuauuuuaggaccaggaagcagcacgcuguuuauugaaagagucacagaagaggaugaaggugucuaucacugcaaagccaccaaccagaagggcucuguggaaaguucagcauaccucacuguucaaggaaccucggacaagucuaaucuggagcugaucacucuaacaugcaccuguguggcugcgacucucuucuggcuccuauuaacccucuuuauccgaaaaaugaaaaggucuucuucugaaauaaagacugacuaccuaucaauuauaauggacccagaugaaguuccuuuggaugagcagugugagcggcucccuuaugaugccagcaagugggaguuugcccgggagagacuuaaacugggcaaaucacuuggaagaggggcuuuuggaaaagugguucaagcaucagcauuuggcauuaagaaaucaccuacgugccggacuguggcugugaaaaugcugaaagagggggccacggccagcgaguacaaagcucugaugacugagcuaaaaaucuugacccacauuggccaccaucugaacgugguuaaccugcugggagccugcaccaagcaaggagggccucugauggugauuguugaauacugcaaauauggaaaucucuccaacuaccucaagagcaaacgugacuuauuuuuucucaacaaggaugcagcacuacacauggagccuaagaaagaaaaaauggagccaggccuggaacaaggcaagaaaccaagacuagauagcgucaccagcagcgaaagcuuugcgagcuccggcuuucaggaagauaaaagucugagugauguugaggaagaggaggauucugacgguuucuacaaggagcccaucacuauggaagaucugauuucuuacaguuuucaaguggccagaggcauggaguuccugucuuccagaaagugcauucaucgggaccuggcagcgagaaacauucuuuuaucugagaacaacguggugaagauuugugauuuuggccuugcccgggauauuuauaagaaccccgauuaugugagaaaaggagauacucgacuuccucugaaauggauggcuccugaaucuaucuuugacaaaaucuacagcaccaagagcgacguguggucuuacggaguauugcugugggaaaucuucuccuuaggugggucuccauacccaggaguacaaauggaugaggacuuuugcagucgccugagggaaggcaugaggaugagagcuccugaguacucuacuccugaaaucuaucagaucaugcuggacugcuggcacagagacccaaaagaaaggccaagauuugcagaacuuguggaaaaacuaggugauuugcuucaagcaaauguacaacaggaugguaaagacuacaucccaaucaaugccauacugacaggaaauaguggguuuacauacucaacuccugccuucucugaggacuucuucaaggaaaguauuucagcuccgaaguuuaauucaggaagcucugaugaugucagauacguaaaugcuuucaaguucaugagccuggaaagaaucaaaaccuuugaagaacuuuuaccgaaugccaccuccauguuugaugacuaccagggcgacagcagcacucuguuggccucucccaugcugaagcgcuucaccuggacugacagcaaacccaaggccucgcucaagauugacuugagaguaaccaguaaaaguaaggagucggggcugucugaugucagcaggcccaguuucugccauuccagcugugggcacgucagcgaaggcaagcgcagguucaccuacgaccacgcugagcuggaaaggaaaaucgcgugcugcuccccgcccccagacuacaacucggugguccuguacuccaccccacccaucuag

SEQ ID NO: 7491 - RNA, 4017 nt, Artificial Sequence
  derived and/or modified sequence opt1 from sFLT-1__Homo_sapiens__AGC09589
auggugagcuacugggacaccggcguccugcucugcgcccugcuguccugccuccugcugaccgggagcuccagcggcuccaagcucaaggaccccgagcugagccugaaggggacgcagcacaucaugcaggccggccagacccuccaccuccagugccgcggggaggcggcccacaaguggucccugcccgagauggugagcaaggaguccgagcggcugagcaucaccaaguccgccugcggccgcaacggcaagcaguucugcagcacccugacgcugaacaccgcccaggccaaccacaccggguucuacuccugcaaguaccucgcggugcccaccagcaagaagaaggagacggaguccgccaucuacaucuucaucagcgacaccggccggcccuucgucgagauguacuccgagauccccgagaucauccacaugaccgaggggcgcgagcuggugaucccgugccgggugaccagccccaacaucacggucacccugaagaaguucccccucgacacccugauccccgacggcaagcgcaucaucugggacucccggaagggguucaucaucagcaacgccaccuacaaggagaucggccugcucacgugcgaggccaccgugaacggccaccuguacaagaccaacuaccugacccaccgccagacgaacaccaucaucgacgugcagaucagcaccccgcggcccgucaagcuccugcgcgggcacacccuggugcucaacugcacggcgaccacgccccugaacacccgggugcagaugaccugguccuaccccgacgagaagaacaagcgcgccagcguccggcgccggaucgaccaguccaacagccacgccaacaucuucuacuccgugcugaccaucgacaagaugcagaacaaggacaagggccucuacacgugccgcgugcggagcgggccguccuucaagagcgucaacaccuccgugcacaucuacgacaaggccuucaucaccgugaagcaccgcaagcagcagguccuggagaccguggccggcaagcggagcuaccgccuguccaugaaggugaaggcguuccccagccccgaggucguguggcucaaggacggccugcccgccaccgagaaguccgcccgguaccugacccgcggguacagccucaucaucaaggacgugacggaggaggacgccggcaacuacaccauccugcuguccaucaagcagagcaacgucuucaagaaccucaccgccacccugaucgugaacgucaagccgcagaucuacgagaaggcgguguccagcuuccccgaccccgcccuguacccccucgggucccgccagauccugaccugcacggccuacggcaucccgcagcccaccaucaagugguucuggcaccccugcaaccacaaccacagcgaggcccggugcgacuucugcagcaacaacgaggaguccuucauccuggacgccgacagcaacauggggaaccgcaucgaguccaucacccagcggauggcgaucaucgagggcaagaacaagauggccagcacccucguggucgccgacucccgcaucagcggcaucuacaucugcaucgccuccaacaagguggggacggugggccggaacaucagcuucuacaucaccgacguccccaacggguuccacgugaaccuggagaagaugccgaccgagggcgaggaccugaagcucuccugcaccgugaacaaguuccuguaccgcgacgucacguggauccugcugcggaccgugaacaaccgcaccaugcacuacagcaucuccaagcagaagauggccaucaccaaggagcacagcaucacgcucaaccugaccaucaugaacgugucccugcaggacagcgggaccuacgcgugccgggcccgcaacgucuacaccggcgaggagauccuccagaagaaggagaucacgauccgggaccaggaggcccccuaccugcugcgcaaccucuccgaccacaccguggccaucagcuccagcaccacccuggacugccacgcgaacggcgugcccgagccccagaucacgugguucaagaacaaccacaagauccagcaggagccggggaucauccugggccccgggagcuccacccucuucaucgagcgggucaccgaggaggacgagggcguguaccacugcaaggccaccaaccagaaggggagcguggaguccagcgccuaccugacgguccagggcaccuccgacaagagcaaccuggagcucaucacccugaccugcacgugcguggccgccacccuguucuggcuccugcugacccucuucauccgcaagaugaagcgguccagcuccgagaucaagaccgacuaccugagcaucaucauggaccccgacgaggugccgcuggacgagcagugcgagcgccuccccuacgacgcguccaagugggaguucgcccgggagcgccugaagcugggcaagagccucgggcggggcgccuucgggaaggucgugcaggccuccgccuucggcaucaagaagucccccacgugccgcaccguggcggucaagaugcugaaggagggcgccaccgccagcgaguacaaggcccugaugaccgagcucaagauccugacgcacaucgggcaccaccugaacguggugaaccuccugggcgccugcaccaagcagggcgggccccugauggucaucguggaguacugcaaguacgggaaccucagcaacuaccugaaguccaagcgcgaccuguucuuccucaacaaggacgcggcccugcacauggagccgaagaaggagaagauggagcccggccuggagcagggcaagaagccccggcucgacagcgugaccuccagcgagagcuucgccuccagcggguuccaggaggacaagucccugagcgacgucgaggaggaggaggacuccgacggcuucuacaaggagcccaucaccauggaggaccugaucagcuacuccuuccagguggcccgcgggauggaguuccucagcucccggaagugcauccaccgcgaccuggcggcccggaacauccugcucagcgagaacaacguggucaagaucugcgacuucggccuggcccgcgacaucuacaagaacccggacuacgugcggaagggggacacccgccugccccucaaguggauggcccccgaguccaucuucgacaagaucuacagcacgaaguccgacguguggagcuacggcguccugcugugggagaucuucucccucggcgggagccccuacccgggcgugcagauggacgaggacuucugcucccggcugcgcgaggggaugcggaugcgcgcccccgaguacagcacccccgagaucuaccagaucaugcuggacugcuggcaccgggaccccaaggagcgcccgcgguucgcggagcucguggagaagcugggcgaccugcuccaggccaacguccagcaggacgggaaggacuacauccccaucaacgccauccugaccggcaacuccggcuucaccuacagcacgcccgccuucagcgaggacuucuucaaggaguccaucagcgcccccaaguucaacuccgggagcuccgacgacgugcgcuacgugaacgcguucaaguucaugagccuggagcggaucaagaccuucgaggagcuccugccgaacgccaccuccauguucgacgacuaccagggcgacagcuccacccugcucgccagccccaugcugaagcgcuucacguggaccgacuccaagcccaaggccagccugaagaucgaccuccgggucaccuccaagagcaaggaguccgggcugagcgacgugucccgccccagcuucugccacuccagcugcggccacgugagcgaggggaagcggcgcuucaccuacgaccacgccgagcuggagcgcaagaucgcgugcugcuccccgccgcccgacuacaacagcgucgugcucuacuccacgccgcccaucuga

SEQ ID NO: 7492 - RNA, 4017 nt, Artificial Sequence
  derived and/or modified sequence opt2 from sFLT-1__Homo_sapiens__AGC09589
auggucuccuacugggacaccggcguccuccucugcgcccuccucuccugccuccuccucaccggcuccuccuccggcuccaagcucaaggaccccgagcucucccucaagggcacccagcacaucaugcaggccggccagacccuccaccuccagugccgcggcgaggccgcccacaaguggucccuccccgagauggucuccaaggaguccgagcgccucuccaucaccaaguccgccugcggccgcaacggcaagcaguucugcuccacccucacccucaacaccgcccaggccaaccacaccggcuucuacuccugcaaguaccucgccguccccaccuccaagaagaaggagaccgaguccgccaucuacaucuucaucuccgacaccggccgccccuucgucgagauguacuccgagauccccgagaucauccacaugaccgagggccgcgagcucgucauccccugccgcgucaccucccccaacaucaccgucacccucaagaaguucccccucgacacccucauccccgacggcaagcgcaucaucugggacucccgcaagggcuucaucaucuccaacgccaccuacaaggagaucggccuccucaccugcgaggccaccgucaacggccaccucuacaagaccaacuaccucacccaccgccagaccaacaccaucaucgacguccagaucuccaccccccgccccgucaagcuccuccgcggccacacccucguccucaacugcaccgccaccaccccccucaacacccgcguccagaugaccugguccuaccccgacgagaagaacaagcgcgccuccguccgccgccgcaucgaccaguccaacucccacgccaacaucuucuacuccguccucaccaucgacaagaugcagaacaaggacaagggccucuacaccugccgcguccgcuccggccccuccuucaaguccgucaacaccuccguccacaucuacgacaaggccuucaucaccgucaagcaccgcaagcagcagguccucgagaccgucgccggcaagcgcuccuaccgccucuccaugaaggucaaggccuuccccucccccgaggucgucuggcucaaggacggccuccccgccaccgagaaguccgcccgcuaccucacccgcggcuacucccucaucaucaaggacgucaccgaggaggacgccggcaacuacaccauccuccucuccaucaagcaguccaacgucuucaagaaccucaccgccacccucaucgucaacgucaagccccagaucuacgagaaggccgucuccuccuuccccgaccccgcccucuacccccucggcucccgccagauccucaccugcaccgccuacggcaucccccagcccaccaucaagugguucuggcaccccugcaaccacaaccacuccgaggcccgcugcgacuucugcuccaacaacgaggaguccuucauccucgacgccgacuccaacaugggcaaccgcaucgaguccaucacccagcgcauggccaucaucgagggcaagaacaagauggccuccacccucgucgucgccgacucccgcaucuccggcaucuacaucugcaucgccuccaacaaggucggcaccgucggccgcaacaucuccuucuacaucaccgacguccccaacggcuuccacgucaaccucgagaagaugcccaccgagggcgaggaccucaagcucuccugcaccgucaacaaguuccucuaccgcgacgucaccuggauccuccuccgcaccgucaacaaccgcaccaugcacuacuccaucuccaagcagaagauggccaucaccaaggagcacuccaucacccucaaccucaccaucaugaacgucucccuccaggacuccggcaccuacgccugccgcgcccgcaacgucuacaccggcgaggagauccuccagaagaaggagaucaccauccgcgaccaggaggcccccuaccuccuccgcaaccucuccgaccacaccgucgccaucuccuccuccaccacccucgacugccacgccaacggcguccccgagccccagaucaccugguucaagaacaaccacaagauccagcaggagcccggcaucauccucggccccggcuccuccacccucuucaucgagcgcgucaccgaggaggacgagggcgucuaccacugcaaggccaccaaccagaagggcuccgucgaguccuccgccuaccucaccguccagggcaccuccgacaaguccaaccucgagcucaucacccucaccugcaccugcgucgccgccacccucuucuggcuccuccucacccucuucauccgcaagaugaagcgcuccuccuccgagaucaagaccgacuaccucuccaucaucauggaccccgacgaggucccccucgacgagcagugcgagcgccuccccuacgacgccuccaagugggaguucgcccgcgagcgccucaagcucggcaagucccucggccgcggcgccuucggcaaggucguccaggccuccgccuucggcaucaagaagucccccaccugccgcaccgucgccgucaagaugcucaaggagggcgccaccgccuccgaguacaaggcccucaugaccgagcucaagauccucacccacaucggccaccaccucaacgucgucaaccuccucggcgccugcaccaagcagggcggcccccucauggucaucgucgaguacugcaaguacggcaaccucuccaacuaccucaaguccaagcgcgaccucuucuuccucaacaaggacgccgcccuccacauggagcccaagaaggagaagauggagcccggccucgagcagggcaagaagccccgccucgacuccgucaccuccuccgaguccuucgccuccuccggcuuccaggaggacaagucccucuccgacgucgaggaggaggaggacuccgacggcuucuacaaggagcccaucaccauggaggaccucaucuccuacuccuuccaggucgcccgcggcauggaguuccucuccucccgcaagugcauccaccgcgaccucgccgcccgcaacauccuccucuccgagaacaacgucgucaagaucugcgacuucggccucgcccgcgacaucuacaagaaccccgacuacguccgcaagggcgacacccgccucccccucaaguggauggcccccgaguccaucuucgacaagaucuacuccaccaaguccgacgucugguccuacggcguccuccucugggagaucuucucccucggcggcucccccuaccccggcguccagauggacgaggacuucugcucccgccuccgcgagggcaugcgcaugcgcgcccccgaguacuccacccccgagaucuaccagaucaugcucgacugcuggcaccgcgaccccaaggagcgcccccgcuucgccgagcucgucgagaagcucggcgaccuccuccaggccaacguccagcaggacggcaaggacuacauccccaucaacgccauccucaccggcaacuccggcuucaccuacuccacccccgccuucuccgaggacuucuucaaggaguccaucuccgcccccaaguucaacuccggcuccuccgacgacguccgcuacgucaacgccuucaaguucaugucccucgagcgcaucaagaccuucgaggagcuccuccccaacgccaccuccauguucgacgacuaccagggcgacuccuccacccuccucgccucccccaugcucaagcgcuucaccuggaccgacuccaagcccaaggccucccucaagaucgaccuccgcgucaccuccaaguccaaggaguccggccucuccgacgucucccgccccuccuucugccacuccuccugcggccacgucuccgagggcaagcgccgcuucaccuacgaccacgccgagcucgagcgcaagaucgccugcugcucccccccccccgacuacaacuccgucguccucuacuccaccccccccaucuga

SEQ ID NO: 7493 - RNA, 4017 nt, Artificial Sequence
  derived and/or modified sequence opt3 from sFLT-1__Homo_sapiens__AGC09589
auggugagcuacugggacaccggcguccugcucugcgcccuucuguccuguuuguuacugacagggucuucaaguggaagcaagcuaaaagaucccgagcucucccugaaggguacucagcacaucaugcaagcuggccagacgcuucaucugcagugcagaggggaagcagcccacaaauggucuuugccugagaugguuucgaaggaaucagagaggcucagcauuaccaaaagugcguguggacggaacggcaagcaguucugcuccacacugacucugaauaccgcucaagccaaccauacagguuuuuauucuuguaaguaccucgcagugccaaccagcaaaaagaaagaaacugaguccgccauauauaucuucauuucagacacagggcgcccguuuguagagauguacagugaaauccccgagauuauccacaugaccgaaggacgagaguuagugauaccuugccgugucacgagcccaaauaucacugugacccugaagaaauucccccuugauacauugauuccugacggcaagagaaucauuugggauucuaggaagggcuuuaucauauccaacgcuacuuauaaagagauugggcugcuaaccugugaagcaacaguuaauggacaucucuacaagaccaacuaucugacgcaccggcagacuaauacaaucauugacgugcagaucucaaccccacgccccgucaaacuucugagaggucacacuuuggugcucaacugcacagccaccacgccucugaauaccaggguacagaugacauggagcuacccagaugagaagaacaaacgggcuaguguucgccgaagaaucgaccaaucuaauucccaugccaacauuuucuacagcguguuaacuauagauaagaugcagaauaaagacaagggccuguauaccuguaggguccggucggggccgucuuuuaaguccgugaacacaucagugcacaucuacgauaaagcguucauuacugucaagcaucguaaacagcagguucucgaaaccguggcaggaaagcgcaguuauagacuuagcaugaaaguaaaggccuuucccuccccugagguggucuggcugaaggacggcuugccagcuacagaaaaaucugccagguaccuaacccgggguuauagccugaucauaaaggaugugacugaggaggacgcagggaauuacacgauucuccugucaaucaaacaaaguaacguuuucaagaaccuuacagcuacccugaucgugaaugucaaaccccagauuuaugaaaaggccguguccagcuuuccugacccagcguuguacccccucggaucucgacagauccugacuugcaccgccuacggcauuccgcaaccuacaauaaagugguucuggcaccccuguaaccacaaucauucagaggcacgcugcgauuuuugcaguaacaaugaagagagcuucaucuuagacgcugauuccaacaugggcaauagaauugaaucuaucacccagaggauggccaucauugaggggaaaaacaagauggcuucgacucugguaguugccgacagccggauauccggaaucuauauuuguaucgcaucaaauaaaguggguacagucggccgcaacauuaguuucuacaucacggaugugccaaauggguuucacgucaaccuagagaagaugccuaccgaaggagaggaccucaaacugucuugcacugugaauaaguuccuuuauagagauguuacauggauauugcugaggaccgugaacaaucguacaaugcauuacagcaucuccaagcagaaaauggccauuacuaaggaacacucaaucacccucaaccugacgauuaugaacguaagccuucaggacucuggcaccuaugcuugucgggcgcgaaaugucuacacaggugaggaaauccugcagaaaaaggagauaacuauuagagaucaagaggcacccuauuugcucaggaaccuguccgaccauaccguggccaucaguagcucuacaacuuuagauugccacgcuaaugggguuccagaaccccagauuaccugguuuaaaaacaaucacaagauccagcaagagccuggcauaauccugggaccaggcuccucaacgcuauucauugaacgcgugacagaggaggacgaaggggucuaccauuguaaagccaccaaccagaagggaaguguggagagcucggcauaccucacuguacaggguacauccgacaagucuaaucuggaacuuaucaccuugacuugcaccuguguggccgcuacacuguuuuggcuccuguuaacgcuguucauucggaaaaugaagagaagcucaagugagaucaaaaccgauuaucuuuccauaauuauggacccggaugaaguucccuuggacgagcagugcgagaggcucccuuacgaugccucuaagugggaauuugcacgcgagcgacugaaacuaggcaagagccuggggcggggagcguucggcaaggucgugcaggcuuccgccuuugguaucaaaaagucaccaacuugucguacaguggcagucaaaaugcucaaggaaggggccaccgcuagcgaguauaaagcccugaugacagaacuuaagaucuugacucacauuggccaucaccugaacguugugaauuuacucggagcaugcaccaagcaaggcgggccccugauggugaucguagaguacuguaaauauggaaaccuuaguaauuaccugaagucuaaaagagacuuguucuuucucaacaaggaugcugcccugcacauggagccuaaaaaggaaaagauggagccaggucuagaacagggcaaaaagcccaggcuggacuccgucacgagcucggagucauucgcgucuaguggguuucaggaagauaaaucccucagcgacguggaggaggaagaggauucugacggauucuauaaggaaccgauuacaauggaggaucugauaagcuacuccuuccaaguugcccgcggcauggaguuucuuucaagucggaaaugcauccauagagacuuggcugcaaggaauauucuguuaagcgaaaacaauguggucaagaucugcgacuucggucucgcccgagauauuuacaaaaacccugacuaugugcgcaagggggauacccggcugccacuuaaguggauggcucccgagucuaucuuugacaaaauauacuccacuaagucagauguuuggaguuauggcgugcugcuaugggaaaucuucagccucggaggcuccccuuaccccgggguacagauggacgaggauuuuuguucuagacugagggaaggaaugcguaugcgcgccccagaguauucgaccccugagauuuaccagaucauguuggacugcuggcaccgggaucccaaagaaagaccaagguucgcagagcuggucgaaaaguuaggcgaccuccugcaagcgaacgugcagcaggaugguaaagacuauauuccgaucaaugccauacuuacagggaacagcggauuuacuuacucaaccccugcuuucuccgaggacuuuuucaaggaaaguauuucugcccccaaguuuaauagcggcuccucagaugacgugcgauacgucaacgcauucaaauuuaugucucuggagcggaucaagacauucgaggaauugcucccaaaugcuacgagcauguucgaugacuaucagggugauaguuccacccugcuagccagccccaugcugaaacgcuuuacuuggacagacucuaagccuaaagcaucacuuaagaucgaucucagaguuaccuccaagaguaaagagagcggccugucggacgugucuaggccauccuucugucauagcucaugcgggcacguaagugaaggaaagcggcgauuuacuuacgaucaugccgaguuggaaagaaaaauugcuuguugcucucccccuccggacuauaacuccgugguccuguacagcacaccacccauauga

SEQ ID NO: 7494 - RNA, 4017 nt, Artificial Sequence
  derived and/or modified sequence opt4 from sFLT-1__Homo_sapiens__AGC09589
auggugagcuacugggacaccggcgugcugcugugcgcccugcugagcugccugcugcugaccggcagcagcagcggcagcaagcugaaggaccccgagcugagccugaagggcacccagcacaucaugcaggccggccagacccugcaccugcagugcagaggcgaggccgcccacaaguggagccugcccgagauggugagcaaggagagcgagagacugagcaucaccaagagcgccugcggcagaaacggcaagcaguucugcagcacccugacccugaacaccgcccaggccaaccacaccggcuucuacagcugcaaguaccuggccgugcccaccagcaagaagaaggagaccgagagcgccaucuacaucuucaucagcgacaccggcagacccuucguggagauguacagcgagauccccgagaucauccacaugaccgagggcagagagcuggugauccccugcagagugaccagccccaacaucaccgugacccugaagaaguucccccuggacacccugauccccgacggcaagagaaucaucugggacagcagaaagggcuucaucaucagcaacgccaccuacaaggagaucggccugcugaccugcgaggccaccgugaacggccaccuguacaagaccaacuaccugacccacagacagaccaacaccaucaucgacgugcagaucagcacccccagacccgugaagcugcugagaggccacacccuggugcugaacugcaccgccaccaccccccugaacaccagagugcagaugaccuggagcuaccccgacgagaagaacaagagagccagcgugagaagaagaaucgaccagagcaacagccacgccaacaucuucuacagcgugcugaccaucgacaagaugcagaacaaggacaagggccuguacaccugcagagugagaagcggccccagcuucaagagcgugaacaccagcgugcacaucuacgacaaggccuucaucaccgugaagcacagaaagcagcaggugcuggagaccguggccggcaagagaagcuacagacugagcaugaaggugaaggccuuccccagccccgaggugguguggcugaaggacggccugcccgccaccgagaagagcgccagauaccugaccagaggcuacagccugaucaucaaggacgugaccgaggaggacgccggcaacuacaccauccugcugagcaucaagcagagcaacguguucaagaaccugaccgccacccugaucgugaacgugaagccccagaucuacgagaaggccgugagcagcuuccccgaccccgcccuguacccccugggcagcagacagauccugaccugcaccgccuacggcaucccccagcccaccaucaagugguucuggcaccccugcaaccacaaccacagcgaggccagaugcgacuucugcagcaacaacgaggagagcuucauccuggacgccgacagcaacaugggcaacagaaucgagagcaucacccagagaauggccaucaucgagggcaagaacaagauggccagcacccuggugguggccgacagcagaaucagcggcaucuacaucugcaucgccagcaacaaggugggcaccgugggcagaaacaucagcuucuacaucaccgacgugcccaacggcuuccacgugaaccuggagaagaugcccaccgagggcgaggaccugaagcugagcugcaccgugaacaaguuccuguacagagacgugaccuggauccugcugagaaccgugaacaacagaaccaugcacuacagcaucagcaagcagaagauggccaucaccaaggagcacagcaucacccugaaccugaccaucaugaacgugagccugcaggacagcggcaccuacgccugcagagccagaaacguguacaccggcgaggagauccugcagaagaaggagaucaccaucagagaccaggaggcccccuaccugcugagaaaccugagcgaccacaccguggccaucagcagcagcaccacccuggacugccacgccaacggcgugcccgagccccagaucaccugguucaagaacaaccacaagauccagcaggagcccggcaucauccugggccccggcagcagcacccuguucaucgagagagugaccgaggaggacgagggcguguaccacugcaaggccaccaaccagaagggcagcguggagagcagcgccuaccugaccgugcagggcaccagcgacaagagcaaccuggagcugaucacccugaccugcaccugcguggccgccacccuguucuggcugcugcugacccuguucaucagaaagaugaagagaagcagcagcgagaucaagaccgacuaccugagcaucaucauggaccccgacgaggugccccuggacgagcagugcgagagacugcccuacgacgccagcaagugggaguucgccagagagagacugaagcugggcaagagccugggcagaggcgccuucggcaagguggugcaggccagcgccuucggcaucaagaagagccccaccugcagaaccguggccgugaagaugcugaaggagggcgccaccgccagcgaguacaaggcccugaugaccgagcugaagauccugacccacaucggccaccaccugaacguggugaaccugcugggcgccugcaccaagcagggcggcccccugauggugaucguggaguacugcaaguacggcaaccugagcaacuaccugaagagcaagagagaccuguucuuccugaacaaggacgccgcccugcacauggagcccaagaaggagaagauggagcccggccuggagcagggcaagaagcccagacuggacagcgugaccagcagcgagagcuucgccagcagcggcuuccaggaggacaagagccugagcgacguggaggaggaggaggacagcgacggcuucuacaaggagcccaucaccauggaggaccugaucagcuacagcuuccagguggccagaggcauggaguuccugagcagcagaaagugcauccacagagaccuggccgccagaaacauccugcugagcgagaacaacguggugaagaucugcgacuucggccuggccagagacaucuacaagaaccccgacuacgugagaaagggcgacaccagacugccccugaaguggauggcccccgagagcaucuucgacaagaucuacagcaccaagagcgacguguggagcuacggcgugcugcugugggagaucuucagccugggcggcagccccuaccccggcgugcagauggacgaggacuucugcagcagacugagagagggcaugagaaugagagcccccgaguacagcacccccgagaucuaccagaucaugcuggacugcuggcacagagaccccaaggagagacccagauucgccgagcugguggagaagcugggcgaccugcugcaggccaacgugcagcaggacggcaaggacuacauccccaucaacgccauccugaccggcaacagcggcuucaccuacagcacccccgccuucagcgaggacuucuucaaggagagcaucagcgcccccaaguucaacagcggcagcagcgacgacgugagauacgugaacgccuucaaguucaugagccuggagagaaucaagaccuucgaggagcugcugcccaacgccaccagcauguucgacgacuaccagggcgacagcagcacccugcuggccagccccaugcugaagagauucaccuggaccgacagcaagcccaaggccagccugaagaucgaccugagagugaccagcaagagcaaggagagcggccugagcgacgugagcagacccagcuucugccacagcagcugcggccacgugagcgagggcaagagaagauucaccuacgaccacgccgagcuggagagaaagaucgccugcugcagccccccccccgacuacaacagcguggugcuguacagcaccccccccaucuga

SEQ ID NO: 7495 - RNA, 4017 nt, Artificial Sequence
  derived and/or modified sequence opt5 from sFLT-1__Homo_sapiens__AGC09589
auggugagcuacugggacaccggcguccugcucugcgcccugcuuuccugucugcuccugaccgggucuagcuccggaucuaaacuuaaggaucccgagcugagccucaagggcacgcagcacaucaugcaagcugggcagacccugcaucugcagugcagaggagaagccgcgcacaaauggucccucccugagaugguuucuaaggaaagcgagcggcuguccauuacaaaaagcgcuuguggccgcaacgggaagcaguucugcucuacccuuacacugaauaccgcccaagccaaccauacaggauuuuauuccuguaaguaccucgcugugccgaccagcaaaaagaaagaaacggagucugccaucuauauuuucaucuccgacaccggcagacccuuuguggagauguacagcgaaauuccugagaucauccacaugacagaaggccgggagcuggucauucccugccgcgugaccucuccuaauaucacaguuacccuuaagaaauucccccuggauacgcucauuccugacgggaagagaaucauuugggauucccggaagggauuuaucauuagcaacgcuacauauaaagagaucggccugcugaccugugaagccacagugaaugggcaucucuacaagaccaacuaucugacccaccgccagacaaauacgaucauugacguccagaucuccaccccgagacccgugaaacuucugcggggacacacacucguucugaacugcaccgcgacaaccccucuuaauacgcgcgugcagaugacauggucuuaccccgaugagaagaacaaaagagccagcguccggcgcagaauugaccaauccaauagccaugcuaacaucuucuacucugugcugaccauugauaagaugcagaauaaagacaagggccucuauaccugucgggugcgcuccgggccuagcuuuaagucugucaacacaagcguucacaucuacgauaaagccuucaucaccgugaagcauagaaaacaacaggugcuggaaacagucgcuggaaagcgguccuauagacugucuaugaaagugaaggccuuucccagcccggagguuguguggcucaaggacggccugccugcgacggaaaaauccgcccgcuaccuuacccggggcuauagccugauuaucaaggaugucacagaggaggacgcugggaauuacaccauucuccugucuaucaaacaauccaacguguucaagaaccuuacagccacccugauuguuaaugugaaaccccagaucuaugaaaaggcugucagcucuuuuccugaccccgcccucuacccccugggauccagacagauccugacgugcaccgccuacggcauuccucaaccgacaaucaagugguucuggcaccccuguaaccacaaucauagcgaggcucgcugcgauuuuugcuccaacaaugaagagucuuucauucucgacgcggauagcaacauggggaaucggaucgaauccauuacccagagaauggccaucauugagggcaaaaacaagauggcuucuacacugguggucgccgacagccgcaucuccggaaucuauauuuguaucgccagcaauaaaguggggaccguuggacggaacauuucuuucuacaucacggaugugccuaauggcuuucacgucaaccuugagaagaugcccacagaaggcgaggaccugaaacucuccugcaccgugaauaaguuccuguauagagauguuacauggauucugcuucgcaccgugaacaaucggaccaugcauuacagcaucucuaagcagaaaauggcuaucacaaaggaacacuccauuacgcucaaccugaccaucaugaacgucagccugcaggacucugggacauaugccuguagagcgcgcaauguguacaccggagaggaaauucuccagaaaaaggagaucacaauucgggaucaggaggcuccuuaucugcuuagaaaccugagcgaccauaccguggccaucuccagcucuacgacacucgauugccacgccaauggcguucccgaaccgcagaucaccugguuuaaaaacaaucacaagauucagcaagagccugggaucauucugggacccggcuccagcacccuguucaucgaacgggucacagaggaggacgaagggguguaccauuguaaagcuaccaaccagaagggcuccguggagucuagcgccuaccuuacaguccagggaacguccgacaagucuaaucucgaacugauuacccugacaugcaccuguguggcugccacacucuuuuggcugcuucugacccucuucauccgcaaaaugaagagaagcuccucugagaucaaaacggauuaucugagcauuaucauggacccugaugaaguuccccuggacgagcagugcgagcggcuuccuuacgaugcguccaagugggaauuugccagagagcgccucaaacugggcaagagccuggggcggggagcuuucggcaaggugguccaagccucugcuuuugggauuaaaaagucccccaccuguagaacaguggccguuaaaaugcucaaggaaggagcgaccgccagcgaguauaaagcucugaugacagaacuuaagauccugacccacauuggccaucaccucaacguggucaaucugcugggggccugcacaaagcagggcggaccgcuuauggugaucguugaguacuguaaauauggcaaccucucuaauuaccugaaguccaaacgcgaccuguucuuucucaacaaggaugcugcccugcacauggagccuaaaaaggaaaagauggagcccgggcuugaacagggcaaaaagcccagacuggacagcgugaccucuuccgagagcuucgccuccagcggauuucaggaagauaaaucucucagcgacgucgaggaggaagaggauuccgacggguucuauaaggaaccuauuacgauggaggaucugaucucuuacagcuuccaaguggcucggggaauggaguuucuguccucucgcaaaugcauccauagagaccuugcggcccggaauauucugcucagcgaaaacaauguggucaagaucugcgacuucggccuggcucgcgauauuuacaaaaacccggacuauguuagaaagggggauacacggcucccccugaaguggauggccccugaguccaucuuugacaaaauuuacucuaccaagagcgaugugugguccuauggcgugcuucugugggaaaucuucagccucggaggcucucccuacccugggguccagauggacgaggauuuuuguucccgccugagagaaggaaugcggaugcgcgcccccgaguauagcaccccugagaucuaccagauuaugcuggacugcuggcacagagaucccaaagaacggccgagauucgcugagcuuguggaaaagcugggcgaccuccugcaagccaacguucagcaggaugggaaagacuauaucccuauuaaugcgauccucacaggaaacucuggcuuuaccuacuccacgcccgcuuucagcgaggacuuuuucaaggaauccauuucugccccuaaguuuaauagcggguccagcgaugacgugcgcuacgucaacgccuucaaauuuaugucucuggagcggaucaagacauucgaggaacuucugcccaaugcuaccuccauguucgaugacuaucagggcgauagcucuacacuccuggccagcccgaugcugaaaagauuuaccuggacagacuccaagccuaaagcgucucuuaagaucgaucugcgcgugaccagcaaguccaaagagucuggacucagcgacguuucccggcccagcuucugucauucuuccugcggccacgugagcgaagggaagagacgcuuuacguacgaucaugcugagcuggaacggaaaauugccuguugcuccccuccucccgacuauaacucugucgugcucuacagcacacccccgaucuga

SEQ ID NO: 7496 - RNA, 4017 nt, Artificial Sequence
  derived and/or modified sequence opt6 from sFLT-1__Homo_sapiens__AGC09589
augguuaguuauugggacacaggcguacuucugugugcuuuacuaucauguuuauuacuaacaggaucaucaagcggcucuaagcuaaaagauccagaacuaagucugaagggaacucagcacauaaugcaagcgggucaaacucuccaccuccagugccguggagaagcugcacauaaauggaguuugccagaaauggucucaaaagaaucagaacgacuuagcauaacaaaauccgcaugugguagaaaugguaaacaauuuugcucaacacucacacuuaauacagcacaagcaaaccacacuggauucuauagcugcaaauaucuugcuguaccaacuucaaaaaaaaaagaaacagaaucagccauauauaucuucauaucagacacaggaaggcccuuuguugaaauguacucugaaauaccagaaauaauacauaugacagaaggucgggaacuugucaucccaugcagagucaccuccccaaauaucacaguuacacugaaaaaauuuccacuagauacgcuuauaccagauggaaaacguaucaucugggauucaagaaaagguuucaucauaucaaaugccacuuacaaagaaauaggcuuacucaccugugaagcaaccguaaauggacacuuauacaaaacuaacuacuuaacacaucgacagacaaauacgauaauagauguacaaauaucaacuccaagaccaguaaaauuauuaagaggacauacgcuaguacuaaauuguacugcaaccaccccccucaauacaagaguucagaugacuuggucauacccagacgaaaaaaacaagagagcuaguguacgcagaagaauugaccaaagcaacucucacgcaaacaucuucuacucuguacuaacuaucgauaaaaugcaaaauaaagacaaaggauuauacacauguaggguccggucaggaccaucauucaaaaguguaaauacaucaguacacauuuaugauaaagcauucauaaccgugaaacaucgaaagcaacaaguauuagagacgguagccggaaaacguagcuaucgucuaagcaugaaaguaaaagcauuccccagcccagaagucguauggcuaaaagauggauuacccgcuaccgaaaaauccgcucgcuaucuaacgagagguuauaguuuaauaauaaaagacguaacagaggaagaugcagguaauuauacaauccuccuuucaauaaaacagucaaauguguucaagaaucuaacagcaacccucauuguaaacguuaaaccucaaauauacgagaaagccguauccucauuuccugauccagccuuauauccacuaggaucucgucaaauacugaccuguacggcauauggaauaccacaaccgacaauaaaaugguucuggcacccauguaaucacaaccauuccgaagcacguugugauuuuuguaguaacaaugaagaaucguuuaucuuagaugcagacaguaauauggguaacagaaucgaaucaaucacacaaagaauggcuaucauugaaggaaaaaacaaaauggccucaacauuaguuguggccgacucacguauauccgguaucuacauuugcauagcgaguaauaaagucggaacugucggccguaauauaaguuuuuauauaacagaugugccaaauggauuucacguuaauuuagaaaaaaugccuacagaaggcgaagaucucaaacuaucuuguacaguaaacaaauuucuauacagggauguaacauggauacuacuacgaacagugaacaaucgaaccaugcauuacagcauaucaaaacaaaaaauggccauaacaaaagaacauaguauaacauuaaaucuuacaaucaugaacgucucgcuacaagauagcgggaccuaugcauguagagcacguaacguguacacaggcgaagaaauacuacaaaaaaaagaaauaacgauccgugaucaagaggccccauaccuacuccgaaacuuaucagaucacaccgucgcaauuucaucauccacuacauuagauugccaugcaaacggcguaccagaaccacaaaucacaugguuuaaaaauaaucacaaaauacaacaagaaccaggaauaauacuaggucccggcucaaguacuuuauuuauugaacgaguaacagaagaggaugaaggaguguaccacugcaaagcuacaaaucaaaaaggguccguugaaaguucggcauaucucacuguacaaggaacuagcgauaaaucuaacuuagaauuaauaaccuuaaccuguaccugcguagcugccacucuauuuugguuacucuugacccuauucauaagaaaaaugaaaagaucaaguuccgaaauaaaaacugauuaccuaaguauaauuauggaccccgaugaaguaccacuagaugaacagugcgaacgacucccuuacgacgcaucaaaaugggaauuugcaagagaaagauuaaaacucggaaaaucuuuaggacguggagccuuuggaaaggucguacaagcgagugcuuucggaauaaaaaagaguccaaccugccguacaguagcaguaaagaugcuuaaagaaggagcaacagcaagcgaauauaaggcucuuaugacagaauuaaaaauacucacccauaucggacaccacuuaaacguaguaaaccuauugggugcgugcacaaaacaagggggcccacuaaugguaauagucgaauacuguaaauaugguaauuuaagcaacuacuuaaaaucaaagagagacuuauucuuuuuaaauaaagacgcagcccuucauauggagccaaaaaaagaaaaaauggagccuggauuggaacaagggaaaaaaccucgucuagacaguguuaccaguucggaaucauucgcaaguagcggauuccaagaagacaaaucauugagcgauguugaagaagaagaagacucggacggauuuuauaaggagccaauuacaauggaagaccuaaucucauacucauuucaagucgcaagagguauggaauucuuaucaucucgcaaaugcauccacagagaccuugcugcuagaaauauuuuacuaagcgaaaauaaugucgucaaaaucugcgacuucgguuuagcuagagacauuuauaaaaaucccgacuacguacgcaaaggagauacaagauuaccccugaaauggauggcaccugaaucuauauucgauaagauauacuccacaaaaucagauguauggucuuaugguguauuacugugggaaauauucagucucggggguagcccguacccaggcguacaaauggacgaagauuucugcucucgccuacgugaaggcaugagaaugcgcgcucccgaauauaguaccccugaaauauaccaaauaauguuagauuguuggcaucgagaccccaaagaaagacccagguuugcagaauuaguagaaaaacuaggagaccuacuacaagccaaugugcaacaagacggaaaagauuauauacccaucaaugcuauauuaacuggaaauucuggauucacuuacuccaccccagccuucucagaagauuucuucaaagaauccaucucugcaccaaaauucaacucaggaucaagcgaugacguccgauacguaaaugcguuuaaauuuaugagcuuagagcguauaaaaacauuugaagaauuacuacccaaugccacaagcauguuugacgacuaccagggugacucaaguacccuuuuagccucaccaaugcucaaaagauuuacauggacugacucaaaaccuaaagcaucacucaaaauugaucucagaguuacaagcaaaagcaaagaaagcggauugucggacguaucgcgcccuucuuuuugucauucgaguugcggucacguaucagaagguaaaagacgauucacguaugaucacgcugaauuagaaaggaaaauagcauguugcaguccaccgccugacuacaauaguguaguacuauacucaacaccuccuauuuaa

SEQ ID NO: 7497 - protein, 1338 aa, Artificial Sequence; identical to SEQ ID NO: 7489
  sFLT-1__Homo_sapiens__P17948

SEQ ID NO: 7498 - RNA, 4017 nt, Artificial Sequence
  sFLT-1__Homo_sapiens__ABY87530
auggucagcuacugggacaccgggguccugcugugcgcgcugcucagcugucugcuucucacaggaucuaguucagguucaaaauuaaaagauccugaacugaguuuaaaaggcacccagcacaucaugcaagcaggccagacacugcaucuccaaugcaggggggaagcagcccauaaauggucuuugccugaaauggugaguaaggaaagcgaaaggcugagcauaacuaaaucugccuguggaagaaauggcaaacaauucugcaguacuuuaaccuugaacacagcucaagcaaaccacacuggcuucuacagcugcaaauaucuagcuguaccuacuucaaagaagaaggaaacagaaucugcaaucuauauauuuauuagugauacagguagaccuuucguagagauguacagugaaauccccgaaauuauacacaugacugaaggaagggagcucgucauucccugccggguuacgucaccuaacaucacuguuacuuuaaaaaaguuuccacuugacacuuugaucccugauggaaaacgcauaaucugggacaguagaaagggcuucaucauaucaaaugcaacguacaaagaaauagggcuucugaccugugaagcaacagucaaugggcauuuguauaagacaaacuaucucacacaucgacaaaccaauacaaucauagauguccaaauaagcacaccacgcccagucaaauuacuuagaggccauacucuuguccucaauuguacugcuaccacucccuugaacacgagaguucaaaugaccuggaguuacccugaugaaaaaaauaagagagcuuccguaaggcgacgaauugaccaaagcaauucccaugccaacauauucuacaguguucuuacuauugacaaaaugcagaacaaagacaaaggacuuuauacuugucguguaaggaguggaccaucauucaaaucuguuaacaccucagugcauauauaugauaaagcauucaucacugugaaacaucgaaaacagcaggugcuugaaaccguagcuggcaagcggucuuaccggcucucuaugaaagugaaggcauuucccucgccggaaguuguaugguuaaaagauggguuaccugcgacugagaaaucugcucgcuauuugacucguggcuacucguuaauuaucaaggacguaacugaagaggaugcagggaauuauacaaucuugcugagcauaaaacagucaaauguguuuaaaaaccucacugccacucuaauugucaaugugaaaccccagauuuacgaaaaggccgugucaucguuuccagacccggcucucuacccacugggcagcagacaaauccugacuuguaccgcauaugguaucccucaaccuacaaucaagugguucuggcaccccuguaaccauaaucauuccgaagcaaggugugacuuuuguuccaauaaugaagaguccuuuauccuggaugcugacagcaacaugggaaacagaauugagagcaucacucagcgcauggcaauaauagaaggaaagaauaagauggcuagcaccuugguuguggcugacucuagaauuucuggaaucuacauuugcauagcuuccaauaaaguugggacugugggaagaaacauaagcuuuuauaucacagaugugccaaauggguuucauguuaacuuggaaaaaaugccgacggaaggagaggaccugaaacugucuugcacaguuaacaaguucuuauacagagacguuacuuggauuuuacugcggacaguuaauaacagaacaaugcacuacaguauuagcaagcaaaaaauggccaucacuaaggagcacuccaucacucuuaaucuuaccaucaugaauguuucccugcaagauucaggcaccuaugccugcagagccaggaauguauacacaggggaagaaauccuccagaagaaagaaauuacaaucagagaucaggaagcaccauaccuccugcgaaaccucagugaucacacaguggccaucagcaguuccaccacuuuagacugucaugcuaaugguguccccgagccucagaucacuugguuuaaaaacaaccacaaaauacaacaagagccuggaauuauuuuaggaccaggaagcagcacgcuguuuauugaaagagucacagaagaggaugaaggugucuaucacugcaaagccaccaaccagaagggcucuguggaaaguucagcauaccucacuguucaaggaaccucggacaagucuaaucuggagcugaucacucuaacaugcaccuguguggcugcgacucucuucuggcuccuauuaacccucuuuauccgaaaaaugaaaaggucuucuucugaaauaaagacugacuaccuaucaauuauaauggacccagaugaaguuccuuuggaugagcagugugagcggcucccuuaugaugccagcaagugggaguuugcccgggagagacuuaaacugggcaaaucacuuggaagaggggcuuuuggaaaagugguucaagcaucagcauuuggcauuaagaaaucaccuacgugccggacuguggcugugaaaaugcugaaagagggggccacggccagcgaguacaaagcucugaugacugagcuaaaaaucuugacccacauuggccaccaucugaacgugguuaaccugcugggagccugcaccaagcaaggagggccucugauggugauuguugaauacugcaaauauggaaaucucuccaacuaccucaagagcaaacgugacuuauuuuuucucaacaaggaugcagcacuacacauggagccuaagaaagaaaaaauggagccaggccuggaacaaggcaagaaaccaagacuagauagcgucaccagcagcgaaagcuuugcgagcuccggcuuucaggaagauaaaagucugagugauguugaggaagaggaggauucugacgguuucuacaaggagcccaucacuauggaagaucugauuucuuacaguuuucaaguggccagaggcauggaguuccugucuuccagaaagugcauucaucgggaccuggcagcgagaaacauucuuuuaucugagaacaacguggugaagauuugugauuuuggccuugcccgggauauuuauaagaaccccgauuaugugagaaaaggagauacucgacuuccucugaaauggauggcuccugaaucuaucuuugacaaaaucuacagcaccaagagcgacguguggucuuacggaguauugcugugggaaaucuucuccuuaggugggucuccauacccaggaguacaaauggaugaggacuuuugcagucgccugagggaaggcaugaggaugagagcuccugaguacucuacuccugaaaucuaucagaucaugcuggacugcuggcacagagacccaaaagaaaggccaagauuugcagaacuuguggaaaaacuaggugauuugcuucaagcaaauguacaacaggaugguaaagacuacaucccaaucaaugccauacugacaggaaauaguggguuuacauacucaacuccugccuucucugaggacuucuucaaggaaaguauuucagcuccgaaguuuaauucaggaagcucugaugaugucagauauguaaaugcuuucaaguucaugagccuggaaagaaucaaaaccuuugaagaacuuuuaccgaaugccaccuccauguuugaugacuaccagggcgacagcagcacucuguuggccucucccaugcugaagcgcuucaccuggacugacagcaaacccaaggccucgcucaagauugacuugagaguaaccaguaaaaguaaggagucggggcugucugaugucagcaggcccaguuucugccauuccagcugugggcacgucagcgaaggcaagcgcagguucaccuacgaccacgcugagcuggaaaggaaaaucgcgugcugcuccccgcccccagacuacaacucggugguccuguacuccaccccacccaucuag

SEQ ID NO: 7499 - RNA, 4017 nt, Artificial Sequence; identical to SEQ ID NO: 7491
  derived and/or modified sequence opt1 from sFLT-1__Homo_sapiens__ABY87530

SEQ ID NO: 7500 - RNA, 4017 nt, Artificial Sequence; identical to SEQ ID NO: 7492
  derived and/or modified sequence opt2 from sFLT-1__Homo_sapiens__ABY87530

SEQ ID NO: 7501 - RNA, 4017 nt, Artificial Sequence; identical to SEQ ID NO: 7493
  derived and/or modified sequence opt3 from sFLT-1__Homo_sapiens__ABY87530

SEQ ID NO: 7502 - RNA, 4017 nt, Artificial Sequence; identical to SEQ ID NO: 7494
  derived and/or modified sequence opt4 from sFLT-1__Homo_sapiens__ABY87530

SEQ ID NO: 7503 - RNA, 4017 nt, Artificial Sequence; identical to SEQ ID NO: 7495
  derived and/or modified sequence opt5 from sFLT-1__Homo_sapiens__ABY87530

SEQ ID NO: 7504 - RNA, 4017 nt, Artificial Sequence
  derived and/or modified sequence opt6 from sFLT-1__Homo_sapiens__ABY87530
augguuagcuacugggauacuggagugcuauuaugugcacuauuaaguugcuuauuacuuaccgguucaaguucuggaaguaaacuuaaggacccagaauuaagucuuaaaggcacucaacauaucaugcaagcuggacaaacacuucaucuccaaugccgaggagaagcagcacauaaauggucucuaccagaaaugguuaguaaagaauccgaacgacuuucuauuacaaaauccgcaugcggccgaaacgggaaacaauuuuguuccacacuaacacuaaauacagcucaggcgaaccauacuggcuuuuacagcugcaaauaucuugccgugccaacgaguaaaaagaaagaaacugaaucagcaauuuacaucuucauuucggacacagguagaccauucguagaaauguauagugaaauaccagaaaucauccauaugacugaaggcagagaacuuguuauaccaugcagaguuacuagcccuaacauaacagucacacuuaagaaauucccacuagacacacucauuccugacggaaaacggauaauuugggauagucguaaaggauucauaauauccaacgcaacuuauaaggaaauaggauuacuaacuugcgaagccaccguaaauggucauuuauauaaaaccaauuacuuaacccaccgucaaacaaacacaauuauagauguucaaauaaguacaccgagaccagucaaacugcuccgaggacacacacuaguucuaaacuguaccgcaaccaccccucuaaacaccagagugcaaaugacauggucauauccugacgaaaaaaacaaacgcgccucaguacgacgcagaauugaccaaaguaauucccaugccaacaucuuuuauucaguguugacaaucgauaagaugcaaaacaaagauaaaggacuuuacacauguagaguacgcucaggucccaguuuuaaaucaguaaauacaaguguccauauauacgauaaagccuuuauaacaguaaaacauagaaaacaacaaguuuuagaaacaguagcuggaaaacgauccuauaggcuaucaaugaaaguuaaagcuuuuccuucaccugaaguuguuugguuaaaggacggacucccugccacagaaaaaagcgcaagauacuuaacucgaggauacucauuaauaauuaaagauguaacugaagaagacgcuggaaauuacacaauacuauuauccauuaaacagucaaacguauuuaagaaucuuaccgcaacacuuauuguaaaugucaaaccccaaauauaugaaaaagcaguguccucauucccagacccagcacucuacccauuaggaucccgacaaauacuuacuuguacugcauaugguaucccucaaccuacuauaaaaugguuuuggcauccauguaaucauaaccauucagaagccagaugcgauuuuuguaguaauaacgaagaaaguuuuauauuagaugcagauucaaacaugggaaacaggauugaaucaauaacucagcgaauggcuauaauagaaggcaaaaauaaaauggcaucaaccuugguaguugcagacucacgaauaaguggcauuuacaucugcaucgcaucaaauaaagucggcacugucggaagaaauauaucauucuacaucacagacguacccaauggauuccacguuaacuuggaaaaaaugccaacagaaggagaagacuuaaaauuaucuuguacaguuaauaaauuccuauacagagauguuaccuggauccuucuaagaacaguuaauaaucgaacaaugcauuacuccauaucgaagcaaaaaauggcaaucacaaaagaacauuccauaacauuaaaucuuacaaucaugaaugucagccuacaagacagcggaaccuaugcaugccgcgcacgcaacguauauacuggugaagaaauuuuacaaaagaaagagauaacuauacgagaccaagaagcaccauaccuuuuaagaaaucuuucagaucacacgguugcuaucucaucaaguaccacucuagauugucaugcaaacggcguaccagaaccccaaauaacuugguucaaaaacaaccacaaaauccaacaggaaccaggaauuauauuaggucccggauccuccacucucuuuauugaaagaguuacugaagaggaugaagguguuuaucacuguaaagcuacaaaucaaaaaggaagcguagaaagcagugcuuaucuuaccguucaaggaacaucagacaaaaguaaucuggaacuaauuacucuaacaugcacuuguguagcagcuacccuuuucuggcuucucuugacacuauuuauccguaaaaugaaacgcucaagcucugagaucaaaacagacuaccuuucuauaauaauggauccagacgaaguuccauuagaugaacaaugugaacgacuuccguaugaugcaaguaaaugggaauucgccagagaacgucuaaaauuaggaaaaucuuuaggacguggagccuuuggcaaaguuguucaagcuucagccuuuggaauaaagaaaagcccaacauguagaacuguagcagucaaaaugcuaaaagaaggugcuacagcaucugaauacaaagcguuaaugacagaauugaaaauccuaacacacauuggccaccaucuaaacgucgucaauuuguuaggagcuugcacuaaacaaggaggaccauuaaugguaauaguagaauauugcaaauacggcaaucuaagcaauuaccucaaaucuaaaagagaccuauuuuuucuaaauaaagaugcugcacuucacauggaaccuaaaaaggaaaaaauggagccaggcuuagaacaaggaaaaaaaccacgacuggacagcgucacaucaucagaauccuucgcauccucaggauuucaagaagauaaaucuuugucagauguugaagaagaagaagacucagauggauuuuauaaagaaccaauuacgauggaagacuuaauaucguauucuuuucagguagcucgcggcauggaauuccuaaguucaaggaaauguauacauagagaccuagcugccagaaacauccuccucagugaaaauaacguuguaaaaauaugugacuuugguuuagcuagagauauauauaaaaaucccgauuacguacgaaaaggcgacacgcgacucccacucaaauggauggccccugaaaguaucuucgauaaaauauacucaaccaagucugacguaugguccuauggagucuuacucugggaaauuuucucacuuggagggucccccuacccagguguucaaauggacgaagauuuuuguaguagacuaagagagggaaugaggaugcgcgcacccgaauacagcacccccgaaauauaucaaauaaugcuugacuguuggcauagagaccccaaagaaagaccacgcuucgcagaauuaguagaaaaacuaggagaccuuuuacaggcgaacguacagcaagauggcaaagacuauaucccaauaaaugcaauacuaacaggaaauagcggguucaccuacuccacacccgcuuuuagugaagauuuuuucaaagagucgauuagcgcaccgaaauuuaacucaggaagcagcgaugauguucgauauguaaaugcauucaaauucaugaguuuagaacgcauaaaaacuuuugaagaauuacuacccaacgcaaccucaauguuugacgauuaucaaggagauucaagcacacuacuagcaaguccgauguuaaaaagauucaccuggaccgacucaaaaccgaaagccagucuaaaaauagaucuuagagugaccagcaaaucaaaagaauccgggcuaucugacguuuccagaccuucauuuugucauucauccuguggacacguauccgaaggaaaacgacgcuuuaccuacgaucaugcagaacuggaaagaaagauagcuuguuguucaccuccaccagauuauaauucaguaguucuauauaguacacccccaauuuaa

SEQ ID NO: 7505 - protein, 367 aa, Artificial Sequence
  sTie2__Homo_sapiens__B5A953
MDSLASLVLCGVSLLLSGTVEGAMDLILINSLPLVSDAETSLTCIASGWRPHEPITIGRDFEALMNQHQDPLEVTQDVTREWAKKVVWKREKASKINGAYFCEGRVRGEAIRIRTMKMRQQASFLPATLTMTVDKGDNVNISFKKVLIKEEDAVIYKNGSFIHSVPRHEVPDILEVHLPHAQPQDAGVYSARYIGGNLFTSAFTRLIVRRCEAQKWGPECNHLCTACMNNGVCHEDTGECICPPGFMGRTCEKACELHTFGRTCKERCSGQEGCKSYVFCLPDPYGCSCATGWKGLQCNEACHPGFYGPDCKLRCSCNNGEMCDRFQGCLCSPGWQGLQCEREGKARHTEDDPKDSGFARSYRSKQW

SEQ ID NO: 7506 - RNA, 1104 nt, Artificial Sequence
  sTie2__Homo_sapiens__ACF47627
auggacucuuuagccagcuuaguucucuguggagucagcuugcuccuuucuggaacuguggaaggugccauggacuugaucuugaucaauucccuaccucuuguaucugaugcugaaacaucucucaccugcauugccucuggguggcgcccccaugagcccaucaccauaggaagggacuuugaagccuuaaugaaccagcaccaggauccgcuggaaguuacucaagaugugaccagagaaugggcuaaaaaaguuguuuggaagagagaaaaggcuaguaagaucaauggugcuuauuucugugaagggcgaguucgaggagaggcaaucaggauacgaaccaugaagaugcgucaacaagcuuccuuccuaccagcuacuuuaacuaugacuguggacaagggagauaacgugaacauaucuuucaaaaagguauugauuaaagaagaagaugcagugauuuacaaaaaugguuccuucauccauucagugccccggcaugaaguaccugauauucuagaaguacaccugccucaugcucagccccaggaugcuggaguguacucggccagguauauaggaggaaaccucuucaccucggccuucaccaggcugauaguccggagaugugaagcccagaaguggggaccugaaugcaaccaucucuguacugcuuguaugaacaauggugucugccaugaagauacuggagaaugcauuugcccuccuggguuuaugggaaggacgugugagaaggcuugugaacugcacacguuuggcagaacuuguaaagaaaggugcaguggacaagagggaugcaagucuuauguguucugucucccugaccccuauggguguuccugugccacaggcuggaagggucugcagugcaaugaagcaugccacccugguuuuuacgggccagauuguaagcuuaggugcagcugcaacaauggggagaugugugaucgcuuccaaggaugucucugcucuccaggauggcaggggcuccagugugagagagaagguaaagcaaggcauacagaggaugaccccaaagauaguggauuugccagaucauauagaaguaaacagugguaa

SEQ ID NO: 7507 - RNA, 1104 nt, Artificial Sequence
  derived and/or modified sequence opt1 from sTie2__Homo_sapiens__ACF47627
auggacagccuggccucccucgugcugugcggcgucagccugcuccuguccgggaccguggagggcgccauggaccugauccucaucaacagccugccccugguguccgacgcggagaccagccucacgugcaucgccuccggguggcgcccgcacgagcccaucaccaucggccgggacuucgaggcccugaugaaccagcaccaggacccccuggaggucacccaggacgugacccgcgagugggccaagaagguggucuggaagcgggagaaggccagcaagaucaacggggcguacuucugcgagggccgcgugcggggcgaggccauccgcauccggacgaugaagaugcgccagcaggccuccuuccuccccgccacccugaccaugaccguggacaagggggacaacgucaacaucagcuucaagaaggugcugaucaaggaggaggacgcggugaucuacaagaacggcuccuucauccacagcgucccgcggcacgaggugcccgacauccucgaggugcaccucccccacgcccagccccaggacgccggggucuacuccgcccgcuacaucggcgggaaccuguucacgagcgccuucacccggcugaucgugcgccggugcgaggcgcagaaguggggcccggagugcaaccaccugugcaccgccugcaugaacaacggcgugugccacgaggacaccggggagugcaucugcccgcccggcuucauggggcgcacgugcgagaaggccugcgagcugcacaccuucggccggaccugcaaggagcgcugcuccggccaggaggggugcaagagcuacgucuucugccuccccgaccccuacggcugcuccugcgccaccggguggaagggccugcagugcaacgaggccugccaccccggguucuacggccccgacugcaagcugcggugcagcugcaacaacggcgagaugugcgaccgcuuccaggggugccucugcucccccggcuggcaggggcugcagugcgagcgggagggcaaggcgcgccacacggaggacgacccgaaggacagcggguucgcccggagcuaccgcuccaagcagugguga

SEQ ID NO: 7508 - RNA, 1104 nt, Artificial Sequence
  derived and/or modified sequence opt2 from sTie2__Homo_sapiens__ACF47627
auggacucccucgccucccucguccucugcggcgucucccuccuccucuccggcaccgucgagggcgccauggaccucauccucaucaacucccucccccucgucuccgacgccgagaccucccucaccugcaucgccuccggcuggcgcccccacgagcccaucaccaucggccgcgacuucgaggcccucaugaaccagcaccaggacccccucgaggucacccaggacgucacccgcgagugggccaagaaggucgucuggaagcgcgagaaggccuccaagaucaacggcgccuacuucugcgagggccgcguccgcggcgaggccauccgcauccgcaccaugaagaugcgccagcaggccuccuuccuccccgccacccucaccaugaccgucgacaagggcgacaacgucaacaucuccuucaagaagguccucaucaaggaggaggacgccgucaucuacaagaacggcuccuucauccacuccgucccccgccacgagguccccgacauccucgagguccaccucccccacgcccagccccaggacgccggcgucuacuccgcccgcuacaucggcggcaaccucuucaccuccgccuucacccgccucaucguccgccgcugcgaggcccagaaguggggccccgagugcaaccaccucugcaccgccugcaugaacaacggcgucugccacgaggacaccggcgagugcaucugcccccccggcuucaugggccgcaccugcgagaaggccugcgagcuccacaccuucggccgcaccugcaaggagcgcugcuccggccaggagggcugcaaguccuacgucuucugccuccccgaccccuacggcugcuccugcgccaccggcuggaagggccuccagugcaacgaggccugccaccccggcuucuacggccccgacugcaagcuccgcugcuccugcaacaacggcgagaugugcgaccgcuuccagggcugccucugcucccccggcuggcagggccuccagugcgagcgcgagggcaaggcccgccacaccgaggacgaccccaaggacuccggcuucgcccgcuccuaccgcuccaagcagugguga

SEQ ID NO: 7509 - RNA, 1104 nt, Artificial Sequence
  derived and/or modified sequence opt3 from sTie2__Homo_sapiens__ACF47627
auggacagccuggccucccucguucuuugcggcgucucucuguuguuaucagggaccguugagggagcuauggaucugauccuaauuaacagucucccccuggugagcgacgcagaaacaucccuuacuuguauagccucugguuggagaccucacgagccaaucacgauuggcagggauuucgaagcgcugaugaaucagcaucaagacccguuggagguaacccaggaugugacacgggaaugggcuaagaaagucguguggaagcgcgagaaagccucgaagaucaacggggcauacuuuugcgagggacgaguucguggcgaagccauuagaaucaggacuaugaaaaugcggcagcaggcuucauuccuccccgcaacccugacaaugaccguggacaagggugauaaugucaacaucagcuuuaagaaagugcugauaaaggaggaagacgccguaauuuauaaaaaugggaguuucauccacuccguuccucgccaugaggugccagauauucucgagguccacuuaccccaugcucaaccucaggacgccggaguguacucugcgagauauaucggcggcaaccuguuuacuagcgcauucacaaggcuuauagugcggcgcugugaagcccagaagugggggccagagugcaaucacuuguguaccgcuugcaugaacaauggagucugucacgaagauacgggugagugcauuugucccccuggcuuuauggggcgaacuugcgaaaaagccugugagcugcauaccuucggaagaacaugcaaggagaggugcuccggccaggaagguuguaagucauacguguuuugccuaccagacccguauggguguaguugcgcaacuggauggaaaggccuccaauguaacgaggcuugccaccccggcuucuacgggccugauuguaagcugcggugcagcuguaauaacggagaaaugugcgaccguuuucaggguugucuuugcucuccaggcuggcaggggcugcagugcgagcgcgaaggaaaagccagacauaccgaggacgaucccaaggacuccggcuucgcgaggucauaucggagcaaacaaugguga

SEQ ID NO: 7510 - RNA, 1104 nt, Artificial Sequence
  derived and/or modified sequence opt4 from sTie2__Homo_sapiens__ACF47627
auggacagccuggccagccuggugcugugcggcgugagccugcugcugagcggcaccguggagggcgccauggaccugauccugaucaacagccugccccuggugagcgacgccgagaccagccugaccugcaucgccagcggcuggagaccccacgagcccaucaccaucggcagagacuucgaggcccugaugaaccagcaccaggacccccuggaggugacccaggacgugaccagagagugggccaagaaggugguguggaagagagagaaggccagcaagaucaacggcgccuacuucugcgagggcagagugagaggcgaggccaucagaaucagaaccaugaagaugagacagcaggccagcuuccugcccgccacccugaccaugaccguggacaagggcgacaacgugaacaucagcuucaagaaggugcugaucaaggaggaggacgccgugaucuacaagaacggcagcuucauccacagcgugcccagacacgaggugcccgacauccuggaggugcaccugccccacgcccagccccaggacgccggcguguacagcgccagauacaucggcggcaaccuguucaccagcgccuucaccagacugaucgugagaagaugcgaggcccagaaguggggccccgagugcaaccaccugugcaccgccugcaugaacaacggcgugugccacgaggacaccggcgagugcaucugcccccccggcuucaugggcagaaccugcgagaaggccugcgagcugcacaccuucggcagaaccugcaaggagagaugcagcggccaggagggcugcaagagcuacguguucugccugcccgaccccuacggcugcagcugcgccaccggcuggaagggccugcagugcaacgaggccugccaccccggcuucuacggccccgacugcaagcugagaugcagcugcaacaacggcgagaugugcgacagauuccagggcugccugugcagccccggcuggcagggccugcagugcgagagagagggcaaggccagacacaccgaggacgaccccaaggacagcggcuucgccagaagcuacagaagcaagcagugguga

SEQ ID NO: 7511 - RNA, 1104 nt, Artificial Sequence
  derived and/or modified sequence opt5 from sTie2__Homo_sapiens__ACF47627
auggacagccuggccucccucgugcugugcggcgucucucuucugcucagcgggaccguugagggagcuauggaucugauccuuauuaacucccugccccucgugucugacgccgaaacaagccugacguguaucgcguccggcuggagaccucacgagccgauuaccaucgggcgggauuucgaagcucugaugaaucagcaucaagacccccucgaggugacacaggaugucacccgcgaaugggccaagaaagugguuuggaagagagagaaagccucuaagauuaacggagcuuacuuuugcgagggccgggugcgcggggaagccaucagaauccggacaaugaaaaugcgccagcaggcuagcuuccugccugccacccuuacaaugaccgucgacaagggagauaaugugaacauuuccuuuaagaaaguucugaucaaggaggaagacgcggugauuuauaaaaauggcagcuucauccacucuguccccagacaugaggugccugauauucucgaggugcaucugccccacgcccaaccucaggacgcuggcgucuacuccgcccgguauaucgggggaaaccuuuuuacgagcgcuuucacccgccugauuguuagacggugugaagcccagaaguggggcccggagugcaaucaccucuguacagcgugcaugaacaauggggugugucacgaagauaccggagagugcaucugucccccuggcuuuauggggcgcacaugcgaaaaagccugugagcugcauaccuucggaagaacgugcaaggagcggugcucuggccaggaaggcuguaaguccuacguguuuugccugcccgacccuuauggguguagcugcgcuacaggauggaaaggccuccaauguaacgaggccugccaccccggguucuacggaccggauuguaagcugcgcugcucuuguaauaacggcgaaaugugcgacagauuucaggggugucuuugcuccccuggauggcagggccugcagugcgagcgggaaggcaaagcuagacauaccgaggacgaucccaaggacagcggguucgcccgcuccuaucggucuaaacaaugguga

SEQ ID NO: 7512 - RNA, 1104 nt, Artificial Sequence
  derived and/or modified sequence opt6 from sTie2__Homo_sapiens__ACF47627
auggauagcuuagcaucauuaguauuauguggaguaaguuuacuauuaucaggaacaguggaaggagcaauggaucuaauauuaauaaauagucuaccacuuguuucagacgcagaaacaucauuaacauguauagccagcggauggcgaccacaugaaccaauaacaauaggaagagauuuugaagcacuaaugaaucaacaucaagauccauuagaaguaacacaagauguaacaagagaaugggcaaaaaaagucguuuggaaaagagaaaaagcaucaaaaauuaacggagcauauuuuugugaaggaagaguaagaggugaagcaauaagaauaagaacuaugaaaaugagacaacaagcaucauucuugccagcaacacuaacaaugaccguagauaaaggagauaauguaaauauaaguuucaaaaaaguacuuauuaaagaagaagacgcaguaauauauaaaaacggaucauuuauacauagcguaccaagacacgaaguaccagauauauuagaaguacacuuaccacaugcacaaccacaagaugcuggaguauacagugcuagauauauaggaggaaauuuauucacaagugcauuuacaagauuaauuguaagaagaugugaagcgcaaaaaugggguccagaaugcaaccacuuauguacagcaugcaugaauaauggaguaugucacgaagacacaggcgaaugcauauguccaccaggauuuaugggaagaacaugugaaaaagcaugugaauuacacacauuuggaagaacauguaaagaaagaugcaguggacaagaaggauguaaaaguuauguauucuguuuaccagacccauauggaugcucaugcgcaacgggauggaaaggacuacaauguaaugaagcaugucauccaggguuuuauggaccagauuguaaauuaagauguaguugcaauaauggagaaaugugugauagauuucagggcuguuuguguaguccaggauggcaaggauuacaaugugaaagagaaggaaaagcuagacauacagaagacgauccaaaagauucaggauuugcaagaaguuauagaagcaagcaaugguaa

SEQ ID NO: 7513 - protein, 207 aa, Artificial Sequence
  TIMP-1__Homo_sapiens__P01033
MAPFEPLASGILLLLWLIAPSRACTCVPPHPQTAFCNSDLVIRAKFVGTPEVNQTTLYQRYEIKMTKMYKGFQALGDAADIRFVYTPAMESVCGYFHRSHNRSEEFLIAGKLQDGLLHITTCSFVAPWNSLSLAQRRGFTKTYTVGCEECTVFPCLSIPCKLQSGTHCLWTDQLLQGSEKGFQSRHLACLPREPGLCTWQSLRSQIA

SEQ ID NO: 7514 - RNA, 624 nt, Artificial Sequence
  TIMP-1__Homo_sapiens__AAA52436
auggcccccuuugagccccuggcuucuggcauccuguuguugcuguggcugauagcccccagcagggccugcaccugugucccaccccacccacagacggccuucugcaauuccgaccucgucaucagggccaaguucguggggacaccagaagucaaccagaccaccuuauaccagcguuaugagaucaagaugaccaagauguauaaaggguuccaagccuuaggggaugccgcugacauccgguucgucuacacccccgccauggagagugucugcggauacuuccacaggucccacaaccgcagcgaggaguuucucauugcuggaaaacugcaggauggacucuugcacaucacuaccugcaguuucguggcucccuggaacagccugagcuuagcucagcgccggggcuucaccaagaccuacacuguuggcugugaggaaugcacaguguuucccuguuuauccauccccugcaaacugcagaguggcacucauugcuuguggacggaccagcuccuccaaggcucugaaaagggcuuccagucccgucaccuugccugccugccucgggagccagggcugugcaccuggcagucccugcggucccagauagccuga

SEQ ID NO: 7515 - RNA, 624 nt, Artificial Sequence
  derived and/or modified sequence opt1 from TIMP-1__Homo_sapiens__AAA52436
auggcccccuucgagccgcuggccagcggcauccuccugcugcucuggcugaucgcgcccucccgcgccugcacgugcgugccgccccacccccagaccgccuucugcaacagcgaccuggucauccgggccaaguucguggggacccccgaggugaaccagaccacccucuaccagcgcuacgagaucaagaugaccaagauguacaagggcuuccaggcccugggggacgcggccgacauccgguucgucuacacgcccgccauggaguccgugugcggcuacuuccaccgcagccacaaccgguccgaggaguuccugaucgccgggaagcuccaggacggccugcugcacaucacgaccugcagcuucguggcgcccuggaacucccucagccuggcccagcgccggggcuucaccaagaccuacaccgucgggugcgaggagugcaccguguucccgugccuguccauccccugcaagcuccagagcggcacccacugccuguggacggaccagcugcuccagggguccgagaagggcuuccagagccgccaccuggccugccugccccgggagcccgggcucugcaccuggcagucccugcgcagccagaucgccuga

SEQ ID NO: 7516 - RNA, 624 nt, Artificial Sequence
  derived and/or modified sequence opt2 from TIMP-1__Homo_sapiens__AAA52436
auggcccccuucgagccccucgccuccggcauccuccuccuccucuggcucaucgcccccucccgcgccugcaccugcguccccccccacccccagaccgccuucugcaacuccgaccucgucauccgcgccaaguucgucggcacccccgaggucaaccagaccacccucuaccagcgcuacgagaucaagaugaccaagauguacaagggcuuccaggcccucggcgacgccgccgacauccgcuucgucuacacccccgccauggaguccgucugcggcuacuuccaccgcucccacaaccgcuccgaggaguuccucaucgccggcaagcuccaggacggccuccuccacaucaccaccugcuccuucgucgcccccuggaacucccucucccucgcccagcgccgcggcuucaccaagaccuacaccgucggcugcgaggagugcaccgucuuccccugccucuccauccccugcaagcuccaguccggcacccacugccucuggaccgaccagcuccuccagggcuccgagaagggcuuccagucccgccaccucgccugccucccccgcgagcccggccucugcaccuggcagucccuccgcucccagaucgccuga

SEQ ID NO: 7517 - RNA, 624 nt, Artificial Sequence
  derived and/or modified sequence opt3 from TIMP-1__Homo_sapiens__AAA52436
auggcccccuucgagccucuggcuagcggcauccuccuucuguugugguuaauugcaccauccagagccugcaccugugugccgccccacccucagacagcguuuugcaauucugaccuggucauaagggcuaaguucguugggacuccagaagugaaucaaacgacccuauaccagcgguaugagaucaaaaugacaaagauguacaaaggauuucaggcccucggugaugcagccgacauucgcuucguauauacucccgcuauggaaucaguguguggcuacuuucaucgaagucacaaccguagcgaggaguuccugaucgcagggaaacuucaggauggacuguugcauauuaccacaugcuccuuugucgccccuuggaacucucucucgcuggcucaaagaaggggcuucaccaagacuuauacaguggguugugaagagugcaccguuuuuccaugucugucaauccccugcaagcuccagagcgggacgcacuguuuauggacugaccagcugcuucagggaagugaaaagggcuuccaaucccggcauuuggccugccugccucgcgagccaggccuauguaccuggcagucucucagaagccagauagcguga

SEQ ID NO: 7518 - RNA, 624 nt, Artificial Sequence
  derived and/or modified sequence opt4 from TIMP-1__Homo_sapiens__AAA52436
auggcccccuucgagccccuggccagcggcauccugcugcugcuguggcugaucgcccccagcagagccugcaccugcgugcccccccacccccagaccgccuucugcaacagcgaccuggugaucagagccaaguucgugggcacccccgaggugaaccagaccacccuguaccagagauacgagaucaagaugaccaagauguacaagggcuuccaggcccugggcgacgccgccgacaucagauucguguacacccccgccauggagagcgugugcggcuacuuccacagaagccacaacagaagcgaggaguuccugaucgccggcaagcugcaggacggccugcugcacaucaccaccugcagcuucguggcccccuggaacagccugagccuggcccagagaagaggcuucaccaagaccuacaccgugggcugcgaggagugcaccguguuccccugccugagcauccccugcaagcugcagagcggcacccacugccuguggaccgaccagcugcugcagggcagcgagaagggcuuccagagcagacaccuggccugccugcccagagagcccggccugugcaccuggcagagccugagaagccagaucgccuga

SEQ ID NO: 7519 - RNA, 624 nt, Artificial Sequence
  derived and/or modified sequence opt5 from TIMP-1__Homo_sapiens__AAA52436
auggcccccuucgagccucuggcuagcggcauccuccugcuucuguggcucauugccccguccagagcgugcaccugugugcccccucacccccagacagcuuuuugcaauucugaccuggucauccgggccaaguucguugggacgccugaagugaaucaaaccacacuuuaccagcgcuaugagauuaaaaugaccaagauguacaaaggauuucaggcccugggcgaugcugccgacaucagauucguguauacacccgcuauggaaagcgucuguggguacuuucaucggucccacaaccgcucugaggaguuccucauugccggaaagcugcaggauggccugcuccauaucaccacaugcagcuuuguggcgccuuggaacucccugucucuugcccaaagacggggguucaccaaaacguauaccguuggaugugaagagugcacaguguuuccgugucugagcauccccugcaagcuccaguccggcacccacugucuguggacagaccagcuucugcagggcagcgaaaagggguuccaaucucgccaucucgcuugccugccuagagagcccggacuguguaccuggcagucccuccggagccagauugccuga

SEQ ID NO: 7520 - RNA, 624 nt, Artificial Sequence
  derived and/or modified sequence opt6 from TIMP-1__Homo_sapiens__AAA52436
auggcaccauucgaacccuuagcaucaggaauacuacuacuacuauggcuaauagcaccaucaagagcaugcacaugcguaccaccacacccacaaaccgcauucugcaacucagaccuaguaauaagagcaaaauucguaggaacaccagaaguaaaucaaaccacauuauaccaaagauacgaaauaaaaaugacaaaaauguacaaaggauuccaagcacuaggagacgcagccgacauaagauuuguauacacaccagcaauggaaucaguauguggauacuuccaccgaucacacaaccgauccgaagaauuuuuaauagcaggaaaauuacaagacggacuauuacacauaacaacaugcucauucguagcaccuuggaacucacuuucacuagcacaaagaagaggauucacaaaaacauacacagucggaugcgaagaauguacaguauucccaugccuauccauaccaugcaaacuacaaucaggaacacacugccuauggacagaccaacuauuacaaggaucagaaaaaggauuccaaucaagacaccuagcaugccuacccagagaaccaggauuaugcacauggcaaucacuaagaucccaaauagccuaa

SEQ ID NO: 7521 - protein, 220 aa, Artificial Sequence
  TIMP-2__Homo_sapiens__P16035
MGAAARTLRLALGLLLLATLLRPADACSCSPVHPQQAFCNADVVIRAKAVSEKEVDSGNDIYGNPIKRIQYEIKQIKMFKGPEKDIEFIYTAPSSAVCGVSLDVGGKKEYLIAGKAEGDGKMHITLCDFIVPWDTLSTTQKKSLNHRYQMGCECKITRCPMIPCYISSPDECLWMDWVTEKNINGHQAKFFACIKRSDGSCAWYRGAAPPKQEFLDIEDP

SEQ ID NO: 7522 - RNA, 663 nt, Artificial Sequence
  TIMP-2__Homo_sapiens__AAA59581
augggcgccgcggcccgcacccugcggcuggcgcucggccuccugcugcuggcgacgcugcuucgcccggccgacgccugcagcugcuccccggugcacccgcaacaggcguuuugcaaugcagauguagugaucagggccaaagcggucagugagaaggaaguggacucuggaaacgacauuuauggcaacccuaucaagaggauccaguaugagaucaagcagauaaagauguucaaagggccugagaaggauauagaguuuaucuacacggcccccuccucggcaguguguggggucucgcuggacguuggaggaaagaaggaauaucucauugcaggaaaggccgagggggacggcaagaugcacaucacccucugugacuucaucgugcccugggacacccugagcaccacccagaagaagagccugaaccacagguaccagaugggcugcgagugcaagaucacgcgcugccccaugaucccgugcuacaucuccuccccggacgagugccucuggauggacugggucacagagaagaacaucaacgggcaccaggccaaguucuucgccugcaucaagagaagugacggcuccugugcgugguaccgcggcgcggcgccccccaagcaggaguuucucgacaucgaggacccauaa

SEQ ID NO: 7523 - RNA, 663 nt, Artificial Sequence
  derived and/or modified sequence opt1 from TIMP-2__Homo_sapiens__AAA59581
augggcgccgccgcgcgcacccugcggcucgcccuggggcugcuccugcuggccacccuccugcgccccgccgacgccugcagcugcucccccgugcacccccagcaggcguucugcaacgccgacgucgugauccgggccaaggccgugagcgagaaggaggucgacuccggcaacgacaucuacgggaaccccaucaagcgcauccaguacgagaucaagcagaucaagauguucaagggccccgagaaggacaucgaguucaucuacacggcgccgagcuccgccgugugcggggugagccuggacgucggcggcaagaaggaguaccucaucgccgggaaggccgagggcgacgggaagaugcacaucacccugugcgacuucaucgugcccugggacacccuguccaccacgcagaagaagucccucaaccaccgguaccagaugggcugcgagugcaagaucacccgcugccccaugauccccugcuacaucagcagcccggacgagugccuguggauggacugggugaccgagaagaacaucaacgggcaccaggccaaguucuucgcgugcaucaagcgguccgacggcagcugcgccugguaccgcggcgccgccccgcccaagcaggaguuccuggacaucgaggaccccuga

SEQ ID NO: 7524 - RNA, 663 nt, Artificial Sequence
  derived and/or modified sequence opt2 from TIMP-2__Homo_sapiens__AAA59581
augggcgccgccgcccgcacccuccgccucgcccucggccuccuccuccucgccacccuccuccgccccgccgacgccugcuccugcucccccguccacccccagcaggccuucugcaacgccgacgucgucauccgcgccaaggccgucuccgagaaggaggucgacuccggcaacgacaucuacggcaaccccaucaagcgcauccaguacgagaucaagcagaucaagauguucaagggccccgagaaggacaucgaguucaucuacaccgcccccuccuccgccgucugcggcgucucccucgacgucggcggcaagaaggaguaccucaucgccggcaaggccgagggcgacggcaagaugcacaucacccucugcgacuucaucguccccugggacacccucuccaccacccagaagaagucccucaaccaccgcuaccagaugggcugcgagugcaagaucacccgcugccccaugauccccugcuacaucuccucccccgacgagugccucuggauggacugggucaccgagaagaacaucaacggccaccaggccaaguucuucgccugcaucaagcgcuccgacggcuccugcgccugguaccgcggcgccgccccccccaagcaggaguuccucgacaucgaggaccccuga

SEQ ID NO: 7525 - RNA, 663 nt, Artificial Sequence
  derived and/or modified sequence opt3 from TIMP-2__Homo_sapiens__AAA59581
augggcgccgcugcaagaacccugaggcucgcccuugggcuguuguuacuggcgacacuacuccggcccgcugacgccugcagcuguuccccugugcacccacagcaagcauucugcaacgccgaugucguuauccgcgcuaaggcagugucugagaaagaaguagacucaggaaaugauauuuacgguaacccgauaaagcgaauccaguaugagauuaaacagaucaagauguuuaaaggccccgaaaaggacauugaguucaucuacacugccccuaguagcgcuguguguggggucucccuggaugugggaggcaagaaagaauaucuuauagccgguaaggcggagggggacggaaaaaugcauaucacgcugugcgauuuuauuguuccaugggacaccuugucuacaacucagaagaaaucgcucaaucaccguuaccaaaugggcugugagugcaagaucaccagaugucccaugauuccuugcuauaucucaagcccagaugaaugucuguggauggacugggugacagagaagaacauaaauggccaucaggcaaaauucuuugccugcauuaagaggagugauggguccugugcuugguaccggggagccgcacccccuaaacaggaguuccuggacaucgaagauccauga

SEQ ID NO: 7526 - RNA, 663 nt, Artificial Sequence
  derived and/or modified sequence opt4 from TIMP-2__Homo_sapiens__AAA59581
augggcgccgccgccagaacccugagacuggcccugggccugcugcugcuggccacccugcugagacccgccgacgccugcagcugcagccccgugcacccccagcaggccuucugcaacgccgacguggugaucagagccaaggccgugagcgagaaggagguggacagcggcaacgacaucuacggcaaccccaucaagagaauccaguacgagaucaagcagaucaagauguucaagggccccgagaaggacaucgaguucaucuacaccgcccccagcagcgccgugugcggcgugagccuggacgugggcggcaagaaggaguaccugaucgccggcaaggccgagggcgacggcaagaugcacaucacccugugcgacuucaucgugcccugggacacccugagcaccacccagaagaagagccugaaccacagauaccagaugggcugcgagugcaagaucaccagaugccccaugauccccugcuacaucagcagccccgacgagugccuguggauggacugggugaccgagaagaacaucaacggccaccaggccaaguucuucgccugcaucaagagaagcgacggcagcugcgccugguacagaggcgccgccccccccaagcaggaguuccuggacaucgaggaccccuga

SEQ ID NO: 7527 - RNA, 663 nt, Artificial Sequence
  derived and/or modified sequence opt5 from TIMP-2__Homo_sapiens__AAA59581
augggcgccgcugccagaacccugcggcucgcgcuggggcuucugcuccuggcuacacuucugcgccccgccgacgccugcagcuguuccccugugcacccgcagcaggcuuucugcaacgccgaugucguuaucagagcuaaggccgugucugagaaagaaguggacagcggaaaugauauuuacggcaaccccaucaagcggauucaauaugagaucaaacagauuaagauguuuaaagggccugaaaaggacaucgaguucaucuacacggcgcccuccucugccgucuguggagugagccucgauguuggcgggaagaaagaauaucugauugcuggaaaggccgagggcgacggcaaaaugcauaucacccugugcgauuuuauugugccuugggacacacucuccaccacacagaagaaaucucugaaucaccgcuaccaaauggggugugagugcaagaucaccagaugucccaugauuccuugcuauaucagcuccccggaugaaugucuuuggauggacugggucacagagaagaacauuaauggacaucaggcuaaauucuuugccugcaucaagcggagcgauggcucuugugcgugguaccgcggggccgcucccccuaaacaggaguuccuggacaucgaagaucccuga

SEQ ID NO: 7528 - RNA, 663 nt, Artificial Sequence
  derived and/or modified sequence opt6 from TIMP-2__Homo_sapiens__AAA59581
augggagcagcagcaagaacauuaagauuagcacuaggacuacuacuauuagcaacacuacuaagaccagcagacgcaugcagcugcucaccaguacacccacaacaagcauucugcaacgcagacguaguaauaagagcaaaagcaguaucagaaaaagaagucgacucaggaaacgacauauauggaaacccaauaaaaagaauacaauacgaaauaaaacaaauaaaaauguucaaaggaccagaaaaagacauagaauucauauauacagcaccaucaucagcaguaugcggaguaucacuagacguaggaggaaaaaaagaauacuuaauagcaggaaaagcagaaggagacggaaaaaugcacauaacacuaugcgacuucauaguaccaugggacacacuaucaacaacccaaaaaaaaagcuuaaaccacagauaccaaaugggaugcgaaugcaaaauaacaagaugcccaaugauaccaugcuacauaucaaguccagaugaaugcuuauggauggacuggguaacagaaaaaaacaucaacggacaccaagcaaaauucuucgcaugcauaaaaagaucagacggaaguugcgcaugguauagaggagcagcaccaccaaaacaagaauuccuagacauagaagauccauaa

SEQ ID NO: 7529 - protein, 211 aa, Artificial Sequence
  TIMP-3__Homo_sapiens__P35625
MTPWLGLIVLLGSWSLGDWGAEACTCSPSHPQDAFCNSDIVIRAKVVGKKLVKEGPFGTLVYTIKQMKMYRGFTKMPHVQYIHTEASESLCGLKLEVNKYQYLLTGRVYDGKMYTGLCNFVERWDQLTLSQRKGLNYRYHLGCNCKIKSCYYLPCFVTSKNECLWTDMLSNFGYPGYQSKHYACIRQKGGYCSWYRGWAPPDKSIINATDP

SEQ ID NO: 7530 - RNA, 636 nt, Artificial Sequence
  TIMP-3__Homo_sapiens__AAA17672
augaccccuuggcucgggcucaucgugcuccugggcagcuggagccugggggacuggggcgccgaggcgugcacaugcucgcccagccacccccaggacgccuucugcaacuccgacaucgugauccgggccaaggugguggggaagaagcugguaaaggaggggcccuucggcacgcuggucuacaccaucaagcagaugaagauguaccgaggcuucaccaagaugccccaugugcaguacauccauacggaagcuuccgagagucucuguggccuuaagcuggaggucaacaaguaccaguaccugcugacaggucgcgucuaugauggcaagauguacacggggcugugcaacuucguggagaggugggaccagcucacccucucccagcgcaaggggcugaacuaucgguaucaccuggguuguaacugcaagaucaaguccugcuacuaccugccuugcuuugugacuuccaagaacgagugucucuggaccgacaugcucuccaauuucgguuacccuggcuaccaguccaaacacuacgccugcauccggcagaagggcggcuacugcagcugguaccgaggaugggcccccccggauaaaagcaucaucaaugccacagaccccuga

SEQ ID NO: 7531 - RNA, 636 nt, Artificial Sequence
  derived and/or modified sequence opt1 from TIMP-3__Homo_sapiens__AAA17672
augacccccuggcugggccucaucgugcugcuggggagcuggucccucggcgacuggggcgccgaggccugcacgugcagcccgucccacccccaggacgcguucugcaacagcgacaucgucauccgcgccaaggugguggggaagaagcuggucaaggaggggcccuucggcacccugguguacaccaucaagcagaugaagauguaccggggcuucaccaagaugccccacgugcaguacauccacaccgaggccuccgagagccucugcgggcugaagcuggaggucaacaaguaccaguaccuccugacgggccgcguguacgacgggaagauguacaccggccugugcaacuucguggagcggugggaccagcucacccugucccagcgcaaggggcugaacuaccgguaccaccucggcugcaacugcaagaucaagagcugcuacuaccugccgugcuucgucaccuccaagaacgagugccuguggacggacaugcucagcaacuucggcuaccccggguaccaguccaagcacuacgccugcauccgccagaagggcggguacugcagcugguaccggggcugggccccgcccgacaaguccaucaucaacgcgaccgaccccuga

SEQ ID NO: 7532 - RNA, 636 nt, Artificial Sequence
  derived and/or modified sequence opt2 from TIMP-3__Homo_sapiens__AAA17672
augacccccuggcucggccucaucguccuccucggcuccuggucccucggcgacuggggcgccgaggccugcaccugcucccccucccacccccaggacgccuucugcaacuccgacaucgucauccgcgccaaggucgucggcaagaagcucgucaaggagggccccuucggcacccucgucuacaccaucaagcagaugaagauguaccgcggcuucaccaagaugccccacguccaguacauccacaccgaggccuccgagucccucugcggccucaagcucgaggucaacaaguaccaguaccuccucaccggccgcgucuacgacggcaagauguacaccggccucugcaacuucgucgagcgcugggaccagcucacccucucccagcgcaagggccucaacuaccgcuaccaccucggcugcaacugcaagaucaaguccugcuacuaccuccccugcuucgucaccuccaagaacgagugccucuggaccgacaugcucuccaacuucggcuaccccggcuaccaguccaagcacuacgccugcauccgccagaagggcggcuacugcuccugguaccgcggcugggccccccccgacaaguccaucaucaacgccaccgaccccuga

SEQ ID NO: 7533 - RNA, 636 nt, Artificial Sequence
  derived and/or modified sequence opt3 from TIMP-3__Homo_sapiens__AAA17672
augacccccuggcugggccucaucgugcuucuggggagcugguccuugggagacuggggugccgaggcuugcacauguucuccuucacacccacaggaugcauucugcaacagugacauugucauaagagccaagguugugggcaaaaaguuaguaaaagaagggccguuuggaacucugguguacacgaucaagcaaaugaaaauguauaggggcuucaccaagaugccccauguccaguacauucacacagaggcgagcgaaucccuauguggucucaagcuggaggugaauaaauaucaguaccuucugacugggcggguuuaugauggaaagauguacaccggcuugugcaacuuuguggaacgcugggaccagcucacacugucucaacgaaaaggccugaauuaucguuaccaucucggguguaacugcaagaucaaaucguguuacuauuuaccuugcuucgucaccucaaagaaugagugucuguggacugauaugcuuagcaacuuuggauacccagguuaucagaguaagcacuacgcuugcauuagacagaaaggcggguauuguuccugguacaggggaugggcacccccugacaagucuaucauaaaugccacagauccauga

SEQ ID NO: 7534 - RNA, 636 nt, Artificial Sequence
  derived and/or modified sequence opt4 from TIMP-3__Homo_sapiens__AAA17672
augacccccuggcugggccugaucgugcugcugggcagcuggagccugggcgacuggggcgccgaggccugcaccugcagccccagccacccccaggacgccuucugcaacagcgacaucgugaucagagccaagguggugggcaagaagcuggugaaggagggccccuucggcacccugguguacaccaucaagcagaugaagauguacagaggcuucaccaagaugccccacgugcaguacauccacaccgaggccagcgagagccugugcggccugaagcuggaggugaacaaguaccaguaccugcugaccggcagaguguacgacggcaagauguacaccggccugugcaacuucguggagagaugggaccagcugacccugagccagagaaagggccugaacuacagauaccaccugggcugcaacugcaagaucaagagcugcuacuaccugcccugcuucgugaccagcaagaacgagugccuguggaccgacaugcugagcaacuucggcuaccccggcuaccagagcaagcacuacgccugcaucagacagaagggcggcuacugcagcugguacagaggcugggccccccccgacaagagcaucaucaacgccaccgaccccuga

SEQ ID NO: 7535 - RNA, 636 nt, Artificial Sequence
  derived and/or modified sequence opt5 from TIMP-3__Homo_sapiens__AAA17672
augacccccuggcugggccucaucgugcugcuugggagcuggucccugggagacuggggcgccgaggcuugcacauguucuccuagccacccgcaggaugccuucugcaacuccgacauugucaucagagcgaagguuguggggaaaaagcucgugaaagaaggacccuuuggcacgcuggucuacaccauuaagcaaaugaaaauguaucggggguucacaaagaugccucaugugcaguacauccacaccgaggcuucugaaagccuuuguggacugaagcucgagguuaauaaauaucaguaccugcugacaggccgcguguaugauggcaagauguacaccgggcucugcaacuuugucgaaagaugggaccagcugacacuuucccaacggaaaggacugaauuaucgcuaccaucucggcuguaacugcaagauuaaaucuuguuacuaucugcccugcuucgugaccagcaagaaugagugucuuuggacggauaugcuguccaacuuuggguacccuggauaucagagcaagcacuacgccugcaucagacagaaaggcggguauuguucuugguaccggggaugggcucccccugacaaguccaucauuaaugccaccgauccguga

SEQ ID NO: 7536 - RNA, 636 nt, Artificial Sequence
  derived and/or modified sequence opt6 from TIMP-3__Homo_sapiens__AAA17672
augacaccauggcuaggacuaauaguacuacuaggaucauggucacuaggagacuggggagcagaagcaugcacaugcucaccaucacacccacaagacgcauucugcaacucagacauaguaauaagagcaaaaguaguaggaaaaaaauuaguaaaagaaggacccuucggaacacuaguauacacaauaaaacaaaugaaaauguacagaggauucacaaaaaugccacacguacaauacauacacacagaagcaucagaaucacuaugcggacuaaaacuagaaguaaacaaauaucaauaucuauuaacaggaagaguauacgacggaaaaauguauacaggacuaugcaacuucguagaaagaugggaccaacuaacacuaucacaaagaaaaggacuaaacuacagauaccaccuaggaugcaauugcaaaauaaaaucaugcuacuacuuaccaugcuucguaacaucaaaaaacgaaugccuauggacagacaugcuaucaaauuucggauacccagguuaccaaagcaaacacuacgcaugcauaagacaaaaaggaggauacugcucaugguacagaggaugggcaccaccagacaaaucaauaauaaacgcaacagaccccuaa

SEQ ID NO: 7537 - protein, 1170 aa, Artificial Sequence
  TSP-1__Homo_sapiens__P07996
MGLAWGLGVLFLMHVCGTNRIPESGGDNSVFDIFELTGAARKGSGRRLVKGPDPSSPAFRIEDANLIPPVPDDKFQDLVDAVRAEKGFLLLASLRQMKKTRGTLLALERKDHSGQVFSVVSNGKAGTLDLSLTVQGKQHVVSVEEALLATGQWKSITLFVQEDRAQLYIDCEKMENAELDVPIQSVFTRDLASIARLRIAKGGVNDNFQGVLQNVRFVFGTTPEDILRNKGCSSSTSVLLTLDNNVVNGSSPAIRTNYIGHKTKDLQAICGISCDELSSMVLELRGLRTIVTTLQDSIRKVTEENKELANELRRPPLCYHNGVQYRNNEEWTVDSCTECHCQNSVTICKKVSCPIMPCSNATVPDGECCPRCWPSDSADDGWSPWSEWTSCSTSCGNGIQQRGRSCDSLNNRCEGSSVQTRTCHIQECDKRFKQDGGWSHWSPWSSCSVTCGDGVITRIRLCNSPSPQMNGKPCEGEARETKACKKDACPINGGWGPWSPWDICSVTCGGGVQKRSRLCNNPTPQFGGKDCVGDVTENQICNKQDCPIDGCLSNPCFAGVKCTSYPDGSWKCGACPPGYSGNGIQCTDVDECKEVPDACFNHNGEHRCENTDPGYNCLPCPPRFTGSQPFGQGVEHATANKQVCKPRNPCTDGTHDCNKNAKCNYLGHYSDPMYRCECKPGYAGNGIICGEDTDLDGWPNENLVCVANATYHCKKDNCPNLPNSGQEDYDKDGIGDACDDDDDNDKIPDDRDNCPFHYNPAQYDYDRDDVGDRCDNCPYNHNPDQADTDNNGEGDACAADIDGDGILNERDNCQYVYNVDQRDTDMDGVGDQCDNCPLEHNPDQLDSDSDRIGDTCDNNQDIDEDGHQNNLDNCPYVPNANQADHDKDGKGDACDHDDDNDGIPDDKDNCRLVPNPDQKDSDGDGRGDACKDDFDHDSVPDIDDICPENVDISETDFRRFQMIPLDPKGTSQNDPNWVVRHQGKELVQTVNCDPGLAVGYDEFNAVDFSGTFFINTERDDDYAGFVFGYQSSSRFYVVMWKQVTQSYWDTNPTRAQGYSGLSVKVVNSTTGPGEHLRNALWHTGNTPGQVRTLWHDPRHIGWKDFTAYRWRLSHRPKTGFIRVVMYEGKKIMADSGPIYDKTYAGGRLGLFVFSQEMVFFSDLKYECRDP

SEQ ID NO: 7538 - RNA, 3513 nt, Artificial Sequence
  TSP-1__Homo_sapiens__AAI36470
auggggcuggccuggggacuaggcguccuguuccugaugcauguguguggcaccaaccgcauuccagagucuggcggagacaacagcguguuugacaucuuugaacucaccggggccgcccgcaaggggucugggcgccgacuggugaagggccccgacccuuccagcccagcuuuccgcaucgaggaugccaaccugauccccccugugccugaugacaaguuccaagaccugguggaugcugugcgggcagaaaaggguuuccuccuucuggcaucccugaggcagaugaagaagacccggggcacgcugcuggcccuggagcggaaagaccacucuggccaggucuucagcgugguguccaauggcaaggcgggcacccuggaccucagccugaccguccaaggaaagcagcacguggugucuguggaagaagcucuccuggcaaccggccaguggaagagcaucacccuguuugugcaggaagacagggcccagcuguacaucgacugugaaaagauggagaaugcugaguuggacguccccauccaaagcgucuucaccagagaccuggccagcaucgccagacuccgcaucgcaaaggggggcgucaaugacaauuuccagggggugcugcagaaugugagguuugucuuuggaaccacaccagaagacauccucaggaacaaaggcugcuccagcucuaccaguguccuccucacccuugacaacaacguggugaaugguuccagcccugccauccgcacuaacuacauuggccacaagacaaaggacuugcaagccaucugcggcaucuccugugaugagcuguccagcaugguccuggaacucaggggccugcgcaccauugugaccacgcugcaggacagcauccgcaaagugacugaagagaacaaagaguuggccaaugagcugaggcggccuccccuaugcuaucacaacggaguucaguacagaaauaacgaggaauggacuguugauagcugcacugagugucacugucagaacucaguuaccaucugcaaaaagguguccugccccaucaugcccugcuccaaugccacaguuccugauggagaaugcuguccucgcuguuggcccagcgacucugcggacgauggcuggucuccaugguccgaguggaccuccuguucuacgagcuguggcaauggaauucagcagcgcggccgcuccugcgauagccucaacaaccgaugugagggcuccucgguccagacacggaccugccacauucaggagugugacaagagauuuaaacaggaugguggcuggagccacugguccccguggucaucuuguucugugacauguggugauggugugaucacaaggauccggcucugcaacucucccagcccccagaugaacgggaaacccugugaaggcgaagcgcgggagaccaaagccugcaagaaagacgccugccccaucaauggaggcugggguccuuggucaccaugggacaucuguucugucaccuguggaggagggguacagaaacguagucgucucugcaacaaccccacaccccaguuuggaggcaaggacugcguuggugauguaacagaaaaccagaucugcaacaagcaggacuguccaauugauggaugccuguccaaucccugcuuugccggcgugaaguguacuagcuacccugauggcagcuggaaauguggugcuugucccccugguuacaguggaaauggcauccagugcacagauguugaugagugcaaagaagugccugaugccugcuucaaccacaauggagagcaccggugugagaacacggaccccggcuacaacugccugcccugccccccacgcuucaccggcucacagcccuucggccagggugucgaacaugccacggccaacaaacaggugugcaagccccguaaccccugcacggaugggacccacgacugcaacaagaacgccaagugcaacuaccugggccacuauagcgaccccauguaccgcugcgagugcaagccuggcuacgcuggcaauggcaucaucugcggggaggacacagaccuggauggcuggcccaaugagaaccuggugugcguggccaaugcgacuuaccacugcaaaaaggauaauugccccaaccuucccaacucagggcaggaagacuaugacaaggauggaauuggugaugccugugaugaugacgaugacaaugauaaaauuccagaugacagggacaacuguccauuccauuacaacccagcucaguaugacuaugacagagaugaugugggagaccgcugugacaacugucccuacaaccacaacccagaucaggcagacacagacaacaauggggaaggagacgccugugcugcagacauugauggagacgguauccucaaugaacgggacaacugccaguacgucuacaauguggaccagagagacacugauauggaugggguuggagaucagugugacaauugccccuuggaacacaauccggaucagcuggacucugacucagaccgcauuggagauaccugugacaacaaucaggauauugaugaagauggccaccagaacaaucuggacaacugucccuaugugcccaaugccaaccaggcugaccaugacaaagauggcaagggagaugccugugaccacgaugaugacaacgauggcauuccugaugacaaggacaacugcagacucgugcccaaucccgaccagaaggacucugacggcgauggucgaggugaugccugcaaagaugauuuugaccaugacagugugccagacaucgaugacaucuguccugagaauguugacaucagugagaccgauuuccgccgauuccagaugauuccucuggaccccaaagggacaucccaaaaugacccuaacuggguuguacgccaucaggguaaagaacucguccagacugucaacugugauccuggacucgcuguagguuaugaugaguuuaaugcuguggacuucaguggcaccuucuucaucaacaccgaaagggacgaugacuaugcuggauuugucuuuggcuaccaguccagcagccgcuuuuauguugugauguggaagcaagucacccaguccuacugggacaccaaccccacgagggcucagggauacucgggccuuucugugaaaguuguaaacuccaccacagggccuggcgagcaccugcggaacgcccuguggcacacaggaaacaccccuggccaggugcgcacccuguggcaugacccucgucacauaggcuggaaagauuucaccgccuacagauggcgucucagccacaggccaaagacggguuucauuagaguggugauguaugaagggaagaaaaucauggcugacucaggacccaucuaugauaaaaccuaugcuggugguagacuaggguuguuugucuucucucaagaaaugguguucuucucugaccugaaauacgaauguagagaucccuaa

SEQ ID NO: 7539 - RNA, 3513 nt, Artificial Sequence
  derived and/or modified sequence opt1 from TSP-1__Homo_sapiens__AAI36470
augggccuggccugggggcucggcgugcuguuccugaugcacgucugcgggaccaaccgcauccccgagagcggcggggacaacuccguguucgacaucuucgagcucaccggcgccgcgcggaagggcagcgggcgccggcuggugaagggcccggaccccuccagccccgccuuccgcaucgaggacgccaaccugaucccgcccguccccgacgacaaguuccaggaccucguggacgccgugcgggccgagaagggguuccugcugcucgcgucccugcgccagaugaagaagacgcggggcacccugcucgcccuggagcgcaaggaccacagcgggcaggucuucuccguggugagcaacggcaaggccggcacccuggaccucucccugaccguccaggggaagcagcacguggugagcgucgaggaggcccugcucgcgacgggccaguggaaguccaucacccuguucgugcaggaggaccgggcccagcuguacaucgacugcgagaagauggagaacgccgagcucgacgugcccauccagagcgucuucacccgcgaccuggccuccaucgcccggcugcgcaucgcgaagggcggggugaacgacaacuuccagggcgugcuccagaacguccgguucguguucgggaccacgcccgaggacauccugcgcaacaagggcugcagcuccagcaccuccgugcugcucacccuggacaacaacgucgugaacgggagcuccccggccauccggaccaacuacaucggccacaagacgaaggaccugcaggccaucugcgggaucagcugcgacgagcucagcuccauggugcuggagcugcgcggccuccggaccaucgucaccacccugcaggacagcauccgcaaggugacggaggagaacaaggagcuggccaacgagcuccggcgcccgccccugugcuaccacaacggcguccaguaccggaacaacgaggaguggaccguggacuccugcaccgagugccacugccagaacagcgugaccaucugcaagaaggucuccugccccaucaugcccugcagcaacgccacggugcccgacggggagugcugcccccgcugcuggcccuccgacagcgcggacgacggcugguccccguggagcgaguggaccuccugcagcaccuccugcgggaacggcauccagcagcgcgggcggagcugcgacucccugaacaaccgcugcgagggcagcuccgugcagacccggacgugccacauccaggagugcgacaagcgcuucaagcaggacggcggguggagccacuggucccccuggagcagcugcuccgugaccugcggcgacggggugaucacccggauccgccucugcaacagccccagcccccagaugaacggcaagccgugcgagggggaggcccgggagaccaaggccugcaagaaggacgccugccccaucaacggcggcugggggcccuggucccccugggacaucugcuccgugacgugcggcgggggcguccagaagcgcagccggcugugcaacaacccgacgccccaguucggcgggaaggacugcgugggcgacgugaccgagaaccagaucugcaacaagcaggacugccccaucgacgggugccuguccaaccccugcuucgccggcgucaagugcaccagcuacccggacggguccuggaagugcggcgcgugcccgcccggcuacagcgggaacggcauccagugcaccgacguggacgagugcaaggaggugcccgacgccugcuucaaccacaacggggagcaccgcugcgagaacaccgaccccggcuacaacugccuccccugcccgccccgguucaccgggucccagcccuucggccagggcgucgagcacgccaccgccaacaagcaggucugcaagccccgcaaccccugcacggacgggacccacgacugcaacaagaacgccaagugcaacuaccugggccacuacagcgacccgauguaccggugcgagugcaagcccggguacgcgggcaacgggaucaucugcggcgaggacaccgaccuggacggcuggcccaacgagaaccucgugugcgucgccaacgccaccuaccacugcaagaaggacaacugccccaaccugccgaacuccgggcaggaggacuacgacaaggacggcaucggggacgccugcgacgacgacgacgacaacgacaagauccccgacgaccgcgacaacugccccuuccacuacaaccccgcgcaguacgacuacgaccgggacgacgugggcgaccgcugcgacaacugcccguacaaccacaaccccgaccaggccgacaccgacaacaacggggagggcgacgccugcgccgccgacaucgacggcgacgggauccugaacgagcgggacaacugccaguacguguacaacgucgaccagcgcgacacggacauggacggcgugggggaccagugcgacaacugcccccucgagcacaaccccgaccagcuggacagcgacuccgaccggaucggcgacacgugcgacaacaaccaggacaucgacgaggacggccaccagaacaaccuggacaacugcccguacgugcccaacgcgaaccaggccgaccacgacaaggacgggaagggcgacgccugcgaccacgacgacgacaacgacgggauccccgacgacaaggacaacugccgccugguccccaacccggaccagaaggacagcgacggcgacgggcgcggcgacgccugcaaggacgacuucgaccacgacuccgugcccgacaucgacgacaucugccccgagaacguggacaucagcgagaccgacuuccggcgcuuccagaugaucccgcucgaccccaagggcaccagccagaacgaccccaacugggucgugcggcaccaggggaaggagcuggugcagaccgucaacugcgaccccggccuggccgugggguacgacgaguucaacgcgguggacuucuccggcaccuucuucaucaacaccgagcgcgacgacgacuacgccggguucgucuucggcuaccagagcuccagccgguucuacguggugauguggaagcaggucacccaguccuacugggacacgaacccgacccgcgcccagggcuacagcgggcucuccgugaagguggucaacagcaccaccggccccggggagcaccuccggaacgcccuguggcacacgggcaacacccccggccaggugcgcacccuguggcacgacccccggcacaucggguggaaggacuucaccgccuaccgcuggcggcugucccaccgcccgaagacgggcuucauccggguggucauguacgaggggaagaagaucauggcggacagcggccccaucuacgacaagaccuacgccgggggccgccugggccucuucguguucucccaggagaugguguucuucagcgaccugaaguacgagugccgggaccccuga

SEQ ID NO: 7540 - RNA, 3513 nt, Artificial Sequence
  derived and/or modified sequence opt2 from TSP-1__Homo_sapiens__AAI36470
augggccucgccuggggccucggcguccucuuccucaugcacgucugcggcaccaaccgcauccccgaguccggcggcgacaacuccgucuucgacaucuucgagcucaccggcgccgcccgcaagggcuccggccgccgccucgucaagggccccgaccccuccucccccgccuuccgcaucgaggacgccaaccucaucccccccguccccgacgacaaguuccaggaccucgucgacgccguccgcgccgagaagggcuuccuccuccucgccucccuccgccagaugaagaagacccgcggcacccuccucgcccucgagcgcaaggaccacuccggccaggucuucuccgucgucuccaacggcaaggccggcacccucgaccucucccucaccguccagggcaagcagcacgucgucuccgucgaggaggcccuccucgccaccggccaguggaaguccaucacccucuucguccaggaggaccgcgcccagcucuacaucgacugcgagaagauggagaacgccgagcucgacguccccauccaguccgucuucacccgcgaccucgccuccaucgcccgccuccgcaucgccaagggcggcgucaacgacaacuuccagggcguccuccagaacguccgcuucgucuucggcaccacccccgaggacauccuccgcaacaagggcugcuccuccuccaccuccguccuccucacccucgacaacaacgucgucaacggcuccucccccgccauccgcaccaacuacaucggccacaagaccaaggaccuccaggccaucugcggcaucuccugcgacgagcucuccuccaugguccucgagcuccgcggccuccgcaccaucgucaccacccuccaggacuccauccgcaaggucaccgaggagaacaaggagcucgccaacgagcuccgccgccccccccucugcuaccacaacggcguccaguaccgcaacaacgaggaguggaccgucgacuccugcaccgagugccacugccagaacuccgucaccaucugcaagaaggucuccugccccaucaugcccugcuccaacgccaccguccccgacggcgagugcugcccccgcugcuggcccuccgacuccgccgacgacggcuggucccccugguccgaguggaccuccugcuccaccuccugcggcaacggcauccagcagcgcggccgcuccugcgacucccucaacaaccgcugcgagggcuccuccguccagacccgcaccugccacauccaggagugcgacaagcgcuucaagcaggacggcggcuggucccacuggucccccugguccuccugcuccgucaccugcggcgacggcgucaucacccgcauccgccucugcaacucccccuccccccagaugaacggcaagcccugcgagggcgaggcccgcgagaccaaggccugcaagaaggacgccugccccaucaacggcggcuggggccccuggucccccugggacaucugcuccgucaccugcggcggcggcguccagaagcgcucccgccucugcaacaaccccaccccccaguucggcggcaaggacugcgucggcgacgucaccgagaaccagaucugcaacaagcaggacugccccaucgacggcugccucuccaaccccugcuucgccggcgucaagugcaccuccuaccccgacggcuccuggaagugcggcgccugcccccccggcuacuccggcaacggcauccagugcaccgacgucgacgagugcaaggagguccccgacgccugcuucaaccacaacggcgagcaccgcugcgagaacaccgaccccggcuacaacugccuccccugccccccccgcuucaccggcucccagcccuucggccagggcgucgagcacgccaccgccaacaagcaggucugcaagccccgcaaccccugcaccgacggcacccacgacugcaacaagaacgccaagugcaacuaccucggccacuacuccgaccccauguaccgcugcgagugcaagcccggcuacgccggcaacggcaucaucugcggcgaggacaccgaccucgacggcuggcccaacgagaaccucgucugcgucgccaacgccaccuaccacugcaagaaggacaacugccccaaccuccccaacuccggccaggaggacuacgacaaggacggcaucggcgacgccugcgacgacgacgacgacaacgacaagauccccgacgaccgcgacaacugccccuuccacuacaaccccgcccaguacgacuacgaccgcgacgacgucggcgaccgcugcgacaacugccccuacaaccacaaccccgaccaggccgacaccgacaacaacggcgagggcgacgccugcgccgccgacaucgacggcgacggcauccucaacgagcgcgacaacugccaguacgucuacaacgucgaccagcgcgacaccgacauggacggcgucggcgaccagugcgacaacugcccccucgagcacaaccccgaccagcucgacuccgacuccgaccgcaucggcgacaccugcgacaacaaccaggacaucgacgaggacggccaccagaacaaccucgacaacugccccuacguccccaacgccaaccaggccgaccacgacaaggacggcaagggcgacgccugcgaccacgacgacgacaacgacggcauccccgacgacaaggacaacugccgccucguccccaaccccgaccagaaggacuccgacggcgacggccgcggcgacgccugcaaggacgacuucgaccacgacuccguccccgacaucgacgacaucugccccgagaacgucgacaucuccgagaccgacuuccgccgcuuccagaugaucccccucgaccccaagggcaccucccagaacgaccccaacugggucguccgccaccagggcaaggagcucguccagaccgucaacugcgaccccggccucgccgucggcuacgacgaguucaacgccgucgacuucuccggcaccuucuucaucaacaccgagcgcgacgacgacuacgccggcuucgucuucggcuaccaguccuccucccgcuucuacgucgucauguggaagcaggucacccaguccuacugggacaccaaccccacccgcgcccagggcuacuccggccucuccgucaaggucgucaacuccaccaccggccccggcgagcaccuccgcaacgcccucuggcacaccggcaacacccccggccagguccgcacccucuggcacgacccccgccacaucggcuggaaggacuucaccgccuaccgcuggcgccucucccaccgccccaagaccggcuucauccgcgucgucauguacgagggcaagaagaucauggccgacuccggccccaucuacgacaagaccuacgccggcggccgccucggccucuucgucuucucccaggagauggucuucuucuccgaccucaaguacgagugccgcgaccccuga

SEQ ID NO: 7541 - RNA, 3513 nt, Artificial Sequence
  derived and/or modified sequence opt3 from TSP-1__Homo_sapiens__AAI36470
augggccuggccugggggcucggagugcuuuuccugaugcacgucugcgguaccaacagaauccccgagagcggcggggacaauuccguuuuugauauuuucgaauugacaggagcugcaaggaagggcucuggucggcgcuuagugaaagggccugacccaucaaguccggccuuucgaauagaggaugcgaaccugauucccccuguaccagacgauaaguuccaggaccuaguggaugcuguccgugccgaaaaaggauuucuccugcuugcaagccugagacaaaugaagaaaacuaggggcacguugcucgcccuggagcggaaggaccauuccggccagguguucucuguugugucgaaugggaaggcuggaacccuggaucucucauuaacaguccaggguaaacagcacgugguaagcguugaagaggcacugcuugccacuggccaauggaagaguaucaccuuguuugugcaggaggaccgcgcucagcuguacaucgauugugaaaagauggagaacgccgaacuagacguccccauucaguccguguucacaagagaucucgcgucuaucgcaaggcugcggauagccaaagggggagugaaugacaacuuucaaggcguccuucagaauguucgcuucguguuugguaccacuccugaggacauccugcgaaacaaagggugcagcuccucaacaaguguauugcucacccuggauaauaacguggucaauggaagcucuccagcuauuagaacgaacuauaucggccauaagacuaaggacuuacaggccauuuguggcaucuccugcgaugagcugucaagcauggugcucgaacuuagggggcugcggaccauaguuacaacuuugcaggacaguauucguaaagugaccgaggaaaauaaggagcuagcaaacgaacugcgcagacccccucucuguuaccacaauggaguccaauauaggaacaacgaggaguggacaguggauucuugcaccgaaugucauugccaaaauuccguaacgaucuguaaaaagguuagcugcccaauuaugccguguucgaacgcuacugugcccgacggugagugcugcccucgguguuggccaucugauuccgccgacgauggcuggucacccuggagugaauggacaagcugcuccaccucuugugggaauggaauccagcagcgaggccgcagcugcgacucacugaacaauagaugugaggguaguuccguccagacuaggacaugccacauccaggaaugugauaaacgguucaagcaggacgggggcuggagccacuggucuccuuggucaaguugcagcgugaccuguggagacggcgucauuacgcgcauaagacuuugcaacuccccaucuccccaaaugaaugggaaaccgugugagggagaggcgagggaaaccaaggccugcaagaaagaugcaugcccuaucaacgguggcugggggcccuggucgccaugggacauuuguagcgugacaugcggaggcgguguucagaagcguucccggcuguguaauaacccuacuccccaguuugggggcaaagauugcgugggagacguaaccgagaaucagaucuguaacaagcaagauugcccaauagacggcuguuugucaaaucccugcuucgcuggggucaaauguacaaguuacccugauggaucuuggaagugcggugccuguccaccgggcuauagcgggaacgggauucagugcacugacguggaugaaugcaaggagguucccgacgcuuguuucaaucauaacggcgaacaccgaugcgagaacaccgauccugguuacaauugucucccaugucccccuagauuuacagggucccagccauucggccagggaguggagcaugccaccgcaaacaaacaagucugcaagcccaggaauccgugcacugacggcacgcacgauuguaacaaaaaugccaagugcaacuaucuggggcacuacucagacccuauguaccgcugugaaugcaaaccaggauaugcuggcaaugguaucaucuguggggaggacacagauuuagacggauggcccaacgaaaaucuggugugcguagcgaacgcaaccuaccauugcaagaaggauaauuguccuaaccuacccaauagcggccaggaggacuaugauaaagacgguauuggcgaugccugcgacgaugacgaugacaacgauaagaucccagacgaccgggauaauuguccuuuucacuacaaccccgcucaguaugacuacgauagagacgaugugggggacaggugcgauaacuguccauauaaucauaacccggaccaggccgauacugacaauaacggagagggcgaugcaugcgccgcugacauugacggggauggaauacucaaugaacgcgacaacugucaauacguuuacaaugucgaucagcgagacaccgauauggacggcgugggugaucagugcgacaacuguccucuggagcacaaucccgaucaacuugacucugauuccgaccggaucggggauacaugcgacaacaaucaggacauugaugaagacggacaucagaacaauuuggauaacuguccauaugugcccaaugccaaccaggcagaccacgauaaagacggcaagggugaugcgugcgaccacgaugacgauaacgacggcaucccugaugacaaagacaauugccgucuggucccaaaccccgaucaaaaggacagugauggggacggaagaggcgaugcuuguaaggacgauuucgaccaugauagcguuccugacaucgaugacauuugcccggagaauguggacauaucugaaaccgauuuuaggcgcuuccagaugaucccacucgaccccaaagggacuucccagaacgauccuaauugggugguacggcaccagggaaaggagcugguccaaacagugaacugugacccaggccuugccguugguuacgaugaguuuaaugcaguggacuucucagggacguuuuucauuaacaccgaaagagaugacgauuaugccggauuugucuucggcuaccagaguagcucgagguuuuaugugguuauguggaaacaggugacucaguccuacugggacacaaaucccacccgagcucaagguuauucuggccugagcguaaaggucgugaacucaacaacugggccuggagagcauuugcgcaaugcccucuggcacaccggcaacacgccgggacaggugcggacccuguggcacgaucccagacauaucggauggaaagacuucacagcauacagguggcguuuaagucaccgcccaaagacuggcuucauucgggucguuauguacgaagguaaaaagaucauggcugauuccgggccuauauaugacaagaccuacgccggaggcagacugggccuauuuguguucucucaggagaugguauuuuucagcgaccucaaauaugaaugcagggaucccuga

SEQ ID NO: 7542 - RNA, 3513 nt, Artificial Sequence
  derived and/or modified sequence opt4 from TSP-1__Homo_sapiens__AAI36470
augggccuggccuggggccugggcgugcuguuccugaugcacgugugcggcaccaacagaauccccgagagcggcggcgacaacagcguguucgacaucuucgagcugaccggcgccgccagaaagggcagcggcagaagacuggugaagggccccgaccccagcagccccgccuucagaaucgaggacgccaaccugaucccccccgugcccgacgacaaguuccaggaccugguggacgccgugagagccgagaagggcuuccugcugcuggccagccugagacagaugaagaagaccagaggcacccugcuggcccuggagagaaaggaccacagcggccagguguucagcguggugagcaacggcaaggccggcacccuggaccugagccugaccgugcagggcaagcagcacguggugagcguggaggaggcccugcuggccaccggccaguggaagagcaucacccuguucgugcaggaggacagagcccagcuguacaucgacugcgagaagauggagaacgccgagcuggacgugcccauccagagcguguucaccagagaccuggccagcaucgccagacugagaaucgccaagggcggcgugaacgacaacuuccagggcgugcugcagaacgugagauucguguucggcaccacccccgaggacauccugagaaacaagggcugcagcagcagcaccagcgugcugcugacccuggacaacaacguggugaacggcagcagccccgccaucagaaccaacuacaucggccacaagaccaaggaccugcaggccaucugcggcaucagcugcgacgagcugagcagcauggugcuggagcugagaggccugagaaccaucgugaccacccugcaggacagcaucagaaaggugaccgaggagaacaaggagcuggccaacgagcugagaagacccccccugugcuaccacaacggcgugcaguacagaaacaacgaggaguggaccguggacagcugcaccgagugccacugccagaacagcgugaccaucugcaagaaggugagcugccccaucaugcccugcagcaacgccaccgugcccgacggcgagugcugccccagaugcuggcccagcgacagcgccgacgacggcuggagccccuggagcgaguggaccagcugcagcaccagcugcggcaacggcauccagcagagaggcagaagcugcgacagccugaacaacagaugcgagggcagcagcgugcagaccagaaccugccacauccaggagugcgacaagagauucaagcaggacggcggcuggagccacuggagccccuggagcagcugcagcgugaccugcggcgacggcgugaucaccagaaucagacugugcaacagccccagcccccagaugaacggcaagcccugcgagggcgaggccagagagaccaaggccugcaagaaggacgccugccccaucaacggcggcuggggccccuggagccccugggacaucugcagcgugaccugcggcggcggcgugcagaagagaagcagacugugcaacaaccccaccccccaguucggcggcaaggacugcgugggcgacgugaccgagaaccagaucugcaacaagcaggacugccccaucgacggcugccugagcaaccccugcuucgccggcgugaagugcaccagcuaccccgacggcagcuggaagugcggcgccugcccccccggcuacagcggcaacggcauccagugcaccgacguggacgagugcaaggaggugcccgacgccugcuucaaccacaacggcgagcacagaugcgagaacaccgaccccggcuacaacugccugcccugcccccccagauucaccggcagccagcccuucggccagggcguggagcacgccaccgccaacaagcaggugugcaagcccagaaaccccugcaccgacggcacccacgacugcaacaagaacgccaagugcaacuaccugggccacuacagcgaccccauguacagaugcgagugcaagcccggcuacgccggcaacggcaucaucugcggcgaggacaccgaccuggacggcuggcccaacgagaaccuggugugcguggccaacgccaccuaccacugcaagaaggacaacugccccaaccugcccaacagcggccaggaggacuacgacaaggacggcaucggcgacgccugcgacgacgacgacgacaacgacaagauccccgacgacagagacaacugccccuuccacuacaaccccgcccaguacgacuacgacagagacgacgugggcgacagaugcgacaacugccccuacaaccacaaccccgaccaggccgacaccgacaacaacggcgagggcgacgccugcgccgccgacaucgacggcgacggcauccugaacgagagagacaacugccaguacguguacaacguggaccagagagacaccgacauggacggcgugggcgaccagugcgacaacugcccccuggagcacaaccccgaccagcuggacagcgacagcgacagaaucggcgacaccugcgacaacaaccaggacaucgacgaggacggccaccagaacaaccuggacaacugccccuacgugcccaacgccaaccaggccgaccacgacaaggacggcaagggcgacgccugcgaccacgacgacgacaacgacggcauccccgacgacaaggacaacugcagacuggugcccaaccccgaccagaaggacagcgacggcgacggcagaggcgacgccugcaaggacgacuucgaccacgacagcgugcccgacaucgacgacaucugccccgagaacguggacaucagcgagaccgacuucagaagauuccagaugaucccccuggaccccaagggcaccagccagaacgaccccaacuggguggugagacaccagggcaaggagcuggugcagaccgugaacugcgaccccggccuggccgugggcuacgacgaguucaacgccguggacuucagcggcaccuucuucaucaacaccgagagagacgacgacuacgccggcuucguguucggcuaccagagcagcagcagauucuacguggugauguggaagcaggugacccagagcuacugggacaccaaccccaccagagcccagggcuacagcggccugagcgugaagguggugaacagcaccaccggccccggcgagcaccugagaaacgcccuguggcacaccggcaacacccccggccaggugagaacccuguggcacgaccccagacacaucggcuggaaggacuucaccgccuacagauggagacugagccacagacccaagaccggcuucaucagaguggugauguacgagggcaagaagaucauggccgacagcggccccaucuacgacaagaccuacgccggcggcagacugggccuguucguguucagccaggagaugguguucuucagcgaccugaaguacgagugcagagaccccuga

SEQ ID NO: 7543 - RNA, 3513 nt, Artificial Sequence
  derived and/or modified sequence opt5 from TSP-1__Homo_sapiens__AAI36470
augggccuggccugggggcucggagugcuguuccuuaugcacgucugcggcaccaacagaauccccgagagcgggggagacaauuccguuuuugauauuuucgaacugacaggcgcugcccggaaggggucuggacgcagacucgugaaaggcccugacccgagcucccccgcguuucggaucgaggaugcuaaccugauuccucccgugccugacgauaaguuccaggaccuugucgaugccgugcgcgccgaaaaaggcuuucugcuccuggcuucucugagacaaaugaagaaaacgcgggggacccuccuggcccuugagcgcaaggaccauagcggacagguuuucuccguggucucuaauggcaaggcugggacacuggaucucagccugaccgugcagggaaaacagcacguuguguccgucgaagaggcccuucuggcgacaggccaauggaaaagcaucacccucuuugugcaggaggacagagcccagcuguacauugauugugaaaagauggagaacgcugaacuggacgugcccauccagucugucuucacacgggaucucgccuccaucgcucgccugagaauugccaaagggggaguuaaugacaacuuucaaggcgugcuucagaaugugcgguucgucuuuggcaccacgccugaggacauccugcgcaacaaggggugcuccucuuccaccagcgugcuccugacacuugauaauaacguugugaauggaucuuccccggcgauuagaaccaacuauaucggccauaagacaaaggaccugcaggccauuugugggaucagcugcgaugagcucuccucuaugguccuggaacugcggggacuccgcaccauugugacgacacugcaggacagcaucagaaaaguuaccgaggaaaauaaggagcuugcuaacgaacugcggagacccccucucuguuaccacaauggcgugcaauaucgcaacaacgaggaguggacagucgauuccugcaccgaaugucauugccagaauagcgugaccaucuguaaaaaggucucuugccccauuaugccuuguuccaacgccacagugcccgacggggagugcugcccgcgguguuggccuagcgauucugcugacgauggauggagccccugguccgaauggacgucuugcagcaccuccuguggcaauggcauccagcaaagagggcgcagcugcgacucucugaacaaucggugugagggauccagcguucagacaagaaccugccacauucaggaaugugauaaacgcuucaagcaggacggcggguggucucacugguccccuuggagcuccugcucugugacauguggagacggcgucaucacccggauuagacuuugcaacagccccagcccccaaaugaaugggaaaccuugugagggcgaggcccgcgaaacgaaggccugcaagaaagaugcuugcccgaucaacggaggcugggggcccuggucuccuugggacaucuguagcgugacaugcggaggcgggguucagaagcgguccagacuguguaauaaccccaccccucaguuuggaggcaaagauugcgugggggacgucaccgagaaucagauuuguaacaagcaagauugccccaucgacggcugucucagcaauccgugcuucgcgggagugaaauguacaucuuacccugauggcuccuggaagugcggggccugucccccuggauauagcggcaacgggauucagugcaccgacguggaugaaugcaaggagguucccgacgcuuguuucaaucauaacggagaacaccgcugcgagaacacagauccuggcuacaauugucugcccugcccgccucgguuuacggggucucagcccuucggccagggagucgagcaugccaccgccaacaaacaaguguguaagcccagaaauccuugcacagacggcacccacgauuguaacaaaaaugcuaagugcaacuaucuggggcacuacuccgacccgauguaccggugugaaugcaaacccggauaugccggcaaugggaucauuuguggagaggacacagaucucgacggcuggccuaacgaaaaucuggugugcgucgcgaacgcuaccuaccauugcaagaaggauaauugucccaaccuuccuaauagcgggcaggaggacuaugauaaagacggcaucggagaugccugcgacgaugacgaugacaacgauaagauccccgacgaccgcgauaauuguccuuuucacuacaaccccgcccaguaugacuacgauagagacgaugugggcgaccggugcgauaacuguccguauaaucauaacccugaccaggcugauacggacaauaacggggagggagaugccugcgcugccgacauugacggcgaugggauccugaaugaaagagacaacugucaauacguuuacaauguggaucagcgcgacaccgauauggacggagucggcgaucagugcgacaacuguccccucgagcacaauccugaucaacuggacucugauagcgaccggauuggcgauacaugcgacaacaaucaggacaucgaugaagacgggcaucagaacaaucuggauaacugucccuaugugccgaaugcgaaccaggccgaccacgauaaagacggaaagggcgaugcuugcgaccacgaugacgauaacgacgggauuccugaugacaaagacaauugcagacuuguucccaacccugaucaaaaggacuccgauggagacggccgcggggaugccuguaaggacgauuucgaccaugauagcgugcccgacaucgaugacauuugccccgagaaugucgacaucucugaaaccgauuuuagacgguuccagaugaucccucucgacccgaaaggaacaucccagaacgaucccaauugggugguucgccaccagggcaaggagcuggugcaaaccgucaacugugacccuggccuggcugugggguacgaugaguuuaaugccguggacuucagcggaacguuuuucauuaacacagaaagagaugacgauuaugcgggcuuugucuucggguaccaguccucuagccgguuuuauguugugauguggaaacaggugacccaguccuacugggacacaaaucccacccgcgcccaaggauauucuggccucagcgucaaggugguuaacuccaccacagggccuggagagcaucugagaaaugcucuuuggcacacgggcaacacccccggccaggugcggacacuguggcacgauccucgccauaucggguggaaagacuucaccgccuacagauggcggcucucucaccgcccgaagacaggauucauuagagucgugauguacgaaggcaaaaagaucauggcugauagcgggcccauuuaugacaagaccuacgccggaggccggcuggggcuguuuguuuucucccaggagaugguguuuuucagcgaccuuaaauaugaaugcagagauccuuga

SEQ ID NO: 7544 - RNA, 3513 nt, Artificial Sequence
  derived and/or modified sequence opt6 from TSP-1__Homo_sapiens__AAI36470
auggguuuagcuuggggucuagguguauuauuuuugaugcauguauguggaacaaauagaauaccagaaucgggaggagauaauucaguauucgacauauuugaauuaacaggagcagcaagaaaaggcagcggaagaagacuuguuaagggaccugacccaaguagucccgcauuucguauagaggaugcuaaucuaauuccaccaguaccagaugauaaauuucaagauuuagucgaugcaguuagagcugaaaaagguuucuuauuauuagcaagcuuaagacaaaugaagaaaacaagagguacauuacuggcauuggaaaggaaagaccacagcgggcaaguauucucaguaguaucuaauggaaaggccggaacuuuagauuuaaguuugacaguccaaggaaagcaacacguaguaucgguugaagaggcccuauuagcuacaggacaguggaaaucgaucacauuauuuguacaagaagaucgagcacaauuauauauagauugugaaaaaauggaaaacgcagaauuggacgucccaauucaaucuguauuuacacgagauuuggcauccaucgcaagacuacgaauagcuaagggaggaguuaacgauaacuuccaagguguacuacaaaauguuagauuuguauucgggacaacaccagaagacauuuuaaggaauaaagguugcucaaguaguacuaguguauuauuaacguuggauaacaacguaguaaacgggaguucacccgcuauucgaacuaauuauaucggacacaaaaccaaagacuuacaagcaauuugugguauaucaugcgaugaauugagcucgaugguauuggaacucagagguuuacgaacaaucguuacaacacuucaagauagcauaagaaaaguaacagaagaaaacaaagaacuagcaaaugaacuccgacgaccaccguuaugcuaccauaacggcguacaauauagaaacaacgaagaauggacuguugauucauguacggaaugucacugucaaaauucuguaacaauauguaagaaaguaucguguccaauuaugccauguucuaaugcuacaguucccgacggagaauguugcccccgauguuggccaagugauucagcagaugauggcuggucgccauggagcgaauggacaagcugcucaacaucuugugguaaugguauacaacaacguggaagaucaugugauucuuuaaauaaucguugcgaaggaaguucugugcaaacucguacaugucauauccaagaaugugauaaacgcuucaaacaagacggaggauggucucacuggaguccauggagcucaugcagcguaacauguggagacggcguaauuaccagaauuaggcuauguaauaguccaagcccgcaaaugaaugggaaacccugugaaggagaagcaagagaaacaaaagcuuguaaaaaagaugccuguccaauaaaugggggauggggaccguggucaccaugggacauaugcucggucacaugcggcggagggguccaaaaaaggucuaggcuaugcaacaauccaacaccacaauuuggaggaaaagauugugucggagauguaaccgaaaaucaaauauguaacaagcaagauuguccaauagauggauguuuaucaaauccaugcuuugcaggaguaaagugcacuucauauccagacggaaguuggaaauguggagcuugcccuccaggauauucaggaaacgguauucaaugcacagauguagacgaauguaaagaaguaccugacgcauguuucaaucacaauggagaacacagaugcgagaauaccgauccuggguauaacugucuaccauguccaccaagauucacuggaagucagccuuuuggacaaggaguagaacaugcgacagcaaacaaacagguauguaaaccuagaaacccgugcacggacggaacacaugauugcaauaaaaacgcgaaauguaauuacuuaggucauuauucugauccuauguacagaugugaaugcaaaccuggauaugcaggaaacgguauaauauguggcgaagacacagauuuagaugguuggccaaacgaaaacuugguauguguggcaaaugcgacauaucauuguaaaaaagauaacugcccaaaucuaccuaauagcggucaagaagacuaugacaaagaugguauaggagacgccugugaugacgacgacgauaaugauaaaauaccugacgaucgggauaacuguccauuccacuacaaucccgcucaauaugauuaugacagggaugacguaggggaucgaugugauaacuguccauacaaccauaacccagaucaagcagauacugauaacaacggugaaggugaugcaugugcagcagauauagauggagacgguauauuaaacgagcgagacaauugucaguacguuuauaacguugaccaaagagauacagacauggaugguguaggagaucaaugugauaacuguccccuagaacacaauccagaccaacuugacagugauagugaccggauuggcgacacaugugauaacaaccaagauauagaugaagauggacaucaaaauaaccuagauaauuguccguacguaccaaaugcaaaucaagcagaucaugauaaagaugguaaaggagacgcuugugaccaugaugaugauaacgauggcauuccugaugauaaagacaauugcagacuaguaccaaaucccgaucaaaaagauagcgauggagacgggagaggugaugcuugcaaagaugauuuugaccaugacucaguuccagauauagaugauauuuguccagaaaauguugacauaucugaaacagauuuucgaagauuccaaaugauaccgcuagacccaaaaggaacuucacaaaaugauccaaauuggguaguaagacaucaaggaaaagagcuaguacaaacaguaaauugcgauccagggcuagcuguaggguaugacgaauuuaaugcaguagauuucucaggaaccuuuuuuaucaauacugaaagagaugacgauuaugcuggauuuguauuuggcuaucagucaagcagcagauuuuacguaguaauguggaaacaaguuacucaaagcuauugggauacaaauccaacaagagcacaaggauacucaggacuuagcguaaaaguuguaaacucaacaacagguccaggagaacaccucagaaaugcacuuuggcauacagguaauacaccgggucaagugagaacacuuuggcacgauccuagacauauaggauggaaagauuucacagcauaccgauggcgauuaucacacagaccaaagacaggauuuauaagaguaguaauguaugagggaaagaaaauaauggcagauuccggaccaauauaugauaagaccuaugccggaggaagauuaggauuauuuguauucagccaagaaaugguauucuucagcgacuugaaauaugaauguagagauccauaa

SEQ ID NO: 7545 - protein, 1172 aa, Artificial Sequence
  TSP-2__Homo_sapiens__P35442
MVWRLVLLALWVWPSTQAGHQDKDTTFDLFSISNINRKTIGAKQFRGPDPGVPAYRFVRFDYIPPVNADDLSKITKIMRQKEGFFLTAQLKQDGKSRGTLLALEGPGLSQRQFEIVSNGPADTLDLTYWIDGTRHVVSLEDVGLADSQWKNVTVQVAGETYSLHVGCDLIDSFALDEPFYEHLQAEKSRMYVAKGSARESHFRGLLQNVHLVFENSVEDILSKKGCQQGQGAEINAISENTETLRLGPHVTTEYVGPSSERRPEVCERSCEELGNMVQELSGLHVLVNQLSENLKRVSNDNQFLWELIGGPPKTRNMSACWQDGRFFAENETWVVDSCTTCTCKKFKTICHQITCPPATCASPSFVEGECCPSCLHSVDGEEGWSPWAEWTQCSVTCGSGTQQRGRSCDVTSNTCLGPSIQTRACSLSKCDTRIRQDGGWSHWSPWSSCSVTCGVGNITRIRLCNSPVPQMGGKNCKGSGRETKACQGAPCPIDGRWSPWSPWSACTVTCAGGIRERTRVCNSPEPQYGGKACVGDVQERQMCNKRSCPVDGCLSNPCFPGAQCSSFPDGSWSCGSCPVGFLGNGTHCEDLDECALVPDICFSTSKVPRCVNTQPGFHCLPCPPRYRGNQPVGVGLEAAKTEKQVCEPENPCKDKTHNCHKHAECIYLGHFSDPMYKCECQTGYAGDGLICGEDSDLDGWPNLNLVCATNATYHCIKDNCPHLPNSGQEDFDKDGIGDACDDDDDNDGVTDEKDNCQLLFNPRQADYDKDEVGDRCDNCPYVHNPAQIDTDNNGEGDACSVDIDGDDVFNERDNCPYVYNTDQRDTDGDGVGDHCDNCPLVHNPDQTDVDNDLVGDQCDNNEDIDDDGHQNNQDNCPYISNANQADHDRDGQGDACDPDDDNDGVPDDRDNCRLVFNPDQEDLDGDGRGDICKDDFDNDNIPDIDDVCPENNAISETDFRNFQMVPLDPKGTTQIDPNWVIRHQGKELVQTANSDPGIAVGFDEFGSVDFSGTFYVNTDRDDDYAGFVFGYQSSSRFYVVMWKQVTQTYWEDQPTRAYGYSGVSLKVVNSTTGTGEHLRNALWHTGNTPGQVRTLWHDPRNIGWKDYTAYRWHLTHRPKTGYIRVLVHEGKQVMADSGPIYDQTYAGGRLGLFVFSQEMVYFSDLKYECRDI

SEQ ID NO: 7546 - RNA, 3519 nt, Artificial Sequence
  TSP-2__Homo_sapiens__BAF85118
auggucuggaggcugguccugcuggcucuguggguguggcccagcacgcaagcuggucaccaggacaaagacacgaccuucgaccuuuucaguaucagcaacaucaaccgcaagaccauuggcgccaagcaguuccgcgggcccgaccccggcgugccggcuuaccgcuucgugcgcuuugacuacaucccaccggugaacgcagaugaccucagcaagaucaccaagaucaugcggcagaaggagggcuucuuccucacggcccagcucaagcaggacggcaaguccaggggcacgcuguuggcucuggagggccccggucucucccagaggcaguucgagaucgucuccaauggccccgcggacacgcuggaucucaccuacuggauugacggcacccggcauguggucucccuggaggacgucggccuggcugacucgcaguggaagaacgucaccgugcagguggcuggcgagaccuacagcuugcacgugggcugcgaccucauagacagcuucgcucuggacgagcccuucuacgagcaccugcaggcggaaaagagccggauguacguggccaaaggcucugccagagagagucacuucagggguuugcuucagaacguccaccuaguguuugaaaacucuguggaagauauucuaagcaagaaggguugccagcaaggccagggagcugagaucaacgccaucagugagaacacagagacgcugcgccuggguccgcaugucaccaccgaguacgugggccccagcucggagaggaggcccgaggugugcgaacgcucgugcgaggagcugggaaacaugguccaggagcucucggggcuccacguccucgugaaccagcucagcgagaaccucaagagagugucgaaugauaaccaguuucucugggagcucauugguggcccuccuaagacaaggaacaugucagcuugcuggcaggauggccgguucuuugcggaaaaugaaacgugggugguggacagcugcaccacguguaccugcaagaaauuuaaaaccauuugccaccaaaucaccugcccgccugcaaccugcgccaguccauccuuuguggaaggcgaaugcugcccuuccugccuccacucgguggacggugaggagggcuggucuccgugggcagaguggacccagugcuccgugacguguggcucugggacccagcagagaggccgguccugugacgucaccagcaacaccugcuuggggcccuccauccagacacgggcuugcagucugagcaagugugacacccgcauccggcaggacggcggcuggagccacuggucaccuuggucuucaugcucugugaccuguggaguuggcaauaucacacgcauccgucucugcaacuccccagugccccagauggggggcaagaauugcaaagggaguggccgggagaccaaagccugccagggcgccccaugcccaaucgauggccgcuggagccccugguccccguggucggccugcacugucaccugugccggugggauccgggagcgcacccgggucugcaacagcccugagccucaguacggagggaaggccugcgugggggaugugcaggagcgucagaugugcaacaagaggagcugccccguggauggcuguuuauccaaccccugcuucccgggagcccagugcagcagcuuccccgauggguccuggucaugcggcuccugcccugugggcuucuugggcaauggcacccacugugaggaccuggacgagugugcccugguccccgacaucugcuucuccaccagcaaggugccucgcugugucaacacucagccuggcuuccacugccugcccugcccgccccgauacagagggaaccagcccgucggggucggccuggaagcagccaagacggaaaagcaagugugugagcccgaaaacccaugcaaggacaagacacacaacugccacaagcacgcggagugcaucuaccugggccacuucagcgaccccauguacaagugcgagugccagacaggcuacgcgggcgacgggcucaucugcggggaggacucggaccuggacggcuggcccaaccucaaucuggucugcgccaccaacgccaccuaccacugcaucaaggauaacugcccccaucugccaaauucugggcaggaagacuuugacaaggacgggauuggcgaugccugugaugaugacgaugacaaugacggugugaccgaugagaaggacaacugccagcuccucuucaauccccgccaggcugacuaugacaaggaugagguuggggaccgcugugacaacugcccuuacgugcacaacccugcccagaucgacacagacaacaauggagagggugacgccugcuccguggacauugauggggacgaugucuucaaugaacgagacaauugucccuacgucuacaacacugaccagagggacacggauggugacggugugggggaucacugugacaacugcccccuggugcacaacccugaccagaccgacguggacaaugaccuuguuggggaccagugugacaacaacgaggacauagaugacgacggccaccagaacaaccaggacaacugccccuacaucuccaacgccaaccaggcugaccaugacagagacggccagggcgacgccugugacccugaugaugacaacgauggcguccccgaugacagggacaacugccggcuuguguucaacccagaccaggaggacuuggacggugauggacggggugauauuuguaaagaugauuuugacaaugacaacaucccagauauugaugauguguguccugaaaacaaugccaucagugagacagacuucaggaacuuccagaugguccccuuggaucccaaagggaccacccaaauugaucccaacugggucauucgccaucaaggcaaggagcugguucagacagccaacucggaccccggcaucgcuguagguuuugacgaguuugggucuguggacuucaguggcacauucuacguaaacacugaccgggacgacgacuaugccggcuucgucuuugguuaccagucaagcagccgcuucuauguggugauguggaagcaggugacgcagaccuacugggaggaccagcccacgcgggccuauggcuacuccggcgugucccucaagguggugaacuccaccacggggacgggcgagcaccugaggaacgcgcuguggcacacggggaacacgccggggcaggugcgaaccuuauggcacgaccccaggaacauuggcuggaaggacuacacggccuauagguggcaccugacucacaggcccaagacuggcuacaucagagucuuagugcaugaaggaaaacaggucauggcagacucaggaccuaucuaugaccaaaccuacgcuggcgggcggcugggucuauuugucuucucucaagaaauggucuauuucucagaccucaaguacgaaugcagagauauuuaa

SEQ ID NO: 7547 - RNA, 3519 nt, Artificial Sequence
  derived and/or modified sequence opt1 from TSP-2__Homo_sapiens__BAF85118
augguguggcgccugguccuccuggcccuguggguguggcccagcacccaggccggccaccaggacaaggacaccacguucgaccucuucuccaucagcaacaucaaccggaagaccaucggggcgaagcaguuccgcggcccggaccccggggugcccgccuaccgguucguccgcuucgacuacaucccgcccgugaacgccgacgaccuguccaagaucaccaagaucaugcggcagaaggagggcuucuuccugaccgcccagcucaagcaggacggcaagagccgcgggacgcugcuggcccucgagggccccgggcugucccagcggcaguucgagaucgugagcaacggccccgcggacacccuggaccucaccuacuggaucgacgggacccgccacgucgugucccuggaggacgugggccuggccgacagccaguggaagaacgucacgguccagguggccggggagaccuacucccuccacgugggcugcgaccugaucgacagcuucgcccuggacgagcccuucuacgagcaccuccaggcggagaagucccggauguacguggccaagggcagcgcccgcgagucccacuuccgggggcugcugcagaacgugcaccucgucuucgagaacagcguggaggacauccuguccaagaagggcugccagcaggggcagggcgccgagaucaacgccaucagcgagaacaccgagacccugcgccucggcccgcacgugacgaccgaguacgucgggcccuccagcgagcggcgccccgaggugugcgagcgguccugcgaggagcugggcaacauggugcaggagcugagcgggcuccacguccuggugaaccagcugagcgagaaccucaagcgcguguccaacgacaaccaguuccugugggagcugaucggcgggcccccgaagacccggaacaugagcgcgugcuggcaggacggccgcuucuucgccgagaacgagaccugggucguggacuccugcacgaccugcacgugcaagaaguucaagaccaucugccaccagaucacgugcccgcccgcgaccugcgccagccccuccuucgucgagggcgagugcugccccagcugccuccacuccguggacggggaggagggcuggagccccugggccgaguggacccagugcuccgugaccugcgggagcggcacccagcagcgggggcgcuccugcgacgucaccagcaacacgugccugggccccuccauccagacccgggcgugcagccuguccaagugcgacacccgcauccgccaggacggcggguggagccacuggucccccuggagcuccugcagcgugaccugcggcguggggaacaucacccggauccgccucugcaacagcccggucccccagaugggcgggaagaacugcaagggcuccggccgggagaccaaggccugccagggggcccccugccccaucgacggccgcuggagcccguggucccccuggagcgccugcacggugaccugcgccgggggcauccgggagcgcacccgggugugcaacucccccgagccccaguacggcgggaaggcgugcgucggcgacgugcaggagcgccagaugugcaacaagcggagcugcccgguggacgggugccuguccaaccccugcuuccccggcgcccagugcagcuccuucccggacgggagcugguccugcggcagcugccccgucggcuuccuggggaacggcacccacugcgaggaccucgacgagugcgcccuggugcccgacaucugcuucuccacgagcaaggugccccgcugcgucaacacccagccgggguuccacugccugcccugcccgccccgguaccgcggcaaccagcccgugggggugggccucgaggccgccaagaccgagaagcaggucugcgagcccgagaaccccugcaaggacaagacccacaacugccacaagcacgcggagugcaucuaccugggccacuucuccgaccccauguacaagugcgagugccagaccggguacgccggcgacgggcugaucugcggcgaggacagcgaccucgacggguggccgaaccugaaccuggugugcgccacgaacgccaccuaccacugcaucaaggacaacugcccccaccuccccaacuccggccaggaggacuucgacaaggacggcaucggggacgcgugcgacgacgacgacgacaacgacggcgugaccgacgagaaggacaacugccagcugcuguucaacccccggcaggccgacuacgacaaggacgaggucggggaccgcugcgacaacugcccguacgugcacaaccccgcccagaucgacaccgacaacaacggcgagggggacgccugcagcguggacaucgacggcgacgacgucuucaacgagcgggacaacugccccuacguguacaacacggaccagcgcgacaccgacggcgacggggugggcgaccacugcgacaacugcccccugguccacaacccggaccagaccgacguggacaacgaccucgugggggaccagugcgacaacaacgaggacaucgacgacgacggccaccagaacaaccaggacaacugccccuacaucagcaacgccaaccaggcggaccacgaccgggacggccagggggacgccugcgaccccgacgacgacaacgacggcguccccgacgaccgcgacaacugccggcugguguucaacccggaccaggaggaccuggacggggacggccgcggggacaucugcaaggacgacuucgacaacgacaacauccccgacaucgacgacgugugccccgagaacaacgccaucuccgagaccgacuuccgcaacuuccagauggucccgcucgaccccaagggcacgacccagaucgaccccaacugggugauccggcaccagggcaaggagcuggugcagaccgccaacagcgaccccgggaucgccgucggcuucgacgaguucggguccguggacuucagcggcaccuucuacgugaacacggaccgcgacgacgacuacgcgggguucgucuucggcuaccaguccagcucccgguucuacguggugauguggaagcaggucacccagaccuacugggaggaccagccgacccgcgccuacggcuacagcggggugucccugaagguggucaacagcacgaccggcaccggggagcaccuccggaacgcccuguggcacaccggcaacacgcccggccaggugcgcacccuguggcacgacccccggaacaucggguggaaggacuacaccgccuaccgcuggcaccucacccaccggcccaagacgggcuacauccgcgugcugguccacgaggggaagcaggucauggccgacuccggcccgaucuacgaccagaccuacgccgggggccggcugggccucuucguguucagccaggagaugguguacuucuccgaccugaaguacgagugccgcgacaucuga

SEQ ID NO: 7548 - RNA, 3519 nt, Artificial Sequence
  derived and/or modified sequence opt2 from TSP-2__Homo_sapiens__BAF85118
auggucuggcgccucguccuccucgcccucugggucuggcccuccacccaggccggccaccaggacaaggacaccaccuucgaccucuucuccaucuccaacaucaaccgcaagaccaucggcgccaagcaguuccgcggccccgaccccggcguccccgccuaccgcuucguccgcuucgacuacaucccccccgucaacgccgacgaccucuccaagaucaccaagaucaugcgccagaaggagggcuucuuccucaccgcccagcucaagcaggacggcaagucccgcggcacccuccucgcccucgagggccccggccucucccagcgccaguucgagaucgucuccaacggccccgccgacacccucgaccucaccuacuggaucgacggcacccgccacgucgucucccucgaggacgucggccucgccgacucccaguggaagaacgucaccguccaggucgccggcgagaccuacucccuccacgucggcugcgaccucaucgacuccuucgcccucgacgagcccuucuacgagcaccuccaggccgagaagucccgcauguacgucgccaagggcuccgcccgcgagucccacuuccgcggccuccuccagaacguccaccucgucuucgagaacuccgucgaggacauccucuccaagaagggcugccagcagggccagggcgccgagaucaacgccaucuccgagaacaccgagacccuccgccucggcccccacgucaccaccgaguacgucggccccuccuccgagcgccgccccgaggucugcgagcgcuccugcgaggagcucggcaacaugguccaggagcucuccggccuccacguccucgucaaccagcucuccgagaaccucaagcgcgucuccaacgacaaccaguuccucugggagcucaucggcggcccccccaagacccgcaacauguccgccugcuggcaggacggccgcuucuucgccgagaacgagaccugggucgucgacuccugcaccaccugcaccugcaagaaguucaagaccaucugccaccagaucaccugcccccccgccaccugcgccucccccuccuucgucgagggcgagugcugccccuccugccuccacuccgucgacggcgaggagggcuggucccccugggccgaguggacccagugcuccgucaccugcggcuccggcacccagcagcgcggccgcuccugcgacgucaccuccaacaccugccucggccccuccauccagacccgcgccugcucccucuccaagugcgacacccgcauccgccaggacggcggcuggucccacuggucccccugguccuccugcuccgucaccugcggcgucggcaacaucacccgcauccgccucugcaacucccccgucccccagaugggcggcaagaacugcaagggcuccggccgcgagaccaaggccugccagggcgcccccugccccaucgacggccgcuggucccccuggucccccugguccgccugcaccgucaccugcgccggcggcauccgcgagcgcacccgcgucugcaacucccccgagccccaguacggcggcaaggccugcgucggcgacguccaggagcgccagaugugcaacaagcgcuccugccccgucgacggcugccucuccaaccccugcuuccccggcgcccagugcuccuccuuccccgacggcuccugguccugcggcuccugccccgucggcuuccucggcaacggcacccacugcgaggaccucgacgagugcgcccucguccccgacaucugcuucuccaccuccaaggucccccgcugcgucaacacccagcccggcuuccacugccuccccugccccccccgcuaccgcggcaaccagcccgucggcgucggccucgaggccgccaagaccgagaagcaggucugcgagcccgagaaccccugcaaggacaagacccacaacugccacaagcacgccgagugcaucuaccucggccacuucuccgaccccauguacaagugcgagugccagaccggcuacgccggcgacggccucaucugcggcgaggacuccgaccucgacggcuggcccaaccucaaccucgucugcgccaccaacgccaccuaccacugcaucaaggacaacugcccccaccuccccaacuccggccaggaggacuucgacaaggacggcaucggcgacgccugcgacgacgacgacgacaacgacggcgucaccgacgagaaggacaacugccagcuccucuucaacccccgccaggccgacuacgacaaggacgaggucggcgaccgcugcgacaacugccccuacguccacaaccccgcccagaucgacaccgacaacaacggcgagggcgacgccugcuccgucgacaucgacggcgacgacgucuucaacgagcgcgacaacugccccuacgucuacaacaccgaccagcgcgacaccgacggcgacggcgucggcgaccacugcgacaacugcccccucguccacaaccccgaccagaccgacgucgacaacgaccucgucggcgaccagugcgacaacaacgaggacaucgacgacgacggccaccagaacaaccaggacaacugccccuacaucuccaacgccaaccaggccgaccacgaccgcgacggccagggcgacgccugcgaccccgacgacgacaacgacggcguccccgacgaccgcgacaacugccgccucgucuucaaccccgaccaggaggaccucgacggcgacggccgcggcgacaucugcaaggacgacuucgacaacgacaacauccccgacaucgacgacgucugccccgagaacaacgccaucuccgagaccgacuuccgcaacuuccagauggucccccucgaccccaagggcaccacccagaucgaccccaacugggucauccgccaccagggcaaggagcucguccagaccgccaacuccgaccccggcaucgccgucggcuucgacgaguucggcuccgucgacuucuccggcaccuucuacgucaacaccgaccgcgacgacgacuacgccggcuucgucuucggcuaccaguccuccucccgcuucuacgucgucauguggaagcaggucacccagaccuacugggaggaccagcccacccgcgccuacggcuacuccggcgucucccucaaggucgucaacuccaccaccggcaccggcgagcaccuccgcaacgcccucuggcacaccggcaacacccccggccagguccgcacccucuggcacgacccccgcaacaucggcuggaaggacuacaccgccuaccgcuggcaccucacccaccgccccaagaccggcuacauccgcguccucguccacgagggcaagcaggucauggccgacuccggccccaucuacgaccagaccuacgccggcggccgccucggccucuucgucuucucccaggagauggucuacuucuccgaccucaaguacgagugccgcgacaucuga

SEQ ID NO: 7549 - RNA, 3519 nt, Artificial Sequence
  derived and/or modified sequence opt3 from TSP-2__Homo_sapiens__BAF85118
augguguggagacugguccuccuugcccuguggguuuggcccagcacccaggcuggccaccaagacaaggauacaacuuucgacuuguuuuccaucucuaacauuaauaggaaaacgauaggggcaaagcaguuccggggaccugauccaggugugccggccuaccgcuuuguacgauucgacuauaucccaccugugaacgcggaugacuuaucaaaaauuaccaagaucaugcgucagaaagagggcuuuuuccugacagcucagcuaaagcaagaugggaagaguagaggaacucuccuggcccuugaaggcccaggucugagccagaggcaguuugagauugucuccaaugggcccgcagacaccuuggaucucacauacuggaucgacggaacccggcaugugguuucucuggaagaugugggccuggccgacucgcaguggaaaaacgucacugugcaaguagcuggcgagacauauucacuccacguugggugcgauuuaauagacagcuucgcacuggacgaaccuuuuuacgagcaucuucaggccgagaagagucgcauguauguggcuaaaggauccgccagagaaucucacuucagggguuugcugcagaauguccaucuaguguuugagaacagcguggaagauauccucuccaagaaaggcugucagcaagggcagggagcggagauuaaugcaaucucagagaacaccgaaacgcugcggcuuggcccacacgucacuaccgaguacguuggucccaguagcgaacgccgaccugaggugugcgaaagaucuugugaggagcuggggaauaugguacaggaauuguccggacuccacgugcuggucaaccaauuaucagagaaucugaagagggugagcaacgacaaucaguuccucugggaacuuauuggcggcccaccgaagacacggaacaugagugccugcuggcaggaugggcgcuuuuucgcugagaaugaaacuuggguuguggacucuuguaccacaugcaccuguaaaaaguucaaaacgaucugccaucagauaacuugucccccugccacaugcgcaucccccagcuuugucgagggagaguguugccccucgugccugcacucuguggauggugaagagggcugguccccuugggcugaauggacccaauguucaguaacuugcgggaguggaacacagcagcguggcagaagcugugacguuaccuccaacacgugcuuggguccaucuauucagaccagggccuguagccuaucaaagugcgauacacggauccgacaagacgggggcuggagucauuggucccccuggagcucuuguucagugacuugcggagucggcaacauuacccgcaucagacuguguaauaguccggugccucagaugggagggaaaaacugcaaggguagcggcagggagacaaaagcgugucagggggcccccugcccaaucgauggacggugguccccuuggucucccuggucggcaugcacugucaccugugcuggcgguauucgcgaaagaacaagggugugcaauagcccagagccccaguaugggggcaaggccuguguuggagacgugcaagagcgucagaugugcaacaagcgguccuguccuguagauggcugccucucaaauccauguuucccgggggcucagugcaguucuuuucccgacggaagcugguccugugguucaugcccugucggcuuccuggggaacggaacccacugugaagaccuugaugagugcgcccuggugccagacauaugcuuuagcacuucuaaaguuccccgaugugugaauacgcagccuggcuuccacugcuugccaugucccccgagauacagggguaaccaaccugucggggugggccucgaagcagccaagacagagaaacagguaugcgagccagaaaaucccuguaaggauaaaacccauaacugccacaagcaugcugaguguaucuaccugggacacuuuuccgacccuauguauaagugcgaaugucagacuggcuacgcgggggauggauuaauuugcggcgaggacagugaucuggacgguuggcccaaucuaaaccucgugugugcaaccaaugccacauaucauugcaucaaagauaacugcccacaucugccuaauagcgggcaagaagacuucgauaaggacggaauaggcgaugcuugugacgacgaugacgauaacgacgguguuaccgaugagaaagacaacugccagcuuuuguuuaauccccgccaggccgauuacgacaaggaugaggucggcgaccggugugauaacugcccauaugugcacaauccggcacagauugacacugauaacaauggggaaggagacgccuguucuguggacaucgauggcgacgaugucuucaacgagagagacaauugcccuuacguuuauaacacagaucaaagggacacggauggggacggagugggcgaucacugugacaauugcccccuggugcacaacccagaucagaccgacguagacaaugaucucgucggugaccagugugauaacaaugaagacaucgaugacgaugggcaucagaacaaucaagacaacugccccuacauuuccaacgcuaaucaggccgaucacgaccgcgauggacagggcgacgcaugugauccugacgacgauaacgacggugugccagaugaccgagauaauugccggcugguuuuuaaccccgaccaggaggaucuugacggcgaugggcguggagacaucugcaaagaugacuucgauaaugacaacauuccugacauagaugacguguguccggaaaauaacgcgaucucagagacugauuuuagaaauuuccaaauggucccacuggaccccaagggcacaacccagauugauccuaacugggugaucaggcaccaggggaaggaguugguucaaacagcuaauagugacccaggaaucgccgugggcuucgaugaauuugguagcguagacuucucggggacuuuuuacgucaacaccgaucgcgacgaugacuaugcaggauucguguuuggcuaccaguccucuagccgguucuauguggucauguggaaacagguuacgcagaccuacugggaggaccaacccacaagagccuaugguuacucaggcgugagucucaagguagugaacuccacuaccgggacaggagaacaucugaggaaugcuuuauggcacacuggcaauaccccugggcagguccgaacgcuguggcaugauccgcgcaacauuggauggaaagacuauacagccuaccgguggcaccuaacccauagacccaagacuggcuacauaagggugcucguucacgaggguaaacaggugauggcagauucugggccaaucuaugaccagacauacgcuggaggccgucugggccuuuuugucuucagccaagaaaugguguauuuuuccgauuugaaguacgagugccgcgacauuuga

SEQ ID NO: 7550 - RNA, 3519 nt, Artificial Sequence
  derived and/or modified sequence opt4 from TSP-2__Homo_sapiens__BAF85118
augguguggagacuggugcugcuggcccuguggguguggcccagcacccaggccggccaccaggacaaggacaccaccuucgaccuguucagcaucagcaacaucaacagaaagaccaucggcgccaagcaguucagaggccccgaccccggcgugcccgccuacagauucgugagauucgacuacaucccccccgugaacgccgacgaccugagcaagaucaccaagaucaugagacagaaggagggcuucuuccugaccgcccagcugaagcaggacggcaagagcagaggcacccugcuggcccuggagggccccggccugagccagagacaguucgagaucgugagcaacggccccgccgacacccuggaccugaccuacuggaucgacggcaccagacacguggugagccuggaggacgugggccuggccgacagccaguggaagaacgugaccgugcagguggccggcgagaccuacagccugcacgugggcugcgaccugaucgacagcuucgcccuggacgagcccuucuacgagcaccugcaggccgagaagagcagaauguacguggccaagggcagcgccagagagagccacuucagaggccugcugcagaacgugcaccugguguucgagaacagcguggaggacauccugagcaagaagggcugccagcagggccagggcgccgagaucaacgccaucagcgagaacaccgagacccugagacugggcccccacgugaccaccgaguacgugggccccagcagcgagagaagacccgaggugugcgagagaagcugcgaggagcugggcaacauggugcaggagcugagcggccugcacgugcuggugaaccagcugagcgagaaccugaagagagugagcaacgacaaccaguuccugugggagcugaucggcggcccccccaagaccagaaacaugagcgccugcuggcaggacggcagauucuucgccgagaacgagaccugggugguggacagcugcaccaccugcaccugcaagaaguucaagaccaucugccaccagaucaccugcccccccgccaccugcgccagccccagcuucguggagggcgagugcugccccagcugccugcacagcguggacggcgaggagggcuggagccccugggccgaguggacccagugcagcgugaccugcggcagcggcacccagcagagaggcagaagcugcgacgugaccagcaacaccugccugggccccagcauccagaccagagccugcagccugagcaagugcgacaccagaaucagacaggacggcggcuggagccacuggagccccuggagcagcugcagcgugaccugcggcgugggcaacaucaccagaaucagacugugcaacagccccgugccccagaugggcggcaagaacugcaagggcagcggcagagagaccaaggccugccagggcgcccccugccccaucgacggcagauggagccccuggagccccuggagcgccugcaccgugaccugcgccggcggcaucagagagagaaccagagugugcaacagccccgagccccaguacggcggcaaggccugcgugggcgacgugcaggagagacagaugugcaacaagagaagcugccccguggacggcugccugagcaaccccugcuuccccggcgcccagugcagcagcuuccccgacggcagcuggagcugcggcagcugccccgugggcuuccugggcaacggcacccacugcgaggaccuggacgagugcgcccuggugcccgacaucugcuucagcaccagcaaggugcccagaugcgugaacacccagcccggcuuccacugccugcccugcccccccagauacagaggcaaccagcccgugggcgugggccuggaggccgccaagaccgagaagcaggugugcgagcccgagaaccccugcaaggacaagacccacaacugccacaagcacgccgagugcaucuaccugggccacuucagcgaccccauguacaagugcgagugccagaccggcuacgccggcgacggccugaucugcggcgaggacagcgaccuggacggcuggcccaaccugaaccuggugugcgccaccaacgccaccuaccacugcaucaaggacaacugcccccaccugcccaacagcggccaggaggacuucgacaaggacggcaucggcgacgccugcgacgacgacgacgacaacgacggcgugaccgacgagaaggacaacugccagcugcuguucaaccccagacaggccgacuacgacaaggacgaggugggcgacagaugcgacaacugccccuacgugcacaaccccgcccagaucgacaccgacaacaacggcgagggcgacgccugcagcguggacaucgacggcgacgacguguucaacgagagagacaacugccccuacguguacaacaccgaccagagagacaccgacggcgacggcgugggcgaccacugcgacaacugcccccuggugcacaaccccgaccagaccgacguggacaacgaccuggugggcgaccagugcgacaacaacgaggacaucgacgacgacggccaccagaacaaccaggacaacugccccuacaucagcaacgccaaccaggccgaccacgacagagacggccagggcgacgccugcgaccccgacgacgacaacgacggcgugcccgacgacagagacaacugcagacugguguucaaccccgaccaggaggaccuggacggcgacggcagaggcgacaucugcaaggacgacuucgacaacgacaacauccccgacaucgacgacgugugccccgagaacaacgccaucagcgagaccgacuucagaaacuuccagauggugccccuggaccccaagggcaccacccagaucgaccccaacugggugaucagacaccagggcaaggagcuggugcagaccgccaacagcgaccccggcaucgccgugggcuucgacgaguucggcagcguggacuucagcggcaccuucuacgugaacaccgacagagacgacgacuacgccggcuucguguucggcuaccagagcagcagcagauucuacguggugauguggaagcaggugacccagaccuacugggaggaccagcccaccagagccuacggcuacagcggcgugagccugaagguggugaacagcaccaccggcaccggcgagcaccugagaaacgcccuguggcacaccggcaacacccccggccaggugagaacccuguggcacgaccccagaaacaucggcuggaaggacuacaccgccuacagauggcaccugacccacagacccaagaccggcuacaucagagugcuggugcacgagggcaagcaggugauggccgacagcggccccaucuacgaccagaccuacgccggcggcagacugggccuguucguguucagccaggagaugguguacuucagcgaccugaaguacgagugcagagacaucuga

SEQ ID NO: 7551 - RNA, 3519 nt, Artificial Sequence
  derived and/or modified sequence opt5 from TSP-2__Homo_sapiens__BAF85118
augguguggagacugguccuccuggcccuuuggguuuggcccagcacccaggcuggccaccaagacaaggauacaacguucgaccuguuuuccaucucuaacauuaaucggaaaaccaucggggccaagcaguuccgcggaccugauccgggcgugcccgcguacagauuugugcgguucgacuauauuccucccgucaacgcugaugaccucagcaaaaucacaaagauuaugcgccagaaagagggguuuuuccugaccgcccagcuuaagcaagauggaaaguccagaggcacacugcucgcccuggaagggccuggacugucucagcggcaguuugagaucgugagcaauggccccgcugacacccucgaucugacauacuggaucgacggcacccgccauguugugucccuugaagaugucgggcuggccgacucucaguggaaaaacgugacgguucaaguggcuggagagaccuauagccuccacgucggcugcgaucugauugacuccuucgcccuugacgaaccuuuuuacgagcaucugcaggcggagaagucuagaauguauguggccaaagggucugcucgggaaucccacuuccgcggacuccugcagaaugugcaucuggucuuugagaacagcguugaagauauccucucuaagaaaggcugucagcaagggcagggagccgagauuaaugcuaucuccgagaacacagaaacccugagacuuggcccgcacgugacaaccgaguacgugggccccagcucugaacggcgcccugaggucugcgaaagauccugugaggagcuggggaauauggugcaggaacucagcggacugcacguucuugugaaccaacuguccgagaaucucaagcgggucucuaacgacaaucaguuccugugggaacugauuggcgggcccccuaagacgcgcaacaugagcgccugcuggcaggauggaagauuuuucgcggagaaugaaacaugggugguugacuccuguaccacaugcaccuguaaaaaguucaaaaccaucugccaucagauuacaugucccccggccacgugcgcuagcccuucuuuuguggagggcgaguguugccccuccugccuccacagcgucgauggggaagagggauggucuccuugggccgaauggacccaauguagcgugacaugcggcuccggcacccagcagcgggggagaucuugugacgucacaagcaauaccugccugggacccuccauccagacgcgcgcuuguagccuuucuaagugcgauacacggaucagacaagacggcggguggucccauuggagccccuggucuuccuguagcgugaccugcggaguuggcaacauuacccgcauccggcuguguaacuccccugugccgcagaugggcgggaaaaacugcaagggaucuggcagagagacaaaagccugucagggggcccccugcccuauugauggacgcuggagccccugguccccuuggucugcuugcaccgucacaugugcgggcgggauccgggaaagaacgcgcgugugcaauagccccgagccgcaguauggaggcaaggccuguguuggggacgugcaagagcggcagaugugcaacaagagauccuguccugucgauggcugccucagcaaucccuguuucccuggagcucagugcagcuccuuucccgacggcagcuggucuuguggguccugcccugugggauuccugggcaacgggacccacugugaagaccuugaugagugcgcccuggugcccgacauuugcuuuagcacaucuaaaguuccgcgcugugucaauacccagccuggauuccacugccuccccugucccccucgguacagaggcaaccaaccggugggggugggccuggaagccgcuaagacagagaaacaggucugcgagcccgaaaauccuuguaaggauaaaacccauaacugccacaagcaugccgaguguaucuaccugggacacuuuagcgaccccauguauaagugcgaaugucagacgggcuacgcgggggauggacucaucugcggcgaggacuccgaucuggacggguggccuaaucuuaaccuggugugugcuaccaaugccacauaucauugcauuaaagauaacugcccccaccucccuaauagcggacaagaagacuucgauaaggacggcaucggggaugccugugacgacgaugacgauaacgacggcguuaccgaugagaaagacaacugccagcugcuguuuaauccccggcaggcugauuacgacaaggaugaggugggagaccgcugugauaacugcccguauguccacaauccugcccagauugacacagauaacaauggcgaaggggacgcuuguucuguggacaucgauggagacgauguuuucaacgagagagacaauugccccuacguguauaacaccgaucaacgggacacggauggcgacggggucggagaucauugugacaauugcccucuugugcacaaccccgaucagacagacguugacaaugaucucgugggcgaccagugugauaacaaugaagacauugaugacgauggccaucagaacaaucaagacaacugcccguacaucuccaacgccaaucaggcggaucacgacagagaugggcagggagacgccugugauccugacgacgauaacgacggcguccccgaugaccgcgauaauugccggcugguguuuaacccugaccaggaggaucuggacggggauggaagaggcgacaucugcaaagaugacuucgauaaugacaacauucccgacaucgaugacgugugucccgaaaauaacgcuauuagcgagaccgauuuucgcaauuuccaaauggucccucucgacccgaaggggacaacccagaucgaucccaacuggguuauuagacaccagggaaaggagcuggugcaaaccgccaauuccgacccuggcaucgcugugggcuucgaugaauuugggucugucgacuucagcggaacauuuuacgugaacacggaucgggacgaugacuaugccggcuucguuuuuggguaccaguccucuagccgcuucuauguggucauguggaaacaggugacccagacauacugggaggaccaacccaccagagcguauggauacuccggcguuucucuuaagguggucaauagcacaaccgggacgggagaacaucugcggaacgcccucuggcacacaggcaauaccccuggccaggugcgcacccuguggcaugaucccagaaacauuggguggaaagacuauacagcuuaccgguggcaccugacccaucgcccuaagacaggauacaucagaguucuugugcacgagggcaaacaggucauggccgauuccgggccgaucuaugaccagacguacgcuggaggccggcucgggcuguuuguguucagccaagaaaugguguauuuuucugaucugaaguacgagugccgcgacauuuga

SEQ ID NO: 7552 - RNA, 3519 nt, Artificial Sequence
  derived and/or modified sequence opt6 from TSP-2__Homo_sapiens__BAF85118
augguuuggagauuaguguuacuagcacuauggguauggccaaguacccaagcagggcaucaagauaaagauacuacauuugaucuauuuaguauuucuaacauaaauagaaaaacaauaggugcaaaacaauucagggguccugauccuggaguuccagccuaucguuuuguaagauuugauuauauaccaccuguaaacgccgaugacuuaucaaaaauaacaaaaauaaugagacaaaaagaaggcuuuuuucuaacugcacaacuuaaacaagauggaaaauccagagguacacuauuagcauuagaagggcccggauuaucacaaagacaauucgaaauuguaaguaaugggccugccgauacacuagauuugacguacuggauagauggaacaagacacguugugagcuuagaagaugucggauuagcagauucacaauggaaaaauguaacaguacagguugcaggugaaacauauuccuugcauguaggaugcgauuuaauagauucguuugccuuagaugaaccauucuacgaacaccuacaagcugaaaaaucacggauguauguagcaaaaggaagugcaagagagucacauuucagaggacuguuacaaaacguucacuuagucuuugagaauucagucgaggacauauuaucaaagaaagguugucaacaaggucaaggugcagaaauuaaugcuauaagugagaauacagaaacucuaagauuagguccgcauguaacaacggaauaugucgguccgagcagcgaaaggagaccagaaguuugugaaagaucaugcgaagaauugggaaauaugguccaagaauuaucaggauuacauguacugguaaaucagcuuucagaaaauuuaaaacgaguaucaaaugacaaucaauuuuuaugggaauuaauaggggguccaccuaaaacuagaaauaugucagcaugcuggcaagauggaagauucuucgcugaaaaugaaacauggguuguagauaguugcacaacaugcacaugcaaaaaauuuaaaacaaucugucaccaaauuacgugcccaccagcaacaugcgcaucaccaucauuuguagaaggagaaugcugucccuccugcuuacauucaguugauggugaagaaggauggaguccaugggcagaguggacacaauguaguguaacaugugguucgggaacgcaacaaagaggacgcucaugugauguaacaaguaacacuugucuugguccuucaauacaaacaagagcuugcucauuaucaaaaugugauacuaggaucagacaagacggaggauggucacacuggaguccaugguccuccuguuccgugacaugcggcgucggaaauauaacaagaauucgacuaugcaauuccccgguaccacaaaugggagguaaaaauuguaaagguaguggaagagagacaaaagcuugucaaggggcacccuguccaauagauggaagguggaguccaugguccccuuggucggcauguacuguaacaugugcggguggaauucgggaaagaacaagaguguguaacagcccugaaccacaguacggaggaaaggcauguguaggagacguacaggaacgucaaauguguaauaaaagaucaugucccgucgauggaugucuaucuaauccuuguuuuccaggcgcacaauguucuuccuuuccugauggaucauggucaugugguaguugcccagucggguuuuuagggaaugguacacauugugaagaccuagacgaaugcgcguuaguuccagauauauguuucaguaccucaaaagugccaagaugugugaauacacaaccuggauuucauugcuuaccauguccaccuagauauagaggcaaccaaccgguaggcguugguuuagaagccgcaaaaacugaaaaacagguuugugaaccugaaaauccuugcaaagacaaaacacauaauugccacaaacaugcagaguguauauaucugggucauuuuucagauccaauguauaagugugaaugccaaacaggguacgcaggagauggacuaauauguggugaggauucagaucuagauggcuggccuaaccuuaaucuaguaugugcaacaaaugcaacauaccauuguauaaaagacaauugcccucaucuuccaaacaguggccaagaagauuucgauaaagauggcauuggagaugcaugugacgaugaugacgacaaugauggugucacagacgaaaaagauaauugccaauuacuuuuuaaccccagacaagcagauuacgauaaagacgaaguaggagauagaugugauaauuguccauauguacauaauccggcacaaauagauacagacaacaacggagaaggugaugcauguuccguugauauagauggcgaugauguauucaacgaaagagauaacuguccuuauguuuacaacacggaucaacgagauacagauggcgacggaguaggagaucacugcgauaacuguccuuuaguacauaauccugaucaaacugauguagauaacgacuuaguaggagaucagugcgacaacaaugaagacauagaugaugauggccaucaaaauaaccaggauaauuguccauauaucucaaacgcaaaccaagcagaucacgauagagauggucagggggaugcaugcgacccagacgaugacaacgacggaguaccggaugaccgugauaauugucgucuuguauuuaauccagaucaagaagaucuagacggggacggaagaggagauauaugcaaagacgauuucgacaacgauaauauaccagauauugacgacguuuguccugaaaauaaugccauuagugaaacggacuuucguaacuuucaaaugguuccguuagauccaaaaggaacuacucaaauagauccaaacuggguaaucagacaucaaggaaaagaauuaguacaaacagccaauucagaccccggaauugcaguaggguuugaugaauucggaucaguagacuuuucaggaacauucuauguaaauaccgaucgugaugacgacuaugcaggauucguauuuggauaucaaaguucgaguagauuuuacguaguuauguggaaacaagucacccagacuuacugggaagaccaaccuacucgagcuuauggauauucuggggucaguuuaaagguaguuaauuccacuacuggaacgggugaacauuuaagaaaugcuuuauggcauacagggaacaccccaggacaggucagaacuuuauggcaugaucccaggaauauaggauggaaagacuauacagccuauagauggcaucuaacgcaucggccaaaaacuggauacauaagaguacuaguucacgaagguaagcaaguaauggcagacagcggaccuauauaugaccaaacuuacgcaggaggaagauuagguuuauucguuuucucccaggaaaugguauacuuuucggaucuaaaauaugaaugccgcgacaucuaa

SEQ ID NO: 7553 - protein, 1670 aa, Artificial Sequence
  Tumstatin__Homo_sapiens__Q01955
MSARTAPRPQVLLLPLLLVLLAAAPAASKGCVCKDKGQCFCDGAKGEKGEKGFPGPPGSPGQKGFTGPEGLPGPQGPKGFPGLPGLTGSKGVRGISGLPGFSGSPGLPGTPGNTGPYGLVGVPGCSGSKGEQGFPGLPGTLGYPGIPGAAGLKGQKGAPAKEEDIELDAKGDPGLPGAPGPQGLPGPPGFPGPVGPPGPPGFFGFPGAMGPRGPKGHMGERVIGHKGERGVKGLTGPPGPPGTVIVTLTGPDNRTDLKGEKGDKGAMGEPGPPGPSGLPGESYGSEKGAPGDPGLQGKPGKDGVPGFPGSEGVKGNRGFPGLMGEDGIKGQKGDIGPPGFRGPTEYYDTYQEKGDEGTPGPPGPRGARGPQGPSGPPGVPGSPGSSRPGLRGAPGWPGLKGSKGERGRPGKDAMGTPGSPGCAGSPGLPGSPGPPGPPGDIVFRKGPPGDHGLPGYLGSPGIPGVDGPKGEPGLLCTQCPYIPGPPGLPGLPGLHGVKGIPGRQGAAGLKGSPGSPGNTGLPGFPGFPGAQGDPGLKGEKGETLQPEGQVGVPGDPGLRGQPGRKGLDGIPGTPGVKGLPGPKGELALSGEKGDQGPPGDPGSPGSPGPAGPAGPPGYGPQGEPGLQGTQGVPGAPGPPGEAGPRGELSVSTPVPGPPGPPGPPGHPGPQGPPGIPGSLGKCGDPGLPGPDGEPGIPGIGFPGPPGPKGDQGFPGTKGSLGCPGKMGEPGLPGKPGLPGAKGEPAVAMPGGPGTPGFPGERGNSGEHGEIGLPGLPGLPGTPGNEGLDGPRGDPGQPGPPGEQGPPGRCIEGPRGAQGLPGLNGLKGQQGRRGKTGPKGDPGIPGLDRSGFPGETGSPGIPGHQGEMGPLGQRGYPGNPGILGPPGEDGVIGMMGFPGAIGPPGPPGNPGTPGQRGSPGIPGVKGQRGTPGAKGEQGDKGNPGPSEISHVIGDKGEPGLKGFAGNPGEKGNRGVPGMPGLKGLKGLPGPAGPPGPRGDLGSTGNPGEPGLRGIPGSMGNMGMPGSKGKRGTLGFPGRAGRPGLPGIHGLQGDKGEPGYSEGTRPGPPGPTGDPGLPGDMGKKGEMGQPGPPGHLGPAGPEGAPGSPGSPGLPGKPGPHGDLGFKGIKGLLGPPGIRGPPGLPGFPGSPGPMGIRGDQGRDGIPGPAGEKGETGLLRAPPGPRGNPGAQGAKGDRGAPGFPGLPGRKGAMGDAGPRGPTGIEGFPGPPGLPGAIIPGQTGNRGPPGSRGSPGAPGPPGPPGSHVIGIKGDKGSMGHPGPKGPPGTAGDMGPPGRLGAPGTPGLPGPRGDPGFQGFPGVKGEKGNPGFLGSIGPPGPIGPKGPPGVRGDPGTLKIISLPGSPGPPGTPGEPGMQGEPGPPGPPGNLGPCGPRGKPGKDGKPGTPGPAGEKGNKGSKGEPGPAGSDGLPGLKGKRGDSGSPATWTTRGFVFTRHSQTTAIPSCPEGTVPLYSGFSFLFVQGNQRAHGQDLGTLGSCLQRFTTMPFLFCNVNDVCNFASRNDYSYWLSTPALMPMNMAPITGRALEPYISRCTVCEGPAIAIAVHSQTTDIPPCPHGWISLWKGFSFIMFTSAGSEGTGQALASPGSCLEEFRASPFLECHGRGTCNYYSNSYSFWLASLNPERMFRKPIPSTVKAGELEKIISRCQVCMKKRH

SEQ ID NO: 7554 - RNA, 5013 nt, Artificial Sequence
  Tumstatin__Homo_sapiens__CCDS42829.1
augagcgcccggaccgcccccaggccgcaggugcuccugcugccgcuccugcuggugcuccuggcggcggcgcccgcagccagcaaggguugugucuguaaagacaaaggccagugcuucugugacggggccaaaggggagaagggggagaagggcuuuccuggaccccccgguucuccuggccagaaaggauucacagguccugaaggcuugccuggaccgcagggacccaagggcuuuccaggacuuccaggacucacggguuccaaagguguaaggggaauaaguggauugccaggauuuucugguucuccuggacuuccaggcaccccaggcaauaccgggccuuacggacuugucgguguaccaggaugcagugguucuaagggugagcagggguuuccaggacucccagggacacugggcuacccagggaucccgggugcugcugguuugaaaggacaaaagggugcuccugcuaaagaagaagauauagaacuugaugcaaaaggcgaccccggguugccaggggcuccaggaccccaggguuugccaggcccuccagguuuuccugggccuguuggcccaccugguccuccgggauucuuuggcuuuccaggagccaugggaccuagaggaccuaagggucacaugggugaaagagugauaggacauaaaggagagcggggugugaaaggguuaacaggacccccgggaccaccaggaacaguuauugugacccuaacuggcccagauaacagaacggaccucaagggggaaaagggagacaagggagcaaugggcgagccuggaccuccuggacccucaggacugccuggagaaucauauggaucugaaaagggugcuccuggagacccuggccugcagggaaaacccggaaaagaugguguuccuggcuucccuggaagugagggagucaagggcaacagggguuucccuggguuaaugggugaagauggcauuaagggacagaaaggggacauuggcccuccaggauuucgugguccaacagaauauuaugacacauaccaggaaaagggagaugaaggcacuccaggcccaccagggcccagaggagcucguggcccacaaggucccagugguccccccggaguuccuggaaguccuggaucaucaaggccuggccucagaggagccccuggauggccaggccugaaaggaaguaaaggggaacgaggccgcccaggaaaggaugccauggggacuccuggguccccagguugugcugguucaccaggucuuccaggaucaccgggaccuccaggaccgccaggugacaucguuuuucgcaaggguccaccuggagaucacggacugccaggcuaucuagggucuccaggaaucccaggaguugaugggcccaaaggagaaccaggccuccuguguacacagugcccuuauaucccagggccucccggucucccaggauugccaggguuacaugguguaaaaggaaucccaggaagacaaggcgcagcuggcuugaaaggaagcccaggguccccaggaaauacaggucuuccaggauuuccagguuucccaggugcccagggugacccaggacuuaaaggagaaaaaggugaaacacuucagccugaggggcaagugggugucccaggugacccggggcucagaggccaaccugggagaaagggcuuggauggaauuccuggaacuccgggagugaaaggauuaccaggaccuaaaggcgaacuggcucugaguggugagaaaggggaccaagguccuccaggggauccuggcuccccuggguccccaggaccugcaggaccagcuggaccaccuggcuacggaccccaaggagaaccuggucuccagggcacgcaaggaguuccuggagcccccggaccacccggagaagccggcccuaggggagagcucaguguuucaacaccaguuccaggcccaccaggaccuccagggcccccuggccauccuggcccccaagguccaccugguaucccuggaucccuggggaaauguggagauccuggucuuccagggccugauggugaaccaggaauuccaggaauuggauuuccugggccuccuggaccuaagggagaccaagguuuuccagguacaaaaggaucacuggguuguccuggaaaaaugggagagccuggguuaccuggaaagccaggccucccaggagccaagggagaaccagcaguagccaugccuggaggaccaggaacaccagguuuuccaggagaaagaggcaauucuggggaacauggagaaauuggacucccuggacuuccaggucucccuggaacuccaggaaaugaagggcuugauggaccacgaggagauccagggcagccuggaccaccuggagaacaaggacccccaggaaggugcauagagggucccaggggagcccaaggacuuccaggcuuaaauggauugaaagggcaacaaggcagaagagguaaaacggggccaaagggagacccaggaauuccaggcuuggauagaucaggauuuccuggagaaacuggaucaccaggaauuccaggucaucaaggugaaaugggaccacugggucaaagaggauauccaggaaauccgggaauuuuagggccaccaggugaagauggagugauugggaugaugggcuuuccuggagccauuggcccuccagggcccccugggaacccaggcacaccagggcagagggggagcccuggaauuccaggaguaaagggccagagaggaaccccaggagccaagggggaacaaggagauaaaggaaaucccgggccuucagagauaucccacguaauaggggacaaaggagaaccaggucucaaaggauucgcaggaaauccaggugagaaaggaaacagaggcguuccagggaugccagguuuaaagggccucaaaggacuacccggaccagcaggaccaccaggccccagaggagauuugggcagcacugggaauccuggagaaccaggacugcgugguauaccaggaagcauggggaacaugggcaugccagguucuaaaggaaaaaggggaacuuugggauucccaggucgagcaggaagaccaggccucccagguauucauggucuccagggagauaagggagagccagguuauucagaagguacaaggccaggaccaccgggaccaacgggggauccaggacugccgggugauaugggaaagaaaggagaaauggggcaaccuggcccaccuggacauuuggggccugcuggaccugagggagccccuggaaguccuggaaguccuggccucccaggaaagccagguccucauggugauuuggguuuuaaaggaaucaaaggccuccugggcccuccaggaaucagaggcccuccaggucuuccaggauuuccaggaucuccuggaccaauggguauaagaggugaccaaggacgugauggaauuccugguccagccggagaaaagggagaaacggguuuauugagggccccuccaggcccaagagggaacccuggugcucaaggagccaaaggagacaggggagccccagguuuuccuggccucccgggcagaaaaggggccaugggagaugcuggaccucgaggacccacaggcauagaaggauucccagggccaccaggucugcccggugcaauuaucccuggccagacaggaaaucgugguccaccaggcucaagaggaagcccaggugcgccuggucccccuggaccuccagggagucauguaauaggcauaaaaggagacaaagggucuaugggccacccuggcccaaaagguccaccuggaacugcaggagacaugggaccaccaggucgucugggagcaccagguacuccaggucuuccaggacccagaggugauccuggauuccagggguuuccaggcgugaaaggagaaaaggguaauccuggauuucuaggauccauuggaccuccaggaccaauugggccaaaaggaccaccugguguacguggagacccuggcacacuuaagauuaucucccuuccaggaagcccagggccaccuggcacaccuggagaaccagggaugcagggagaaccugggccaccagggccaccuggaaaccuaggacccugugggccaagagguaagccaggcaaggauggaaaaccaggaacuccuggaccagcuggagaaaaaggcaacaaagguucuaaaggagagccaggaccagcuggaucagauggauugccagguuugaaaggaaaacguggagacaguggaucaccugcaaccuggacaacgagaggcuuugucuucacccgacacagucaaaccacagcaauuccuucauguccagaggggacagugccacucuacaguggguuuucuuuucuuuuuguacaaggaaaucaacgagcccacggacaagaccuuggaacucuuggcagcugccugcagcgauuuaccacaaugccauucuuauucugcaaugucaaugauguauguaauuuugcaucucgaaaugauuauucauacuggcugucaacaccagcucugaugccaaugaacauggcucccauuacuggcagagcccuugagccuuauauaagcagaugcacuguuugugaagguccugcgaucgccauagccguucacagccaaaccacugacauuccuccauguccucacggcuggauuucucucuggaaaggauuuucauucaucauguucacaagugcagguucugagggcaccgggcaagcacuggccuccccuggcuccugccuggaagaauuccgagccagcccauuucuagaaugucauggaagaggaacgugcaacuacuauucaaauuccuacaguuucuggcuggcuucauuaaacccagaaagaauguucagaaagccuauuccaucaacugugaaagcuggggaauuagaaaaaauaauaagucgcugucaggugugcaugaagaaaagacacuga

SEQ ID NO: 7555 - RNA, 5013 nt, Artificial Sequence
  derived and/or modified sequence opt1 from Tumstatin__Homo_sapiens__CCDS42829.1
augagcgcccgcaccgccccccggccgcaggugcugcuccugccccugcuccugguccugcucgcggccgcccccgccgccuccaagggcugcgugugcaaggacaaggggcagugcuucugcgacggcgcgaagggggagaagggcgagaagggguuccccggcccgcccggcagccccgggcagaagggcuucaccgggcccgagggccugccggggccccagggccccaagggcuuccccgggcugccgggccucacgggguccaagggcgugcgcggcaucagcgggcugcccggcuucuccgggagccccggccugcccgggaccccgggcaacaccggccccuacgggcucgucggcgugcccgggugcuccggcagcaagggggagcagggcuuccccggccugccggggacccugggcuaccccgggauccccggcgccgccgggcucaagggccagaagggcgcccccgcgaaggaggaggacaucgagcuggacgccaagggggacccgggccugcccggggcccccggcccccagggccucccggggccccccggcuucccggggcccgugggcccccccgggccgcccggcuucuucggcuuccccggggccaugggcccccgggggccgaagggccacaugggggagcgcgucaucggccacaagggcgagcggggggugaagggccugacggggccccccggccccccggggaccgugaucgucacccugaccggccccgacaaccgcacggaccucaagggcgagaagggggacaagggcgccaugggggagcccggccccccggggcccuccggccugcccggcgagagcuacggguccgagaagggcgcgcccggggacccgggccugcagggcaagcccgggaaggacggcgugcccggguuccccggcagcgagggggugaagggcaaccggggcuucccggggcucaugggcgaggacgggaucaagggccagaagggggacaucggcccccccggcuuccgcgggccgaccgaguacuacgacaccuaccaggagaagggcgacgaggggacccccggcccccccgggccgcggggcgcccgcggcccccaggggcccuccggccccccggggguccccggcagccccggcuccagccggcccgggcugcgcggcgccccgggguggcccggccugaagggguccaagggcgagcggggccgccccgggaaggacgccaugggcacgcccgggagcccgggcugcgccgggucccccggccuccccggcagccccgggccgcccggcccccccggggacaucguguuccggaagggcccgcccggggaccacggccugcccggcuaccuggggagccccggcaucccggggguggacggccccaagggggagcccggccuccugugcacccagugcccguacauccccggcccccccgggcugccgggccuccccgggcugcacggcgucaagggcauccccgggcgccagggcgcggccgggcugaagggcucccccgggagcccgggcaacaccggccuccccggguuccccggcuuccccggggcccagggcgacccggggcugaagggcgagaagggcgagacccugcagcccgaggggcaggugggcgugcccggggaccccggccuccgggggcagccgggccgcaagggccuggacgggauccccggcacgcccggggucaagggccugcccgggccgaagggcgagcucgcccuguccggcgagaagggggaccagggcccccccggggaccccggcagcccgggcucccccgggcccgccggccccgcggggccgcccggcuacgggccccagggcgagccgggccugcaggggacccagggcgugcccggggcccccggccccccgggggaggccggcccccggggcgagcucagcguguccacccccguccccgggccgcccggcccccccgggccgcccggccaccccgggccccagggcccgcccggcauccccgggagccugggcaagugcggggaccccggccugccgggccccgacggggagcccggcauccccgggaucggcuucccggggccccccggcccgaagggcgaccagggguuccccggcaccaaggggucccucggcugccccgggaagaugggcgagcccggccugccggggaagcccggccugcccggggccaagggcgagcccgccguggcgaugccggggggccccggcacgcccggguuccccggcgagcgcgggaacagcggcgagcacggggagaucggccugccgggccuccccgggcugcccggcacccccgggaacgagggccuggacggcccgcggggggaccccggccagcccgggcccccgggcgagcaggggccccccggccgcugcaucgagggcccccgcggggcccagggccucccggggcugaacggccugaaggggcagcagggccggcgcggcaagaccgggcccaagggcgaccccgggauccccggccucgaccgguccggguucccgggcgagaccggcagccccgggauccccggccaccagggggagaugggcccgcugggccagcgcggguaccccggcaaccccgggauccugggccccccgggggaggacggcgugaucggcaugaugggguuccccggcgccaucgggccccccggcccgcccgggaaccccggcacgcccggccagcggggguccccgggcauccccggggucaagggccagcgcgggacccccggcgccaagggcgagcagggggacaagggcaaccccgggccgagcgagaucucccacgugaucggcgacaagggggagcccggccucaagggcuucgcggggaaccccggcgagaaggggaaccggggcguccccggcaugccggggcugaagggccugaaggggcuccccggccccgccgggcccccgggcccccgcggcgaccuggggagcaccggcaaccccggggagcccggccugcgggggaucccgggcuccaugggcaacauggggaugcccggcagcaaggggaagcgcggcacccucggguuccccggccgggccggccgcccggggcugcccggcauccacgggcugcagggcgacaagggcgagcccggguacuccgagggcacgcggcccgggccgcccggccccaccggggaccccggccucccgggcgacauggggaagaagggcgagauggggcagcccggcccccccgggcaccugggcccggccggccccgagggggcccccggcagccccgggagcccgggccugcccgggaagcccggcccccacggcgaccucggguucaagggcaucaaggggcugcugggcccgcccgggauccgcggcccccccggccucccgggguuccccggcucccccgggcccaugggcauccggggcgaccaggggcgcgacggcaucccggggcccgcgggcgagaagggggagaccggccugcugcgggcccccccgggcccccgcgggaaccccggcgcccagggggccaagggcgaccggggggcccccggcuucccgggccuccccgggcgcaagggcgcgaugggggacgccggcccccgcgggcccaccggcaucgagggcuucccggggccccccggccugcccggggccaucaucccgggccagacggggaaccggggcccccccggcagccgcgggucccccggcgccccggggccccccggccccccgggcagccacgugaucgggaucaagggcgacaagggguccaugggccaccccgggcccaagggccccccgggcaccgccggggacaugggcccccccgggcggcugggcgcgccggggacccccggccuccccggcccccgcggggacccgggcuuccagggguuccccggcgugaagggggagaagggcaaccccggcuuccuggggagcaucggccccccggggcccaucggccccaagggccccccggggguccggggcgaccccgggacccugaagaucaucucccuccccggcagccccgggccgcccggcacgcccggcgagcccgggaugcagggcgagccggggccccccggccccccggggaaccugggccccugcggcccccgcgggaagcccggcaaggacgggaagccgggcacccccgggcccgccggcgagaagggcaacaagggguccaagggcgagccggggcccgccggcagcgacgggcugcccggccucaagggcaagcggggggacuccggcagccccgccaccuggaccacccgcggguucguguucacgcggcacucccagaccaccgcgaucccgagcugccccgagggcaccgugccccuguacuccggcuucagcuuccuguucguccaggggaaccagcgcgcccacggccaggaccucgggacgcugggcuccugccugcagcgguucaccaccaugcccuuccucuucugcaacgugaacgacgugugcaacuucgccagccgcaacgacuacagcuacuggcuguccaccccggcccugaugcccaugaacauggcccccaucacggggcgggcgcucgagcccuacaucagccgcugcaccgucugcgagggcccggccaucgccaucgccgugcacucccagaccaccgacaucccccccugcccccacggcuggaucagccuguggaagggguucuccuucaucauguucacgagcgccggcuccgaggggaccggccaggcgcuggccagcccgggguccugccucgaggaguuccgggccagccccuuccuggagugccacggccgcggcaccugcaacuacuacuccaacagcuacuccuucuggcuggccagccucaaccccgagcggauguuccgcaagcccaucccguccaccgugaaggccggggagcuggagaagaucaucagccggugccaggucugcaugaagaagcgccacuga

SEQ ID NO: 7556 - RNA, 5013 nt, Artificial Sequence
  derived and/or modified sequence opt2 from Tumstatin__Homo_sapiens__CCDS42829.1
auguccgcccgcaccgccccccgcccccagguccuccuccucccccuccuccucguccuccucgccgccgcccccgccgccuccaagggcugcgucugcaaggacaagggccagugcuucugcgacggcgccaagggcgagaagggcgagaagggcuuccccggcccccccggcucccccggccagaagggcuucaccggccccgagggccuccccggcccccagggccccaagggcuuccccggccuccccggccucaccggcuccaagggcguccgcggcaucuccggccuccccggcuucuccggcucccccggccuccccggcacccccggcaacaccggccccuacggccucgucggcguccccggcugcuccggcuccaagggcgagcagggcuuccccggccuccccggcacccucggcuaccccggcauccccggcgccgccggccucaagggccagaagggcgcccccgccaaggaggaggacaucgagcucgacgccaagggcgaccccggccuccccggcgcccccggcccccagggccuccccggcccccccggcuuccccggccccgucggcccccccggcccccccggcuucuucggcuuccccggcgccaugggcccccgcggccccaagggccacaugggcgagcgcgucaucggccacaagggcgagcgcggcgucaagggccucaccggcccccccggcccccccggcaccgucaucgucacccucaccggccccgacaaccgcaccgaccucaagggcgagaagggcgacaagggcgccaugggcgagcccggcccccccggccccuccggccuccccggcgaguccuacggcuccgagaagggcgcccccggcgaccccggccuccagggcaagcccggcaaggacggcguccccggcuuccccggcuccgagggcgucaagggcaaccgcggcuuccccggccucaugggcgaggacggcaucaagggccagaagggcgacaucggcccccccggcuuccgcggccccaccgaguacuacgacaccuaccaggagaagggcgacgagggcacccccggcccccccggcccccgcggcgcccgcggcccccagggccccuccggcccccccggcguccccggcucccccggcuccucccgccccggccuccgcggcgcccccggcuggcccggccucaagggcuccaagggcgagcgcggccgccccggcaaggacgccaugggcacccccggcucccccggcugcgccggcucccccggccuccccggcucccccggcccccccggcccccccggcgacaucgucuuccgcaagggcccccccggcgaccacggccuccccggcuaccucggcucccccggcauccccggcgucgacggccccaagggcgagcccggccuccucugcacccagugccccuacauccccggcccccccggccuccccggccuccccggccuccacggcgucaagggcauccccggccgccagggcgccgccggccucaagggcucccccggcucccccggcaacaccggccuccccggcuuccccggcuuccccggcgcccagggcgaccccggccucaagggcgagaagggcgagacccuccagcccgagggccaggucggcguccccggcgaccccggccuccgcggccagcccggccgcaagggccucgacggcauccccggcacccccggcgucaagggccuccccggccccaagggcgagcucgcccucuccggcgagaagggcgaccagggcccccccggcgaccccggcucccccggcucccccggccccgccggccccgccggcccccccggcuacggcccccagggcgagcccggccuccagggcacccagggcguccccggcgcccccggcccccccggcgaggccggcccccgcggcgagcucuccgucuccacccccguccccggcccccccggcccccccggcccccccggccaccccggcccccagggcccccccggcauccccggcucccucggcaagugcggcgaccccggccuccccggccccgacggcgagcccggcauccccggcaucggcuuccccggcccccccggccccaagggcgaccagggcuuccccggcaccaagggcucccucggcugccccggcaagaugggcgagcccggccuccccggcaagcccggccuccccggcgccaagggcgagcccgccgucgccaugcccggcggccccggcacccccggcuuccccggcgagcgcggcaacuccggcgagcacggcgagaucggccuccccggccuccccggccuccccggcacccccggcaacgagggccucgacggcccccgcggcgaccccggccagcccggcccccccggcgagcagggcccccccggccgcugcaucgagggcccccgcggcgcccagggccuccccggccucaacggccucaagggccagcagggccgccgcggcaagaccggccccaagggcgaccccggcauccccggccucgaccgcuccggcuuccccggcgagaccggcucccccggcauccccggccaccagggcgagaugggcccccucggccagcgcggcuaccccggcaaccccggcauccucggcccccccggcgaggacggcgucaucggcaugaugggcuuccccggcgccaucggcccccccggcccccccggcaaccccggcacccccggccagcgcggcucccccggcauccccggcgucaagggccagcgcggcacccccggcgccaagggcgagcagggcgacaagggcaaccccggccccuccgagaucucccacgucaucggcgacaagggcgagcccggccucaagggcuucgccggcaaccccggcgagaagggcaaccgcggcguccccggcaugcccggccucaagggccucaagggccuccccggccccgccggcccccccggcccccgcggcgaccucggcuccaccggcaaccccggcgagcccggccuccgcggcauccccggcuccaugggcaacaugggcaugcccggcuccaagggcaagcgcggcacccucggcuuccccggccgcgccggccgccccggccuccccggcauccacggccuccagggcgacaagggcgagcccggcuacuccgagggcacccgccccggcccccccggccccaccggcgaccccggccuccccggcgacaugggcaagaagggcgagaugggccagcccggcccccccggccaccucggccccgccggccccgagggcgcccccggcucccccggcucccccggccuccccggcaagcccggcccccacggcgaccucggcuucaagggcaucaagggccuccucggcccccccggcauccgcggcccccccggccuccccggcuuccccggcucccccggccccaugggcauccgcggcgaccagggccgcgacggcauccccggccccgccggcgagaagggcgagaccggccuccuccgcgccccccccggcccccgcggcaaccccggcgcccagggcgccaagggcgaccgcggcgcccccggcuuccccggccuccccggccgcaagggcgccaugggcgacgccggcccccgcggccccaccggcaucgagggcuuccccggcccccccggccuccccggcgccaucauccccggccagaccggcaaccgcggcccccccggcucccgcggcucccccggcgcccccggcccccccggcccccccggcucccacgucaucggcaucaagggcgacaagggcuccaugggccaccccggccccaagggcccccccggcaccgccggcgacaugggcccccccggccgccucggcgcccccggcacccccggccuccccggcccccgcggcgaccccggcuuccagggcuuccccggcgucaagggcgagaagggcaaccccggcuuccucggcuccaucggcccccccggccccaucggccccaagggcccccccggcguccgcggcgaccccggcacccucaagaucaucucccuccccggcucccccggcccccccggcacccccggcgagcccggcaugcagggcgagcccggcccccccggcccccccggcaaccucggccccugcggcccccgcggcaagcccggcaaggacggcaagcccggcacccccggccccgccggcgagaagggcaacaagggcuccaagggcgagcccggccccgccggcuccgacggccuccccggccucaagggcaagcgcggcgacuccggcucccccgccaccuggaccacccgcggcuucgucuucacccgccacucccagaccaccgccauccccuccugccccgagggcaccgucccccucuacuccggcuucuccuuccucuucguccagggcaaccagcgcgcccacggccaggaccucggcacccucggcuccugccuccagcgcuucaccaccaugcccuuccucuucugcaacgucaacgacgucugcaacuucgccucccgcaacgacuacuccuacuggcucuccacccccgcccucaugcccaugaacauggcccccaucaccggccgcgcccucgagcccuacaucucccgcugcaccgucugcgagggccccgccaucgccaucgccguccacucccagaccaccgacaucccccccugcccccacggcuggaucucccucuggaagggcuucuccuucaucauguucaccuccgccggcuccgagggcaccggccaggcccucgccucccccggcuccugccucgaggaguuccgcgccucccccuuccucgagugccacggccgcggcaccugcaacuacuacuccaacuccuacuccuucuggcucgccucccucaaccccgagcgcauguuccgcaagcccauccccuccaccgucaaggccggcgagcucgagaagaucaucucccgcugccaggucugcaugaagaagcgccacuga

SEQ ID NO: 7557 - RNA, 5013 nt, Artificial Sequence
  derived and/or modified sequence opt3 from Tumstatin__Homo_sapiens__CCDS42829.1
augagcgccagaaccgcucccaggccucaggugcugcuccuuccacuguuguuaguccugcuagcagccgcgccggcugccuccaagggcugcguuuguaaagacaaggggcaaugcuucugugauggagcaaaaggugagaagggcgaaaaaggguuucccggaccuccaggcucucccggucagaagggguucacaggaccugagggccucccaggcccccaggggccuaagggauuuccaggucugccgggccuuacugggucaaaaggagugcggggcaucaguggucugcccggguucagcggauccccuggcuugccaggcacgcccgggaacaccggaccuuacggucucguaggcgugccagggugcucuggaucgaagggcgaacaggguuuucccgggcugccgggcacacugggauauccuggcauucccggggccgcuggacucaaaggucaaaagggcgcaccagccaaagaggaagacauagaguuagaugcuaagggggacccuggacugcccggcgccccagguccccaggggcuuccuggcccaccgggauuccccggcccugucgggccacccggaccuccagguuucuucggcuuucccggggcgaugggaccgcgcggcccuaagggucacaugggggagcgagugaucggccauaaaggagaacguggcguuaagggguugacuggaccacccggcccucccgguaccgugauugucacacugaccgggccagauaauagaacugaccuaaaaggagagaagggcgauaaaggugcaaugggcgaaccugggcccccaggaccgucaggccucccuggggagagcuacggaagugagaagggcgcccccggugacccagggcugcagggaaaacccggcaaggauggugugccuggcuucccaggguccgaaggaguaaagggcaacaggggguuucccggacuuaugggcgaggacgguaucaaagggcagaagggagauauuggcccuccggguuuccggggcccaacagaauauuacgacaccuaucaagagaaaggggaugaaggaacgcccggcccuccagggccccgcggagcuagaggcccucaggguccgucugggcccccaggaguuccuggcagccccggcuccucaaggccagggcugcggggagccccugguuggcccggcuugaaggggaguaaaggagagcgcggccgaccagguaaggacgcaauggggacuccgggaagcccuggcugugcuggcucucccgggcucccaggaucccccgguccuccaggcccucccggggacaucguguuuagaaagggaccgccaggcgaucacggucugcccggguacuuaggaucaccuggcauacccggcgucgacgggccaaaaggagagccuggucugcucugcacccagugucccuauaucccaggcccuccggggcuucccggacugccaggcuugcauggugugaaggggauuccuggaaggcagggcgccgcgggccuaaaagggagccccggaaguccagguaauacaggccugccuggguuccccggauucccgggcgcccaaggugauccagggcucaagggagaaaaaggcgagacucugcagccugaaggccagguggggguccccggagacccaggucuucggggccaacccgggcguaagggacuggauggcaucccugguaccccggggguuaagggcuugcccggaccaaaaggcgagcucgcacugucuggggaaaagggagaccaggguccucccggcgauccuggguccccaggaagccccggcccugcugguccagccgggcccccgggcuacggaccucagggcgagccaggguuacagggaacacaaggugugcccggcgcuccugggccacccggagaggccggcccgcgcggugaacugucgguaucuaccccugugcccgggccaccuggacccccaggacccccuggccacccagggccgcagggacccccuggcauuccagguucccuagggaaaugcggagaccccggccucccugguccagauggcgagcccgggaucccuggaauaggcuuuccggggccacccggaccuaagggcgaccaggguuuccccgggacgaaaggaucacugggcuguccagguaagaugggcgaaccugggcuucccggaaagccaggcuugccgggggcaaaaggagagccugccgucgcuaugcccggcgguccagggacucccggauuuccuggcgaaagaggcaacaguggggagcauggagagauuggucugccaggccuccccgggcugccuggaacaccgggcaaugaaggucuugaugggccaaggggagaccccggccagccuggcccacccggggagcaaggaccucccggucggugcaucgaaggcccacgaggggcgcagggacugccgggcuugaacggucucaaggggcagcagggacgcagaggcaaaaccggcccuaagggggaccccggcauuccaggucuggauaggagcggcuucccuggggagacuggaucccccggcaucccaggucaccaaggggagaugggaccuuuaggccagcggggcuaccccgggaauccgggaauccuggguccaccuggcgaagacggggugauuggaaugaugggcuuucccggugcaauagggccacccggaccuccgggcaacccaggcacacccgggcagcgcggaucuccugguauccccggcguuaaagggcagagaggaaccccaggcgccaagggugagcaaggggauaaaggaaauccuggccccagcgaaauuucacacgugaucggcgacaagggggagccaggacuaaaggguuucgcuggcaacccuggggaaaaaggaaauaggggcgucccggguaugcccgggcucaagggccugaaaggacuuccaggcccugccgggcccccaggaccucguggugauuugggcaguacggggaaccccggagagccgggccugcgggguauaccaggguccaugggcaauaugggaaugccuggcagcaaggggaaacgaggaacccucgguuuucccggcagagcagggaggccaggacugcccggcauucaugguuuacagggcgacaagggggagccuggauauucugaaggcacacgccccgggccaccuggaccgacuggcgaucccggucugccaggggacaugggaaagaaaggcgagaugggucagccugggcccccaggccaccuuggaccugccggccccgaaggggcuccgggaucaccuggcaguccagguuugcccgggaagccuggaccacauggcgaucucgguuucaaaggcaucaaggggcugcuaggacccccuggcauccgggggccacccggacugccgggcuuuccugguagccccgggccaaugggaauuagaggcgaccaaggcagggaugggauccccggaccugccggugagaaaggcgaaaccgggcuccugcgcgcaccacccggaccucgaggcaacccaggugcgcagggggcuaagggagaccggggcgccccgggcuuccccgggcuuccuggacguaagggugcaaugggcgaugccgggccaagaggacccacaggcauugaggguuuuccugggccacccggauugccgggcgcuauaaucccuggccagacugggaauaggggaccacccgguucccgcggcucuccuggggcccccggaccaccgggcccucccgguucgcacgugauugggaucaaaggagacaagggcagcaugggccacccagggcccaaaggaccuccagguaccgcaggcgacauggggcccccuggacggcugggcgcuccagguacaccgggguuacccggaccuagaggcgauccaggcuuccagggguuucccggaguaaagggugagaaaggcaacccuggguuccucggauccaucggcccacccgguccuauugggccgaagggacccccaggcguuaggggcgacccugggacccugaagauaaucucacuucccggaaguccagguccucccggcacuccaggggaaccgggaaugcaaggcgagccuggucccccagggcccccuggcaaccugggaccauguggcccccgagggaaaccuggaaaggaugguaaaccgggcacgcccgggccagccggagaaaagggcaauaaagguucuaagggggagccuggccccgcgggaagcgacggcuugccagggcucaaaggaaagcgcggugauuccggcagcccugccacauggaccacucggggguucguguuuaccagacauucacagacaaccgcuauucccucuugcccagaaggaacugucccgcuguacuccggcuucaguuuucuauucgugcaggguaaccagagggcacacggccaagaccuggggacacucggaagcugccugcagcguuuuacgaccaugccuuucuuguuuuguaaugucaacgaugugugcaauuucgccucucgcaacgacuauuccuacuggcuuucaacucccgcucugaugccaaugaauauggccccuaucacaggccgggcauuagagcccuauauuaguagauguaccguuugcgaggggccagcgaucgccauagcugugcauagccagacaacugauaucccucccuguccgcacggauggauuucgcucuggaagggcuuuuccuucaucauguuuaccucugccgguagcgaagggacgggacaggcacuggcuucaccaggcaguugccuugaggaauuuagggccucccccuuucuggagugucauggucgagggaccugcaacuacuauucuaauagcuacuccuucuggcuagcaucacucaacccugagcggauguuccgcaaaccaauucccagcacaguaaaggccggcgaacuggagaaaaucauaaguagaugucaagucugcaugaagaaaaggcacuga

SEQ ID NO: 7558 - RNA, 5013 nt, Artificial Sequence
  derived and/or modified sequence opt4 from Tumstatin__Homo_sapiens__CCDS42829.1
augagcgccagaaccgcccccagaccccaggugcugcugcugccccugcugcuggugcugcuggccgccgcccccgccgccagcaagggcugcgugugcaaggacaagggccagugcuucugcgacggcgccaagggcgagaagggcgagaagggcuuccccggcccccccggcagccccggccagaagggcuucaccggccccgagggccugcccggcccccagggccccaagggcuuccccggccugcccggccugaccggcagcaagggcgugagaggcaucagcggccugcccggcuucagcggcagccccggccugcccggcacccccggcaacaccggccccuacggccuggugggcgugcccggcugcagcggcagcaagggcgagcagggcuuccccggccugcccggcacccugggcuaccccggcauccccggcgccgccggccugaagggccagaagggcgcccccgccaaggaggaggacaucgagcuggacgccaagggcgaccccggccugcccggcgcccccggcccccagggccugcccggcccccccggcuuccccggccccgugggcccccccggcccccccggcuucuucggcuuccccggcgccaugggccccagaggccccaagggccacaugggcgagagagugaucggccacaagggcgagagaggcgugaagggccugaccggcccccccggcccccccggcaccgugaucgugacccugaccggccccgacaacagaaccgaccugaagggcgagaagggcgacaagggcgccaugggcgagcccggcccccccggccccagcggccugcccggcgagagcuacggcagcgagaagggcgcccccggcgaccccggccugcagggcaagcccggcaaggacggcgugcccggcuuccccggcagcgagggcgugaagggcaacagaggcuuccccggccugaugggcgaggacggcaucaagggccagaagggcgacaucggcccccccggcuucagaggccccaccgaguacuacgacaccuaccaggagaagggcgacgagggcacccccggcccccccggccccagaggcgccagaggcccccagggccccagcggcccccccggcgugcccggcagccccggcagcagcagacccggccugagaggcgcccccggcuggcccggccugaagggcagcaagggcgagagaggcagacccggcaaggacgccaugggcacccccggcagccccggcugcgccggcagccccggccugcccggcagccccggcccccccggcccccccggcgacaucguguucagaaagggcccccccggcgaccacggccugcccggcuaccugggcagccccggcauccccggcguggacggccccaagggcgagcccggccugcugugcacccagugccccuacauccccggcccccccggccugcccggccugcccggccugcacggcgugaagggcauccccggcagacagggcgccgccggccugaagggcagccccggcagccccggcaacaccggccugcccggcuuccccggcuuccccggcgcccagggcgaccccggccugaagggcgagaagggcgagacccugcagcccgagggccaggugggcgugcccggcgaccccggccugagaggccagcccggcagaaagggccuggacggcauccccggcacccccggcgugaagggccugcccggccccaagggcgagcuggcccugagcggcgagaagggcgaccagggcccccccggcgaccccggcagccccggcagccccggccccgccggccccgccggcccccccggcuacggcccccagggcgagcccggccugcagggcacccagggcgugcccggcgcccccggcccccccggcgaggccggccccagaggcgagcugagcgugagcacccccgugcccggcccccccggcccccccggcccccccggccaccccggcccccagggcccccccggcauccccggcagccugggcaagugcggcgaccccggccugcccggccccgacggcgagcccggcauccccggcaucggcuuccccggcccccccggccccaagggcgaccagggcuuccccggcaccaagggcagccugggcugccccggcaagaugggcgagcccggccugcccggcaagcccggccugcccggcgccaagggcgagcccgccguggccaugcccggcggccccggcacccccggcuuccccggcgagagaggcaacagcggcgagcacggcgagaucggccugcccggccugcccggccugcccggcacccccggcaacgagggccuggacggccccagaggcgaccccggccagcccggcccccccggcgagcagggcccccccggcagaugcaucgagggccccagaggcgcccagggccugcccggccugaacggccugaagggccagcagggcagaagaggcaagaccggccccaagggcgaccccggcauccccggccuggacagaagcggcuuccccggcgagaccggcagccccggcauccccggccaccagggcgagaugggcccccugggccagagaggcuaccccggcaaccccggcauccugggcccccccggcgaggacggcgugaucggcaugaugggcuuccccggcgccaucggcccccccggcccccccggcaaccccggcacccccggccagagaggcagccccggcauccccggcgugaagggccagagaggcacccccggcgccaagggcgagcagggcgacaagggcaaccccggccccagcgagaucagccacgugaucggcgacaagggcgagcccggccugaagggcuucgccggcaaccccggcgagaagggcaacagaggcgugcccggcaugcccggccugaagggccugaagggccugcccggccccgccggcccccccggccccagaggcgaccugggcagcaccggcaaccccggcgagcccggccugagaggcauccccggcagcaugggcaacaugggcaugcccggcagcaagggcaagagaggcacccugggcuuccccggcagagccggcagacccggccugcccggcauccacggccugcagggcgacaagggcgagcccggcuacagcgagggcaccagacccggcccccccggccccaccggcgaccccggccugcccggcgacaugggcaagaagggcgagaugggccagcccggcccccccggccaccugggccccgccggccccgagggcgcccccggcagccccggcagccccggccugcccggcaagcccggcccccacggcgaccugggcuucaagggcaucaagggccugcugggcccccccggcaucagaggcccccccggccugcccggcuuccccggcagccccggccccaugggcaucagaggcgaccagggcagagacggcauccccggccccgccggcgagaagggcgagaccggccugcugagagccccccccggccccagaggcaaccccggcgcccagggcgccaagggcgacagaggcgcccccggcuuccccggccugcccggcagaaagggcgccaugggcgacgccggccccagaggccccaccggcaucgagggcuuccccggcccccccggccugcccggcgccaucauccccggccagaccggcaacagaggcccccccggcagcagaggcagccccggcgcccccggcccccccggcccccccggcagccacgugaucggcaucaagggcgacaagggcagcaugggccaccccggccccaagggcccccccggcaccgccggcgacaugggcccccccggcagacugggcgcccccggcacccccggccugcccggccccagaggcgaccccggcuuccagggcuuccccggcgugaagggcgagaagggcaaccccggcuuccugggcagcaucggcccccccggccccaucggccccaagggcccccccggcgugagaggcgaccccggcacccugaagaucaucagccugcccggcagccccggcccccccggcacccccggcgagcccggcaugcagggcgagcccggcccccccggcccccccggcaaccugggccccugcggccccagaggcaagcccggcaaggacggcaagcccggcacccccggccccgccggcgagaagggcaacaagggcagcaagggcgagcccggccccgccggcagcgacggccugcccggccugaagggcaagagaggcgacagcggcagccccgccaccuggaccaccagaggcuucguguucaccagacacagccagaccaccgccauccccagcugccccgagggcaccgugccccuguacagcggcuucagcuuccuguucgugcagggcaaccagagagcccacggccaggaccugggcacccugggcagcugccugcagagauucaccaccaugcccuuccuguucugcaacgugaacgacgugugcaacuucgccagcagaaacgacuacagcuacuggcugagcacccccgcccugaugcccaugaacauggcccccaucaccggcagagcccuggagcccuacaucagcagaugcaccgugugcgagggccccgccaucgccaucgccgugcacagccagaccaccgacaucccccccugcccccacggcuggaucagccuguggaagggcuucagcuucaucauguucaccagcgccggcagcgagggcaccggccaggcccuggccagccccggcagcugccuggaggaguucagagccagccccuuccuggagugccacggcagaggcaccugcaacuacuacagcaacagcuacagcuucuggcuggccagccugaaccccgagagaauguucagaaagcccauccccagcaccgugaaggccggcgagcuggagaagaucaucagcagaugccaggugugcaugaagaagagacacuga

SEQ ID NO: 7559 - RNA, 5013 nt, Artificial Sequence
  derived and/or modified sequence opt5 from Tumstatin__Homo_sapiens__CCDS42829.1
augagcgccagaaccgcuccccggccucaggugcugcuccugccgcuucugcucguccugcuugccgcggcucccgccgccuccaagggcugcguuuguaaagacaaggggcaaugcuucugugauggagcuaaaggcgagaagggggaaaaaggauuuccuggacccccugggucucccggacagaagggcuucacaggcccugaggggcugccgggaccccagggcccuaagggguuucccggacucccuggccugacggggagcaaaggagugcgcggcaucuccggccugcccggguucucuggaagcccgggccucccugggacccccggaaacacaggcccuuacgggcuggugggaguccccggcugcuccggcucuaagggggaacagggauuucccggccuuccugggacccugggauauccgggcauucccggggccgcuggccucaaaggacaaaagggcgccccugcgaaagaggaagacaucgagcuggaugccaagggggaccccggacuuccuggcgcucccgggccgcagggacugccugggcccccuggcuuccccggcccugugggacccccgggcccucccggguuuuucggauuucccggcgccauggggccuagaggaccgaagggccacaugggggagcggguuauuggccauaaaggagaacgcggcgugaaggggcucacaggacccccugggcccccuggcaccgucaucgugacacugaccggacccgauaauagaacggaccugaaaggcgagaagggggauaaaggcgcuaugggagaaccugggcccccgggcccuagcggacuccccggcgaguccuacgggagcgagaagggagccccuggcgaccccggccugcaggggaaaccgggaaaggauggcguuccuggguuccccggaucugaaggcgugaaggggaaccggggauuuccuggccuuaugggcgaggacgggauuaaaggacagaagggcgauaucgggccgcccggauuccgcggcccuaccgaauauuacgacacauaucaagagaaaggggaugaaggaaccccggggcccccuggccccagaggcgcgcggggaccucagggccccuccgggccuccgggaguccccggcagcccugggucuucccgccccggacugagaggcgccccuggcuggcccgggcucaagggaagcaaaggcgagcgggggcgcccgggaaaggacgcuaugggcacaccugggucucccggaugugccggcucccccggccugccugggagccccggaccuccggggcccccuggcgacaucguguuuagaaagggacccccuggcgaucacgggcuucccggauaccugggcuccccgggcauuccugggguggacggacccaaaggcgagccugggcuccugugcacccagugucccuauaucccuggacccccgggccugccugggcuccccggacugcauggcgucaagggcauucccgggcggcagggagcugccggccuuaaagggucuccuggaagcccgggcaauacggggcugcccggcuucccuggauuccccggcgcccaaggggauccuggacucaagggcgaaaaaggggagacacugcagcccgaaggacagguuggcgugccuggggacccgggccuucgcggacaacccggcagaaaggggcuggauggaaucccuggcacccccggggugaagggacucccuggccccaaaggggagcuggcucuguccggcgaaaagggagaccagggcccgccuggggaucccggaagccccggcucuccugggcccgcgggaccugccggcccgcccggcuacgggccucagggagagcccggccuccaggggacacaaggagucccuggcgcucccgggccgccuggagaggccggcccccggggcgaacuguccgugagcaccccuguucccgggccucccggaccgccuggcccucccgggcaccccggaccgcaggggcccccuggcauucccggaucucuuggcaaaugcggcgacccugggcugcccggaccugauggcgagcccgggaucccgggaauuggcuuuccugggcccccuggacccaagggcgaccagggcuucccggggaccaaaggaagccucggcuguccugggaagaugggagaacccggccugcccgggaagccuggacugcccggcgccaaaggcgagccugcuguggccaugcccgggggacccggcacaccuggguuucccggagaaagaggcaacuccggggagcauggagagaucggccuuccuggccuccccgggcugccuggaacgccgggcaaugaagggcuggauggaccccgcggcgacccugggcagcccggaccucccggcgagcaaggcccgccugggcggugcaucgaaggacccagaggcgcgcaggggcuccccggacugaacggccuuaaggggcagcagggccgccggggaaaaaccggcccuaagggggaccccggcauuccuggccuggauagaucuggguucccgggagagacaggcagccccgggaucccuggccaccaaggagagaugggcccccucgggcagcgcggauacccuggcaaucccgggauucugggaccgccuggcgaagacggggucaucggcaugaugggauuucccggcgcuauugggccucccggaccgccuggcaaccccgggacccccggacagcggggcuccccugggauccccggcgugaaaggacagagaggcacaccuggggccaagggagagcaaggcgauaaagggaauccgggacccagcgaaaucucucacguuauuggcgacaagggcgagccugggcugaagggauucgccggcaaccccggggaaaaaggaaaucgcggcgugccugggaugcccggacuuaagggccucaaaggccugccugggccggcuggacccccuggccccagaggggaucugggauccaccggcaacccuggggagcccggacuccggggcaucccgggcagcauggggaauaugggaaugccuggcucuaaggggaaacgcggaacgcugggcuuucccgggcgggccggaagacccggccuuccuggcauucaugggcugcagggagacaagggcgagcccggguauuccgaaggaacacggccuggcccgcccgggccuaccggagaucccggccucccuggcgacauggggaagaaaggagagaugggccagcccgggccgccuggacaccugggccccgcugggccugaaggagcccccggcagcccuggcucccccgggcugccgggaaagcccggcccucauggggaucuuggauucaaaggcaucaaggggcuccugggacccccuggcauucgcggcccgcccgggcugccuggauuucccggcucuccugggcccaugggaaucagaggcgaccaagggcgggauggcaucccuggacccgcgggcgagaaaggggaaaccggacuccugagagccccgccuggcccccgcgggaacccuggagcucagggcgccaagggggaccggggcgcucccggauucccgggccuuccugggagaaagggagccaugggcgaugcggggccccgcggacccacaggcauugagggguuuccuggacccccuggccugccgggcgccaucauucccgggcagaccggaaauagaggcccucccgggagccggggauccccuggcgcucccgggccgccuggacccccuggcucucacgucaucggcauuaaaggggacaagggaagcaugggccaccccgggccuaaaggacccccgggcacagccggcgacauggggcccccuggacgccucggcgcucccgggacgccuggacugcccggcccuagaggggauccgggauuccagggcuuucccggcgugaagggggagaaaggaaacccuggcuuccugggguccaucggacccccuggccccauugggccgaagggaccucccggcguccggggcgacccugggacccuuaagaucaucagccuccccggaucuccgggcccucccgggacacccggagaaccuggcaugcaaggggagcccggaccuccggggcccccuggcaaccugggccccuguggaccucgcggcaaacccgggaaggauggaaaaccuggcaccccggggcccgccggagaaaagggcaauaaaggcuccaagggggagccuggacccgccggcagcgacgggcugccuggacucaaaggcaagagaggggauucuggaucccccgcuacauggaccacgcggggcuucguguuuacccgccauagccagacaaccgcgauuccgucuugccccgaaggcacaguuccucuguacagcggguucuccuuucuuuucgugcagggaaaccagagagcccacggccaagaccuggggacccucggaagcugccugcagcgguuuacgacaaugcccuuccuguuuuguaaugucaacgaugugugcaauuucgcuucucgcaacgacuauuccuacuggcuuagcaccccugcccugaugcccaugaauauggccccuaucacaggcagagcucucgagccguauauuucccgguguaccguuugcgaggggcccgccaucgcgauugcugugcauucucagaccacagauaucccucccuguccucacggauggaucagccuguggaagggcuuuuccuucauuauguuuacgucugccggcagcgaagggaccggacaggcccucgcuucccccggcucuugccuggaggaguucagagccagcccguuucuugaaugucaugggcgcggaacaugcaacuacuauuccaauagcuacucuuucuggcuggcgucccucaacccugagcggauguucagaaaacccaucccuagcaccgucaaggcuggcgaacuggagaaaauuaucucucgcugucaagugugcaugaagaaacggcacuga

SEQ ID NO: 7560 - RNA, 5013 nt, Artificial Sequence
  derived and/or modified sequence opt6 from Tumstatin__Homo_sapiens__CCDS42829.1
augagugcucggacggcgccaagaccucagguguuguuguugccuuuacuuuuggucuuauuggcagccgcaccggcagcgucuaaaggcuguguuuguaaagauaaggggcagugcuucugcgauggagcuaaaggugagaaaggagaaaaaggauuuccaggacccccaggaucaccagggcaaaaagguuucacgggcccugaaggauuaccugggccacaagguccgaaaggauucccgggauuaccuggacuaacugguucgaaaggugucagaggaauaucaggacuuccaggauuuucagguucacccggacuuccaggaacaccuggcaacacaggaccauauggauuagucggcguaccuggguguaguggaucuaaaggagagcaaggauuuccgggcuugccaggaacuuuaggcuauccaggcauaccuggagcagcuggacugaaaggacaaaaaggugcuccagcaaaagaagaagauauagaacuagaugccaaaggagacccaggguuaccgggagcacccggaccacagggacuaccugggccgccaggauucccaggaccaguagguccaccugguccaccgggauuuuuuggguuuccaggcgcaauggguccucgagggcccaaaggacacaugggcgaaagagugauaggucacaaaggggagagaggcguuaaggguuuaacaggcccaccagguccaccagguacgguaauuguaacacuaaccggacccgauaauaggacagauuugaaaggagaaaaaggagacaaaggcgcaaugggagaaccaggaccaccaggaccaaguggccuaccuggagaaaguuauggaagcgaaaagggagcaccaggagauccaggacuacaaggaaaaccagggaaagauggagucccaggauucccaggguccgaaggaguaaaggggaauaggggauuuccaggacugaugggagaagacggaaucaaaggucaaaaaggugauauaggacccccgggauucagaggacccacagaguauuacgauacauaucaggaaaaaggcgacgaaggaacucccgguccacccggaccaagaggagcgagggguccacaaggaccaucuggaccaccaggaguuccagguucgccaggaaguucucgaccaggacuaagaggagcuccuggguggccaggguugaaaggauccaagggugagagagggagaccaggcaaggacgcgauggguacaccaggaucgccggggugcgcaggaucaccggguuugccaggauccccaggcccaccgggaccacccggagauauaguauucaggaaaggcccaccgggggaucauggauuaccaggauauuuggggaguccugguauccccggaguugacgggcccaaaggggaaccaggacuuuuguguacacaauguccauauauuccgggucccccgggacuucccggacuuccaggacuacauggcgugaaagggauaccagggcgacaaggugcagccggccuaaaaggaucaccgggauccccaggaaauacuggucucccagguuucccaggauuuccuggagcgcagggagaccccggauuaaaaggcgaaaaaggagaaacucuacagccugaaggacaaguaggaguuccuggagacccuggucuuagaggacaaccaggaaggaaaggacucgacgguauacccgggaccccgggaguuaaaggacuaccuggucccaaaggugagcuugcacuuucuggagaaaagggcgaucagggaccgccaggagaucccgggaguccagggucaccaggaccagcugguccagcaggaccgccuggauacgguccacaaggagagccugggcuacaaggaacacaaggggugccaggugcaccaggaccuccuggggaagcaggaccgagaggagaauuaagcgugucuacuccagugccaggaccuccaggaccaccggggccaccuggucaucccgguccucaaggacccccaggaaucccggguucauuaggaaaauguggugacccaggauuaccuggaccagauggagaaccgggaauuccaggaauaggauuuccaggcccuccaggaccuaaaggagaccaagguuuuccaggaaccaaagguaguuuagguugcccaggaaaaaugggcgaaccaggucuaccggguaaaccaggacuaccuggcgcgaagggugaaccagcuguagccaugccggguggacccggaacaccugguuuuccgggcgaacguggaaacucgggagagcacggagagauuggucucccaggauuaccaggacuaccaggcacaccagguaacgaaggacuggaugguccacgcggugacccaggacaaccugggccaccaggggaacaaggaccaccuggaagguguauagagggucccagaggcgcucaaggacuaccuggauuaaaugguuuaaagggucagcaaggcagaagagguaaaacagggccaaagggcgacccagguauacccggauuggacagaucugguuuuccuggagaaacagguucuccggguauuccgggccaccaaggugaaaugggcccguuaggacagagggguuacccugguaaccccgggauccuagguccgccuggagaggaugguguaauagggaugaugggauuuccuggagcuauaggaccacccggaccaccaggaaauccuggcacaccuggacagcgcgggucaccaggaauaccuggcguaaaaggccaaagaggaaccccaggggcaaaaggagaacaaggagacaaaggcaauccgggaccgucggaaauaucucauguaaucggagacaaaggugaacccgggcuuaaagguuuugccggcaauccgggagaaaaaggaaauagaggugucccaggcaugccagguuuaaaagguuugaaaggauuacccggaccagccgggccgccugguccgagaggagacuuagggucuacggggaacccaggagaaccaggccuuagaggaauaccagguuccaugggaaauauggggaugccuggaaguaaaggaaaaagagguacguuaggguuucccggaagggcuggacgaccgggauuacccgggauacauggucuucagggagauaagggagaaccaggauacucagaagguacuagaccuggaccaccaggucccacgggagacccgggucuacccggcgauaugggaaaaaaaggagaaaugggccaaccugguccgccuggucaucugggcccagcaggaccagagggugcaccaggaagcccagguucaccaggccuaccgggaaaaccuggaccacauggugauuuaggauuuaaaggaauaaaaggauuacuaggaccaccuggcauacgugguccaccaggauugcccggcuuuccaggaucuccagguccaauggggauuagaggagaucaagguagagacggaauaccggggccagcgggugaaaaaggagaaacagguuuauuacgagcuccgccaggaccgcgggggaacccgggggcacaaggagcaaaaggagauagaggugcaccgggauuuccaggacugccaggucguaaaggagcgaugggggaugccggacccagaggcccuacggggauagaaggcuuccccgguccuccgggucuucccggugcaauaauaccaggacaaacaggaaaccguggacccccagggaguagagguucuccuggagcaccaggaccuccgggaccaccaggaagucauguuaucggcauaaagggcgacaaaggcaguaugggacauccaggaccuaaaggaccuccagguacagccggagauauggguccaccagggaggcuaggugccccgggaacuccgggacuuccaggacccagaggagauccaggauuucagggcuucccuggaguuaaaggagaaaaaggcaauccuggauucuuagggucuauaggaccaccagggccaauagggccgaaaggaccaccaggagugagaggagacccuggaacccuuaaaauaauaaguuuacccggauccccugguccacccgggacuccaggagaaccagguaugcaaggagaaccgggaccaccaggcccgccaggcaaucuagguccuuguggacccagggggaaaccugggaaggauggaaagccaggaaccccaggaccggccggggagaaagguaauaaagguaguaaaggggagcccggaccagcagggagcgacggauuaccaggccuaaaggguaaaagaggggacucagguucaccggcuacuuggacgaccagaggcuuuguguucacuagacacucacagacuacagcuauucccucuuguccagaggguacagucccacuauauagugguuuuucauuccuuuuuguacaaggaaaucaaagggcacaugggcaggaucuuggaacgcuagggucgugucugcaaagauucacuaccaugcccuuucuauuuuguaacgucaaugauguauguaauuuugcgucaagaaaugauuauagcuacugguugucaaccccugcauugaugccgaugaacauggcgcccaucacagguagagcacuagaaccguacauaucuagauguacuguaugugaaggaccugcaaucgcaauugcagugcauucacaaacaacugauauuccuccaugcccucacggguggauuucguuguggaaaggauucucauucauaauguuuacaucugcgggaucagaaggaacaggucaagcacuugccucuccgggaaguuguuuggaggaauuucgcgcaucgccuuuucuagaaugucaugguagaggaacuuguaacuauuauagcaauagcuacagcuuuuggcuagcuucauugaauccggaaaggauguuuagaaaaccaauuccuucaacuguuaaagcaggugaauuggagaaaauaauuucaagaugccaaguguguaugaaaaagcgccacuaa

SEQ ID NO: 7561 - protein, 457 aa, Artificial Sequence
  Vasostatin__Homo_sapiens__P10645
MRSAAVLALLLCAGQVTALPVNSPMNKGDTEVMKCIVEVISDTLSKPSPMPVSQECFETLRGDERILSILRHQNLLKELQDLALQGAKERAHQQKKHSGFEDELSEVLENQSSQAELKEAVEEPSSKDVMEKREDSKEAEKSGEATDGARPQALPEPMQESKAEGNNQAPGEEEEEEEEATNTHPPASLPSQKYPGPQAEGDSEGLSQGLVDREKGLSAEPGWQAKREEEEEEEEEAEAGEEAVPEEEGPTVVLNPHPSLGYKEIRKGESRSEALAVDGAGKPGAEEAQDPEGKGEQEHSQQKEEEEEMAVVPQGLFRGGKSGELEQEEERLSKEWEDSKRWSKMDQLAKELTAEKRLEGQEEEEDNRDSSMKLSFRARAYGFRGPGPQLRRGWRPSSREDSLEAGLPLQVRGYPEEKKEEEGSANRRPEDQELESLSAIEAELEKVAHQLQALRRG

SEQ ID NO: 7562 - RNA, 1374 nt, Artificial Sequence
  Vasostatin__Homo_sapiens__AAH01059
augcgcuccgccgcuguccuggcucuucugcucugcgccgggcaagucacugcgcucccugugaacagcccuaugaauaaaggggauaccgaggugaugaaaugcaucguugaggucaucuccgacacacuuuccaagcccagccccaugccugucagccaggaauguuuugagacacuccgaggagaugaacggauccuuuccauucugagacaucagaauuuacugaaggagcuccaagaccucgcucuccaaggcgccaaggagagggcacaucagcagaagaaacacagcgguuuugaagaugaacucucagagguucuugagaaccagagcagccaggccgagcugaaagaggcgguggaagagccaucauccaaggauguuauggagaaaagagaggauuccaaggaggcagagaaaaguggugaagccacagacggagccaggccccaggcccucccggagcccaugcaggaguccaaggcugaggggaacaaucaggccccuggggaggaagaggaggaggaggaggaggccaccaacacccacccuccagccagccuccccagccagaaauacccaggcccacaggccgagggggacagugagggccucucucagggucugguggacagagagaagggccugagugcagagccaggguggcaggcaaagagagaagaggaggaggaggaggaggaggaggcugaggcuggagaggaggcuguccccgaggaagaaggccccacuguagugcugaacccccacccgagccuuggcuacaaggagauccggaaaggcgagagucggucggaggcucuggcuguggauggagcugggaagccuggggcugaggaggcucaggaccccgaagggaagggagaacaggagcacucccagcagaaagaggaggaggaggagauggcaguggucccgcaaggccucuuccggggugggaagagcggagagcuggagcaggaggaggagcggcucuccaaggagugggaggacuccaaacgcuggagcaagauggaccagcuggccaaggagcugacggcugagaagcggcuggaggggcaggaggaggaggaggacaaccgggacaguuccaugaagcucuccuuccgggcccgggccuacggcuucaggggcccugggccgcagcugcgacgaggcuggaggccauccucccgggaggacagccuugaggcgggccugccccuccagguccgaggcuaccccgaggagaagaaagaggaggagggcagcgcaaaccgcagaccagaggaccaggagcuggagagccugucggccauugaggcagagcuggagaaaguggcccaccagcugcaggcacuacggcggggcuga

SEQ ID NO: 7563 - RNA, 1374 nt, Artificial Sequence
  derived and/or modified sequence opt1 from Vasostatin__Homo_sapiens__AAH01059
augcgcagcgccgccgugcuggcgcuccugcugugcgccggccaggucaccgcccuccccgugaacuccccgaugaacaagggggacaccgaggugaugaagugcaucgucgaggugaucagcgacacgcuguccaagcccagccccaugcccgugucccaggagugcuucgagacccugcggggcgacgagcgcauccucagcauccugcggcaccagaaccugcucaaggagcugcaggaccuggcccuccagggggccaaggagcgcgcgcaccagcagaagaagcacuccggcuucgaggacgagcugagcgagguccuggagaaccaguccagccaggccgagcucaaggaggccguggaggagccguccagcaaggacgugauggagaagcgggaggacuccaaggaggccgagaaguccggggaggcgaccgacggcgcccgcccccaggcccugcccgagcccaugcaggagagcaaggccgagggcaacaaccaggccccgggggaggaggaggaggaggaggaggaggcgaccaacacgcacccgcccgccagccugcccucccagaaguaccccggcccccaggccgagggggacagcgagggccucucccaggggcuggucgaccgggagaagggccugagcgccgagcccggcuggcaggccaagcgcgaggaggaggaggaggaggaggaggaggcggaggccggggaggaggccgugcccgaggaggagggcccgaccgugguccucaacccccaccccagccugggguacaaggagauccggaagggcgagucccgcagcgaggcccuggccguggacggcgcggggaagcccggcgccgaggaggcccaggacccggaggggaagggcgagcaggagcacucccagcagaaggaggaggaggaggagauggccguggucccccaggggcuguuccggggcggcaagagcggggagcuggagcaggaggaggagcgccuguccaaggagugggaggacagcaagcggugguccaagauggaccagcucgccaaggagcugaccgcggagaagcgccuggagggccaggaggaggaggaggacaaccgggacagcuccaugaagcucagcuuccgcgcccgggccuacggguuccgcggccccgggccccagcugcggcgcggcuggcggccguccagccgcgaggacucccuggaggccggccucccccuccaggugcgcggguaccccgaggagaagaaggaggaggagggcagcgcgaaccggcgccccgaggaccaggagcuggagucccucagcgccaucgaggccgagcuggagaagguggcccaccagcugcaggcccuccggcgcggguga

SEQ ID NO: 7564 - RNA, 1374 nt, Artificial Sequence
  derived and/or modified sequence opt2 from Vasostatin__Homo_sapiens__AAH01059
augcgcuccgccgccguccucgcccuccuccucugcgccggccaggucaccgcccuccccgucaacucccccaugaacaagggcgacaccgaggucaugaagugcaucgucgaggucaucuccgacacccucuccaagcccucccccaugcccgucucccaggagugcuucgagacccuccgcggcgacgagcgcauccucuccauccuccgccaccagaaccuccucaaggagcuccaggaccucgcccuccagggcgccaaggagcgcgcccaccagcagaagaagcacuccggcuucgaggacgagcucuccgagguccucgagaaccaguccucccaggccgagcucaaggaggccgucgaggagcccuccuccaaggacgucauggagaagcgcgaggacuccaaggaggccgagaaguccggcgaggccaccgacggcgcccgcccccaggcccuccccgagcccaugcaggaguccaaggccgagggcaacaaccaggcccccggcgaggaggaggaggaggaggaggaggccaccaacacccacccccccgccucccuccccucccagaaguaccccggcccccaggccgagggcgacuccgagggccucucccagggccucgucgaccgcgagaagggccucuccgccgagcccggcuggcaggccaagcgcgaggaggaggaggaggaggaggaggaggccgaggccggcgaggaggccguccccgaggaggagggccccaccgucguccucaacccccaccccucccucggcuacaaggagauccgcaagggcgagucccgcuccgaggcccucgccgucgacggcgccggcaagcccggcgccgaggaggcccaggaccccgagggcaagggcgagcaggagcacucccagcagaaggaggaggaggaggagauggccgucgucccccagggccucuuccgcggcggcaaguccggcgagcucgagcaggaggaggagcgccucuccaaggagugggaggacuccaagcgcugguccaagauggaccagcucgccaaggagcucaccgccgagaagcgccucgagggccaggaggaggaggaggacaaccgcgacuccuccaugaagcucuccuuccgcgcccgcgccuacggcuuccgcggccccggcccccagcuccgccgcggcuggcgccccuccucccgcgaggacucccucgaggccggccucccccuccagguccgcggcuaccccgaggagaagaaggaggaggagggcuccgccaaccgccgccccgaggaccaggagcucgagucccucuccgccaucgaggccgagcucgagaaggucgcccaccagcuccaggcccuccgccgcggcuga

SEQ ID NO: 7565 - RNA, 1374 nt, Artificial Sequence
  derived and/or modified sequence opt3 from Vasostatin__Homo_sapiens__AAH01059
augagaagcgccgcugugcuggcacuccuucugugcgccggccaggucaccgcguugcccguuaacuccccuaugaauaagggggacacagaggugaugaaauguaucguagaagugauuucugauacuuuaucaaagccaaguccgaugcccgucagccaagagugcuucgaaacgcugaggggagacgagcggauacuauccauccuccgccaccagaaccugcuuaaagaacugcaggauuuggcucuccagggugccaaggagcgagcacaucaacagaaaaagcacucuggcuuugaggacgaacugucggaggugcuggaaaaucagucaagccaggccgagcucaaggaggcuguugaggagccuaguuccaaagaugugauggaaaagcgugaggacucuaaagaagcagaaaagagcggggaggccaccgauggagcuagaccacaagccuuacccgaaccuaugcaggaguccaaagcggaaggcaacaaucaggcaccaggugaggaagaggaggaagaggaagaggccacaaacacucaucccccugcuucacugccaagucagaaguacccggggccccaagccgaaggagacagcgagggccuuucucagggcuuggucgauagggagaaggggcuguccgcagaaccuggauggcaggcuaaacgggaggaagaggaggaagaggaagaggaagccgaggcgggugaggaagccgugccagaggaagagggccccaccguaguucuaaauccucacccaucacucggguauaaggaaauucgcaaaggagagagcagaagugaggcacuggcuguggacggcgccgguaagcccggggcugaagaggcccaagauccggaaggaaaaggcgagcaggaacauucucagcagaaggaggaggaagaggaaauggcagucgugccucaaggccuuuucaggggagggaaauccggugagcuggagcaggaagaggaacgguugagcaaggagugggaagacucgaagcgcuggucuaaaauggaucagcucgccaaggagcugacagcugagaaacgauuagaaggccaggaggaagaggaagacaacagagacuccucaaugaagcugaguuuuagggcgcgggcauacggguuccguggacccggcccacaacuccgcagagguuggaggccuagcucccgggaggauucucuugaggccgggcugccccuacaggugcgaggcuauccagaagagaaaaaggaagaggaaggaagcgcuaaucgcagacccgaggaccaggaguuggaaucacugagugccaucgaggcagaacucgagaaggucgcccaccagcugcaagcucuuaggcggggcuga

SEQ ID NO: 7566 - RNA, 1374 nt, Artificial Sequence
  derived and/or modified sequence opt4 from Vasostatin__Homo_sapiens__AAH01059
augagaagcgccgccgugcuggcccugcugcugugcgccggccaggugaccgcccugcccgugaacagccccaugaacaagggcgacaccgaggugaugaagugcaucguggaggugaucagcgacacccugagcaagcccagccccaugcccgugagccaggagugcuucgagacccugagaggcgacgagagaauccugagcauccugagacaccagaaccugcugaaggagcugcaggaccuggcccugcagggcgccaaggagagagcccaccagcagaagaagcacagcggcuucgaggacgagcugagcgaggugcuggagaaccagagcagccaggccgagcugaaggaggccguggaggagcccagcagcaaggacgugauggagaagagagaggacagcaaggaggccgagaagagcggcgaggccaccgacggcgccagaccccaggcccugcccgagcccaugcaggagagcaaggccgagggcaacaaccaggcccccggcgaggaggaggaggaggaggaggaggccaccaacacccacccccccgccagccugcccagccagaaguaccccggcccccaggccgagggcgacagcgagggccugagccagggccugguggacagagagaagggccugagcgccgagcccggcuggcaggccaagagagaggaggaggaggaggaggaggaggaggccgaggccggcgaggaggccgugcccgaggaggagggccccaccguggugcugaacccccaccccagccugggcuacaaggagaucagaaagggcgagagcagaagcgaggcccuggccguggacggcgccggcaagcccggcgccgaggaggcccaggaccccgagggcaagggcgagcaggagcacagccagcagaaggaggaggaggaggagauggccguggugccccagggccuguucagaggcggcaagagcggcgagcuggagcaggaggaggagagacugagcaaggagugggaggacagcaagagauggagcaagauggaccagcuggccaaggagcugaccgccgagaagagacuggagggccaggaggaggaggaggacaacagagacagcagcaugaagcugagcuucagagccagagccuacggcuucagaggccccggcccccagcugagaagaggcuggagacccagcagcagagaggacagccuggaggccggccugccccugcaggugagaggcuaccccgaggagaagaaggaggaggagggcagcgccaacagaagacccgaggaccaggagcuggagagccugagcgccaucgaggccgagcuggagaagguggcccaccagcugcaggcccugagaagaggcuga

SEQ ID NO: 7567 - RNA, 1374 nt, Artificial Sequence
  derived and/or modified sequence opt5 from Vasostatin__Homo_sapiens__AAH01059
augagaagcgccgcugugcuggcccuccugcuuugcgcgggccaggucaccgcucugcccguuaacuccccuaugaauaagggggacacagaggugaugaaauguaucguggaagucauuucugauacgcucagcaagccgucccccaugccugugucucaagagugcuucgaaacccugcggggagacgagcgcauccuuagcauucugagacaccagaaccuccugaaagaacugcaggaucucgcccugcagggcgccaaggagcgggcucaucaacagaaaaagcacuccggguuugaggacgaacuuucugagguucuggaaaaucagagcucccaggccgagcucaaggaggcuguggaggagcccagcucuaaagaugucauggaaaagcgcgaggacuccaaagaagccgaaaagagcggagaggcgacagauggcgccagaccucaagcucugcccgaaccuaugcaggagucuaaagccgaagggaacaaucaggcuccgggagaggaagaggaggaagaggaagaggccaccaacacacaucccccugcgucccuucccagccagaaguacccuggcccccaagccgaaggcgacucugaggggcugucccagggacucguggaucgggagaagggccugagcgcugaaccgggguggcaggccaaacgcgaggaagaggaggaagaggaagaggaagcugaggccggagaggaagccguuccugaggaagagggccccaccgugguccugaauccucaccccucccucggguauaaggaaaucagaaaaggagagucucggagcgaggcucuggcgguggacggcgccggcaagcccggggcugaagaggcccaagauccugaaggaaaaggcgagcaggaacauucccagcagaaggaggaggaagaggaaauggccguggucccgcaagggcuuuuccgcggaggcaaaagcggggagcuggagcaggaagaggaaagacucucuaaggagugggaagacuccaagcgguggagcaaaauggaucagcuggcuaaggagcuuacagccgagaaacgccuggaaggacaggaggaagaggaagacaacagagacucuagcaugaagcucuccuuucgggcgcgcgcuuacggcuucagaggccccgggccucaacugcggagaggauggcgccccucuagccgggaggauucccuggaggccggccucccucugcagguuagaggguaucccgaagagaaaaaggaagaggaaggaagcgccaaucgccggccggaggaccaggagcuugaaucucuguccgcuauugaggccgaacucgagaagguggcucaccagcugcaagcccuuagacgcggcuga

SEQ ID NO: 7568 - RNA, 1374 nt, Artificial Sequence
  derived and/or modified sequence opt6 from Vasostatin__Homo_sapiens__AAH01059
augagaucagcagcaguauuagcauuauuauuaugugcaggacagguaacggcacugccagugaauuccccaaugaauaaaggagauacagaaguaaugaaauguauaguagaaguaauaagcgauacauuaagcaaacccaguccaaugccaguaucacaagaauguuuugaaacauuaagaggugaugaaagaauauuaaguauacuuagacaucaaaaucuauuaaaagaauuacaagauuuagcacuacagggagcaaaagaaagagcacaucaacaaaagaaacacagugguuucgaagaugaauuaucagaaguguuagaaaaucaaaguucacaagcagaacuaaaagaggcaguggaagaaccaaguagcaaagauguaauggaaaagagggaagauaguaaagaggcggaaaaaaguggagaagcgacggauggagcucgaccacaagcauuaccagaaccuaugcaggaaaguaaagcggaaggaaacaaucaagcaccaggagaggaagaagaagaagaagaagaagcuacaaauacacauccuccagcgagccuaccgagucaaaaauauccuggaccacaggcagaaggagauucagaaggauuaagucaaggacuuguagauagagaaaaaggacuaagugcugaacccgguuggcaagcaaaaagggaagaagaagaagaagaagaagaagaagcagaagcaggagaagaagcaguaccggaagaagaaggaccaacggucgugcuaaauccacauccaaguuuaggauacaaagaaauaagaaaaggagaaagcagaagugaggcauuagcuguagauggugcaggaaaaccgggagcugaagaagcucaagacccagaaggaaaaggagaacaagaacauagccaacaaaaggaagaagaagaagaaauggcuguaguaccacaaggacuauucagaggaggaaaaagcggagaauuagagcaagaagaagaaagauuaaguaaagaaugggaagauaguaaaagauggaguaaaauggaucaauuagcaaaagaacucacggcagaaaaaagacuagaaggacaagaagaagaagaagacaacagagauaguucaaugaaacuaaguuuuagagcaagagcguacggauuuaggggaccagggccacaacuaaggaggggauggagaccaucaaguagagaagauaguuuagaagcaggauuaccuuuacaaguaagaggauauccagaagaaaaaaaagaagaagaaggaagcgcgaacaggagaccagaagaucaagaauuggagagccuaagugcaauagaagcagaguuagaaaagguagcacaucaauugcaagcauuacgaagaggauga

SEQ ID NO: 7569 - protein, 212 aa, Artificial Sequence [sequence omitted]

SEQ ID NO: 7570 - RNA, 639 nt, Artificial Sequence
  calreticulin__Homo_sapiens__BAG58223
augcugcuauccgucuacuucaaggagcaguuucuggacggagacggguggacuucccgcuggaucgaauccaaacacaagucagauuuuggcaaauucguucucaguuccggcaaguucuacggugacgaggagaaagauaaagguuugcagacaagccaggaugcacgcuuuuaugcucugucggccaguuucgagccuuucagcaacaaaggccagacgcugguggugcaguucacggugaaacaugagcagaacaucgacugugggggcggcuaugugaagcuguuuccuaauaguuuggaccagacagacaugcacggagacucagaauacaacaucauguuuggucccgacaucuguggcccuggcaccaagaagguucaugucaucuucaacuacaagggcaagaacgugcugaucaacaaggacauccguugcaaggaugaugaguuuacacaccuguacacacugauugugcggccagacaacaccuaugaggugaagauugacaacagccagguggaguccggcuccuuggaagacgauugggacuuccugccacccaagaagauaaaggauccugaugcuucaaaaccggaagacugggaugagcgggccaagaucgaugaucccuga

SEQ ID NO: 7571 - RNA, 639 nt, Artificial Sequence
  derived and/or modified sequence opt1 from calreticulin__Homo_sapiens__BAG58223
augcugcucagcguguacuucaaggagcaguuccuggacggcgacggguggaccucccgcuggaucgagagcaagcacaaguccgacuucggcaaguucguccugagcuccgggaaguucuacggcgacgaggagaaggacaaggggcuccagaccagccaggacgcccgguucuacgcccuguccgcgagcuucgagcccuucuccaacaagggccagacgcugguggugcaguucaccgucaagcacgagcagaacaucgacugcggcgggggcuacgugaagcuguucccgaacagccucgaccagaccgacaugcacggggacuccgaguacaacaucauguucggccccgacaucugcgggcccggcaccaagaaggugcacgucaucuucaacuacaagggcaagaacgugcugaucaacaaggacauccgcugcaaggacgacgaguucacgcaccucuacacccugaucgugcggcccgacaacaccuacgaggucaagaucgacaacagccagguggaguccgggagccuggaggacgacugggacuuccucccgcccaagaagaucaaggaccccgacgccuccaagcccgaggacugggacgagcgcgccaagaucgacgacccguga

SEQ ID NO: 7572 - RNA, 639 nt, Artificial Sequence
  derived and/or modified sequence opt2 from calreticulin__Homo_sapiens__BAG58223
augcuccucuccgucuacuucaaggagcaguuccucgacggcgacggcuggaccucccgcuggaucgaguccaagcacaaguccgacuucggcaaguucguccucuccuccggcaaguucuacggcgacgaggagaaggacaagggccuccagaccucccaggacgcccgcuucuacgcccucuccgccuccuucgagcccuucuccaacaagggccagacccucgucguccaguucaccgucaagcacgagcagaacaucgacugcggcggcggcuacgucaagcucuuccccaacucccucgaccagaccgacaugcacggcgacuccgaguacaacaucauguucggccccgacaucugcggccccggcaccaagaagguccacgucaucuucaacuacaagggcaagaacguccucaucaacaaggacauccgcugcaaggacgacgaguucacccaccucuacacccucaucguccgccccgacaacaccuacgaggucaagaucgacaacucccaggucgaguccggcucccucgaggacgacugggacuuccucccccccaagaagaucaaggaccccgacgccuccaagcccgaggacugggacgagcgcgccaagaucgacgaccccuga

SEQ ID NO: 7573 - RNA, 639 nt, Artificial Sequence
  derived and/or modified sequence opt3 from calreticulin__Homo_sapiens__BAG58223
augcugcucagcguguacuucaaggagcaguuucuugacggcgauggguggaccuccagauggaucgaaucuaaacacaagucagacuucggaaaauuuguccugaguagcgguaaguucuauggcgaugaggaaaaagacaagggguugcaaacaucccaggaugccagguuuuacgcuuuaucugcaucguucgagcccuuuucaaacaagggacagacucugguugugcaguucacgguaaaacaugaacaaaauauugacugcggcgguggguaugugaagcuauuuccuaacagccucgaucagaccgacaugcacggagauagugaguacaauauaauguucggcccagacaucuguggcccggggacuaaaaagguccaugugauuuuuaacuauaaaggaaagaauguucugaucaacaaggauauucggugcaaagacgaugaguucacacaccuuuacacccugaucgugcgccccgacaauacauaugaagucaagauagacaacucccagguggagucugguagcuuggaagaugacugggauuuucucccucccaaaaagaucaaagacccagaugccuccaagccugaggacugggaugagcgagcgaaaauugacgauccauga

SEQ ID NO: 7574 - RNA, 639 nt, Artificial Sequence
  derived and/or modified sequence opt4 from calreticulin__Homo_sapiens__BAG58223
augcugcugagcguguacuucaaggagcaguuccuggacggcgacggcuggaccagcagauggaucgagagcaagcacaagagcgacuucggcaaguucgugcugagcagcggcaaguucuacggcgacgaggagaaggacaagggccugcagaccagccaggacgccagauucuacgcccugagcgccagcuucgagcccuucagcaacaagggccagacccugguggugcaguucaccgugaagcacgagcagaacaucgacugcggcggcggcuacgugaagcuguuccccaacagccuggaccagaccgacaugcacggcgacagcgaguacaacaucauguucggccccgacaucugcggccccggcaccaagaaggugcacgugaucuucaacuacaagggcaagaacgugcugaucaacaaggacaucagaugcaaggacgacgaguucacccaccuguacacccugaucgugagacccgacaacaccuacgaggugaagaucgacaacagccagguggagagcggcagccuggaggacgacugggacuuccugccccccaagaagaucaaggaccccgacgccagcaagcccgaggacugggacgagagagccaagaucgacgaccccuga

SEQ ID NO: 7575 - RNA, 639 nt, Artificial Sequence
  derived and/or modified sequence opt5 from calreticulin__Homo_sapiens__BAG58223
augcugcucagcguguacuucaaggagcaguuucuggacggcgauggguggaccuccagauggaucgaaucuaaacacaagagcgacuucggaaaauuuguccuuuccucuggcaaguucuauggggaugaggaaaaagacaagggacugcaaacaagccaggaugcccgguuuuacgcucucuccgccucuuucgagcccuuuagcaacaagggccagacgcugguugugcaguucaccgugaaacaugaacaaaauauugacugcgggggaggcuaugucaaacuuuuuccuaacucccuggaucagacagacaugcacggcgauagcgaguacaauaucauguucgggccggacauuuguggacccggcaccaagaaggugcauguuaucuuuaacuauaaagggaagaaugugcucauuaacaaggauauccgcugcaaagacgaugaguucacacaccuguacacccugaucgucagaccugacaauacauaugaagugaagauugacaacucucagguugaguccggaagccucgaagaugacugggauuuucugcccccuaaaaagaucaaagaccccgaugcgucuaagccugaggacugggaugagcgggcuaaaauugacgauccguga

SEQ ID NO: 7576 - RNA, 639 nt, Artificial Sequence
  derived and/or modified sequence opt6 from calreticulin__Homo_sapiens__BAG58223
augcuacuaagcguauacuucaaagaacaauuccuagacggagacggauggacaucaagauggaucgaaucaaaacacaaaucagacuucggaaaauucguacuaucaucaggaaaauuuuacggagacgaagaaaaagacaaaggacuccaaacaucacaagacgcaagauucuacgcacuaucagcaucauucgaaccauucucaaacaaaggacaaacacuagucguacaauucacaguaaaacacgaacaaaacauagacugcggaggaggauacguaaaacuauucccaaacucacuagaccaaacagauaugcacggagacagcgaauacaacauaauguucggaccagacauaugcggaccaggaacaaaaaaaguacacguaauauucaacuacaaaggaaaaaacguacuaauaaacaaagacauaagaugcaaagacgacgaauucacacaccuauacacacuaauaguaagaccagauaacacauacgaagucaaaauagacaacucacaaguagaaucaggauccuuagaagacgacugggacuuccuaccaccaaaaaaaauaaaagacccagacgcaucaaaaccagaagacugggacgaaagagcaaaaauagacgacccauaa

SEQ ID NO: 7577 - protein, 296 aa, Artificial Sequence
  calreticulin__Homo_sapiens__B4E2Y9
MHGDSEYNIMFGPDICGPGTKKVHVIFNYKGKNVLINKDIRCKDDEFTHLYTLIVRPDNTYEVKIDNSQVESGSLEDDWDFLPPKKIKDPDASKPEDWDERAKIDDPTDSKPEDWDKPEHIPDPDAKKPEDWDEEMDGEWEPPVIQNPEYKGEWKPRQIDNPDYKGTWIHPEIDNPEYSPDPSIYAYDNFGVLGLDLWQVKSGTIFDNFLITNDEAYAEEFGNETWGVTKAAEKQMKDKQDEEQRLKEEEEDKKRKEEEEAEDKEDDEDKDEDEEDEEDKEEDEEEDVPGQAKDEL

SEQ ID NO: 7578 - RNA, 891 nt, Artificial Sequence
  calreticulin__Homo_sapiens__BAG65301
augcacggagacucagaauacaacaucauguuuggucccgacaucuguggcccuggcaccaagaagguucaugucaucuucaacuacaagggcaagaacgugcugaucaacaaggacauccguugcaaggaugaugaguuuacacaccuguacacacugauugugcggccagacaacaccuaugaggugaagauugacaacagccagguggaguccggcuccuuggaagacgauugggacuuccugccacccaagaagauaaaggauccugaugcuucaaaaccggaagacugggaugagcgggccaagaucgaugaucccacagacuccaagccugaggacugggacaagcccgagcauaucccugacccugaugcuaagaagcccgaggacugggaugaagagauggacggagagugggaacccccagugauucagaacccugaguacaagggugaguggaagccccggcagaucgacaacccagauuacaagggcacuuggauccacccagaaauugacaaccccgaguauucucccgaucccaguaucuaugccuaugauaacuuuggcgugcugggccuggaccucuggcaggucaagucuggcaccaucuuugacaacuuccucaucaccaacgaugaggcauacgcugaggaguuuggcaacgagacguggggcguaacaaaggcagcagagaaacaaaugaaggacaaacaggacgaggagcagaggcuuaaggaggaggaagaagacaagaaacgcaaagaggaggaggaggcagaggacaaggaggaugaugaggacaaagaugaggaugaggaggaugaggaggacaaggaggaagaugaggaggaagauguccccggccaggccaaggacgagcuguag

SEQ ID NO: 7579 - RNA, 891 nt, Artificial Sequence
  derived and/or modified sequence opt1 from calreticulin__Homo_sapiens__BAG65301
augcacggcgacagcgaguacaacaucauguucgggcccgacaucugcggcccggggaccaagaaggugcacgucaucuucaacuacaagggcaagaacgugcugaucaacaaggacauccgcugcaaggacgacgaguucacccaccucuacacgcugaucgugcggcccgacaacaccuacgaggucaagaucgacaacucccagguggagagcgggucccuggaggacgacugggacuuccucccgcccaagaagaucaaggaccccgacgccagcaagcccgaggacugggacgagcgcgccaagaucgacgaccccaccgacuccaagcccgaggacugggacaagccggagcacauccccgaccccgacgcgaagaagcccgaggacugggacgaggagauggacggcgagugggagccgcccgugauccagaaccccgaguacaagggcgaguggaagccccggcagaucgacaacccggacuacaaggggaccuggauccaccccgagaucgacaaccccgaguacagccccgacccguccaucuacgccuacgacaacuucggcguccuggggcuggaccucuggcaggucaagagcggcacgaucuucgacaacuuccugaucaccaacgacgaggccuacgccgaggaguucgggaacgagaccuggggcgugaccaaggccgcggagaagcagaugaaggacaagcaggacgaggagcagcgccugaaggaggaggaggaggacaagaagcggaaggaggaggaggaggccgaggacaaggaggacgacgaggacaaggacgaggacgaggaggacgaggaggacaaggaggaggacgaggaggaggacgugcccggccaggccaaggacgagcucuga

SEQ ID NO: 7580 - RNA, 891 nt, Artificial Sequence
  derived and/or modified sequence opt2 from calreticulin__Homo_sapiens__BAG65301
augcacggcgacuccgaguacaacaucauguucggccccgacaucugcggccccggcaccaagaagguccacgucaucuucaacuacaagggcaagaacguccucaucaacaaggacauccgcugcaaggacgacgaguucacccaccucuacacccucaucguccgccccgacaacaccuacgaggucaagaucgacaacucccaggucgaguccggcucccucgaggacgacugggacuuccucccccccaagaagaucaaggaccccgacgccuccaagcccgaggacugggacgagcgcgccaagaucgacgaccccaccgacuccaagcccgaggacugggacaagcccgagcacauccccgaccccgacgccaagaagcccgaggacugggacgaggagauggacggcgagugggagccccccgucauccagaaccccgaguacaagggcgaguggaagccccgccagaucgacaaccccgacuacaagggcaccuggauccaccccgagaucgacaaccccgaguacucccccgaccccuccaucuacgccuacgacaacuucggcguccucggccucgaccucuggcaggucaaguccggcaccaucuucgacaacuuccucaucaccaacgacgaggccuacgccgaggaguucggcaacgagaccuggggcgucaccaaggccgccgagaagcagaugaaggacaagcaggacgaggagcagcgccucaaggaggaggaggaggacaagaagcgcaaggaggaggaggaggccgaggacaaggaggacgacgaggacaaggacgaggacgaggaggacgaggaggacaaggaggaggacgaggaggaggacguccccggccaggccaaggacgagcucuga

SEQ ID NO: 7581 - RNA, 891 nt, Artificial Sequence
  derived and/or modified sequence opt3 from calreticulin__Homo_sapiens__BAG65301
augcacggcgacagcgaguacaacaucauguucgggcccgauauuugcggaccugguaccaagaaagugcaugucauauuuaauuauaagggcaaaaacguucugaucaauaaggacauuagauguaaagaugacgaauuuacacaccucuacacucuuaucgugaggccagauaacacguaugagguaaagauugacaauucccagguggaaucugggucacuggaggaugacugggauuucuugccgcccaagaaaaucaaggacccugaugccaguaaaccagaagacugggaugagcgggcuaagauagacgaccccaccgauagcaaaccugaggacugggauaagccagaacauauccccgacccugaugcaaagaaaccagaggacugggaugaagagauggacggagagugggaaccgcccgucauucaaaacccugaguacaagggcgaauggaaaccacgccagaucgauaaucccgacuauaaggguacauggauucacccugagaucgauaacccagaauacucccccgacccgucuauauaugccuacgacaauuucgggguguuaggacuggaucuauggcagguuaaaucgggcacuauuuuugacaacuuccucaucaccaaugaugaggcguacgcugaggaauuuggcaacgagacauggggagugaccaaggccgcagaaaaacagaugaaggacaagcaagaugaggaacagcgacugaaagaggaggaagaggacaagaaacguaaggaagaggaagaggccgaggauaaagaagacgaugaggacaaggaugaagacgaggaggaugaagaggacaaggaagaggacgaagaggaggaugucccugggcaggcuaaagacgaacuuuga

SEQ ID NO: 7582 - RNA, 891 nt, Artificial Sequence
  derived and/or modified sequence opt4 from calreticulin__Homo_sapiens__BAG65301
augcacggcgacagcgaguacaacaucauguucggccccgacaucugcggccccggcaccaagaaggugcacgugaucuucaacuacaagggcaagaacgugcugaucaacaaggacaucagaugcaaggacgacgaguucacccaccuguacacccugaucgugagacccgacaacaccuacgaggugaagaucgacaacagccagguggagagcggcagccuggaggacgacugggacuuccugccccccaagaagaucaaggaccccgacgccagcaagcccgaggacugggacgagagagccaagaucgacgaccccaccgacagcaagcccgaggacugggacaagcccgagcacauccccgaccccgacgccaagaagcccgaggacugggacgaggagauggacggcgagugggagccccccgugauccagaaccccgaguacaagggcgaguggaagcccagacagaucgacaaccccgacuacaagggcaccuggauccaccccgagaucgacaaccccgaguacagccccgaccccagcaucuacgccuacgacaacuucggcgugcugggccuggaccuguggcaggugaagagcggcaccaucuucgacaacuuccugaucaccaacgacgaggccuacgccgaggaguucggcaacgagaccuggggcgugaccaaggccgccgagaagcagaugaaggacaagcaggacgaggagcagagacugaaggaggaggaggaggacaagaagagaaaggaggaggaggaggccgaggacaaggaggacgacgaggacaaggacgaggacgaggaggacgaggaggacaaggaggaggacgaggaggaggacgugcccggccaggccaaggacgagcuguga

SEQ ID NO: 7583 - RNA, 891 nt, Artificial Sequence
  derived and/or modified sequence opt5 from calreticulin__Homo_sapiens__BAG65301
augcacggcgacagcgaguacaacaucauguucgggcccgauauuugcggaccuggcaccaagaaagugcaugucaucuuuaauuauaaggggaaaaacguucugauuaauaaggacaucagauguaaagaugacgaguucacacaccucuacacgcugauugugcggccggauaacaccuaugaagugaagaucgacaauucccaggucgaaucuggaagccuugaggaugacugggauuuucugcccccuaagaaaaucaaggaccccgaugccuccaaaccugaagacugggaugagcgcgcuaagauugacgaccccacagauucuaaaccugaggacugggauaagccggaacauauccccgacccugaugccaagaaacccgaggacugggaugaagagauggacggcgagugggaaccucccgugauucaaaacccggaguacaagggggaauggaaaccuagacagaucgauaaucccgacuauaagggaaccuggauucacccugagaucgauaaccccgaauacagccccgacccuuccauuuaugcguacgacaauuucggcguucucggccuggaucuuuggcaagugaaaucugggacaaucuuugacaacuuccugaucaccaaugaugaggcuuacgccgaggaauuuggaaacgagacauggggcgucaccaaggccgcugaaaaacagaugaaggacaagcaggaugaggaacagcggcucaaagaggaggaagaggacaagaaacgcaaggaagaggaagaggccgaggauaaagaagacgaugaggacaaggaugaagacgaggaggaugaagaggacaaggaagaggacgaagaggaggaugugccggggcaggcuaaagacgaacuguga

SEQ ID NO: 7584 - RNA, 891 nt, Artificial Sequence
  derived and/or modified sequence opt6 from calreticulin__Homo_sapiens__BAG65301
augcacggagauagcgaauacaauauaauguucgggccagacauaugcggaccaggaacaaaaaaaguacacguaauauucaacuacaaaggaaaaaacguacuaauaaacaaagacauaagauguaaagacgacgaauuuacacaccuauacacacuaauaguaagaccagacaacacauaugaaguaaaaauagacaacagucaaguagaaucaggaagccuagaagacgacugggacuucuuaccaccgaaaaaaauaaaagacccagacgcaagcaaaccagaagacugggacgaaagagcgaaaauagacgauccaacagacucaaaaccagaagacugggacaaaccagaacacauaccagacccagacgcaaaaaaaccagaagacugggacgaagaaauggauggagaaugggaacccccaguaauccaaaacccagaauacaaaggagaauggaaaccaagacaaauagacaacccagacuacaaagggacauggauacacccagaaauagacaauccagaauauagcccagacccaaguauauacgcauacgacaacuucggaguauuaggauuagaucuauggcaagugaaaaguggaacaauauuugacaacuucuuaauaacaaaugaugaagcauacgcagaagaauucggaaacgaaacauggggaguaacaaaagcagcagaaaaacaaaugaaagacaaacaagacgaagaacaaagauuaaaagaagaagaagaagauaaaaaaagaaaagaagaagaagaagcagaagacaaagaagacgacgaagacaaagacgaagacgaagaagacgaagaagacaaagaagaagacgaagaagaagacguaccaggacaagcaaaagacgaauuauaa

SEQ ID NO: 7585 - protein, 417 aa, Artificial Sequence
  calreticulin__Homo_sapiens__P27797
MLLSVPLLLGLLGLAVAEPAVYFKEQFLDGDGWTSRWIESKHKSDFGKFVLSSGKFYGDEEKDKGLQTSQDARFYALSASFEPFSNKGQTLVVQFTVKHEQNIDCGGGYVKLFPNSLDQTDMHGDSEYNIMFGPDICGPGTKKVHVIFNYKGKNVLINKDIRCKDDEFTHLYTLIVRPDNTYEVKIDNSQVESGSLEDDWDFLPPKKIKDPDASKPEDWDERAKIDDPTDSKPEDWDKPEHIPDPDAKKPEDWDEEMDGEWEPPVIQNPEYKGEWKPRQIDNPDYKGTWIHPEIDNPEYSPDPSIYAYDNFGVLGLDLWQVKSGTIFDNFLITNDEAYAEEFGNETWGVTKAAEKQMKDKQDEEQRLKEEEEDKKRKEEEEAEDKEDDEDKDEDEEDEEDKEEDEEEDVPGQAKDEL

SEQ ID NO: 7586 - RNA, 1254 nt, Artificial Sequence
  calreticulin__Homo_sapiens__AAA36582
augcugcuauccgugccgcugcugcucggccuccucggccuggccgucgccgagcccgccgucuacuucaaggagcaguuucuggacggagacggguggacuucccgcuggaucgaauccaaacacaagucagauuuuggcaaauucguucucaguuccggcaaguucuacggugacgaggagaaagauaaagguuugcagacaagccaggaugcacgcuuuuaugcucugucggccaguuucgagccuuucagcaacaaaggccagacgcugguggugcaguucacggugaaacaugagcagaacaucgacugugggggcggcuaugugaagcuguuuccuaauaguuuggaccagacagacaugcacggagacucagaauacaacaucauguuuggucccgacaucuguggcccuggcaccaagaagguucaugucaucuucaacuacaagggcaagaacgugcugaucaacaaggacauccguugcaaggaugaugaguuuacacaccuguacacacugauugugcggccagacaacaccuaugaggugaagauugacaacagccagguggaguccggcuccuuggaagacgauugggacuuccugccacccaagaagauaaaggauccugaugcuucaaaaccggaagacugggaugagcgggccaagaucgaugaucccacagacuccaagccugaggacugggacaagcccgagcauaucccugacccugaugcuaagaagcccgaggacugggaugaagagauggacggagagugggaacccccagugauucagaacccugaguacaagggugaguggaagccccggcagaucgacaacccagauuacaagggcacuuggauccacccagaaauugacaaccccgaguauucucccgaucccaguaucuaugccuaugauaacuuuggcgugcugggccuggaccucuggcaggucaagucuggcaccaucuuugacaacuuccucaucaccaacgaugaggcauacgcugaggaguuuggcaacgagacguggggcguaacaaaggcagcagagaaacaaaugaaggacaaacaggacgaggagcagaggcuuaaggaggaggaagaagacaagaaacgcaaagaggaggaggaggcagaggacaaggaggaugaugaggacaaagaugaggaugaggaggaugaggaggacaaggaggaagaugaggaggaagauguccccggccaggccaaggacgagcuguag

SEQ ID NO: 7587 - RNA, 1254 nt, Artificial Sequence
  derived and/or modified sequence opt1 from calreticulin__Homo_sapiens__AAA36582
augcugcucagcgugccccugcugcucggccugcuggggcucgccgucgccgagccggcgguguacuucaaggagcaguuccuggacggcgacggguggaccucccgcuggaucgagagcaagcacaaguccgacuucggcaaguucgugcugagcuccgggaaguucuacggcgacgaggagaaggacaagggccuccagaccagccaggacgcccgguucuacgcccuguccgccagcuucgagcccuucuccaacaaggggcagacgcuggucgugcaguucaccgugaagcacgagcagaacaucgacugcggcgggggcuacgucaagcuguuccccaacagccucgaccagaccgacaugcacggggacuccgaguacaacaucauguucggccccgacaucugcggcccggggaccaagaaggugcacgugaucuucaacuacaagggcaagaacguccugaucaacaaggacauccgcugcaaggacgacgaguucacgcaccucuacacccugaucgugcggcccgacaacaccuacgaggugaagaucgacaacagccaggucgaguccgggagccuggaggacgacugggacuuccucccgcccaagaagaucaaggaccccgacgccuccaagcccgaggacugggacgagcgcgcgaagaucgacgaccccaccgacagcaagcccgaggacugggacaagccggagcacauccccgaccccgacgccaagaagcccgaggacugggacgaggagauggacggcgagugggagccgcccgugauccagaaccccgaguacaagggcgaguggaagccccggcagaucgacaacccggacuacaaggggacguggauccaccccgagaucgacaaccccgaguacucccccgacccgagcaucuacgccuacgacaacuucggcgugcuggggcuggaccucuggcaggucaaguccggcaccaucuucgacaacuuccugaucaccaacgacgaggccuacgcggaggaguucgggaacgagaccuggggcgugacgaaggccgccgagaagcagaugaaggacaagcaggacgaggagcagcgccugaaggaggaggaggaggacaagaagcggaaggaggaggaggaggccgaggacaaggaggacgacgaggacaaggacgaggacgaggaggacgaggaggacaaggaggaggacgaggaggaggacgugcccggccaggccaaggacgagcucuga

SEQ ID NO: 7588 - RNA, 1254 nt, Artificial Sequence
  derived and/or modified sequence opt2 from calreticulin__Homo_sapiens__AAA36582
augcuccucuccgucccccuccuccucggccuccucggccucgccgucgccgagcccgccgucuacuucaaggagcaguuccucgacggcgacggcuggaccucccgcuggaucgaguccaagcacaaguccgacuucggcaaguucguccucuccuccggcaaguucuacggcgacgaggagaaggacaagggccuccagaccucccaggacgcccgcuucuacgcccucuccgccuccuucgagcccuucuccaacaagggccagacccucgucguccaguucaccgucaagcacgagcagaacaucgacugcggcggcggcuacgucaagcucuuccccaacucccucgaccagaccgacaugcacggcgacuccgaguacaacaucauguucggccccgacaucugcggccccggcaccaagaagguccacgucaucuucaacuacaagggcaagaacguccucaucaacaaggacauccgcugcaaggacgacgaguucacccaccucuacacccucaucguccgccccgacaacaccuacgaggucaagaucgacaacucccaggucgaguccggcucccucgaggacgacugggacuuccucccccccaagaagaucaaggaccccgacgccuccaagcccgaggacugggacgagcgcgccaagaucgacgaccccaccgacuccaagcccgaggacugggacaagcccgagcacauccccgaccccgacgccaagaagcccgaggacugggacgaggagauggacggcgagugggagccccccgucauccagaaccccgaguacaagggcgaguggaagccccgccagaucgacaaccccgacuacaagggcaccuggauccaccccgagaucgacaaccccgaguacucccccgaccccuccaucuacgccuacgacaacuucggcguccucggccucgaccucuggcaggucaaguccggcaccaucuucgacaacuuccucaucaccaacgacgaggccuacgccgaggaguucggcaacgagaccuggggcgucaccaaggccgccgagaagcagaugaaggacaagcaggacgaggagcagcgccucaaggaggaggaggaggacaagaagcgcaaggaggaggaggaggccgaggacaaggaggacgacgaggacaaggacgaggacgaggaggacgaggaggacaaggaggaggacgaggaggaggacguccccggccaggccaaggacgagcucuga

SEQ ID NO: 7589 - RNA, 1254 nt, Artificial Sequence
  derived and/or modified sequence opt3 from calreticulin__Homo_sapiens__AAA36582
augcugcucagcgugccccuucuguugggcuuacuggggcuagccgucgcugagccugcaguuuacuucaaggaacaguuucucgacggagaugguuggaccuccagauggaucgagucuaaacacaagucagacuucggcaaauuugugcugaguagcgggaaguucuauggagaugaagagaaagacaagggccuucaaacaucccaggaugccagguuuuacgcgcugucugcuucguucgaaccauuuucaaacaagggucagacuuugguagugcaguucacggucaaacaugagcaaaauauugacugcgggggaggcuaugugaagcucuuuccgaacagccuggaucagaccgacaugcacggcgauagugaguacaauauaauguucgggcccgacaucuguggaccugguacuaaaaagguucaugugauuuuuaacuauaaaggcaagaauguccugaucaacaaggauauucggugcaaagacgaugaguucacacaccucuacaccuuaaucgugcgcccagacaauacauaugaaguaaagauagacaacucccagguugaaucugggagccuggaggaugacugggauuuucuucccccuaaaaagaucaaagacccagaugccuccaagcccgaggacugggaugaacgagcaaaaauugacgauccuaccgacucaaagccagaggauugggacaagccggaacauauccccgacccugaugccaaaaagccagaggacugggaugaagagauggacggagagugggaacccccugugauucagaauccagaguacaaaggcgaauggaagccccgucaaaucgauaacccggacuacaaagguacuuggauacacccugagauugauaaucccgaauauaguccagacccuagcaucuacgcuuaugauaacuucggggucuugggacuggaccuauggcaagugaagucuggcacaauuuucgauaauuuucucaucaccaacgacgaggcauacgccgaggaguucggcaaugaaacguggggagugacuaaggcugccgaaaaacagaugaaggauaaacaggacgaggaacagagacugaaggaggaggaagaggacaaaaagaggaaggaagaggaggaagcggaggauaaagaagacgaugaggacaaggaugaagacgaggaggaugaagaggacaaagaagaggaugaagaggaggacguccccgggcaggcaaaggaugaacuuuga

SEQ ID NO: 7590 - RNA, 1254 nt, Artificial Sequence
  derived and/or modified sequence opt4 from calreticulin__Homo_sapiens__AAA36582
augcugcugagcgugccccugcugcugggccugcugggccuggccguggccgagcccgccguguacuucaaggagcaguuccuggacggcgacggcuggaccagcagauggaucgagagcaagcacaagagcgacuucggcaaguucgugcugagcagcggcaaguucuacggcgacgaggagaaggacaagggccugcagaccagccaggacgccagauucuacgcccugagcgccagcuucgagcccuucagcaacaagggccagacccugguggugcaguucaccgugaagcacgagcagaacaucgacugcggcggcggcuacgugaagcuguuccccaacagccuggaccagaccgacaugcacggcgacagcgaguacaacaucauguucggccccgacaucugcggccccggcaccaagaaggugcacgugaucuucaacuacaagggcaagaacgugcugaucaacaaggacaucagaugcaaggacgacgaguucacccaccuguacacccugaucgugagacccgacaacaccuacgaggugaagaucgacaacagccagguggagagcggcagccuggaggacgacugggacuuccugccccccaagaagaucaaggaccccgacgccagcaagcccgaggacugggacgagagagccaagaucgacgaccccaccgacagcaagcccgaggacugggacaagcccgagcacauccccgaccccgacgccaagaagcccgaggacugggacgaggagauggacggcgagugggagccccccgugauccagaaccccgaguacaagggcgaguggaagcccagacagaucgacaaccccgacuacaagggcaccuggauccaccccgagaucgacaaccccgaguacagccccgaccccagcaucuacgccuacgacaacuucggcgugcugggccuggaccuguggcaggugaagagcggcaccaucuucgacaacuuccugaucaccaacgacgaggccuacgccgaggaguucggcaacgagaccuggggcgugaccaaggccgccgagaagcagaugaaggacaagcaggacgaggagcagagacugaaggaggaggaggaggacaagaagagaaaggaggaggaggaggccgaggacaaggaggacgacgaggacaaggacgaggacgaggaggacgaggaggacaaggaggaggacgaggaggaggacgugcccggccaggccaaggacgagcuguga

SEQ ID NO: 7591 - RNA, 1254 nt, Artificial Sequence
  derived and/or modified sequence opt5 from calreticulin__Homo_sapiens__AAA36582
augcugcucagcgugccccugcuucugggccuccuggggcuugccgucgcugagccugccguuuacuucaaggaacaguuucuggacggagauggcuggaccuccagauggaucgagucuaaacacaagagcgacuucgggaaauuugugcucuccucuggaaaguucuauggcgaugaagagaaagacaaggggcugcaaacaagccaggaugcgcgguuuuacgcucuguccgccucuuucgaaccguuuagcaacaagggacagacgcucgugguccaguucaccgugaaacaugagcaaaauauugacugcggcggcggguauguuaagcuguuucccaacucccuugaucagacagacaugcacggagauagcgaguacaauaucauguucggcccugacauuugugggcccggaaccaaaaaggugcaugucaucuuuaacuauaaaggcaagaaugugcugauuaacaaggauauccgcugcaaagacgaugaguucacacaccucuacacccugaucguuagaccugacaauacauaugaagugaagauugacaacucucaggucgaauccgggagccuugaggaugacugggauuuucugcccccuaaaaagaucaaagacccggaugccucuaagcccgaggacugggaugaacgggcuaaaauugacgauccuaccgacuccaagcccgaggauugggacaagccugaacauauccccgacccggaugccaaaaagccugaggacugggaugaagagauggacggagagugggaacccccugugauucagaaucccgaguacaaaggcgaauggaagccccgccaaaucgauaacccugacuacaaaggcacguggauucacccggagaucgauaaucccgaauauagcccugaccccucuaucuacgcuuaugauaacuucggggugcucggacuggaccuguggcaggucaaguccggcaccauuuucgauaauuuucucaucacaaacgacgaggccuacgcggaggaguucgggaaugaaaccuggggaguuacaaaggccgcugaaaaacagaugaaggauaaacaggacgaggaacaaagacugaaggaggaggaagaggacaaaaagcggaaggaagaggaggaagccgaggauaaagaagacgaugaggacaaggaugaagacgaggaggaugaagaggacaaagaagaggaugaagaggaggacgugccuggccaggcuaaggaugaacuuuga

SEQ ID NO: 7592 - RNA, 1254 nt, Artificial Sequence
  derived and/or modified sequence opt6 from calreticulin__Homo_sapiens__AAA36582
augcuauuaucaguaccacuucuauuaggauuauuaggauuagcgguagcagaaccagcaguauacuuuaaagaacaauuccuagauggagacggauggacaagcagauggauagaaagcaaacauaaaagcgauuucggaaaauuuguauuaaguucagguaaauucuauggagacgaagaaaaagauaaaggguuacaaacaucacaagaugcaagauucuaugccuuaucagcaucuuuugaaccauucaguaauaaaggacaaacauuaguaguacaauuuacaguaaaacaugaacaaaauauagauugugguggagguuauguaaaacuauuuccaaauucacuagaccaaacagacaugcacggagacagcgaauacaauauaauguucggaccagauauauguggaccaggaacaaaaaaaguacauguaauauucaauuauaaaggaaaaaauguacuaauaaacaaagacauaagauguaaagaugacgaauucacacaccuguacacgcuaauaguaagaccagacaacacauacgaaguaaaaauagauaacucacaaguugaaaguggaucacuagaagacgauugggacuuuuuaccaccaaaaaaaauaaaagacccugacgcaaguaaacccgaagacugggacgaacgagcaaaaauagacgauccaacagacucaaaaccggaagauugggauaaaccagaacacauaccagauccagaugcaaaaaagccagaagacugggacgaagaaauggacggagaaugggaaccaccaguaauacagaacccagaauauaaaggagaauggaaaccaagacaaauagauaaccccgacuacaaaggaacauggauacauccagaaauagauaacccagaauauaguccagauccaaguauauacgcauacgacaacuuuggagucuuaggacuagaucuauggcaaguaaaaaguggaacaauauuugacaauuucuuaauaacaaacgaugaagcguacgcagaagaauucggaaacgaaacauggggaguaacuaaagcagcugaaaaacaaaugaaagauaaacaagaugaagaacaaagguugaaagaagaagaagaggauaaaaaaagaaaagaagaagaggaagcagaagauaaagaagaugacgaagacaaagacgaagaugaagaagaugaagaagacaaagaagaagacgaagaagaagacguaccaggacaagcaaaagaugaauuauaa

SEQ ID NO: 7593 - protein, 384 aa, Artificial Sequence
  calreticulin__Homo_sapiens__Q96L12
MARALVQLWAICMLRVALATVYFQEEFLDGEHWRNRWLQSTNDSRFGHFRLSSGKFYGHKEKDKGLQTTQNGRFYAISARFKPFSNKGKTLVIQYTVKHEQKMDCGGGYIKVFPADIDQKNLNGKSQYYIMFGPDICGFDIKKVHVILHFKNKYHENKKLIRCKVDGFTHLYTLILRPDLSYDVKIDGQSIESGSIEYDWNLTSLKKETSPAESKDWEQTKDNKAQDWEKHFLDASTSKQSDWNGDLDGDWPAPMLQKPPYQDGLKPEGIHKDVWLHRKMKNTDYLTQYDLSEFENIGAIGLELWQVRSGTIFDNFLITDDEEYADNFGKATWGETKGPEREMDAIQAKEEMKKAREEEEEELLSGKINRHEHYFNQFHRRNEL

SEQ ID NO: 7594 - RNA, 1155 nt, Artificial Sequence
  calreticulin__Homo_sapiens__BAB71655
auggcccgggcuuugguccagcucugggccauaugcaugcugcgaguggcgcuggcuaccgucuauuuccaagaggaauuucuagacggagagcauuggagaaaccgaugguugcaguccaccaaugacucccgauuugggcauuuuagacuuucgucgggcaaguuuuauggucauaaagagaaagauaaaggucugcaaaccacucagaauggccgauucuaugccaucucugcacgcuucaaaccguucagcaauaaagggaaaacucugguuauucaguacacaguaaaacaugagcagaagauggacuguggagggggcuacauuaaggucuuuccugcagacauugaccagaagaaccugaauggaaaaucgcaauacuauauuauguuuggacccgauauuuguggauuugauaucaagaaaguucauguuauuuuacauuucaagaauaaguaucacgaaaacaagaaacugaucagguguaagguugauggcuucacacaccuguacacucuaauuuuaagaccagaucuuucuuaugaugugaaaauugauggucagucaauugaauccggcagcauagaguacgacuggaacuuaacaucacucaagaaggaaacguccccggcagaaucgaaggauugggaacagacuaaagacaacaaagcccaggacugggagaagcauuuucuggacgccagcaccagcaagcagagcgacuggaacggugaccuggauggggacuggccagcgccgaugcuccagaagcccccguaccaggauggccugaaaccagaagguauucauaaagacgucuggcuccaccguaagaugaagaauaccgacuauuugacgcaguaugaccucucagaauuugagaacauuggugccauuggccuggagcuuuggcaggugagaucuggaaccauuuuugauaacuuucugaucacagaugaugaagaguaugcagauaauuuuggcaaggccaccuggggcgaaaccaaggguccagaaagggagauggaugccauacaggccaaggaggaaaugaagaaggcccgcgaggaagaggaggaagagcugcugucgggaaaaauuaacaggcacgaacauuacuucaaucaauuucacagaaggaaugaacuuuag

SEQ ID NO: 7595 - RNA, 1155 nt, Artificial Sequence
  derived and/or modified sequence opt1 from calreticulin__Homo_sapiens__BAB71655
auggcccgcgcccuggugcagcucugggcgaucugcaugcugcggguggcccuggccaccguguacuuccaggaggaguuccucgacggcgagcacuggcgcaaccgguggcugcagagcaccaacgacucccgcuucgggcacuuccggcugagcuccggcaaguucuacgggcacaaggagaaggacaagggccuccagacgacccagaacgggcgcuucuacgccaucagcgcccgguucaagcccuucuccaacaagggcaagacccuggugauccaguacaccgucaagcacgagcagaagauggacugcggcgggggcuacaucaagguguucccggcggacaucgaccagaagaaccugaacggcaagagccaguacuacaucauguucgggcccgacaucugcggguucgacaucaagaaggugcacgucauccuccacuucaagaacaaguaccacgagaacaagaagcugauccgcugcaagguggacggcuucacgcaccuguacacccucauccugcggcccgaccuguccuacgacgugaagaucgacggccagagcaucgaguccgggagcaucgaguacgacuggaaccucaccucccugaagaaggagaccagccccgccgaguccaaggacugggagcagacgaaggacaacaaggcccaggacugggagaagcacuuccuggacgccagcaccuccaagcagagcgacuggaacggcgaccucgacggggacuggccggcgcccaugcugcagaagccgcccuaccaggacggccugaagcccgagggcauccacaaggacgucuggcuccaccgcaagaugaagaacaccgacuaccugacccaguacgaccuguccgaguucgagaacaucggggccaucggccucgagcuguggcagguccggagcgggacgaucuucgacaacuuccugaucaccgacgacgaggaguacgccgacaacuucggcaaggccaccuggggcgagaccaaggggcccgagcgcgagauggacgccauccaggcgaaggaggagaugaagaaggcccgggaggaggaggaggaggagcuccuguccggcaagaucaaccgccacgagcacuacuucaaccaguuccaccggcgcaacgagcuguga

SEQ ID NO: 7596 - RNA, 1155 nt, Artificial Sequence
  derived and/or modified sequence opt2 from calreticulin__Homo_sapiens__BAB71655
auggcccgcgcccucguccagcucugggccaucugcaugcuccgcgucgcccucgccaccgucuacuuccaggaggaguuccucgacggcgagcacuggcgcaaccgcuggcuccaguccaccaacgacucccgcuucggccacuuccgccucuccuccggcaaguucuacggccacaaggagaaggacaagggccuccagaccacccagaacggccgcuucuacgccaucuccgcccgcuucaagcccuucuccaacaagggcaagacccucgucauccaguacaccgucaagcacgagcagaagauggacugcggcggcggcuacaucaaggucuuccccgccgacaucgaccagaagaaccucaacggcaagucccaguacuacaucauguucggccccgacaucugcggcuucgacaucaagaagguccacgucauccuccacuucaagaacaaguaccacgagaacaagaagcucauccgcugcaaggucgacggcuucacccaccucuacacccucauccuccgccccgaccucuccuacgacgucaagaucgacggccaguccaucgaguccggcuccaucgaguacgacuggaaccucaccucccucaagaaggagaccucccccgccgaguccaaggacugggagcagaccaaggacaacaaggcccaggacugggagaagcacuuccucgacgccuccaccuccaagcaguccgacuggaacggcgaccucgacggcgacuggcccgcccccaugcuccagaagccccccuaccaggacggccucaagcccgagggcauccacaaggacgucuggcuccaccgcaagaugaagaacaccgacuaccucacccaguacgaccucuccgaguucgagaacaucggcgccaucggccucgagcucuggcagguccgcuccggcaccaucuucgacaacuuccucaucaccgacgacgaggaguacgccgacaacuucggcaaggccaccuggggcgagaccaagggccccgagcgcgagauggacgccauccaggccaaggaggagaugaagaaggcccgcgaggaggaggaggaggagcuccucuccggcaagaucaaccgccacgagcacuacuucaaccaguuccaccgccgcaacgagcucuga

SEQ ID NO: 7597 - RNA, 1155 nt, Artificial Sequence
  derived and/or modified sequence opt3 from calreticulin__Homo_sapiens__BAB71655
auggccagagcucuggugcagcucugggcaaucugcaugcuuagggucgcccuggcgaccguuuacuuccaagaggaauuuuuggacggcgagcacuggcggaaccgcugguuacagagcacaaaugauucccgauucgggcauuuucgucugucuucaggaaaguucuauggucacaaagaaaaggacaaaggccuacagacuacgcagaacgggagauuuuacgcuauuagugccagguucaagcccuuuagcaauaaaggaaagacccucgugauacaauauacaguaaagcaugagcagaaaauggauuguggcgguggguacaucaagguguucccugcagacauugaucagaaaaaccugaauggaaagucccaguauuacaucauguuuggcccagacauuugcggcuucgauaucaaaaagguccacgugauacuucauuuuaagaacaaauaucacgaaaauaagaaacugauccgguguaagguugacggguucacucacuuguacacccucauucugcgcccggaucugucuuacgacgugaaaaucgauggacaaucgauugagucagguagcaucgaguaugacuggaaccucacaaguuuaaagaaagaaaccucccccgccgagucuaaggauugggaacagacuaaggacaauaaagcucaggacugggagaagcauuuucuggaugcaagcacauccaaacagucagacuggaacggcgaucuugacggggauuggccugccccaauguugcaaaagcccccuuaccaggacggacugaaaccagagggcauacacaaggaugucuggcuacauagaaagaugaaaaauaccgacuaucucacgcaguacgaucugagugaauuugagaacauuggugcuaucgggcuugaacuguggcaagugaggagcggaacuauuuucgacaauuucuugaucaccgaugacgaggaauaugccgacaacuucggcaaggcgacauggggcgagacuaaagggcccgagcgggaaauggaugcaauccaggccaaggaggaaaugaaaaaggcucgcgaggaagaggaggaggaacuccugucuggaaagauuaaucgacacgaacacuacuuuaaccaguuccauagaaggaacgaguuauga

SEQ ID NO: 7598 - RNA, 1155 nt, Artificial Sequence
  derived and/or modified sequence opt4 from calreticulin__Homo_sapiens__BAB71655
auggccagagcccuggugcagcugugggccaucugcaugcugagaguggcccuggccaccguguacuuccaggaggaguuccuggacggcgagcacuggagaaacagauggcugcagagcaccaacgacagcagauucggccacuucagacugagcagcggcaaguucuacggccacaaggagaaggacaagggccugcagaccacccagaacggcagauucuacgccaucagcgccagauucaagcccuucagcaacaagggcaagacccuggugauccaguacaccgugaagcacgagcagaagauggacugcggcggcggcuacaucaagguguuccccgccgacaucgaccagaagaaccugaacggcaagagccaguacuacaucauguucggccccgacaucugcggcuucgacaucaagaaggugcacgugauccugcacuucaagaacaaguaccacgagaacaagaagcugaucagaugcaagguggacggcuucacccaccuguacacccugauccugagacccgaccugagcuacgacgugaagaucgacggccagagcaucgagagcggcagcaucgaguacgacuggaaccugaccagccugaagaaggagaccagccccgccgagagcaaggacugggagcagaccaaggacaacaaggcccaggacugggagaagcacuuccuggacgccagcaccagcaagcagagcgacuggaacggcgaccuggacggcgacuggcccgcccccaugcugcagaagccccccuaccaggacggccugaagcccgagggcauccacaaggacguguggcugcacagaaagaugaagaacaccgacuaccugacccaguacgaccugagcgaguucgagaacaucggcgccaucggccuggagcuguggcaggugagaagcggcaccaucuucgacaacuuccugaucaccgacgacgaggaguacgccgacaacuucggcaaggccaccuggggcgagaccaagggccccgagagagagauggacgccauccaggccaaggaggagaugaagaaggccagagaggaggaggaggaggagcugcugagcggcaagaucaacagacacgagcacuacuucaaccaguuccacagaagaaacgagcuguga

SEQ ID NO: 7599 - RNA, 1155 nt, Artificial Sequence
  derived and/or modified sequence opt5 from calreticulin__Homo_sapiens__BAB71655
auggccagagcucuggugcagcucugggccaucugcaugcugcgggucgcgcuugcuaccguuuacuuccaagaggaauuucuggacggcgagcacuggcgcaacagauggcuccagagcacaaaugauucccgguucgggcauuuucgccugucuagcggaaaguucuauggccacaaagaaaaggacaaagggcuucagacgacccagaacggaagauuuuacgccauuuccgcccgguucaagcccuuuucuaauaaaggcaagacacuggugauccaauauaccgugaagcaugagcagaaaauggauugugggggaggcuacauuaaggucuucccugcugacaucgaucagaaaaaccucaauggcaagagccaguauuacauuauguuugggccggacaucugcggauucgauaucaaaaaggugcacguuauucugcauuuuaagaacaaauaucacgaaaauaagaaacugauccgcuguaagguggacggcuucacacaccucuacacccugauucuuagacccgaucuguccuacgacgucaaaaucgaugggcaaucuauugagagcggauccaucgaguaugacuggaaccucacaagccugaagaaagaaaccucuccugccgaguccaaggauugggaacagacgaaggacaauaaagcucaggacugggagaagcauuuucuugaugccagcaccucuaaacaguccgacuggaacggcgaucuggacggggauuggcccgcgccuaugcuccaaaagcccccuuaccaggacggacugaaaccggagggcauucacaaggauguguggcugcaucggaagaugaaaaauacagacuaucucacccaguacgaucugagcgaguucgagaacaucggcgccaucgggcuugaacuguggcaaguucgcucuggaacaauuuucgacaauuuucucaucaccgaugacgaggaauaugcugacaacuucggcaaggccacguggggagagacaaaagggcccgagagagaaauggaugcuauucaggccaaggaggaaaugaaaaaggcgcgggaggaagaggaggaagaacugcuuuccggcaagaucaaucgccacgaacacuacuuuaaccaguuccauagacggaacgagcuguga

SEQ ID NO: 7600 - RNA, 1155 nt, Artificial Sequence
  derived and/or modified sequence opt6 from calreticulin__Homo_sapiens__BAB71655
auggccagagcacuaguccaauuaugggcaauaugcauguuacgaguugcacuagcuacaguauacuuucaagaagaauuccuagacggagaacacuggcgaaacagauggcuacaaucaacaaaugauucaagauucggacacuucagacuaaguagcggaaaauucuauggacacaaagaaaaagacaaaggccuacaaacaacacaaaauggaagauuuuaugcaauaucagcaagauucaaaccauucucaaauaaaggaaaaacacuaguaauacaauacacaguaaaacaugaacagaaaauggacugcggaggaggauacaucaaggucuucccagcagacauagaccaaaaaaacuuaaacggcaaaucacaauacuacauaauguuuggaccagacaucuguggauucgacauaaaaaaaguacauguaauacuacacuucaaaaauaaauaccacgaaaauaaaaaacuaauaagaugcaaaguagacggauuuacacacuuauacacacuaauauuacgaccagaccuaucauacgacguaaaaaucgacggacaaucaauagaaucaggaucaauagaauacgacuggaaccuaacaucauuaaaaaaagaaacaucaccagcagaaucaaaagacugggaacaaacaaaagacaacaaagcacaagacugggaaaaacacuuccuagacgcaagcacaagcaaacaaucagacuggaacggagaucuagacggagacuggccagcaccaauguuacaaaaaccaccuuaucaagacggacuaaaaccagaaggaauacauaaagacguaugguuacacaggaaaaugaaaaauacagacuaccuaacacaauacgacuuaucagaauucgaaaacauaggagcaauaggacuagaacuauggcaaguaagaaguggaacaauauucgacaauuuccuaauaacagacgacgaagaauacgcagacaauuucgguaaagcaacauggggcgaaacaaaaggaccagaaagagaaauggacgcaauacaagcaaaagaagaaaugaaaaaagcaagagaagaagaagaagaagaacuacuuaguggcaaaauaaacagacacgaacacuacuucaaccaauuucacagaagaaaugaauuauaa

SEQ ID NO: 7601 - protein, 999 aa, Artificial Sequence
  GRP170_(ORP150)__Homo_sapiens__Q9Y4L1
MADKVRRQRPRRRVCWALVAVLLADLLALSDTLAVMSVDLGSESMKVAIVKPGVPMEIVLNKESRRKTPVIVTLKENERFFGDSAASMAIKNPKATLRYFQHLLGKQADNPHVALYQARFPEHELTFDPQRQTVHFQISSQLQFSPEEVLGMVLNYSRSLAEDFAEQPIKDAVITVPVFFNQAERRAVLQAARMAGLKVLQLINDNTATALSYGVFRRKDINTTAQNIMFYDMGSGSTVCTIVTYQMVKTKEAGMQPQLQIRGVGFDRTLGGLEMELRLRERLAGLFNEQRKGQRAKDVRENPRAMAKLLREANRLKTVLSANADHMAQIEGLMDDVDFKAKVTRVEFEELCADLFERVPGPVQQALQSAEMSLDEIEQVILVGGATRVPRVQEVLLKAVGKEELGKNINADEAAAMGAVYQAAALSKAFKVKPFVVRDAVVYPILVEFTREVEEEPGIHSLKHNKRVLFSRMGPYPQRKVITFNRYSHDFNFHINYGDLGFLGPEDLRVFGSQNLTTVKLKGVGDSFKKYPDYESKGIKAHFNLDESGVLSLDRVESVFETLVEDSAEEESTLTKLGNTISSLFGGGTTPDAKENGTDTVQEEEESPAEGSKDEPGEQVELKEEAEAPVEDGSQPPPPEPKGDATPEGEKATEKENGDKSEAQKPSEKAEAGPEGVAPAPEGEKKQKPARKRRMVEEIGVELVVLDLPDLPEDKLAQSVQKLQDLTLRDLEKQEREKAANSLEAFIFETQDKLYQPEYQEVSTEEQREEISGKLSAASTWLEDEGVGATTVMLKEKLAELRKLCQGLFFRVEERKKWPERLSALDNLLNHSSMFLKGARLIPEMDQIFTEVEMTTLEKVINETWAWKNATLAEQAKLPATEKPVLLSKDIEAKMMALDREVQYLLNKAKFTKPRPRPKDKNGTRAEPPLNASASDQGEKVIPPAGQTEDAEPISEPEKVETGSEPGDTEPLELGGPGAEPEQKEQSTGQKRPLKNDEL

SEQ ID NO: 7602 - RNA, 3000 nt, Artificial Sequence
  GRP170_(ORP150)__Homo_sapiens__AAC50947
auggcagacaaaguuaggaggcagaggccgaggaggcgagucuguugggccuugguggcugugcucuuggcagaccuguuggcacugagugauacacuggcagugaugucuguggaccugggcagugaguccaugaagguggccauugucaaaccuggagugcccauggaaauugucuugaauaaggaaucucggaggaaaacaccggugaucgugacccugaaagaaaaugaaagauucuuuggagacagugcagcaagcauggcgauuaagaauccaaaggcuacgcuacguuacuuccagcaccuccuggggaagcaggcagauaacccccauguagcucuuuaccaggcccgcuucccggagcacgagcugacuuucgacccacagaggcagacugugcacuuucagaucagcucgcagcugcaguucucaccugaggaaguguugggcaugguucucaauuauucucguucucuagcugaagauuuugcagagcagcccaucaaggaugcagugaucaccgugccagucuucuucaaccaggccgagcgccgagcugugcugcaggcugcucguauggcuggccucaaagugcugcagcucaucaaugacaacaccgccacugcccucagcuauggugucuuccgccggaaagauauuaacaccacugcccagaauaucauguucuaugacaugggcucaggcagcaccguaugcaccauugugaccuaccagauggugaagacuaaggaagcugggaugcagccacagcugcagauccggggaguaggauuugaccguacccuggggggccuggagauggagcuccggcuucgagaacgccuggcugggcuuuucaaugagcagcgcaagggucagagagcaaaggaugugcgggagaacccgcgugccauggccaagcugcugcgugaggcuaaucggcucaaaaccguccucagugccaacgcugaccacauggcacagauugaaggccugauggaugauguggacuucaaggcaaaagugacucguguggaauuugaggaguugugugcagacuuguuugagcgggugccugggccuguacagcaggcccuccagagugccgaaaugagucuggaugagauugagcaggugauccugguggguggggccacucggguccccagaguucaggaggugcugcugaaggccgugggcaaggaggagcuggggaagaacaucaaugcagaugaagcagccgccaugggggcaguguaccaggcagcugcgcucagcaaagccuuuaaagugaagccauuugucguccgagaugcaguggucuaccccauccugguggaguucacgagggagguggaggaggagccugggauucacagccugaagcacaauaaacggguacucuucucucggauggggcccuacccucaacgcaaagucaucaccuuuaaccgcuacagccaugauuucaacuuccacaucaacuacggcgaccugggcuuccuggggccugaagaucuucggguauuuggcucccagaaucugaccacagugaagcuaaaaggggugggugacagcuucaagaaguauccugacuacgaguccaagggcaucaaggcucacuucaaccuggaugagaguggcgugcucagucuagacaggguggagucuguauuugagacacugguagaggacagcgcagaagaggaaucuacucucaccaaacuuggcaacaccauuuccagccuguuuggaggcgguaccacaccagaugccaaggagaaugguacugauacuguccaggaggaagaggagagcccugcagaggggagcaaggacgagccuggggagcagguggagcucaaggaggaagcugaggccccaguggaggauggcucucagcccccacccccugaaccuaagggagaugcaaccccugagggagaaaaggccacagaaaaagaaaauggggacaagucugaggcccagaaaccaagugagaaggcagaggcagggccugagggcgucgcuccagccccagagggagagaagaagcagaagcccgccaggaagcggcgaaugguagaggagaucgggguggagcugguuguucuggaccugccugacuugccagaggauaagcuggcucagucggugcagaaacuucaggacuugacacuccgagaccuggagaagcaggaacgggaaaaagcugccaacagcuuggaagcguucauauuugagacccaggacaagcuguaccagcccgaguaccaggaaguguccacagaggagcagcgugaggagaucucugggaagcucagcgccgcauccaccuggcuggaggaugaggguguuggagccaccacagugauguugaaggagaagcuggcugagcugaggaagcugugccaagggcuguuuuuucggguagaggagcgcaagaaguggcccgaacggcugucugcccucgauaaucuccucaaccauuccagcauguuccucaagggggcccggcucaucccagagauggaccagaucuucacugagguggagaugacaacguuagagaaagucaucaaugagaccugggccuggaagaaugcaacucuggccgagcaggcuaagcugcccgccacagagaagccuguguugcucucaaaagacauugaagcuaagaugauggcccuggaccgagaggugcaguaucugcucaauaaggccaaguuuaccaagccccggccccggccuaaggacaagaaugggacccgggcagagccaccccucaaugccagugccagugaccagggggagaaggucaucccuccagcaggccagacugaagaugcagagcccauuucagaaccugagaaaguagagacuggauccgagccaggagacacugagccuuuggaguuaggagguccuggagcagaaccugaacagaaagaacaaucgacaggacagaagcggccuuugaagaacgacgaacuauaa

SEQ ID NO: 7603 - RNA, 3000 nt, Artificial Sequence
  derived and/or modified sequence opt1 from GRP170_(ORP150)__Homo_sapiens__AAC50947
auggccgacaaggugcgccggcagcgcccccggcgccgggucugcugggcccugguggcggugcuccuggccgaccugcucgcccugagcgacacccuggccgucauguccguggaccucggcagcgaguccaugaagguggccaucgucaagccgggggugcccauggagaucgugcugaacaaggagagccgccggaagacccccgucaucgugacgcugaaggagaacgagcgcuucuucggcgacuccgcggccagcauggccaucaagaaccccaaggccacccuccgguacuuccagcaccuccuggggaagcaggcggacaacccgcacguggcccuguaccaggcccgcuuccccgagcacgagcugaccuucgacccccagcggcagaccguccacuuccagaucuccagccagcugcaguucucccccgaggaggugcucggcauggugcugaacuacagccgcucccuggccgaggacuucgccgagcagccgaucaaggacgcggucaucacggugcccguguucuucaaccaggccgagcggcgcgccguccuccaggccgcccggauggcggggcugaaggugcugcagcucaucaacgacaacaccgccaccgcccugagcuacggcguguuccgccggaaggacaucaacaccacggcccagaacaucauguucuacgacaugggcuccgggagcaccgucugcaccaucgugaccuaccagauggugaagacgaaggaggccggcaugcagccccagcugcagauccgcggggucggcuucgaccggacccucgggggccuggagauggagcugcgccuccgggagcgccuggcgggccuguucaacgagcagcgcaaggggcagcgggccaaggacgugcgcgagaacccccgggccauggccaagcuccugcgcgaggccaaccggcugaagaccguccucuccgcgaacgccgaccacauggcccagaucgagggccugauggacgacguggacuucaaggccaaggugacccgcgucgaguucgaggagcugugcgcggaccucuucgagcgggugccggggcccgugcagcaggcccugcagagcgccgagaugucccuggacgagaucgagcaggucauccucgugggcggcgccacgcgcgugccccggguccaggaggugcugcugaaggccguggggaaggaggagcucggcaagaacaucaacgcggacgaggccgccgccaugggggccgucuaccaggcggccgcccugagcaaggccuucaaggugaagcccuucgugguccgcgacgccgugguguacccgauccuggucgaguucacccgggagguggaggaggagcccggcauccacucccucaagcacaacaagcgcgugcuguucagccggauggggcccuacccccagcgcaaggucaucaccuucaaccgguacagccacgacuucaacuuccacaucaacuacggcgaccugggcuuccucgggccggaggaccugcgcguguucggcucccagaaccugaccacggugaagcugaagggggucggcgacagcuucaagaaguaccccgacuacgaguccaaggggaucaaggcgcacuucaaccucgacgagagcggcgugcugucccuggaccggguggagagcgucuucgagacccucguggaggacuccgccgaggaggagagcacccugaccaagcugggcaacacgaucuccagccucuucgggggcgggaccacccccgacgccaaggagaacggcaccgacacggugcaggaggaggaggagucccccgccgaggggagcaaggacgagccgggcgagcaggucgagcugaaggaggaggcggaggcccccguggaggacggcucccagccgccgccgcccgagcccaagggggacgccacccccgagggcgagaaggccaccgagaaggagaacggggacaagagcgaggcccagaagcccuccgagaaggcggaggccggccccgagggcguggcccccgcccccgagggggagaagaagcagaagcccgcccgcaagcggcgcauggucgaggagaucggcguggagcuggugguccucgaccugcccgaccugcccgaggacaagcucgcgcagagcgugcagaagcugcaggaccugacccuccgcgaccuggagaagcaggagcgggagaaggccgccaacucccuggaggccuucaucuucgagacgcaggacaagcucuaccagccggaguaccaggaggugagcaccgaggagcagcgcgaggagaucuccgggaagcugagcgccgcgagcaccuggcuggaggacgagggcgucggggccaccacggugaugcucaaggagaagcuggccgagcugcggaagcucugccagggccuguucuuccgcguggaggagcggaagaaguggcccgagcgccuguccgcccucgacaaccugcugaaccacagcuccauguuccucaagggcgcgcggcugauccccgagauggaccagaucuucaccgaggucgagaugaccacccuggagaaggugaucaacgagaccugggccuggaagaacgccacgcucgccgagcaggccaagcugcccgcgaccgagaagccggugcugcucagcaaggacaucgaggccaagaugauggcccuggaccgcgagguccaguaccugcucaacaaggccaaguucaccaagccccggccccgccccaaggacaagaacgggacccgggccgagccgccccugaacgcguccgccagcgaccagggcgagaaggugaucccgcccgccgggcagacggaggacgccgagcccaucuccgagcccgagaagguggagaccggcagcgagcccggggacaccgagccccuggagcucggcggcccgggggccgagcccgagcagaaggagcaguccaccggccagaagcgcccccugaagaacgacgagcuguga

SEQ ID NO: 7604 - RNA, 3000 nt, Artificial Sequence
  derived and/or modified sequence opt2 from GRP170_(ORP150)__Homo_sapiens__AAC50947
auggccgacaagguccgccgccagcgcccccgccgccgcgucugcugggcccucgucgccguccuccucgccgaccuccucgcccucuccgacacccucgccgucauguccgucgaccucggcuccgaguccaugaaggucgccaucgucaagcccggcguccccauggagaucguccucaacaaggagucccgccgcaagacccccgucaucgucacccucaaggagaacgagcgcuucuucggcgacuccgccgccuccauggccaucaagaaccccaaggccacccuccgcuacuuccagcaccuccucggcaagcaggccgacaacccccacgucgcccucuaccaggcccgcuuccccgagcacgagcucaccuucgacccccagcgccagaccguccacuuccagaucuccucccagcuccaguucucccccgaggagguccucggcaugguccucaacuacucccgcucccucgccgaggacuucgccgagcagcccaucaaggacgccgucaucaccguccccgucuucuucaaccaggccgagcgccgcgccguccuccaggccgcccgcauggccggccucaagguccuccagcucaucaacgacaacaccgccaccgcccucuccuacggcgucuuccgccgcaaggacaucaacaccaccgcccagaacaucauguucuacgacaugggcuccggcuccaccgucugcaccaucgucaccuaccagauggucaagaccaaggaggccggcaugcagccccagcuccagauccgcggcgucggcuucgaccgcacccucggcggccucgagauggagcuccgccuccgcgagcgccucgccggccucuucaacgagcagcgcaagggccagcgcgccaaggacguccgcgagaacccccgcgccauggccaagcuccuccgcgaggccaaccgccucaagaccguccucuccgccaacgccgaccacauggcccagaucgagggccucauggacgacgucgacuucaaggccaaggucacccgcgucgaguucgaggagcucugcgccgaccucuucgagcgcguccccggccccguccagcaggcccuccaguccgccgagaugucccucgacgagaucgagcaggucauccucgucggcggcgccacccgcgucccccgcguccaggagguccuccucaaggccgucggcaaggaggagcucggcaagaacaucaacgccgacgaggccgccgccaugggcgccgucuaccaggccgccgcccucuccaaggccuucaaggucaagcccuucgucguccgcgacgccgucgucuaccccauccucgucgaguucacccgcgaggucgaggaggagcccggcauccacucccucaagcacaacaagcgcguccucuucucccgcaugggccccuacccccagcgcaaggucaucaccuucaaccgcuacucccacgacuucaacuuccacaucaacuacggcgaccucggcuuccucggccccgaggaccuccgcgucuucggcucccagaaccucaccaccgucaagcucaagggcgucggcgacuccuucaagaaguaccccgacuacgaguccaagggcaucaaggcccacuucaaccucgacgaguccggcguccucucccucgaccgcgucgaguccgucuucgagacccucgucgaggacuccgccgaggaggaguccacccucaccaagcucggcaacaccaucuccucccucuucggcggcggcaccacccccgacgccaaggagaacggcaccgacaccguccaggaggaggaggagucccccgccgagggcuccaaggacgagcccggcgagcaggucgagcucaaggaggaggccgaggcccccgucgaggacggcucccagccccccccccccgagcccaagggcgacgccacccccgagggcgagaaggccaccgagaaggagaacggcgacaaguccgaggcccagaagcccuccgagaaggccgaggccggccccgagggcgucgcccccgcccccgagggcgagaagaagcagaagcccgcccgcaagcgccgcauggucgaggagaucggcgucgagcucgucguccucgaccuccccgaccuccccgaggacaagcucgcccaguccguccagaagcuccaggaccucacccuccgcgaccucgagaagcaggagcgcgagaaggccgccaacucccucgaggccuucaucuucgagacccaggacaagcucuaccagcccgaguaccaggaggucuccaccgaggagcagcgcgaggagaucuccggcaagcucuccgccgccuccaccuggcucgaggacgagggcgucggcgccaccaccgucaugcucaaggagaagcucgccgagcuccgcaagcucugccagggccucuucuuccgcgucgaggagcgcaagaaguggcccgagcgccucuccgcccucgacaaccuccucaaccacuccuccauguuccucaagggcgcccgccucauccccgagauggaccagaucuucaccgaggucgagaugaccacccucgagaaggucaucaacgagaccugggccuggaagaacgccacccucgccgagcaggccaagcuccccgccaccgagaagcccguccuccucuccaaggacaucgaggccaagaugauggcccucgaccgcgagguccaguaccuccucaacaaggccaaguucaccaagccccgcccccgccccaaggacaagaacggcacccgcgccgagcccccccucaacgccuccgccuccgaccagggcgagaaggucaucccccccgccggccagaccgaggacgccgagcccaucuccgagcccgagaaggucgagaccggcuccgagcccggcgacaccgagccccucgagcucggcggccccggcgccgagcccgagcagaaggagcaguccaccggccagaagcgcccccucaagaacgacgagcucuga

SEQ ID NO: 7605 - RNA, 3000 nt, Artificial Sequence
  derived and/or modified sequence opt3 from GRP170_(ORP150)__Homo_sapiens__AAC50947
auggccgacaaggugagaaggcagcggccccgccgacgugucugcugggcucugguugcagugcuccuugccgaucuguuggcguuaagcgacacccuggcuguaauguccguggaucuaggcucugagucaaugaaagucgccaucgugaagccugggguuccaauggaaauugugcucaacaaagagaguagaaggaagacaccggucauagugacucugaaagaaaaugagcgguucuuuggagacagcgcagccuccauggcuaucaagaaccccaaggcaacgcuucgcuacuuccaacaccuguuggguaaacaggccgauaauccucauguagcucucuaucaggccagauuuccagaacacgagcugaccuucgacccccagaggcaaacaguucauuuucagauuucuucgcagcugcaguucucaccugaggaagugcucggcauggucuuaaacuacagccggagucuggcggaggauuuugcagaacaaccaaucaaggacgccgugauuacugugcccgucuucuuuaaucaggcugagcgccgagccguucuucaggcagcuagaauggccggguugaaagugcugcagcuaaucaacgauaauaccgcgacagcccucuccuauggaguauucaggcggaaggacauaaacaccacugcacaaaauaucauguuuuacgauaugggcucugguagcacaguguguaccauugucacguaucagauggugaaaacuaaggaggcugggaugcagccucaacugcagauccguggaguuggcuucgaccgcacccuuggcgggcuggaaauggaguugagacucagggaacggcuggccggauuauuuaacgagcagcgaaagggucagcgcgcuaaagaugugagagaaaauccaagggccauggcaaagcugcuccgggaggccaaccgccuuaaaacaguccuguccgcuaaugcggaccacauggcacaaauugagggcuugauggacgauguggacuucaaggccaaaguaacuagaguugaguucgaggaacuaugcgcugaucuguuugagagggugccggggcccguccagcaggcccuccagucagcagaaaugagucuggacgagaucgagcaagugauacuugucggaggcgccacccgugugccucggguucaggaagugcuguugaaggcuguagguaaagaggaacucgggaagaacauuaaugccgaugaggcagcggcuaugggagccgucuaccaggcagccgcucugagcaaggccuucaaagugaagccauuuguugugcgagacgcagucguguaucccaucuuaguagaguucacaagagagguggaggaagaaccuggcauucauucucugaaacacaacaagaggguucuauuuucccgcaugggcccauacccccagcggaaagucaucaccuucaacagauacucacacgauuuuaauuuccauaucaacuauggggaccucggauuucuggguccggaagaucuuaggguguucggcagccaaaauuugacgacugugaagcugaagggggucggagacaguuuuaaaaaguacccugauuaugagucuaaaggcauuaaggcucacuucaaccucgacgaguccgguguucugagccuugaccgcguggaaucgguguuugagacacugguagaagauucugccgaggaagaguccaccuugacuaaacucgggaauacaauaucaagucuguucggcggaggcaccacgcccgacgcgaaggagaacgggaccgauacaguccaggaagaggaagagagcccagccgaaggauccaaggacgagccuggugaacagguggaauuaaaagaggaagcugaggcacccguugaagauggcucucagccacccccuccagagccgaagggggacgccacucccgagggagaaaaagcuaccgagaaggaaaauggcgauaaaagcgaggcccaaaagccuucagagaaggcagaagcggguccagaggggguggcccccgcuccugaaggcgagaaaaagcagaaaccagcccgaaagcggcguauggucgaagagaucggaguggagcugguugugcuagaccuccccgaucugccggaagacaaacuugcacagaguguacaaaaguugcaggaucugacacucagagaccuggagaaacaggaaagggagaaggcugccaacuccuuagaagcauucauuuuugagacucaggauaagcuguaccaaccugaguaucaggaagucagcaccgaggaacagcgcgaggaaaucucuggcaaacuuucagccgcuaguacaugguuggaggacgagggggugggagcgaccacugugaugcucaaggaaaaacuggccgagcuacggaagcugugucagggucucuucuuuagagucgaagagaggaaaaaguggccagagcgacugagcgcacuugacaauuugcugaaccauuccucuauguucuuaaagggcgcucgccucauacccgaaauggaucaaauuuuuacggagguugaaaugacaacccuggagaaagugaucaaugaaacuugggccuggaagaacgccacccuugcugagcaggcaaaacugccugccacagagaagcccguauugcucucgaaagacaucgaagcgaagaugauggcucuggaucgggaggugcaguaccuacugaauaaggccaaauucaccaagccaagaccuaggcccaaagacaagaacgggacucgugcagaaccaccgcucaaugccagcgcuuccgaucagggagagaaagucauuccucccgcaggccaaacagaagacgccgagccaaucucagagcccgaaaagguggagacggguagugaaccuggggauaccgagccacuggaacuuggcggacccggcgcggagccugagcagaaggaacagucuacugggcaaaaacgcccguugaagaacgacgagcuguga

SEQ ID NO: 7606 - RNA, 3000 nt, Artificial Sequence
  derived and/or modified sequence opt4 from GRP170_(ORP150)__Homo_sapiens__AAC50947
auggccgacaaggugagaagacagagacccagaagaagagugugcugggcccugguggccgugcugcuggccgaccugcuggcccugagcgacacccuggccgugaugagcguggaccugggcagcgagagcaugaagguggccaucgugaagcccggcgugcccauggagaucgugcugaacaaggagagcagaagaaagacccccgugaucgugacccugaaggagaacgagagauucuucggcgacagcgccgccagcauggccaucaagaaccccaaggccacccugagauacuuccagcaccugcugggcaagcaggccgacaacccccacguggcccuguaccaggccagauuccccgagcacgagcugaccuucgacccccagagacagaccgugcacuuccagaucagcagccagcugcaguucagccccgaggaggugcugggcauggugcugaacuacagcagaagccuggccgaggacuucgccgagcagcccaucaaggacgccgugaucaccgugcccguguucuucaaccaggccgagagaagagccgugcugcaggccgccagaauggccggccugaaggugcugcagcugaucaacgacaacaccgccaccgcccugagcuacggcguguucagaagaaaggacaucaacaccaccgcccagaacaucauguucuacgacaugggcagcggcagcaccgugugcaccaucgugaccuaccagauggugaagaccaaggaggccggcaugcagccccagcugcagaucagaggcgugggcuucgacagaacccugggcggccuggagauggagcugagacugagagagagacuggccggccuguucaacgagcagagaaagggccagagagccaaggacgugagagagaaccccagagccauggccaagcugcugagagaggccaacagacugaagaccgugcugagcgccaacgccgaccacauggcccagaucgagggccugauggacgacguggacuucaaggccaaggugaccagaguggaguucgaggagcugugcgccgaccuguucgagagagugcccggccccgugcagcaggcccugcagagcgccgagaugagccuggacgagaucgagcaggugauccuggugggcggcgccaccagagugcccagagugcaggaggugcugcugaaggccgugggcaaggaggagcugggcaagaacaucaacgccgacgaggccgccgccaugggcgccguguaccaggccgccgcccugagcaaggccuucaaggugaagcccuucguggugagagacgccgugguguaccccauccugguggaguucaccagagagguggaggaggagcccggcauccacagccugaagcacaacaagagagugcuguucagcagaaugggccccuacccccagagaaaggugaucaccuucaacagauacagccacgacuucaacuuccacaucaacuacggcgaccugggcuuccugggccccgaggaccugagaguguucggcagccagaaccugaccaccgugaagcugaagggcgugggcgacagcuucaagaaguaccccgacuacgagagcaagggcaucaaggcccacuucaaccuggacgagagcggcgugcugagccuggacagaguggagagcguguucgagacccugguggaggacagcgccgaggaggagagcacccugaccaagcugggcaacaccaucagcagccuguucggcggcggcaccacccccgacgccaaggagaacggcaccgacaccgugcaggaggaggaggagagccccgccgagggcagcaaggacgagcccggcgagcagguggagcugaaggaggaggccgaggcccccguggaggacggcagccagccccccccccccgagcccaagggcgacgccacccccgagggcgagaaggccaccgagaaggagaacggcgacaagagcgaggcccagaagcccagcgagaaggccgaggccggccccgagggcguggcccccgcccccgagggcgagaagaagcagaagcccgccagaaagagaagaaugguggaggagaucggcguggagcugguggugcuggaccugcccgaccugcccgaggacaagcuggcccagagcgugcagaagcugcaggaccugacccugagagaccuggagaagcaggagagagagaaggccgccaacagccuggaggccuucaucuucgagacccaggacaagcuguaccagcccgaguaccaggaggugagcaccgaggagcagagagaggagaucagcggcaagcugagcgccgccagcaccuggcuggaggacgagggcgugggcgccaccaccgugaugcugaaggagaagcuggccgagcugagaaagcugugccagggccuguucuucagaguggaggagagaaagaaguggcccgagagacugagcgcccuggacaaccugcugaaccacagcagcauguuccugaagggcgccagacugauccccgagauggaccagaucuucaccgagguggagaugaccacccuggagaaggugaucaacgagaccugggccuggaagaacgccacccuggccgagcaggccaagcugcccgccaccgagaagcccgugcugcugagcaaggacaucgaggccaagaugauggcccuggacagagaggugcaguaccugcugaacaaggccaaguucaccaagcccagacccagacccaaggacaagaacggcaccagagccgagcccccccugaacgccagcgccagcgaccagggcgagaaggugaucccccccgccggccagaccgaggacgccgagcccaucagcgagcccgagaagguggagaccggcagcgagcccggcgacaccgagccccuggagcugggcggccccggcgccgagcccgagcagaaggagcagagcaccggccagaagagaccccugaagaacgacgagcuguga

SEQ ID NO: 7607 - RNA, 3000 nt, Artificial Sequence
  derived and/or modified sequence opt5 from GRP170_(ORP150)__Homo_sapiens__AAC50947
auggccgacaaggugagacggcagcgccccagacggcgcgucugcugggcucugguugccgugcuccuggcggaucuucuggcucucagcgacacccuggccgugauguccgucgaucuuggcucugagagcaugaaaguggccaucguuaagccuggggugccgauggaaaucguccugaacaaagaguccagacggaagacacccgugaucguuacgcucaaagaaaaugagcgcuucuuuggagacucugcugccagcauggcuauuaagaacccuaaggccacccugagauacuuccaacaucugcucggcaaacaggcggauaauccccacguggcccuguaucaggcucgguuuccugaacacgagcuuacauucgacccccagcgccaaaccguccauuuucagaucuccucucagcugcaguucagcccugaggaagugcucgggauggugcugaacuacuccagaagccuugccgaggauuuugcugaacaaccgauuaaggacgccgucaucacaguucccguguucuuuaaucaggcggagcggcgcgccgugcugcaggcugccagaauggcuggacucaaaguccugcagcugaucaacgauaauaccgccacagcccucucuuauggcguguuccggcgcaaggacauuaacaccacggcucaaaauaucauguuuuacgauaugggguccggaagcaccguuuguacaauugugaccuaucagauggucaaaacaaaggaggcgggcaugcagccucaacugcagaucagaggcgugggguucgaccggacccuuggaggccuggaaauggagcucagacugcgcgaacggcuugccgggcuguuuaacgagcagagaaagggacagcgcgcuaaagauguucgggaaaaucccagagccauggccaagcuccugcgcgaggcuaaccggcugaaaacggugcucucugccaaugcggaccacauggcucaaauugagggccugauggacgaugucgacuucaaggccaaagugacaagagucgaguucgaggaacuuugcgccgaucuguuugagcgcgugccugggcccguucagcaggcucuccaguccgccgaaaugagccuggacgagaucgagcaagugauucuugucggaggcgcuacccgggugccgagaguucaggaagugcugcucaaggccgucggcaaagaggaacuggggaagaacaucaaugcggaugaggccgcugccaugggagcuguguaccaggccgcggcccugucuaaggcuuucaaagugaagccuuuuguuguccgcgacgccgugguguaucccauccucgucgaguucacacgggagguggaggaagaaccuggcauucauucccugaaacacaacaagagaguucuuuuuagccggauggggcccuacccccagcgcaaagugaucaccuucaacagauacucccacgauuuuaauuuccauauuaacuauggagaccugggcuuucucgggccugaagaucugcgggucuucggaucucaaaaucugaccacagugaagcucaagggcguuggcgacagcuuuaaaaaguacccggauuaugaguccaaagggaucaaggcucacuucaaccucgacgagagcggagugcugucucuggacagagucgaauccguguuugagacgcucguugaagauagcgccgaggaagagucuacccugacaaaacuuggcaauaccauuagcucccuguucgggggaggcacaacccccgacgccaaggagaacgggacggauacagugcaggaagaggaagagucuccugcugaaggcagcaaggacgagcccggagagcaggucgaacucaaagaggaagcggaggccccuguggaagauggcucccagcccccgccucccgagccuaagggggacgcuacccccgagggagaaaaagccaccgagaaggaaaauggcgauaaaagcgaggcccaaaagccuucugagaaggcugaagccgggcccgagggaguggcgccggcuccugaaggcgagaaaaagcagaaacccgcccgcaagcggagaauggucgaagagaucgggguugagcugguggugcuggaccuucccgaucucccugaagacaaacuggcccaguccguccaaaagcugcaggaucucacacugcgcgaccuugagaaacaggaaagagagaaggcugccaacagccuggaagcguucaucuuugagacccaggauaagcucuaccaaccggaguaucaggaagugucuacagaggaacagcgggaggaaauuuccggcaaacugagcgcugccuccacguggcuggaggacgagggaguuggcgccaccacagugaugcuuaaggaaaaacucgcugagcugcgcaagcugugucaggggcuuuucuuuagagucgaagaacggaaaaaguggcccgagcgccugucugcccuugacaaucugcucaaccauagcuccauguuccugaagggagcuagacugaucccugaaauggaucaaauuuuuaccgagguggaaaugacaacccuugagaaaguuaucaaugaaacgugggccuggaagaacgcgacccucgccgagcaggcuaaacugcccgccacagagaagccugugcugcucucuaaagacauugaagcuaagaugauggcccuggaucgggagguccaguaccuucugaauaaggccaaauucaccaagccccgcccuagacccaaagacaagaacggcacacgggcugaaccgccucucaaugcgagcgccuccgaucagggggagaaagugauucccccugcuggacaaaccgaagacgccgagcccaucagcgagccggaaaagguugagacgggcucugaaccuggggauacagagccccuggaacugggcggaccuggcgccgagcccgagcagaaggaacaguccaccgggcaaaaacgcccccuuaagaacgacgagcuguga

SEQ ID NO: 7608 - RNA, 3000 nt, Artificial Sequence
  derived and/or modified sequence opt6 from GRP170_(ORP150)__Homo_sapiens__AAC50947
auggcagacaaaguaagacgacaaagaccuaggagaagaguuuguugggcauuaguugcaguacuauuagcagaucuauuagcucuaucugauacuuuagcuguuaugagugucgaucuuggaagugagucaaugaaaguagcaauaguaaaaccagguguaccaauggagauaguucuaaauaaagaaaguagaagaaaaacgccaguaaucgucacucuaaaagaaaacgaaagauuuuucggugacucggcagcaagcauggcaauuaaaaauccuaaagcaaccuuaagauacuuccaacaucuucuuggaaaacaggcagauaacccacauguggcacuauaucaggcaagauuccccgaacaugaauuaacauucgauccacaacgacagacgguacacuuucaaauuucaucacaauuacaauuuucacccgaagaaguacuuggaaugguacuaaacuauagcagaucauuggcugaggauuuugcugaacaaccaauaaaagaugcaguaauaacagugcccguauucuuuaaccaagcagaaagaagggcaguacuacaagcugcaagaauggccggauuaaagguacuucaacuaauaaaugauaauacugcaacagcauugucauacggugucuuccgaagaaaagauauaaacacaacagcccaaaauauaauguuuuaugauauggguucaggguccaccguaugcacuauuguuacauaccagaugguaaaaacaaaagaagcagguaugcaaccacaguugcagauacgaggaguaggauuugaccguacacuagguggauuggaaauggaacugaggcuacgagaaagauuggcggguuuauuuaaugaacaacgcaaaggucaacgggcuaaagacguaagagaaaaucccagggcuauggccaagcuauuaagagaagcaaauagacuaaaaacuguucugucagcaaacgcagaccauauggcacaaauagaaggucuaauggaugacgucgacuuuaaagcgaaagugacccggguugaauucgaagaacucugugccgauuuauuugaacgagucccuggaccaguucaacaagcacuacaaagugcagaaaugucacuagacgaaaucgagcaaguaauucuagugggaggagcaacacgagucccaagaguccaagaaguccuacuuaaagccguaggaaaagaagaacucggaaaaaauauaaaugcagacgaagcugcggcgaugggagcuguauaucaagcagcagcacuuagcaaagcguucaagguuaaacccuucguagugagagacgcaguuguauaccccauauuaguagaauucacacgggaagucgaggaagaaccuggaauacauucuuuaaaacauaauaaaaggguacuauuuaguagaaugggaccauacccacaaagaaaaguuauaacuuuuaaucgauacagucaugacuuuaauuuccauauaaauuacggggaucuaggcuuccuaggaccagaagaccugcgaguauucgggagccaaaacuuaaccacagucaaacuaaaaggagucggagauagcuucaaaaaauaucccgacuacgaaaguaaaggaauaaaagcccacuuuaauuuagaugaaucaggaguucuaaguuuagaucgugucgaaagugucuuugaaacacuuguagaagacagcgcagaggaggaaaguacgcuuaccaaacuagggaauacaauaucaagucuauuuggaggggggacaacaccagaugcaaaagaaaaugguacugacaccgugcaagaagaagaagaaucgccagccgaaggaucgaaagacgaaccaggggaacaagucgaauuaaaagaagaagcagaagcaccaguugaagaugguagccaaccgccucccccggaaccuaaaggugacgcaacaccugaaggagaaaaagcaacagaaaaagagaauggugauaaaucagaagcacaaaaaccuagugaaaaagcagaagcgggucccgaaggaguagcaccagcaccagaaggugaaaaaaaacaaaagccagcacgaaaaagaagaaugguagaagaaauaggagucgaacuugucguucuagacuuaccggauuuaccagaagauaagcuagcacaaaguguacaaaaauugcaagacuuaacucuuagggaccuagaaaaacaggagcgcgaaaaagcugcaaauaguuuagaagcauuuaucuuugaaacgcaagacaaacuguaccaaccagaauaucaggaaguaaguacugaagaacaaagagaagaaauuaguggaaaacugucagcagcuucaacuugguuagaagaugaaggaguuggagcuacaaccgucaugcuuaaagaaaaacuagcugaacuaagaaaauuaugucaaggcuuauucuuuaggguagaagaaagaaaaaaauggccugaacgcuuauccgcauuagauaauuugcuaaaucacucgaguauguuuuugaaaggugcucgauuaauccccgaaauggaccaaauauucacugaaguagaaaugaccacauuagagaaaguaauuaaugaaacaugggcauggaaaaacgcaaccuuagccgaacaagcuaaacuaccagccacggagaaaccgguucuauuauccaaagacauagaagcgaagaugauggcccucgauagagaaguacaguauuuauugaacaaagcaaaauuuacaaaaccaagacccaggcccaaagauaaaaacgguacaagagcagaaccaccgcuaaacgcaucagcaucagaccaaggagagaaaguaauacccccagccggacaaacagaagacgcagaaccaauaagugaaccagaaaaaguugagaccggaucagaaccuggagacacagaaccauuagaacuaggaggccccggcgcagaaccugaacaaaaagaacaaaguacaggacaaaaaaggccgcuaaagaacgacgaguuauaa

SEQ ID NO: 7609 - protein, 654 aa, Artificial Sequence
  GRP78_(BiP)__Homo_sapiens__P11021
MKLSLVAAMLLLLSAARAEEEDKKEDVGTVVGIDLGTTYSCVGVFKNGRVEIIANDQGNRITPSYVAFTPEGERLIGDAAKNQLTSNPENTVFDAKRLIGRTWNDPSVQQDIKFLPFKVVEKKTKPYIQVDIGGGQTKTFAPEEISAMVLTKMKETAEAYLGKKVTHAVVTVPAYFNDAQRQATKDAGTIAGLNVMRIINEPTAAAIAYGLDKREGEKNILVFDLGGGTFDVSLLTIDNGVFEVVATNGDTHLGGEDFDQRVMEHFIKLYKKKTGKDVRKDNRAVQKLRREVEKAKRALSSQHQARIEIESFYEGEDFSETLTRAKFEELNMDLFRSTMKPVQKVLEDSDLKKSDIDEIVLVGGSTRIPKIQQLVKEFFNGKEPSRGINPDEAVAYGAAVQAGVLSGDQDTGDLVLLDVCPLTLGIETVGGVMTKLIPRNTVVPTKKSQIFSTASDNQPTVTIKVYEGERPLTKDNHLLGTFDLTGIPPAPRGVPQIEVTFEIDVNGILRVTAEDKGTGNKNKITITNDQNRLTPEEIERMVNDAEKFAEEDKKLKERIDTRNELESYAYSLKNQIGDKEKLGGKLSSEDKETMEKAVEEKIEWLESHQDADIEDFKAKKKELEEIVQPIISKLYGSAGPPPTGEEDTAEKDEL

SEQ ID NO: 7610 - RNA, 1965 nt, Artificial Sequence
  GRP78_(BiP)__Homo_sapiens__AAF42836
augaagcucucccugguggccgcgaugcugcugcugcucagcgcggcgcgggccgaggaggaggacaagaaggaggacgugggcacgguggucggcaucgaccuggggaccaccuacuccugcgucggcguguucaagaacggccgcguggagaucaucgccaacgaucagggcaaccgcaucacgccguccuaugucgccuucacuccugaaggggaacgucugauuggcgaugccgccaagaaccagcucaccuccaaccccgagaacacggucuuugacgccaagcggcucaucggccgcacguggaaugacccgucugugcagcaggacaucaaguucuugccguucaaggugguugaaaagaaaacuaaaccauacauucaaguugauauuggaggugggcaaacaaagacauuugcuccugaagaaauuucugccaugguucucacuaaaaugaaagaaaccgcugaggcuuauuugggaaagaagguuacccaugcaguuguuacuguaccagccuauuuuaaugaugcccaacgccaagcaaccaaagacgcuggaacuauugcuggccuaaauguuaugaggaucaucaacgagccuacggcagcugcuauugcuuauggccuggauaagagggagggggagaagaacauccugguguuugaccuggguggcggaaccuucgaugugucucuucucaccauugacaauggugucuucgaaguuguggccacuaauggagauacucaucuggguggagaagacuuugaccagcgugucauggaacacuucaucaaacuguacaaaaagaagacgggcaaagaugucaggaaagacaauagagcugugcagaaacuccggcgcgagguagaaaaggccaaacgggcccugucuucucagcaucaagcaagaauugaaauugaguccuucuaugaaggagaagacuuuucugagacccugacucgggccaaauuugaagagcucaacauggaucuguuccggucuacuaugaagcccguccagaaaguguuggaagauucugauuugaagaagucugauauugaugaaauuguucuuguugguggcucgacucgaauuccaaagauucagcaacugguuaaagaguucuucaauggcaaggaaccaucccguggcauaaacccagaugaagcuguagcguauggugcugcuguccaggcuggugugcucucuggugaucaagauacaggugaccugguacugcuugauguauguccccuuacacuugguauugaaacugugggaggugucaugaccaaacugauuccaaggaacacaguggugccuaccaagaagucucagaucuuuucuacagcuucugauaaucaaccaacuguuacaaucaaggucuaugaaggugaaagaccccugacaaaagacaaucaucuucuggguacauuugaucugacuggaauuccuccugcuccucguggggucccacagauugaagucaccuuugagauagaugugaaugguauucuucgagugacagcugaagacaaggguacagggaacaaaaauaagaucacaaucaccaaugaccagaaucgccugacaccugaagaaaucgaaaggaugguuaaugaugcugagaaguuugcugaggaagacaaaaagcucaaggagcgcauugauacuagaaaugaguuggaaagcuaugccuauucucuaaagaaucagauuggagauaaagaaaagcugggagguaaacuuuccucugaagauaaggagaccauggaaaaagcuguagaagaaaagauugaauggcuggaaagccaccaagaugcugacauugaagacuucaaagcuaagaagaaggaacuggaagaaauuguucaaccaauuaucagcaaacucuauggaagugcaggcccucccccaacuggugaagaggauacagcagaaaaagaugaguuguag

SEQ ID NO: 7611 - RNA, 1965 nt, Artificial Sequence
  derived and/or modified sequence opt1 from GRP78_(BiP)__Homo_sapiens__AAF42836
augaagcugagccucguggccgccaugcugcugcuccuguccgcggcccgcgccgaggaggaggacaagaaggaggacgucggcaccgugguggggaucgaccugggcaccacguacagcugcgucgggguguucaagaacggccggguggagaucaucgccaacgaccaggggaaccgcaucacccccuccuacgucgccuucaccccggagggcgagcggcucaucggcgacgcggccaagaaccagcugaccagcaaccccgagaacacgguguucgacgccaagcgccugaucgggcggaccuggaacgaccccuccgugcagcaggacaucaaguuccuccccuucaaggucguggagaagaagaccaagccguacauccagguggacaucggcgggggccagaccaagacguucgcccccgaggagaucagcgcgaugguccugaccaagaugaaggagaccgccgaggccuaccuggggaagaaggugacccacgccguggucacggugcccgccuacuucaacgacgcgcagcgccaggccaccaaggacgccggcaccaucgccggccucaacgugaugcggaucaucaacgagcccaccgccgcggccaucgccuacgggcuggacaagcgcgagggcgagaagaacauccuggucuucgaccucgggggcggcacguucgacgugucccugcugaccaucgacaacgggguguucgaggucguggccaccaacggcgacacccaccucgggggcgaggacuucgaccagcgggugauggagcacuucaucaagcuguacaagaagaagacggggaaggacguccgcaaggacaaccgggccgugcagaagcugcgccgggaggucgagaaggcgaagcgcgcccucagcucccagcaccaggcccggaucgagaucgagagcuucuacgagggcgaggacuucuccgagacccugacccgcgccaaguucgaggagcugaacauggaccucuuccggagcaccaugaagccggugcagaaggugcuggaggacuccgaccugaagaaguccgacaucgacgagaucguccucgugggcgggagcacgcgcauccccaagauccagcagcuggugaaggaguucuucaacggcaaggagcccagccgggggaucaaccccgacgaggccgucgcguacggcgccgccgugcaggccggggugcuguccggcgaccaggacaccggcgaccucguccugcuggacgugugcccgcucacccuggggaucgagaccgugggcggggucaugacgaagcugaucccccgcaacaccguggugcccaccaagaagucccagaucuucagcaccgcgagcgacaaccagcccacggucaccaucaagguguacgagggcgagcggccgcucaccaaggacaaccaccuccuggggaccuucgaccugacgggcaucccgcccgcgccccgcggcgugccccagaucgaggucaccuucgagaucgacgugaacgggauccugcgcgugaccgccgaggacaagggcaccgggaacaagaacaagaucaccaucacgaacgaccagaaccggcugacccccgaggagaucgagcgcauggucaacgacgccgagaaguucgccgaggaggacaagaagcucaaggagcggaucgacacccgcaacgagcuggagagcuacgccuacucccugaagaaccagaucggcgacaaggagaagcucggcgggaagcugagcuccgaggacaaggagaccauggagaaggccguggaggagaagaucgaguggcuggagagccaccaggacgccgacaucgaggacuucaaggccaagaagaaggagcucgaggagaucgugcagcccaucaucuccaagcuguacggcagcgccgggcccccgcccacgggcgaggaggacaccgcggagaaggacgagcuguga

SEQ ID NO: 7612 - RNA, 1965 nt, Artificial Sequence
  derived and/or modified sequence opt2 from GRP78_(BiP)__Homo_sapiens__AAF42836
augaagcucucccucgucgccgccaugcuccuccuccucuccgccgcccgcgccgaggaggaggacaagaaggaggacgucggcaccgucgucggcaucgaccucggcaccaccuacuccugcgucggcgucuucaagaacggccgcgucgagaucaucgccaacgaccagggcaaccgcaucacccccuccuacgucgccuucacccccgagggcgagcgccucaucggcgacgccgccaagaaccagcucaccuccaaccccgagaacaccgucuucgacgccaagcgccucaucggccgcaccuggaacgaccccuccguccagcaggacaucaaguuccuccccuucaaggucgucgagaagaagaccaagcccuacauccaggucgacaucggcggcggccagaccaagaccuucgcccccgaggagaucuccgccaugguccucaccaagaugaaggagaccgccgaggccuaccucggcaagaaggucacccacgccgucgucaccguccccgccuacuucaacgacgcccagcgccaggccaccaaggacgccggcaccaucgccggccucaacgucaugcgcaucaucaacgagcccaccgccgccgccaucgccuacggccucgacaagcgcgagggcgagaagaacauccucgucuucgaccucggcggcggcaccuucgacgucucccuccucaccaucgacaacggcgucuucgaggucgucgccaccaacggcgacacccaccucggcggcgaggacuucgaccagcgcgucauggagcacuucaucaagcucuacaagaagaagaccggcaaggacguccgcaaggacaaccgcgccguccagaagcuccgccgcgaggucgagaaggccaagcgcgcccucuccucccagcaccaggcccgcaucgagaucgaguccuucuacgagggcgaggacuucuccgagacccucacccgcgccaaguucgaggagcucaacauggaccucuuccgcuccaccaugaagcccguccagaagguccucgaggacuccgaccucaagaaguccgacaucgacgagaucguccucgucggcggcuccacccgcauccccaagauccagcagcucgucaaggaguucuucaacggcaaggagcccucccgcggcaucaaccccgacgaggccgucgccuacggcgccgccguccaggccggcguccucuccggcgaccaggacaccggcgaccucguccuccucgacgucugcccccucacccucggcaucgagaccgucggcggcgucaugaccaagcucaucccccgcaacaccgucguccccaccaagaagucccagaucuucuccaccgccuccgacaaccagcccaccgucaccaucaaggucuacgagggcgagcgcccccucaccaaggacaaccaccuccucggcaccuucgaccucaccggcaucccccccgccccccgcggcgucccccagaucgaggucaccuucgagaucgacgucaacggcauccuccgcgucaccgccgaggacaagggcaccggcaacaagaacaagaucaccaucaccaacgaccagaaccgccucacccccgaggagaucgagcgcauggucaacgacgccgagaaguucgccgaggaggacaagaagcucaaggagcgcaucgacacccgcaacgagcucgaguccuacgccuacucccucaagaaccagaucggcgacaaggagaagcucggcggcaagcucuccuccgaggacaaggagaccauggagaaggccgucgaggagaagaucgaguggcucgagucccaccaggacgccgacaucgaggacuucaaggccaagaagaaggagcucgaggagaucguccagcccaucaucuccaagcucuacggcuccgccggccccccccccaccggcgaggaggacaccgccgagaaggacgagcucuga

SEQ ID NO: 7613 - RNA, 1965 nt, Artificial Sequence
  derived and/or modified sequence opt3 from GRP78_(BiP)__Homo_sapiens__AAF42836
augaagcugagccucguggccgcuaugcuucuguuguuauccgcagccagagcggaggaagaggacaaaaaggaagaugucggcaccguuguggggaucgaccugggaacaacuuacucuugcguagguguguucaaaaacggcagggucgagauuauagcuaaugaucaggggaaccggaucacgcccucauauguggccuuuaccccugaaggagagcgccuaauuggcgacgcagccaagaaucaacucacaaguaacccagagaauacuguuuucgaugcuaaacgacugaucggucguaccuggaacgacccgagcgugcagcaggauauuaaguuucuucccuucaaggucguggaaaagaagacaaaaccuuacauccagguagacauagggggaggccaaaccaagacuuuugcaccagaggaaaucuccgccaugguucugacaaaaaugaaggagaccgcugaggccuauuugggcaagaaagugacgcacgcggucgugacugugcccgcauacuucaaugaugcccagagacaggcuaccaaggacgccgggacaauugcaggacucaacgucaugaggaucauuaaugaaccuacugcugccgcgaucgccuauggucuggauaaacgggagggcgaaaagaacauacugguuuuugaccucgggggaggcaccuucgaugugucuuuacugacaauugacaaugguguauuugagguggucgcaaccaacggggacacgcaucuuggaggcgaagauuucgaccagcgcgugauggagcacuuuaucaaauuguacaagaaaaagacuggcaaggauguuagaaaagacaauagggcugugcaaaagcugcggcgcgaggucgaaaaagccaagcgagcucuaucgucacagcaucaggccagaauugagaucgaaucuuucuaugagggggaagauuuuagugagacacucaccagggcaaaauucgaggaacugaacauggaccuuuuccgguccacuaugaagccagugcagaagguacuggaggauucugacuugaaaaagagcgauaucgacgaaauuguucucgugggagguuccacacguauacccaaaauccaacagcuggucaaggaguuuuucaauggcaaagaaccuucacgcgggauuaacccagaugaggccguggcuuacggagcggcaguccaggccggcguguuaaguggugaccaagacaccggggaucugguucuccuugacguguguccgcugacguugggcaucgagaccguaggaggcgucaugacaaagcuaauacccagaaacacugugguuccuaccaagaaaagccagauuuuuagcacagcuuccgauaaucagccaacugugaccaucaaggucuacgaaggggagaggccccugacaaaagacaaccaccuccugggaaccuucgaucuuacugguaucccuccagcaccccggggcgugccgcagauugaaguaacguuugagaucgacgugaaugggauucugcgaguuacagccgaggauaagggaaccggcaacaaaaauaagauaacuaucaccaacgaccaaaaucgcuugacaccugaagagauugaaagaauggucaacgaugccgagaaguucgcugaagaggacaaaaagcucaaagagaggaucgauacccggaaugaacuggagucauaugccuacagcuuaaagaaccagaucggugacaaagaaaagcuagggggcaaacugaguucugaggauaaggaaacuauggagaaggcaguggaggagaaaauugaauggcucgaaucccaucaggacgcggacauagaggauuuuaaggcuaaaaagaaagaacuggaggagaucgugcagcccauuaucagcaaacuuuauggaucggccggcccaccucccacaggggaagaggacacggcagaaaaggaugaguuguga

SEQ ID NO: 7614 - RNA, 1965 nt, Artificial Sequence
  derived and/or modified sequence opt4 from GRP78_(BiP)__Homo_sapiens__AAF42836
augaagcugagccugguggccgccaugcugcugcugcugagcgccgccagagccgaggaggaggacaagaaggaggacgugggcaccguggugggcaucgaccugggcaccaccuacagcugcgugggcguguucaagaacggcagaguggagaucaucgccaacgaccagggcaacagaaucacccccagcuacguggccuucacccccgagggcgagagacugaucggcgacgccgccaagaaccagcugaccagcaaccccgagaacaccguguucgacgccaagagacugaucggcagaaccuggaacgaccccagcgugcagcaggacaucaaguuccugcccuucaaggugguggagaagaagaccaagcccuacauccagguggacaucggcggcggccagaccaagaccuucgcccccgaggagaucagcgccauggugcugaccaagaugaaggagaccgccgaggccuaccugggcaagaaggugacccacgccguggugaccgugcccgccuacuucaacgacgcccagagacaggccaccaaggacgccggcaccaucgccggccugaacgugaugagaaucaucaacgagcccaccgccgccgccaucgccuacggccuggacaagagagagggcgagaagaacauccugguguucgaccugggcggcggcaccuucgacgugagccugcugaccaucgacaacggcguguucgaggugguggccaccaacggcgacacccaccugggcggcgaggacuucgaccagagagugauggagcacuucaucaagcuguacaagaagaagaccggcaaggacgugagaaaggacaacagagccgugcagaagcugagaagagagguggagaaggccaagagagcccugagcagccagcaccaggccagaaucgagaucgagagcuucuacgagggcgaggacuucagcgagacccugaccagagccaaguucgaggagcugaacauggaccuguucagaagcaccaugaagcccgugcagaaggugcuggaggacagcgaccugaagaagagcgacaucgacgagaucgugcuggugggcggcagcaccagaauccccaagauccagcagcuggugaaggaguucuucaacggcaaggagcccagcagaggcaucaaccccgacgaggccguggccuacggcgccgccgugcaggccggcgugcugagcggcgaccaggacaccggcgaccuggugcugcuggacgugugcccccugacccugggcaucgagaccgugggcggcgugaugaccaagcugauccccagaaacaccguggugcccaccaagaagagccagaucuucagcaccgccagcgacaaccagcccaccgugaccaucaagguguacgagggcgagagaccccugaccaaggacaaccaccugcugggcaccuucgaccugaccggcaucccccccgcccccagaggcgugccccagaucgaggugaccuucgagaucgacgugaacggcauccugagagugaccgccgaggacaagggcaccggcaacaagaacaagaucaccaucaccaacgaccagaacagacugacccccgaggagaucgagagaauggugaacgacgccgagaaguucgccgaggaggacaagaagcugaaggagagaaucgacaccagaaacgagcuggagagcuacgccuacagccugaagaaccagaucggcgacaaggagaagcugggcggcaagcugagcagcgaggacaaggagaccauggagaaggccguggaggagaagaucgaguggcuggagagccaccaggacgccgacaucgaggacuucaaggccaagaagaaggagcuggaggagaucgugcagcccaucaucagcaagcuguacggcagcgccggccccccccccaccggcgaggaggacaccgccgagaaggacgagcuguga

SEQ ID NO: 7615 - RNA, 1965 nt, Artificial Sequence
  derived and/or modified sequence opt5 from GRP78_(BiP)__Homo_sapiens__AAF42836
augaagcugagccucguggccgcuaugcugcuucugcucuccgccgcgagagcugaggaagaggacaaaaaggaagaugucggcaccguuguggggaucgaccugggaacaacguacucuugcgugggcgucuucaaaaacgggcggguggagauuaucgccaaugaucagggaaaccgcauuacccccagcuauguugccuuuacaccugaaggcgagagacuuaucggggacgcugccaagaaucaacugaccuccaacccggagaauacaguguucgaugcuaaacggcucauuggacgcaccuggaacgaccccucuguccagcaggauaucaaguuucugccuuucaaggugguugaaaagaagacaaaacccuacauccagguggacauuggcggcgggcaaaccaagacguuugccccugaggaaaucagcgcgaugguccugaccaaaaugaaggagacagccgaggcuuaucucggaaagaaagugacccacgccguggucacaguucccgcuuacuucaaugaugcccagagacaggcgaccaaggacgccggcacgauugcugggcugaacgugaugcggaucauuaaugaaccuacagccgcugccaucgccuauggacuugauaaacgcgagggcgaaaagaacauucugguguuugaccucgggggaggcaccuucgaugucucccugcuuacaaucgacaauggcguguuugagguuguggcuaccaacggggacacccaucugggaggcgaagauuucgaccagagagucauggagcacuuuaucaaacucuacaagaaaaagacagggaaggaugugcggaaagacaaucgcgcgguucaaaagcugagacgggagguggaaaaagccaagcgcgcucugucuagccagcaucaggccagaauugagaucgaauccuucuaugagggagaagauuuuagcgagacgcucacccgggccaaauucgaggaacugaacauggaccuuuuccgcucuacaaugaagccgguccagaaggugcuggaggauuccgaccucaaaaagagcgauauugacgaaaucguccuggugggcgggucuacccggauucccaaaauccaacagcuuguuaaggaguuuuucaauggaaaagaaccuuccagaggcaucaaccccgaugaggcuguggccuacggcgcggcuguccaggccggggugcugagcggagaccaagacacaggcgaucucguucugcuggacguguguccucucacccuggggauugagacggucggaggcgugaugacaaaacuuauccccagaaacaccgugguuccgaccaagaaaucucagaucuuuuccacagccagcgauaaucagccuaccgucacaauuaagguguacgaaggggagcgcccccugacgaaagacaaccaccuccugggcaccuucgaucuuacaggcauuccucccgcuccccggggagugccucagaucgaagucaccuuugagaucgacgugaaugggauucugagaguuacagccgaggauaagggaaccggcaacaaaaauaagaucacgauuaccaacgaccaaaaucgccucacaccggaagagaucgaacggauggugaacgaugcugagaaguucgccgaagaggacaaaaagcugaaagagagaauugauacccgcaaugaacuggaguccuaugcguacucucucaagaaccagaucggggacaaagaaaagcugggaggcaaacuuagcuccgaggauaaggaaacaauggagaaggccgucgaggagaaaauugaauggcuggaaagccaucaggacgcugacaucgaggauuuuaaggccaaaaagaaagaacucgaggagaucgugcagcccauuaucucuaagcuguauggguccgcuggcccucccccuaccggagaagaggacacggccgaaaaggaugagcuguga

SEQ ID NO: 7616 - RNA, 1965 nt, Artificial Sequence
  derived and/or modified sequence opt6 from GRP78_(BiP)__Homo_sapiens__AAF42836
augaaacuaucauuaguagccgcaaugcuuuuacuucuaagcgcagcccgugccgaagaagaagauaaaaaagaagauguaggaacaguagucggaauagauuuaggaacaacauauagcuguguaggggucuuuaaaaacggaagaguagaaauuaucgcaaaugaccaaggaaauagaauaacaccuucauauguugcauuuacaccagaaggagaacgauuaauuggagacgcugcuaaaaaucaacuaacuucuaauccagaaaacacaguguucgacgcaaaaagauuaauaggaaggacauggaaugauccaaguguacaacaagacauaaaauuccuaccauucaaagucguagagaaaaaaacaaaaccauacauacaaguagauauaggagggggacaaacaaaaacauucgcccccgaagagauaucagcaaugguauuaaccaaaaugaaagaaacagcggaagcauauuuaggcaaaaaaguaacacaugcaguaguaaccguacccgcauacuuuaaugacgcccaaagacaagcaacaaaagacgcaggaacaauagcaggacugaauguaaugcguauaauaaaugaacccacagccgcagcaauagcauacggauuagauaaaagagaaggagaaaaaaauauucucguguucgaucugggagguggcacauuugacguaagucuauuaacaauagauaacggaguuuucgaaguaguagcaacuaacggcgacacccauuuaggaggagaagauuuugaccaacgaguaauggaacacuucauaaaauuauauaaaaaaaaaaccggaaaagacgucagaaaagacaacagagcuguacaaaaacuacgaagagaaguagaaaaagcuaaaagagcccugucaagucaacaccaagcaagaauagaaauagaauccuucuaugaaggagaagacuucagcgaaacacuaaccagagcaaaauucgaagaacuaaauauggaccucuuuagaagcacaaugaaaccaguacaaaaaguauuagaagauucggacuuaaaaaaaucagauauagaugaaauaguacuaguuggagggucaacaagaauaccaaagauacaacaacuuguaaaagaguucuuuaacggaaaagaaccaagcaggggaauaaauccagacgaagcaguagcuuauggagcagcaguacaagcaggaguauuaaguggagaucaagauacaggagaucuaguacuauuagacguaugcccauuaacucucggaauagaaacuguaggaggcguaaugacaaaauuaaucccaagaaacaccguagucccaacaaaaaaaucacaaauauuuucaacagcaagugacaaccaaccaacaguuacaauaaagguuuacgaaggagaaagaccauuaacaaaagauaaucaccuauuaggaacauuugacuuaacaggaauaccaccugcacccagaggagucccacaaaucgaaguaacauuugaaauagauguaaacggaauauuaagggucacagcugaagauaaaggcacagguaacaaaaacaaaauaacaauaacuaaugaccaaaauagauuaacaccagaagaaauagaaaggaugguaaacgaugcagaaaaauucgcagaagaagacaaaaaauuaaaagagagaaucgauacuagaaacgaacuugaaucuuacgcuuacagccuaaaaaaucaaauaggagacaaagaaaaacuuggcggaaaacuaucuagcgaagacaaagaaacuauggaaaaagcgguagaggaaaaaauagaaugguuggaaucucaucaagacgcagacauagaagacuucaaagcaaaaaaaaaagaacucgaagagauaguacaaccaauaaucaguaaacuauauggaagcgcaggaccaccuccaacgggagaagaagacaccgcagaaaaagacgaacuauaa

SEQ ID NO: 7617 - protein, 803 aa, Artificial Sequence
  GRP94_(gp96)__Homo_sapiens__P14625
MRALWVLGLCCVLLTFGSVRADDEVDVDGTVEEDLGKSREGSRTDDEVVQREEEAIQLDGLNASQIRELREKSEKFAFQAEVNRMMKLIINSLYKNKEIFLRELISNASDALDKIRLISLTDENALSGNEELTVKIKCDKEKNLLHVTDTGVGMTREELVKNLGTIAKSGTSEFLNKMTEAQEDGQSTSELIGQFGVGFYSAFLVADKVIVTSKHNNDTQHIWESDSNEFSVIADPRGNTLGRGTTITLVLKEEASDYLELDTIKNLVKKYSQFINFPIYVWSSKTETVEEPMEEEEAAKEEKEESDDEAAVEEEEEEKKPKTKKVEKTVWDWELMNDIKPIWQRPSKEVEEDEYKAFYKSFSKESDDPMAYIHFTAEGEVTFKSILFVPTSAPRGLFDEYGSKKSDYIKLYVRRVFITDDFHDMMPKYLNFVKGVVDSDDLPLNVSRETLQQHKLLKVIRKKLVRKTLDMIKKIADDKYNDTFWKEFGTNIKLGVIEDHSNRTRLAKLLRFQSSHHPTDITSLDQYVERMKEKQDKIYFMAGSSRKEAESSPFVERLLKKGYEVIYLTEPVDEYCIQALPEFDGKRFQNVAKEGVKFDESEKTKESREAVEKEFEPLLNWMKDKALKDKIEKAVVSQRLTESPCALVASQYGWSGNMERIMKAQAYQTGKDISTNYYASQKKTFEINPRHPLIRDMLRRIKEDEDDKTVLDLAVVLFETATLRSGYLLPDTKAYGDRIERMLRLSLNIDPDAKVEEEPEEEPEETAEDTTEDTEQDEDEEMDVGTDEEEETAKESTAEKDEL

SEQ ID NO: 7618 - RNA, 2412 nt, Artificial Sequence
  GRP94_(gp96)__Homo_sapiens__AAH66656
augagggcccugugggugcugggccucugcugcguccugcugaccuucgggucggucagagcugacgaugaaguugauguggaugguacaguagaagaggaucuggguaaaaguagagaaggaucaaggacggaugaugaaguaguacagagagaggaagaagcuauucaguuggauggauuaaaugcaucacaaauaagagaacuuagagagaagucggaaaaguuugccuuccaagccgaaguuaacagaaugaugaaacuuaucaucaauucauuguauaaaaauaaagagauuuuccugagagaacugauuucaaaugcuucugaugcuuuagauaagauaaggcuaauaucacugacugaugaaaaugcucuuucuggaaaugaggaacuaacagucaaaauuaagugugauaaggagaagaaccugcugcaugucacagacaccgguguaggaaugaccagagaagaguugguuaaaaaccuugguaccauagccaaaucugggacaagcgaguuuuuaaacaaaaugacugaagcacaggaagauggccagucaacuucugaauugauuggccaguuuggugucgguuucuauuccgccuuccuuguagcagauaagguuauugucacuucaaaacacaacaacgauacccagcacaucugggagucugacuccaaugaauuuucuguaauugcugacccaagaggaaacacucuaggacggggaacgacaauuacccuugucuuaaaagaagaagcaucugauuaccuugaauuggauacaauuaaaaaucucgucaaaaaauauucacaguucauaaacuuuccuauuuauguauggagcagcaagacugaaacuguugaggagcccauggaggaagaagaagcagccaaagaagagaaagaagaaucugaugaugaagcugcaguagaggaagaagaagaagaaaagaaaccaaagacuaaaaaaguugaaaaaacugucugggacugggaacuuaugaaugauaucaaaccaauauggcagagaccaucaaaagaaguagaagaagaugaauacaaagcuuucuacaaaucauuuucaaaggaaagugaugaccccauggcuuauauucacuuuacugcugaaggggaaguuaccuucaaaucaauuuuauuuguacccacaucugcuccacguggucuguuugacgaauauggaucuaaaaagagcgauuacauuaagcucuaugugcgccguguauucaucacagacgacuuccaugauaugaugccuaaauaccucaauuuugucaagggugugguggacucagaugaucuccccuugaauguuucccgcgagacucuucagcaacauaaacugcuuaaggugauuaggaagaagcuuguucguaaaacgcuggacaugaucaagaagauugcugaugauaaauacaaugauacuuuuuggaaagaauuugguaccaacaucaagcuuggugugauugaagaccacucgaaucgaacacgucuugcuaaacuucuuagguuccagucuucucaucauccaacugacauuacuagccuagaccaguauguggaaagaaugaaggaaaaacaagacaaaaucuacuucauggcuggguccagcagaaaagaggcugaaucuucuccauuuguugagcgacuucugaaaaagggcuaugaaguuauuuaccucacagaaccuguggaugaauacuguauucaggcccuucccgaauuugaugggaagagguuccagaauguugccaaggaaggagugaaguucgaugaaagugagaaaacuaaggagagucgugaagcaguugagaaagaauuugagccucugcugaauuggaugaaagauaaagcccuuaaggacaagauugaaaaggcuguggugucucagcgccugacagaaucuccgugugcuuugguggccagccaguacggauggucuggcaacauggagagaaucaugaaagcacaagcguaccaaacgggcaaggacaucucuacaaauuacuaugcgagucagaagaaaacauuugaaauuaaucccagacacccgcugaucagagacaugcuucgacgaauuaaggaagaugaagaugauaaaacaguuuuggaucuugcugugguuuuguuugaaacagcaacgcuucggucaggguaucuuuuaccagacacuaaagcauauggagauagaauagaaagaaugcuucgccucaguuugaacauugacccugaugcaaagguggaagaagagccugaagaagaaccugaagagacagcagaagacacaacagaagacacagagcaagacgaagaugaagaaauggaugugggaacagaugaagaagaagaaacagcaaaggaaucuacagcugaaaaagaugaauuguaa

SEQ ID NO: 7619 - RNA, 2412 nt, Artificial Sequence
  derived and/or modified sequence opt1 from GRP94_(gp96)__Homo_sapiens__AAH66656
augcgcgcccugugggugcucggccugugcugcguccugcucaccuucgggagcgugcgggccgacgacgagguggacgucgacggcaccguggaggaggaccuggggaagucccgcgagggcagccggacggacgacgaggugguccagcgcgaggaggaggcgauccagcuggacgggcucaacgccucccagauccgggagcugcgcgagaaguccgagaaguucgccuuccaggccgaggugaaccggaugaugaagcugaucaucaacagccucuacaagaacaaggagaucuuccugcgcgagcugaucagcaacgccuccgacgcgcucgacaagauccggcugaucagccugaccgacgagaacgcccucuccggcaacgaggagcugaccgugaagaucaagugcgacaaggagaagaaccugcuccacgucaccgacacgggcguggggaugacccgcgaggagcuggugaagaaccugggcaccaucgccaagagcgggaccuccgaguuccucaacaagaugacggaggcccaggaggacggccagagcaccuccgagcugaucgggcaguucggcgucggcuucuacagcgcguuccugguggccgacaaggugaucgucaccuccaagcacaacaacgacacccagcacaucugggagagcgacuccaacgaguucagcgugaucgccgacccccgggggaacacgcucggccgcgggaccaccaucacccuggugcugaaggaggaggccuccgacuaccucgagcuggacacgaucaagaaccuggucaagaaguacagccaguucaucaacuucccgaucuacguguggagcuccaagaccgagaccguggaggagcccauggaggaggaggaggccgcgaaggaggagaaggaggagagcgacgacgaggccgccgucgaggaggaggaggaggagaagaagcccaagaccaagaagguggagaagacggugugggacugggagcucaugaacgacaucaagcccaucuggcagcggccguccaaggaggucgaggaggacgaguacaaggccuucuacaagagcuucuccaaggagagcgacgaccccauggccuacauccacuucaccgcggagggcgaggugaccuucaaguccauccuguucguccccaccagcgcgccccgcggccuguucgacgaguacggguccaagaaguccgacuacaucaagcucuacgugcggcgcguguucaucacggacgacuuccacgacaugaugccgaaguaccugaacuucgucaagggcgugguggacagcgacgaccugccccucaacgucagccgggagacccugcagcagcacaagcugcucaaggugauccgcaagaagcuggugcggaagacccuggacaugaucaagaagaucgccgacgacaaguacaacgacaccuucuggaaggaguucgggacgaacaucaagcucggcgucaucgaggaccacuccaaccgcacccggcuggccaagcugcuccgcuuccagagcucccaccaccccaccgacaucaccagccuggaccaguacguggagcgcaugaaggagaagcaggacaagaucuacuucauggccggguccagccggaaggaggccgaguccagccccuucguggagcgccugcucaagaagggcuacgaggucaucuaccugacggagccgguggacgaguacugcauccaggcccugcccgaguucgacggcaagcgguuccagaacguggccaaggagggggucaaguucgacgagagcgagaagaccaaggagucccgcgaggccguggagaaggaguucgagccccugcucaacuggaugaaggacaaggcccugaaggacaagaucgagaaggcgguggucagccagcggcugaccgagucccccugcgcccucguggccagccaguacggcugguccgggaacauggagcgcaucaugaaggcccaggcguaccagaccggcaaggacaucagcacgaacuacuacgccucccagaagaagaccuucgagaucaacccgcggcacccccugauccgcgacaugcugcggcgcaucaaggaggacgaggacgacaagaccgugcucgaccuggccgucgugcuguucgagaccgccacccuccggagcggguaccugcugcccgacacgaaggccuacggcgaccgcaucgagcggaugcuccgccugucccugaacaucgaccccgacgcgaagguggaggaggagccggaggaggagcccgaggagaccgccgaggacaccaccgaggacacggagcaggacgaggacgaggagauggacgucggcaccgacgaggaggaggagaccgccaaggagagcaccgccgagaaggacgagcucuga

SEQ ID NO: 7620 - RNA, 2412 nt, Artificial Sequence
  derived and/or modified sequence opt2 from GRP94_(gp96)__Homo_sapiens__AAH66656
augcgcgcccucuggguccucggccucugcugcguccuccucaccuucggcuccguccgcgccgacgacgaggucgacgucgacggcaccgucgaggaggaccucggcaagucccgcgagggcucccgcaccgacgacgaggucguccagcgcgaggaggaggccauccagcucgacggccucaacgccucccagauccgcgagcuccgcgagaaguccgagaaguucgccuuccaggccgaggucaaccgcaugaugaagcucaucaucaacucccucuacaagaacaaggagaucuuccuccgcgagcucaucuccaacgccuccgacgcccucgacaagauccgccucaucucccucaccgacgagaacgcccucuccggcaacgaggagcucaccgucaagaucaagugcgacaaggagaagaaccuccuccacgucaccgacaccggcgucggcaugacccgcgaggagcucgucaagaaccucggcaccaucgccaaguccggcaccuccgaguuccucaacaagaugaccgaggcccaggaggacggccaguccaccuccgagcucaucggccaguucggcgucggcuucuacuccgccuuccucgucgccgacaaggucaucgucaccuccaagcacaacaacgacacccagcacaucugggaguccgacuccaacgaguucuccgucaucgccgacccccgcggcaacacccucggccgcggcaccaccaucacccucguccucaaggaggaggccuccgacuaccucgagcucgacaccaucaagaaccucgucaagaaguacucccaguucaucaacuuccccaucuacgucugguccuccaagaccgagaccgucgaggagcccauggaggaggaggaggccgccaaggaggagaaggaggaguccgacgacgaggccgccgucgaggaggaggaggaggagaagaagcccaagaccaagaaggucgagaagaccgucugggacugggagcucaugaacgacaucaagcccaucuggcagcgccccuccaaggaggucgaggaggacgaguacaaggccuucuacaaguccuucuccaaggaguccgacgaccccauggccuacauccacuucaccgccgagggcgaggucaccuucaaguccauccucuucguccccaccuccgccccccgcggccucuucgacgaguacggcuccaagaaguccgacuacaucaagcucuacguccgccgcgucuucaucaccgacgacuuccacgacaugaugcccaaguaccucaacuucgucaagggcgucgucgacuccgacgaccucccccucaacgucucccgcgagacccuccagcagcacaagcuccucaaggucauccgcaagaagcucguccgcaagacccucgacaugaucaagaagaucgccgacgacaaguacaacgacaccuucuggaaggaguucggcaccaacaucaagcucggcgucaucgaggaccacuccaaccgcacccgccucgccaagcuccuccgcuuccaguccucccaccaccccaccgacaucaccucccucgaccaguacgucgagcgcaugaaggagaagcaggacaagaucuacuucauggccggcuccucccgcaaggaggccgaguccucccccuucgucgagcgccuccucaagaagggcuacgaggucaucuaccucaccgagcccgucgacgaguacugcauccaggcccuccccgaguucgacggcaagcgcuuccagaacgucgccaaggagggcgucaaguucgacgaguccgagaagaccaaggagucccgcgaggccgucgagaaggaguucgagccccuccucaacuggaugaaggacaaggcccucaaggacaagaucgagaaggccgucgucucccagcgccucaccgagucccccugcgcccucgucgccucccaguacggcugguccggcaacauggagcgcaucaugaaggcccaggccuaccagaccggcaaggacaucuccaccaacuacuacgccucccagaagaagaccuucgagaucaacccccgccacccccucauccgcgacaugcuccgccgcaucaaggaggacgaggacgacaagaccguccucgaccucgccgucguccucuucgagaccgccacccuccgcuccggcuaccuccuccccgacaccaaggccuacggcgaccgcaucgagcgcaugcuccgccucucccucaacaucgaccccgacgccaaggucgaggaggagcccgaggaggagcccgaggagaccgccgaggacaccaccgaggacaccgagcaggacgaggacgaggagauggacgucggcaccgacgaggaggaggagaccgccaaggaguccaccgccgagaaggacgagcucuga

SEQ ID NO: 7621 - RNA, 2412 nt, Artificial Sequence
  derived and/or modified sequence opt3 from GRP94_(gp96)__Homo_sapiens__AAH66656
augagagcccugugggugcucggccuuugcuguguccuguugaccuucgggagcguuagggcugacgaugagguggacguagauggaacaguggaagaggacuuagguaagucccgggaaggcucucgcacugaugacgaggucgugcagcgagaagaggaggcaauccaacuggaugggcuaaacgccucacagauucgugaacucagagagaaaagugaaaaguuugcguuccaggcugagguuaauaggaugaugaaacugauaaucaacagccuuuacaagaauaaagagauuuuucugcgggaauugaucuccaacgccucugacgcacucgauaagauucgccugaucucgcugacggacgagaaugcccucucaggaaacgaagaguuaaccgugaagauaaaaugcgauaaggagaaaaaucugcuucacgucacagacacuggcguggguaugaccagagaggaguugguaaagaaccuggggacaaucgcuaaaagcggaaccagugaguuccuaaauaagaugacugaagcacaggaagauggccaauccacaucugagcucauuggccaguuugggguuggauucuauagcgccuuucugguggcugacaaggucaucgugaccuccaaacauaacaaugacacgcagcacauuugggaaucagauaguaacgaguucagcgugaucgccgaccccagggguaauacucuuggccgggggaccacaauaacucuggucuugaaggaggaagcgucugauuaccucgagcuggacaccauuaaaaacuuaguuaagaaauauucccaguuuaucaauuucccuauuuacguguggucaagcaagacagaaaccguagaggaaccaauggaggaggaagaggcagccaaagaagagaaggaggaaagugaugacgaggcugccguggaagaggaagaggaggaaaagaaaccgaagacgaaaaaggucgagaaaacugugugggauugggaacugaugaacgacaucaagcccaucuggcaacgcccuucuaaggagguugaagaggaugaguauaaagcauuuuacaaguccuucagcaaagaaucggacgauccaauggcuuauauucauuuuacagccgagggagaagugaccuucaagucuauacucuucguccccacuuccgcgccucgaggccuuuuugacgaguacgguaguaaaaagucagacuacaucaagcuguaugugagaaggguauucauuacagaugacuuucacgauaugaugccaaaauacuugaacuucguuaaggggguggucgacagcgaugaccuaccccugaaugugucccgggaaacccuccagcagcauaaacugcuuaaggucauccguaaaaagcuggugcgcaagacguuggauaugauuaaaaagauagccgacgauaaauauaacgacaccuuuuggaaggaguucggaacaaauaucaaacucggcguuaucgaggaucacucuaacagaacuaggcuggcaaaguuacugcgguuucagagcucacaccauccuaccgacauuacaagucuagaucaauacguggaacgaaugaaagagaagcaggacaagaucuauuucauggcuggcuccagccgcaaagaagccgagucuucaccauuuguagagagacuccugaagaaaggguacgaagucauuuaucuuacugagccgguggacgaauacuguauacaggcuuugcccgaguucgauggaaagagguuucaaaauguugccaaagaaggugugaaguucgacgagagugagaagaccaaagaaagccgggaggcagucgaaaaggaguuugaaccucugcucaacuggaugaaagauaaggcccugaaagacaagaucgagaaggcugugguaucccagcgccuuacagagucuccaugcgcgcugguggcaucgcaguacggcuggagcgggaauauggaaagaauuaugaaagcccaggcuuaucaaaccggaaaggauaucuccacuaacuacuaugccucacagaaaaagacguucgagaucaaucccaggcacccuuugauucgugacaugcuccggcgaauaaaagaagaugaggacgauaagacaguucuggacuuagcagucgugcuguucgaaaccgccacucuaagaaguggcuaccuccugccagauaccaaggcuuauggugacaggaucgagcgcaugcuucgguugucucugaacauugaucccgacgccaaaguggaggaagaaccggaagaggagccugaagagacagcagaagacaccacugaggauacagaacaggacgaggaugaggaaauggacgucgggacggaugaggaagaggaaaccgcgaaggagagcacugcugagaaagacgaacucuga

SEQ ID NO: 7622 - RNA, 2412 nt, Artificial Sequence
  derived and/or modified sequence opt4 from GRP94_(gp96)__Homo_sapiens__AAH66656
augagagcccugugggugcugggccugugcugcgugcugcugaccuucggcagcgugagagccgacgacgagguggacguggacggcaccguggaggaggaccugggcaagagcagagagggcagcagaaccgacgacgagguggugcagagagaggaggaggccauccagcuggacggccugaacgccagccagaucagagagcugagagagaagagcgagaaguucgccuuccaggccgaggugaacagaaugaugaagcugaucaucaacagccuguacaagaacaaggagaucuuccugagagagcugaucagcaacgccagcgacgcccuggacaagaucagacugaucagccugaccgacgagaacgcccugagcggcaacgaggagcugaccgugaagaucaagugcgacaaggagaagaaccugcugcacgugaccgacaccggcgugggcaugaccagagaggagcuggugaagaaccugggcaccaucgccaagagcggcaccagcgaguuccugaacaagaugaccgaggcccaggaggacggccagagcaccagcgagcugaucggccaguucggcgugggcuucuacagcgccuuccugguggccgacaaggugaucgugaccagcaagcacaacaacgacacccagcacaucugggagagcgacagcaacgaguucagcgugaucgccgaccccagaggcaacacccugggcagaggcaccaccaucacccuggugcugaaggaggaggccagcgacuaccuggagcuggacaccaucaagaaccuggugaagaaguacagccaguucaucaacuuccccaucuacguguggagcagcaagaccgagaccguggaggagcccauggaggaggaggaggccgccaaggaggagaaggaggagagcgacgacgaggccgccguggaggaggaggaggaggagaagaagcccaagaccaagaagguggagaagaccgugugggacugggagcugaugaacgacaucaagcccaucuggcagagacccagcaaggagguggaggaggacgaguacaaggccuucuacaagagcuucagcaaggagagcgacgaccccauggccuacauccacuucaccgccgagggcgaggugaccuucaagagcauccuguucgugcccaccagcgcccccagaggccuguucgacgaguacggcagcaagaagagcgacuacaucaagcuguacgugagaagaguguucaucaccgacgacuuccacgacaugaugcccaaguaccugaacuucgugaagggcgugguggacagcgacgaccugccccugaacgugagcagagagacccugcagcagcacaagcugcugaaggugaucagaaagaagcuggugagaaagacccuggacaugaucaagaagaucgccgacgacaaguacaacgacaccuucuggaaggaguucggcaccaacaucaagcugggcgugaucgaggaccacagcaacagaaccagacuggccaagcugcugagauuccagagcagccaccaccccaccgacaucaccagccuggaccaguacguggagagaaugaaggagaagcaggacaagaucuacuucauggccggcagcagcagaaaggaggccgagagcagccccuucguggagagacugcugaagaagggcuacgaggugaucuaccugaccgagcccguggacgaguacugcauccaggcccugcccgaguucgacggcaagagauuccagaacguggccaaggagggcgugaaguucgacgagagcgagaagaccaaggagagcagagaggccguggagaaggaguucgagccccugcugaacuggaugaaggacaaggcccugaaggacaagaucgagaaggccguggugagccagagacugaccgagagccccugcgcccugguggccagccaguacggcuggagcggcaacauggagagaaucaugaaggcccaggccuaccagaccggcaaggacaucagcaccaacuacuacgccagccagaagaagaccuucgagaucaaccccagacacccccugaucagagacaugcugagaagaaucaaggaggacgaggacgacaagaccgugcuggaccuggccguggugcuguucgagaccgccacccugagaagcggcuaccugcugcccgacaccaaggccuacggcgacagaaucgagagaaugcugagacugagccugaacaucgaccccgacgccaagguggaggaggagcccgaggaggagcccgaggagaccgccgaggacaccaccgaggacaccgagcaggacgaggacgaggagauggacgugggcaccgacgaggaggaggagaccgccaaggagagcaccgccgagaaggacgagcuguga

SEQ ID NO: 7623 - RNA, 2412 nt, Artificial Sequence
  derived and/or modified sequence opt5 from GRP94_(gp96)__Homo_sapiens__AAH66656
augagagcccugugggugcucggccugugcuguguccuucugaccuucgggagcguucgggcugacgaugagguggacguggauggaacagucgaagaggaccucggcaagucccgcgaagggucuagaacggaugacgaggugguucagcgggaagaggaggccauccaacuggauggacuuaacgcgagccagauucgcgaacugagagagaaauccgaaaaguuugcuuuccaggccgaggugaaucggaugaugaaacucaucauuaacucucuguacaagaauaaagagaucuuucugcgcgaacucauuagcaacgccuccgacgcucuggauaagaucagacuuaucucucugaccgacgagaaugcccucagcggcaacgaagaacugacagucaagauuaaaugcgauaaggagaaaaaucuucugcacgugaccgacacagggguuggaaugacccgggaggagcucgugaagaaccugggcacaaucgcuaaauccggcaccagcgaguuccugaauaagaugacggaggcccaggaagaugggcaaucuaccuccgagcucauuggacaguuuggcgucggguucuauagcgcguuucugguggccgacaaggugaucgucacaucuaaacauaacaaugacacccagcacauuugggaauccgauagcaacgaguucucuguuaucgcugacccccgcggaaauacacuuggcagagggaccacgauuacacuggugcucaaggaggaagccuccgauuaccuggagcuugacaccaucaaaaaccuggugaagaaauauagccaguuuaucaauuucccuauuuacgucugguccucuaagacagaaaccguggaggaaccgauggaggaggaagaggcugccaaagaagagaaggaggaaagcgaugacgaggcggccguugaagaggaagaggaggaaaagaaacccaagaccaaaaagguggagaaaacagucugggauugggaacucaugaacgacaucaagccuauuuggcaacggcccuccaaggagguggaagaggaugaguauaaagccuuuuacaagagcuucucuaaagaauccgacgauccuauggcuuauauccauuuuacggcugagggagaaguuaccuucaagagcauucuguucgugcccacaucugccccucgcggccuguuugacgaguacggcagcaaaaaguccgacuacaucaagcucuaugucagacggguguucaucaccgaugacuuucacgauaugaugccgaaauaccugaacuucgucaagggggugguugacucugaugaccuuccccugaaugugagccgcgaaacacuccagcagcauaaacugcuuaaggucauucggaaaaagcuggugagaaagacccucgauaugaucaaaaagauugccgacgauaaauauaacgacacguuuuggaaggaguucggaacaaauaucaaacugggcguuauugaggaucacuccaacagaacccgccuggcuaagcuccugcgguuucagagcucucaccauccuaccgacaucacaucccuugaucaauacguggaaagaaugaaagagaagcaggacaagaucuauuucauggcggggagcucucgcaaagaagccgaguccagccccuuugucgagcggcugcucaagaaaggauacgaagugauuuaucugaccgagccuguggacgaauacuguauccaggcucugcccgaguucgauggcaagagauuucaaaauguugccaaagaaggggucaaguucgacgaguccgagaagacaaaagaaucucgcgaggccguggaaaaggaguuugaaccgcuucucaacuggaugaaagauaaggcucugaaagacaagauugagaaggccguggucagccagcggcugacggaguccccuugcgcgcucguggcuucucaguacggauggagcggcaauauggaaagaaucaugaaagcccaggccuaucaaaccggcaaggauauuuccacaaacuacuaugcuagccagaaaaagaccuucgagaucaauccccgccacccucugauucgggacaugcuuagacgcaucaaagaagaugaggacgauaagacaguucuggaccucgccgugguccuguucgaaaccgcuacgcugcggucuggguaccuucuccccgauaccaaggccuauggagacagaaucgagcggaugcugcgccugucccucaacauugaucccgacgcgaaaguggaggaagaaccugaagaggagccggaagagacagccgaagacaccacagaggauaccgaacaggacgaggaugaggaaauggacguuggcacggaugaggaagaggaaacagcuaaggagagcaccgccgagaaagacgaacuguga

SEQ ID NO: 7624 - RNA, 2412 nt, Artificial Sequence
  derived and/or modified sequence opt6 from GRP94_(gp96)__Homo_sapiens__AAH66656
augagagcgcucuggguacuaggauuauguugcguacuauuaacguuugggucuguaagagcagacgaugagguagauguagacggaacuguugaagaagauuuaggaaaaagccgagaaggaucaagaacagaugacgaagucguacaaagagaagaagaagcaauacaacuugauggacuaaacgcaagucaaauaagagaauuaagagaaaaaucagaaaaauuugcguuucaagcagaaguaaacagaaugaugaaacuaauaaucaacagucuauauaaaaacaaagaaauuuucuuaagagaacucauaagcaaugcuagugaugcacuagauaaaauacgauuaauaucauuaacagaugaaaaugcacuaagcggaaaugaggaauuaacaguaaaaauaaaaugcgauaaagaaaaaaaccuguuacaugucacagauacaggcguugguaugacuagagaagaacuaguuaaaaaucuugguacuauagcaaaaaguggaacaucagaauuccuaaauaaaaugacagaagcacaagaagauggacaaaguacgucagaacuaauaggacaauuuggagugggauuuuauuccgcauuccuaguagcggacaaagugauagugacuagcaaacacaacaaugacacacaacauauaugggaaucagauaguaaugaguucagugucaucgcugauccaagaggaaacacacuagguagaggaacaacuauaacacugguccuaaaagaagaagccagcgauuaucuagaauuagacacuauaaaaaaucuaguuaaaaaauacagccaauucauaaacuucccaauauacguaugguccaguaaaaccgaaacaguugaagaaccuauggaagaagaagaagccgcgaaagaggaaaaagaagaaucagaugacgaagcagcaguagaagaagaagaagaagagaaaaaaccaaaaacuaagaaaguagaaaaaacgguaugggauugggaacucaugaaugacauaaaaccaauauggcaaagaccaucuaaagaaguugaagaagaugaauacaaggcauuuuauaaaucauuuagcaaagaaagcgaugauccaauggcauauauacacuuuacagcagaaggagaaguaacuuucaaaucaauauuauucguaccgacaagugcuccaagaggauuauucgacgaauauggaucaaaaaaaagugacuauauuaaacuauacguaaggagaguauucauaaccgaugauuuucacgauaugaugccuaaauaccucaacuucguaaaaggaguuguggacucggacgacuuaccacuaaacguuagccgagaaacacuccaacaacacaaguuguuaaagguaauacgcaaaaaacuuguaagaaaaacacuagauaugauaaaaaagaucgcagaugacaaauacaacgauacauucuggaaagaauucgguacaaauauuaaacucggagugauugaagaucacaguaauagaacgagauuagcaaaacuacuuagauuccagucaagucaucacccaacagacaucacgucacuagaccaauaugucgaaagaaugaaagaaaaacaagauaagauauauuuuauggcaggaucaucaagaaaagaagcagaaaguagcccuuuuguagaaagauuauugaaaaaaggauacgaaguaauauauuuaaccgaaccuguugacgaauauuguauucaagcacuccccgaauuugacggaaaaagauuccaaaaugucgccaaagaaggaguuaaauucgaugaaucagaaaaaacaaaagagucaagagaagcaguagaaaaagaauucgaaccacuacuaaacuggaugaaagacaaagcauuaaaagauaaaauagaaaaagcaguaguaagccaaagauuaacggaaucgccaugcgcacuaguagcaucacaauacggauggaguggcaauauggaacgaauaaugaaagcacaggccuaccaaacagggaaagacauaagcacaaauuauuacgcaagucaaaaaaaaacauucgaaaucaauccuaggcacccauuaauucgagacaugcuaagaaggauaaaagaagaugaagacgauaaaacgguacuagaucuagcaguaguucuuuucgaaacagcaacccuacgaucagguuauuuacuccccgauacgaaagcuuacggcgacagaaucgaaagaaugcuaagacuaagucucaauaucgacccagaugcaaaaguugaagaagaacccgaagaagaaccugaagaaacagcagaagauacaacagaagacacagaacaagaugaagaugaagagauggauguaggaacagacgaagaagaggaaacugcaaaagaaucaacagcagaaaaagacgaacuauaa

SEQ ID NO: 7625 - protein, 646 aa, Artificial Sequence
  HSC70__Homo_sapiens__P11142
MSKGPAVGIDLGTTYSCVGVFQHGKVEIIANDQGNRTTPSYVAFTDTERLIGDAAKNQVAMNPTNTVFDAKRLIGRRFDDAVVQSDMKHWPFMVVNDAGRPKVQVEYKGETKSFYPEEVSSMVLTKMKEIAEAYLGKTVTNAVVTVPAYFNDSQRQATKDAGTIAGLNVLRIINEPTAAAIAYGLDKKVGAERNVLIFDLGGGTFDVSILTIEDGIFEVKSTAGDTHLGGEDFDNRMVNHFIAEFKRKHKKDISENKRAVRRLRTACERAKRTLSSSTQASIEIDSLYEGIDFYTSITRARFEELNADLFRGTLDPVEKALRDAKLDKSQIHDIVLVGGSTRIPKIQKLLQDFFNGKELNKSINPDEAVAYGAAVQAAILSGDKSENVQDLLLLDVTPLSLGIETAGGVMTVLIKRNTTIPTKQTQTFTTYSDNQPGVLIQVYEGERAMTKDNNLLGKFELTGIPPAPRGVPQIEVTFDIDANGILNVSAVDKSTGKENKITITNDKGRLSKEDIERMVQEAEKYKAEDEKQRDKVSSKNSLESYAFNMKATVEDEKLQGKINDEDKQKILDKCNEIINWLDKNQTAEKEEFEHQQKELEKVCNPIITKLYQSAGGMPGGMPGGFPGGGAPPSGGASSGPTIEEVD

SEQ ID NO: 7626 - RNA, 1941 nt, Artificial Sequence
  HSC70__Homo_sapiens__AAH16179
auguccaagggaccugcaguugguauugaucuuggcaccaccuacucuuguguggguguuuuccagcacggaaaagucgagauaauugccaaugaucagggaaaccgaaccacuccaagcuaugucgccuuuacggacacugaacgguugaucggugaugccgcaaagaaucaaguugcaaugaaccccaccaacacaguuuuugaugccaaacgucugauuggacgcagauuugaugaugcuguuguccagucugauaugaaacauuggcccuuuaugguggugaaugaugcuggcaggcccaagguccaaguagaauacaagggagagaccaaaagcuucuauccagaggaggugucuucuaugguucugacaaagaugaaggaaauugcagaagccuaccuugggaagacuguuaccaaugcuguggucacagugccagcuuacuuuaaugacucucagcgucaggcuaccaaagaugcuggaacuauugcuggucucaauguacuuagaauuauuaaugagccaacugcugcugcuauugcuuacggcuuagacaaaaagguuggagcagaaagaaacgugcucaucuuugaccugggagguggcacuuuugaugugucaauccucacuauugaggauggaaucuuugaggucaagucuacagcuggagacacccacuuggguggagaagauuuugacaaccgaauggucaaccauuuuauugcugaguuuaagcgcaagcauaagaaggacaucagugagaacaagagagcuguaagacgccuccguacugcuugugaacgugcuaagcguacccucucuuccagcacccaggccaguauugagaucgauucucucuaugaaggaaucgacuucuauaccuccauuacccgugcccgauuugaagaacugaaugcugaccuguuccguggcacccuggacccaguagagaaagcccuucgagaugccaaacuagacaagucacagauucaugauauuguccugguuggugguucuacucguauccccaagauucagaagcuucuccaagacuucuucaauggaaaagaacugaauaagagcaucaacccugaugaagcuguugcuuauggugcagcuguccaggcagccaucuugucuggagacaagucugagaauguucaagauuugcugcucuuggaugucacuccucuuucccuugguauugaaacugcugguggagucaugacuguccucaucaagcguaauaccaccauuccuaccaagcagacacagaccuucacuaccuauucugacaaccagccuggugugcuuauucagguuuaugaaggcgagcgugccaugacaaaggauaacaaccugcuuggcaaguuugaacucacaggcauaccuccugcaccccgagguguuccucagauugaagucacuuuugacauugaugccaaugguauacucaaugucucugcuguggacaagaguacgggaaaagagaacaagauuacuaucacuaaugacaagggccguuugagcaaggaagacauugaacguaugguccaggaagcugagaaguacaaagcugaagaugagaagcagagggacaaggugucauccaagaauucacuugaguccuaugccuucaacaugaaagcaacuguugaagaugagaaacuucaaggcaagauuaacgaugaggacaaacagaagauucuggacaaguguaaugaaauuaucaacuggcuugauaagaaucagacugccgagaaggaagaauuugaacaucaacagaaagagcuggagaaaguuugcaaccccaucaucaccaagcuguaccagagugcaggaggcaugccaggaggaaugccugggggauuuccuggugguggagcuccucccucugguggugcuuccucagggcccaccauugaagagguugauuaa

SEQ ID NO: 7627 - RNA, 1941 nt, Artificial Sequence
  derived and/or modified sequence opt1 from HSC70__Homo_sapiens__AAH16179
augagcaagggccccgccguggggaucgaccugggcaccaccuacuccugcgucgggguguuccagcacggcaagguggagaucaucgccaacgaccaggggaaccgcacgacccccagcuacgucgcguucaccgacaccgagcggcucaucggcgacgccgccaagaaccagguggccaugaaccccacgaacaccguguucgacgccaagcgccugaucggccggcgcuucgacgacgcggucgugcaguccgacaugaagcacuggcccuucaugguggucaacgacgccgggcggcccaagguccagguggaguacaagggcgagaccaagagcuucuacccggaggagguguccagcauggugcugaccaagaugaaggagaucgccgaggccuaccucgggaagacggugaccaacgcggucgugaccgugcccgccuacuucaacgacucccagcgccaggccaccaaggacgccggcacgaucgccgggcugaacguccugcggaucaucaacgagcccaccgcggccgccaucgccuacggccucgacaagaaggugggcgccgagcgcaacgugcugaucuucgaccucgggggcgggaccuucgacgucagcauccugaccaucgaggacggcaucuucgaggugaaguccacggcgggcgacacccaccucgggggcgaggacuucgacaaccggauggugaaccacuucaucgccgaguucaagcgcaagcacaagaaggacaucagcgagaacaagcgggccguccgccggcugcgcaccgccugcgagcgggccaagcgcacccuguccagcuccacgcaggcgagcaucgagaucgacucccuguacgaggggaucgacuucuacaccagcaucacccgggcccgcuucgaggagcugaacgccgaccucuuccggggcacccuggaccccguggagaaggcccugcgcgacgccaagcucgacaagucccagauccacgacaucguccuggucgggggcagcacgcggaucccgaagauccagaagcugcuccaggacuucuucaacggcaaggagcugaacaaguccaucaaccccgacgaggcgguggccuacggggccgccgugcaggcggccauccugagcggcgacaagagcgagaacgugcaggaccuccugcugcucgacgugacgccccugucccuggggaucgagaccgccggcggggucaugaccgugcucaucaagcgcaacaccaccauccccaccaagcagacccagacguucaccaccuacagcgacaaccagccgggcgugcugauccaggucuacgagggcgagcgcgccaugaccaaggacaacaaccugcucgggaaguucgagcugacgggcaucccgcccgcgccccgcggggugccccagaucgaggugaccuucgacaucgacgccaacggcauccugaacgucuccgccguggacaagagcaccgggaaggagaacaagaucaccaucaccaacgacaagggccggcucuccaaggaggacaucgagcggauggugcaggaggccgagaaguacaaggccgaggacgagaagcagcgcgacaaggucagcuccaagaacagccuggaguccuacgccuucaacaugaaggcgacgguggaggacgagaagcugcagggcaagaucaacgacgaggacaagcagaagauccucgacaagugcaacgagaucaucaacuggcuggacaagaaccagaccgccgagaaggaggaguucgagcaccagcagaaggagcuggagaaggugugcaaccccaucaucaccaagcucuaccagagcgccgggggcaugcccgggggcaugcccggcggguucccgggcgggggcgccccgcccuccgggggcgccagcuccggccccaccaucgaggaggucgacuga

SEQ ID NO: 7628 - RNA, 1941 nt, Artificial Sequence
  derived and/or modified sequence opt2 from HSC70__Homo_sapiens__AAH16179
auguccaagggccccgccgucggcaucgaccucggcaccaccuacuccugcgucggcgucuuccagcacggcaaggucgagaucaucgccaacgaccagggcaaccgcaccacccccuccuacgucgccuucaccgacaccgagcgccucaucggcgacgccgccaagaaccaggucgccaugaaccccaccaacaccgucuucgacgccaagcgccucaucggccgccgcuucgacgacgccgucguccaguccgacaugaagcacuggcccuucauggucgucaacgacgccggccgccccaagguccaggucgaguacaagggcgagaccaaguccuucuaccccgaggaggucuccuccaugguccucaccaagaugaaggagaucgccgaggccuaccucggcaagaccgucaccaacgccgucgucaccguccccgccuacuucaacgacucccagcgccaggccaccaaggacgccggcaccaucgccggccucaacguccuccgcaucaucaacgagcccaccgccgccgccaucgccuacggccucgacaagaaggucggcgccgagcgcaacguccucaucuucgaccucggcggcggcaccuucgacgucuccauccucaccaucgaggacggcaucuucgaggucaaguccaccgccggcgacacccaccucggcggcgaggacuucgacaaccgcauggucaaccacuucaucgccgaguucaagcgcaagcacaagaaggacaucuccgagaacaagcgcgccguccgccgccuccgcaccgccugcgagcgcgccaagcgcacccucuccuccuccacccaggccuccaucgagaucgacucccucuacgagggcaucgacuucuacaccuccaucacccgcgcccgcuucgaggagcucaacgccgaccucuuccgcggcacccucgaccccgucgagaaggcccuccgcgacgccaagcucgacaagucccagauccacgacaucguccucgucggcggcuccacccgcauccccaagauccagaagcuccuccaggacuucuucaacggcaaggagcucaacaaguccaucaaccccgacgaggccgucgccuacggcgccgccguccaggccgccauccucuccggcgacaaguccgagaacguccaggaccuccuccuccucgacgucaccccccucucccucggcaucgagaccgccggcggcgucaugaccguccucaucaagcgcaacaccaccauccccaccaagcagacccagaccuucaccaccuacuccgacaaccagcccggcguccucauccaggucuacgagggcgagcgcgccaugaccaaggacaacaaccuccucggcaaguucgagcucaccggcaucccccccgccccccgcggcgucccccagaucgaggucaccuucgacaucgacgccaacggcauccucaacgucuccgccgucgacaaguccaccggcaaggagaacaagaucaccaucaccaacgacaagggccgccucuccaaggaggacaucgagcgcaugguccaggaggccgagaaguacaaggccgaggacgagaagcagcgcgacaaggucuccuccaagaacucccucgaguccuacgccuucaacaugaaggccaccgucgaggacgagaagcuccagggcaagaucaacgacgaggacaagcagaagauccucgacaagugcaacgagaucaucaacuggcucgacaagaaccagaccgccgagaaggaggaguucgagcaccagcagaaggagcucgagaaggucugcaaccccaucaucaccaagcucuaccaguccgccggcggcaugcccggcggcaugcccggcggcuuccccggcggcggcgccccccccuccggcggcgccuccuccggccccaccaucgaggaggucgacuga

SEQ ID NO: 7629 - RNA, 1941 nt, Artificial Sequence
  derived and/or modified sequence opt3 from HSC70__Homo_sapiens__AAH16179
augagcaagggccccgccguggggaucgaccugggaaccacauacuccugcgucgguguuuuccagcacggcaaaguggagauuauagcuaacgaucaagggaauagaacuacgccuucuuauguagcauuuaccgacacagaaaggcucaucggagaugccgcgaagaaccagguggcuaugaauccaacuaacaccgucuucgacgccaaacggcuuauuggccgccgauuugaugacgcagugguucagucagauaugaagcauuggccguucaugguggucaaugacgccggucgucccaaagugcagguagaguacaagggggaaacaaagaguuuuuauccugaggaaguuagcuccauggugcugaccaaaaugaaggagaucgcugaggcauacuugggaaaaacugucacaaacgccguggugaccgucccagcuuauuucaaugauucucaaagacaggccacgaaggacgcgggcacuauugcaggcuuaaacguucugaggaucauaaaugaacccaccgccgcugccaucgcauacgggcuagauaaaaaggugggagcugagcggaacguacucauuuuugaccuggguggcgggacauucgaugugucgauccuuacuauugaagacggaaucuuugaggucaagucaaccgccggcgacacacaccuggguggggaggauuucgacaaucgcauggugaaccauuuuauagcggaauuuaaaagaaagcacaaaaaggauauuagcgagaauaaaagggccguucggcgcuugcgaaccgcaugugaaagagcuaagaggacgcucaguuccucuacucaggccagcaucgagauugacucccuguaugaaggaaucgauuuuuacacaucaaucacccgggcucguuucgaggagcugaacgccgaccucuuccgcggcacuuuagauccuguggaaaaagcacugagagacgccaaacuugauaagagucagauucaugacauagucuuggugggcgggagcacaaggaucccaaagauucaaaagcugcuacaggauuucuucaauggaaaagagcucaacaagucuaucaaccccgacgaagcuguagcguacggugcagccguucaggcugccauacuguccggcgacaaaucagagaaugugcaggaucuucuguugcucgacgucaccccucugagcuuagggauugaaacggcaggaggcgugaugaccguccugaucaagcggaacacaacuaucccaaccaagcaaacacagacuuuuaccacauauagugauaaucagccgggugugcucauucaaguuuacgagggggagcgagccaugaccaaagacaacaaucuucugggcaaguucgaauugacuggaaucccucccgcuccacgcggcgugccccagauugagguaacguuugauauagacgccaacgggauccuaaaugucucugcaguggauaaauccacaggaaaggaaaacaaaauuaccaucacuaaugacaaggguagacugagcaaggaggauaucgaaaggaugguucaggaggcggagaaauauaaggcugaagacgagaaacagcgggauaaggugucgucuaaaaacucccucgaaucauacgccuucaauaugaaggcaaccgucgaggacgagaagcugcaaggcaaaauuaacgaugaagacaagcagaaaauacuugacaagugcaaugagaucauuaacuggcuggauaaaaaucagacagccgaaaaggaggaauuugagcaccagcaaaaagaguuggaaaagguguguaacccuaucauuaccaagcucuaucagagugcugggggaaugccaggcgguaugcccgggggcuucccgggaggcggggccccucccagcggaggugcauccucuggcccaacuaucgaggaaguagacuga

SEQ ID NO: 7630 - RNA, 1941 nt, Artificial Sequence
  derived and/or modified sequence opt4 from HSC70__Homo_sapiens__AAH16179
augagcaagggccccgccgugggcaucgaccugggcaccaccuacagcugcgugggcguguuccagcacggcaagguggagaucaucgccaacgaccagggcaacagaaccacccccagcuacguggccuucaccgacaccgagagacugaucggcgacgccgccaagaaccagguggccaugaaccccaccaacaccguguucgacgccaagagacugaucggcagaagauucgacgacgccguggugcagagcgacaugaagcacuggcccuucaugguggugaacgacgccggcagacccaaggugcagguggaguacaagggcgagaccaagagcuucuaccccgaggaggugagcagcauggugcugaccaagaugaaggagaucgccgaggccuaccugggcaagaccgugaccaacgccguggugaccgugcccgccuacuucaacgacagccagagacaggccaccaaggacgccggcaccaucgccggccugaacgugcugagaaucaucaacgagcccaccgccgccgccaucgccuacggccuggacaagaaggugggcgccgagagaaacgugcugaucuucgaccugggcggcggcaccuucgacgugagcauccugaccaucgaggacggcaucuucgaggugaagagcaccgccggcgacacccaccugggcggcgaggacuucgacaacagaauggugaaccacuucaucgccgaguucaagagaaagcacaagaaggacaucagcgagaacaagagagccgugagaagacugagaaccgccugcgagagagccaagagaacccugagcagcagcacccaggccagcaucgagaucgacagccuguacgagggcaucgacuucuacaccagcaucaccagagccagauucgaggagcugaacgccgaccuguucagaggcacccuggaccccguggagaaggcccugagagacgccaagcuggacaagagccagauccacgacaucgugcuggugggcggcagcaccagaauccccaagauccagaagcugcugcaggacuucuucaacggcaaggagcugaacaagagcaucaaccccgacgaggccguggccuacggcgccgccgugcaggccgccauccugagcggcgacaagagcgagaacgugcaggaccugcugcugcuggacgugaccccccugagccugggcaucgagaccgccggcggcgugaugaccgugcugaucaagagaaacaccaccauccccaccaagcagacccagaccuucaccaccuacagcgacaaccagcccggcgugcugauccagguguacgagggcgagagagccaugaccaaggacaacaaccugcugggcaaguucgagcugaccggcaucccccccgcccccagaggcgugccccagaucgaggugaccuucgacaucgacgccaacggcauccugaacgugagcgccguggacaagagcaccggcaaggagaacaagaucaccaucaccaacgacaagggcagacugagcaaggaggacaucgagagaauggugcaggaggccgagaaguacaaggccgaggacgagaagcagagagacaaggugagcagcaagaacagccuggagagcuacgccuucaacaugaaggccaccguggaggacgagaagcugcagggcaagaucaacgacgaggacaagcagaagauccuggacaagugcaacgagaucaucaacuggcuggacaagaaccagaccgccgagaaggaggaguucgagcaccagcagaaggagcuggagaaggugugcaaccccaucaucaccaagcuguaccagagcgccggcggcaugcccggcggcaugcccggcggcuuccccggcggcggcgccccccccagcggcggcgccagcagcggccccaccaucgaggagguggacuga

SEQ ID NO: 7631 - RNA, 1941 nt, Artificial Sequence
  derived and/or modified sequence opt5 from HSC70__Homo_sapiens__AAH16179
augagcaagggccccgccguggggaucgaccugggaaccacauacuccugcgucggcguuuuccagcacgggaaaguggagauuaucgcuaacgaucaaggaaauagaacgaccccuucuuauguggccuuuacagacaccgaacggcucauuggcgaugcggcuaagaaccaggucgccaugaauccgacaaacaccguguucgacgccaaacgccugaucgggagacgguuugaugacgcuguugugcagagcgauaugaagcauuggcccuucauggucgugaaugacgccggacgcccuaaaguucagguggaguacaagggcgaaacaaaguccuuuuaucccgaggaagucucuagcauggugcuuaccaaaaugaaggagauugcugaggccuaccugggcaaaacggugaccaacgcggucguuacagugccugccuauuucaaugauucccaaagacaggcuaccaaggacgccgggacaaucgcuggacucaacgugcugcggaucauuaaugaacccaccgccgcggccaucgcuuacggccuugauaaaaaggucggggccgagcgcaacgugcugauuuuugaccucggaggcgggacguucgauguuucuauccugacaauugaagacggaaucuuugaggugaagucuaccgcuggcgacacacaccugggcggggaggauuucgacaauagaauggucaaccauuuuauugccgaauuuaaacggaagcacaaaaaggauaucuccgagaauaaacgcgccgugagacggcuccgcaccgcuugugaaagagcgaagcggacccugagcagcuccacacaggccagcaucgagauugacucucuuuaugaaggaaucgauuuuuacacguccauuacccgcgcuagauucgaggagcugaacgccgaccucuuccggggcacacuggauccuguugaaaaagcccuuagagacgcuaagcuggauaagagccagauccaugacauugugcucgucgggggaucuacccgcaucccgaaaauccaaaagcugcugcaggauuucuucaauggcaaagagcucaacaaguccauuaaccccgacgaagccguggcguacggggcugccguccaggccgcuauccugagcggagacaaauccgagaaugugcaggaucuucugcuccuggacguuacaccucuuucucugggcauugaaaccgccggcggggugaugacgguccucaucaagcggaacacaaccauucccaccaagcaaacacagaccuuuacaacguauagcgauaaucagccuggagugcugauccaaguuuacgagggcgagagagcuaugaccaaagacaacaaucugcucgggaaguucgaacugacaggaaucccgcccgccccucgcggcgugccccagauugaggucaccuuugauaucgacgcgaacgggauucuuaauguguccgccguggauaaaagcacaggcaaggaaaacaaaaucaccauuacgaaugacaagggacggcugucuaaggaggauaucgaaagaaugguucaggaggcugagaaauauaaggccgaagacgagaaacagcgcgauaaggucuccagcaaaaacucucucgaaagcuacgcuuucaauaugaaggccaccguggaggacgagaagcugcaaggcaaaauuaacgaugaagacaagcagaaaauccuugacaagugcaaugagaucauuaacuggcuggauaaaaaucagacagcggaaaaggaggaauuugagcaccagcaaaaagagcucgaaaagguguguaacccuaucauuaccaagcuguaucaguccgccgggggaaugcccggcgggaugcccggaggcuucccugggggcggagcuccgcccucuggcggggccagcuccggaccuacaaucgaggaagucgacuga

SEQ ID NO: 7632 - RNA, 1941 nt, Artificial Sequence
  derived and/or modified sequence opt6 from HSC70__Homo_sapiens__AAH16179
augucuaagggucccgcaguugggauugauuuaggaacuacuuauucaugcguaggaguauuccaacacggaaaaguagaaauuauagcaaacgaccaaggaaaucgaacaacaccaaguuaugucgccuuuacugauacugaaagacucauaggagacgcugcaaaaaaccaaguugcaaugaacccaacuaauacaguauucgaugcaaaaagacuaauagguagaagauucgacgacgcuguaguacaaagugauaugaaacacuggccauuuaugguagugaaugacgccgguagaccaaaaguacaaguagaauauaaaggugaaaccaaaaguuuuuacccagaagaaguaagcucaaugguauuaaccaaaaugaaagagauagcagaagcguauuuaggaaaaacaguaacuaacgcaguagucaccguaccagcauacuuuaaugauucucaaagacaagcaacaaaagaugcaggaacaaucgccggauuaaauguacuaagaaucauaaaugaaccuacagcagcagcaauagcauacggauuagauaaaaaaguaggcgcagaaagaaauguacuaauauuugaccucggaggaggaacauuugacguuucaauuuuaaccauagaagacggaauuuucgaaguaaaaucaacagcaggagacacucaucuagguggcgaagauuuugacaaucgaaugguaaaccauuucauugcagaauuuaaaagaaaacauaaaaaggauauaucagaaaacaaaagagcagucagaagguuaagaacagcaugugaaagagcaaaaagaacauuaucuucaaguacgcaagcaaguauagaaaucgacaguuuauaugaaggaauugauuuuuacacaucaaucacacgagcuagguuugaagaacuaaaugcagaccucuucagaggaacauuggauccaguagagaaagcucuacgagaugcuaaacuagacaaaucacaaauacaugacauagugcugguaggcggaucaacaagaaucccgaaaauacaaaaauuacuacaagauuucuuuaauggaaaagaacuuaacaaaucaauaaauccagacgaagcuguagcauacggugcagcagugcaagcagcaauuuuauccggagacaaaucagaaaacgugcaagauuuauuacuacuagacguuacaccacuaagucuagguauagaaacagcgggaggaguaaugacaguauuaauaaaacgaaauaccacaauacccacuaaacaaacgcaaacauuuacaacauauucagacaaucaaccuggcgugcugauccaaguauacgaaggagaaagagcaaugacaaaagauaacaaccuuuuaggcaaauuugaacuaacagguauaccaccugcaccaaggggaguaccacaaaucgaaguuacauucgacauagacgcaaacggaauauuaaauguaagugcaguagacaaaucaacagguaaagaaaacaagauaacuauaacaaacgauaaaggaagacuaucuaaagaagacauagaacgaaugguacaagaagcagaaaaauacaaagccgaggacgaaaaacaaagagauaaaguaaguagcaaaaauaguuuagaaucauacgcauucaauaugaaagcaacuguggaggacgaaaaauugcaaggaaaaauaaaugaugaagacaaacaaaagauauuagauaaauguaaugaaauaauaaacuggcuagauaaaaaucaaacagcagaaaaagaagaauuugaacaucaacaaaaagaauuggaaaaaguaugcaauccaauaauaacaaaacuauaucaaagcgcagggggcaugcccggcggaaugcccggaggcuuuccaggaggaggagcuccaccaucagguggcgcuucaaguggucccacaauagaagaaguagauuaa

SEQ ID NO: 7633 - protein, 858 aa, Artificial Sequence
  HSP110__Homo_sapiens__Q92598
MSVVGLDVGSQSCYIAVARAGGIETIANEFSDRCTPSVISFGSKNRTIGVAAKNQQITHANNTVSNFKRFHGRAFNDPFIQKEKENLSYDLVPLKNGGVGIKVMYMGEEHLFSVEQITAMLLTKLKETAENSLKKPVTDCVISVPSFFTDAERRSVLDAAQIVGLNCLRLMNDMTAVALNYGIYKQDLPSLDEKPRIVVFVDMGHSAFQVSACAFNKGKLKVLGTAFDPFLGGKNFDEKLVEHFCAEFKTKYKLDAKSKIRALLRLYQECEKLKKLMSSNSTDLPLNIECFMNDKDVSGKMNRSQFEELCAELLQKIEVPLYSLLEQTHLKVEDVSAVEIVGGATRIPAVKERIAKFFGKDISTTLNADEAVARGCALQCAILSPAFKVREFSVTDAVPFPISLIWNHDSEDTEGVHEVFSRNHAAPFSKVLTFLRRGPFELEAFYSDPQGVPYPEAKIGRFVVQNVSAQKDGEKSRVKVKVRVNTHGIFTISTASMVEKVPTEENEMSSEADMECLNQRPPENPDTDKNVQQDNSEAGTQPQVQTDAQQTSQSPPSPELTSEENKIPDADKANEKKVDQPPEAKKPKIKVVNVELPIEANLVWQLGKDLLNMYIETEGKMIMQDKLEKERNDAKNAVEEYVYEFRDKLCGPYEKFICEQDHQNFLRLLTETEDWLYEEGEDQAKQAYVDKLEELMKIGTPVKVRFQEAEERPKMFEELGQRLQHYAKIAADFRNKDEKYNHIDESEMKKVEKSVNEVMEWMNNVMNAQAKKSLDQDPVVRAQEIKTKIKELNNTCEPVVTQPKPKIESPKLERTPNGPNIDKKEEDLEDKNNFGAEPPHQNGECYPNEKNSVNMDLD

SEQ ID NO: 7634 - RNA, 2577 nt, Artificial Sequence
  HSP110__Homo_sapiens__AAH37553
augucgguggugggguuggacgugggcucgcagagcugcuacaucgcgguagcccgggccgggggcaucgagaccaucgccaaugaguucagcgaccggugcaccccgucagucauaucauuuggaucaaaaaauagaacaaucggaguugcagccaaaaaucagcaaaucacucaugcaaacaauacggugucuaacuucaaaagauuucauggccgagcauucaaugaccccuucauucaaaaggagaaggaaaacuugaguuacgauuugguuccauugaaaaaugguggaguuggaauaaagguaauguacaugggugaagaacaucuauuuaguguggagcagauaacagccauguuguugacuaagcugaaggaaacugcugaaaacagccucaagaaaccaguaacagauuguguuauuucaguccccuccuucuuuacagaugcugagaggcgaucuguguuagaugcugcacagauuguuggccuaaacuguuuaagacuuaugaaugacaugacagcuguugcuuugaauuacggaauuuauaagcaggaucucccaagccuggaugagaaaccucggauagugguuuuuguugauaugggacauucagcuuuucaagugucugcuugugcuuuuaacaagggaaaauugaagguacugggaacagcuuuugauccuuucuuaggaggaaaaaacuucgaugaaaaguuaguggaacauuuuugugcagaauuuaaaacuaaguacaaguuggaugcaaaauccaaaauacgagcacuccuacgucuguaucaggaaugugaaaaacugaaaaagcuaaugagcucuaacagcacagaccuuccacugaauaucgaaugcuuuaugaaugauaaagauguuuccggaaagaugaacaggucacaauuugaagaacucugugcugaacuucugcaaaagauagaaguaccccuuuauucacuguuggaacaaacucaucucaaaguagaagaugugagugcaguugagauuguuggaggcgcuacacgaauuccagcugugaaggaaagaauugccaaauucuuuggaaaagauauuagcacaacacucaaugcagaugaagcaguagccagaggaugugcauuacagugugcaauacuuuccccggcauuuaaaguuagagaauuuuccgucacagaugcaguuccuuuuccaauaucucugaucuggaaccaugauucagaagauacugaagguguucaugaagucuuuagucgaaaccaugcugcuccuuucuccaaaguucucaccuuucugagaagggggccuuuugagcuagaagcuuucuauucugauccccaaggaguuccauauccagaagcaaaaauaggccgcuuuguaguucagaauguuucugcacagaaagauggagaaaaaucuagaguaaaagucaaagugcgagucaacacccauggcauuuucaccaucucuacggcaucuaugguggagaaagucccaacugaggagaaugaaaugucuucugaagcugacauggagugucugaaucagagaccaccagaaaacccagacacugauaaaaauguccagcaagacaacagugaagcuggaacacagccccagguacaaacugaugcucaacaaaccucacagucucccccuucaccugaacuuaccucagaagaaaacaaaaucccagaugcugacaaagcaaaugaaaaaaaaguugaccagccuccagaagcuaaaaagcccaaaauaaagguggugaauguugagcugccuauugaagccaacuuggucuggcaguuagggaaagaccuucuuaacauguauauugagacagaggguaagaugauaaugcaagauaaauuggaaaaagaaaggaaugaugcuaaaaaugcaguugaggaauauguguaugaguucagagacaagcuguguggaccauaugaaaaauuuauaugugagcaggaucaucaaaauuuuuugagacuccucacagaaacugaagacuggcuguaugaagaaggagaggaccaagcuaaacaagcauauguugacaaguuggaagaauuaaugaaaauuggcacuccaguuaaaguucgguuucaggaagcugaagaacggccaaaaauguuugaagaacuaggacagaggcugcagcauuaugccaagauagcagcugacuucagaaauaaggaugagaaauacaaccauauugaugagucugaaaugaaaaaaguggagaagucuguuaaugaagugauggaauggaugaauaaugucaugaaugcucaggcuaaaaagagucuugaucaggauccaguuguacgugcucaggaaauuaaaacaaaaaucaaggaauugaacaacacaugugaacccguuguaacacaaccgaaaccaaaaauugaaucacccaaacuggaaagaacuccaaauggcccaaauauugauaaaaaggaagaagauuuagaagacaaaaacaauuuuggugcugaaccuccacaucagaauggugaauguuacccuaaugagaaaaauucuguuaauauggacuuggacuag

SEQ ID NO: 7635 - RNA, 2577 nt, Artificial Sequence
  derived and/or modified sequence opt1 from HSP110__Homo_sapiens__AAH37553
augagcguggucggccuggacguggggucccagagcugcuacaucgccguggcccgcgcgggcgggaucgagaccaucgccaacgaguucuccgaccggugcacccccagcgucaucuccuucggcagcaagaaccgcaccaucgggguggccgccaagaaccagcagaucacccacgccaacaacaccguguccaacuucaagcgguuccacggccgcgcguucaacgacccguucauccagaaggagaaggagaaccucagcuacgaccuggucccccugaagaacggcggggugggcaucaaggugauguacaugggggaggagcaccucuucuccgucgagcagaucaccgccaugcugcugacgaagcucaaggagaccgccgagaacagccugaagaagcccgugaccgacugcgugaucuccguccccagcuucuucaccgacgccgagcggcgcuccgugcuggacgcggcccagaucgugggccucaacugccugcggcugaugaacgacaugacggccgucgcccucaacuacgggaucuacaagcaggaccugccgagccuggacgagaagccccgcaucgugguguucgucgacaugggccacuccgccuuccaggugagcgcgugcgccuucaacaagggcaagcucaaggugcuggggaccgccuucgaccccuuccugggcgggaagaacuucgacgagaagcucgucgagcacuucugcgccgaguucaagaccaaguacaagcuggacgccaaguccaagauccgggcgcugcuccgccuguaccaggagugcgagaagcugaagaagcucaugagcuccaacagcaccgaccugccccugaacaucgagugcuucaugaacgacaaggacgugagcggcaagaugaaccggucccaguucgaggagcucugcgccgagcugcugcagaagaucgaggugccgcucuacagccugcuggagcagacgcaccucaaggucgaggacguguccgccgucgagaucgugggcggggccacccgcauccccgccgugaaggagcggaucgcgaaguucuucggcaaggacaucagcaccacccugaacgccgacgaggccgucgcccgcgggugcgcccugcagugcgcgauccucucccccgccuucaaggugcgggaguucagcgugacggacgccguccccuucccgaucucccugaucuggaaccacgacagcgaggacaccgagggcgugcacgagguguucucccgcaaccacgccgcgcccuucagcaagguccugaccuuccuccggcgcgggcccuucgagcuggaggccuucuacuccgacccccagggcgugccguaccccgaggccaagaucggccgguucgugguccagaacgugagcgcccagaaggacggggagaagucccgcgugaaggucaaggugcgggugaacacccacggcaucuucacgaucagcaccgccuccauggucgagaaggugcccaccgaggagaacgagaugagcuccgaggcggacauggagugccugaaccagcggcccccggagaaccccgacaccgacaagaacgugcagcaggacaacagcgaggccgggacgcagccccagguccagaccgacgcccagcagaccucccagagcccgcccagccccgagcucaccuccgaggagaacaagauccccgacgccgacaaggccaacgagaagaagguggaccagcccccggaggcgaagaagcccaagaucaagguggucaacguggagcugcccaucgaggccaaccugguguggcagcucggcaaggaccugcugaacauguacaucgagacggaggggaagaugaucaugcaggacaagcucgagaaggagcgcaacgacgccaagaacgccgucgaggaguacguguacgaguuccgcgacaagcugugcggcccguacgagaaguucaucugcgagcaggaccaccagaacuuccugcgccugcucaccgagaccgaggacuggcuguacgaggagggcgaggaccaggccaagcaggcguacguggacaagcuggaggagcucaugaagaucgggacccccgucaaggugcgguuccaggaggccgaggagcgccccaagauguucgaggagcugggccagcggcugcagcacuacgccaagaucgccgcggacuuccgcaacaaggacgagaaguacaaccacaucgacgagagcgagaugaagaagguggagaaguccgucaacgaggugauggaguggaugaacaacgugaugaacgcccaggccaagaagucccucgaccaggaccccgucgugcgggcccaggagaucaagacgaagaucaaggagcugaacaacacgugcgagccgguggucacccagcccaagcccaagaucgagagccccaagcuggagcgcaccccgaacgggcccaacaucgacaagaaggaggaggaccucgaggacaagaacaacuucggcgccgagccgccccaccagaacggggagugcuaccccaacgagaagaacagcgugaacauggaccuggacuga

SEQ ID NO: 7636 - RNA, 2577 nt, Artificial Sequence
  derived and/or modified sequence opt2 from HSP110__Homo_sapiens__AAH37553
auguccgucgucggccucgacgucggcucccaguccugcuacaucgccgucgcccgcgccggcggcaucgagaccaucgccaacgaguucuccgaccgcugcacccccuccgucaucuccuucggcuccaagaaccgcaccaucggcgucgccgccaagaaccagcagaucacccacgccaacaacaccgucuccaacuucaagcgcuuccacggccgcgccuucaacgaccccuucauccagaaggagaaggagaaccucuccuacgaccucgucccccucaagaacggcggcgucggcaucaaggucauguacaugggcgaggagcaccucuucuccgucgagcagaucaccgccaugcuccucaccaagcucaaggagaccgccgagaacucccucaagaagcccgucaccgacugcgucaucuccguccccuccuucuucaccgacgccgagcgccgcuccguccucgacgccgcccagaucgucggccucaacugccuccgccucaugaacgacaugaccgccgucgcccucaacuacggcaucuacaagcaggaccuccccucccucgacgagaagccccgcaucgucgucuucgucgacaugggccacuccgccuuccaggucuccgccugcgccuucaacaagggcaagcucaagguccucggcaccgccuucgaccccuuccucggcggcaagaacuucgacgagaagcucgucgagcacuucugcgccgaguucaagaccaaguacaagcucgacgccaaguccaagauccgcgcccuccuccgccucuaccaggagugcgagaagcucaagaagcucauguccuccaacuccaccgaccucccccucaacaucgagugcuucaugaacgacaaggacgucuccggcaagaugaaccgcucccaguucgaggagcucugcgccgagcuccuccagaagaucgaggucccccucuacucccuccucgagcagacccaccucaaggucgaggacgucuccgccgucgagaucgucggcggcgccacccgcauccccgccgucaaggagcgcaucgccaaguucuucggcaaggacaucuccaccacccucaacgccgacgaggccgucgcccgcggcugcgcccuccagugcgccauccucucccccgccuucaagguccgcgaguucuccgucaccgacgccguccccuuccccaucucccucaucuggaaccacgacuccgaggacaccgagggcguccacgaggucuucucccgcaaccacgccgcccccuucuccaagguccucaccuuccuccgccgcggccccuucgagcucgaggccuucuacuccgacccccagggcguccccuaccccgaggccaagaucggccgcuucgucguccagaacgucuccgcccagaaggacggcgagaagucccgcgucaaggucaagguccgcgucaacacccacggcaucuucaccaucuccaccgccuccauggucgagaagguccccaccgaggagaacgagauguccuccgaggccgacauggagugccucaaccagcgcccccccgagaaccccgacaccgacaagaacguccagcaggacaacuccgaggccggcacccagccccagguccagaccgacgcccagcagaccucccaguccccccccucccccgagcucaccuccgaggagaacaagauccccgacgccgacaaggccaacgagaagaaggucgaccagccccccgaggccaagaagcccaagaucaaggucgucaacgucgagcuccccaucgaggccaaccucgucuggcagcucggcaaggaccuccucaacauguacaucgagaccgagggcaagaugaucaugcaggacaagcucgagaaggagcgcaacgacgccaagaacgccgucgaggaguacgucuacgaguuccgcgacaagcucugcggccccuacgagaaguucaucugcgagcaggaccaccagaacuuccuccgccuccucaccgagaccgaggacuggcucuacgaggagggcgaggaccaggccaagcaggccuacgucgacaagcucgaggagcucaugaagaucggcacccccgucaagguccgcuuccaggaggccgaggagcgccccaagauguucgaggagcucggccagcgccuccagcacuacgccaagaucgccgccgacuuccgcaacaaggacgagaaguacaaccacaucgacgaguccgagaugaagaaggucgagaaguccgucaacgaggucauggaguggaugaacaacgucaugaacgcccaggccaagaagucccucgaccaggaccccgucguccgcgcccaggagaucaagaccaagaucaaggagcucaacaacaccugcgagcccgucgucacccagcccaagcccaagaucgagucccccaagcucgagcgcacccccaacggccccaacaucgacaagaaggaggaggaccucgaggacaagaacaacuucggcgccgagcccccccaccagaacggcgagugcuaccccaacgagaagaacuccgucaacauggaccucgacuga

SEQ ID NO: 7637 - RNA, 2577 nt, Artificial Sequence
  derived and/or modified sequence opt3 from HSP110__Homo_sapiens__AAH37553
augagcguggucggccuggacguugggucccagucuugcuacaucgccguggcuagagcaggagguauugagaccauagccaacgaguucucagauagguguacacccaguguaaucagcuuuggcuccaagaaucggacuauugggguggcggcuaaaaaccaacagaucacgcacgccaauaacaccgucucuaauuucaagcgcuuucauggacgagcauucaacgacccuuuuauucagaaagagaaggaaaaucucucguaugaucuugugccacugaaaaacggcgguguugggaucaaggugauguacaugggagaggaacacuuguucucagucgagcagauaacagccauguuacugacuaagcuaaaagagaccgcugaaaauagccucaagaaaccggugacagacugcguaaucaguguucccuccuuuuucaccgaugcagagcguagaucugugcuggacgccgcucaaauugucggccuuaacugucugagguugaugaaugauaugacugccguggcgcucaacuauggcaucuacaagcaggaccugccuagccuggaugaaaaaccacggauuguggucuuuguugacauggggcauuccgcauuccaggugucagccugcgcuuuuaauaagggaaagcucaaaguauuagguacagccuucgaucccuuucugggcgggaagaacuucgacgagaaacuuguggagcacuucugugcagaauuuaagaccaaauauaaguuggaugcuaaaaguaagauccgcgcccugcuaagacucuaccaggagugcgaaaagcugaaaaagcugaugagcucuaauuccacggaccuuccuuugaacauagaguguuucaugaacgacaaagaugucucaggaaagaugaauaggagccaauuugaagaacucugcgcggagcuguuacagaaaauugaagugccacuguauagucuccuugagcagacucaucugaagguugaagacgugucugccgucgagaucgugggcggugcaacccggauucccgcuguaaaggaacgcaucgccaaauucuuugggaaggauaucuccacaacuuugaacgcugacgaggccguugcacgaggaugugcccuacagugcgcuauucugagcccugcguucaaagugagagaguuuucggucaccgaugcagugccauucccgauaucucucaucuggaaucacgacuccgaagauacagagggcguccacgaaguguuuucaaggaaccaugccgcucccuucaguaagguucugaccuuucuucggcguggcccuuucgagcuggaagccuuuuacagcgacccacaaggggugcccuacccugaggcaaaaauuggacgcuucguaguccagaauguguccgcccagaaggauggugagaagucuagaguuaaagugaaggucagggugaacacgcacggcaucuucacuauaagcacagcuucaaugguagaaaaagugccaaccgaggaaaaugagaugaguuccgaggccgacauggaauguuugaaccaacggcccccggagaauccugauacugacaagaacguucagcaggacaauagcgaagcagggacacagccccaaguccagaccgaugcgcagcagacgucucaaucaccaccuagucccgagcucaccagcgaagagaacaaaauuccagacgcugauaaggccaaugagaagaaaguggaccagcccccugaagcaaagaaaccaaagaucaaaguggucaacguugagcugccgaucgaagccaauuuaguguggcagcugggaaaggaucuacucaacauguauauugagacagaaggcaaaaugaucaugcaggacaagcuggagaaggagcgaaacgaugcuaaaaaugccguggaagaguacguauaugaauuucgcgacaaacuuugcggucccuacgagaaauucauuugcgaacaagaucaucagaacuuuuugagacugcucacugagaccgaggacuggcuguaugaagagggggaagaucaggcaaagcaggcuuacgucgacaaacuugaggagcugaugaagauaggcacaccugugaagguuagguuccaagaagccgaggaacggccaaaaauguuugaggaauugggacagcgccuccagcacuaugcgaagaucgccgcugauuucagaaauaaagacgagaaguacaaccacauugacgaguccgaaaugaaaaagguggagaagucugucaaugaagugauggaguggaugaacaauguuaugaacgcacaagccaaaaagucgcuggaucaggaccccgugguaagggcucaggaaaucaaaacuaagaucaaagaguuaaauaacaccugugagccugucgugacacagccaaagcccaagauugaaagcccgaaacuggagcguaccccuaauggcccaaacauagauaagaaagaagaggaccuagaagauaagaauaacuuuggggccgagcccccucaucaaaauggagagugcuaccccaacgaaaagaacuccgugaauauggaccucgauuga

SEQ ID NO: 7638 - RNA, 2577 nt, Artificial Sequence
  derived and/or modified sequence opt4 from HSP110__Homo_sapiens__AAH37553
augagcguggugggccuggacgugggcagccagagcugcuacaucgccguggccagagccggcggcaucgagaccaucgccaacgaguucagcgacagaugcacccccagcgugaucagcuucggcagcaagaacagaaccaucggcguggccgccaagaaccagcagaucacccacgccaacaacaccgugagcaacuucaagagauuccacggcagagccuucaacgaccccuucauccagaaggagaaggagaaccugagcuacgaccuggugccccugaagaacggcggcgugggcaucaaggugauguacaugggcgaggagcaccuguucagcguggagcagaucaccgccaugcugcugaccaagcugaaggagaccgccgagaacagccugaagaagcccgugaccgacugcgugaucagcgugcccagcuucuucaccgacgccgagagaagaagcgugcuggacgccgcccagaucgugggccugaacugccugagacugaugaacgacaugaccgccguggcccugaacuacggcaucuacaagcaggaccugcccagccuggacgagaagcccagaaucgugguguucguggacaugggccacagcgccuuccaggugagcgccugcgccuucaacaagggcaagcugaaggugcugggcaccgccuucgaccccuuccugggcggcaagaacuucgacgagaagcugguggagcacuucugcgccgaguucaagaccaaguacaagcuggacgccaagagcaagaucagagcccugcugagacuguaccaggagugcgagaagcugaagaagcugaugagcagcaacagcaccgaccugccccugaacaucgagugcuucaugaacgacaaggacgugagcggcaagaugaacagaagccaguucgaggagcugugcgccgagcugcugcagaagaucgaggugccccuguacagccugcuggagcagacccaccugaagguggaggacgugagcgccguggagaucgugggcggcgccaccagaauccccgccgugaaggagagaaucgccaaguucuucggcaaggacaucagcaccacccugaacgccgacgaggccguggccagaggcugcgcccugcagugcgccauccugagccccgccuucaaggugagagaguucagcgugaccgacgccgugcccuuccccaucagccugaucuggaaccacgacagcgaggacaccgagggcgugcacgagguguucagcagaaaccacgccgcccccuucagcaaggugcugaccuuccugagaagaggccccuucgagcuggaggccuucuacagcgacccccagggcgugcccuaccccgaggccaagaucggcagauucguggugcagaacgugagcgcccagaaggacggcgagaagagcagagugaaggugaaggugagagugaacacccacggcaucuucaccaucagcaccgccagcaugguggagaaggugcccaccgaggagaacgagaugagcagcgaggccgacauggagugccugaaccagagaccccccgagaaccccgacaccgacaagaacgugcagcaggacaacagcgaggccggcacccagccccaggugcagaccgacgcccagcagaccagccagagcccccccagccccgagcugaccagcgaggagaacaagauccccgacgccgacaaggccaacgagaagaagguggaccagccccccgaggccaagaagcccaagaucaagguggugaacguggagcugcccaucgaggccaaccugguguggcagcugggcaaggaccugcugaacauguacaucgagaccgagggcaagaugaucaugcaggacaagcuggagaaggagagaaacgacgccaagaacgccguggaggaguacguguacgaguucagagacaagcugugcggccccuacgagaaguucaucugcgagcaggaccaccagaacuuccugagacugcugaccgagaccgaggacuggcuguacgaggagggcgaggaccaggccaagcaggccuacguggacaagcuggaggagcugaugaagaucggcacccccgugaaggugagauuccaggaggccgaggagagacccaagauguucgaggagcugggccagagacugcagcacuacgccaagaucgccgccgacuucagaaacaaggacgagaaguacaaccacaucgacgagagcgagaugaagaagguggagaagagcgugaacgaggugauggaguggaugaacaacgugaugaacgcccaggccaagaagagccuggaccaggaccccguggugagagcccaggagaucaagaccaagaucaaggagcugaacaacaccugcgagcccguggugacccagcccaagcccaagaucgagagccccaagcuggagagaacccccaacggccccaacaucgacaagaaggaggaggaccuggaggacaagaacaacuucggcgccgagcccccccaccagaacggcgagugcuaccccaacgagaagaacagcgugaacauggaccuggacuga

SEQ ID NO: 7639 - RNA, 2577 nt, Artificial Sequence
  derived and/or modified sequence opt5 from HSP110__Homo_sapiens__AAH37553
augagcguggucggccuggacguugggucccagucuugcuacaucgccguggcuagagccggaggcauugagaccaucgcgaacgaauuuagcgaucgguguacacccuccgugauuucuuuugggagcaagaaucgcacgaucggagucgcugccaaaaaccaacagauuacccacgccaauaacacaguguccaauuucaagagauuucauggccgggcuuucaacgacccuuuuauccagaaagagaaggaaaaucucucuuaugaucugguuccgcuuaaaaacgggggagugggcaucaaggucauguacaugggcgaggaacaccuguucagcguggagcagauuaccgccaugcuccugacaaaacuuaaagagaccgcugaaaauucccugaagaaacccguuacagacugcgugaucagcgucccuucuuucuucaccgaugccgagcgcagauccgugcucgacgcggcccaaauuguggggcugaacugucugcggcucaugaaugauaugacggcugucgcccugaacuauggaaucuacaagcaggaccuucccagccuggaugaaaaaccucgcauuguuguguuuguggacaugggccauucugcuuuccaggucuccgccugcgcguuuaauaaggggaagcucaaagugcugggaaccgccuucgaucccuuucuuggcgggaagaacuucgacgagaaacugguugagcacuucugugcugaauuuaagacaaaauauaagcucgaugccaaaagcaagaucagagcucugcugcggcucuaccaggagugcgaaaagcugaaaaagcugaugucuuccaauagcaccgaccuuccucucaacauugaguguuucaugaacgacaaagauguguccggaaagaugaaucgcucucaauuugaggaacugugcgccgagcuucugcagaaaaucgaagucccgcucuauagccugcuggagcagacacaucucaagguggaagacguuuccgccguggagaucgucggcggcgcuacccggauucccgcggugaaggaaagaaucgccaaauucuuugggaaggauauuagcacgacacugaacgcugacgaggccgucgcccgcggaugugcccuucagugcgcuauccugucuccugcguucaaagugagagaguuuuccguuaccgaugcugugcccuucccuauuagccucaucuggaaucacgacucugaagauacagagggcguccacgaaguguuuagccggaaccaugccgcccccuucuccaagguucugaccuuucuucgcagagggccguucgagcuggaggcuuuuuacucugacccucaaggagugcccuacccugaagccaaaaucggccgguucgucgugcagaaugugagcgcucagaaggauggggagaaguccagaguuaaagucaaggugcgcgugaacacccacggaauuuucacaaucagcacggccucuauggucgaaaaagugcccaccgaggaaaaugagauguccagcgaggcggacauggaaugucucaaccaacggcccccugagaauccggauacagacaagaacguucagcaggacaauucugaagccggcacccagccccaagugcagacagaugcucagcagaccucccaaagcccucccuccccugagcugacgucugaagagaacaaaauucccgacgccgauaaggcuaaugagaagaaagucgaccagccgccugaagccaagaaacccaagaucaaagugguuaacguggagcugccuauugaagcgaaucucgucuggcagcugggcaaggaucuucugaacauguauaucgagacagaagggaaaaugaucaugcaggacaagcucgagaaggagagaaacgaugccaaaaaugcuguggaagaguacguuuaugaauuucgcgacaagcugugcggacccuacgagaaauucauuugcgaacaagaucaucagaacuuucugcggcuucucaccgagaccgaggacuggcuguaugaagagggcgaagaucaggccaagcaggcuuacguggacaaacuggaggagcucaugaagaucgggacaccugucaaggugagauuccaagaagccgaggaacgccccaaaauguuugaggaacugggacagcggcuucagcacuaugccaagauugcugcggauuucagaaauaaagacgagaaguacaaccacaucgacgagagcgaaaugaaaaagguggagaaguccgucaaugaaguuauggaguggaugaacaaugugaugaacgcccaagcuaaaaagucucuggaucaggacccggugguccgcgcccaggaaauuaaaaccaagaucaaagagcucaauaacacaugugagccugugguuacgcagcccaagcccaagauugaaagcccuaaacuggagcggaccccgaauggccccaacaucgauaagaaagaagaggaccuggaagauaagaauaacuuuggggccgagccuccccaucaaaauggcgagugcuacccuaacgaaaagaacuccgugaauauggaccuugauuga

SEQ ID NO: 7640 - RNA, 2577 nt, Artificial Sequence
  derived and/or modified sequence opt6 from HSP110__Homo_sapiens__AAH37553
augucaguugucggauuagauguaggaucucaaucauguuacauugcggucgccagagcuggcggaauagaaacaauagcgaacgaauucucagacagauguacaccaucaguuauaaguuuugguagcaaaaacagaacaauaggaguggcggcaaaaaaccaacaaauaacucaugcuaacaacacgguaucaaauuucaaaagauuucauggccgugcauucaaugacccguuuauacaaaaagaaaaagaaaauuuaaguuacgaucuaguaccauuaaaaaacggaggagucgggauaaaaguaauguauaugggggaagaacacuuauucuccguagagcaaauaacagcaauguuacuaacgaaauuaaaagaaacagcagaaaauucccuaaaaaaacccguuacagauuguguuauuuccgugccaagcuucuuuacagacgcagaacgacggaguguccuugacgcagcccaaauagucggacuaaauugccucagauuaaugaacgauaugacagcaguagcacuaaauuauggaauauauaaacaagaucuacccagccuagaugaaaagccucgaauaguaguauuuguagauaugggucauuccgcauuccaaguaucagcuugugcuuuuaacaaaggcaaacuuaaaguacuaggcacagcauucgacccuuuccugggaggcaaaaacuuugacgaaaaauuagucgaacauuucugcgcagaauucaaaacaaaauauaaauuagaugccaaaaguaaaauacgagcacucuuacgacuauaucaagaaugugaaaaauuaaaaaaacuaaugagcucuaacucuacugaccuaccacuaaauaucgaaugcuucaugaacgauaaagacguaucagguaaaaugaauagaucacaauucgaagaacuaugugcagaauuacuacaaaaaauagaaguaccacuuuacucacuauuagaacaaacucacuuaaaaguagaagaugucagcgcaguagaaaucguagguggcgccacuagaauaccagcagugaaagaaagaauagcaaaauuuuuuggaaaagauauaucaaccacacuaaacgccgaugaagcuguagcacguggcugcgccuuacaaugcgcaauucuaagccccgcauucaaagucagagaauuuuccguaacagaugcagugccauucccaauaagucuaauauggaaucacgauuccgaagacacugaaggaguccacgaaguauuuagcagaaaucacgcagcaccauucucaaaaguacuaacauuccuaaggagaggaccuuuugagcuagaagcauucuacucagacccucaaggaguaccuuacccagaagcaaagauaggaagauucguggugcaaaauguuagcgcacaaaaagauggagaaaaaagcagagucaaagucaaaguaagagucaacacacauggaauauuuacaaucucaacagcauccauggucgaaaaggucccaacagaagaaaacgaaaugaguagcgaagcagacauggaaugucuaaaucaaagaccgccagaaaauccggauacugauaaaaacgugcaacaggauaacagcgaagcaggaacccaaccacaaguucaaacagaugcacaacagacaucacaguccccuccaucacccgaacucaccucggaagaaaacaaaauaccagacgcugacaaagcaaacgaaaaaaaaguagaucaaccaccagaagcuaaaaaaccuaaaauaaaaguaguaaacgucgaacuacccauagaggcaaaccucguauggcaauuaggaaaagaucuccucaauauguauauugaaaccgaagggaagaugauuaugcaagauaaacuagagaaagaaagaaacgaugcuaaaaaugcaguugaggaauacguauacgaauuuagagacaaauuauguggaccauacgaaaaauucauaugcgaacaagaccaccaaaauuuccuaagauuacuuacagaaacagaagauuggcucuaugaagaaggcgaggaucaagccaaacaagcauacguagacaaacuagaagaauuaaugaagaucggcacaccagucaaaguaagauuucaggaagcugaagaaagaccaaaaauguucgaagaacucgggcaacgauuacaacacuacgcaaaaauagcagcagacuucagaaacaaggaugaaaaauacaaucacauagacgaaucagaaaugaaaaaaguagaaaaguccguaaaugaaguaauggaauggaugaauaacgugaugaacgcacaggcaaaaaaaagucucgaccaagacccaguaguucgugcacaagaaauaaaaacaaaaauaaaagaauugaacaacacaugugaaccaguaguaacacaaccuaaaccaaaaaucgaaucacccaaacuagaacgaacaccaaacggcccaaacauagauaaaaaagaggaagacuuagaagacaaaaauaauuuuggagcagaaccaccacaucagaacggagaaugcuauccaaaugaaaaaaauucaguaaauauggauuuagacuaa

SEQ ID NO: 7641 - protein, 205 aa, Artificial Sequence
  HSP27__Homo_sapiens__P04792
MTERRVPFSLLRGPSWDPFRDWYPHSRLFDQAFGLPRLPEEWSQWLGGSSWPGYVRPLPPAAIESPAVAAPAYSRALSRQLSSGVSEIRHTADRWRVSLDVNHFAPDELTVKTKDGVVEITGKHEERQDEHGYISRCFTRKYTLPPGVDPTQVSSSLSPEGTLTVEAPMPKLATQSNEITIPVTFESRAQLGGPEAAKSDETAAK

SEQ ID NO: 7642 - RNA, 618 nt, Artificial Sequence
  HSP27__Homo_sapiens__AAB51056
augaccgagcgccgcguccccuucucgcuccugcggggccccagcugggaccccuuccgcgacugguacccgcauagccgccucuucgaccaggccuucgggcugccccggcugccggaggaguggucgcagugguuaggcggcagcagcuggccaggcuacgugcgcccccugccccccgccgccaucgagagccccgcaguggccgcgcccgccuacagccgcgcgcucagccggcaacucagcagcggggucucggagauccggcacacugcggaccgcuggcgcgugucccuggaugucaaccacuucgccccggacgagcugacggucaagaccaaggauggcgugguggagaucaccggcaagcacgaggagcggcaggacgagcauggcuacaucucccggugcuucacgcggaaauacacgcugccccccgguguggaccccacccaaguuuccuccucccuguccccugagggcacacugaccguggaggcccccaugcccaagcuagccacgcaguccaacgagaucaccaucccagucaccuucgagucgcgggcccagcuugggggcccagaagcugcaaaauccgaugagacugccgccaaguaa

SEQ ID NO: 7643 - RNA, 618 nt, Artificial Sequence
  derived and/or modified sequence opt1 from HSP27__Homo_sapiens__AAB51056
augaccgagcgccgggugcccuucagccugcuccgcggcccguccugggaccccuuccgggacugguacccccacagccgccuguucgaccaggccuucgggcugccccggcucccggaggaguggucccaguggcugggcgggagcuccuggcccggcuacguccgcccccugcccccggccgcgaucgagagccccgccguggccgcccccgccuacucccgggcgcucagccgccagcuguccagcgggguguccgagauccggcacaccgccgaccgcuggcgggucagccuggacgugaaccacuucgcccccgacgagcucacggugaagaccaaggacggcgucguggagaucaccggcaagcacgaggagcgccaggacgagcacggguacaucucccggugcuucacccgcaaguacacgcugccgcccggcguggaccccacccaggucagcuccagccugucccccgaggggacccucaccguggaggccccgaugcccaagcuggcgacgcagagcaacgagaucaccauccccgugaccuucgagucccgggcccagcugggcgggcccgaggccgccaagagcgacgagaccgccgcgaaguga

SEQ ID NO: 7644 - RNA, 618 nt, Artificial Sequence
  derived and/or modified sequence opt2 from HSP27__Homo_sapiens__AAB51056
augaccgagcgccgcguccccuucucccuccuccgcggccccuccugggaccccuuccgcgacugguacccccacucccgccucuucgaccaggccuucggccucccccgccuccccgaggaguggucccaguggcucggcggcuccuccuggcccggcuacguccgcccccucccccccgccgccaucgagucccccgccgucgccgcccccgccuacucccgcgcccucucccgccagcucuccuccggcgucuccgagauccgccacaccgccgaccgcuggcgcgucucccucgacgucaaccacuucgcccccgacgagcucaccgucaagaccaaggacggcgucgucgagaucaccggcaagcacgaggagcgccaggacgagcacggcuacaucucccgcugcuucacccgcaaguacacccucccccccggcgucgaccccacccaggucuccuccucccucucccccgagggcacccucaccgucgaggcccccaugcccaagcucgccacccaguccaacgagaucaccauccccgucaccuucgagucccgcgcccagcucggcggccccgaggccgccaaguccgacgagaccgccgccaaguga

SEQ ID NO: 7645 - RNA, 618 nt, Artificial Sequence
  derived and/or modified sequence opt3 from HSP27__Homo_sapiens__AAB51056
augaccgagagaagggugcccuucagccugcuccggggcccuuccugggacccauuucgcgauugguacccgcacucucgacuuuucgaccaggccuuugggcugccccguuugccugaagaguggucacaaugguuaggagguaguagcuggccaggcuaugucagaccccugccuccagcugcaaucgaaucccccgccguugcggcuccugccuacucuagggcacuaucgcggcagcucucaagcggggugagugagauucgccauacagccgauagauggaggguaucccuggacgugaaccacuucgcuccagaugaacuuacugucaagacgaaagacggagugguugagauaaccggcaagcaugaggaacggcaggaugagcacgguuauaucucucgcugcuuuacacgaaaauacacucugccgcccgggguggacccuacccaggucagcuccucauugaguccagaaggaacacucaccguggaggcacccaugccuaagcuggccacucaaagcaaugagauuacaaucccaguaaccuucgaaucuagagcucagcugggcggccccgaggccgcgaaauccgaugaaacggcagccaaguga

SEQ ID NO: 7646 - RNA, 618 nt, Artificial Sequence
  derived and/or modified sequence opt4 from HSP27__Homo_sapiens__AAB51056
augaccgagagaagagugcccuucagccugcugagaggccccagcugggaccccuucagagacugguacccccacagcagacuguucgaccaggccuucggccugcccagacugcccgaggaguggagccaguggcugggcggcagcagcuggcccggcuacgugagaccccugccccccgccgccaucgagagccccgccguggccgcccccgccuacagcagagcccugagcagacagcugagcagcggcgugagcgagaucagacacaccgccgacagauggagagugagccuggacgugaaccacuucgcccccgacgagcugaccgugaagaccaaggacggcgugguggagaucaccggcaagcacgaggagagacaggacgagcacggcuacaucagcagaugcuucaccagaaaguacacccugccccccggcguggaccccacccaggugagcagcagccugagccccgagggcacccugaccguggaggcccccaugcccaagcuggccacccagagcaacgagaucaccauccccgugaccuucgagagcagagcccagcugggcggccccgaggccgccaagagcgacgagaccgccgccaaguga

SEQ ID NO: 7647 - RNA, 618 nt, Artificial Sequence
  derived and/or modified sequence opt5 from HSP27__Homo_sapiens__AAB51056
augaccgagagacgggugcccuucagccugcuccgcggcccuuccugggacccguuuagagauugguacccccacucucggcuguucgaccaggccuuugggcuuccucgccugcccgaagaguggagccaauggcucggaggcuccucuuggccuggguaugucagaccccugccuccggcugccaucgaaagccccgcgguugcugccccugccuacucccgggcucuuucucgccagcugagcuccggagugagcgagauuagacauacagccgaucgguggcgcgugucucucgacgucaaccacuucgcucccgaugaacugacggugaagaccaaagacggcguuguggagaucacagggaagcaugaggaaagacaggaugagcacggauauauuucccggugcuuuacccgcaaauacacacugccucccggcgucgacccgacccaggugucuagcucccucagcccugaaggcacacugaccguugaggcccccaugccuaagcuggcgacgcaaucuaaugagaucaccauucccgugacauucgaauccagagcccagcuugggggacccgaggcugccaaaagcgaugaaaccgcugccaaguga

SEQ ID NO: 7648 - RNA, 618 nt, Artificial Sequence
  derived and/or modified sequence opt6 from HSP27__Homo_sapiens__AAB51056
augacagaaagaagaguaccuuucucauuauuaagaggaccaucaugggauccauuucgagauugguauccacauagcagacucuuugaucaagcauuuggauuaccuagacuaccugaagaauggucacaauggcuaggaggaucaucauggccaggauacguaagaccauuaccaccagcagcaauagaaucaccagcaguagcagcaccagcauauucacgagcauuaaguagacaauuaagcucaggcguuucagaaauaagacacacagcugacagauggagaguaagcuuagacguaaaccauuucgcaccagaugaauuaacaguaaaaacaaaagacggaguaguagaaauaacaggaaaacacgaagaaagacaagaugaacauggauauauaucaagauguuucacaagaaaauacacacuaccaccaggaguagauccaacucaaguaagcucaagcuuaucaccagaaggaaccuuaacaguagaagcaccaaugccaaaacuagcaacccaaucaaaugaaauaacaauacccguaacauuugaaaguagagcacaauuaggaggaccagaagcagcaaaaucagacgaaacagcagcaaaauaa

SEQ ID NO: 7649 - protein, 418 aa, Artificial Sequence
  HSP47_(serpin_H1)__Homo_sapiens__P50454
MRSLLLLSAFCLLEAALAAEVKKPAAAAAPGTAEKLSPKAATLAERSAGLAFSLYQAMAKDQAVENILVSPVVVASSLGLVSLGGKATTASQAKAVLSAEQLRDEEVHAGLGELLRSLSNSTARNVTWKLGSRLYGPSSVSFADDFVRSSKQHYNCEHSKINFRDKRSALQSINEWAAQTTDGKLPEVTKDVERTDGALLVNAMFFKPHWDEKFHHKMVDNRGFMVTRSYTVGVMMMHRTGLYNYYDDEKEKLQIVEMPLAHKLSSLIILMPHHVEPLERLEKLLTKEQLKIWMGKMQKKAVAISLPKGVVEVTHDLQKHLAGLGLTEAIDKNKADLSRMSGKKDLYLASVFHATAFELDTDGNPFDQDIYGREELRSPKLFYADHPFIFLVRDTQSGSLLFIGRLVRPKGDKMRDEL

SEQ ID NO: 7650 - RNA, 1257 nt, Artificial Sequence
  HSP47_(serpin_H1)__Homo_sapiens__AAH14623
augcgcucccuccugcuucucagcgccuucugccuccuggaggcggcccuggccgccgaggugaagaaaccugcagccgcagcagcuccuggcacugcggagaaguugagccccaaggcggccacgcuugccgagcgcagcgccggccuggccuucagcuuguaccaggccauggccaaggaccaggcaguggagaacauccuggugucacccguggugguggccucgucgcuggggcucgugucgcugggcggcaaggcgaccacggcgucgcaggccaaggcagugcugagcgccgagcagcugcgcgacgaggaggugcacgccggccugggcgagcugcugcgcucacucagcaacuccacggcgcgcaacgugaccuggaagcugggcagccgacuguacggacccagcucagugagcuucgcugaugacuucgugcgcagcagcaagcagcacuacaacugcgagcacuccaagaucaacuuccgcgacaagcgcagcgcgcugcaguccaucaacgagugggccgcgcagaccaccgacggcaagcugcccgaggucaccaaggacguggagcgcacggacggcgcccuguuagucaacgccauguucuucaagccacacugggaugagaaauuccaccacaagaugguggacaaccguggcuucauggugacucgguccuauaccgugggugucaugaugaugcaccggacaggccucuacaacuacuacgacgacgagaaggaaaagcugcaaaucguggagaugccccuggcccacaagcucuccagccucaucauccucaugccccaucacguggagccucucgagcgccuugaaaagcugcuaaccaaagagcagcugaagaucuggauggggaagaugcagaagaaggcuguugccaucuccuugcccaagggugugguggaggugacccaugaccugcagaaacaccuggcugggcugggccugacugaggccauugacaagaacaaggccgacuugucacgcaugucaggcaagaaggaccuguaccuggccagcguguuccacgccaccgccuuugaguuggacacagauggcaaccccuuugaccaggacaucuacgggcgcgaggagcugcgcagccccaagcuguucuacgccgaccaccccuucaucuuccuagugcgggacacccaaagcggcucccugcuauucauugggcgccugguccggccuaagggugacaagaugcgagacgaguuauag

SEQ ID NO: 7651 - RNA, 1257 nt, Artificial Sequence
  derived and/or modified sequence opt1 from HSP47_(serpin_H1)__Homo_sapiens__AAH14623
augcgcagccugcuccugcuguccgccuucugccuccuggaggccgcgcuggccgccgaggugaagaagcccgccgccgcggccgccccgggcaccgccgagaagcucagccccaaggcggccacccuggccgagcgguccgccgggcuggccuucagccucuaccaggcgauggccaaggaccaggccgucgagaacauccuggugucccccguggucguggccagcucccugggccucgugagccucgggggcaaggccacgaccgcgucccaggccaaggccguccugagcgccgagcagcugcgcgacgaggaggugcacgccgggcugggcgagcugcuccggucccugagcaacuccaccgcgcgcaacgugaccuggaagcugggcagccggcucuacgggcccuccagcgucuccuucgccgacgacuucgugcgcagcuccaagcagcacuacaacugcgagcacagcaagaucaacuuccgggacaagcgcagcgcccugcaguccaucaacgagugggccgcccagacgaccgacggcaagcugccggaggugaccaaggacgucgagcggaccgacggggcgcuccuggugaacgccauguucuucaagccccacugggacgagaaguuccaccacaagaugguggacaaccgcggcuucauggucacgcggagcuacaccgugggggugaugaugaugcaccgcaccggccuguacaacuacuacgacgacgagaaggagaagcuccagaucgucgagaugccccuggcccacaagcuguccagccucaucauccugaugccccaccacguggagccgcuggagcggcucgagaagcugcugaccaaggagcagcucaagaucuggaugggcaagaugcagaagaaggccguggcgaucucccugcccaagggggucguggaggugacgcacgaccugcagaagcaccucgccggccuggggcugaccgaggccaucgacaagaacaaggccgaccucagccgcauguccggcaagaaggaccuguaccuggccagcgucuuccacgcgaccgccuucgagcucgacaccgacggcaaccccuucgaccaggacaucuacgggcgggaggagcugcgcucccccaagcuguucuacgccgaccacccguucaucuuccucgugcgggacacgcagagcggcucccugcuguucaucgggcgccugguccggcccaagggcgacaagaugcgcgacgagcucuga

SEQ ID NO: 7652 - RNA, 1257 nt, Artificial Sequence
  derived and/or modified sequence opt2 from HSP47_(serpin_H1)__Homo_sapiens__AAH14623
augcgcucccuccuccuccucuccgccuucugccuccucgaggccgcccucgccgccgaggucaagaagcccgccgccgccgccgcccccggcaccgccgagaagcucucccccaaggccgccacccucgccgagcgcuccgccggccucgccuucucccucuaccaggccauggccaaggaccaggccgucgagaacauccucgucucccccgucgucgucgccuccucccucggccucgucucccucggcggcaaggccaccaccgccucccaggccaaggccguccucuccgccgagcagcuccgcgacgaggagguccacgccggccucggcgagcuccuccgcucccucuccaacuccaccgcccgcaacgucaccuggaagcucggcucccgccucuacggccccuccuccgucuccuucgccgacgacuucguccgcuccuccaagcagcacuacaacugcgagcacuccaagaucaacuuccgcgacaagcgcuccgcccuccaguccaucaacgagugggccgcccagaccaccgacggcaagcuccccgaggucaccaaggacgucgagcgcaccgacggcgcccuccucgucaacgccauguucuucaagccccacugggacgagaaguuccaccacaagauggucgacaaccgcggcuucauggucacccgcuccuacaccgucggcgucaugaugaugcaccgcaccggccucuacaacuacuacgacgacgagaaggagaagcuccagaucgucgagaugccccucgcccacaagcucuccucccucaucauccucaugccccaccacgucgagccccucgagcgccucgagaagcuccucaccaaggagcagcucaagaucuggaugggcaagaugcagaagaaggccgucgccaucucccuccccaagggcgucgucgaggucacccacgaccuccagaagcaccucgccggccucggccucaccgaggccaucgacaagaacaaggccgaccucucccgcauguccggcaagaaggaccucuaccucgccuccgucuuccacgccaccgccuucgagcucgacaccgacggcaaccccuucgaccaggacaucuacggccgcgaggagcuccgcucccccaagcucuucuacgccgaccaccccuucaucuuccucguccgcgacacccaguccggcucccuccucuucaucggccgccucguccgccccaagggcgacaagaugcgcgacgagcucuga

SEQ ID NO: 7653 - RNA, 1257 nt, Artificial Sequence
  derived and/or modified sequence opt3 from HSP47_(serpin_H1)__Homo_sapiens__AAH14623
augagaagccugcuccuucuguccgccuucugcuuguuagaggcugcacuggccgcggaagugaagaaacccgcugccgcagccgcuccuggcaccgcagagaagcuaucuccaaaagccgcuacacucgccgaaaggucagcggggcuggcauuuagucuuuaccaggccauggcuaaggaccaagccgucgagaacauccugguuagcccggugguaguggcauccucuuugggacucgucucgcuggguggcaaagcuacuacggccucacaggcgaaggccgugcugagcgcagaacagcuccgggaugaggagguucacgcuggguuaggagaacugcuucgcaguuuguccaauucuaccgcccgaaacgugacauggaagcugggcagccgucuauauggucccuccucagucaguuucgcugacgauuuugugagaagcucuaaacagcauuacaauugugagcacuccaagauuaacuucagggacaaacggucagcccuccaaagcauaaaugaaugggcagcccagacuaccgaugggaagcugccugagguaacaaaagacguugagcgcaccgauggagcgcuucuggugaacgcuauguuuuucaagccacauugggacgaaaaguuucaccauaaaauggucgauaauagaggcuucauggugacuaggaguuauacagugggcgucaugaugaugcaccggaccggguuguacaacuauuacgacgaugagaaggaaaaacuccagaucguugagaugccccuggcacacaaguuaucuucccugauuauccucaugccucaucacguggaaccacuugagcgccuggagaaauugcuaacgaaggaacagcugaaaauuuggaugggaaagaugcaaaagaaagccguagcuaucagccuccccaaggguguggucgaggugacucaugaccugcagaaacaccuugccggccugggguugaccgaagcaauagauaagaauaaagccgaccucucgcgaaugucuggaaagaaggaccuguauuuagcuuccguuuuucacgccacagcauucgagcuggauacugacggcaacccuuuugaucaggacaucuacgguagagaggaacuaaggucaccaaaacucuucuacgcggaucauccguuuauuuuccuggugcgggacacccagagugggagccuuuuguucaucggacgucugguccgccccaagggcgauaaaaugagagacgagcucuga

SEQ ID NO: 7654 - RNA, 1257 nt, Artificial Sequence
  derived and/or modified sequence opt4 from HSP47_(serpin_H1)__Homo_sapiens__AAH14623
augagaagccugcugcugcugagcgccuucugccugcuggaggccgcccuggccgccgaggugaagaagcccgccgccgccgccgcccccggcaccgccgagaagcugagccccaaggccgccacccuggccgagagaagcgccggccuggccuucagccuguaccaggccauggccaaggaccaggccguggagaacauccuggugagccccguggugguggccagcagccugggccuggugagccugggcggcaaggccaccaccgccagccaggccaaggccgugcugagcgccgagcagcugagagacgaggaggugcacgccggccugggcgagcugcugagaagccugagcaacagcaccgccagaaacgugaccuggaagcugggcagcagacuguacggccccagcagcgugagcuucgccgacgacuucgugagaagcagcaagcagcacuacaacugcgagcacagcaagaucaacuucagagacaagagaagcgcccugcagagcaucaacgagugggccgcccagaccaccgacggcaagcugcccgaggugaccaaggacguggagagaaccgacggcgcccugcuggugaacgccauguucuucaagccccacugggacgagaaguuccaccacaagaugguggacaacagaggcuucauggugaccagaagcuacaccgugggcgugaugaugaugcacagaaccggccuguacaacuacuacgacgacgagaaggagaagcugcagaucguggagaugccccuggcccacaagcugagcagccugaucauccugaugccccaccacguggagccccuggagagacuggagaagcugcugaccaaggagcagcugaagaucuggaugggcaagaugcagaagaaggccguggccaucagccugcccaagggcgugguggaggugacccacgaccugcagaagcaccuggccggccugggccugaccgaggccaucgacaagaacaaggccgaccugagcagaaugagcggcaagaaggaccuguaccuggccagcguguuccacgccaccgccuucgagcuggacaccgacggcaaccccuucgaccaggacaucuacggcagagaggagcugagaagccccaagcuguucuacgccgaccaccccuucaucuuccuggugagagacacccagagcggcagccugcuguucaucggcagacuggugagacccaagggcgacaagaugagagacgagcuguga

SEQ ID NO: 7655 - RNA, 1257 nt, Artificial Sequence
  derived and/or modified sequence opt5 from HSP47_(serpin_H1)__Homo_sapiens__AAH14623
augagaagccugcuccugcuuuccgccuucugccugcucgaggcugcccuggcggcugaagugaagaaacccgccgccgcugccgcuccuggcaccgccgagaaacuuucuccgaaggcggccacacuggcugaacggagcgccgggcucgcuuuuucccuguaccaggccauggcgaaggaccaagccgucgagaacauccugguuucucccgugguggucgcuagcucccucggacuggugucucuuggcgggaaagccacgaccgcuagccaggccaaggccguucuguccgcugaacagcuccgcgaugaggaggugcacgcgggacugggcgaacuucugagaagccucucuaauuccacagcccggaacgucaccuggaagcuggggagccgccuguauggaccuucuuccgugagcuucgcugacgauuuuguuagaucuuccaaacagcauuacaauugugagcacagcaagauuaacuuccgggacaaacgcuccgcccuccaaucuaucaaugaaugggccgcucagacaaccgauggcaagcugcccgaggugacaaaagacgucgagagaaccgauggcgcccuucuggugaacgcgauguuuuucaagccucauugggacgaaaaguuucaccauaaaaugguggauaaucggggguucauggucacgcgcagcuauaccguuggagugaugaugaugcacagaacaggccucuacaacuauuacgacgaugagaaggaaaaacugcagauuguggagaugccccuugcucacaagcuguccagccucaucauucugaugccucaucacgucgaaccgcuggagcggcucgagaaacugcuuaccaaggaacagcugaaaaucuggauggggaagaugcaaaagaaagccguggccaucucucuccccaagggaguuguggaggucacacaugaccugcagaaacaccuugcuggccuggggcucaccgaagccauugauaagaauaaagcugaccugucccgcaugagcggaaagaaggaccuguaucucgccucuguguuucacgcgacggccuucgagcuggauacagacggcaacccuuuugaucaggacaucuacggcagagaggaacuucggagccccaaacuguucuacgcugaucauccuuuuauuuuccucguucgcgacacccaguccgggucucugcuguucaucggaagacuugugcggcccaagggcgauaaaaugagagacgagcucuga

SEQ ID NO: 7656 - RNA, 1257 nt, Artificial Sequence
  derived and/or modified sequence opt6 from HSP47_(serpin_H1)__Homo_sapiens__AAH14623
augcgaagccuacuauuauuaagcgccuucugucuacuagaagcagcauuagccgcagaaguaaaaaaaccagcagcagcagccgcaccaggaaccgcggaaaaacuaucaccaaaagcagcaacacuagcagaacgcucagcuggacuagcauucucauuauaucaagcaauggcaaaagaucaagcaguagaaaacauucuaguaucaccaguuguaguagcuucaucccuaggacuaguaagccuaggcggaaaagcaacuacagcaucacaagcaaaagcaguccuaagcgcagaacaacuaagagacgaagaaguacacgcaggcuuaggagaauuauugcgaucauuaucgaacucaacagcaagaaauguaacauggaaauugggaagucggcuauauggaccaaguucaguaucauucgcagacgauuucguaagaucauccaaacaacauuacaauugcgaacacucuaaaauaaacuuuagagauaaaagaagugcacuacaauccauaaaugaaugggcagcacaaaccacagauggaaaacuaccagagguaacaaaagauguagaaagaacagacggagccuuauuagugaaugcaauguuuuucaaaccccauugggaugaaaaauuucaccauaaaaugguggauaauagaggauucaugguaaccagaucauacacgguaggaguaaugaugaugcauagaacaggacuauauaacuauuaugaugacgaaaaagaaaaauuacaaauaguagaaaugccacuagcccauaaacuuucaagucuaauaauacuuaugccacaucauguugaaccacuagaaagacuagaaaaacuccugacaaaagaacaauuaaaaauauggaugggaaaaaugcaaaaaaaagcuguugcaauaucacuaccaaaaggaguuguagaaguaacccaugacuuacaaaaacacuuagcaggacuaggacuaacggaagcaauagauaaaaauaaagcggacuuauccagaaugucagguaaaaaagaucuauaucuugcgaguguauuccacgcaacagcauucgaacuagauacugacggaaauccauuugaucaagauaucuauggaagagaagaacucaggaguccaaaacuauucuaugccgaucacccauuuauauucuuagucagagauacgcaaucggguucauuauuauuuauaggaagacuaguaagaccaaaaggagauaaaaugagagacgaacuauag

SEQ ID NO: 7657 - protein, 573 aa, Artificial Sequence
  HSP60__Homo_sapiens__A0A024R3X4
MLRLPTVFRQMRPVSRVLAPHLTRAYAKDVKFGADARALMLQGVDLLADAVAVTMGPKGRTVIIEQSWGSPKVTKDGVTVAKSIDLKDKYKNIGAKLVQDVANNTNEEAGDGTTTATVLARSIAKEGFEKISKGANPVEIRRGVMLAVDAVIAELKKQSKPVTTPEEIAQVATISANGDKEIGNIISDAMKKVGRKGVITVKDGKTLNDELEIIEGMKFDRGYISPYFINTSKGQKCEFQDAYVLLSEKKISSIQSIVPALEIANAHRKPLVIIAEDVDGEALSTLVLNRLKVGLQVVAVKAPGFGDNRKNQLKDMAIATGGAVFGEEGLTLNLEDVQPHDLGKVGEVIVTKDDAMLLKGKGDKAQIEKRIQEIIEQLDVTTSEYEKEKLNERLAKLSDGVAVLKVGGTSDVEVNEKKDRVTDALNATRAAVEEGIVLGGGCALLRCIPALDSLTPANEDQKIGIEIIKRTLKIPAMTIAKNAGVEGSLIVEKIMQSSSEVGYDAMAGDFVNMVEKGIIDPTKVVRTALLDAAGVASLLTTAEVVVTEIPKEEKDPGMGAMGGMGGGMGGGMF

SEQ ID NO: 7658 - RNA, 1722 nt, Artificial Sequence
  HSP60__Homo_sapiens__EAW70148
augcuucgguuacccacagucuuucgccagaugagaccgguguccaggguacuggcuccucaucucacucgggcuuaugccaaagauguaaaauuuggugcagaugcccgagccuuaaugcuucaagguguagaccuuuuagccgaugcuguggccguuacaauggggccaaagggaagaacagugauuauugagcagaguuggggaagucccaaaguaacaaaagauggugugacuguugcaaagucaauugacuuaaaagauaaauacaaaaacauuggagcuaaacuuguucaagauguugccaauaacacaaaugaagaagcuggggauggcacuaccacugcuacuguacuggcacgcucuauagccaaggaaggcuucgagaagauuagcaaaggugcuaauccaguggaaaucaggagaggugugauguuagcuguugaugcuguaauugcugaacuuaaaaagcagucuaaaccugugaccaccccugaagaaauugcacagguugcuacgauuucugcaaacggagacaaagaaauuggcaauaucaucucugaugcaaugaaaaaaguuggaagaaagggugucaucacaguaaaggauggaaaaacacugaaugaugaauuagaaauuauugaaggcaugaaguuugaucgaggcuauauuucuccauacuuuauuaauacaucaaaaggucagaaaugugaauuccaggaugccuauguucuguugagugaaaagaaaauuucuaguauccaguccauuguaccugcucuugaaauugccaaugcucaccguaagccuuuggucauaaucgcugaagauguugauggagaagcucuaaguacacucgucuugaauaggcuaaagguuggucuucagguuguggcagucaaggcuccaggguuuggugacaauagaaagaaccagcuuaaagauauggcuauugcuacugguggugcaguguuuggagaagagggauugacccugaaucuugaagacguucagccucaugacuuaggaaaaguuggagaggucauugugaccaaagacgaugccaugcucuuaaaaggaaaaggugacaaggcucaaauugaaaaacguauucaagaaaucauugagcaguuagaugucacaacuagugaauaugaaaaggaaaaacugaaugaacggcuugcaaaacuuucagauggaguggcugugcugaagguuggugggacaagugauguugaagugaaugaaaagaaagacagaguuacagaugcccuuaaugcuacaagagcugcuguugaagaaggcauuguuuugggaggggguugugcccuccuucgaugcauuccagccuuggacucauugacuccagcuaaugaagaucaaaaaauugguauagaaauuauuaaaagaacacucaaaauuccagcaaugaccauugcuaagaaugcagguguugaaggaucuuugauaguugagaaaauuaugcaaaguuccucagaaguugguuaugaugcuauggcuggagauuuugugaauaugguggaaaaaggaaucauugacccaacaaagguugugagaacugcuuuauuggaugcugcugguguggccucucuguuaacuacagcagaaguuguagucacagaaauuccuaaagaagagaaggacccuggaaugggugcaauggguggaaugggaggugguaugggagguggcauguucuaa

SEQ ID NO: 7659 - RNA, 1722 nt, Artificial Sequence
  derived and/or modified sequence opt1 from HSP60__Homo_sapiens__EAW70148
augcugcgccuccccaccguguuccggcagaugcgcccggucagccgggugcuggcgccccaccugacccgcgccuacgccaaggacgugaaguucggggccgacgcccgggcccucaugcugcagggggucgaccugcucgccgacgcgguggccgugacgaugggccccaaggggcgcaccgucaucaucgagcaguccuggggcagccccaaggugaccaaggacggggugaccgucgccaaguccaucgaccugaaggacaaguacaagaacaucggcgccaagcuggugcaggacguggcgaacaacacgaacgaggaggccggcgacgggaccaccaccgccacgguccucgcccggagcaucgccaaggagggcuucgagaagaucuccaagggggcgaacccgguggagauccgccggggcgugaugcuggccgucgacgccgugaucgccgagcugaagaagcagagcaagcccgugaccacccccgaggagaucgcccaggucgcgaccaucuccgccaacggggacaaggagaucggcaacaucaucagcgacgccaugaagaaggugggccgcaagggggugaucacggucaaggacggcaagacccucaacgacgagcuggagaucaucgaggggaugaaguucgaccggggcuacaucucccccuacuucaucaacaccagcaagggccagaagugcgaguuccaggacgccuacgugcugcucuccgagaagaagaucagcuccauccagagcaucgugccggcccuggagaucgcgaacgcccaccgcaagccccuggucaucaucgccgaggacguggacggggaggcccucuccacccugguccugaaccggcucaaggugggccuccagguggucgccgugaaggcgcccggguucggcgacaaccgcaagaaccagcugaaggacauggccaucgccaccgggggcgccguguucggcgaggaggggcugacgcugaaccuggaggacguccagccccacgaccucggcaaggugggggaggugaucgucaccaaggacgacgcgaugcugcugaagggcaagggggacaaggcccagaucgagaagcggauccaggagaucaucgagcagcucgacgugaccacgagcgaguacgagaaggagaagcugaacgagcgccuggccaagcucuccgacggcguggccguccugaaggugggcgggaccagcgacguggaggucaacgagaagaaggaccgggugaccgacgcccugaacgcgacccgcgccgccguggaggagggcaucguccucgggggcgggugcgcccugcugcggugcaucccggcccucgacucccugacgcccgcgaacgaggaccagaagaucggcaucgagaucaucaagcgcacccugaagauccccgccaugaccaucgccaagaacgccggcguggaggggagccucaucguggagaagaucaugcagagcuccagcgaggucggcuacgacgccauggcgggggacuucgugaacaugguggagaagggcaucaucgaccccaccaaggucgugcggacggcccugcuggacgccgccggcguggcgucccuccugaccaccgccgaggucguggugaccgagaucccgaaggaggagaaggaccccgggaugggcgccaugggcgggaugggcgggggcaugggcggcgggauguucuga

SEQ ID NO: 7660 - RNA, 1722 nt, Artificial Sequence
  derived and/or modified sequence opt2 from HSP60__Homo_sapiens__EAW70148
augcuccgccuccccaccgucuuccgccagaugcgccccgucucccgcguccucgccccccaccucacccgcgccuacgccaaggacgucaaguucggcgccgacgcccgcgcccucaugcuccagggcgucgaccuccucgccgacgccgucgccgucaccaugggccccaagggccgcaccgucaucaucgagcaguccuggggcucccccaaggucaccaaggacggcgucaccgucgccaaguccaucgaccucaaggacaaguacaagaacaucggcgccaagcucguccaggacgucgccaacaacaccaacgaggaggccggcgacggcaccaccaccgccaccguccucgcccgcuccaucgccaaggagggcuucgagaagaucuccaagggcgccaaccccgucgagauccgccgcggcgucaugcucgccgucgacgccgucaucgccgagcucaagaagcaguccaagcccgucaccacccccgaggagaucgcccaggucgccaccaucuccgccaacggcgacaaggagaucggcaacaucaucuccgacgccaugaagaaggucggccgcaagggcgucaucaccgucaaggacggcaagacccucaacgacgagcucgagaucaucgagggcaugaaguucgaccgcggcuacaucucccccuacuucaucaacaccuccaagggccagaagugcgaguuccaggacgccuacguccuccucuccgagaagaagaucuccuccauccaguccaucguccccgcccucgagaucgccaacgcccaccgcaagccccucgucaucaucgccgaggacgucgacggcgaggcccucuccacccucguccucaaccgccucaaggucggccuccaggucgucgccgucaaggcccccggcuucggcgacaaccgcaagaaccagcucaaggacauggccaucgccaccggcggcgccgucuucggcgaggagggccucacccucaaccucgaggacguccagccccacgaccucggcaaggucggcgaggucaucgucaccaaggacgacgccaugcuccucaagggcaagggcgacaaggcccagaucgagaagcgcauccaggagaucaucgagcagcucgacgucaccaccuccgaguacgagaaggagaagcucaacgagcgccucgccaagcucuccgacggcgucgccguccucaaggucggcggcaccuccgacgucgaggucaacgagaagaaggaccgcgucaccgacgcccucaacgccacccgcgccgccgucgaggagggcaucguccucggcggcggcugcgcccuccuccgcugcauccccgcccucgacucccucacccccgccaacgaggaccagaagaucggcaucgagaucaucaagcgcacccucaagauccccgccaugaccaucgccaagaacgccggcgucgagggcucccucaucgucgagaagaucaugcaguccuccuccgaggucggcuacgacgccauggccggcgacuucgucaacauggucgagaagggcaucaucgaccccaccaaggucguccgcaccgcccuccucgacgccgccggcgucgccucccuccucaccaccgccgaggucgucgucaccgagauccccaaggaggagaaggaccccggcaugggcgccaugggcggcaugggcggcggcaugggcggcggcauguucuga

SEQ ID NO: 7661 - RNA, 1722 nt, Artificial Sequence
  derived and/or modified sequence opt3 from HSP60__Homo_sapiens__EAW70148
augcugagacuccccaccguguucaggcagaugcggccugucagccgcguucuugccccacaccugacacgagcuuacgcaaaggacgugaaauuuggcgccgaugcgcgugcuuugauguuacaagggguagaccugcuagccgaugcaguggccgucacuaugggaccgaaggguagaacggugaucauugagcaguccuggggcucucccaaaguuaccaaggacggggugacagucgcuaaaucaauagaucucaaggacaaguauaaaaacaucggagcaaagcuggugcaggauguagccaauaacacuaaugaagaggcuggcgacgguaccacaaccgccacuguucuugcgaggaguauugcaaaagaaggguucgagaagaucagcaaaggagccaacccuguggaaauucggcgcggcgucaugcuggcuguggaugccgugaucgcagaguugaagaagcaguccaaaccagucacaacccccgaggaaauagcucaaguugccacgaucucugcgaauggcgacaaggagauugggaacaucauuucggaugccaugaaaaaggugggaagaaaagguguaaucacugugaaggacggcaaaacccucaaugaugaacuggagauaauugaggggaugaaguuugacaggggauacaucucaccuuauuucauuaacacaagcaagggccagaaaugcgaauuucaggacgcauacguccugcucagugagaagaaaaucuccucuauccagagcauugugccagcuuuagaaauagccaaugcucaucggaagccccugguuaucauugccgaggauguggacggugaagcacuuuccacuuugguccugaaccgccuaaaaguggggcuccaaguaguugccgugaaggcuccuggauucggcgauaaucgaaagaaccagcugaaagacauggcgaucgcaaccggcggggccgucuuuggagaggagggucuuacacugaauuuggaagaugugcagccacacgaccucggcaaggucggggaggugauaguuaccaaagaugacgcuaugcuguuaaagggaaaaggcgauaaggcccagauugaaaagagaauccaagagaucauugaacagcuggacgugacgacuucagaguaugagaaagaaaagcucaacgagaggcuugcaaaacugagugaugguguagccgucuugaagguugggggcacaagcgacguggaagugaaugagaaaaaggaccgggucaccgaugcucuaaacgccacucgugcagcgguggaagagggaaucguacugggcgggggaugugcucuccugcgcugcauuccggcccuugacucucugacacccgcaaacgaggaucagaagauagguaucgaaauuaucaaaagaaccuugaagaucccugccaugacgauugcuaaaaaugccggcguggaggggucccucauaguugaaaagaucaugcaaucaagcagugaggucggauacgacgcaauggcuggcgauuucgugaacaugguggagaaagguauuaucgacccaaccaaggucguuaggacagcccuguuagaugcggccgggguggcuucucugcuaacuaccgcagaagugguagucacagagauucccaaagaagagaaggacccuggcaugggagccaugggcgggaugggagguggcaugggagggggcauguuuuga

SEQ ID NO: 7662 - RNA, 1722 nt, Artificial Sequence
  derived and/or modified sequence opt4 from HSP60__Homo_sapiens__EAW70148
augcugagacugcccaccguguucagacagaugagacccgugagcagagugcuggccccccaccugaccagagccuacgccaaggacgugaaguucggcgccgacgccagagcccugaugcugcagggcguggaccugcuggccgacgccguggccgugaccaugggccccaagggcagaaccgugaucaucgagcagagcuggggcagccccaaggugaccaaggacggcgugaccguggccaagagcaucgaccugaaggacaaguacaagaacaucggcgccaagcuggugcaggacguggccaacaacaccaacgaggaggccggcgacggcaccaccaccgccaccgugcuggccagaagcaucgccaaggagggcuucgagaagaucagcaagggcgccaaccccguggagaucagaagaggcgugaugcuggccguggacgccgugaucgccgagcugaagaagcagagcaagcccgugaccacccccgaggagaucgcccagguggccaccaucagcgccaacggcgacaaggagaucggcaacaucaucagcgacgccaugaagaaggugggcagaaagggcgugaucaccgugaaggacggcaagacccugaacgacgagcuggagaucaucgagggcaugaaguucgacagaggcuacaucagccccuacuucaucaacaccagcaagggccagaagugcgaguuccaggacgccuacgugcugcugagcgagaagaagaucagcagcauccagagcaucgugcccgcccuggagaucgccaacgcccacagaaagccccuggugaucaucgccgaggacguggacggcgaggcccugagcacccuggugcugaacagacugaaggugggccugcaggugguggccgugaaggcccccggcuucggcgacaacagaaagaaccagcugaaggacauggccaucgccaccggcggcgccguguucggcgaggagggccugacccugaaccuggaggacgugcagccccacgaccugggcaaggugggcgaggugaucgugaccaaggacgacgccaugcugcugaagggcaagggcgacaaggcccagaucgagaagagaauccaggagaucaucgagcagcuggacgugaccaccagcgaguacgagaaggagaagcugaacgagagacuggccaagcugagcgacggcguggccgugcugaaggugggcggcaccagcgacguggaggugaacgagaagaaggacagagugaccgacgcccugaacgccaccagagccgccguggaggagggcaucgugcugggcggcggcugcgcccugcugagaugcauccccgcccuggacagccugacccccgccaacgaggaccagaagaucggcaucgagaucaucaagagaacccugaagauccccgccaugaccaucgccaagaacgccggcguggagggcagccugaucguggagaagaucaugcagagcagcagcgaggugggcuacgacgccauggccggcgacuucgugaacaugguggagaagggcaucaucgaccccaccaagguggugagaaccgcccugcuggacgccgccggcguggccagccugcugaccaccgccgaggugguggugaccgagauccccaaggaggagaaggaccccggcaugggcgccaugggcggcaugggcggcggcaugggcggcggcauguucuga

SEQ ID NO: 7663 - RNA, 1722 nt, Artificial Sequence
  derived and/or modified sequence opt5 from HSP60__Homo_sapiens__EAW70148
augcugagacuccccaccguguuccggcagaugcgcccugucagcagaguucuggccccgcaccuuacacgggcuuacgccaaggacgugaaauuuggcgcggaugcucgcgcccugaugcuccaagggguggaccugcuugccgaugcugucgccgugacgaugggacccaagggcagaaccguuaucauugagcaguccugggggucuccuaaagugacaaaggacggagucaccguggcuaaaagcaucgaucugaaggacaaguauaaaaacauuggcgccaagcucguucaggauguggcgaauaacacaaaugaagaggccggggacggaaccacaaccgcuacgguccuggcccgguccaucgcuaaagaaggcuucgagaagauuucuaaaggcgccaaccccguggaaauccgcagaggggugaugcuggcggucgaugccguuaucgcugagcucaagaagcagagcaaaccugugaccacacccgaggaaauugcccaaguggcuaccaucuccgccaauggagacaaggagauuggcaacaucauuucugaugccaugaaaaaggucgggcggaaaggagugaucacaguuaaggacggcaaaacccugaaugaugaacuugagauuaucgaggggaugaaguuugaccgcggauacaucagcccuuauuucauuaacacguccaagggccagaaaugcgaauuucaggacgcuuacgugcugcucagcgagaagaaaaucucuuccauucagagcaucgucccggcgcuggaaauugccaaugcucauagaaagccccuugugaucaucgccgaggauguugacggcgaagcccugucuacacucgugcugaaccggcugaaagucgggcuccaaguggucgcugugaaggccccuggauucggcgauaaucgcaagaaccagcugaaagacauggcgauugcuaccgggggagccguuuuuggcgaggaggggcuuacacugaaucucgaagaugugcagccccacgaccugggaaaggucggcgaggugaucguuaccaaagaugacgccaugcuucugaagggcaaaggggauaaggcucagauugaaaagagaauccaagagauuaucgaacagcucgacgugaccacauccgaguaugagaaagaaaagcugaacgagcggcuggccaaacucagcgauggagucgcugugcugaaggugggcgggacgucugacguugaagucaaugagaaaaaggaccgcgugaccgaugcccuuaacgcgacaagagccgcuguggaagagggaaucguccugggcgggggcugugcccuccugcggugcauuccugcucuugacucccugacccccgccaacgaggaucagaagaucggaauugaaaucauuaaaagaacacucaagaucccggcgaugaccauugccaaaaaugcuggcguggaggggagccugaucguugaaaagaucaugcaauccucuagcgaggugggauacgacgccauggcuggcgauuucgucaacaugguggagaaagggauuaucgacccuacgaagguugugcgcacagcccugcucgaugccgcuggagucgcgucccugcuuaccaccgccgaagugguugugacagagauucccaaagaagagaaggacccuggcaugggggcuaugggcggaaugggcgggggaaugggcgggggaauguuuuga

SEQ ID NO: 7664 - RNA, 1722 nt, Artificial Sequence
  derived and/or modified sequence opt6 from HSP60__Homo_sapiens__EAW70148
augcuaagacuaccgacgguauuuagacaaaugagaccaguaaguagaguauuggcaccacaccugacaagagcauaugcgaaagauguaaaauuuggagcagaugcaagagcacuaaugcuacaaggcguggauuuacuagccgacgcaguagcaguuacuaugggaccgaaaggacggacaguaauuauagaacaaaguugggguaguccgaaaguaacaaaagauggggucacaguagcaaaaucaauagacuuaaaggacaaauacaaaaauauaggagcaaaacuaguacaagauguggcaaauaacacaaaugaagaagcaggagacggaacaaccacggcaacaguacuagcuagaaguauagcaaaagaaggguuugaaaaaauaagcaaaggagcaaauccuguagaaauaagaaggggaguaaugcuagcgguagacgccguuauagcagaguuaaaaaaacaaaguaaaccaguaacaacaccagaggaaauagcacaaguagcaacaauaagugcaaauggagauaaggaaauuggaaacauuauauccgaugccaugaagaaaguaggaagaaaagggguaauaacaguaaaggauggaaaaacguuaaaugaugaacuagaaauaauagaaggaaugaaauucgaccgaggauauauuaguccauauuuuauaaacacaagcaaaggacaaaaaugugaauuucaagacgcuuauguccuauuaagcgaaaaaaaaauaucaagcauacaaucaauuguaccagcacuugaaauagcaaaugcacacagaaaaccauuaguaauaauugcugaagauguagacggggaagcgcuaagcacauuaguauuaaauagacuaaaaguaggacuccaagugguagcaguaaaagcuccaggauuuggagauaauagaaaaaaucaauuaaaagacauggcaauagcaacagggggagccguauuuggagaggaaggucugacauuaaacuuagaggacguacagccacaugauuugggaaaaguaggagaaguaauaguaacgaaagacgacgcaauguuauugaaaggaaagggagauaaagcgcagauagaaaaaaggauucaagagauaauagagcaauuagauguaacaacaagugaauaugagaaagaaaaacuaaaugaaagauuagcaaaauugagcgacggaguagcaguauuaaaaguaggaggaacaucagacguagaaguaaaugaaaaaaaggacagaguaacagaugcuuugaacgcaacaagagcagccguugaagaaggaauaguauuaggaggaggaugugcuuuacuaagaugcaucccagcacuagauucauuaacgccagcaaaugaagaucaaaaaauaggaauagaaauaauaaaaagaaccuuaaaaauaccagcuaugacaauagcaaaaaacgcaggcguagagggaagccuaauaguagaaaaaauaaugcaaaguucaagugaaguaggguaugacgccauggcuggagauuuuguaaacaugguagaaaaaggaauaauagauccaacaaaaguaguaaggacggcauuguuagaugcagcaggaguugcaagccuuuuaacaaccgcagaaguaguagugacagaaauaccaaaagaagaaaaagauccagguaugggggcaaugggagggaugggaggaggaaugggaggaggaauguucuaa

SEQ ID NO: 7665 - protein, 569 aa, Artificial Sequence [sequence omitted]

SEQ ID NO: 7666 - RNA, 1710 nt, Artificial Sequence
  HSP60__Homo_sapiens__ACE06961
augcuucgguuacccacagucuuucgccagaugagaccgguguccaggguacuggcuccucaucucacucgggcuuaugccaaagauguaaaauuuggugcagaugcccgagccuuaaugcuucaagguguagaccuuuuagccgaugcuguggccguuacaauggggccaaagggaagaacagugauuauugagcagaguuggggaagucccaaaguaacaaaagauggugugacuguugcaaagucaauugacuuaaaagauaaauacaagaacauuggagcuaaacuuguucaagauguugccaauaacacaaaugaagaagcuggggauggcacuaccacugcuacuguacuggcacgcucuauagccaaggaaggcuucgagaagauuagcaaaggugcuaauccaguggaaaucaggagaggugugauguuagcuguugaugcuguaauugcugaacuuaaaaagcagucuaaaccugugaccaccccugaagaaauugcacagguugcuacgauuucugcaaacggagacaaagaaauuggcaauaucaucucugaugcaaugaaaaaaguuggaagaaagggugucaucacaguaaaggauggaaaaacacugaaugaugaauuagaaauuauugaaggcaugaaguuugaucgaggcuauauuucuccauacuuuauuaauacaucaaaaggucagaaaugugaauuccaggaugccuauguucuguugagugaaaagaaaauuucuaguauccaguccauuguaccugcucuugaaauugccaaugcucaccguaagccuuuggucauaaucgcugaagauguugauggagaagcucuaaguacacucgucuugaauaggcuaaagguuggucuucagguuguggcagucaaggcuccaggguuuggugacaauagaaagaaccagcuuaaagauauggcuauugcuacugguggugcaguguuuggagaagagggauugacccugaaucuugaagacguucagccucaugacuuaggaaaaguuggagaggucauugugaccaaagacgaugccaugcucuuaaaaggaaaaggugacaaggcucaaauugaaaaacguauucaagaaaucauugagcaguuagaugucacaacuagugaauaugaaaagggaaaacugaaugaacggcuugcaaaacuuucagauggaguggcugugcugaagguuggugggacaagugauguugaagugaaugaaaagaaagacagaguuacagaugcccuuaaugcuacaagagcugcuguugaagaaggcauuguuuugggaggggguugugcccuccuucgaugcauuccagccuuggacucauugacuccagcuaaugaagaucaaaaaauugguauagaaauuauuaaaagaacacucaaaauuccagcaaugaccauugcuaagaaugcagguguugaaggaucuuugauaguugagaaaauuaugcaaaguuccucagaaguugguuaugaugcuauggcuggagauuuugugaauaugguggaaaaaggaaucauugacccaacaaagguugugagaacugcuuuauuggaugcugcugguguggccucucuguuaacuacagcagaaguuguagucacagaaauuccuaaagaagagaaggacccuggaaugggugcaauggguggaaugggagguggcauguucuaa

SEQ ID NO: 7667 - RNA, 1710 nt, Artificial Sequence
  derived and/or modified sequence opt1 from HSP60__Homo_sapiens__ACE06961
augcugcgccuccccaccguguuccggcagaugcgcccggucagccgggugcuggcgccccaccugacccgcgccuacgccaaggacgugaaguucggcgccgacgcccgggcccucaugcugcagggggucgaccugcucgccgacgcgguggccgugacgaugggccccaaggggcgcaccgucaucaucgagcaguccuggggcagccccaaggugaccaaggacggggugaccgucgccaaguccaucgaccugaaggacaaguacaagaacaucggcgccaagcuggugcaggacguggcgaacaacacgaacgaggaggccggcgacgggaccaccaccgccacgguccucgcccggagcaucgccaaggagggcuucgagaagaucuccaagggggcgaacccgguggagauccgccggggcgugaugcuggccgucgacgccgugaucgccgagcugaagaagcagagcaagcccgugaccacccccgaggagaucgcccaggucgcgaccaucuccgccaacggggacaaggagaucggcaacaucaucagcgacgccaugaagaaggugggccgcaagggggugaucacggucaaggacggcaagacccucaacgacgagcuggagaucaucgaggggaugaaguucgaccggggcuacaucucccccuacuucaucaacaccagcaagggccagaagugcgaguuccaggacgccuacgugcugcucuccgagaagaagaucagcuccauccagagcaucgugccggcccuggagaucgcgaacgcccaccgcaagccccuggucaucaucgccgaggacguggacggggaggcccucuccacccugguccugaaccggcucaaggugggccuccagguggucgccgugaaggcgcccggguucggcgacaaccgcaagaaccagcugaaggacauggccaucgccaccgggggcgccguguucggcgaggaggggcugacgcugaaccuggaggacguccagccccacgaccucggcaaggugggggaggugaucgucaccaaggacgacgcgaugcugcugaagggcaagggggacaaggcccagaucgagaagcggauccaggagaucaucgagcagcucgacgugaccacgagcgaguacgagaagggcaagcugaacgagcgccuggccaagcucuccgacggcguggccguccugaaggucgggggcaccagcgacguggaggugaacgagaagaaggaccgggugaccgacgcccugaacgcgacccgcgccgccguggaggaggggaucguccucggcgggggcugcgcccugcugcggugcaucccggcccucgacucccugacgcccgcgaacgaggaccagaagaucggcaucgagaucaucaagcgcacccugaagauccccgccaugaccaucgccaagaacgccgggguggagggcagccucaucguggagaagaucaugcagagcuccagcgaggucggguacgacgccauggcgggcgacuucgugaacaugguggagaagggcaucaucgaccccaccaaggucgugcggacggcccugcuggacgccgccgggguggcgucccuccugaccaccgccgaggucguggugaccgagaucccgaaggaggagaaggaccccggcaugggggccaugggcgggaugggcggcgggauguucuga

SEQ ID NO: 7668 - RNA, 1710 nt, Artificial Sequence
  derived and/or modified sequence opt2 from HSP60__Homo_sapiens__ACE06961
augcuccgccuccccaccgucuuccgccagaugcgccccgucucccgcguccucgccccccaccucacccgcgccuacgccaaggacgucaaguucggcgccgacgcccgcgcccucaugcuccagggcgucgaccuccucgccgacgccgucgccgucaccaugggccccaagggccgcaccgucaucaucgagcaguccuggggcucccccaaggucaccaaggacggcgucaccgucgccaaguccaucgaccucaaggacaaguacaagaacaucggcgccaagcucguccaggacgucgccaacaacaccaacgaggaggccggcgacggcaccaccaccgccaccguccucgcccgcuccaucgccaaggagggcuucgagaagaucuccaagggcgccaaccccgucgagauccgccgcggcgucaugcucgccgucgacgccgucaucgccgagcucaagaagcaguccaagcccgucaccacccccgaggagaucgcccaggucgccaccaucuccgccaacggcgacaaggagaucggcaacaucaucuccgacgccaugaagaaggucggccgcaagggcgucaucaccgucaaggacggcaagacccucaacgacgagcucgagaucaucgagggcaugaaguucgaccgcggcuacaucucccccuacuucaucaacaccuccaagggccagaagugcgaguuccaggacgccuacguccuccucuccgagaagaagaucuccuccauccaguccaucguccccgcccucgagaucgccaacgcccaccgcaagccccucgucaucaucgccgaggacgucgacggcgaggcccucuccacccucguccucaaccgccucaaggucggccuccaggucgucgccgucaaggcccccggcuucggcgacaaccgcaagaaccagcucaaggacauggccaucgccaccggcggcgccgucuucggcgaggagggccucacccucaaccucgaggacguccagccccacgaccucggcaaggucggcgaggucaucgucaccaaggacgacgccaugcuccucaagggcaagggcgacaaggcccagaucgagaagcgcauccaggagaucaucgagcagcucgacgucaccaccuccgaguacgagaagggcaagcucaacgagcgccucgccaagcucuccgacggcgucgccguccucaaggucggcggcaccuccgacgucgaggucaacgagaagaaggaccgcgucaccgacgcccucaacgccacccgcgccgccgucgaggagggcaucguccucggcggcggcugcgcccuccuccgcugcauccccgcccucgacucccucacccccgccaacgaggaccagaagaucggcaucgagaucaucaagcgcacccucaagauccccgccaugaccaucgccaagaacgccggcgucgagggcucccucaucgucgagaagaucaugcaguccuccuccgaggucggcuacgacgccauggccggcgacuucgucaacauggucgagaagggcaucaucgaccccaccaaggucguccgcaccgcccuccucgacgccgccggcgucgccucccuccucaccaccgccgaggucgucgucaccgagauccccaaggaggagaaggaccccggcaugggcgccaugggcggcaugggcggcggcauguucuga

SEQ ID NO: 7669 - RNA, 1710 nt, Artificial Sequence
  derived and/or modified sequence opt3 from HSP60__Homo_sapiens__ACE06961
augcugagacuccccaccguguucaggcagaugcggccugucagccgcguucuugccccacaccugacacgagcuuacgcaaaggacgugaaauuuggcgccgaugcgcgugcuuugauguuacaagggguagaccugcuagccgaugcaguggccgucacuaugggaccgaaggguagaacggugaucauugagcaguccuggggcucucccaaaguuaccaaggacggggugacagucgcuaaaucaauagaucucaaggacaaguauaaaaacaucggagcaaagcuggugcaggauguagccaauaacacuaaugaagaggcuggcgacgguaccacaaccgccacuguucuugcgaggaguauugcaaaagaaggguucgagaagaucagcaaaggagccaacccuguggaaauucggcgcggcgucaugcuggcuguggaugccgugaucgcagaguugaagaagcaguccaaaccagucacaacccccgaggaaauagcucaaguugccacgaucucugcgaauggcgacaaggagauugggaacaucauuucggaugccaugaaaaaggugggaagaaaagguguaaucacugugaaggacggcaaaacccucaaugaugaacuggagauaauugaggggaugaaguuugacaggggauacaucucaccuuauuucauuaacacaagcaagggccagaaaugcgaauuucaggacgcauacguccugcucagugagaagaaaaucuccucuauccagagcauugugccagcuuuagaaauagccaaugcucaucggaagccccugguuaucauugccgaggauguggacggugaagcacuuuccacuuugguccugaaccgccuaaaaguggggcuccaaguaguugccgugaaggcuccuggauucggcgauaaucgaaagaaccagcugaaagacauggcgaucgcaaccggcggggccgucuuuggagaggagggucuuacacugaauuuggaagaugugcagccacacgaccucggcaaggucggggaggugauaguuaccaaagaugacgcuaugcuguuaaagggaaaaggcgauaaggcccagauugaaaagagaauccaagagaucauugaacagcuggacgugacgacuucagaguaugagaaagguaagcucaacgaaaggcuugcaaaacugagugaugggguagccgucuugaaggugggcggaacaagcgacguugaggugaaugagaaaaaggaccgggucaccgaugcucuaaacgccacucgugcagcgguggaagaaggcaucguacucgggggagguugugcucugcugcgcugcauuccggcccuugacucucugacacccgcaaacgaggaucagaagauaggcaucgagauuaucaaaagaaccuugaagaucccugccaugacgauugcuaaaaaugccgggguggaaggaucccucauaguugagaagaucaugcaaucaagcagugaagucggcuacgacgcaauggcuggugauuucgugaacaugguggagaaagggauuaucgacccaaccaaggucguuaggacagcccuguuagaugcggccggcguggcuucucugcuaacuaccgcagaggugguagucacagaaauucccaaagaggaaaaggacccuggaaugggcgccaugggagggauggguggcgggauguuuuga

SEQ ID NO: 7670 - RNA, 1710 nt, Artificial Sequence
  derived and/or modified sequence opt4 from HSP60__Homo_sapiens__ACE06961
augcugagacugcccaccguguucagacagaugagacccgugagcagagugcuggccccccaccugaccagagccuacgccaaggacgugaaguucggcgccgacgccagagcccugaugcugcagggcguggaccugcuggccgacgccguggccgugaccaugggccccaagggcagaaccgugaucaucgagcagagcuggggcagccccaaggugaccaaggacggcgugaccguggccaagagcaucgaccugaaggacaaguacaagaacaucggcgccaagcuggugcaggacguggccaacaacaccaacgaggaggccggcgacggcaccaccaccgccaccgugcuggccagaagcaucgccaaggagggcuucgagaagaucagcaagggcgccaaccccguggagaucagaagaggcgugaugcuggccguggacgccgugaucgccgagcugaagaagcagagcaagcccgugaccacccccgaggagaucgcccagguggccaccaucagcgccaacggcgacaaggagaucggcaacaucaucagcgacgccaugaagaaggugggcagaaagggcgugaucaccgugaaggacggcaagacccugaacgacgagcuggagaucaucgagggcaugaaguucgacagaggcuacaucagccccuacuucaucaacaccagcaagggccagaagugcgaguuccaggacgccuacgugcugcugagcgagaagaagaucagcagcauccagagcaucgugcccgcccuggagaucgccaacgcccacagaaagccccuggugaucaucgccgaggacguggacggcgaggcccugagcacccuggugcugaacagacugaaggugggccugcaggugguggccgugaaggcccccggcuucggcgacaacagaaagaaccagcugaaggacauggccaucgccaccggcggcgccguguucggcgaggagggccugacccugaaccuggaggacgugcagccccacgaccugggcaaggugggcgaggugaucgugaccaaggacgacgccaugcugcugaagggcaagggcgacaaggcccagaucgagaagagaauccaggagaucaucgagcagcuggacgugaccaccagcgaguacgagaagggcaagcugaacgagagacuggccaagcugagcgacggcguggccgugcugaaggugggcggcaccagcgacguggaggugaacgagaagaaggacagagugaccgacgcccugaacgccaccagagccgccguggaggagggcaucgugcugggcggcggcugcgcccugcugagaugcauccccgcccuggacagccugacccccgccaacgaggaccagaagaucggcaucgagaucaucaagagaacccugaagauccccgccaugaccaucgccaagaacgccggcguggagggcagccugaucguggagaagaucaugcagagcagcagcgaggugggcuacgacgccauggccggcgacuucgugaacaugguggagaagggcaucaucgaccccaccaagguggugagaaccgcccugcuggacgccgccggcguggccagccugcugaccaccgccgaggugguggugaccgagauccccaaggaggagaaggaccccggcaugggcgccaugggcggcaugggcggcggcauguucuga

SEQ ID NO: 7671 - RNA, 1710 nt, Artificial Sequence
  derived and/or modified sequence opt5 from HSP60__Homo_sapiens__ACE06961
augcugagacuccccaccguguuccggcagaugcgcccugucagcagaguucuggccccgcaccuuacacgggcuuacgccaaggacgugaaauuuggcgcggaugcucgcgcccugaugcuccaagggguggaccugcuugccgaugcugucgccgugacgaugggacccaagggcagaaccguuaucauugagcaguccugggggucuccuaaagugacaaaggacggagucaccguggcuaaaagcaucgaucugaaggacaaguauaaaaacauuggcgccaagcucguucaggauguggcgaauaacacaaaugaagaggccggggacggaaccacaaccgcuacgguccuggcccgguccaucgcuaaagaaggcuucgagaagauuucuaaaggcgccaaccccguggaaauccgcagaggggugaugcuggcggucgaugccguuaucgcugagcucaagaagcagagcaaaccugugaccacacccgaggaaauugcccaaguggcuaccaucuccgccaauggagacaaggagauuggcaacaucauuucugaugccaugaaaaaggucgggcggaaaggagugaucacaguuaaggacggcaaaacccugaaugaugaacuugagauuaucgaggggaugaaguuugaccgcggauacaucagcccuuauuucauuaacacguccaagggccagaaaugcgaauuucaggacgcuuacgugcugcucagcgagaagaaaaucucuuccauucagagcaucgucccggcgcuggaaauugccaaugcucauagaaagccccuugugaucaucgccgaggauguugacggcgaagcccugucuacacucgugcugaaccggcugaaagucgggcuccaaguggucgcugugaaggccccuggauucggcgauaaucgcaagaaccagcugaaagacauggcgauugcuaccgggggagccguuuuuggcgaggaggggcuuacacugaaucucgaagaugugcagccccacgaccugggaaaggucggcgaggugaucguuaccaaagaugacgccaugcuucugaagggcaaaggggauaaggcucagauugaaaagagaauccaagagauuaucgaacagcucgacgugaccacauccgaguaugagaaaggaaagcugaacgaacggcuggccaaacucagcgauggcgucgcugugcugaagguugggggaacgucugacguggaggucaaugagaaaaaggaccgcgugaccgaugcccuuaacgcgacaagagccgcuguggaagaaggcaucguccucgggggcggaugugcccugcugcggugcauuccugcucuugacucccugacccccgccaacgaggaucagaagaucggcauugagaucauuaaaagaacacucaagaucccggcgaugaccauugccaaaaaugcugggguggaaggaagccugaucguugagaagaucaugcaauccucuagcgaagugggcuacgacgccauggcuggggauuucgucaacaugguggagaaaggaauuaucgacccuacgaagguugugcgcacagcccugcucgaugccgcuggcgucgcgucccugcuuaccaccgccgaggugguugugacagaaauucccaaagaggaaaaggacccugggaugggcgcuaugggaggcaugggagggggcauguuuuga

SEQ ID NO: 7672 - RNA, 1710 nt, Artificial Sequence
  derived and/or modified sequence opt6 from HSP60__Homo_sapiens__ACE06961
augcuaagguuaccaacaguauucagacaaaugagaccaguaucaagaguccuagcaccacauuuaacacgagcauaugcaaaagauguaaaauucggggcagaugcaagggcauugauguuacaaggagucgauuuacuagcggaugcaguagcgguaacaaugggaccaaaaggaagaacaguaauaauagaacaaaguuggggaucaccuaaaguaacaaaagauggaguaacaguagcaaaaaguauagauuuaaaagacaaauauaaaaacauuggagcaaaacuagugcaagauguagcaaacaauaccaaugaagaagcaggagaugguacaacaacagcaacgguauuggcuagaucaauagcgaaagaaggauuugaaaaaauaucaaaaggcgcaaacccaguagagauaagaaggggaguaaugcuagcaguagaugcgguaauagcagaacuaaaaaaacaaaguaaaccuguaacaaccccugaggaaauagcacaaguugcaacuauaucagcaaacggcgacaaagaaauagggaauauuauaagugaugcaaugaagaaaguaggaagaaaagguguaauaacaguaaaagaugggaaaacacugaaugaugaacuagagauaauagaaggaaugaaauucgauaggggauacauaagcccauacuuuauuaauacaucaaaaggacagaaaugcgaauuucaagacgcauacgucuuacuaagcgaaaaaaaaauaaguagcauacaaucaauuguaccagcacuggagauagcgaacgcacaucgaaaaccauuagugauuauagcugaagauguggauggagaggcacuaaguacauuaguguuaaacagguuaaaaguaggacuucaaguaguagccguaaaagccccaggauucggagauaauagaaaaaaucaauugaaagacauggcaauugcaacaggaggagcaguauuuggcgaagaaggauuaacacuaaaccuagaagauguacagccacacgauuuagggaaaguaggagaaguaauagugacgaaagacgaugcaauguuacuaaaaggaaaaggggauaaagcucaaauagagaaaagaauacaagagauaauugaacaauuagacguaacaacaagcgaauacgaaaaaggaaaauuaaaugaaaggcuagcaaaauuaagcgauggaguggcagugcuaaaaguaggaggaacaagugacgucgaaguaaaugaaaagaaagauagagugacagaugcguuaaacgcaacaagagcagcaguagaggaagggauaguacuagggggcggaugugcccuacuaagaugcauuccggcuuuagacucauuaacaccagcuaaugaagaucaaaaaaucggaauagaaauaauaaaaagaacguuaaaaauaccagcaaugacgauagcaaagaaugcagggguagaaggaucacuaauaguggaaaaaauaaugcaaaguucaagugaaguaggauaugacgcaauggcuggggauuucguaaauaugguagagaaagggauaauagauccaacaaaaguaguucgaaccgcauuauuagaugcagcagggguagcaucacuacuaacaacugcagaaguaguaguaacagaaauaccaaaagaagagaaagaucccggaaugggagcuaugggagggauggguggagggauguucuaa

SEQ ID NO: 7673 - protein, 573 aa, Artificial Sequence; identical to SEQ ID NO: 7657
  HSP60__Homo_sapiens__P10809

SEQ ID NO: 7674 - RNA, 1722 nt, Artificial Sequence
  HSP60__Homo_sapiens__AAA60127
augcuucgguuacccacagucuuucgccagaugagaccgguguccaggguacuggcuccucaucucacucgggcuuaugccaaagauguaaaauuuggugcagaugcccgagccuuaaugcuucaagguguagaccuuuuagccgaugcuguggccguuacaauggggccaaagggaagaacagugauuauugagcagaguuggggaagucccaaaguaacaaaagauggugugacuguugcaaagucaauugacuuaaaagauaaauacaagaacauuggagcuaaacuuguucaagauguugccaauaacacaaaugaagaagcuggggauggcacuaccacugcuacuguacuggcacgcucuauagccaaggaaggcuucgagaagauuagcaaaggugcuaauccaguggaaaucaggagaggugugauguuagcuguugaugcuguaauugcugaacuuaaaaagcagucuaaaccugugaccaccccugaagaaauugcacagguugcuacgauuucugcaaacggagacaaagaaauuggcaauaucaucucugaugcaaugaaaaaaguuggaagaaagggugucaucacaguaaaggauggaaaaacacugaaugaugaauuagaaauuauugaaggcaugaaguuugaucgaggcuauauuucuccauacuuuauuaauacaucaaaaggucagaaaugugaauuccaggaugccuauguucuguugagugaaaagaaaauuucuaguauccaguccauuguaccugcucuugaaauugccaaugcucaccguaagccuuuggucauaaucgcugaagauguugauggagaagcucuaaguacacucgucuugaauaggcuaaagguuggucuucagguuguggcagucaaggcuccaggguuuggugacaauagaaagaaccagcuuaaagauauggcuauugcuacugguggugcaguguuuggagaagagggauugacccugaaucuugaagacguucagccucaugacuuaggaaaaguuggagaggucauugugaccaaagacgaugccaugcucuuaaaaggaaaaggugacaaggcucaaauugaaaaacguauucaagaaaucauugagcaguuagaugucacaacuagugaauaugaaaaggaaaaacugaaugaacggcuugcaaaacuuucagauggaguggcugugcugaagguuggugggacaagugauguugaagugaaugaaaagaaagacagaguuacagaugcccuuaaugcuacaagagcugcuguugaagaaggcauuguuuugggaggggguugugcccuccuucgaugcauuccagccuuggacucauugacuccagcuaaugaagaucaaaaaauugguauagaaauuauuaaaagaacacucaaaauuccagcaaugaccauugcuaagaaugcagguguugaaggaucuuugauaguugagaaaauuaugcaaaguuccucagaaguugguuaugaugcuauggcuggagauuuugugaauaugguggaaaaaggaaucauugacccaacaaagguugugagaacugcuuuauuggaugcugcugguguggccucucuguuaacuacagcagaaguuguagucacagaaauuccuaaagaagagaaggacccuggaaugggugcaauggguggaaugggaggugguaugggagguggcauguucuaa

SEQ ID NO: 7675 - RNA, 1722 nt, Artificial Sequence; identical to SEQ ID NO: 7659
  derived and/or modified sequence opt1 from HSP60__Homo_sapiens__AAA60127

SEQ ID NO: 7676 - RNA, 1722 nt, Artificial Sequence; identical to SEQ ID NO: 7660
  derived and/or modified sequence opt2 from HSP60__Homo_sapiens__AAA60127

SEQ ID NO: 7677 - RNA, 1722 nt, Artificial Sequence; identical to SEQ ID NO: 7661
  derived and/or modified sequence opt3 from HSP60__Homo_sapiens__AAA60127

SEQ ID NO: 7678 - RNA, 1722 nt, Artificial Sequence; identical to SEQ ID NO: 7662
  derived and/or modified sequence opt4 from HSP60__Homo_sapiens__AAA60127

SEQ ID NO: 7679 - RNA, 1722 nt, Artificial Sequence; identical to SEQ ID NO: 7663
  derived and/or modified sequence opt5 from HSP60__Homo_sapiens__AAA60127

SEQ ID NO: 7680 - RNA, 1722 nt, Artificial Sequence
  derived and/or modified sequence opt6 from HSP60__Homo_sapiens__AAA60127
auguuaagauuaccaacgguauucagacaaaugagaccaguaaguagaguacuagcuccacaucuaacaagagccuaugcaaaagacguaaaauuuggagcugaugcaagagcauuaaugcuacaaggaguagaucuacuagcagaugcaguugcaguuacaaugggaccaaaaggaaggacggucauaauagaacaaagcuggggaucgccaaaaguaacgaaagauggaguuacuguagcaaaaagcauagaccuaaaagauaaauauaagaacauaggagcaaaauuaguacaagacgucgcaaauaauacaaacgaagaagcaggagacggaacaacaaccgcaacaguacuugcaaggucaauugcaaaagaaggauuugaaaaaauaucaaaaggagcaaaucccguagaaauaagaagagggguaaugcuagcaguagacgcaguaauagcagaacugaaaaaacaaaguaaaccagugacuacaccagaagaaauagcgcaaguagcuacaauaagcgcuaauggagacaaagaaauaggaaacauaauaagcgaugccaugaaaaagguaggaagaaaaggaguaauaacaguuaaagauggaaaaacacuuaaugaugaacucgaaauaauagaagggaugaaauuugauagaggauauauaagcccauacuuuauaaacacaaguaaaggacaaaaaugcgaauuccaggaugcauacguguuacuaagcgagaaaaaaaucaguagcauucaaucaauuguaccagcauuagagaucgcaaaugcgcauagaaaaccacuaguaauaauagcagaagauguagacggagaagcauuaaguacauuaguuuuaaauagacuaaaaguaggacuacaaguaguagcaguaaaagcaccaggauucggagauaaucgaaaaaaucaacuuaaagauauggcaauagcaacaggaggcgcuguguucggagaagaaggguuaacuuugaaucuagaagauguacaaccacaugaucuaggaaaaguaggagaaguaauaguaacaaaagacgaugcaaugcucuuaaaaggaaaaggagauaaggcgcaaauugaaaaaagaauucaagaaauaauagaacaacuagauguaacaacaagugaauaugagaaagagaaacugaacgaaagacuggcaaaacugagugacggcgucgcaguacuaaaaguagguggcacgucagauguagaaguaaacgaaaaaaaagauagaguaacagacgcguuaaaugcuacuagagcggcaguugaagaagguauagucuuagguggaggaugcgcauuguuaagauguauaccagcauuagauagccuaacacccgcaaaugaagaucaaaagauuggaauagaaauaauaaaaagaacucuaaaaauaccagcaaugaccauagcgaaaaaugcagguguagaaggaagccuaauaguagaaaaaauaaugcaaucaaguucagaaguaggauaugaugcgauggcgggugacuuuguuaauaugguagaaaaagguauuauagacccaacaaaaguaguaagaacagcauuacuggacgcagcaggaguagcaagucuauuaacaacagcagaaguuguaguaacugaaauaccuaaagaggaaaaagauccaggaaugggagcaaugggaggaaugggcgguggaaugggaggaggaauguuuuaa

SEQ ID NO: 7681 - protein, 509 aa, Artificial Sequence
  HSP60__Homo_sapiens__Q0VDF9
MAAIGVHLGCTSACVAVYKDGRAGVVANDAGDRVTPAVVAYSENEEIVGLAAKQSRIRNISNTVMKVKQILGRSSSDPQAQKYIAESKCLVIEKNGKLRYEIDTGEETKFVNPEDVARLIFSKMKETAHSVLGSDANDVVITVPFDFGEKQKNALGEAARAAGFNVLRLIHEPSAALLAYGIGQDSPTGKSNILVFKLGGTSLSLSVMEVNSGIYRVLSTNTDDNIGGAHFTETLAQYLASEFQRSFKHDVRGNARAMMKLTNSAEVAKHSLSTLGSANCFLDSLYEGQDFDCNVSRARFELLCSPLFNKCIEAIRGLLDQNGFTADDINKVVLCGGSSRIPKLQQLIKDLFPAVELLNSIPPDEVIPIGAAIEAGILIGKENLLVEDSLMIECSARDILVKGVDESGASRFTVLFPSGTPLPARRQHTLQAPGSISSVCLELYESDGKNSAKEETKFAQVVLQDLDKKENGLRDILAVLTMKRDGSLHVTCTDQETGKCEAISIEIAS

SEQ ID NO: 7682 - RNA, 1530 nt, Artificial Sequence
  HSP60__Homo_sapiens__AAI19691
auggcggccaucggaguucaccugggcugcaccucagccuguguggccgucuauaaggauggccgggcuggugugguugcaaaugaugccggugaccgaguuacuccagcuguuguugcuuacucagaaaaugaagagauuguuggauuggcagcaaaacaaaguagaauaagaaauauuucaaauacaguaaugaaaguaaagcagauccugggcagaagcuccagugauccacaagcucagaaauacaucgcggaaaguaaauguuuagucauugaaaaaaaugggaaauuacgauaugaaauagauacuggagaagaaacaaaauuuguuaacccagaagauguugccagacugauauuuaguaaaaugaaagaaacggcacauucuguauugggcucagaugcaaaugauguaguuauuacugucccguuugauuuuggagaaaagcaaaaaaaugcucuuggagaagcagcuagagcugcuggauuuaauguuuugcgauuaauucacgaaccgucugcagcucuucuugcuuauggaauuggacaagacuccccuacuggaaaaagcaauauuuugguguuuaagcuuggaggaacauccuuaucucucagcgucauggaaguuaacaguggaauauaucggguucuuucaacaaacacugaugauaacaucgguggugcacauuucacagaaaccuuagcacaguaucuagcuucugaguuccaaagauccuucaaacaugaugugagaggaaaugcgcgagccaugaugaaauuaacgaacagugcugaaguagcgaaacauucuuugucaaccuugggaagugccaacuguuuucuugacucauuauaugaaggucaagauuuugauugcaauguguccagagcaagauuugaacuucuuuguucuccacuuuuuaauaaguguauagaagcaaucagaggacucuuagaucaaaauggauuuacagcagaugauaucaacaagguuguccuuuguggagggucuucucgaaucccaaagcuacagcaacugauuaaagaucuuuucccagcuguugagcuucucaauucuaucccuccugaugaagugaucccuauuggugcagcuauagaagcaggaauucuuauugggaaagaaaaccuguugguggaagacucucuuaugauagaguguucagccagagauauuuuaguuaaggguguggacgaaucaggagccaguagauucacagugcuguuuccaucagggacuccuuugccagcucgaagacaacacacauugcaagccccuggaagcauaucuucagugugccuugaacucuaugagucugaugggaagaacucugccaaagaggaaaccaaguuugcacagguuguacuccaggauuuagauaaaaaagaaaauggauuacgugauauauuagcuguucuuacuaugaaaagggauggaucuuuacaugugacaugcacagaucaagaaacuggaaaaugugaagcaaucucuauugagauagcaucuuag

SEQ ID NO: 7683 - RNA, 1530 nt, Artificial Sequence
  derived and/or modified sequence opt1 from HSP60__Homo_sapiens__AAI19691
auggccgccaucggcgugcaccuggggugcaccagcgcgugcgucgccguguacaaggacggccgcgccgggguggucgccaacgacgccggcgaccgggugacccccgcgguggucgccuacuccgagaacgaggagaucguggggcucgccgccaagcagagccgcauccggaacaucuccaacacggugaugaaggucaagcagauccugggccgcagcuccagcgacccgcaggcgcagaaguacaucgccgaguccaagugccuggugaucgagaagaacggcaagcuccgguacgagaucgacaccggggaggagaccaaguucgugaaccccgaggacgucgcccgccugaucuucagcaagaugaaggagaccgcccacuccgugcugggcagcgacgccaacgacguggucaucacggugcccuucgacuucggggagaagcagaagaacgcgcucggcgaggccgcccgggccgccggguucaacgugcugcgccugauccacgagcccuccgcggcccuccuggccuacggcaucggccaggacagcccgaccgggaaguccaacauccuggucuucaagcucggcgggaccagccugucccugagcgugauggaggugaacuccggcaucuaccggguccucagcaccaacacggacgacaacaucggcggggcccacuucaccgagacccuggcccaguaccuggcguccgaguuccagcgcagcuucaagcacgacgugcggggcaacgcccgcgccaugaugaagcucaccaacagcgccgagguggccaagcacucccugagcacgcugggguccgcgaacugcuuccucgacagccuguacgagggccaggacuucgacugcaacgucucccgggcccgcuucgagcugcucugcagcccccuguucaacaagugcaucgaggccauccgggggcugcucgaccagaacggcuucaccgccgacgacaucaacaaggugguccugugcggcggguccagccgcauccccaagcugcagcagcucaucaaggaccuguuccccgcgguggagcugcucaacuccaucccgcccgacgaggugauccccaucggcgccgccaucgaggccgggauccugaucggcaaggagaaccugcucgucgaggacagccugaugaucgagugcuccgcccgggacauccuggugaaggggguggacgagagcggcgcgucccgcuucaccguccucuuccccagcggcaccccgcugcccgcccggcgccagcacacgcugcaggcccccggguccaucagcuccgugugccucgagcuguacgagagcgacggcaagaacuccgccaaggaggagaccaaguucgcccaggugguccugcaggaccucgacaagaaggagaacgggcugcgggacauccuggcggugcucaccaugaagcgcgacggcagccugcacgugaccugcacggaccaggagaccgggaagugcgaggccaucagcaucgagaucgccuccuga

SEQ ID NO: 7684 - RNA, 1530 nt, Artificial Sequence
  derived and/or modified sequence opt2 from HSP60__Homo_sapiens__AAI19691
auggccgccaucggcguccaccucggcugcaccuccgccugcgucgccgucuacaaggacggccgcgccggcgucgucgccaacgacgccggcgaccgcgucacccccgccgucgucgccuacuccgagaacgaggagaucgucggccucgccgccaagcagucccgcauccgcaacaucuccaacaccgucaugaaggucaagcagauccucggccgcuccuccuccgacccccaggcccagaaguacaucgccgaguccaagugccucgucaucgagaagaacggcaagcuccgcuacgagaucgacaccggcgaggagaccaaguucgucaaccccgaggacgucgcccgccucaucuucuccaagaugaaggagaccgcccacuccguccucggcuccgacgccaacgacgucgucaucaccguccccuucgacuucggcgagaagcagaagaacgcccucggcgaggccgcccgcgccgccggcuucaacguccuccgccucauccacgagcccuccgccgcccuccucgccuacggcaucggccaggacucccccaccggcaaguccaacauccucgucuucaagcucggcggcaccucccucucccucuccgucauggaggucaacuccggcaucuaccgcguccucuccaccaacaccgacgacaacaucggcggcgcccacuucaccgagacccucgcccaguaccucgccuccgaguuccagcgcuccuucaagcacgacguccgcggcaacgcccgcgccaugaugaagcucaccaacuccgccgaggucgccaagcacucccucuccacccucggcuccgccaacugcuuccucgacucccucuacgagggccaggacuucgacugcaacgucucccgcgcccgcuucgagcuccucugcuccccccucuucaacaagugcaucgaggccauccgcggccuccucgaccagaacggcuucaccgccgacgacaucaacaaggucguccucugcggcggcuccucccgcauccccaagcuccagcagcucaucaaggaccucuuccccgccgucgagcuccucaacuccaucccccccgacgaggucauccccaucggcgccgccaucgaggccggcauccucaucggcaaggagaaccuccucgucgaggacucccucaugaucgagugcuccgcccgcgacauccucgucaagggcgucgacgaguccggcgccucccgcuucaccguccucuuccccuccggcaccccccuccccgcccgccgccagcacacccuccaggcccccggcuccaucuccuccgucugccucgagcucuacgaguccgacggcaagaacuccgccaaggaggagaccaaguucgcccaggucguccuccaggaccucgacaagaaggagaacggccuccgcgacauccucgccguccucaccaugaagcgcgacggcucccuccacgucaccugcaccgaccaggagaccggcaagugcgaggccaucuccaucgagaucgccuccuga

SEQ ID NO: 7685 - RNA, 1530 nt, Artificial Sequence
  derived and/or modified sequence opt3 from HSP60__Homo_sapiens__AAI19691
auggccgcuaucggcgugcaccuggggugcaccagcgcaugugucgccguuuacaaggacgguagagcgggagugguagcuaacgaugccggcgacagggugacacccgcagucguggccuauuccgagaaugaagagauuguugggcucgcugcaaaacagucucggauacgcaacaucucaaauacugugaugaaggucaaacaaauucuuggacgaaguagcuccgauccucaggcccagaaguacaucgcugaaucuaaaugccuggugauugagaagaacggcaaguugcguuaugaaaucgacacgggugaggagaccaaauucguaaauccagaagauguugccagauuaauauuuucgaagaugaaagagacagcgcauucagugcuggggagcgacgcaaacgaugucgugaucacugugccguucgacuuuggagaaaagcagaaaaaugcccuaggcgaggcugccagggcagcuggcuucaacguccuccggcugauucacgagcccagugccgcgcuucuggccuacgggaucggacaagauuccccuaccgguaagucuaauauuuugguuuuuaagcucggcgggacaagccugucccugucagugauggaaguaaacaguggaaucuaucgcgugcucagcaccaauacugacgauaacauaggcggugcacauuucacagagaccuuagcucaguaccuggccucugaauuucagagauccuucaaacacgacgucagggggaaugcucgggccaugaugaagcugacgaacucagcagagguggccaaacauagcuugaguacucugggaucugcuaauuguuuucuagauucccucuaugaaggccaggacuucgacugcaacguuagccgcgcgcgauuugagcugcuuuguucgccacuguucaacaagugcauugaggcaaucagaggcuugcucgaucaaaauggguuuaccgccgacgauauuaacaaagugguccuguguggagguucuuccaggauccccaaguuacagcagcugaucaaagaccucuucccugcuguggaacuucuuaauucaauuccacccgaugagguaauaccuaucggcgccgcaauugaagccgggaucuugauaggaaaggagaaccuacugguugaagacagucucaugauugagugcagcgcucgggauauccuggugaagggcgucgacgaguccggugccucucguuucacagugcuuuuuccaagcgggacuccgcugcccgcacgcagacagcacaccuugcaagcgccuggcucaaucaguuccgucugucucgaacuguacgagagcgauggcaaaaauucugcuaaggaagagacaaaauucgcccaggugguuuuacaggaccuggauaagaaagaaaacggacuaagggacauucucgcagugcugaccaugaagcgggacgggucacuucacguaacgugcacugaucaagagacaggaaagugugaggccaucaguauugaaauagcuagcuga

SEQ ID NO: 7686 - RNA, 1530 nt, Artificial Sequence
  derived and/or modified sequence opt4 from HSP60__Homo_sapiens__AAI19691
auggccgccaucggcgugcaccugggcugcaccagcgccugcguggccguguacaaggacggcagagccggcgugguggccaacgacgccggcgacagagugacccccgccgugguggccuacagcgagaacgaggagaucgugggccuggccgccaagcagagcagaaucagaaacaucagcaacaccgugaugaaggugaagcagauccugggcagaagcagcagcgacccccaggcccagaaguacaucgccgagagcaagugccuggugaucgagaagaacggcaagcugagauacgagaucgacaccggcgaggagaccaaguucgugaaccccgaggacguggccagacugaucuucagcaagaugaaggagaccgcccacagcgugcugggcagcgacgccaacgacguggugaucaccgugcccuucgacuucggcgagaagcagaagaacgcccugggcgaggccgccagagccgccggcuucaacgugcugagacugauccacgagcccagcgccgcccugcuggccuacggcaucggccaggacagccccaccggcaagagcaacauccugguguucaagcugggcggcaccagccugagccugagcgugauggaggugaacagcggcaucuacagagugcugagcaccaacaccgacgacaacaucggcggcgcccacuucaccgagacccuggcccaguaccuggccagcgaguuccagagaagcuucaagcacgacgugagaggcaacgccagagccaugaugaagcugaccaacagcgccgagguggccaagcacagccugagcacccugggcagcgccaacugcuuccuggacagccuguacgagggccaggacuucgacugcaacgugagcagagccagauucgagcugcugugcagcccccuguucaacaagugcaucgaggccaucagaggccugcuggaccagaacggcuucaccgccgacgacaucaacaagguggugcugugcggcggcagcagcagaauccccaagcugcagcagcugaucaaggaccuguuccccgccguggagcugcugaacagcaucccccccgacgaggugauccccaucggcgccgccaucgaggccggcauccugaucggcaaggagaaccugcugguggaggacagccugaugaucgagugcagcgccagagacauccuggugaagggcguggacgagagcggcgccagcagauucaccgugcuguuccccagcggcaccccccugcccgccagaagacagcacacccugcaggcccccggcagcaucagcagcgugugccuggagcuguacgagagcgacggcaagaacagcgccaaggaggagaccaaguucgcccagguggugcugcaggaccuggacaagaaggagaacggccugagagacauccuggccgugcugaccaugaagagagacggcagccugcacgugaccugcaccgaccaggagaccggcaagugcgaggccaucagcaucgagaucgccagcuga

SEQ ID NO: 7687 - RNA, 1530 nt, Artificial Sequence
  derived and/or modified sequence opt5 from HSP60__Homo_sapiens__AAI19691
auggccgcuaucggcguccaccuggggugcaccagcgccugugucgcgguuuacaaggacggcagagcuggagugguggccaacgaugccggggaccgggucacacccgcugugguugccuauuccgagaaugaagagauugugggacucgcugccaaacagucucgcaucagaaacauuagcaauacggucaugaaggugaaacaaauccugggccgguccucuagcgauccucaggcgcagaaguacauugccgaauccaaaugccuuguuaucgagaagaacgggaagcugcgcuaugaaaucgacaccggagaggagacaaaauucgugaauccggaagaugucgcuagacucaucuuuucuaagaugaaagagaccgcccauagcgugcugggcuccgacgcuaacgauguggucauuacaguucccuucgacuuuggcgaaaagcagaaaaaugcccuuggggaggcggcccgggcugccggauucaacgugcugcgccucauucacgagccuagcgcugcccugcuggccuacggcaucgggcaagauucucccaccggaaaguccaauauucucguguuuaagcugggcgggacaagccuuucucuguccgucauggaagugaacagcggaaucuauagaguucucucuaccaauacggacgauaacauuggcggcgcucauuucaccgagacacuggcgcaguaccuugccuccgaauuucagcggagcuucaaacacgacgugcgcgggaaugcuagagccaugaugaagcugaccaacuccgccgaggucgcuaaacauucucucagcacacugggauccgccaauuguuuucuggauagccucuaugaaggccaggacuucgacugcaacgugucucgggcgcgcuuugagcugcuuuguuccccucuguucaacaagugcaucgaggcuaucagagggcuccuggaucaaaauggauuuaccgccgacgauauuaacaaaguugugcuuuguggcgggagcucucggauccccaagcugcagcagcucauuaaagaccuguucccugccgucgaacugcucaauagcaucccgcccgaugaggugauuccuaucggagcugccaucgaagcuggcauucugaucggcaaggagaaccuucuggucgaagacucccucaugauugagugcucugcccgcgauauccuggugaaggggguugacgagagcggagcguccagauucacggugcuuuuucccagcggcacaccucugcccgcccggagacagcacacccuccaagcuccggggucuauuuccagcgucugucuggaacuguacgagucugauggcaaaaauuccgccaaggaagagacaaaauucgcucaggugguucuccaggaccuggauaagaaagaaaacggacuucgcgacauccuggccgugcucaccaugaagcgggacgggagccugcacgugaccugcacagaucaagagacgggcaagugugaggcgaucuccauugaaaucgccucuuga

SEQ ID NO: 7688 - RNA, 1530 nt, Artificial Sequence
  derived and/or modified sequence opt6 from HSP60__Homo_sapiens__AAI19691
auggcagcaauaggaguacaucuagguuguacaucagcaugcguagcaguuuacaaagauggaagagcaggaguaguagcaaacgacgcaggugauagaguaacaccagcgguuguagccuauucagaaaaugaagaaauaguaggauuagcugcaaaacaaucaagaauaagaaauauaaguaacacaguaaugaaaguaaaacaaauacuaggaagaaguaguagcgacccacaagcacaaaaauauauagcagaaaguaaauguuuagucauagaaaaaaauggaaaacucagauacgaaauagauacaggagaagaaacaaaauuuguaaaucccgaagacguugcaagacuaauauucagcaaaaugaaagaaacugcucauucaguacuaggaucagaugcaaaugauguaguaauaacaguaccauuugauuuuggagaaaaacaaaaaaaugcauuaggagaagcagcaagagcagccggauuuaauguauuaagauuaauacacgaaccaucugcagcauuacuagcauaugggauuggacaagauucaccaacuggaaagagcaacauacuaguauucaaacuuggugggacuagucuaucguuaaguguaauggaagucaacagcggaauuuacagaguacuaucaacaaauacggacgacaacauagguggagcacacuuuacagaaacacuagcacaguacuuagcauccgaauuucaaagguccuucaaacaugacguaaggggaaaugcaagagccaugaugaaauuaacaaauagcgcagaaguagcaaaacauucauuaucaacauuaggaucugccaauugcuuucuggauaguuuauacgaaggacaagacuucgacugcaauguuaguagagcuagauuugaauuauuauguagcccauuauucaauaaauguauagaagcaauacgaggacuacuagaccaaaauggauucacagcagaugacauaaacaagguuguauuauguggaggaaguucacgaauaccaaaauuacaacaacuaauuaaagaccuauucccagcaguagagcuauugaauagcauaccacccgacgaaguaauaccaauuggagcagcuauagaagcaggaauauuaauaggaaaagaaaacuuauuaguagaagacagccuaaugauagaaugcagcgcuagagacauauuaguuaaaggcguugaugaaagcggagcaucuagauuuacaguacucuucccaagcggaacaccccuaccagcaagaagacaacacacauuacaagccccaggaucaauaucaaguguaugccuugaacuuuacgaaucagauggaaaaaacagugcaaaggaagagacaaaauuugcacaaguaguacuacaagaucuagacaaaaaagaaaauggccuaagagauauauuagcaguacuaacaaugaagagagacggaagccuacauguaaccugcaccgaucaagaaacaggaaaaugcgaagcaauaucaauagaaauagcaucauaa

SEQ ID NO: 7689 - protein, 679 aa, Artificial Sequence
  HSP70__Homo_sapiens__P38646
MISASRAAAARLVGAAASRGPTAARHQDSWNGLSHEAFRLVSRRDYASEAIKGAVVGIDLGTTNSCVAVMEGKQAKVLENAEGARTTPSVVAFTADGERLVGMPAKRQAVTNPNNTFYATKRLIGRRYDDPEVQKDIKNVPFKIVRASNGDAWVEAHGKLYSPSQIGAFVLMKMKETAENYLGHTAKNAVITVPAYFNDSQRQATKDAGQISGLNVLRVINEPTAAALAYGLDKSEDKVIAVYDLGGGTFDISILEIQKGVFEVKSTNGDTFLGGEDFDQALLRHIVKEFKRETGVDLTKDNMALQRVREAAEKAKCELSSSVQTDINLPYLTMDSSGPKHLNMKLTRAQFEGIVTDLIRRTIAPCQKAMQDAEVSKSDIGEVILVGGMTRMPKVQQTVQDLFGRAPSKAVNPDEAVAIGAAIQGGVLAGDVTDVLLLDVTPLSLGIETLGGVFTKLINRNTTIPTKKSQVFSTAADGQTQVEIKVCQGEREMAGDNKLLGQFTLIGIPPAPRGVPQIEVTFDIDANGIVHVSAKDKGTGREQQIVIQSSGGLSKDDIENMVKNAEKYAEEDRRKKERVEAVNMAEGIIHDTETKMEEFKDQLPADECNKLKEEISKMRELLARKDSETGENIRQAASSLQQASLKLFEMAYKKMASEREGSGSSGTGEQKEDQKEEKQ

SEQ ID NO: 7690 - RNA, 2040 nt, Artificial Sequence
  HSP70__Homo_sapiens__ABF50973
augauaagugccagccgagcugcagcagcccgucucgugggcgccgcagccucccggggcccuacggccgcccgccaccaggauagcuggaauggccuuagucaugaggcuuuuagacuuguuucaaggcgggauuaugcaucagaagcaaucaagggagcaguuguugguauugauuuggguacuaccaacuccugcguggcaguuauggaagguaaacaagcaaaggugcuggagaaugccgaaggugccagaaccaccccuucaguuguggccuuuacagcagauggugagcgacuuguuggaaugccggccaagcgacaggcugucaccaacccaaacaauacauuuuaugcuaccaagcgucucauuggccggcgauaugaugauccugaaguacagaaagacauuaaaaauguucccuuuaaaauuguccgugccuccaauggugaugccuggguugaggcucaugggaaauuguauucuccgagucagauuggagcauuuguguugaugaagaugaaagagacugcagaaaauuacuuggggcacacagcaaaaaaugcugugaucacagucccagcuuauuucaaugacucgcagagacaggccacuaaagaugcuggccagauaucuggacugaaugugcuucgggugauuaaugagcccacagcugcugcucuugccuauggucuagacaaaucagaagacaaagucauugcuguauaugauuuaggugguggaacuuuugauauuucuauccuggaaauucagaaaggaguauuugaggugaaauccacaaauggggauaccuucuuagguggggaagacuuugaccaggccuugcuacggcacauugugaaggaguucaagagagagacagggguugauuugacuaaagacaacauggcacuucagaggguacgggaagcugcugaaaaggcuaaaugugaacucuccucaucugugcagacugacaucaauuugcccuaucuuacaauggauucuucuggacccaagcauuugaauaugaaguugacccgugcucaauuugaagggauugucacugaucuaaucagaaggacuaucgcuccaugccaaaaagcuaugcaagaugcagaagucagcaagagugacauaggagaagugauucuuguggguggcaugacuaggaugcccaagguucagcagacuguacaggaucuuuuuggcagagccccaaguaaagcugucaauccugaugaggcuguggccauuggagcugccauucagggagguguguuggccggcgaugucacggaugugcugcuccuugaugucacuccccugucucuggguauugaaacucuaggaggugucuuuaccaaacuuauuaauaggaauaccacuauuccaaccaagaagagccagguauucucuacugccgcugauggucaaacgcaaguggaaauuaaagugugucagggugaaagagagauggcuggagacaacaaacuccuuggacaguuuacuuugauuggaauuccaccagccccucguggaguuccucagauugaaguuacauuugacauugaugccaaugggauaguacauguuucugcuaaagauaaaggcacaggacgugagcagcagauuguaauccagucuucugguggauuaagcaaagaugauauugaaaauaugguuaaaaaugcagagaaauaugcugaagaagaccggcgaaagaaggaacgaguugaagcaguuaauauggcugaaggaaucauucacgacacagaaaccaagauggaagaauucaaggaccaauuaccugcugaugagugcaacaagcugaaagaagagauuuccaaaaugagggagcuccuggcuagaaaagacagcgaaacaggagaaaauauuagacaggcagcauccucucuucagcaggcaucauugaagcuguucgaaauggcauacaaaaagauggcaucugagcgagaaggcucuggaaguucuggcacuggggaacaaaaggaagaucaaaaggaggaaaaacaguaa

SEQ ID NO: 7691 - RNA, 2040 nt, Artificial Sequence
  derived and/or modified sequence opt1 from HSP70__Homo_sapiens__ABF50973
augaucagcgccucccgcgccgcggccgcccggcuggugggcgccgccgcgagccgcgggcccaccgccgcccggcaccaggacuccuggaacggccucagccacgaggccuuccgccuggucucccggcgcgacuacgcgagcgaggccaucaagggggccguggugggcaucgaccuggggaccacgaacuccugcgucgccgugauggagggcaagcaggccaaggugcucgagaacgcggagggcgcccggaccaccccgagcgucguggccuucaccgccgacggggagcgccuggugggcaugcccgccaagcggcaggcggucacgaaccccaacaacaccuucuacgccaccaagcgccugaucgggcggcgcuacgacgaccccgaggugcagaaggacaucaagaacgugccguucaagaucguccgggccuccaacggcgacgccuggguggaggcccacgggaagcucuacagccccucccagaucggcgcguucgugcugaugaagaugaaggagaccgccgagaacuaccugggccacacggccaagaacgccgucaucaccgugcccgccuacuucaacgacagccagcgccaggcgaccaaggacgccgggcagaucuccggccucaacgugcugcgggucaucaacgagcccaccgccgccgcgcuggccuacgggcucgacaagagcgaggacaaggugaucgccguguacgaccugggcggcgggacguucgacaucuccauccuggagauccagaagggcgucuucgaggucaagagcaccaacggggacaccuuccucggcggggaggacuucgaccaggcccugcugcgccacaucgugaaggaguucaagcgggagaccggcguggaccucacgaaggacaacauggcccugcagcgcgugcgggaggcggccgagaaggccaagugcgagcuguccagcuccguccagaccgacaucaaccucccguaccugaccauggacagcagcggccccaagcaccugaacaugaagcucacccgcgcccaguucgaggggaucgugacggaccugauccggcgcaccaucgcccccugccagaaggcgaugcaggacgccgagguguccaagagcgacaucggcgaggucauccuggucgggggcaugacccgcaugcccaaggugcagcagaccgugcaggaccucuucgggcgggccccguccaaggccgugaaccccgacgaggccguggcgaucggcgccgccauccagggcgggguccuggccggcgacgugacggacgugcugcuccuggacgucacgccccugagccucgggaucgagacccugggcgggguguucaccaagcugaucaaccgcaacaccaccauccccaccaagaagucccagguguucagcaccgcggccgacggccagacgcaggucgagaucaaggugugccagggcgagcgggagauggccggggacaacaagcuccugggccaguucacccugaucgggaucccgcccgcgccccgcggcgugccccagaucgaggucaccuucgacaucgacgccaacggcaucgugcacguguccgccaaggacaaggggaccggccgggagcagcagaucgucauccagagcuccgggggccucagcaaggacgacaucgagaacauggugaagaacgccgagaaguacgccgaggaggaccgccggaagaaggagcgcguggaggccgucaacauggccgaggggaucauccacgacacggagaccaagauggaggaguucaaggaccagcugccggcggacgagugcaacaagcugaaggaggagaucuccaagaugcgggagcuccuggcccgcaaggacagcgagaccggcgagaacauccggcaggccgccuccagccugcagcaggccucccucaagcuguucgagauggcguacaagaagauggccagcgagcgcgagggcuccgggagcuccggcaccggggagcagaaggaggaccagaaggaggagaagcaguga

SEQ ID NO: 7692 - RNA, 2040 nt, Artificial Sequence
  derived and/or modified sequence opt2 from HSP70__Homo_sapiens__ABF50973
augaucuccgccucccgcgccgccgccgcccgccucgucggcgccgccgccucccgcggccccaccgccgcccgccaccaggacuccuggaacggccucucccacgaggccuuccgccucgucucccgccgcgacuacgccuccgaggccaucaagggcgccgucgucggcaucgaccucggcaccaccaacuccugcgucgccgucauggagggcaagcaggccaagguccucgagaacgccgagggcgcccgcaccacccccuccgucgucgccuucaccgccgacggcgagcgccucgucggcaugcccgccaagcgccaggccgucaccaaccccaacaacaccuucuacgccaccaagcgccucaucggccgccgcuacgacgaccccgagguccagaaggacaucaagaacguccccuucaagaucguccgcgccuccaacggcgacgccugggucgaggcccacggcaagcucuacucccccucccagaucggcgccuucguccucaugaagaugaaggagaccgccgagaacuaccucggccacaccgccaagaacgccgucaucaccguccccgccuacuucaacgacucccagcgccaggccaccaaggacgccggccagaucuccggccucaacguccuccgcgucaucaacgagcccaccgccgccgcccucgccuacggccucgacaaguccgaggacaaggucaucgccgucuacgaccucggcggcggcaccuucgacaucuccauccucgagauccagaagggcgucuucgaggucaaguccaccaacggcgacaccuuccucggcggcgaggacuucgaccaggcccuccuccgccacaucgucaaggaguucaagcgcgagaccggcgucgaccucaccaaggacaacauggcccuccagcgcguccgcgaggccgccgagaaggccaagugcgagcucuccuccuccguccagaccgacaucaaccuccccuaccucaccauggacuccuccggccccaagcaccucaacaugaagcucacccgcgcccaguucgagggcaucgucaccgaccucauccgccgcaccaucgcccccugccagaaggccaugcaggacgccgaggucuccaaguccgacaucggcgaggucauccucgucggcggcaugacccgcaugcccaagguccagcagaccguccaggaccucuucggccgcgcccccuccaaggccgucaaccccgacgaggccgucgccaucggcgccgccauccagggcggcguccucgccggcgacgucaccgacguccuccuccucgacgucaccccccucucccucggcaucgagacccucggcggcgucuucaccaagcucaucaaccgcaacaccaccauccccaccaagaagucccaggucuucuccaccgccgccgacggccagacccaggucgagaucaaggucugccagggcgagcgcgagauggccggcgacaacaagcuccucggccaguucacccucaucggcaucccccccgccccccgcggcgucccccagaucgaggucaccuucgacaucgacgccaacggcaucguccacgucuccgccaaggacaagggcaccggccgcgagcagcagaucgucauccaguccuccggcggccucuccaaggacgacaucgagaacauggucaagaacgccgagaaguacgccgaggaggaccgccgcaagaaggagcgcgucgaggccgucaacauggccgagggcaucauccacgacaccgagaccaagauggaggaguucaaggaccagcuccccgccgacgagugcaacaagcucaaggaggagaucuccaagaugcgcgagcuccucgcccgcaaggacuccgagaccggcgagaacauccgccaggccgccuccucccuccagcaggccucccucaagcucuucgagauggccuacaagaagauggccuccgagcgcgagggcuccggcuccuccggcaccggcgagcagaaggaggaccagaaggaggagaagcaguga

SEQ ID NO: 7693 - RNA, 2040 nt, Artificial Sequence
  derived and/or modified sequence opt3 from HSP70__Homo_sapiens__ABF50973
augaucagcgccuccagagcugcagccgcgaggcuggugggcgcugccgcaucucgggggcccaccgccgcucgccaccaggacucauggaacggacucagucaugaggcauuccgacuugucagccguagagauuacgccuccgaagcuauuaagggugccguugugggcauagaccuggggacaacuaauucuugcguagcggugauggagggaaaacaagcaaaggucuuggaaaacgccgagggcgcuaggacgaccccuucggugguugccuuuacagcagauggugaacgguuaguggggaugccagcuaaacgccaggccgucacuaauccgaacaauaccuucuaugcgacaaagagacugaucggaaggcgguacgacgaucccgaggugcagaaagacauuaagaacguaccuuuuaagaucguucgcgccucaaauggcgaugcauggguggaggcucacggcaaacuauauagcccaagucagauuggggccuucguccucaugaagaugaaagaaaccgcugagaacuaccugggacauacugccaagaaugcagugaucacagugcccgccuauuuuaacgacucccaacgacaggcuaccaaagaugcgggucagauaucuggccuuaauguccugagaguuaucaacgaaccuacggcagccgcuuuggccuacgggcucgacaagagcgaggauaaggugauugcaguauaugaccugggaggcgguacuuucgauaucuccauucuggagauccagaaagggguguuugaagucaagucaaccaauggagacacauuccucggcggcgaggacuuugaucaagccuuacugaggcacauagugaaagaguucaagcgggaaacugggguugaccuuaccaaagauaacauggcuuugcagcgugugcgcgaagccgcagagaaggcgaaaugugagcugaguagcucuguccagacagacauuaaucuaccauaccucaccauggauuccucaggacccaagcaucugaacaugaaguugacgagagcucaguuugaagguaucgugacugaccugauuaggcggacaaucgccccuugccaaaaagcaaugcaggaugccgagguaagcaagagugacaucggcgaaguuauuuuggucgggggaaugacccgaaugccaaaagugcagcaaacugugcaggaucucuucggccgcgcuccgucuaaggccgucaaccccgacgaggcaguggcuauaggugccgcgauccaagggggcguucuggccggagaugugacagacguauuacugcucgacgucaccccucuuucccugggcauugaaacgcuugggggaguguuuaccaaacuaaucaauagaaacacaacuauaccaaccaaaaagagccagguuuucucgacagcugcagauggucagacucagguggagauuaaggucugucagggcgagagggaaauggccggggacaauaagcugcucggacaguucacccugaucggcauucccccugcuccacggggugugccccaaaucgagguaacauuugauaucgacgccaacgggauugugcacguuucugcaaaagauaagggcaccggacgcgaacagcagauagucauccaguccucaggcgggcuuaguaaagacgauauugagaauauggugaagaacgcggaaaaguacgccgaggaggacagaaggaaaaaggaacguguggaggcugucaauauggccgaaggaaucauccacgauacugagacgaaaauggaggaguucaaggaccaacugccggcagaugaaugcaacaaauugaaggaagagauuagcaagaugcgggaacuccuggcucgaaaagacuccgagacaggugagaauauaagacaggccgcaucuagcuuacagcaggccucacugaagcuauuugaaauggcuuauaaaaagauggcgagugagagggaaggcuccgggagcucuggaaccggcgagcaaaaagaagaucagaaggaggagaaacaguga

SEQ ID NO: 7694 - RNA, 2040 nt, Artificial Sequence
  derived and/or modified sequence opt4 from HSP70__Homo_sapiens__ABF50973
augaucagcgccagcagagccgccgccgccagacuggugggcgccgccgccagcagaggccccaccgccgccagacaccaggacagcuggaacggccugagccacgaggccuucagacuggugagcagaagagacuacgccagcgaggccaucaagggcgccguggugggcaucgaccugggcaccaccaacagcugcguggccgugauggagggcaagcaggccaaggugcuggagaacgccgagggcgccagaaccacccccagcgugguggccuucaccgccgacggcgagagacuggugggcaugcccgccaagagacaggccgugaccaaccccaacaacaccuucuacgccaccaagagacugaucggcagaagauacgacgaccccgaggugcagaaggacaucaagaacgugcccuucaagaucgugagagccagcaacggcgacgccuggguggaggcccacggcaagcuguacagccccagccagaucggcgccuucgugcugaugaagaugaaggagaccgccgagaacuaccugggccacaccgccaagaacgccgugaucaccgugcccgccuacuucaacgacagccagagacaggccaccaaggacgccggccagaucagcggccugaacgugcugagagugaucaacgagcccaccgccgccgcccuggccuacggccuggacaagagcgaggacaaggugaucgccguguacgaccugggcggcggcaccuucgacaucagcauccuggagauccagaagggcguguucgaggugaagagcaccaacggcgacaccuuccugggcggcgaggacuucgaccaggcccugcugagacacaucgugaaggaguucaagagagagaccggcguggaccugaccaaggacaacauggcccugcagagagugagagaggccgccgagaaggccaagugcgagcugagcagcagcgugcagaccgacaucaaccugcccuaccugaccauggacagcagcggccccaagcaccugaacaugaagcugaccagagcccaguucgagggcaucgugaccgaccugaucagaagaaccaucgcccccugccagaaggccaugcaggacgccgaggugagcaagagcgacaucggcgaggugauccuggugggcggcaugaccagaaugcccaaggugcagcagaccgugcaggaccuguucggcagagcccccagcaaggccgugaaccccgacgaggccguggccaucggcgccgccauccagggcggcgugcuggccggcgacgugaccgacgugcugcugcuggacgugaccccccugagccugggcaucgagacccugggcggcguguucaccaagcugaucaacagaaacaccaccauccccaccaagaagagccagguguucagcaccgccgccgacggccagacccagguggagaucaaggugugccagggcgagagagagauggccggcgacaacaagcugcugggccaguucacccugaucggcaucccccccgcccccagaggcgugccccagaucgaggugaccuucgacaucgacgccaacggcaucgugcacgugagcgccaaggacaagggcaccggcagagagcagcagaucgugauccagagcagcggcggccugagcaaggacgacaucgagaacauggugaagaacgccgagaaguacgccgaggaggacagaagaaagaaggagagaguggaggccgugaacauggccgagggcaucauccacgacaccgagaccaagauggaggaguucaaggaccagcugcccgccgacgagugcaacaagcugaaggaggagaucagcaagaugagagagcugcuggccagaaaggacagcgagaccggcgagaacaucagacaggccgccagcagccugcagcaggccagccugaagcuguucgagauggccuacaagaagauggccagcgagagagagggcagcggcagcagcggcaccggcgagcagaaggaggaccagaaggaggagaagcaguga

SEQ ID NO: 7695 - RNA, 2040 nt, Artificial Sequence
  derived and/or modified sequence opt5 from HSP70__Homo_sapiens__ABF50973
augaucagcgccuccagagcugccgcggcucggcuggugggcgccgccgcuucucgcgggcccaccgccgcuagacaccaggacagcuggaacggacucucccaugaggccuuccggcuggucucucgcagagauuacgcgagcgaagccauuaagggcgcuguuguggggaucgaccuuggaacaacgaauagcugcguggccgucauggagggcaaacaagcuaaggugcuggaaaacgccgagggggcgcggaccacaccuucuguuguggccuuuaccgcugauggagaacgccucgucggcaugccggccaaaagacaggcugugacaaaucccaacaauaccuucuaugccacaaagcggcugauuggccgcagauacgacgauccugagguucagaaagacaucaagaacgugcccuuuaagauuguccgggccagcaauggggaugcuuggguggaggcgcacggaaaacuuuauuccccuagccagaucggcgccuucgugcugaugaagaugaaagaaaccgcugagaacuaccucgggcauacggccaagaaugccgucaucaccguucccgcuuauuuuaacgacucucaacgccaggccacaaaagaugcgggacagauuuccggccugaaugugcugagagugaucaacgaaccuaccgcugccgcccucgcuuacgggcuggacaagagcgaggauaaggucauugccguguaugaccuuggaggcggcacauucgauaucucuauucuggagauccagaaagggguuuuugaagugaaguccaccaauggagacacguuccucggcggggaggacuuugaucaagcucugcuucggcacauugucaaagaguucaagcgcgaaacaggaguggaccugaccaaagauaacauggcccuccagagaguucgggaagcggccgagaaggcuaaaugugagcuguccucuuccgugcagacagacaucaaucugccguaccucaccauggauagcuccggccccaagcaucugaacaugaaacuuaccagagcccaguuugaagggaucgucacagaccugauucgccggacgaucgcuccuugccaaaaggccaugcaggaugcggaggugucuaagagcgacauuggagaagucauccucgugggcggcaugaccagaaugcccaaaguucagcaaacagugcaggaucuguucgggcgcgccccuuccaaggcugucaaccccgacgaggccguggcuauuggagccgccauccagggcgggguucuugcuggagaugugaccgacguccugcuccuggacgugacaccgcugagccucggcaucgaaacccugggcggcguguuuacgaaacuuauuaaucggaacacaaccaucccuaccaagaagucucagguuuucuccacagcggccgauggacaaacccaggucgagauuaaagugugucagggcgagagagaaauggcuggggacaauaagcugcucggacaguucacacugaucggcauucccccugcuccccgcggggugccccaaaucgaggucacguuugauaucgacgccaacggaauugugcacguuagcgccaaagauaagggcaccgggcgggaacagcagaucgugauucagucuagcggcggacuuuccaaagacgauaucgagaauauggucaagaacgccgaaaaguacgcggaggaggacagacgcaaaaaggaacggguggaggcuguuaauauggccgaaggcauuauccacgauacagagaccaaaauggaggaguucaaggaccaacugccugccgaugaaugcaacaaacucaaggaagagauuucuaagaugagagaacugcuggcucgcaaagacagcgagacaggggagaauauccggcaggccgcguccagccuccagcaggcuucucugaaacuuuuugaaauggccuauaagaagauggccuccgagagagaaggaagcgggucuuccgggaccggagagcaaaaagaagaucagaaggaggagaaacaguga

SEQ ID NO: 7696 - RNA, 2040 nt, Artificial Sequence
  derived and/or modified sequence opt6 from HSP70__Homo_sapiens__ABF50973
augauauccgcaagcagagcagcagcagcaagauuaguaggugcugcagcaucaagaggaccaacagcggcaaggcaucaagacaguuggaacggauuaucacaugaggcauucagauuaguaagcagaagagauuaugcaagcgaagcuauaaaaggagcaguaguagggauagaucuaggaacaacaaauagcuguguagcggugauggaaggaaaacaagcaaaaguauuagaaaacgcugaaggagcaagaacaacuccaaguguaguagcauucacagcagauggcgaaagauuaguaggaaugccggcaaaaagacaagcagugacaaauccaaauaacacauuuuaugcaacaaaaagacuaauugggaggagguaugaugauccagaaguacaaaaagauauaaaaaaugugccguuuaaaauaguaagagccaguaacggagacgcuuggguugaagcucacggaaaauuauauucuccaucacaaauaggggcauuuguacucaugaaaaugaaagaaacugcggaaaacuaucugggccauacggcaaaaaaugcaguuauaacaguaccagcuuacuucaaugauagccaaagacaagcaacaaaagaugcaggucaaauaagugguuuaaauguacuucguguaauaaaugaacccacagcggcagcacuagcauacggauuagauaaaucagaagacaaaguaauagccguuuacgaucugggagggggaacauuugauauaagcauccuagaaauucaaaaagggguauucgaaguaaaaaguacaaauggagacacguuccucggaggugaagauuucgaucaagcacuucuaaggcauauaguaaaagaauuuaaaagagaaaccgguguugaccuaacaaaagacaauauggcguugcaaagaguaagagaggcugcagaaaaagcaaaaugcgaacuaucaagcaguguacaaacagauauaaaucugccguauuuaacaauggauucaucaggaccgaaacauuuaaauaugaaacuuacaagagcccaauuugaaggaauagucacggacuuaauaagaaggacgauagcaccaugucaaaaagcaaugcaagaugcagaaguaaguaaaagcgacauaggagaagucauuuugguaggggguaugacuagaaugccaaaaguccaacaaacaguccaagauuuauucggaagagcgccaagcaaagcuguaaauccagaugaagcaguagcgauaggagcagcaauacaaggaggaguauuggcuggagauguuacugacguauuauuauuggacgugacaccauuaaguuuaggaauagaaacauuaggagggguauuuacaaaauuaauaaauagaaauacaaccauucccacaaaaaaaucacaaguauucaguacagcagcugauggucaaacacaaguugaaauaaaaguaugucaaggcgaaagagaaauggcaggugauaauaaauuauuaggacaauucacacuaauagguauaccaccugcuccuagaggaguuccucaaauugaaguuacuuuugacauagacgcaaacggaauaguacauguaagugcaaaagacaaaggaacaggaagagaacaacagauaguaauacaaaguagcggaggauuaucaaaagacgauauagaaaauauggucaaaaaugcugaaaaauaugcagaggaagaucgacggaaaaaagaaaggguagaagcggugaauauggcugaaggaauaauacaugauacggagacaaaaauggaggaauuuaaagaucaauuaccggcugacgaaugcaauaaauuaaaagaagaaauaagcaaaaugcgagaauugcuggcacgaaaagauagcgaaacaggcgaaaauauuagacaagcagcaaguagcuuacaacaagcaucuuuaaaacuauuugaaauggcguauaaaaagauggcaagugaaagagaaggaaguggaagcucaggaacgggagaacaaaaagaagaucaaaaagaagaaaaacaauaa

SEQ ID NO: 7697 - protein, 732 aa, Artificial Sequence
  HSP90__Homo_sapiens__P07900
MPEETQTQDQPMEEEEVETFAFQAEIAQLMSLIINTFYSNKEIFLRELISNSSDALDKIRYESLTDPSKLDSGKELHINLIPNKQDRTLTIVDTGIGMTKADLINNLGTIAKSGTKAFMEALQAGADISMIGQFGVGFYSAYLVAEKVTVITKHNDDEQYAWESSAGGSFTVRTDTGEPMGRGTKVILHLKEDQTEYLEERRIKEIVKKHSQFIGYPITLFVEKERDKEVSDDEAEEKEDKEEEKEKEEKESEDKPEIEDVGSDEEEEKKDGDKKKKKKIKEKYIDQEELNKTKPIWTRNPDDITNEEYGEFYKSLTNDWEDHLAVKHFSVEGQLEFRALLFVPRRAPFDLFENRKKKNNIKLYVRRVFIMDNCEELIPEYLNFIRGVVDSEDLPLNISREMLQQSKILKVIRKNLVKKCLELFTELAEDKENYKKFYEQFSKNIKLGIHEDSQNRKKLSELLRYYTSASGDEMVSLKDYCTRMKENQKHIYYITGETKDQVANSAFVERLRKHGLEVIYMIEPIDEYCVQQLKEFEGKTLVSVTKEGLELPEDEEEKKKQEEKKTKFENLCKIMKDILEKKVEKVVVSNRLVTSPCCIVTSTYGWTANMERIMKAQALRDNSTMGYMAAKKHLEINPDHSIIETLRQKAEADKNDKSVKDLVILLYETALLSSGFSLEDPQTHANRIYRMIKLGLGIDEDDPTADDTSAAVTEEMPPLEGDDDTSRMEEVD

SEQ ID NO: 7698 - RNA, 2199 nt, Artificial Sequence
  HSP90__Homo_sapiens__AAA63194
augccugaggaaacccagacccaagaccaaccgauggaggaggaggagguugagacguucgccuuucaggcagaaauugcccaguugaugucauugaucaucaauacuuucuacucgaacaaagagaucuuucugagagagcucauuucaaauucaucagaugcauuggacaaaauccgguaugaaagcuugacagaucccaguaaauuagacucugggaaagagcugcauauuaaccuuauaccgaacaaacaagaucgaacucucacuauuguggauacuggaauuggaaugaccaaggcugacuugaucaauaaccuugguacuaucgccaagucugggaccaaagcguucauggaagcuuugcaggcuggugcagauaucucuaugauuggccaguucgguguugguuuuuauucugcuuauuugguugcugagaaaguaacugugaucaccaaacauaacgaugaugagcaguacgcuugggaguccucagcagggggaucauucacagugaggacagacacaggugaaccuaugggucguggaacaaaaguuauccuacaccugaaagaagaccaaacugaguacuuggaggaacgaagaauaaaggagauugugaagaaacauucucaguuuauuggauaucccauuacucuuuuuguggagaaggaacgugauaaagaaguaagcgaugaugaggcugaagaaaaggaagacaaagaagaagaaaaagaaaaagaagagaaagagucggaagacaaaccugaaauugaagauguugguucugaugaggaagaagaaaagaaggauggugacaagaagaagaagaagaagauuaaggaaaaguacaucgaucaagaagagcucaacaaaacaaagcccaucuggaccagaaaucccgacgauauuacuaaugaggaguacggagaauucuauaagagcuugaccaaugacugggaagaucacuuggcagugaagcauuuuucaguugaaggacaguuggaauucagagcccuucuauuugucccacgacgugcuccuuuugaucuguuugaaaacagaaagaaaaagaacaacaucaaauuguauguacgcagaguuuucaucauggauaacugugaggagcuaaucccugaauaucugaacuucauuagaggggugguagacucggaggaucucccucuaaacauaucccgugagauguugcaacaaagcaaaauuuugaaaguuaucaggaagaauuuggucaaaaaaugcuuagaacucuuuacugaacuggcggaagauaaagagaacuacaagaaauucuaugagcaguucucuaaaaacauaaagcuuggaauacacgaagacucucaaaaucggaagaagcuuucagagcuguuaagguacuacacaucugccucuggugaugagaugguuucucucaaggacuacugcaccagaaugaaggagaaccagaaacauaucuauuauaucacaggugagaccaaggaccagguagcuaacucagccuuuguggaacgucuucggaaacauggcuuagaagugaucuauaugauugagcccauugaugaguacuguguccaacagcugaaggaauuugaggggaagacuuuagugucagucaccaaagaaggccuggaacuuccagaggaugaagaagagaaaaagaagcaggaagagaaaaaaacaaaguuugagaaccucugcaaaaucaugaaagacauauuggagaaaaaaguugaaaaggugguugugucaaaccgauuggugacaucuccaugcuguauugucacaagcacauauggcuggacagcaaacauggagagaaucaugaaagcucaagcccuaagagacaacucaacaauggguuacauggcagcaaagaaacaccuggagauaaacccugaccauuccauuauugagaccuuaaggcaaaaggcagaggcugauaagaacgacaagucugugaaggaucuggucaucuugcuuuaugaaacugcgcuccugucuucuggcuucagucuggaagauccccagacacaugcuaacaggaucuacaggaugaucaaacuuggucuggguauugaugaagaugacccuacugcugaugauaccagugcugcuguaacugaagaaaugccaccccuugaaggagaugacgacacaucacgcauggaagaaguagacuaa

SEQ ID NO: 7699 - RNA, 2199 nt, Artificial Sequence
  derived and/or modified sequence opt1 from HSP90__Homo_sapiens__AAA63194
augcccgaggagacccagacccaggaccagcccauggaggaggaggagguggagacguucgccuuccaggccgagaucgcgcagcugaugagccucaucaucaacaccuucuacuccaacaaggagaucuuccugcgcgagcugaucagcaacuccagcgacgcccucgacaagauccgguacgagucccugaccgaccccagcaagcuggacuccggcaaggagcuccacaucaaccugauccccaacaagcaggaccgcacccugacgaucgucgacaccgggaucggcaugaccaaggccgaccucaucaacaaccuggggaccaucgccaagagcggcacgaaggccuucauggaggcgcugcaggccggggccgacaucuccaugaucggccaguucggcgugggguucuacagcgccuaccucguggcggagaaggucaccgugaucaccaagcacaacgacgacgagcaguacgccugggaguccagcgccggcggguccuucaccgugcggacggacaccggcgagcccauggggcgcggcaccaaggucauccugcaccugaaggaggaccagaccgaguaccucgaggagcggcgcaucaaggagaucgugaagaagcacagccaguucaucggcuacccgaucacgcuguucguggagaaggagcgggacaaggaggucuccgacgacgaggccgaggagaaggaggacaaggaggaggagaaggagaaggaggagaaggagagcgaggacaagcccgagaucgaggacgugggguccgacgaggaggaggagaagaaggacggcgacaagaagaagaagaagaagaucaaggagaaguacaucgaccaggaggagcugaacaagaccaagcccaucuggacccgcaaccccgacgacaucaccaacgaggaguacggggaguucuacaagagccucacgaacgacugggaggaccaccuggccgugaagcacuucuccgucgagggccagcuggaguuccgggcgcuccuguucgugccgcgccgggcccccuucgaccuguucgagaaccgcaagaagaagaacaacaucaagcucuacgugcggcgcgucuucaucauggacaacugcgaggagcugauccccgaguaccugaacuucauccggggcgugguggacagcgaggaccucccccugaacaucagccgcgagaugcugcagcaguccaagauccucaaggucauccggaagaaccuggugaagaagugccuggagcuguucaccgagcucgccgaggacaaggagaacuacaagaaguucuacgagcaguucagcaagaacaucaagcuggggauccacgaggacucccagaaccgcaagaagcucagcgagcugcugcgguacuacaccuccgccagcggcgacgagauggugucccucaaggacuacugcacccgcaugaaggagaaccagaagcacaucuacuacaucacgggggagaccaaggaccaggucgccaacagcgcguucguggagcggcugcgcaagcacggccuggaggugaucuacaugaucgagccgaucgacgaguacugcguccagcagcucaaggaguucgaggggaagacccugguguccgucaccaaggagggccuggagcuccccgaggacgaggaggagaagaagaagcaggaggagaagaagacgaaguucgagaaccugugcaagaucaugaaggacauccuggagaagaagguggagaagguggucgugagcaaccgccucgugaccucccccugcugcaucgucaccagcaccuacggcuggacggccaacauggagcggaucaugaaggcccaggcccugcgcgacaacuccaccaugggguacauggccgcgaagaagcaccuggagaucaaccccgaccacagcaucaucgagacccugcggcagaaggccgaggccgacaagaacgacaaguccgugaaggaccucgugauccugcuguacgagaccgcccuccugagcuccggcuucagccuggaggacccgcagacgcacgccaaccgcaucuaccggaugaucaagcucgggcugggcaucgacgaggacgaccccaccgcggacgacaccuccgccgccgucaccgaggagaugccgccccuggagggggacgacgacaccagccgcauggaggagguggacuga

SEQ ID NO: 7700 - RNA, 2199 nt, Artificial Sequence
  derived and/or modified sequence opt2 from HSP90__Homo_sapiens__AAA63194
augcccgaggagacccagacccaggaccagcccauggaggaggaggaggucgagaccuucgccuuccaggccgagaucgcccagcucaugucccucaucaucaacaccuucuacuccaacaaggagaucuuccuccgcgagcucaucuccaacuccuccgacgcccucgacaagauccgcuacgagucccucaccgaccccuccaagcucgacuccggcaaggagcuccacaucaaccucauccccaacaagcaggaccgcacccucaccaucgucgacaccggcaucggcaugaccaaggccgaccucaucaacaaccucggcaccaucgccaaguccggcaccaaggccuucauggaggcccuccaggccggcgccgacaucuccaugaucggccaguucggcgucggcuucuacuccgccuaccucgucgccgagaaggucaccgucaucaccaagcacaacgacgacgagcaguacgccugggaguccuccgccggcggcuccuucaccguccgcaccgacaccggcgagcccaugggccgcggcaccaaggucauccuccaccucaaggaggaccagaccgaguaccucgaggagcgccgcaucaaggagaucgucaagaagcacucccaguucaucggcuaccccaucacccucuucgucgagaaggagcgcgacaaggaggucuccgacgacgaggccgaggagaaggaggacaaggaggaggagaaggagaaggaggagaaggaguccgaggacaagcccgagaucgaggacgucggcuccgacgaggaggaggagaagaaggacggcgacaagaagaagaagaagaagaucaaggagaaguacaucgaccaggaggagcucaacaagaccaagcccaucuggacccgcaaccccgacgacaucaccaacgaggaguacggcgaguucuacaagucccucaccaacgacugggaggaccaccucgccgucaagcacuucuccgucgagggccagcucgaguuccgcgcccuccucuucgucccccgccgcgcccccuucgaccucuucgagaaccgcaagaagaagaacaacaucaagcucuacguccgccgcgucuucaucauggacaacugcgaggagcucauccccgaguaccucaacuucauccgcggcgucgucgacuccgaggaccucccccucaacaucucccgcgagaugcuccagcaguccaagauccucaaggucauccgcaagaaccucgucaagaagugccucgagcucuucaccgagcucgccgaggacaaggagaacuacaagaaguucuacgagcaguucuccaagaacaucaagcucggcauccacgaggacucccagaaccgcaagaagcucuccgagcuccuccgcuacuacaccuccgccuccggcgacgagauggucucccucaaggacuacugcacccgcaugaaggagaaccagaagcacaucuacuacaucaccggcgagaccaaggaccaggucgccaacuccgccuucgucgagcgccuccgcaagcacggccucgaggucaucuacaugaucgagcccaucgacgaguacugcguccagcagcucaaggaguucgagggcaagacccucgucuccgucaccaaggagggccucgagcuccccgaggacgaggaggagaagaagaagcaggaggagaagaagaccaaguucgagaaccucugcaagaucaugaaggacauccucgagaagaaggucgagaaggucgucgucuccaaccgccucgucaccucccccugcugcaucgucaccuccaccuacggcuggaccgccaacauggagcgcaucaugaaggcccaggcccuccgcgacaacuccaccaugggcuacauggccgccaagaagcaccucgagaucaaccccgaccacuccaucaucgagacccuccgccagaaggccgaggccgacaagaacgacaaguccgucaaggaccucgucauccuccucuacgagaccgcccuccucuccuccggcuucucccucgaggacccccagacccacgccaaccgcaucuaccgcaugaucaagcucggccucggcaucgacgaggacgaccccaccgccgacgacaccuccgccgccgucaccgaggagaugcccccccucgagggcgacgacgacaccucccgcauggaggaggucgacuga

SEQ ID NO: 7701 - RNA, 2199 nt, Artificial Sequence
  derived and/or modified sequence opt3 from HSP90__Homo_sapiens__AAA63194
augcccgaggaaacccagacacaagaccagccuauggaggaagaggaaguggagacuuucgccuuucaggcugagaucgcacagcugaugagccucauuauaaacacguucuacuccaauaaggaaaucuuucuuagagagcugauuucuaacucaagugaugccuuggacaaaaucagguaugagagcuuaaccgauccauccaagcuggacucuggcaaagagcuacacauuaaucucaucccgaacaagcaagaucggacacugacuauagucgacaccgggaucggaaugacaaaagcggaucuuauuaauaaccuggguaccaucgcuaagucgggcacuaaggccuucauggaggcauugcaggccggggcugacauuucaaugaucggacaguuuggcguugguuucuacagcgcauaucucguggccgaaaaaguaacagugauaaccaagcauaaugaugacgagcaguacgcuugggaaaguuccgccgggggaucuuuuacgguccgcacugauaccggcgagcccaugggccgagggacaaaagugauucugcaccugaaggaagaccaaacugaguaucucgaggaacguagaaucaaagagauuguuaagaagcauagccaguucaucggauacccuaucaccuuauuuguggaaaaagagagggauaaggaagucuccgacgacgaggcggaggaaaaagaggauaaggaagaggaaaaagagaaggaggaaaaagagucagaagacaagccagagauugaggauguggguagugacgaagaggaagagaagaaagauggcgacaagaaaaagaaaaagaagauaaaagaaaaguauaucgaucaggaggagcugaacaaaacaaagcccauuuggacccggaauccugacgauaucacgaacgaagaguacggggaguucuacaaaagccuuacuaaugacugggaagaucacuuggcaguaaagcauuuuucuguugaaggacagcuggaguuccgcgcccuacucuuugugccaagaagggcucccuucgaccuguucgagaaccggaagaaaaagaauaacauaaaacuuuauguccgccgaguguuuauuauggacaauugcgaagaacugaucccugaauacuugaacuucaucagaggcguggucgauuccgaggaccucccacugaacauuucaagggaaauguuacaacagagcaagauccugaaaguuauucggaagaaucucgugaagaaaugucuugagcuguuuacagaguuggccgaagauaaggagaacuauaaaaaguucuacgaacaguuuaguaaaaauauaaagcuagguauccacgaggacucucaaaaccguaaaaagcuguccgagcuccugcgcuauuacaccagcgcaucgggggaugaaaugguaucucuuaaggacuauugcacuagaaugaaagagaaucagaagcacauuuacuacaucacaggagaaaccaaagaucagguggcuaacuccgccuucgucgagaggcugcggaagcauggcuuggaagugaucuauaugauugagccgauagacgaguacuguguucagcaacucaaagaauuugagggcaagacgcuggugucagucaccaaggaaggguuagagcugcccgaagaugaggaggagaaaaagaaacaggaagaaaagaaaacaaaguucgagaaucuaugcaagaucaugaaagacauucucgaaaagaaaguggagaagguaguugugaguaaccgacuggucacuagcccuuguugcaucgugaccuccacauauggauggacugcgaauauggagcgcauuaugaaagcccaggcacuuagagauaacucuaccauggguuacauggcugccaagaagcacuuggaaaucaauccagaccauagcauaaucgagacacugaggcagaaagcugaagccgauaagaacgacaaaucagucaaggaccucgugauucugcuuuaugagaccgcacuguugaguuccggcuuuagccucgaggauccccaaacucacgccaaucggaucuaccgcaugauuaaacugggguuaggaaucgacgaagaugacccuacggcugaugacacaucugcggcaguuaccgaggaaaugccaccccuggagggcgaugacgauacuucaagaauggaagagguggacuga

SEQ ID NO: 7702 - RNA, 2199 nt, Artificial Sequence
  derived and/or modified sequence opt4 from HSP90__Homo_sapiens__AAA63194
augcccgaggagacccagacccaggaccagcccauggaggaggaggagguggagaccuucgccuuccaggccgagaucgcccagcugaugagccugaucaucaacaccuucuacagcaacaaggagaucuuccugagagagcugaucagcaacagcagcgacgcccuggacaagaucagauacgagagccugaccgaccccagcaagcuggacagcggcaaggagcugcacaucaaccugauccccaacaagcaggacagaacccugaccaucguggacaccggcaucggcaugaccaaggccgaccugaucaacaaccugggcaccaucgccaagagcggcaccaaggccuucauggaggcccugcaggccggcgccgacaucagcaugaucggccaguucggcgugggcuucuacagcgccuaccugguggccgagaaggugaccgugaucaccaagcacaacgacgacgagcaguacgccugggagagcagcgccggcggcagcuucaccgugagaaccgacaccggcgagcccaugggcagaggcaccaaggugauccugcaccugaaggaggaccagaccgaguaccuggaggagagaagaaucaaggagaucgugaagaagcacagccaguucaucggcuaccccaucacccuguucguggagaaggagagagacaaggaggugagcgacgacgaggccgaggagaaggaggacaaggaggaggagaaggagaaggaggagaaggagagcgaggacaagcccgagaucgaggacgugggcagcgacgaggaggaggagaagaaggacggcgacaagaagaagaagaagaagaucaaggagaaguacaucgaccaggaggagcugaacaagaccaagcccaucuggaccagaaaccccgacgacaucaccaacgaggaguacggcgaguucuacaagagccugaccaacgacugggaggaccaccuggccgugaagcacuucagcguggagggccagcuggaguucagagcccugcuguucgugcccagaagagcccccuucgaccuguucgagaacagaaagaagaagaacaacaucaagcuguacgugagaagaguguucaucauggacaacugcgaggagcugauccccgaguaccugaacuucaucagaggcgugguggacagcgaggaccugccccugaacaucagcagagagaugcugcagcagagcaagauccugaaggugaucagaaagaaccuggugaagaagugccuggagcuguucaccgagcuggccgaggacaaggagaacuacaagaaguucuacgagcaguucagcaagaacaucaagcugggcauccacgaggacagccagaacagaaagaagcugagcgagcugcugagauacuacaccagcgccagcggcgacgagauggugagccugaaggacuacugcaccagaaugaaggagaaccagaagcacaucuacuacaucaccggcgagaccaaggaccagguggccaacagcgccuucguggagagacugagaaagcacggccuggaggugaucuacaugaucgagcccaucgacgaguacugcgugcagcagcugaaggaguucgagggcaagacccuggugagcgugaccaaggagggccuggagcugcccgaggacgaggaggagaagaagaagcaggaggagaagaagaccaaguucgagaaccugugcaagaucaugaaggacauccuggagaagaagguggagaaggugguggugagcaacagacuggugaccagccccugcugcaucgugaccagcaccuacggcuggaccgccaacauggagagaaucaugaaggcccaggcccugagagacaacagcaccaugggcuacauggccgccaagaagcaccuggagaucaaccccgaccacagcaucaucgagacccugagacagaaggccgaggccgacaagaacgacaagagcgugaaggaccuggugauccugcuguacgagaccgcccugcugagcagcggcuucagccuggaggacccccagacccacgccaacagaaucuacagaaugaucaagcugggccugggcaucgacgaggacgaccccaccgccgacgacaccagcgccgccgugaccgaggagaugcccccccuggagggcgacgacgacaccagcagaauggaggagguggacuga

SEQ ID NO: 7703 - RNA, 2199 nt, Artificial Sequence
  derived and/or modified sequence opt5 from HSP90__Homo_sapiens__AAA63194
augcccgaggaaacccagacacaagaccagcccauggaggaagaggaaguggagacguucgccuuucaggcugagaucgcccagcugaugagccucauuaucaacaccuucuacuccaauaaggaaauuuuucugagagagcuuaucucuaacagcuccgaugcgcuggacaaaauucgguaugaaucucucacagauccgagcaagcuggacuccggcaaagagcuucacaucaaucugauccccaacaagcaagaucgcacccucacaauugucgacaccgggaucggaaugacaaaagcugaucugauuaauaaccugggcaccaucgccaagucugggacgaaggccuucauggaggcucuccaggccggagcugacauuagcaugaucggccaguuugggguuggauucuacuccgccuaucugguggcggaaaaagugaccgucauuacaaagcauaaugaugacgagcaguacgccugggaaagcucugcuggcggcuccuuuaccgugagaacagauaccggggagccuaugggacggggcacgaaaguuauccuucaccugaaggaagaccaaacagaguaucucgaggaacgcagaaucaaagagauugugaagaagcauagccaguucaucggguaccccauuacccuguuugucgaaaaagagcgggauaaggaagugucugacgacgaggccgaggaaaaagaggauaaggaagaggaaaaagagaaggaggaaaaagaguccgaagacaagccugagaucgaggauguuggaagcgacgaagaggaagagaagaaagauggcgacaagaaaaagaaaaagaagauuaaagaaaaguauaucgaucaggaggagcuuaacaaaacaaagcccaucuggacccgcaauccugacgauauuaccaacgaagaguacggggaguucuacaaaucucugacaaaugacugggaggaucaccucgcugugaagcauuuuuccgucgaaggacagcuggaguucagagcccugcucuuugugccgcggcgcgcgcccuucgaccuguucgagaacagaaagaaaaagaauaacaucaaacuuuaugugcggcgcgucuuuauuauggacaauugcgaagaacugaucccugaauaccucaacuucauuagaggcguuguggauagcgaggaccugccccuuaacaucucccgggaaaugcugcaacagucuaagauccucaaagugauucgcaagaaucuggucaagaaaugucuggagcucuuuacggagcuggccgaagauaaggagaacuauaaaaaguucuacgaacaguuuagcaaaaauaucaaacuuggcauucacgaggacucccaaaacagaaagaagcugagcgagcuccugcgguauuacaccucugcuuccggggaugaaauggugagccuuaaggacuauugcacaagaaugaaagagaaucagaagcacaucuacuacauuaccggagaaacaaaagaucagguugccaacucugcuuucguggagcgccugcggaagcauggccucgaagucaucuauaugauugagccuaucgacgaguacugugugcagcaacugaaagaauuugaggggaagacccugguuagcgugacgaaggaaggacucgagcugcccgaagaugaggaggagaaaaagaaacaggaagaaaagaaaacaaaguucgagaaucuuugcaagaucaugaaagacauucuggaaaagaaagucgagaagguggucguguccaacagacucguuaccucuccguguugcaucgugaccagcacauauggcuggaccgccaauauggagcgcauuaugaaagcccaggcucugcgggauaacuccacaaugggguacauggcggccaagaagcaccuggaaaucaauccugaccauagcauuaucgagacgcuuagacagaaagcugaagccgauaagaacgacaaaucugucaaggaccucgugauccugcuguaugagaccgcccuccuguccagcggauuuucucuugaggauccccaaacacacgcuaaucgcauuuaccggaugaucaaacugggccucggcauugacgaagaugacccuaccgccgaugacacauccgcggcuguuaccgaggaaaugccuccccuggagggggaugacgauacgagcagaauggaagagguggacuga

SEQ ID NO: 7704 - RNA, 2199 nt, Artificial Sequence
  derived and/or modified sequence opt6 from HSP90__Homo_sapiens__AAA63194
augccagaagaaacacaaacacaagaucaaccaauggaagaagaggaaguggaaacauuugcauuccaagcagaaaucgcacaacucaugucauuaauaauaaauaccuucuacaguaacaaagaaauuuucuuacgagaauuaauaagcaauaguagcgacgcacuagacaaaauuagauacgaaaguuuaacagacccuagcaaacuagacucaggaaaagaauuacacauaaaucucauaccuaauaaacaagacagaacacuaacgauaguagacaccggaauaggaaugacaaaagcagaucuaauaaauaacuuaggaacaaucgcaaaaucaggcacaaaagcauucauggaagcauuacaagcgggagcagauauaucaaugaucggacaauucggugucggauuuuacuccgcauaucuagucgcagaaaaaguaacgguaauaacaaagcacaaugaugaugaacaauaugcaugggaaaguucagccggaggaagcuucacgguaagaacagauacaggcgaaccaaugggaagaggaacaaaaguaauacuacaccuaaaagaagaccaaacggaauauuuagaagaaagaagaaucaaagaaauaguaaaaaaacacucacaauuuauaggauacccaauuacacuauucguagaaaaagaaagagacaaagaagucucugacgaugaagcggaagagaaagaagacaaagaagaagaaaaagaaaaggaagaaaaagaaagugaagacaaaccagagauagaagacguaggaagugacgaagaagaagaaaaaaaagacggugacaaaaagaaaaaaaaaaagauaaaagaaaaauauauagaucaagaagaacuaaacaaaacaaaaccaauauggacacgaaacccagaugauauaacuaaugaagaauacggagaauucuacaaaagcuuaacaaaugacugggaagaucacuuagcaguuaaacauuuuucaguagaaggacaauuagaauucagagcacuacuauucguaccuagacgugcgccauucgaucucuucgaaaaucguaaaaaaaaaaauaacauaaaacuauacguaagaaggguauucaucauggacaauugcgaagaauuaaucccagaauaccuaaacuuuauaagaggaguaguagauucggaagauuuaccauuaaauauaagcagagaaaugcuacaacagaguaaaauacugaaagugauacgaaaaaaccugguaaaaaaaugccucgaauuauucacagaauuagcagaagacaaagaaaacuauaaaaaauuuuaugaacaauucaguaaaaacauaaaauuagguauacacgaagauagucaaaacagaaaaaaacuaagcgaacuacuaagguacuacacauccgcauccggggaugaaaugguaagcuugaaagauuacuguacaagaaugaaagaaaaccaaaaacacauauacuacauaacaggggaaacaaaagaucaagucgcgaauucagcguuuguagaaagacuaagaaaacauggacuagaaguaauauauaugauagaaccaauagaugaauacugcguacaacaauuaaaagaauuugaaggaaaaacacuaguaaguguaaccaaagaaggcuuagaauugcccgaagacgaagaagaaaaaaagaaacaggaagaaaaaaaaacaaaauuugaaaaucuaugcaagauaaugaaagauauauuggaaaaaaaaguagaaaaaguagugguaagcaauagauuaguaacaucaccaugcugcauaguaacgagcacauacggauggacggcaaauauggaaagaauuaugaaagcacaagccuuaagggauaacucaacaaugggauacauggcagcaaaaaaacaccuagaaauaaauccagaccauagcauaauagaaacauuaagacaaaaagccgaagcagauaaaaaugauaagagcguaaaagaucuaguaauauuacuauacgaaacagcacuauugucaagcggcuuuaguuuagaagauccacagacccaugcaaaucgaaucuaccgcaugauuaaauuaggauuaggaaucgacgaagacgauccuacagcugacgacacaucugcagccguuacagaagaaaugccaccacuagaaggagaugacgacaccaguagaauggaggaaguagacuaa

SEQ ID NO: 7705 - protein, 724 aa, Artificial Sequence
  HSP90__Homo_sapiens__P08238
MPEEVHHGEEEVETFAFQAEIAQLMSLIINTFYSNKEIFLRELISNASDALDKIRYESLTDPSKLDSGKELKIDIIPNPQERTLTLVDTGIGMTKADLINNLGTIAKSGTKAFMEALQAGADISMIGQFGVGFYSAYLVAEKVVVITKHNDDEQYAWESSAGGSFTVRADHGEPIGRGTKVILHLKEDQTEYLEERRVKEVVKKHSQFIGYPITLYLEKEREKEISDDEAEEEKGEKEEEDKDDEEKPKIEDVGSDEEDDSGKDKKKKTKKIKEKYIDQEELNKTKPIWTRNPDDITQEEYGEFYKSLTNDWEDHLAVKHFSVEGQLEFRALLFIPRRAPFDLFENKKKKNNIKLYVRRVFIMDSCDELIPEYLNFIRGVVDSEDLPLNISREMLQQSKILKVIRKNIVKKCLELFSELAEDKENYKKFYEAFSKNLKLGIHEDSTNRRRLSELLRYHTSQSGDEMTSLSEYVSRMKETQKSIYYITGESKEQVANSAFVERVRKRGFEVVYMTEPIDEYCVQQLKEFDGKSLVSVTKEGLELPEDEEEKKKMEESKAKFENLCKLMKEILDKKVEKVTISNRLVSSPCCIVTSTYGWTANMERIMKAQALRDNSTMGYMMAKKHLEINPDHPIVETLRQKAEADKNDKAVKDLVVLLFETALLSSGFSLEDPQTHSNRIYRMIKLGLGIDEDEVAAEEPNAAVPDEIPPLEGDEDASRMEEVD

SEQ ID NO: 7706 - RNA, 2175 nt, Artificial Sequence
  HSP90__Homo_sapiens__AAA36026
augccugaggaagugcaccauggagaggaggagguggagacuuuugccuuucaggcagaaauugcccaacucaugucccucaucaucaauaccuucuauuccaacaaggagauuuuccuucgggaguugaucucuaaugcuucugaugccuuggacaagauucgcuaugagagccugacagacccuucgaaguuggacagugguaaagagcugaaaauugacaucauccccaacccucaggaacguacccugacuuugguagacacaggcauuggcaugaccaaagcugaucucauaaauaauuugggaaccauugccaagucugguacuaaagcauucauggaggcucuucaggcuggugcagacaucuccaugauugggcaguuugguguuggcuuuuauucugccuacuugguggcagagaaagugguugugaucacaaagcacaacgaugaugaacaguaugcuugggagucuucugcuggagguuccuucacugugcgugcugaccauggugagcccauuggcagggguaccaaagugauccuccaucuuaaagaagaucagacagaguaccuagaagagaggcgggucaaagaaguagugaagaagcauucucaguucauaggcuaucccaucacccuuuauuuggagaaggaacgagagaaggaaauuagugaugaugaggcagaggaagagaaaggugagaaagaagaggaagauaaagaugaugaagaaaaacccaagaucgaagauguggguucagaugaggaggaugacagcgguaaggauaagaagaagaaaacuaagaagaucaaagagaaauacauugaucaggaagaacuaaacaagaccaagccuauuuggaccagaaacccugaugacaucacccaagaggaguauggagaauucuacaagagccucacuaaugacugggaagaccacuuggcagucaagcacuuuucuguagaaggucaguuggaauucagggcauugcuauuuauuccucgucgggcucccuuugaccuuuuugagaacaagaagaaaaagaacaacaucaaacucuauguccgccguguguucaucauggacagcugugaugaguugauaccagaguaucucaauuuuauccguggugugguugacucugaggaucugccccugaacaucucccgagaaaugcuccagcagagcaaaaucuugaaagucauucgcaaaaacauuguuaagaagugccuugagcucuucucugagcuggcagaagacaaggagaauuacaagaaauucuaugaggcauucucuaaaaaucucaagcuuggaauccacgaagacuccacuaaccgccgccgccugucugagcugcugcgcuaucauaccucccagucuggagaugagaugacaucucugucagaguauguuucucgcaugaaggagacacagaaguccaucuauuacaucacuggugagagcaaagagcagguggccaacucagcuuuuguggagcgagugcggaaacggggcuucgaggugguauauaugaccgagcccauugacgaguacugugugcagcagcucaaggaauuugaugggaagagccuggucucaguuaccaaggagggucuggagcugccugaggaugaggaggagaagaagaagauggaagagagcaaggcaaaguuugagaaccucugcaagcucaugaaagaaaucuuagauaagaagguugagaaggugacaaucuccaauagacuugugucuucaccuugcugcauugugaccagcaccuacggcuggacagccaauauggagcggaucaugaaagcccaggcacuucgggacaacuccaccaugggcuauaugauggccaaaaagcaccuggagaucaacccugaccaccccauuguggagacgcugcggcagaaggcugaggccgacaagaaugauaaggcaguuaaggaccugguggugcugcuguuugaaaccgcccugcuaucuucuggcuuuucccuugaggauccccagacccacuccaaccgcaucuaucgcaugaucaagcuaggucuagguauugaugaagaugaaguggcagcagaggaacccaaugcugcaguuccugaugagauccccccucucgagggcgaugaggaugcgucucgcauggaagaagucgauuag

SEQ ID NO: 7707 - RNA, 2175 nt, Artificial Sequence
  derived and/or modified sequence opt1 from HSP90__Homo_sapiens__AAA36026
augcccgaggaggugcaccacggcgaggaggaggucgagaccuucgccuuccaggccgagaucgcgcagcugaugagccucaucaucaacaccuucuacuccaacaaggagaucuuccugcgcgagcugaucagcaacgccuccgacgcccucgacaagauccgguacgagagccugacggacccguccaagcuggacagcgggaaggagcucaagaucgacaucauccccaacccccaggagcgcacccugacccugguggacaccggcaucgggaugacgaaggccgaccucaucaacaaccugggcaccaucgccaaguccgggaccaaggcguucauggaggcccugcaggccggcgccgacaucagcaugaucggccaguucggggugggcuucuacuccgcguaccucgucgccgagaaggugguggucaucaccaagcacaacgacgacgagcaguacgccugggagagcuccgccgggggcagcuucacggugcgggccgaccacggggagcccaucggccgcggcaccaaggugauccugcaccugaaggaggaccagaccgaguaccucgaggagcggcgcgucaaggagguggugaagaagcacucccaguucaucggguacccgaucacccuguaccuggagaaggagcgggagaaggagaucagcgacgacgaggcggaggaggagaagggcgagaaggaggaggaggacaaggacgacgaggagaagcccaagaucgaggacgucggguccgacgaggaggacgacagcggcaaggacaagaagaagaagacgaagaagaucaaggagaaguacaucgaccaggaggagcucaacaagaccaagcccaucuggacccgcaaccccgacgacaucacccaggaggaguacggcgaguucuacaagucccugacgaacgacugggaggaccaccuggccgugaagcacuucagcguggaggggcagcucgaguuccgggcccugcuguucaucccgcgccgggcccccuucgaccucuucgagaacaagaagaagaagaacaacaucaagcuguacguccgccggguguucaucauggacuccugcgacgagcugauccccgaguaccucaacuucauccgcggcguggucgacagcgaggaccugccccugaacaucagccgggagaugcuccagcaguccaagauccugaaggugauccgcaagaacaucgugaagaagugccuggagcuguucagcgagcucgccgaggacaaggagaacuacaagaaguucuacgaggcguucuccaagaaccugaagcucgggauccacgaggacagcaccaaccggcgccggcuguccgagcugcuccgcuaccacaccagccaguccggcgacgagaugaccagccuguccgaguacgucagccggaugaaggagacgcagaaguccaucuacuacaucaccggggagagcaaggagcaggucgccaacuccgccuucguggagcgcgugcgcaagcggggcuucgagguggucuacaugaccgagccgaucgacgaguacugcgugcagcagcugaaggaguucgacggcaagagccucguguccgucaccaaggaggggcuggagcugcccgaggacgaggaggagaagaagaagauggaggagagcaaggccaaguucgagaaccucugcaagcugaugaaggagauccuggacaagaagguggagaaggugacgaucuccaaccgccucgucagcucccccugcugcaucgugaccagcaccuacggcuggaccgccaacauggagcggaucaugaaggcgcaggcccugcgcgacaacagcacgaugggguacaugauggccaagaagcaccuggagaucaaccccgaccacccgaucguggagacccugcggcagaaggccgaggccgacaagaacgacaaggcggucaaggaccucguggugcugcuguucgagaccgcccuccuguccagcggcuucucccuggaggacccccagacccacagcaaccgcaucuaccggaugaucaagcucgggcugggcaucgacgaggacgaggucgccgccgaggagcccaacgcggccgugcccgacgagaucccgccccuggagggcgacgaggacgccucccgcauggaggagguggacuga

SEQ ID NO: 7708 - RNA, 2175 nt, Artificial Sequence
  derived and/or modified sequence opt2 from HSP90__Homo_sapiens__AAA36026
augcccgaggagguccaccacggcgaggaggaggucgagaccuucgccuuccaggccgagaucgcccagcucaugucccucaucaucaacaccuucuacuccaacaaggagaucuuccuccgcgagcucaucuccaacgccuccgacgcccucgacaagauccgcuacgagucccucaccgaccccuccaagcucgacuccggcaaggagcucaagaucgacaucauccccaacccccaggagcgcacccucacccucgucgacaccggcaucggcaugaccaaggccgaccucaucaacaaccucggcaccaucgccaaguccggcaccaaggccuucauggaggcccuccaggccggcgccgacaucuccaugaucggccaguucggcgucggcuucuacuccgccuaccucgucgccgagaaggucgucgucaucaccaagcacaacgacgacgagcaguacgccugggaguccuccgccggcggcuccuucaccguccgcgccgaccacggcgagcccaucggccgcggcaccaaggucauccuccaccucaaggaggaccagaccgaguaccucgaggagcgccgcgucaaggaggucgucaagaagcacucccaguucaucggcuaccccaucacccucuaccucgagaaggagcgcgagaaggagaucuccgacgacgaggccgaggaggagaagggcgagaaggaggaggaggacaaggacgacgaggagaagcccaagaucgaggacgucggcuccgacgaggaggacgacuccggcaaggacaagaagaagaagaccaagaagaucaaggagaaguacaucgaccaggaggagcucaacaagaccaagcccaucuggacccgcaaccccgacgacaucacccaggaggaguacggcgaguucuacaagucccucaccaacgacugggaggaccaccucgccgucaagcacuucuccgucgagggccagcucgaguuccgcgcccuccucuucaucccccgccgcgcccccuucgaccucuucgagaacaagaagaagaagaacaacaucaagcucuacguccgccgcgucuucaucauggacuccugcgacgagcucauccccgaguaccucaacuucauccgcggcgucgucgacuccgaggaccucccccucaacaucucccgcgagaugcuccagcaguccaagauccucaaggucauccgcaagaacaucgucaagaagugccucgagcucuucuccgagcucgccgaggacaaggagaacuacaagaaguucuacgaggccuucuccaagaaccucaagcucggcauccacgaggacuccaccaaccgccgccgccucuccgagcuccuccgcuaccacaccucccaguccggcgacgagaugaccucccucuccgaguacgucucccgcaugaaggagacccagaaguccaucuacuacaucaccggcgaguccaaggagcaggucgccaacuccgccuucgucgagcgcguccgcaagcgcggcuucgaggucgucuacaugaccgagcccaucgacgaguacugcguccagcagcucaaggaguucgacggcaagucccucgucuccgucaccaaggagggccucgagcuccccgaggacgaggaggagaagaagaagauggaggaguccaaggccaaguucgagaaccucugcaagcucaugaaggagauccucgacaagaaggucgagaaggucaccaucuccaaccgccucgucuccucccccugcugcaucgucaccuccaccuacggcuggaccgccaacauggagcgcaucaugaaggcccaggcccuccgcgacaacuccaccaugggcuacaugauggccaagaagcaccucgagaucaaccccgaccaccccaucgucgagacccuccgccagaaggccgaggccgacaagaacgacaaggccgucaaggaccucgucguccuccucuucgagaccgcccuccucuccuccggcuucucccucgaggacccccagacccacuccaaccgcaucuaccgcaugaucaagcucggccucggcaucgacgaggacgaggucgccgccgaggagcccaacgccgccguccccgacgagauccccccccucgagggcgacgaggacgccucccgcauggaggaggucgacuga

SEQ ID NO: 7709 - RNA, 2175 nt, Artificial Sequence
  derived and/or modified sequence opt3 from HSP90__Homo_sapiens__AAA36026
augcccgaggaagugcaccauggcgaggaagaggucgaaaccuucgccuuucaggcugagaucgcacaacugaugagccucauuauaaacacauucuacuccaauaaggagaucuuucuuagagaacugauuucuaacgccucagacgcguuggauaaaaucagguaugagaguuuaacugacccuagcaagcuggauuccgggaaagaacuaaagauugacaucauaccaaauccgcaggagcggacgcucacccugguugauacaggaaucgguaugacuaaagcugaccuuauuaacaaucugggcaccaucgccaagucugggacaaaggcauucauggaggccuugcaggcuggagcagauauuucgaugaucggccaguuuggugugggguucuacucagccuaucucguagcugaaaaaguggucgugauaaccaagcacaacgacgaugagcaauacgccugggaaagcagugcgggaggcuccuuuacuguucgcgcagaccauggcgagcccauugggcgaggaacaaaagugauccugcaccugaaggaagaucagaccgaguaucucgaggaacguagagucaaagaggugguaaagaagcauucucaguucauugguuacccuaucacguuauaucuggaaaaagagagggaaaaggagaucagcgacgaugaggccgaagaggaaaaaggcgagaaggaagaggaggacaaagacgaugaagagaagccaaaaauugaagacguuggguccgaugaggaggacgauucaggaaaggacaagaaaaagaaaacuaagaaaauaaaggaaaaguacaucgaucaggaggaacuuaauaaaaccaagcccauuuggacacggaacccugacgauaucacucaagaggaauacggcgaguuuuauaaaaguuugaccaaugacugggaggaucaccuggcugugaagcacuucagcgucgaaggucagcuagaguuucgcgcccuccuguucauaccaagaagggcacccuuugaccuuuucgaaaacaaaaagaagaaaaauaacauuaagcuguacgugcggcgcguguucaucauggacucuugcgaugaguugaucccugaauaucucaauuuuauucgaggggucguugacuccgaggaucugccauuaaacaucucaagagagaugcugcagcagagcaaaauucucaaggugauaaggaaaaauaucguaaagaagugucuugaacuguucagugaguuggcugaagacaaagagaacuacaagaaauuuuaugaagccuucucuaagaaccuaaaacugggcauucaugaggauuccacaaaucggcgucgccucagcgagcugcuuagauaccacaccucgcaaucuggagacgaaaugacgucccugucagaguaugugaguaggaugaaggaaacucagaaaagcaucuacuacaucacaggcgaguccaaggagcaggucgcgaacucugccuuuguggaacggguucgaaagcgcggguucgagguggucuauaugaccgaaccgauugaugaguacugcgugcaacaguugaaagaauuugacggaaagagccucguaucaguuacuaaagagggucuggaguuacccgaagaugaggaagagaagaaaaagauggaagagaguaaggcaaaauucgagaaucuguguaagcuaaugaaagaaauacucgacaagaaaguggagaaggucacaaucuccaacagacuggugagcucuccuugcuguauugucaccucaacguauggcuggaccgcuaauauggaaaggaucaugaaggcccaggcccuucgggauaacaguacaaugggguacaugauggcuaaaaagcauuuggagauuaauccagaccaccccaucguggaaacucugcgccagaaagcagaggccgauaagaacgacaaagcuguuaaggaccucgugguacugcuuuuugagaccgcgcuguugagcuccggauucucucucgaagauccucaaacacacucgaauagaauauauaggaugaucaagcugggcuuagguauugacgaggaugaagucgcagccgaggagccaaacgcugccgugcccgacgaaaucccgccucuggagggggaugaagacgcaagccguauggaggaaguugauuga

SEQ ID NO: 7710 - RNA, 2175 nt, Artificial Sequence
  derived and/or modified sequence opt4 from HSP90__Homo_sapiens__AAA36026
augcccgaggaggugcaccacggcgaggaggagguggagaccuucgccuuccaggccgagaucgcccagcugaugagccugaucaucaacaccuucuacagcaacaaggagaucuuccugagagagcugaucagcaacgccagcgacgcccuggacaagaucagauacgagagccugaccgaccccagcaagcuggacagcggcaaggagcugaagaucgacaucauccccaacccccaggagagaacccugacccugguggacaccggcaucggcaugaccaaggccgaccugaucaacaaccugggcaccaucgccaagagcggcaccaaggccuucauggaggcccugcaggccggcgccgacaucagcaugaucggccaguucggcgugggcuucuacagcgccuaccugguggccgagaaggugguggugaucaccaagcacaacgacgacgagcaguacgccugggagagcagcgccggcggcagcuucaccgugagagccgaccacggcgagcccaucggcagaggcaccaaggugauccugcaccugaaggaggaccagaccgaguaccuggaggagagaagagugaaggagguggugaagaagcacagccaguucaucggcuaccccaucacccuguaccuggagaaggagagagagaaggagaucagcgacgacgaggccgaggaggagaagggcgagaaggaggaggaggacaaggacgacgaggagaagcccaagaucgaggacgugggcagcgacgaggaggacgacagcggcaaggacaagaagaagaagaccaagaagaucaaggagaaguacaucgaccaggaggagcugaacaagaccaagcccaucuggaccagaaaccccgacgacaucacccaggaggaguacggcgaguucuacaagagccugaccaacgacugggaggaccaccuggccgugaagcacuucagcguggagggccagcuggaguucagagcccugcuguucauccccagaagagcccccuucgaccuguucgagaacaagaagaagaagaacaacaucaagcuguacgugagaagaguguucaucauggacagcugcgacgagcugauccccgaguaccugaacuucaucagaggcgugguggacagcgaggaccugccccugaacaucagcagagagaugcugcagcagagcaagauccugaaggugaucagaaagaacaucgugaagaagugccuggagcuguucagcgagcuggccgaggacaaggagaacuacaagaaguucuacgaggccuucagcaagaaccugaagcugggcauccacgaggacagcaccaacagaagaagacugagcgagcugcugagauaccacaccagccagagcggcgacgagaugaccagccugagcgaguacgugagcagaaugaaggagacccagaagagcaucuacuacaucaccggcgagagcaaggagcagguggccaacagcgccuucguggagagagugagaaagagaggcuucgaggugguguacaugaccgagcccaucgacgaguacugcgugcagcagcugaaggaguucgacggcaagagccuggugagcgugaccaaggagggccuggagcugcccgaggacgaggaggagaagaagaagauggaggagagcaaggccaaguucgagaaccugugcaagcugaugaaggagauccuggacaagaagguggagaaggugaccaucagcaacagacuggugagcagccccugcugcaucgugaccagcaccuacggcuggaccgccaacauggagagaaucaugaaggcccaggcccugagagacaacagcaccaugggcuacaugauggccaagaagcaccuggagaucaaccccgaccaccccaucguggagacccugagacagaaggccgaggccgacaagaacgacaaggccgugaaggaccugguggugcugcuguucgagaccgcccugcugagcagcggcuucagccuggaggacccccagacccacagcaacagaaucuacagaaugaucaagcugggccugggcaucgacgaggacgagguggccgccgaggagcccaacgccgccgugcccgacgagauccccccccuggagggcgacgaggacgccagcagaauggaggagguggacuga

SEQ ID NO: 7711 - RNA, 2175 nt, Artificial Sequence
  derived and/or modified sequence opt5 from HSP90__Homo_sapiens__AAA36026
augcccgaggaagugcaccauggcgaggaagaggucgaaaccuucgccuuucaggcugagaucgcccaacugaugagccucauuaucaacacauucuacuccaauaaggagauuuuucugagagaacuuaucucuaacgcgagcgacgcucuggauaaaauucgguaugagucccucacggacccuucuaagcuggauagcgggaaagaacuuaagaucgacaucauuccgaauccccaggagcgcacccugacacucguugauaccggaaucggcaugacaaaagccgaccugauuaacaaucuggggaccaucgccaaguccggaacaaaggcuuucauggaggcccuccaggcuggcgccgauauuucuaugaucgggcaguuuggagugggcuucuacagcgcguaucugguggccgaaaaagucgugguuauuaccaagcacaacgacgaugagcaauacgcuugggaauccagcgccggcgggucuuuuacggugagagcugaccauggagagccuaucggccgggggaccaaagucauccuucaccugaaggaagaucagacagaguaucucgaggaacgcagagugaaagagguugugaagaagcauucccaguucauuggauaccccaucacccuguaucuugaaaaagagcgggaaaaggagauuagcgacgaugaggccgaagaggaaaaaggcgagaaggaagaggaggacaaagacgaugaagagaagccuaaaaucgaagacgucgggucugaugaggaggacgauuccggaaaggacaagaaaaagaaaacaaagaaaauuaaggaaaaguacaucgaucaggaggaacugaauaaaaccaagcccaucuggacgcgcaacccugacgauauuacacaagaggaauacggcgaguuuuauaaaagccucaccaaugacugggaggaucaccuggcggugaagcacuucucuguggaaggccagcuggaguuuagagcccuccuguucaucccgcggcgcgcucccuuugaccuuuucgaaaacaaaaagaagaaaaauaacauuaagcuguacgucagacggguuuucaucauggacuccugcgaugagcucauuccugaauaucugaauuuuauccgcggggugguggacagcgaggaucuuccccugaacaucuccagagagaugcuccagcagucuaaaauucugaaggucauccggaaaaauauugugaagaagugucuggaacucuucagcgagcuggccgaagacaaagagaacuacaagaaauuuuaugaggcuuucuccaagaaccuuaaacugggaauccaugaggauagcacaaaucgcagacggcucucugagcugcuuagauaccacaccucccaaagcggcgacgaaaugaccucucugagcgaguauguuucccgcaugaaggaaacacagaaaucuauuuacuacaucacgggggagagcaaggaacagguggccaacuccgccuuugucgaacgggugagaaagcgcggauucgagguuguguauaugaccgaaccuauugaugaguacugcguccaacagcucaaagaauuugacggcaagagccuggugucugucacaaaagaggggcuggagcuccccgaagaugaggaagagaagaaaaagauggaagaguccaaggcuaaauucgagaaucuguguaaacuuaugaaggaaauccuggacaagaaaguggagaagguuaccaucagcaaccggcucgugucuuccccgugcuguauugucacaagcaccuauggauggacggcgaauauggaaagaaucaugaaggcccaggcucugcgcgauaacuccacaaugggcuacaugauggccaaaaagcaucuggagauuaauccugaccaccccaucguggaaacccuucggcagaaagccgaggcugauaagaacgacaaagccguuaaggaccucgugguccugcuguuugagaccgcgcuccugucuagcggcuucucccuugaagauccucaaacacacucuaauagaauuuaucgcaugaucaagcuggggcucggaaucgacgaggaugaaguggcugccgaggagcccaacgccgcugugcccgacgaaauuccuccgcuggagggcgaugaagacgccagccggauggaggaaguugauuga

SEQ ID NO: 7712 - RNA, 2175 nt, Artificial Sequence
  derived and/or modified sequence opt6 from HSP90__Homo_sapiens__AAA36026
augccugaagaaguacaccauggagaagaagaaguagaaacuuuugcauuccaagcagaaaucgcucaacuaaugagcuuaauaauaaauacguuuuauaguaauaaagaaauauuccuaagagaauuaauaucaaaugcaagugaugcauuagacaaaauaagauacgagaguuugaccgacccaucaaaauuagacaguggaaaagaacuaaaaaucgacauaauaccaaauccacaagaaagaacacuaacacuaguagacacaggaauaggcaugacaaaagcugauuuaaucaacaauuuaggaacaauagccaaaucagggacuaaagccuucauggaggcacuacaagcaggugcagauauaucaaugauaggacaauuuggagugggauuuuacucagcauacuuaguagccgaaaaaguaguaguaauuacaaaacauaaugacgacgagcaauaugcaugggaguccagcgcaggaggaaguuucacaguaagagcggaccauggagagccaauagggagagguacaaaaguaauauugcacuuaaaagaagaccaaacagaauacuuagaagaaagaagaguaaaagaaguagugaaaaaacacagccaauucaucggauacccuauaaccuuauaccuagaaaaagagagagaaaaagaaauuagugaugacgaagcugaagaagaaaaaggggaaaaagaagaagaagacaaagacgaugaagaaaaaccuaaaauagaggauguagggagcgacgaagaagacgacagcggaaaggacaaaaaaaaaaaaacaaaaaaaauaaaagaaaaauauauagaccaagaagaacuaaacaaaacaaaaccaauauggacuagaaacccagacgauauaacccaggaagaauauggagaauucuacaaaucguuaacaaaugacugggaagaucaucuugcgguaaaacacuucaguguagaaggacaguuagaauuccgagcacuacuguucauuccaagaagagcacccuuugaccuauuugaaaauaaaaagaaaaaaaacaacauaaaauuauacguaagacgaguuuucauaauggauucaugugacgaauuaauaccagaauaccuaaacuuuauacgaggagugguugacucagaagauuuaccacuaaacaucucaagagagaugcuacaacaaaguaaaauacugaaaguaauaagaaaaaacauugugaaaaaauguuuagaauuauucagcgaauuagcugaagauaaagaaaauuauaagaaauuuuacgaagcauucagcaaaaaucugaaacuaggaauacacgaagauucaaccaauagaagacgacugagcgaacuacuucgguaccauacaagccagaguggagaugaaaugacgucauuaucagaauaugucucaagaaugaaagaaacgcaaaaaucuauauacuacauaacuggagaaagcaaagaacaagucgcaaacucagcauucguugaaagaguacguaagagaggauucgagguuguauacaugacugagccaauagaugaauacugcguacaacaauuaaaggaauucgauggaaaaucauuaguuagcguaacgaaagaaggacuagaauugccagaagacgaagaagaaaaaaaaaaaauggaagaaagcaaagccaaauuugaaaauuuaugcaaauugaugaaagaaauacuagauaaaaaaguggaaaaagugacaauaucaaauagacuuguaagcucgccgugcuguauuguaacauccacauacggguggacggcaaacauggagagaauaaugaaagcccaagcacugcgagacaacucaaccaugggauacaugauggccaaaaagcacuuggaaauaaaccccgaucauccaauaguagaaacauuaagacaaaaagcagaagcagacaaaaacgauaaagcugucaaagaucuuguaguacuacuguuugaaacagcacuauuaaguagcggauuuaguuuagaagauccacagacacacagcaacagaaucuacagaaugauuaaauuaggucuaggaauagacgaggaugaaguagcggcagaagaaccaaaugcggcaguaccugacgaaauaccaccacuggagggagaugaagacgcaucaagaauggaagaaguggauuaa

SEQ ID NO: 7713 - protein, 508 aa, Artificial Sequence
  PDI/PDIA__Homo_sapiens__P07237
MLRRALLCLAVAALVRADAPEEEDHVLVLRKSNFAEALAAHKYLLVEFYAPWCGHCKALAPEYAKAAGKLKAEGSEIRLAKVDATEESDLAQQYGVRGYPTIKFFRNGDTASPKEYTAGREADDIVNWLKKRTGPAATTLPDGAAAESLVESSEVAVIGFFKDVESDSAKQFLQAAEAIDDIPFGITSNSDVFSKYQLDKDGVVLFKKFDEGRNNFEGEVTKENLLDFIKHNQLPLVIEFTEQTAPKIFGGEIKTHILLFLPKSVSDYDGKLSNFKTAAESFKGKILFIFIDSDHTDNQRILEFFGLKKEECPAVRLITLEEEMTKYKPESEELTAERITEFCHRFLEGKIKPHLMSQELPEDWDKQPVKVLVGKNFEDVAFDEKKNVFVEFYAPWCGHCKQLAPIWDKLGETYKDHENIVIAKMDSTANEVEAVKVHSFPTLKFFPASADRTVIDYNGERTLDGFKKFLESGGQDGAGDDDDLEDLEEAEEPDMEEDDDQKAVKDEL

SEQ ID NO: 7714 - RNA, 1527 nt, Artificial Sequence
  PDI/PDIA__Homo_sapiens__AAC13652
augcugcgccgcgcucugcugugccuggccguggccgcccuggugcgcgccgacgcccccgaggaggaggaccacguccuggugcugcggaaaagcaacuucgcggaggcgcuggcggcccacaaguaccugcugguggaguucuaugccccuugguguggccacugcaaggcucuggccccugaguaugccaaagccgcugggaagcugaaggcagaagguuccgagaucagguuggccaagguggacgccacggaggagucugaccuggcccagcaguacggcgugcgcggcuaucccaccaucaaguucuucaggaauggagacacggcuucccccaaggaauauacagcuggcagagaggcugaugacaucgugaacuggcugaagaagcgcacgggcccggcugccaccacccugccugacggcgcagcugcagaguccuugguggaguccagcgagguggcugucaucggcuucuucaaggacguggagucggacucugccaagcaguuuuugcaggcagcagaggccaucgaugacauaccauuugggaucacuuccaacagugacguguucuccaaauaccagcucgacaaagaugggguuguccucuuuaagaaguuugaugaaggccggaacaacuuugaaggggaggucaccaaggagaaccugcuggacuuuaucaaacacaaccagcugccccuugucaucgaguucaccgagcagacagccccgaagauuuuuggaggugaaaucaagacucacauccugcuguucuugcccaagagugugucugacuaugacggcaaacugagcaacuucaaaacagcagccgagagcuucaagggcaagauccuguucaucuucaucgacagcgaccacaccgacaaccagcgcauccucgaguucuuuggccugaagaaggaagagugcccggccgugcgccucaucacccuggaggaggagaugaccaaguacaagcccgaaucggaggagcugacggcagagaggaucacagaguucugccaccgcuuccuggagggcaaaaucaagccccaccugaugagccaggagcugccggaggacugggacaagcagccugucaaggugcuuguugggaagaacuuugaagacguggcuuuugaugagaaaaaaaacgucuuuguggaguucuaugccccaugguguggucacugcaaacaguuggcucccauuugggauaaacugggagagacguacaaggaccaugagaacaucgucaucgccaagauggacucgacugccaacgagguggaggccgucaaagugcacagcuuccccacacucaaguucuuuccugccagugccgacaggacggucauugauuacaacggggaacgcacgcuggaugguuuuaagaaauuccuggagagcgguggccaggauggggcaggggaugaugacgaucucgaggaccuggaagaagcagaggagccagacauggaggaagacgaugaucagaaagcugugaaagaugaacuguaa

SEQ ID NO: 7715 - RNA, 1527 nt, Artificial Sequence
  derived and/or modified sequence opt1 from PDI/PDIA__Homo_sapiens__AAC13652
augcugcgccgggcccuccugugccuggccguggcggcccucguccgcgccgacgcccccgaggaggaggaccacgugcuggugcugcgcaagagcaacuucgccgaggcgcucgccgcccacaaguaccugcuggucgaguucuacgccccguggugcggccacugcaaggcgcucgcccccgaguacgccaaggccgccgggaagcugaaggcggagggcuccgagauccggcuggccaagguggacgccaccgaggagagcgaccucgcccagcaguacggggugcggggcuaccccaccaucaaguucuuccgcaacggggacacggccucccccaaggaguacaccgcgggccgggaggccgacgacaucgucaacuggcugaagaagcgcaccggcccggccgccaccacgcugcccgacggggccgcggccgagagccucguggaguccagcgagguggccgucaucggcuucuucaaggacguggaguccgacagcgccaagcaguuccugcaggccgcggaggccaucgacgacauccccuucgggaucaccuccaacagcgacguguucuccaaguaccagcuggacaaggacggcgucgugcuguucaagaaguucgacgaggggcggaacaacuucgagggcgaggugaccaaggagaaccugcuggacuucaucaagcacaaccagcucccccuggucaucgaguucaccgagcagacggccccgaagaucuucggcggggagaucaagacccacauccuccucuuccugcccaagagcguguccgacuacgacggcaagcugagcaacuucaagaccgccgcggaguccuucaaggggaagauccucuucaucuucaucgacagcgaccacaccgacaaccagcgcauccuggaguucuucggccugaagaaggaggagugccccgccgugcggcucaucacgcuggaggaggagaugaccaaguacaagcccgaguccgaggagcugaccgccgagcgcaucaccgaguucugccaccgguuccucgagggcaagaucaagccgcaccugaugagccaggagcugcccgaggacugggacaagcagcccgucaaggugcucguggggaagaacuucgaggacgucgccuucgacgagaagaagaacguguucguggaguucuacgcccccuggugcggccacugcaagcagcuggcgccgaucugggacaagcugggggagacguacaaggaccacgagaacaucgucaucgccaagauggacuccaccgccaacgagguggaggccgucaaggugcacagcuuccccacccucaaguucuuccccgccagcgcggaccgcaccgugaucgacuacaacggcgagcggacgcuggacggguucaagaaguuccuggaguccggcggccaggacggggccggcgacgacgacgaccucgaggaccuggaggaggccgaggagcccgacauggaggaggacgacgaccagaaggccgucaaggacgagcuguga

SEQ ID NO: 7716 - RNA, 1527 nt, Artificial Sequence
  derived and/or modified sequence opt2 from PDI/PDIA__Homo_sapiens__AAC13652
augcuccgccgcgcccuccucugccucgccgucgccgcccucguccgcgccgacgcccccgaggaggaggaccacguccucguccuccgcaaguccaacuucgccgaggcccucgccgcccacaaguaccuccucgucgaguucuacgcccccuggugcggccacugcaaggcccucgcccccgaguacgccaaggccgccggcaagcucaaggccgagggcuccgagauccgccucgccaaggucgacgccaccgaggaguccgaccucgcccagcaguacggcguccgcggcuaccccaccaucaaguucuuccgcaacggcgacaccgccucccccaaggaguacaccgccggccgcgaggccgacgacaucgucaacuggcucaagaagcgcaccggccccgccgccaccacccuccccgacggcgccgccgccgagucccucgucgaguccuccgaggucgccgucaucggcuucuucaaggacgucgaguccgacuccgccaagcaguuccuccaggccgccgaggccaucgacgacauccccuucggcaucaccuccaacuccgacgucuucuccaaguaccagcucgacaaggacggcgucguccucuucaagaaguucgacgagggccgcaacaacuucgagggcgaggucaccaaggagaaccuccucgacuucaucaagcacaaccagcucccccucgucaucgaguucaccgagcagaccgcccccaagaucuucggcggcgagaucaagacccacauccuccucuuccuccccaaguccgucuccgacuacgacggcaagcucuccaacuucaagaccgccgccgaguccuucaagggcaagauccucuucaucuucaucgacuccgaccacaccgacaaccagcgcauccucgaguucuucggccucaagaaggaggagugccccgccguccgccucaucacccucgaggaggagaugaccaaguacaagcccgaguccgaggagcucaccgccgagcgcaucaccgaguucugccaccgcuuccucgagggcaagaucaagccccaccucaugucccaggagcuccccgaggacugggacaagcagcccgucaagguccucgucggcaagaacuucgaggacgucgccuucgacgagaagaagaacgucuucgucgaguucuacgcccccuggugcggccacugcaagcagcucgcccccaucugggacaagcucggcgagaccuacaaggaccacgagaacaucgucaucgccaagauggacuccaccgccaacgaggucgaggccgucaagguccacuccuuccccacccucaaguucuuccccgccuccgccgaccgcaccgucaucgacuacaacggcgagcgcacccucgacggcuucaagaaguuccucgaguccggcggccaggacggcgccggcgacgacgacgaccucgaggaccucgaggaggccgaggagcccgacauggaggaggacgacgaccagaaggccgucaaggacgagcucuga

SEQ ID NO: 7717 - RNA, 1527 nt, Artificial Sequence
  derived and/or modified sequence opt3 from PDI/PDIA__Homo_sapiens__AAC13652
augcugagaagggcccuccuuugccuggcuguggcagccuugguccgggcggacgcucccgaggaagaggaucacguuuuagugcugcgcaagagcaacuucgccgaagcacuagccgcucauaaauaccuccugguagaguuuuaugcaccuugguguggccacugcaaggcccuugcuccagaauacgccaaagcggcagggaagcugaaagccgagggauccgagauccgauuggcuaagguggacgccaccgaagagucugaucucgcacagcaauaugguguccguggcuacccgacaauuaaguucuuuagaaauggggacacugcuucacccaaagaauauacggccggaagggaggcggaugacauagugaacuggcugaagaaacggaccggcccugccgcaacaacucugccagauggugcugccgcugagagucucguugaaagcuccgagguggccgucaucggguucuuuaaggacguggaaucugauucggcaaaacaguucuuacaggccgcugaggcgauugacgauauccccuuuggaauuaccucaaauagcgacguauucaguaaguaccagcuggauaaggacggcguugugcuuuuuaaaaaguucgacgaaggccgcaacaauuuugagggggaggucacaaaagaaaacuugcuggauuucaucaagcauaaucaacuaccucucgugauagaguuuaccgaacagacugcaccaaaaaucuucggaggugagauuaagacacacauccugcuuuuccugcccaaauccgugucugacuaugauggcaaguugagcaacuuuaagaccgccgcugaauccuucaaagggaagauucucuuuaucuucauagacucagaucauacggacaaucagagaauuuuagaguuuuucggacugaaaaaggaggaauguccugccgucaggcugaucacucucgaggaagagaugaccaaauacaagccagaaagugaggagcuuacagcagaacggauuacugaguuuugccaccgcuuccuggaaggcaagaucaaaccgcacuugaugagccaggagcuacccgaggauugggacaagcaaccuguuaaagugcugguagguaagaacuuugaagauguggccuucgacgagaaaaagaaugucuuuguggaguucuacgcuccauggugugggcauugcaagcagcucgcccccaucugggauaaacugggagaaaccuauaaggaccacgaaaacauuguuauagcaaaaauggacucuacagcgaaugagguggaggcugucaaggugcauuccuuuccuacccuuaaauucuucccagccucagcagaucgaacgguaaucgacuacaacggcgaaagaacucuggauggcuuuaagaaguucuuggagagcgggggacaggacggugccggcgaugacgaugaccucgaagaucuggaggaagcugaggagcccgacauggaagaggaugacgaucagaaagccguuaaggacgaauuauga

SEQ ID NO: 7718 - RNA, 1527 nt, Artificial Sequence
  derived and/or modified sequence opt4 from PDI/PDIA__Homo_sapiens__AAC13652
augcugagaagagcccugcugugccuggccguggccgcccuggugagagccgacgcccccgaggaggaggaccacgugcuggugcugagaaagagcaacuucgccgaggcccuggccgcccacaaguaccugcugguggaguucuacgcccccuggugcggccacugcaaggcccuggcccccgaguacgccaaggccgccggcaagcugaaggccgagggcagcgagaucagacuggccaagguggacgccaccgaggagagcgaccuggcccagcaguacggcgugagaggcuaccccaccaucaaguucuucagaaacggcgacaccgccagccccaaggaguacaccgccggcagagaggccgacgacaucgugaacuggcugaagaagagaaccggccccgccgccaccacccugcccgacggcgccgccgccgagagccugguggagagcagcgagguggccgugaucggcuucuucaaggacguggagagcgacagcgccaagcaguuccugcaggccgccgaggccaucgacgacauccccuucggcaucaccagcaacagcgacguguucagcaaguaccagcuggacaaggacggcguggugcuguucaagaaguucgacgagggcagaaacaacuucgagggcgaggugaccaaggagaaccugcuggacuucaucaagcacaaccagcugccccuggugaucgaguucaccgagcagaccgcccccaagaucuucggcggcgagaucaagacccacauccugcuguuccugcccaagagcgugagcgacuacgacggcaagcugagcaacuucaagaccgccgccgagagcuucaagggcaagauccuguucaucuucaucgacagcgaccacaccgacaaccagagaauccuggaguucuucggccugaagaaggaggagugccccgccgugagacugaucacccuggaggaggagaugaccaaguacaagcccgagagcgaggagcugaccgccgagagaaucaccgaguucugccacagauuccuggagggcaagaucaagccccaccugaugagccaggagcugcccgaggacugggacaagcagcccgugaaggugcuggugggcaagaacuucgaggacguggccuucgacgagaagaagaacguguucguggaguucuacgcccccuggugcggccacugcaagcagcuggcccccaucugggacaagcugggcgagaccuacaaggaccacgagaacaucgugaucgccaagauggacagcaccgccaacgagguggaggccgugaaggugcacagcuuccccacccugaaguucuuccccgccagcgccgacagaaccgugaucgacuacaacggcgagagaacccuggacggcuucaagaaguuccuggagagcggcggccaggacggcgccggcgacgacgacgaccuggaggaccuggaggaggccgaggagcccgacauggaggaggacgacgaccagaaggccgugaaggacgagcuguga

SEQ ID NO: 7719 - RNA, 1527 nt, Artificial Sequence
  derived and/or modified sequence opt5 from PDI/PDIA__Homo_sapiens__AAC13652
augcugagacgggcccuccugugccuugcuguggccgcgcugguccgcgcugacgcccccgaggaagaggaucacguucucgugcugagaaagagcaacuucgccgaagcucuugccgcucauaaauaccugcucguggaguuuuaugccccuugguguggccacugcaaggcgcuggccccggaauacgcuaaagccgcugggaagcugaaagccgagggauccgagauccggcucgcgaaggucgacgccaccgaagagucugaucuggcucagcaauauggcgugcgcggguaccccacaauuaaguucuuuagaaauggagacacggccagcccuaaagaauauaccgcuggccgggaggccgaugacaucguuaacuggcuuaagaaacgcacagggcccgccgcuaccacacugccugauggagcggccgcugagucccucguggaaucuagcgaggucgccgugauuggcuucuuuaaggacguugaauccgauucugccaaacaguuccugcaggcugccgaggcgaucgacgauauucccuuuggcaucaccagcaauuccgacguguucagcaaguaccagcuugauaaggacggggucgugcuguuuaaaaaguucgacgaaggaagaaacaauuuugagggcgaggugacaaaagaaaaccuccuggauuucaucaagcauaaucaacugccucucgucauugaguuuaccgaacagacggcuccgaaaaucuucgggggagagauuaagacccacauccugcuuuuccugcccaaaucuguuuccgacuaugauggcaagcucagcaacuuuaagacagccgccgaaucuuucaaagggaagauucuguuuaucuucauugacuccgaucauaccgacaaucagcggauccuugaguuuuucggacugaaaaaggaggaauguccugcugugcgccucaucacacuggaggaagagaugaccaaauacaagcccgaaagcgaggagcugacggccgaaagaauuacagaguuuugccaccgguuccucgaaggcaagaucaaaccucaccugaugucucaggagcuucccgaggauugggacaagcaaccggugaaaguccuggugggcaagaacuuugaagauguugcuuucgacgagaaaaagaauguguuugucgaguucuacgccccuuggugugggcauugcaagcagcucgcgcccauuugggauaaacugggagaaaccuauaaggaccacgaaaacaucgugauugccaaaauggacuccacagcuaaugagguugaggccgugaagguccauagcuuuccuacccuuaaauucuuccccgcuuccgccgaucgcaccgugaucgacuacaacggcgaaagaacacuggauggguuuaagaaguuccucgagucuggaggccaggacggggcgggagaugacgaugaccuggaagaucuggaggaagccgaggagcccgacauggaagaggaugacgaucagaaagcugucaaggacgaacucuga

SEQ ID NO: 7720 - RNA, 1527 nt, Artificial Sequence
  derived and/or modified sequence opt6 from PDI/PDIA__Homo_sapiens__AAC13652
augcuaagaagagcucuauuaugucuagcaguugcggcacuagucagggcugacgcaccagaagaagaagaucauguacuaguauuacgaaaaagcaauuucgcagaagcucuagcagcacacaaauaccucuuaguagaauucuacgcaccaugguguggacauugcaaagcauuagcacccgaauaugccaaagcagcaggaaaacuaaaggcagaaggaagcgaaauaagauuagccaaaguagaugcaacagaagaaagcgacuuagcacaacaauauggaguccgaggauauccaacaauaaaauuuuuuagaaauggagauaccgcaucaccaaaagaauauacagcagguagagaagcagaugacauugucaauuggcuaaaaaaaagaacaggcccagcugccacaacacuaccggacggagcagcggcagaauccuuaguagaaucaucagaaguagcaguaaucggauucuucaaagauguugaaagcgauucagcaaaacaauuuuuacaagccgcagaagcaauugaugauauaccauuuggaauaacuucaaacagugacgucuucaguaaauaucaauuagauaaagaugguguuguacuauucaaaaaauucgacgaaggaagaaauaacuucgaaggagaagugacaaaagaaaaucuucuagacuucauaaagcauaaccaacuaccauuaguaauugaauuuacagaacaaacagcuccaaaaauauuuggaggagaaauaaaaacacauauacuauuauucuuaccaaaaaguguaucagacuaugacgguaaacuaaguaacuuuaaaacugcagcagaaaguuuuaaaggaaaaauauuauuuauauuuauugauagugaccauacugauaaccaacgaauacuagaauucuuuggauuaaaaaaagaagaauguccggcagucagacucauaacauuagaagaagaaaugacaaaauacaaaccagaaagugaggaauugacagcagaaagaauaacagaauucugucacagauuccuagaaggaaaaauaaaaccacauuuaaugucacaagaacuaccagaggauugggacaaacaacccguaaaaguauuaguaggaaaaaacuuugaagauguagcauucgacgaaaaaaaaaacguguuuguagaauuuuaugcaccaugguguggacauuguaaacaacuagccccuauaugggauaaacuaggagaaacauacaaagaccaugaaaacauaguaauagcaaaaauggacucaacagcuaaugaagucgaagcaguaaaaguacacucguuuccaacguuaaaauuuuuuccagcaucagcagaucguacaguaauagacuacaauggagaaagaacauuagacggauuuaaaaaauucuuagaaagcggaggacaggacggugcaggcgaugaugaugaccuugaagauuuagaagaagcugaagaaccagauauggaagaagacgaugaccaaaaagcaguaaaagacgaacuuuaa

SEQ ID NO: 7721 - protein, 332 aa, Artificial Sequence [sequence omitted]

SEQ ID NO: 7722 - RNA, 999 nt, Artificial Sequence
  PDI/PDIA__Homo_sapiens__AAG32626
augggagucugguuaaauaaagaugacuauaucagagacuugaaaaggaucauucucuguuuucugauaguguauauggccauuuuagugggcacagaucaggauuuuuacaguuuacuuggaguguccaaaacugcaagcaguagagaaauaagacaagcuuucaagaaauuggcauugaaguuacauccugauaaaaacccgaauaacccaaaugcacauggcaauuuuuuaaaaauaaauagagcauaugaaguacucaaagaugaagaucuacggaaaaaguaugacaaauauggagaaaagggacuugaggauaaucaagguggccaguaugaaagcuggaacuauuaucguuaugauuuugguauuuaugaugaugauccugaaaucauaacauuggaaagaagagaauuugaugcugcuguuaauucuggagaacugugguuuguaaauuuuuacuccccaggcuguucacacugccaugauuuagcucccacauggagagacuuugcuaaagaaguggauggguuacuucgaauuggagcuguuaacuguggugaugauagaaugcuuugccgaaugaaaggagucaacagcuaucccagucucuucauuuuucggucuggaauggccccagugaaauaucauggagacagaucaaaggagaguuuagugaguuuugcaaugcagcauguuagaaguacagugacagaacuuuggacaggaaauuuugucaacuccauacaaacugcuuuugcugcugguauuggcuggcugaucacuuuuuguucaaaaggaggagauuguuugacuucacagacacgacucaggcuuaguggcauguuggauggucuuguuaauguaggauggauggacugugccacccaggauaaccuuuguaaaagcuuagauauuacaacaaguacuacugcuuauuuuccuccuggagccacuuuaaauaacaaagagaaaaacaguauuuugcugcuucauuga

SEQ ID NO: 7723 - RNA, 999 nt, Artificial Sequence
  derived and/or modified sequence opt1 from PDI/PDIA__Homo_sapiens__AAG32626
augggcguguggcugaacaaggacgacuacauccgcgaccucaagcggaucauccugugcuuccugaucgucuacauggccauccucguggggaccgaccaggacuucuacagccugcugggcguguccaagaccgccagcucccgcgagauccggcaggcguucaagaagcucgcccugaagcugcaccccgacaagaacccgaacaaccccaacgcccacgggaacuuccucaagaucaaccgcgccuacgagguccugaaggacgaggaccugcggaagaaguacgacaaguacggcgagaaggggcucgaggacaaccagggcggccaguacgagagcuggaacuacuaccgcuacgacuucgggaucuacgacgacgaccccgagaucaucacgcuggagcggcgcgaguucgacgccgcggugaacuccggcgagcugugguucgugaacuucuacagccccgggugcucccacugccacgaccucgccccgaccuggcgggacuucgccaaggaggucgacggccugcugcgcaucggggccgugaacugcggcgacgaccggaugcucugccgcaugaagggcgugaacagcuaccccucccuguucaucuuccggagcgggauggcgcccgucaaguaccacggcgaccgcuccaaggagagccugguguccuucgccaugcagcacgugcggagcaccgucaccgagcucuggacggggaacuucgugaacuccauccagaccgccuucgccgccggcaucggcuggcugaucaccuucugcagcaagggcggggacugccugaccucccagacgcgccuccggcugagcgggaugcuggacggccucgugaacgucggguggauggacugcgcgacccaggacaaccugugcaagucccuggacaucaccaccagcacgaccgccuacuucccgcccggcgccacccucaacaacaaggagaagaacagcauccugcugcuccacuga

SEQ ID NO: 7724 - RNA, 999 nt, Artificial Sequence
  derived and/or modified sequence opt2 from PDI/PDIA__Homo_sapiens__AAG32626
augggcgucuggcucaacaaggacgacuacauccgcgaccucaagcgcaucauccucugcuuccucaucgucuacauggccauccucgucggcaccgaccaggacuucuacucccuccucggcgucuccaagaccgccuccucccgcgagauccgccaggccuucaagaagcucgcccucaagcuccaccccgacaagaaccccaacaaccccaacgcccacggcaacuuccucaagaucaaccgcgccuacgagguccucaaggacgaggaccuccgcaagaaguacgacaaguacggcgagaagggccucgaggacaaccagggcggccaguacgaguccuggaacuacuaccgcuacgacuucggcaucuacgacgacgaccccgagaucaucacccucgagcgccgcgaguucgacgccgccgucaacuccggcgagcucugguucgucaacuucuacucccccggcugcucccacugccacgaccucgcccccaccuggcgcgacuucgccaaggaggucgacggccuccuccgcaucggcgccgucaacugcggcgacgaccgcaugcucugccgcaugaagggcgucaacuccuaccccucccucuucaucuuccgcuccggcauggcccccgucaaguaccacggcgaccgcuccaaggagucccucgucuccuucgccaugcagcacguccgcuccaccgucaccgagcucuggaccggcaacuucgucaacuccauccagaccgccuucgccgccggcaucggcuggcucaucaccuucugcuccaagggcggcgacugccucaccucccagacccgccuccgccucuccggcaugcucgacggccucgucaacgucggcuggauggacugcgccacccaggacaaccucugcaagucccucgacaucaccaccuccaccaccgccuacuucccccccggcgccacccucaacaacaaggagaagaacuccauccuccuccuccacuga

SEQ ID NO: 7725 - RNA, 999 nt, Artificial Sequence
  derived and/or modified sequence opt3 from PDI/PDIA__Homo_sapiens__AAG32626
augggcguguggcugaacaaggacgauuacaucagagaccucaaaaggauuauacuuugcuuccugaucgucuauauggccauuuugguugggaccgaucaggacuuuuacagcuuacugggaguguccaagacagcuucuucacgggagauccgccaagcauucaaaaagcuagcccucaaacugcaccccgauaagaauccuaacaauccaaacgcgcaugguaauuuucuuaagauuaaccgagcuuaugaaguacugaaagacgaggauuugcguaagaaauacgacaaguauggcgaaaaagggcucgaggauaaucagggaggccaguacgaaaguuggaacuauuacagauacgacuucgguaucuaugaugacgauccggagauaaucacucuggagaggcgggaauuugacgccgcagugaauagcggggagcugugguucgucaacuuuuacucccccggauguucucacugccaugaccucgccccuacguggcgcgauuucgcuaaggaaguggacggcuuacugagaauuggcgcaguuaauuguggggaugacaggaugcuuugccggaugaagggagugaacucguauccaucauuguuuaucuuccgcagcgguauggcccccgucaaauaccacggcgaucgaaguaaggagucccuggugucuuuugcuaugcagcauguaagaagcaccguuacagagcuauggacugggaauuucgugaacuccauucaaaccgccuuugcggcaggaaucggcuggcucauaacauucuguucaaaagguggggacugccugaccagucagacuaggcuucggcugagcggaauguuggauggccucgucaaugugggcuggauggacugugccacacaggauaaccugugcaagucuuuagacauuaccacguccacuaccgcuuauuucccuccaggggccacacugaacaauaaagaaaagaacucaauccuccuucugcacuga

SEQ ID NO: 7726 - RNA, 999 nt, Artificial Sequence
  derived and/or modified sequence opt4 from PDI/PDIA__Homo_sapiens__AAG32626
augggcguguggcugaacaaggacgacuacaucagagaccugaagagaaucauccugugcuuccugaucguguacauggccauccuggugggcaccgaccaggacuucuacagccugcugggcgugagcaagaccgccagcagcagagagaucagacaggccuucaagaagcuggcccugaagcugcaccccgacaagaaccccaacaaccccaacgcccacggcaacuuccugaagaucaacagagccuacgaggugcugaaggacgaggaccugagaaagaaguacgacaaguacggcgagaagggccuggaggacaaccagggcggccaguacgagagcuggaacuacuacagauacgacuucggcaucuacgacgacgaccccgagaucaucacccuggagagaagagaguucgacgccgccgugaacagcggcgagcugugguucgugaacuucuacagccccggcugcagccacugccacgaccuggcccccaccuggagagacuucgccaaggagguggacggccugcugagaaucggcgccgugaacugcggcgacgacagaaugcugugcagaaugaagggcgugaacagcuaccccagccuguucaucuucagaagcggcauggcccccgugaaguaccacggcgacagaagcaaggagagccuggugagcuucgccaugcagcacgugagaagcaccgugaccgagcuguggaccggcaacuucgugaacagcauccagaccgccuucgccgccggcaucggcuggcugaucaccuucugcagcaagggcggcgacugccugaccagccagaccagacugagacugagcggcaugcuggacggccuggugaacgugggcuggauggacugcgccacccaggacaaccugugcaagagccuggacaucaccaccagcaccaccgccuacuucccccccggcgccacccugaacaacaaggagaagaacagcauccugcugcugcacuga

SEQ ID NO: 7727 - RNA, 999 nt, Artificial Sequence
  derived and/or modified sequence opt5 from PDI/PDIA__Homo_sapiens__AAG32626
augggcguguggcugaacaaggacgauuacaucagagaccucaaacggauuauccugugcuuccuuauugucuauauggccauccugguugggaccgaucaggacuuuuacagccuccugggaguguccaagacagcuucuagccgcgagauuagacaagccuucaaaaagcuggcgcuuaaacuccaccccgauaagaauccuaacaauccgaacgcucauggcaauuuucugaagaucaaccgggccuaugaagugcugaaagacgaggaucuccgcaagaaauacgacaaguauggggaaaaaggacuggaggauaaucagggcgggcaguacgaauccuggaacuauuacagauacgacuucggaaucuaugaugacgaucccgagauuaucacgcuugagcggcgcgaauuugacgccgcugucaauucuggcgagcugugguucgugaacuuuuacagcccuggcuguucccacugccaugaccucgcccccaccuggagagauuucgcuaaggaaguugacgggcugcuucggauuggagccgugaauuguggcgaugaccgcaugcugugcagaaugaagggggucaacucuuauccuagccucuuuaucuuccgguccggaauggcgcccgugaaauaccacggcgaucgcagcaaggagucucugguuuccuuugccaugcagcaugugagaagcacagucaccgagcuguggacagggaauuucgugaacucuauucaaaccgcuuuugccgcuggaaucggcuggcucauuacauucuguuccaaaggcggggacugccugaccagccagacgcggcuucgccugucuggaaugcucgauggccuggugaaugucggguggauggacugugccacccaggauaaccuuugcaagucccuggacaucacaaccagcacaaccgcguauuucccuccgggagccacgcucaacaauaaagaaaagaacuccauccugcugcuccacuga

SEQ ID NO: 7728 - RNA, 999 nt, Artificial Sequence
  derived and/or modified sequence opt6 from PDI/PDIA__Homo_sapiens__AAG32626
augggaguauggcuaaacaaagacgauuacauacgagaucuaaaaagaauaauauuaugcuuuuuaauaguauauauggcaauauuaguaggaacagaccaagauuucuauaguuuauuagguguaucaaaaacagcaucgagcagagaaauaagacaagcauuuaaaaaacuagcacuaaaacuacauccagauaaaaauccaaauaauccaaacgcacacggaaacuuucuaaaaauaaauagagcauaugaaguauuaaaagaugaagaucuaagaaaaaaauacgauaaguauggagaaaaaggucuagaagacaaccaaggaggacaauacgaaagcuggaauuacuaccgauacgauuucgguauauaugacgaugacccagaaauaauaacauuagaaagaagagaauucgacgcagcaguaaacucuggagaacuaugguucguuaacuuuuacucucccggauguucacacugucacgauuuagcaccaacauggagagacuuugcaaaagaaguugacggauuauuaagaauaggagcaguaaacugcggagacgauagaaugcuaugucgaaugaaaggaguaaauagcuacccaagucuauuuauauucagaucaggaauggcaccaguaaaauaccacggcgauagaucaaaagaaagcuuaguaucauucgcaaugcaacacguaagaucgacaguaacagaacuauggacaggaaacuuuguaaauagcauacaaacugcauuugcagcuggaauaggauggcuaauaacauuuuguucaaaaggaggagauugcuuaacaucucaaacaagacuaagacuaucaggaauguuagacggacuaguaaacguaggauggauggauugugcuacacaagacaauuuauguaaaaguuuagauauaacaacaucaacaacagcauauuuuccaccaggagcaacucuaaauaacaaagaaaaaaacucgauacuauuauuacacuaa

SEQ ID NO: 7729 - protein, 177 aa, Artificial Sequence [sequence omitted]

SEQ ID NO: 7730 - RNA, 534 nt, Artificial Sequence
  PDI/PDIA__Homo_sapiens__AAQ14565
augggagucugguuaaauaaagaugacuauaucagagacuugaaaaggaucauucucuguuuucugauaguguauauggccauuuuagugggcacagaucaggauuuuuacaguuuacuuggaguguccaaaacugcaagcaguagagaaauaagacaagcuuucaagaaauuggcauugaaguuacauccugauaaaaacccgaauaacccaaaugcacauggcgauuuuuuaaaaauaaauagagcauaugaaguacucaaagaugaagaucuacggaaaaaguaugacaaauauggagaaaagggacuugaggauaaucaagguggccaguaugaaagcuggaacuauuaucguuaugauuuugguauuuaugaugaugauccugaaaucauaacauuggaaagaagagaauuugaugcugcuguuaauucuggagaacugugguuuguaaauuuuuacuccccaggcuguucacacugccaugauuuagcucccacauggagagacuuugccaaagaaucccugagauaa

SEQ ID NO: 7731 - RNA, 534 nt, Artificial Sequence
  derived and/or modified sequence opt1 from PDI/PDIA__Homo_sapiens__AAQ14565
augggcguguggcugaacaaggacgacuacauccgcgaccucaagcggaucauccugugcuuccugaucgucuacauggccauccucguggggaccgaccaggacuucuacagccugcugggcguguccaagaccgccagcucccgcgagauccggcaggcguucaagaagcucgcccugaagcugcaccccgacaagaacccgaacaaccccaacgcccacggggacuuccucaagaucaaccgcgccuacgagguccugaaggacgaggaccugcggaagaaguacgacaaguacggcgagaaggggcucgaggacaaccagggcggccaguacgagagcuggaacuacuaccgcuacgacuucgggaucuacgacgacgaccccgagaucaucacgcuggagcggcgcgaguucgacgccgcggugaacuccggcgagcugugguucgugaacuucuacagccccgggugcucccacugccacgaccucgccccgaccuggcgggacuucgccaaggagagccugcgcuga

SEQ ID NO: 7732 - RNA, 534 nt, Artificial Sequence
  derived and/or modified sequence opt2 from PDI/PDIA__Homo_sapiens__AAQ14565
augggcgucuggcucaacaaggacgacuacauccgcgaccucaagcgcaucauccucugcuuccucaucgucuacauggccauccucgucggcaccgaccaggacuucuacucccuccucggcgucuccaagaccgccuccucccgcgagauccgccaggccuucaagaagcucgcccucaagcuccaccccgacaagaaccccaacaaccccaacgcccacggcgacuuccucaagaucaaccgcgccuacgagguccucaaggacgaggaccuccgcaagaaguacgacaaguacggcgagaagggccucgaggacaaccagggcggccaguacgaguccuggaacuacuaccgcuacgacuucggcaucuacgacgacgaccccgagaucaucacccucgagcgccgcgaguucgacgccgccgucaacuccggcgagcucugguucgucaacuucuacucccccggcugcucccacugccacgaccucgcccccaccuggcgcgacuucgccaaggagucccuccgcuga

SEQ ID NO: 7733 - RNA, 534 nt, Artificial Sequence
  derived and/or modified sequence opt3 from PDI/PDIA__Homo_sapiens__AAQ14565
augggcguguggcugaacaaggacgauuacaucagagaccucaaaaggauuauacuuugcuuccugaucgucuauauggccauuuugguugggaccgaucaggacuuuuacagcuuacugggaguguccaagacagcuucuucacgggagauccgccaagcauucaaaaagcuagcccucaaacugcaccccgauaagaauccuaacaauccaaacgcgcauggugacuuucuuaagauuaaucgagcuuaugaaguacugaaagaugaggacuugcguaagaaauacgauaaguauggcgaaaaagggcucgaggacaaccagggaggccaguacgaaaguuggaauuauuacagauacgauuucgguaucuaugacgaugacccggagauaaucacucuggagaggcgggaauuugacgccgcagugaacagcggggagcugugguucgucaauuuuuacucccccggauguucucacugccaugaucucgccccuacguggcgcgacuucgcuaaggaaucguuaagauga

SEQ ID NO: 7734 - RNA, 534 nt, Artificial Sequence
  derived and/or modified sequence opt4 from PDI/PDIA__Homo_sapiens__AAQ14565
augggcguguggcugaacaaggacgacuacaucagagaccugaagagaaucauccugugcuuccugaucguguacauggccauccuggugggcaccgaccaggacuucuacagccugcugggcgugagcaagaccgccagcagcagagagaucagacaggccuucaagaagcuggcccugaagcugcaccccgacaagaaccccaacaaccccaacgcccacggcgacuuccugaagaucaacagagccuacgaggugcugaaggacgaggaccugagaaagaaguacgacaaguacggcgagaagggccuggaggacaaccagggcggccaguacgagagcuggaacuacuacagauacgacuucggcaucuacgacgacgaccccgagaucaucacccuggagagaagagaguucgacgccgccgugaacagcggcgagcugugguucgugaacuucuacagccccggcugcagccacugccacgaccuggcccccaccuggagagacuucgccaaggagagccugagauga

SEQ ID NO: 7735 - RNA, 534 nt, Artificial Sequence
  derived and/or modified sequence opt5 from PDI/PDIA__Homo_sapiens__AAQ14565
augggcguguggcugaacaaggacgauuacaucagagaccucaaacggauuauccugugcuuccuuauugucuauauggccauccugguugggaccgaucaggacuuuuacagccuccugggaguguccaagacagcuucuagccgcgagauuagacaagccuucaaaaagcuggcgcuuaaacuccaccccgauaagaauccuaacaauccgaacgcucauggcgacuuucugaagaucaaucgggccuaugaagugcugaaagaugaggaccuccgcaagaaauacgauaaguauggggaaaaaggacuggaggacaaccagggcgggcaguacgaauccuggaauuauuacagauacgauuucggaaucuaugacgaugaccccgagauuaucacgcuugagcggcgcgaauuugacgccgcugucaacucuggcgagcugugguucgugaauuuuuacagcccuggcuguucccacugccaugaucucgcccccaccuggagagacuucgcuaaggaaucucugcgguga

SEQ ID NO: 7736 - RNA, 534 nt, Artificial Sequence
  derived and/or modified sequence opt6 from PDI/PDIA__Homo_sapiens__AAQ14565
augggaguauggcuaaacaaagacgacuacauaagagacuuaaaaagaauaauacuaugcuuccuaauaguauacauggcaauacuaguaggaacagaccaagacuucuacagccuacuaggaguaucaaaaacagcaucaucaagagaaauacgacaagcauucaaaaaauuagcacuaaaauuacauccagacaaaaacccaaacaacccaaacgcacacggagacuuccuaaaaauaaacagagcauacgaaguauuaaaagacgaagacuuaagaaaaaaauacgacaaauacggagaaaaaggacuagaagacaaccaaggaggacaauacgaaucauggaacuacuacagauacgacuucggaauauacgacgacgacccagaaauaauaacacuagaaagaagagaauucgacgcagcaguaaacucaggagaacuaugguucguaaacuucuacucaccaggaugcagucacugccacgaccuagcaccaacauggagagacuucgcaaaagaaucacuacgauaa

SEQ ID NO: 7737 - protein, 480 aa, Artificial Sequence [sequence omitted]

SEQ ID NO: 7738 - RNA, 1443 nt, Artificial Sequence
  Akt__Homo_sapiens__ABY87524
augagcgacguggcuauugugaaggaggguuggcugcacaaacgaggggaguacaucaagaccuggcggccacgcuacuuccuccucaagaaugauggcaccuucauuggcuacaaggagcggccgcaggauguggaccaacgugaggcuccccucaacaacuucucuguggcgcagugccagcugaugaagacggagcggccccggcccaacaccuucaucauccgcugccugcaguggaccacugucaucgaacgcaccuuccauguggagacuccugaggagcgggaggaguggacaaccgccauccagacuguggcugacggccucaagaagcaggaggaggaggagauggacuuccggucgggcucacccagugacaacucaggggcugaagagauggaggugucccuggccaagcccaagcaccgcgugaccaugaacgaguuugaguaccugaagcugcugggcaagggcacuuucggcaaggugauccuggugaaggagaaggccacaggccgcuacuacgccaugaagauccucaagaaggaagucaucguggccaaggacgagguggcccacacacucaccgagaaccgcguccugcagaacuccaggcaccccuuccucacagcccugaaguacucuuuccagacccacgaccgccucugcuuugucauggaguacgccaacgggggcgagcuguucuuccaccugucccgggagcguguguucuccgaggaccgggcccgcuucuauggcgcugagauugugucagcccuggacuaccugcacucggagaagaacgugguguaccgggaccucaagcuggagaaccucaugcuggacaaggacgggcacauuaagaucacagacuucgggcugugcaaggaggggaucaaggacggugccaccaugaagaccuuuugcggcacaccugaguaccuggcccccgaggugcuggaggacaaugacuacggccgugcaguggacuggugggggcugggcguggucauguacgagaugaugugcggucgccugcccuucuacaaccaggaccaugagaagcuuuuugagcucauccucauggaggagauccgcuucccgcgcacgcuuggucccgaggccaaguccuugcuuucagggcugcucaagaaggaccccaagcagaggcuuggcgggggcuccgaggacgccaaggagaucaugcagcaucgcuucuuugccgguaucguguggcagcacguguacgagaagaagcucagcccacccuucaagccccaggucacgucggagacugacaccagguauuuugaugaggaguucacggcccagaugaucaccaucacaccaccugaccaagaugacagcauggaguguguggacagcgagcgcaggccccacuucccccaguucuccuacucggccagcggcacggccuga

SEQ ID NO: 7739 - RNA, 1443 nt, Artificial Sequence
  derived and/or modified sequence opt1 from Akt__Homo_sapiens__ABY87524
augagcgacguggccaucgucaaggagggcuggcugcacaagcgcggggaguacaucaagaccuggcggccccgcuacuuccuccugaagaacgacggcaccuucaucggguacaaggagcggccgcaggacguggaccagcgcgaggcgccccugaacaacuucuccguggcccagugccagcucaugaagacggagcggccccgccccaacaccuucaucauccggugccugcaguggaccaccgucaucgagcgcacguuccacguggagaccccggaggagcgggaggaguggaccaccgccauccagacgguggccgacggccugaagaagcaggaggaggaggagauggacuuccgcagcgggucccccagcgacaacuccggcgccgaggagauggaggucagccucgccaagcccaagcaccgggugaccaugaacgaguucgaguaccugaagcugcucggcaaggggaccuucggcaaggugauccuggucaaggagaaggcgaccgggcgcuacuacgccaugaagauccugaagaaggaggugaucguggccaaggacgaggucgcccacacgcucaccgagaaccgggugcugcagaacucccgccaccccuuccugaccgcgcucaaguacagcuuccagacccacgaccggcugugcuucgugauggaguacgccaacggcggggagcuguucuuccaccucucccgcgagcgggucuucagcgaggaccgcgcccgguucuacggcgccgagaucguguccgcccuggacuaccugcacagcgagaagaacguggucuaccgcgaccucaagcuggagaaccugaugcucgacaaggacggccacaucaagaucacggacuucgggcugugcaaggagggcaucaaggacggggcgaccaugaagaccuucugcggcaccccggaguaccuggcccccgaggugcucgaggacaacgacuacggccgggccguggacuggugggggcugggcgucgugauguacgagaugaugugcgggcgccugcccuucuacaaccaggaccacgagaagcuguucgagcucauccugauggaggagauccgcuucccccggacgcucggcccggaggccaagucccugcugagcgggcuccugaagaaggaccccaagcagcgccugggcggcggguccgaggacgccaaggagaucaugcagcaccgguucuucgcgggcaucguguggcagcacgucuacgagaagaagcucagcccgcccuucaagccccaggugaccuccgagaccgacacccgcuacuucgacgaggaguucacggcccagaugaucaccaucaccccgcccgaccaggacgacagcauggagugcgucgacuccgagcggcgcccccacuucccccaguucagcuacagcgccuccgggaccgccuga

SEQ ID NO: 7740 - RNA, 1443 nt, Artificial Sequence
  derived and/or modified sequence opt2 from Akt__Homo_sapiens__ABY87524
auguccgacgucgccaucgucaaggagggcuggcuccacaagcgcggcgaguacaucaagaccuggcgcccccgcuacuuccuccucaagaacgacggcaccuucaucggcuacaaggagcgcccccaggacgucgaccagcgcgaggccccccucaacaacuucuccgucgcccagugccagcucaugaagaccgagcgcccccgccccaacaccuucaucauccgcugccuccaguggaccaccgucaucgagcgcaccuuccacgucgagacccccgaggagcgcgaggaguggaccaccgccauccagaccgucgccgacggccucaagaagcaggaggaggaggagauggacuuccgcuccggcucccccuccgacaacuccggcgccgaggagauggaggucucccucgccaagcccaagcaccgcgucaccaugaacgaguucgaguaccucaagcuccucggcaagggcaccuucggcaaggucauccucgucaaggagaaggccaccggccgcuacuacgccaugaagauccucaagaaggaggucaucgucgccaaggacgaggucgcccacacccucaccgagaaccgcguccuccagaacucccgccaccccuuccucaccgcccucaaguacuccuuccagacccacgaccgccucugcuucgucauggaguacgccaacggcggcgagcucuucuuccaccucucccgcgagcgcgucuucuccgaggaccgcgcccgcuucuacggcgccgagaucgucuccgcccucgacuaccuccacuccgagaagaacgucgucuaccgcgaccucaagcucgagaaccucaugcucgacaaggacggccacaucaagaucaccgacuucggccucugcaaggagggcaucaaggacggcgccaccaugaagaccuucugcggcacccccgaguaccucgcccccgagguccucgaggacaacgacuacggccgcgccgucgacugguggggccucggcgucgucauguacgagaugaugugcggccgccuccccuucuacaaccaggaccacgagaagcucuucgagcucauccucauggaggagauccgcuucccccgcacccucggccccgaggccaagucccuccucuccggccuccucaagaaggaccccaagcagcgccucggcggcggcuccgaggacgccaaggagaucaugcagcaccgcuucuucgccggcaucgucuggcagcacgucuacgagaagaagcucuccccccccuucaagccccaggucaccuccgagaccgacacccgcuacuucgacgaggaguucaccgcccagaugaucaccaucaccccccccgaccaggacgacuccauggagugcgucgacuccgagcgccgcccccacuucccccaguucuccuacuccgccuccggcaccgccuga

SEQ ID NO: 7741 - RNA, 1443 nt, Artificial Sequence
  derived and/or modified sequence opt3 from Akt__Homo_sapiens__ABY87524
augagcgacguggccaucgucaaggagggcuggcugcacaaaagaggggaauacauuaagaccuggaggccccgguauuuccuccuuaaaaacgauggaacauuuauagguuacaaggagcgcccucaggacguugaucaacgagaagcuccacugaauaacuucuccguggcacagugccaguugaugaaaacugagcguccgagacccaauacguuuaucauuagguguuuacaguggaccacaguaaucgaacggacuuuccauguggagaccccugaggaacgcgaggaauggacaaccgccauucaaacugucgcggacggccugaagaagcaggaggaggaagagauggauuuuagaucugggucaccaagugacaacagcggagcugaagagauggaagugucccuagccaaacccaagcacaggguuacaaugaaugaguucgaguaucucaaacugcuuggcaaggguaccuuugggaaagugauccuggucaaggaaaaggcaacgggacgguacuaugccaugaaaauauugaagaaagaggugaucguagcuaaggaugaaguugcacauacucucaccgagaaccgcgugcugcaaaauucucgacacccuuuccugacagcccucaaauacucguuucagacucaugacagauuaugcuucgucauggaauaugcuaacggcggcgagcuguuuuuccaccuuucaagggagcggguguuuagcgaagaucgugcccgcuucuacggggcggagauugugagugcauuggacuaccugcacuccgaaaagaaugucguuuauagagaucuaaaacucgagaaccugaugcuugacaaggauggacauaucaagauuaccgacuucggucuguguaaagaaggcaucaaggacggggccacaaugaaaaccuuuugcggaacgccagaguacuuggcucccgaggugcucgaagauaaugacuauggcagggccguagauugguggggucuggggguggucauguacgagaugauguguggacgguuaccuuucuauaaccaggaccacgaaaagcuguuugagcucauacuuauggaggaaauucgauucccacgcacucugggcccggaggcaaaaucuuugcuaagcggccugcucaagaaggaucccaaacagagacuugggggagguuccgaagacgcuaaggagaucaugcagcauagguuuuucgccggcauuguguggcagcacguuuacgaaaagaaacugucaccuccauuuaaaccccaagugacaagugagaccgauacucgguauuucgacgaggaauuuacagcgcagaugaucaccaucacgccuccagaucaggacgauagcauggagugcgucgacucugaacgcagaccccacuucccgcaauuuuccuacucagccagcgggaccgcauga

SEQ ID NO: 7742 - RNA, 1443 nt, Artificial Sequence
  derived and/or modified sequence opt4 from Akt__Homo_sapiens__ABY87524
augagcgacguggccaucgugaaggagggcuggcugcacaagagaggcgaguacaucaagaccuggagacccagauacuuccugcugaagaacgacggcaccuucaucggcuacaaggagagaccccaggacguggaccagagagaggccccccugaacaacuucagcguggcccagugccagcugaugaagaccgagagacccagacccaacaccuucaucaucagaugccugcaguggaccaccgugaucgagagaaccuuccacguggagacccccgaggagagagaggaguggaccaccgccauccagaccguggccgacggccugaagaagcaggaggaggaggagauggacuucagaagcggcagccccagcgacaacagcggcgccgaggagauggaggugagccuggccaagcccaagcacagagugaccaugaacgaguucgaguaccugaagcugcugggcaagggcaccuucggcaaggugauccuggugaaggagaaggccaccggcagauacuacgccaugaagauccugaagaaggaggugaucguggccaaggacgagguggcccacacccugaccgagaacagagugcugcagaacagcagacaccccuuccugaccgcccugaaguacagcuuccagacccacgacagacugugcuucgugauggaguacgccaacggcggcgagcuguucuuccaccugagcagagagagaguguucagcgaggacagagccagauucuacggcgccgagaucgugagcgcccuggacuaccugcacagcgagaagaacgugguguacagagaccugaagcuggagaaccugaugcuggacaaggacggccacaucaagaucaccgacuucggccugugcaaggagggcaucaaggacggcgccaccaugaagaccuucugcggcacccccgaguaccuggcccccgaggugcuggaggacaacgacuacggcagagccguggacugguggggccugggcguggugauguacgagaugaugugcggcagacugcccuucuacaaccaggaccacgagaagcuguucgagcugauccugauggaggagaucagauuccccagaacccugggccccgaggccaagagccugcugagcggccugcugaagaaggaccccaagcagagacugggcggcggcagcgaggacgccaaggagaucaugcagcacagauucuucgccggcaucguguggcagcacguguacgagaagaagcugagcccccccuucaagccccaggugaccagcgagaccgacaccagauacuucgacgaggaguucaccgcccagaugaucaccaucaccccccccgaccaggacgacagcauggagugcguggacagcgagagaagaccccacuucccccaguucagcuacagcgccagcggcaccgccuga

SEQ ID NO: 7743 - RNA, 1443 nt, Artificial Sequence
  derived and/or modified sequence opt5 from Akt__Homo_sapiens__ABY87524
augagcgacguggccaucgucaaggagggcuggcugcacaaaagaggggaauacauuaagaccuggcggccccgcuauuuccuccugaaaaacgauggaacauuuaucggcuacaaggagagaccucaggacguugaucaacgggaagcuccgcuuaauaacuucuccguggcccagugccagcugaugaaaacggagcgccccagaccuaauaccuuuauuauccggugucuccaguggacaaccgugauugaacgcacauuccaugucgagacccccgaggaaagagaggaauggacaaccgcgauccaaacgguggcugacgggcugaagaagcaggaggaggaagagauggauuuucggucuggaagcccuuccgacaacucuggcgccgaagagauggaaguuagccuugccaaacccaagcaccgcgugaccaugaaugaguucgaguaucugaaacuccuggggaagggaacauuuggcaaagucauccuggugaaggaaaaggcuaccggcagauacuaugccaugaaaauucucaagaaagagguuaucguggcuaaggaugaagucgcccauacacugaccgagaaccgggugcuucaaaauucccgccacccuuuccugacggcgcucaaauacucuuuucagacacaugacagacugugcuucgugauggaauaugccaacgggggagagcuguuuuuccaccuuagccgggagcgcgucuuuuccgaagauagagcucgguucuacggcgccgagauuguuagcgcucucgacuaccugcacucugaaaagaaugugguguauagagaucugaaacucgagaaccugaugcuugacaaggaugggcauaucaagauuaccgacuucggacuguguaaagaaggcaucaaggacggggccacaaugaaaaccuuuugcggaaccccggaguaccucgcgcccgagguccuggaagauaaugacuauggccgcgccguggauugguggggccuugggguugugauguacgagaugauguguggacggcugccuuucuauaaccaggaccacgaaaagcucuuugagcugauucugauggaggaaaucagauucccccgcacacucggcccugaggcuaaaucccugcuuagcgggcugcucaagaaggaucccaaacagcggcugggaggcgggucugaagacgccaaggagaucaugcagcauagauuuuucgcuggaauugucuggcagcacguguacgaaaagaaacuuuccccgccuuuuaaaccccaaguuacgagcgagaccgauacacgcuauuucgacgaggaauuuaccgcccagaugaucacaauuaccccucccgaucaggacgauucuauggagugcguggacuccgaacggagaccccacuucccucaauuuagcuacuccgccucuggcacggcuuga

SEQ ID NO: 7744 - protein, 480 aa, Artificial Sequence [sequence omitted]

SEQ ID NO: 7745 - RNA, 1443 nt, Artificial Sequence; identical to SEQ ID NO: 7738
  Akt__Homo_sapiens__AAH00479

SEQ ID NO: 7746 - RNA, 1443 nt, Artificial Sequence; identical to SEQ ID NO: 7739
  derived and/or modified sequence opt1 from Akt__Homo_sapiens__AAH00479

SEQ ID NO: 7747 - RNA, 1443 nt, Artificial Sequence; identical to SEQ ID NO: 7740
  derived and/or modified sequence opt2 from Akt__Homo_sapiens__AAH00479

SEQ ID NO: 7748 - RNA, 1443 nt, Artificial Sequence; identical to SEQ ID NO: 7741
  derived and/or modified sequence opt3 from Akt__Homo_sapiens__AAH00479

SEQ ID NO: 7749 - RNA, 1443 nt, Artificial Sequence; identical to SEQ ID NO: 7742
  derived and/or modified sequence opt4 from Akt__Homo_sapiens__AAH00479

SEQ ID NO: 7750 - RNA, 1443 nt, Artificial Sequence; identical to SEQ ID NO: 7743
  derived and/or modified sequence opt5 from Akt__Homo_sapiens__AAH00479

SEQ ID NO: 7751 - protein, 481 aa, Artificial Sequence
  Akt__Homo_sapiens__P31751
MNEVSVIKEGWLHKRGEYIKTWRPRYFLLKSDGSFIGYKERPEAPDQTLPPLNNFSVAECQLMKTERPRPNTFVIRCLQWTTVIERTFHVDSPDEREEWMRAIQMVANSLKQRAPGEDPMDYKCGSPSDSSTTEEMEVAVSKARAKVTMNDFDYLKLLGKGTFGKVILVREKATGRYYAMKILRKEVIIAKDEVAHTVTESRVLQNTRHPFLTALKYAFQTHDRLCFVMEYANGGELFFHLSRERVFTEERARFYGAEIVSALEYLHSRDVVYRDIKLENLMLDKDGHIKITDFGLCKEGISDGATMKTFCGTPEYLAPEVLEDNDYGRAVDWWGLGVVMYEMMCGRLPFYNQDHERLFELILMEEIRFPRTLSPEAKSLLAGLLKKDPKQRLGGGPSDAKEVMEHRFFLSINWQDVVQKKLLPPFKPQVTSEVDTRYFDDEFTAQSITITPPDRYDSLGLLELDQRTHFPQFSYSASIRE

SEQ ID NO: 7752 - RNA, 1446 nt, Artificial Sequence
  Akt__Homo_sapiens__AAA58364
augaaugaggugucugucaucaaagaaggcuggcuccacaagcguggugaauacaucaagaccuggaggccacgguacuuccugcugaagagcgacggcuccuucauuggguacaaggagaggcccgaggccccugaucagacucuaccccccuuaaacaacuucuccguagcagaaugccagcugaugaagaccgagaggccgcgacccaacaccuuugucauacgcugccugcaguggaccacagucaucgagaggaccuuccacguggauucuccagacgagagggaggaguggaugcgggccauccagauggucgccaacagccucaagcagcgggccccaggcgaggaccccauggacuacaaguguggcucccccagugacuccuccacgacugaggagauggaaguggcggucagcaaggcacgggcuaaagugaccaugaaugacuucgacuaucucaaacuccuuggcaagggaaccuuuggcaaagucauccuggugcgggagaaggccacuggccgcuacuacgccaugaagauccugcgaaaggaagucaucauugccaaggaugaagucgcucacacagucaccgagagccggguccuccagaacaccaggcacccguuccucacugcgcugaaguaugccuuccagacccacgaccgccugugcuuugugauggaguaugccaacgggggugagcuguucuuccaccugucccgggagcgugucuucacagaggagcgggcccgguuuuauggugcagagauugucucggcucuugaguacuugcacucgcgggacgugguauaccgcgacaucaagcuggaaaaccucaugcuggacaaagauggccacaucaagaucacugacuuuggccucugcaaagagggcaucagugacggggccaccaugaaaaccuucugugggaccccggaguaccuggcgccugaggugcuggaggacaaugacuauggccgggccguggacuggugggggcuggguguggucauguacgagaugaugugcggccgccugcccuucuacaaccaggaccacgagcgccucuucgagcucauccucauggaagagauccgcuucccgcgcacgcucagccccgaggccaagucccugcuugcugggcugcuuaagaaggaccccaagcagaggcuugguggggggcccagcgaugccaaggaggucauggagcacagguucuuccucagcaucaacuggcaggacgugguccagaagaagcuccugccacccuucaaaccucaggucacguccgaggucgacacaagguacuucgaugaugaauuuaccgcccaguccaucacaaucacacccccugaccgcuaugacagccugggcuuacuggagcuggaccagcggacccacuucccccaguucuccuacucggccagcauccgcgaguga

SEQ ID NO: 7753 - RNA, 1446 nt, Artificial Sequence
  derived and/or modified sequence opt1 from Akt__Homo_sapiens__AAA58364
augaacgaggugagcgucaucaaggagggcuggcugcacaagcgcggggaguacaucaagaccuggcggccccgcuacuuccuccugaaguccgacggcagcuucaucggguacaaggagcggcccgaggcccccgaccagacccugccgccccucaacaacuucuccguggccgagugccagcugaugaagacggagcgcccccggcccaacaccuucgugauccgcugccugcaguggaccaccgucaucgagcggacguuccacguggacagccccgacgagcgcgaggaguggaugcgggcgauccagaugguggccaacucccucaagcagcgcgcccccggcgaggacccgauggacuacaagugcgggagccccuccgacagcuccaccaccgaggagauggaggucgccgugagcaaggcccgggcgaaggugaccaugaacgacuucgacuaccugaagcugcucggcaagggcacguucgggaaggucauccuggugcgcgagaaggccaccggccgguacuacgccaugaagauccugcgcaaggaggugaucaucgccaaggacgaggucgcgcacaccgugaccgagucccgggugcuccagaacacgcgccaccccuuccugaccgcccugaaguacgccuuccagacccacgaccggcucugcuucgucauggaguacgccaacgggggcgagcuguucuuccaccugagccgcgagcggguguucaccgaggagcgcgcccgguucuacggggcggagaucguguccgcccucgaguaccugcacagccgcgacgucguguaccgcgacaucaagcuggagaaccucaugcuggacaaggacggccacaucaagaucacggacuucggccugugcaaggaggggaucuccgacggcgccaccaugaagaccuucugcgggacccccgaguaccucgccccggaggugcuggaggacaacgacuacggccgggccgucgacugguggggccuggggguggugauguacgagaugaugugcggccgccuccccuucuacaaccaggaccacgagcggcuguucgagcugauccucauggaggagauccgcuucccccggacgcugagccccgaggcgaagucccugcucgccgggcugcugaagaaggacccgaagcagcgccucggcgggggccccagcgacgccaaggaggucauggagcaccgguucuuccuguccaucaacuggcaggacgugguccagaagaagcugcucccgcccuucaagccccaggugaccagcgagguggacacccgcuacuucgacgacgaguucaccgcccagagcaucacgaucaccccgcccgaccgguacgacucccugggccugcucgagcuggaccagcgcacccacuucccccaguucagcuacuccgccagcauccgggaguga

SEQ ID NO: 7754 - RNA, 1446 nt, Artificial Sequence
  derived and/or modified sequence opt2 from Akt__Homo_sapiens__AAA58364
augaacgaggucuccgucaucaaggagggcuggcuccacaagcgcggcgaguacaucaagaccuggcgcccccgcuacuuccuccucaaguccgacggcuccuucaucggcuacaaggagcgccccgaggcccccgaccagacccuccccccccucaacaacuucuccgucgccgagugccagcucaugaagaccgagcgcccccgccccaacaccuucgucauccgcugccuccaguggaccaccgucaucgagcgcaccuuccacgucgacucccccgacgagcgcgaggaguggaugcgcgccauccagauggucgccaacucccucaagcagcgcgcccccggcgaggaccccauggacuacaagugcggcucccccuccgacuccuccaccaccgaggagauggaggucgccgucuccaaggcccgcgccaaggucaccaugaacgacuucgacuaccucaagcuccucggcaagggcaccuucggcaaggucauccucguccgcgagaaggccaccggccgcuacuacgccaugaagauccuccgcaaggaggucaucaucgccaaggacgaggucgcccacaccgucaccgagucccgcguccuccagaacacccgccaccccuuccucaccgcccucaaguacgccuuccagacccacgaccgccucugcuucgucauggaguacgccaacggcggcgagcucuucuuccaccucucccgcgagcgcgucuucaccgaggagcgcgcccgcuucuacggcgccgagaucgucuccgcccucgaguaccuccacucccgcgacgucgucuaccgcgacaucaagcucgagaaccucaugcucgacaaggacggccacaucaagaucaccgacuucggccucugcaaggagggcaucuccgacggcgccaccaugaagaccuucugcggcacccccgaguaccucgcccccgagguccucgaggacaacgacuacggccgcgccgucgacugguggggccucggcgucgucauguacgagaugaugugcggccgccuccccuucuacaaccaggaccacgagcgccucuucgagcucauccucauggaggagauccgcuucccccgcacccucucccccgaggccaagucccuccucgccggccuccucaagaaggaccccaagcagcgccucggcggcggccccuccgacgccaaggaggucauggagcaccgcuucuuccucuccaucaacuggcaggacgucguccagaagaagcuccucccccccuucaagccccaggucaccuccgaggucgacacccgcuacuucgacgacgaguucaccgcccaguccaucaccaucaccccccccgaccgcuacgacucccucggccuccucgagcucgaccagcgcacccacuucccccaguucuccuacuccgccuccauccgcgaguga

SEQ ID NO: 7755 - RNA, 1446 nt, Artificial Sequence
  derived and/or modified sequence opt3 from Akt__Homo_sapiens__AAA58364
augaacgaggugagcgucaucaaggaaggcuggcugcacaaaagaggggaguacauuaagaccuggaggccccgguauuuccuccuuaaauccgacggaucuuuuauagguuacaaggaacgcccugaggccccagaucagacacugccgcccuugaauaacuucucaguugcugaaugccaauuaaugaaaacugagcgaccucguccaaauacguuugugaucagaugucugcaguggaccacaguaauugagaggacuuuccauguggacagucccgaugaacgggaggaauggaugcgcgcaauccagauggucgccaacagccuaaagcagagagcgccuggcgaggacccaauggauuauaagugcgggucccccucugacucgucaaccacagaggaaauggagguggcuguuagcaaagccagggcaaaggugaccaugaaugauuuugacuaccucaaacugcuuggaaagggcacuuucgguaaagucauucuggugcgggaaaaggccacagggcgcuauuacgcuaugaagaucuugcgaaaagagguaauaaucgcaaaggaugaaguugcccacaccgugacggagaguagaguccuccaaaacacuaggcauccuuuucugaccgcucugaaauaugccuuccagacacacgaccggcucuguuuugugauggaguacgcgaauggaggcgaauuauucuuucaucugucccgugagcgcguguucacugaagagagagcaagguuuuacggcgccgaaauugucucugcucuugaguauuugcacagccgggauguuguguaccgagacaucaagcuggagaaccuaaugcucgauaaagacgggcacauuaagaucaccgacuucggacugugcaaagaagguauauccgauggcgccacaaugaagaccuucugugggacgccagaguaucuugcaccggaaguacuggaggacaaugauuacggacgcgcuguggacugguggggcuugggugucgugauguaugaaaugaugugcgggagacuccccuuuuacaaccaggaucaugagaggcuguucgaguuaauucugauggaagagauccgguuuccucgcacucucucaccagaagccaagagucuucuggcgggauugcugaaaaaggaccccaaacagagacuaggcggcgggccuagcgaugccaaggagguuauggagcacagguucuuucucucuauuaauuggcaagacgugguccagaaaaagcugcuuccacccuucaagccucaggugacauccgaaguagauacccguuauuuugacgaugaguucacugcacagucaaucacaaucaccccgcccgaccgguacgacagccugggauugcucgaacuggaucaacgaacgcauuuuccacaguucaguuacucugcuuccauuagagaguga

SEQ ID NO: 7756 - RNA, 1446 nt, Artificial Sequence
  derived and/or modified sequence opt4 from Akt__Homo_sapiens__AAA58364
augaacgaggugagcgugaucaaggagggcuggcugcacaagagaggcgaguacaucaagaccuggagacccagauacuuccugcugaagagcgacggcagcuucaucggcuacaaggagagacccgaggcccccgaccagacccugcccccccugaacaacuucagcguggccgagugccagcugaugaagaccgagagacccagacccaacaccuucgugaucagaugccugcaguggaccaccgugaucgagagaaccuuccacguggacagccccgacgagagagaggaguggaugagagccauccagaugguggccaacagccugaagcagagagcccccggcgaggaccccauggacuacaagugcggcagccccagcgacagcagcaccaccgaggagauggagguggccgugagcaaggccagagccaaggugaccaugaacgacuucgacuaccugaagcugcugggcaagggcaccuucggcaaggugauccuggugagagagaaggccaccggcagauacuacgccaugaagauccugagaaaggaggugaucaucgccaaggacgagguggcccacaccgugaccgagagcagagugcugcagaacaccagacaccccuuccugaccgcccugaaguacgccuuccagacccacgacagacugugcuucgugauggaguacgccaacggcggcgagcuguucuuccaccugagcagagagagaguguucaccgaggagagagccagauucuacggcgccgagaucgugagcgcccuggaguaccugcacagcagagacgugguguacagagacaucaagcuggagaaccugaugcuggacaaggacggccacaucaagaucaccgacuucggccugugcaaggagggcaucagcgacggcgccaccaugaagaccuucugcggcacccccgaguaccuggcccccgaggugcuggaggacaacgacuacggcagagccguggacugguggggccugggcguggugauguacgagaugaugugcggcagacugcccuucuacaaccaggaccacgagagacuguucgagcugauccugauggaggagaucagauuccccagaacccugagccccgaggccaagagccugcuggccggccugcugaagaaggaccccaagcagagacugggcggcggccccagcgacgccaaggaggugauggagcacagauucuuccugagcaucaacuggcaggacguggugcagaagaagcugcugccccccuucaagccccaggugaccagcgagguggacaccagauacuucgacgacgaguucaccgcccagagcaucaccaucaccccccccgacagauacgacagccugggccugcuggagcuggaccagagaacccacuucccccaguucagcuacagcgccagcaucagagaguga

SEQ ID NO: 7757 - RNA, 1446 nt, Artificial Sequence
  derived and/or modified sequence opt5 from Akt__Homo_sapiens__AAA58364
augaacgaggugagcgucaucaaggaaggcuggcugcacaaaagaggggaguacauuaagaccuggcggccccgcuauuuccuccugaaauccgacggaucuuuuaucggcuacaaggaaagaccugaggccccggaucagacacuucccccucugaauaacuucagcguugcugaaugccaacucaugaaaacggagcggccccgcccuaauaccuuugugauuagaugucugcaguggacaaccgugaucgagcggacauuccaugucgacucccccgaugaacgcgaggaauggaugagagccauucagaugguggcgaacucucuuaagcagcgggcuccuggggaggacccgauggauuauaagugcggaagccccuccgacucuagcaccacagaggaaauggagguugccguguccaaagcccgcgcuaaggucaccaugaaugauuuugacuaccugaaacuccugggcaaggggacguucggaaaagugauccugguuagagaaaaggccaccggccgguauuacgcuaugaagauccuccgcaaagaggugauuaucgccaaggaugaagucgcgcacacagugaccgagagcagagugcugcaaaacacacggcauccuuuucuuaccgcccugaaauaugcuuuccagacgcacgaccgccucuguuuugucauggaguacgccaauggcggggaacuguucuuucaucuuucuagagagcggguuuucacagaagagagagcucgcuuuuacggagccgaaauuguguccgcgcuggaguaucuccacagccgggauguggucuacagagacaucaagcuggagaaccugaugcucgauaaagacggccacauuaagaucaccgacuucgggcugugcaaagaaggaauuucugauggcgccacaaugaagaccuucugugggacccccgaguaucuugcuccugaagugcuggaggacaaugauuacggacgcgccguugacugguggggccucggcguggucauguaugaaaugaugugcgggcggcugcccuuuuacaaccaggaucaugagagacuuuucgagcugauccucauggaagagauccgcuuuccgcggacacuguccccugaagcuaagagccugcucgccggacugcuuaaaaaggaccccaaacagagacugggcgggggaccuucugaugccaaggaggugauggagcaccgcuucuuucucuccauuaauuggcaagacguugugcagaaaaagcugcuuccucccuucaagccccaggucacgagcgaaguggauacccgguauuuugacgaugaguucacagcucaguccaucaccauuacaccgcccgacagauacgacucucugggccuccuggaacuggaucaacgcacccauuuuccucaguucagcuacuccgcgagcauccgggaguga

SEQ ID NO: 7758 - protein, 479 aa, Artificial Sequence
  Akt__Homo_sapiens__Q9Y243
MSDVTIVKEGWVQKRGEYIKNWRPRYFLLKTDGSFIGYKEKPQDVDLPYPLNNFSVAKCQLMKTERPKPNTFIIRCLQWTTVIERTFHVDTPEEREEWTEAIQAVADRLQRQEEERMNCSPTSQIDNIGEEEMDASTTHHKRKTMNDFDYLKLLGKGTFGKVILVREKASGKYYAMKILKKEVIIAKDEVAHTLTESRVLKNTRHPFLTSLKYSFQTKDRLCFVMEYVNGGELFFHLSRERVFSEDRTRFYGAEIVSALDYLHSGKIVYRDLKLENLMLDKDGHIKITDFGLCKEGITDAATMKTFCGTPEYLAPEVLEDNDYGRAVDWWGLGVVMYEMMCGRLPFYNQDHEKLFELILMEDIKFPRTLSSDAKSLLSGLLIKDPNKRLGGGPDDAKEIMRHSFFSGVNWQDVYDKKLVPPFKPQVTSETDTRYFDEEFTAQTITITPPEKYDEDGMDCMDNERRPHFPQFSYSASGRE

SEQ ID NO: 7759 - RNA, 1440 nt, Artificial Sequence
  Akt__Homo_sapiens__AAD24196
augagcgauguuaccauugugaaagaagguuggguucagaagaggggagaauauauaaaaaacuggaggccaagauacuuccuuuugaagacagauggcucauucauaggauauaaagagaaaccucaagauguggauuuaccuuauccccucaacaacuuuucaguggcaaaaugccaguuaaugaaaacagaacgaccaaagccaaacacauuuauaaucagaugucuccaguggacuacuguuauagagagaacauuucauguagauacuccagaggaaagggaagaauggacagaagcuauccaggcuguagcagacagacugcagaggcaagaagaggagagaaugaauuguaguccaacuucacaaauugauaauauaggagaggaagagauggaugccucuacaacccaucauaaaagaaagacaaugaaugauuuugacuauuugaaacuacuagguaaaggcacuuuugggaaaguuauuuugguucgagagaaggcaaguggaaaauacuaugcuaugaagauucugaagaaagaagucauuauugcaaaggaugaaguggcacacacucuaacugaaagcagaguauuaaagaacacuagacaucccuuuuuaacauccuugaaauauuccuuccagacaaaagaccguuuguguuuugugauggaauauguuaaugggggcgagcuguuuuuccauuugucgagagagcggguguucucugaggaccgcacacguuucuauggugcagaaauugucucugccuuggacuaucuacauuccggaaagauuguguaccgugaucucaaguuggagaaucuaaugcuggacaaagauggccacauaaaaauuacagauuuuggacuuugcaaagaagggaucacagaugcagccaccaugaagacauucuguggcacuccagaauaucuggcaccagagguguuagaagauaaugacuauggccgagcaguagacugguggggccuagggguugucauguaugaaaugaugugugggagguuaccuuucuacaaccaggaccaugagaaacuuuuugaauuaauauuaauggaagacauuaaauuuccucgaacacucucuucagaugcaaaaucauugcuuucagggcucuugauaaaggauccaaauaaacgccuugguggaggaccagaugaugcaaaagaaauuaugagacacaguuucuucucuggaguaaacuggcaagauguauaugauaaaaagcuuguaccuccuuuuaaaccucaaguaacaucugagacagauacuagauauuuugaugaagaauuuacagcucagacuauuacaauaacaccaccugaaaaauaugaugaggaugguauggacugcauggacaaugagaggcggccgcauuucccucaauuuuccuacucugcaaguggacgagaauaa

SEQ ID NO: 7760 - RNA, 1440 nt, Artificial Sequence
  derived and/or modified sequence opt1 from Akt__Homo_sapiens__AAD24196
augagcgacgugaccaucgucaaggagggcugggugcagaagcgcggggaguacaucaagaacuggcggccccgcuacuuccugcugaagaccgacggcuccuucaucggguacaaggagaagccgcaggacguggaccugcccuacccccugaacaacuucagcgucgccaagugccagcucaugaagacggagcggcccaagccgaacaccuucaucauccgcugccugcaguggaccaccgugaucgagcggacguuccacguggacacccccgaggagcgcgaggaguggaccgaggccauccaggcggucgccgaccggcugcagcgccaggaggaggagcggaugaacugcucccccaccagccagaucgacaacaucggcgaggaggagauggacgccuccacgacccaccacaagcgcaagaccaugaacgacuucgacuaccucaagcugcuggggaagggcaccuucggcaaggugauccucgugcgggagaaggccagcgggaaguacuacgccaugaagauccugaagaaggaggucaucaucgcgaaggacgagguggcccacacgcugaccgagucccgcgugcucaagaacacccggcaccccuuccugaccagccugaaguacuccuuccagacgaaggaccgccucugcuucgucauggaguacgugaacggcggggagcuguucuuccaccugagccgggagcgcguguucuccgaggaccggacccgcuucuacggcgccgagaucgucagcgcccucgacuaccugcacuccgggaagaucguguaccgggaccugaagcucgagaaccugaugcuggacaaggacggccacaucaagaucaccgacuucggccucugcaaggaggggaucaccgacgcggccacgaugaagaccuucugcggcaccccggaguaccuggcccccgaggugcuggaggacaacgacuacgggcgcgccgucgacugguggggccucggcguggugauguacgagaugaugugcgggcggcugcccuucuacaaccaggaccacgagaagcuguucgagcucauccugauggaggacaucaaguucccccgcacccugagcuccgacgccaagagccuccuguccggccugcucaucaaggacccgaacaagcgccucgggggcgggcccgacgacgcgaaggagaucaugcggcacagcuucuucuccggcgucaacuggcaggacguguacgacaagaagcuggugccgcccuucaagccccaggucacgagcgagaccgacacccgcuacuucgacgaggaguucaccgcccagacgaucaccaucaccccgcccgagaaguacgacgaggacggcauggacugcauggacaacgagcggcgcccccacuucccccaguucagcuacuccgccagcgggcgggaguga

SEQ ID NO: 7761 - RNA, 1440 nt, Artificial Sequence
  derived and/or modified sequence opt2 from Akt__Homo_sapiens__AAD24196
auguccgacgucaccaucgucaaggagggcuggguccagaagcgcggcgaguacaucaagaacuggcgcccccgcuacuuccuccucaagaccgacggcuccuucaucggcuacaaggagaagccccaggacgucgaccuccccuacccccucaacaacuucuccgucgccaagugccagcucaugaagaccgagcgccccaagcccaacaccuucaucauccgcugccuccaguggaccaccgucaucgagcgcaccuuccacgucgacacccccgaggagcgcgaggaguggaccgaggccauccaggccgucgccgaccgccuccagcgccaggaggaggagcgcaugaacugcucccccaccucccagaucgacaacaucggcgaggaggagauggacgccuccaccacccaccacaagcgcaagaccaugaacgacuucgacuaccucaagcuccucggcaagggcaccuucggcaaggucauccucguccgcgagaaggccuccggcaaguacuacgccaugaagauccucaagaaggaggucaucaucgccaaggacgaggucgcccacacccucaccgagucccgcguccucaagaacacccgccaccccuuccucaccucccucaaguacuccuuccagaccaaggaccgccucugcuucgucauggaguacgucaacggcggcgagcucuucuuccaccucucccgcgagcgcgucuucuccgaggaccgcacccgcuucuacggcgccgagaucgucuccgcccucgacuaccuccacuccggcaagaucgucuaccgcgaccucaagcucgagaaccucaugcucgacaaggacggccacaucaagaucaccgacuucggccucugcaaggagggcaucaccgacgccgccaccaugaagaccuucugcggcacccccgaguaccucgcccccgagguccucgaggacaacgacuacggccgcgccgucgacugguggggccucggcgucgucauguacgagaugaugugcggccgccuccccuucuacaaccaggaccacgagaagcucuucgagcucauccucauggaggacaucaaguucccccgcacccucuccuccgacgccaagucccuccucuccggccuccucaucaaggaccccaacaagcgccucggcggcggccccgacgacgccaaggagaucaugcgccacuccuucuucuccggcgucaacuggcaggacgucuacgacaagaagcucgucccccccuucaagccccaggucaccuccgagaccgacacccgcuacuucgacgaggaguucaccgcccagaccaucaccaucaccccccccgagaaguacgacgaggacggcauggacugcauggacaacgagcgccgcccccacuucccccaguucuccuacuccgccuccggccgcgaguga

SEQ ID NO: 7762 - RNA, 1440 nt, Artificial Sequence
  derived and/or modified sequence opt3 from Akt__Homo_sapiens__AAD24196
augagcgacgugaccaucgucaaggagggcuggguucagaaaagaggggaauacauuaagaacuggaggccccgguauuuccugcucaaaacagauggauccuuuauagguuacaaggagaaaccucaagacguggaucuuccauauccgcugaauaacuucucuguagccaagugccaguugaugaagacugaacgccccaaaccuaauacguuuaucauucgauguuuacaguggaccacagugaucgagcguacuuuccacgucgacaccccagaagagagagaggaauggacagaggcuauucaggcaguggccgauaggcugcaacggcaggaagaggagcgcaugaacugcucacccaccagucagaucgacaauauaggcgaagaggaaauggaugcgagcacuacacaucacaagagaaaaaccaugaacgacuuugauuaccuaaagcuccuggggaaaggaacguucggcaagguuauccuugugagggagaaggcuuccgguaaauauuacgccaugaagauucugaaaaaggaagucaucauugcaaaagacgagguggcccauacuuugaccgagucucggguacucaagaauacacgccacccuuuucugacuucgcugaaauauucauuccagaccaaggaucgacucuguuuuguuauggaauacgugaacgggggagaguuauucuuucaucugagcagagaaagggucuucagugaggaccggacacguuuuuacggcgcugaaaucguguccgcacuugauuauuugcacucuggcaagauaguguaccgcgaccugaaacuagagaaucucaugcuggacaaggaugggcacauuaaaaucaccgacuucggacuuugcaaggaggguauuacggaugccgcuacuaugaaaacauucuguggcaccccagaauaucuggcccccgaggucuuggaagacaacgauuacgggagagcgguugacugguggggacucggcgugguaauguaugagaugaugugcgguaggcugccuuuuuacaaucaagaucaugaaaaguuauucgagcugauccucauggaggacaucaaguuuccacggacucuuagcuccgaugcaaaaucacuguugagugggcuacugauuaaggacccgaacaaacgacucggaggcggccccgaugacgccaaggaaauaaugcgccacagcuucuuuucuggggugaauuggcaggacgucuaugauaaaaagcuggugccuccauucaagccccagguuacauccgagaccgacacgagauacuuugaugaagaguucaccgcucagacaaucacuauuaccccuccagagaaauacgacgaagauggaauggacuguauggauaacgagaggcggccccauuuuccgcaauucucauauagcgccaguggucgcgaauga

SEQ ID NO: 7763 - RNA, 1440 nt, Artificial Sequence
  derived and/or modified sequence opt4 from Akt__Homo_sapiens__AAD24196
augagcgacgugaccaucgugaaggagggcugggugcagaagagaggcgaguacaucaagaacuggagacccagauacuuccugcugaagaccgacggcagcuucaucggcuacaaggagaagccccaggacguggaccugcccuacccccugaacaacuucagcguggccaagugccagcugaugaagaccgagagacccaagcccaacaccuucaucaucagaugccugcaguggaccaccgugaucgagagaaccuuccacguggacacccccgaggagagagaggaguggaccgaggccauccaggccguggccgacagacugcagagacaggaggaggagagaaugaacugcagccccaccagccagaucgacaacaucggcgaggaggagauggacgccagcaccacccaccacaagagaaagaccaugaacgacuucgacuaccugaagcugcugggcaagggcaccuucggcaaggugauccuggugagagagaaggccagcggcaaguacuacgccaugaagauccugaagaaggaggugaucaucgccaaggacgagguggcccacacccugaccgagagcagagugcugaagaacaccagacaccccuuccugaccagccugaaguacagcuuccagaccaaggacagacugugcuucgugauggaguacgugaacggcggcgagcuguucuuccaccugagcagagagagaguguucagcgaggacagaaccagauucuacggcgccgagaucgugagcgcccuggacuaccugcacagcggcaagaucguguacagagaccugaagcuggagaaccugaugcuggacaaggacggccacaucaagaucaccgacuucggccugugcaaggagggcaucaccgacgccgccaccaugaagaccuucugcggcacccccgaguaccuggcccccgaggugcuggaggacaacgacuacggcagagccguggacugguggggccugggcguggugauguacgagaugaugugcggcagacugcccuucuacaaccaggaccacgagaagcuguucgagcugauccugauggaggacaucaaguuccccagaacccugagcagcgacgccaagagccugcugagcggccugcugaucaaggaccccaacaagagacugggcggcggccccgacgacgccaaggagaucaugagacacagcuucuucagcggcgugaacuggcaggacguguacgacaagaagcuggugccccccuucaagccccaggugaccagcgagaccgacaccagauacuucgacgaggaguucaccgcccagaccaucaccaucaccccccccgagaaguacgacgaggacggcauggacugcauggacaacgagagaagaccccacuucccccaguucagcuacagcgccagcggcagagaguga

SEQ ID NO: 7764 - RNA, 1440 nt, Artificial Sequence
  derived and/or modified sequence opt5 from Akt__Homo_sapiens__AAD24196
augagcgacgugaccaucgucaaggagggcuggguucagaaaagaggggaauacauuaagaacuggcggccccgcuauuuccugcucaaaacagauggauccuuuaucggcuacaaggagaaaccucaagacguggaucugccguauccccuuaauaacuucucuguggccaagugccagcugaugaagacggaaagaccuaaacccaauaccuuuauuauccggugucuccaguggacaaccgucauugagcgcacauuccacguggacaccccugaagagagagaggaauggacagaggcuauccaggccguugcggaucggcugcaacgccaggaagaggagagaaugaacugcagccccaccucccagaucgacaauauuggggaagaggaaauggaugcuucuacgacccaucacaagcggaaaacaaugaacgacuuugauuaccuuaagcugcucggaaaaggcaccuucgggaaggugauccugguccgcgagaaggccagcggaaaauauuacgccaugaagauucugaaaaaggaagugaucauugcuaaagacgagguugcccauacacucaccgaguccagagugcugaagaauacgcggcacccuuuucuuacaucucugaaauauagcuuccagaccaaggaucgccucuguuuugucauggaauacgugaacggcggcgagcuguucuuucaucuuuccagagaacggguguucagcgaggaccgcacaagauuuuacggggcugaaaucgucucugcccuggauuaucuccacuccggaaagauuguuuaccgggaccugaaacuggagaaucucaugcuggacaaggauggccacaucaaaaucaccgacuucgggcuuugcaaggagggaauuaccgaugcggccacaaugaaaacguucuguggcaccccggaauaucuggcucccgaggugcucgaagacaacgauuacgggagagccguggacugguggggacugggcgucgugauguaugagaugaugugcggccgccuuccuuuuuacaaucaagaucaugaaaagcuguucgagcucauccugauggaggacauuaaguuuccccggacacugagcucugaugcuaaaucccuccugagcgggcuucugaucaaggacccuaacaaaagacucggaggcgggcccgaugacgccaaggaaauuaugcgccacucuuucuuuuccggaguuaauuggcaggacguguaugauaaaaagcuggucccgccuuucaagccccaggugaccagcgagacagacacccgguacuuugaugaagaguucacggcgcagacaaucaccaucaccccucccgagaaauacgacgaagauggcauggacuguauggauaacgagagacgcccccauuuuccucaauucuccuauucugccagcgggcgggaauga

SEQ ID NO: 7765 - protein, 505 aa, Artificial Sequence
  ATF2__Homo_sapiens__P15336
MKFKLHVNSARQYKDLWNMSDDKPFLCTAPGCGQRFTNEDHLAVHKHKHEMTLKFGPARNDSVIVADQTPTPTRFLKNCEEVGLFNELASPFENEFKKASEDDIKKMPLDLSPLATPIIRSKIEEPSVVETTHQDSPLPHPESTTSDEKEVPLAQTAQPTSAIVRPASLQVPNVLLTSSDSSVIIQQAVPSPTSSTVITQAPSSNRPIVPVPGPFPLLLHLPNGQTMPVAIPASITSSNVHVPAAVPLVRPVTMVPSVPGIPGPSSPQPVQSEAKMRLKAALTQQHPPVTNGDTVKGHGSGLVRTQSEESRPQSLQQPATSTTETPASPAHTTPQTQSTSGRRRRAANEDPDEKRRKFLERNRAAASRCRQKRKVWVQSLEKKAEDLSSLNGQLQSEVTLLRNEVAQLKQLLLAHKDCPVTAMQKKSGYHTADKDDSSEDISVPSSPHTEAIQHSSVSTSNGVSSTSKAEAVATSVLTQMADQSTEPALSQIVMAPSSQSQPSGS

SEQ ID NO: 7766 - RNA, 1518 nt, Artificial Sequence
  ATF2__Homo_sapiens__CCDS2262.1
augaaauucaaguuacaugugaauucugccaggcaauacaaggaccuguggaauaugagugaugacaaacccuuucuauguacugcgccuggauguggccagcguuuuaccaacgaggaucauuuggcuguccauaaacauaaacaugagaugacacugaaauuugguccagcacguaaugacagugucauuguggcugaucagaccccaacaccaacaagauucuugaaaaacugugaagaaguggguuuguuuaaugaguuggcgaguccauuugagaaugaauucaagaaagcuucagaagaugacauuaaaaaaaugccucuagauuuauccccucuugcaacaccuaucauaagaagcaaaauugaggagccuucuguuguagaaacaacucaccaggauaguccuuuaccucacccagagucuacuaccagugaugagaaggaaguaccauuggcacaaacugcacagcccacaucagcuauuguucguccagcaucauuacagguucccaaugugcugcuuacaaguucugacucaaguguaauuauucagcaggcaguaccuucaccaaccucaaguacuguaaucacccaggcaccauccucuaacaggccaauugucccuguaccaggcccauuuccucuucuguuacaucuuccuaauggacaaaccaugccuguugcuauuccugcaucaauuacaaguucuaaugugcauguuccagcugcagucccacucguucgaccagucaccauggugccuaguguuccaggaaucccagguccuuccucuccccaaccaguacagucagaagcaaaaaugagauuaaaagcugcuuugacccagcaacauccuccaguuaccaauggugauacugucaaaggucaugguagcggauugguuaggacucagucagaggaaucucgaccgcagucauuacaacagccagccacauccacuacagaaacuccggcuucuccagcucacacaacuccacagacccaaaguacaaguggucgucggagaagagcagcuaacgaagauccugaugaaaaaaggagaaaguuuuuagagcgaaauagagcagcagcuucaagaugccgacaaaaaaggaaagucuggguucagucuuuagagaagaaagcugaagacuugaguucauuaaauggucagcugcagagugaagucacccugcugagaaaugaaguggcacagcugaaacagcuucuucuggcucauaaagauugcccuguaaccgccaugcagaagaaaucuggcuaucauacugcugauaaagaugauaguucagaagacauuucagugccgaguaguccacauacagaagcuauacagcauaguucggucagcacauccaauggagucaguucaaccuccaaggcagaagcuguagccacuucaguccucacccagauggcggaccagaguacagagccugcucuuucacagaucguuauggcuccuuccucccagucacagcccucaggaaguuga

SEQ ID NO: 7767 - RNA, 1518 nt, Artificial Sequence
  derived and/or modified sequence opt1 from ATF2__Homo_sapiens__CCDS2262.1
augaaguucaagcugcacgugaacagcgcccgccaguacaaggaccucuggaacauguccgacgacaagcccuuccugugcaccgccccgggcugcgggcagcgguucaccaacgaggaccaccuggcgguccacaagcacaagcacgagaugacgcucaaguucggccccgcccgcaacgacagcgugaucguggccgaccagacccccacccccacccgguuccugaagaacugcgaggaggucgggcuguucaacgagcucgccuccccguucgagaacgaguucaagaaggccagcgaggacgacaucaagaagaugccccuggaccugagcccccucgcgacgcccaucauccgcagcaagaucgaggagccguccgugguggagaccacccaccaggacagcccccugccccaccccgaguccaccacgagcgacgagaaggaggucccgcuggcccagaccgcccagcccaccuccgccaucgugcggcccgcgagccuccaggugcccaacguccugcugaccuccagcgacuccagcgugaucauccagcaggccgugccgucccccacgagcuccaccgucaucacccaggcccccagcagcaaccgccccaucgugccggugcccggccccuucccccuccugcugcaccucccgaacgggcagaccaugcccgucgccauccccgccuccaucacgagcuccaacgugcacgugcccgcggccgucccgcuggugcggcccgugaccaugguccccagcgugccgggcauccccggccccuccagcccccagccggugcaguccgaggccaagaugcgccugaaggccgcccucacccagcagcacccgcccgucaccaacggggacacggugaagggccacgggagcggccugguccggacccaguccgaggagagccgcccccagucccugcagcagcccgcgaccagcaccacggagacccccgccucccccgcccacaccacgccccagacccagagcaccuccgggcggcgccggcgcgccgccaacgaggacccggacgagaagcggcgcaaguuccucgagcggaaccgcgcggccgccagccggugccgccagaagcggaaggugugggugcagucccuggagaagaaggccgaggaccugagcucccucaacggccagcugcagagcgaggucacccugcuccgcaacgagguggcccagcugaagcagcugcuccuggcgcacaaggacugccccgugaccgccaugcagaagaaguccggcuaccacacggccgacaaggacgacuccagcgaggacaucuccguccccagcagcccccacaccgaggccauccagcacuccuccgugagcaccuccaacggggugagcuccaccagcaaggcggaggccgucgccacguccgugcugacccagauggccgaccagagcaccgagccggcccucucccagaucgugauggcgcccagcucccagagccagcccagcggcuccuga

SEQ ID NO: 7768 - RNA, 1518 nt, Artificial Sequence
  derived and/or modified sequence opt2 from ATF2__Homo_sapiens__CCDS2262.1
augaaguucaagcuccacgucaacuccgcccgccaguacaaggaccucuggaacauguccgacgacaagcccuuccucugcaccgcccccggcugcggccagcgcuucaccaacgaggaccaccucgccguccacaagcacaagcacgagaugacccucaaguucggccccgcccgcaacgacuccgucaucgucgccgaccagacccccacccccacccgcuuccucaagaacugcgaggaggucggccucuucaacgagcucgccucccccuucgagaacgaguucaagaaggccuccgaggacgacaucaagaagaugccccucgaccucuccccccucgccacccccaucauccgcuccaagaucgaggagcccuccgucgucgagaccacccaccaggacuccccccucccccaccccgaguccaccaccuccgacgagaaggaggucccccucgcccagaccgcccagcccaccuccgccaucguccgccccgccucccuccagguccccaacguccuccucaccuccuccgacuccuccgucaucauccagcaggccguccccucccccaccuccuccaccgucaucacccaggcccccuccuccaaccgccccaucguccccguccccggccccuucccccuccuccuccaccuccccaacggccagaccaugcccgucgccauccccgccuccaucaccuccuccaacguccacguccccgccgccgucccccucguccgccccgucaccaugguccccuccguccccggcauccccggccccuccuccccccagcccguccaguccgaggccaagaugcgccucaaggccgcccucacccagcagcacccccccgucaccaacggcgacaccgucaagggccacggcuccggccucguccgcacccaguccgaggagucccgcccccagucccuccagcagcccgccaccuccaccaccgagacccccgccucccccgcccacaccaccccccagacccaguccaccuccggccgccgccgccgcgccgccaacgaggaccccgacgagaagcgccgcaaguuccucgagcgcaaccgcgccgccgccucccgcugccgccagaagcgcaaggucuggguccagucccucgagaagaaggccgaggaccucuccucccucaacggccagcuccaguccgaggucacccuccuccgcaacgaggucgcccagcucaagcagcuccuccucgcccacaaggacugccccgucaccgccaugcagaagaaguccggcuaccacaccgccgacaaggacgacuccuccgaggacaucuccguccccuccuccccccacaccgaggccauccagcacuccuccgucuccaccuccaacggcgucuccuccaccuccaaggccgaggccgucgccaccuccguccucacccagauggccgaccaguccaccgagcccgcccucucccagaucgucauggcccccuccucccagucccagcccuccggcuccuga

SEQ ID NO: 7769 - RNA, 1518 nt, Artificial Sequence
  derived and/or modified sequence opt3 from ATF2__Homo_sapiens__CCDS2262.1
augaaguucaaacugcacgugaacagcgccagacaguacaaggaccucuggaauauguccgaugacaaacccuuucuuugcaccgcuccuggcugugggcaaagguucacaaacgaggaucaucuggcaguccacaagcauaaacacgaaaugacuuugaaguuuggaccagcccggaaugacucuguuaucguggcggaucagacgccgacccccacacgcuucuuaaagaacugcgaggaaguaggucuguuuaaugagcuagcuucaccuuucgaaaacgaguuuaaaaaggccagugaggacgauauuaaaaagaugccacucgaccugagcccccuugcaacuccuauaauccgauccaaaauugaggaaccaucuguggucgaaaccacacaucaggauucgccccugccucacccagagucaaccacuagcgacgagaaggaagugccguuggcccagacagcucaacccaccagugcaaucguucguccugccucccuccaggugccaaauguccugcugacgucuagcgauuccucagugauuauccagcaggcuguacccaguccuacuagcucuaccguuauaacacaagccccauccucaaacagacccaucgugccggucccuggccccuucccacucuuacugcaccuuccuaaugggcagacuaugcccguggcgauuccagcaagcaucaccaguucuaacgugcauguccccgccgcuguuccuuuggugaggccaguaacaauggugccguccguccccggcauuccuggaccaagcucgccccagccugugcagucugaggccaagaugcggcugaaagcagcucuaacccaacagcacccacccguuacgaauggugacacugugaaggggcauggauccggccucguccgcacacagucagaagagaguagaccgcaaagccugcagcagccugccaccuccacuacagaaaccccagcgucucccgcccacacgaccccucagacacaaagcacuucaggcaggcggcgccgagcagcuaacgaggaucccgacgagaaaagaaggaaguuucuugaacggaaucgugccgcugccagucgcuguagacagaaaaggaagguguggguacagucccuggagaaaaaggcagaagacuugagcucucucaacgggcagcugcaaucagagguuaccuuacugcggaaugaaguggcccagcucaagcagcuucuguuggcucacaaagauugcccagucacagcgaugcagaagaaaaguggauaucauacugcagacaaggaugacagcuccgaggauaucucugugccuucgagcccccacaccgaggccauacaacauuccucagucaguacaucuaacggugugagcuccaccucaaaagcugaagccguugcaacuagcgugcuaacgcagauggccgaccagucuacagagccagcucugucccagauuguaauggccccgaguagccaaucucagccuuccggcucauga

SEQ ID NO: 7770 - RNA, 1518 nt, Artificial Sequence
  derived and/or modified sequence opt4 from ATF2__Homo_sapiens__CCDS2262.1
augaaguucaagcugcacgugaacagcgccagacaguacaaggaccuguggaacaugagcgacgacaagcccuuccugugcaccgcccccggcugcggccagagauucaccaacgaggaccaccuggccgugcacaagcacaagcacgagaugacccugaaguucggccccgccagaaacgacagcgugaucguggccgaccagacccccacccccaccagauuccugaagaacugcgaggaggugggccuguucaacgagcuggccagccccuucgagaacgaguucaagaaggccagcgaggacgacaucaagaagaugccccuggaccugagcccccuggccacccccaucaucagaagcaagaucgaggagcccagcgugguggagaccacccaccaggacagcccccugccccaccccgagagcaccaccagcgacgagaaggaggugccccuggcccagaccgcccagcccaccagcgccaucgugagacccgccagccugcaggugcccaacgugcugcugaccagcagcgacagcagcgugaucauccagcaggccgugcccagccccaccagcagcaccgugaucacccaggcccccagcagcaacagacccaucgugcccgugcccggccccuucccccugcugcugcaccugcccaacggccagaccaugcccguggccauccccgccagcaucaccagcagcaacgugcacgugcccgccgccgugccccuggugagacccgugaccauggugcccagcgugcccggcauccccggccccagcagcccccagcccgugcagagcgaggccaagaugagacugaaggccgcccugacccagcagcacccccccgugaccaacggcgacaccgugaagggccacggcagcggccuggugagaacccagagcgaggagagcagaccccagagccugcagcagcccgccaccagcaccaccgagacccccgccagccccgcccacaccaccccccagacccagagcaccagcggcagaagaagaagagccgccaacgaggaccccgacgagaagagaagaaaguuccuggagagaaacagagccgccgccagcagaugcagacagaagagaaaggugugggugcagagccuggagaagaaggccgaggaccugagcagccugaacggccagcugcagagcgaggugacccugcugagaaacgagguggcccagcugaagcagcugcugcuggcccacaaggacugccccgugaccgccaugcagaagaagagcggcuaccacaccgccgacaaggacgacagcagcgaggacaucagcgugcccagcagcccccacaccgaggccauccagcacagcagcgugagcaccagcaacggcgugagcagcaccagcaaggccgaggccguggccaccagcgugcugacccagauggccgaccagagcaccgagcccgcccugagccagaucgugauggcccccagcagccagagccagcccagcggcagcuga

SEQ ID NO: 7771 - RNA, 1518 nt, Artificial Sequence
  derived and/or modified sequence opt5 from ATF2__Homo_sapiens__CCDS2262.1
augaaguucaaacugcacgugaacagcgccagacaguacaaggaccucuggaauauguccgaugacaaacccuuucugugcaccgcuccuggcugugggcaacgguucacaaacgaggaucaucuugccguccacaagcauaaacacgaaaugacgcugaaguuuggaccggcgcgcaaugacucuguuaucguggcugaucagacccccacaccuaccagauuccucaagaacugcgaggaagugggccuguuuaaugagcuugccagccccuucgaaaacgaguuuaaaaaggccuccgaggacgauauuaaaaagaugccucuggaccucucuccccuggcuacaccuaucauucggagcaaaaucgaggaaccguccgucguggaaaccacacaucaggauucuccccugccucaccccgagagcaccacguccgacgagaaggaaguuccucucgcccagaccgcucaacccacaagcgccauugugcgcccggcgucucugcaggucccuaaugugcuucugaccuccagcgauucuuccguuaucauccagcaggccgugcccagcccuacaucuuccaccgucauuacgcaagcucccagcuccaacagacccaucgugccugugccggggcccuucccucuccugcuucaucugcccaauggacagacaaugccugucgccauucccgcuucuaucaccagcuccaacguucacgugccggccgcggugccucucguccggcccgugacaaugguuccuagcgugcccggcauuccugggcccucuuccccgcagccuguccagagcgaggccaagaugcgccugaaagcugcccugacccaacagcacccucccgugaccaauggagacacaguuaagggccauggcucugggcucgugagaacgcagagcgaagagucccggccccaaucucugcagcagccggcuaccagcacaaccgaaacacccgccuccccugcccacaccacgccccagacacaaagcaccucuggacgcagacggcgcgcugcgaacgaggauccugacgagaaaagacggaaguuucuugaacgcaauagagccgcugccucccgguguagacagaaacgcaaggucugggugcagagccuggagaaaaaggccgaagaccucucuucccugaacggccagcuucaaagcgaggucacccugcuccggaaugaaguggcucagcugaagcagcugcuccuggcccacaaagauugccccguuacagcgaugcagaagaaauccggguaucauaccgcugacaaggaugacucuagcgaggauaucuccgugccuucuagcccccacacagaggccauucaacauuccagcgucucuacguccaacggagugagcucuaccuccaaagccgaagcuguugccacaagcgugcuuacccagauggcugaccagucuacagagccggcccugagccagaucgucauggcgccuuccagccaaucucagcccuccggcagcuga

SEQ ID NO: 7772 - protein, 282 aa, Artificial Sequence
  C1QBP__Homo_sapiens__Q07021
MLPLLRCVPRVLGSSVAGLRAAAPASPFRQLLQPAPRLCTRPFGLLSVRAGSERRPGLLRPRGPCACGCGCGSLHTDGDKAFVDFLSDEIKEERKIQKHKTLPKMSGGWELELNGTEAKLVRKVAGEKITVTFNINNSIPPTFDGEEEPSQGQKVEEQEPELTSTPNFVVEVIKNDDGKKALVLDCHYPEDEVGQEDEAESDIFSIREVSFQSTGESEWKDTNYTLNTDSLDWALYDHLMDFLADRGVDNTFADELVELSTALEHQEYITFLEDLKSFVKSQ

SEQ ID NO: 7773 - RNA, 849 nt, Artificial Sequence
  C1QBP__Homo_sapiens__AAA16315
augcugccucugcugcgcugcgugccccgugugcugggcuccuccgucgccggccuccgcgcugccgcgcccgccucgccuuuccggcagcuccugcagccggcaccccggcugugcacccggcccuucgggcugcucagcgugcgcgcagguuccgagcggcggccgggccuccugcggccucgcggacccugcgccuguggcuguggcugcggcucgcugcacaccgacggagacaaagcuuuuguugauuuccugagugaugaaauuaaggaggaaagaaaaauucagaagcauaaaacccucccuaagaugucuggagguugggagcuggaacugaaugggacagaagcgaaauuagugcggaaaguugccggggaaaaaaucacggucacuuucaacauuaacaacagcaucccaccaacauuugauggugaggaggaacccucgcaagggcagaagguugaagaacaggagccugaacugacaucaacucccaauuucgugguugaaguuauaaagaaugaugauggcaagaaggcccuuguguuggacugucauuauccagaggaugagguuggacaagaagacgaggcugagagugacaucuucucuaucagggaaguuagcuuucaguccacuggcgagucugaauggaaggauacuaauuauacacucaacacagauuccuuggacugggccuuauaugaccaccuaauggauuuccuugccgaccgagggguggacaacacuuuugcagaugagcugguggagcucagcacagcccuggagcaccaggaguacauuacuuuucuugaagaccucaagaguuuugucaagagccaguag

SEQ ID NO: 7774 - RNA, 849 nt, Artificial Sequence
  derived and/or modified sequence opt1 from C1QBP__Homo_sapiens__AAA16315
augcugccccugcugcgcugcgugccgcggguccugggcagcuccguggccgggcuccgcgccgcggcccccgccagccccuuccggcagcugcugcagcccgccccgcgccucugcacccggcccuucggccugcuguccgugcgcgccgggagcgagcggcgccccggccuccugcggccccgcgggccgugcgcgugcggcugcggcugcgggucccugcacaccgacggcgacaaggccuucgucgacuuccucagcgacgagaucaaggaggagcggaagauccagaagcacaagacgcugcccaagauguccgggggcugggagcuggagcucaacgggaccgaggccaagcuggugcgcaagguggccggcgagaagaucaccgucaccuucaacaucaacaacagcaucccgcccacguucgacggcgaggaggagcccucccaggggcagaagguggaggagcaggagcccgagcugaccagcacccccaacuucguggucgaggugaucaagaacgacgacggcaagaaggcgcucgugcuggacugccacuaccccgaggacgaggucgggcaggaggacgaggccgaguccgacaucuucagcauccgggagguguccuuccagagcaccggcgaguccgaguggaaggacacgaacuacacccugaacaccgacagccucgacugggcccuguacgaccaccugauggacuuccucgccgaccgcggcguggacaacaccuucgccgacgagcuggucgagcuguccacggcgcucgagcaccaggaguacaucaccuuccuggaggaccucaagagcuucgugaagucccaguga

SEQ ID NO: 7775 - RNA, 849 nt, Artificial Sequence
  derived and/or modified sequence opt2 from C1QBP__Homo_sapiens__AAA16315
augcucccccuccuccgcugcgucccccgcguccucggcuccuccgucgccggccuccgcgccgccgcccccgccucccccuuccgccagcuccuccagcccgccccccgccucugcacccgccccuucggccuccucuccguccgcgccggcuccgagcgccgccccggccuccuccgcccccgcggccccugcgccugcggcugcggcugcggcucccuccacaccgacggcgacaaggccuucgucgacuuccucuccgacgagaucaaggaggagcgcaagauccagaagcacaagacccuccccaagauguccggcggcugggagcucgagcucaacggcaccgaggccaagcucguccgcaaggucgccggcgagaagaucaccgucaccuucaacaucaacaacuccaucccccccaccuucgacggcgaggaggagcccucccagggccagaaggucgaggagcaggagcccgagcucaccuccacccccaacuucgucgucgaggucaucaagaacgacgacggcaagaaggcccucguccucgacugccacuaccccgaggacgaggucggccaggaggacgaggccgaguccgacaucuucuccauccgcgaggucuccuuccaguccaccggcgaguccgaguggaaggacaccaacuacacccucaacaccgacucccucgacugggcccucuacgaccaccucauggacuuccucgccgaccgcggcgucgacaacaccuucgccgacgagcucgucgagcucuccaccgcccucgagcaccaggaguacaucaccuuccucgaggaccucaaguccuucgucaagucccaguga

SEQ ID NO: 7776 - RNA, 849 nt, Artificial Sequence
  derived and/or modified sequence opt3 from C1QBP__Homo_sapiens__AAA16315
augcugccccuccuuagaugcgugccuaggguccugggcagcuccguugccggguugcgggcugcagccccagcgucuccguuccgccaguuacugcaacccgcuccucgacuauguacccguccauuuggacuccugucagugagagccgguagugagaggcggcccggccuucugcgcccuagagggccaugcgcauguggaugcggcugugguagcuugcacacagacggggauaaggccuucguagacuuucucuccgaugaaaucaaagaggaaaggaagauucagaaacauaagacucugcccaaaaugucuggaggcugggagcuggaacucaacggcacggaggcuaaguuagugcggaaggucgcaggggagaaaauaaccgugacauucaauaucaacaauucgauuccuccaacuuuugacggagaagaggaaccgucacagggucagaagguugaggagcaagaacccgagcugaccagcacaccuaacuucguggucgaagugaucaaaaaugaugacggcaagaaagcccuuguauuggauugccacuacccagaggacgaaguugggcaggaggaugaggcugaaagugacaucuuuuccauucgcgaggugucuuuccagagcaccggagaauccgaguggaaggauacuaacuauacacugaauaccgacucacuagauugggcccucuacgaccaucugauggacuuucuugcggaucgaggcgucgacaacacguucgcagaugaacugguggaguugaguacugcccucgagcaccaggaauauauaaccuuucuggaggacuuaaagagcuucgugaaaucucaauga

SEQ ID NO: 7777 - RNA, 849 nt, Artificial Sequence
  derived and/or modified sequence opt4 from C1QBP__Homo_sapiens__AAA16315
augcugccccugcugagaugcgugcccagagugcugggcagcagcguggccggccugagagccgccgcccccgccagccccuucagacagcugcugcagcccgcccccagacugugcaccagacccuucggccugcugagcgugagagccggcagcgagagaagacccggccugcugagacccagaggccccugcgccugcggcugcggcugcggcagccugcacaccgacggcgacaaggccuucguggacuuccugagcgacgagaucaaggaggagagaaagauccagaagcacaagacccugcccaagaugagcggcggcugggagcuggagcugaacggcaccgaggccaagcuggugagaaagguggccggcgagaagaucaccgugaccuucaacaucaacaacagcaucccccccaccuucgacggcgaggaggagcccagccagggccagaagguggaggagcaggagcccgagcugaccagcacccccaacuucgugguggaggugaucaagaacgacgacggcaagaaggcccuggugcuggacugccacuaccccgaggacgaggugggccaggaggacgaggccgagagcgacaucuucagcaucagagaggugagcuuccagagcaccggcgagagcgaguggaaggacaccaacuacacccugaacaccgacagccuggacugggcccuguacgaccaccugauggacuuccuggccgacagaggcguggacaacaccuucgccgacgagcugguggagcugagcaccgcccuggagcaccaggaguacaucaccuuccuggaggaccugaagagcuucgugaagagccaguga

SEQ ID NO: 7778 - RNA, 849 nt, Artificial Sequence
  derived and/or modified sequence opt5 from C1QBP__Homo_sapiens__AAA16315
augcugccccuccugagaugcgugccucggguccuuggcagcuccguugccgggcugcgcgcugccgcgccggcuucucccuucagacagcuccugcaaccugcuccccggcuuuguacccgcccuuuuggacugcucagcgugagagccggcuccgagcggcgccccgggcugcugagaccucggggaccgugcgccuguggcugcggguguggaucucuccacacagacggcgauaaggccuucguggacuuucugagcgaugaaaucaaagaggaacgcaagauucagaaacauaagacgcuucccaaaauguccggcgggugggagcuggaacucaacggaaccgaggcuaagcuggucagaaagguggccggcgagaaaaucacaguuaccuucaauauuaacaauucuaucccucccacauuugacggggaagaggaaccuagccagggacagaagguggaggagcaagaacccgagcuuaccuccacaccgaacuucgucguggaaguuauuaaaaaugaugacggcaagaaagcgcuggugcucgauugccacuacccugaggacgaagucgggcaggaggaugaggccgaaagcgacaucuuuucuauccgggagguguccuuccagagcaccggagaaucugaguggaaggauacgaacuauacccugaauacagacucccuggauugggcucucuacgaccaucugauggacuuucuugccgaucgcggcguggacaacaccuucgcugaugaacuggucgagcucagcacagcccuggagcaccaggaauauauuaccuuucuugaggaccugaagucuuucguuaaaucccaauga

SEQ ID NO: 7779 - protein, 245 aa, Artificial Sequence
  C1QC__Homo_sapiens__P02747
MDVGPSSLPHLGLKLLLLLLLLPLRGQANTGCYGIPGMPGLPGAPGKDGYDGLPGPKGEPGIPAIPGIRGPKGQKGEPGLPGHPGKNGPMGPPGMPGVPGPMGIPGEPGEEGRYKQKFQSVFTVTRQTHQPPAPNSLIRFNAVLTNPQGDYDTSTGKFTCKVPGLYYFVYHASHTANLCVLLYRSGVKVVTFCGHTSKTNQVNSGGVLLRLQVGEEVWLAVNDYYDMVGIQGSDSVFSGFLLFPD

SEQ ID NO: 7780 - RNA, 738 nt, Artificial Sequence
  C1QC__Homo_sapiens__CCDS227.1
auggacguggggcccagcucccugccccaccuugggcugaagcugcugcugcuccugcugcugcugccccucaggggccaagccaacacaggcugcuacgggaucccagggaugcccggccugcccggggcaccagggaaggauggguacgacggacugccggggcccaagggggagccaggaaucccagccauucccgggauccgaggacccaaagggcagaagggagaacccggcuuacccggccauccugggaaaaauggccccaugggacccccugggaugccaggggugcccggccccaugggcaucccuggagagccaggugaggagggcagauacaagcagaaauuccagucaguguucacggucacucggcagacccaccagcccccugcacccaacagccugaucagauucaacgcgguccucaccaacccgcagggagauuaugacacgagcacuggcaaguucaccugcaaaguccccggccucuacuacuuugucuaccacgcgucgcauacagccaaccugugcgugcugcuguaccgcagcggcgucaaaguggucaccuucuguggccacacguccaaaaccaaucaggucaacucgggcggugugcugcugagguugcaggugggcgaggagguguggcuggcugucaaugacuacuacgacauggugggcauccagggcucugacagcgucuucuccggcuuccugcucuuccccgacuag

SEQ ID NO: 7781 - RNA, 738 nt, Artificial Sequence
  derived and/or modified sequence opt1 from C1QC__Homo_sapiens__CCDS227.1
auggacgugggccccagcucccugccgcaccucgggcugaagcugcuccugcugcuccugcugcucccccugcgcggccaggccaacaccgggugcuacggcauccccgggaugcccggccugccgggcgcccccgggaaggacggcuacgacgggcuccccggccccaagggggagccgggcauccccgcgauccccggcauccgggggcccaagggccagaagggggagccgggccugcccggccaccccgggaagaacggccccauggggccgcccggcaugcccgggguccccggcccgaugggcauccccggggagcccggcgaggaggggcgcuacaagcagaaguuccagagcguguucaccgugacgcggcagacccaccagcccccggcccccaacucccugauccgcuucaacgccguccucaccaacccccagggcgacuacgacaccagcacggggaaguucacgugcaaggugcccggccuguacuacuucguguaccacgccucccacaccgccaaccugugcguccuccuguaccggagcggcgugaagguggucaccuucugcgggcacaccuccaagaccaaccaggugaacagcggcggggugcugcuccgccugcaggucggcgaggagguguggcuggcggugaacgacuacuacgacauggucgggauccagggcuccgacagcguguucuccggcuuccuccuguucccggacuga

SEQ ID NO: 7782 - RNA, 738 nt, Artificial Sequence
  derived and/or modified sequence opt2 from C1QC__Homo_sapiens__CCDS227.1
auggacgucggccccuccucccucccccaccucggccucaagcuccuccuccuccuccuccuccucccccuccgcggccaggccaacaccggcugcuacggcauccccggcaugcccggccuccccggcgcccccggcaaggacggcuacgacggccuccccggccccaagggcgagcccggcauccccgccauccccggcauccgcggccccaagggccagaagggcgagcccggccuccccggccaccccggcaagaacggccccaugggcccccccggcaugcccggcguccccggccccaugggcauccccggcgagcccggcgaggagggccgcuacaagcagaaguuccaguccgucuucaccgucacccgccagacccaccagccccccgcccccaacucccucauccgcuucaacgccguccucaccaacccccagggcgacuacgacaccuccaccggcaaguucaccugcaagguccccggccucuacuacuucgucuaccacgccucccacaccgccaaccucugcguccuccucuaccgcuccggcgucaaggucgucaccuucugcggccacaccuccaagaccaaccaggucaacuccggcggcguccuccuccgccuccaggucggcgaggaggucuggcucgccgucaacgacuacuacgacauggucggcauccagggcuccgacuccgucuucuccggcuuccuccucuuccccgacuga

SEQ ID NO: 7783 - RNA, 738 nt, Artificial Sequence
  derived and/or modified sequence opt3 from C1QC__Homo_sapiens__CCDS227.1
auggacgugggccccagcucccugccucaccucgggcuuaagcuguuguuacugcuacuccugcuuccacugagaggacaggccaacaccgguugcuacggcaucccggggaugcccggauugccuggcgcuccagguaaagauggguaugacggacuccccggcccuaagggcgagccagggauucccgcaauaccuggaaucagggguccaaaaggccaaaagggggaaccgggacugcccggccauccugguaaaaaugggccaaugggacccccuggcaugccaggcguccccgggccgauggguauuccuggagagcccggcgaagaggggcgguacaagcagaaguuccagucuguuuuuacagugacucgccagacgcaccaaccuccagcccccaacucacugauccgauucaaugcgguacucaccaacccacagggagauuaugacacaaguacuggcaaauuuaccuguaaggugcccgguuuauacuauuucgucuaccaugcuagccacacagccaaucugugcgugcuuuuguaucguuccgggguuaaaguggucaccuuuuguggccauacuucuaagacaaaccagguaaauucgggaggcgugcugcuaagacuccagguuggggaagagguguggcuggcagucaacgauuacuacgacaugguggguauucaaggaucagauagcguguucaguggcuuucuucuguucccugacuga

SEQ ID NO: 7784 - RNA, 738 nt, Artificial Sequence
  derived and/or modified sequence opt4 from C1QC__Homo_sapiens__CCDS227.1
auggacgugggccccagcagccugccccaccugggccugaagcugcugcugcugcugcugcugcugccccugagaggccaggccaacaccggcugcuacggcauccccggcaugcccggccugcccggcgcccccggcaaggacggcuacgacggccugcccggccccaagggcgagcccggcauccccgccauccccggcaucagaggccccaagggccagaagggcgagcccggccugcccggccaccccggcaagaacggccccaugggcccccccggcaugcccggcgugcccggccccaugggcauccccggcgagcccggcgaggagggcagauacaagcagaaguuccagagcguguucaccgugaccagacagacccaccagccccccgcccccaacagccugaucagauucaacgccgugcugaccaacccccagggcgacuacgacaccagcaccggcaaguucaccugcaaggugcccggccuguacuacuucguguaccacgccagccacaccgccaaccugugcgugcugcuguacagaagcggcgugaagguggugaccuucugcggccacaccagcaagaccaaccaggugaacagcggcggcgugcugcugagacugcaggugggcgaggagguguggcuggccgugaacgacuacuacgacauggugggcauccagggcagcgacagcguguucagcggcuuccugcuguuccccgacuga

SEQ ID NO: 7785 - RNA, 738 nt, Artificial Sequence
  derived and/or modified sequence opt5 from C1QC__Homo_sapiens__CCDS227.1
auggacgugggccccagcucccugccucaccucgggcugaaacuucugcuccugcuucugcuccugccgcugagaggacaggccaacaccggcugcuacgggauccccggaaugccuggccuccccggggcuccuggaaaggauggcuaugacggccugcccgggccuaagggagagccgggcauucccgccaucccugggauucggggacccaaaggccaaaagggggaaccuggacuucccggccauccgggcaaaaaugggccuaugggacccccuggcaugcccgggguccccggaccuaugggcaucccgggggagcccggagaagagggccgcuacaagcagaaguuccagucuguuuuuacagugacgagacagacccaccaaccucccgcgccuaacagccugauucgguucaaugcugugcucacaaacccccagggcgauuaugacaccuccacagggaaauuuaccuguaaggucccgggacuguacuauuucguguaccaugccucucacacagccaaucuuugcguucugcucuaucgcagcggcgugaaagucgugaccuuuugugggcauacguccaagaccaaccagguuaauucuggaggcgugcugcugagacuccaggucggggaagagguguggcuggcugugaacgauuacuacgacauggucggcauccaaggaagcgauuccguuuucagcggcuuucuucuguucccugacuga

SEQ ID NO: 7786 - protein, 540 aa, Artificial Sequence
  Cardif__Homo_sapiens__Q7Z434
MPFAEDKTYKYICRNFSNFCNVDVVEILPYLPCLTARDQDRLRATCTLSGNRDTLWHLFNTLQRRPGWVEYFIAALRGCELVDLADEVASVYQSYQPRTSDRPPDPLEPPSLPAERPGPPTPAAAHSIPYNSCREKEPSYPMPVQETQAPESPGENSEQALQTLSPRAIPRNPDGGPLESSSDLAALSPLTSSGHQEQDTELGSTHTAGATSSLTPSRGPVSPSVSFQPLARSTPRASRLPGPTGSVVSTGTSFSSSSPGLASAGAAEGKQGAESDQAEPIICSSGAEAPANSLPSKVPTTLMPVNTVALKVPANPASVSTVPSKLPTSSKPPGAVPSNALTNPAPSKLPINSTRAGMVPSKVPTSMVLTKVSASTVPTDGSSRNEETPAAPTPAGATGGSSAWLDSSSENRGLGSELSKPGVLASQVDSPFSGCFEDLAISASTSLGMGPCHGPEENEYKSEGTFGIHVAENPSIQLLEGNPGPPADPDGGPRPQADRKFQEREVPCHRPSPGALWLQVAVTGVLVVTLLVVLYRRRLH

SEQ ID NO: 7787 - RNA, 1623 nt, Artificial Sequence
  Cardif__Homo_sapiens__ABA54890
augccguuugcugaagacaagaccuauaaguauaucugccgcaauuucagcaauuuuugcaauguggauguuguagagauucugccuuaccugcccugccucacagcaagagaccaggaucgacugcgggccaccugcacacucucagggaaccgggacacccucuggcaucucuucaauacccuucagcggcggcccggcuggguggaguacuucauugcggcacugaggggcugugagcuaguugaucucgcggacgaaguggccucugucuaccagagcuaccagccucggaccucggaccgucccccagacccacuggagccaccgucacuuccugcugagaggccagggccccccacaccugcugcggcccacagcauccccuacaacagcugcagagagaaggagccaaguuaccccaugccuguccaggagacccaggcgccagaguccccaggagagaauucagagcaagcccugcagacgcucagccccagagccaucccaaggaauccagaugguggcccccuggaguccuccucugaccuggcagcccucagcccucugaccuccagcgggcaucaggagcaggacacagaacugggcaguacccacacagcaggugcgaccuccagccucacaccaucccgugggccugugucuccaucugucuccuuccagccccuggcccguuccacccccagggcaagccgcuugccuggacccacagggucaguuguaucuacuggcaccuccuucuccuccucauccccuggcuuggccucugcaggggcugcagaggguaaacagggugcagagagugaccaggccgagccuaucaucugcuccaguggggcagaggcaccugccaacucucugcccuccaaagugccuaccaccuugaugccugugaacacaguggcccugaaagugccugccaacccagcaucugucagcacagugcccuccaaguugccaacuagcucaaagcccccuggugcagugccuucuaaugcgcucaccaauccagcaccauccaaauugcccaucaacucaacccgugcuggcauggugccauccaaagugccuacuagcauggugcucaccaaggugucugccagcacaguccccacugacgggagcagcagaaaugaggagaccccagcagcuccaacacccgccggcgccacuggaggcagcucagccuggcuagacagcagcucugagaauaggggccuugggucggagcugaguaagccuggcgugcuggcaucccagguagacagcccguucucgggcugcuucgaggaucuugccaucagugccagcaccuccuugggcauggggcccugccauggcccagaggagaaugaguauaaguccgagggcaccuuugggauccacguggcugagaaccccagcauccagcuccuggagggcaacccugggccaccugcggacccggauggcggccccaggccacaagccgaccggaaguuccaggagagggaggugccaugccacaggcccucaccuggggcucuguggcuccagguggcugugacaggggugcugguagucacacuccugguggugcuguaccggcggcgucugcacuag

SEQ ID NO: 7788 - RNA, 1623 nt, Artificial Sequence
  derived and/or modified sequence opt1 from Cardif__Homo_sapiens__ABA54890
augcccuucgccgaggacaagaccuacaaguacaucugccgcaacuucagcaacuucugcaacguggacgucguggagauccugccguaccuccccugccugaccgcccgggaccaggaccgccugcgggcgacgugcacccucuccggcaaccgcgacacccuguggcaccuguucaacacccuccagcggcgccccggguggguggaguacuucaucgccgcccugcggggcugcgagcuggucgaccucgccgacgagguggccagcguguaccaguccuaccagccccgcacgagcgaccggccgcccgacccccuggagcccccgucccugcccgcggagcgccccgggcccccgacccccgccgccgcccacagcauccccuacaacuccugccgggagaaggagcccagcuacccgaugcccguccaggagacccaggcgcccgagucccccggcgagaacagcgagcaggcccuccagacccuguccccgcgcgccaucccccggaaccccgacgggggcccccuggagagcuccagcgaccucgccgcccuguccccgcugacgagcuccggccaccaggagcaggacaccgagcucgggagcacccacaccgcgggcgccacguccagccugacccccagccgcgggcccgugucccccagcguguccuuccagccgcuggcccggagcacgccccgcgccucccggcuccccggcccgaccgggagcgucguguccaccggcaccagcuucuccagcuccagccccggccuggccuccgcgggggccgccgagggcaagcagggggccgagagcgaccaggccgagcccaucaucugcuccagcggcgcggaggcccccgccaacucccugccgagcaaggugcccaccacccucaugcccgucaacacgguggcccugaaggugcccgccaacccggcguccgucagcaccgugcccagcaagcugcccaccuccagcaagcccccgggcgccgugcccuccaacgcccucaccaaccccgcccccagcaagcugccgaucaacuccacgcgcgcggggaugguccccagcaaggugcccaccuccauggugcugaccaaggucagcgccuccaccgugcccacggacggcagcucccggaacgaggagaccccggccgcccccacccccgccggggcgaccggcgggagcuccgccuggcucgacagcuccagcgagaaccgcggccugggcuccgagcugagcaagcccggggugcucgccagccaggucgacuccccguucagcggcugcuucgaggaccuggccaucuccgccagcacgucccuggggaugggccccugccacgggcccgaggagaacgaguacaagagcgagggcaccuucggcauccacguggcggagaacccguccauccagcuccuggaggggaaccccggcccgcccgccgaccccgacgggggcccccggccccaggccgaccgcaaguuccaggagcgcgagguccccugccaccggccgagccccggggcccuguggcuccagguggccgugaccggcguccugguggugacccugcucgucgugcuguaccgccggcgccugcacuga

SEQ ID NO: 7789 - RNA, 1623 nt, Artificial Sequence
  derived and/or modified sequence opt2 from Cardif__Homo_sapiens__ABA54890
augcccuucgccgaggacaagaccuacaaguacaucugccgcaacuucuccaacuucugcaacgucgacgucgucgagauccuccccuaccuccccugccucaccgcccgcgaccaggaccgccuccgcgccaccugcacccucuccggcaaccgcgacacccucuggcaccucuucaacacccuccagcgccgccccggcugggucgaguacuucaucgccgcccuccgcggcugcgagcucgucgaccucgccgacgaggucgccuccgucuaccaguccuaccagccccgcaccuccgaccgcccccccgacccccucgagccccccucccuccccgccgagcgccccggcccccccacccccgccgccgcccacuccauccccuacaacuccugccgcgagaaggagcccuccuaccccaugcccguccaggagacccaggcccccgagucccccggcgagaacuccgagcaggcccuccagacccucuccccccgcgccaucccccgcaaccccgacggcggcccccucgaguccuccuccgaccucgccgcccucuccccccucaccuccuccggccaccaggagcaggacaccgagcucggcuccacccacaccgccggcgccaccuccucccucacccccucccgcggccccgucucccccuccgucuccuuccagccccucgcccgcuccaccccccgcgccucccgccuccccggccccaccggcuccgucgucuccaccggcaccuccuucuccuccuccucccccggccucgccuccgccggcgccgccgagggcaagcagggcgccgaguccgaccaggccgagcccaucaucugcuccuccggcgccgaggcccccgccaacucccuccccuccaagguccccaccacccucaugcccgucaacaccgucgcccucaagguccccgccaaccccgccuccgucuccaccguccccuccaagcuccccaccuccuccaagccccccggcgccguccccuccaacgcccucaccaaccccgcccccuccaagcuccccaucaacuccacccgcgccggcaugguccccuccaagguccccaccuccaugguccucaccaaggucuccgccuccaccguccccaccgacggcuccucccgcaacgaggagacccccgccgcccccacccccgccggcgccaccggcggcuccuccgccuggcucgacuccuccuccgagaaccgcggccucggcuccgagcucuccaagcccggcguccucgccucccaggucgacucccccuucuccggcugcuucgaggaccucgccaucuccgccuccaccucccucggcaugggccccugccacggccccgaggagaacgaguacaaguccgagggcaccuucggcauccacgucgccgagaaccccuccauccagcuccucgagggcaaccccggcccccccgccgaccccgacggcggcccccgcccccaggccgaccgcaaguuccaggagcgcgagguccccugccaccgccccucccccggcgcccucuggcuccaggucgccgucaccggcguccucgucgucacccuccucgucguccucuaccgccgccgccuccacuga

SEQ ID NO: 7790 - RNA, 1623 nt, Artificial Sequence
  derived and/or modified sequence opt3 from Cardif__Homo_sapiens__ABA54890
augcccuucgccgaggacaagaccuacaaauauaucugcagaaacuuuagcaauuucuguaacguggaugucguugaaauucugccuuaccucccaugccuuacagcuagggaccaggaucggcugcgcgcaacuuguacguuguccggcaaucgagacaccuuauggcaccuguuuaacacacuacaacguagaccgggguggguggaguauuucauagccgcgcucaggggaugcgaacugguagaucuugcugacgagguggccucugucuaccagucauaucagccccggacuagcgaucgcccuccagacccccuggaaccuccaaguuugcccgcagagagaccugguccaccgacccccgccgcugcacauuccaucccuuacaauucuuguagggagaaggaaccaucguaucccaugccugugcaggagacacaagccccagaaucacccggcgagaacagcgagcaggcucuccagacccugaguccgcgggccauuccucgcaaucccgaugggggaccacuggaauccucuagcgaccucgcggcauuauccccucugacuucaaguggccaccaggagcaagauacagaacuugguagcacccauacggccggggcuacuucuuccuugacccccucacgaggaccaguuagccccagugugucuuuucagccucuggccagauccacaccaagggcaagccggcuaccgggccccacuggcucggucgugucuaccgggacauccuucucaaguagcuccccuggacucgcuucugccggugcggccgagggcaaacagggggcagaaagcgaccaggcugagccaaucauuugcucaaguggagccgaggcucccgccaacucccugccuagcaagguaccaaccacgcuuaugcccguuaauacuguggcacugaaagucccggccaacccugcuucugugucaacagugccaaguaaguugcccaccagcuccaagccucccggcgcggucccaucuaaugcacucacuaacccugcccccucgaaacugccaaucaauagcacacgugcugguaugguuccguccaaggugccuaccucaaugguauuaacgaaagugagugccucuaccguccccacagaugggagcucccgcaacgaagagacuccagcagcccccaccccugcuggagccacaggcggcucaagcgcauggcuggacucuuccagugaaaauagagggcucggaagcgagcuuucuaagccaggugugcuggcgucccaaguugacucacccuuuaguggcuguuucgaagauuuggcuauaagcgccucgacuucccuagggaugggaccuugccacggcccggaggagaacgaauacaaaucugaggguaccuuugggauccauguggcagaaaacccaagcauucagcugcucgagggcaaucccggaccuccagccgaccccgauggcgggccuaggccgcaggcugaccggaaguuccaagaacgagagguccccugucaccgcccaucaccuggagcccuguggcuucagguggcaguaacagguguucugguggucaccuugcucgugguccuguacagaaggcgguuacacuga

SEQ ID NO: 7791 - RNA, 1623 nt, Artificial Sequence
  derived and/or modified sequence opt4 from Cardif__Homo_sapiens__ABA54890
augcccuucgccgaggacaagaccuacaaguacaucugcagaaacuucagcaacuucugcaacguggacgugguggagauccugcccuaccugcccugccugaccgccagagaccaggacagacugagagccaccugcacccugagcggcaacagagacacccuguggcaccuguucaacacccugcagagaagacccggcuggguggaguacuucaucgccgcccugagaggcugcgagcugguggaccuggccgacgagguggccagcguguaccagagcuaccagcccagaaccagcgacagaccccccgacccccuggagccccccagccugcccgccgagagacccggcccccccacccccgccgccgcccacagcauccccuacaacagcugcagagagaaggagcccagcuaccccaugcccgugcaggagacccaggcccccgagagccccggcgagaacagcgagcaggcccugcagacccugagccccagagccauccccagaaaccccgacggcggcccccuggagagcagcagcgaccuggccgcccugagcccccugaccagcagcggccaccaggagcaggacaccgagcugggcagcacccacaccgccggcgccaccagcagccugacccccagcagaggccccgugagccccagcgugagcuuccagccccuggccagaagcacccccagagccagcagacugcccggccccaccggcagcguggugagcaccggcaccagcuucagcagcagcagccccggccuggccagcgccggcgccgccgagggcaagcagggcgccgagagcgaccaggccgagcccaucaucugcagcagcggcgccgaggcccccgccaacagccugcccagcaaggugcccaccacccugaugcccgugaacaccguggcccugaaggugcccgccaaccccgccagcgugagcaccgugcccagcaagcugcccaccagcagcaagccccccggcgccgugcccagcaacgcccugaccaaccccgcccccagcaagcugcccaucaacagcaccagagccggcauggugcccagcaaggugcccaccagcauggugcugaccaaggugagcgccagcaccgugcccaccgacggcagcagcagaaacgaggagacccccgccgcccccacccccgccggcgccaccggcggcagcagcgccuggcuggacagcagcagcgagaacagaggccugggcagcgagcugagcaagcccggcgugcuggccagccagguggacagccccuucagcggcugcuucgaggaccuggccaucagcgccagcaccagccugggcaugggccccugccacggccccgaggagaacgaguacaagagcgagggcaccuucggcauccacguggccgagaaccccagcauccagcugcuggagggcaaccccggcccccccgccgaccccgacggcggccccagaccccaggccgacagaaaguuccaggagagagaggugcccugccacagacccagccccggcgcccuguggcugcagguggccgugaccggcgugcugguggugacccugcugguggugcuguacagaagaagacugcacuga

SEQ ID NO: 7792 - RNA, 1623 nt, Artificial Sequence
  derived and/or modified sequence opt5 from Cardif__Homo_sapiens__ABA54890
augcccuucgccgaggacaagaccuacaaauauaucugcagaaacuuuagcaauuucuguaacguggaugucguugaaauucugccuuaccucccgugccugacagcucgggaccaggaucgccuuagagccacguguacccuguccggcaaucgggacacacucuggcaccuguuuaacacccuucaacgcagacccggguggguggaguauuucaucgcggcucugcggggaugcgaacucguggaucuggccgacgaggucgccucuguguaccagagcuaucagccucgcacauccgauagacccccugacccccuggaaccuccgucucuccccgcugagcggccugggcccccuacccccgccgcugcccauagcauuccguacaauuccugucgcgagaaggaaccuucuuaucccaugccuguucaggagacacaagcgcccgaaagccccggcgagaacuccgagcaggcccugcagacccuuagcccuagagcuaucccgcggaaucccgauggaggcccucuggaaucuuccagcgaccucgccgcucugucuccccuuacguccagcgggcaccaggagcaagauaccgaacugggaucuacacauaccgccggcgcgacauccagccucaccccuucccgcggccccgugucuccgagcgucuccuuucagccucuggccagaagcacgccccgggcuucucgccugccugggcccacaggauccgugguuagcaccggcacaucuuucagcuccucuagcccugggcucgccuccgcuggagccgccgagggcaaacagggggcugaaagcgaccaggcggagcccauuaucuguucuuccggagccgaggcuccggccaacagccugccuucuaaggugcccaccacccuuaugcccgucaauacaguggcccugaaagugccugcuaacccggccuccgucagcacgguucccuccaagcucccuaccucuagcaagcccccuggcgcggugcccuccaaugcucugacaaacccugcccccucuaaacuuccgaucaauagcaccagagccggcauggugccuuccaagguccccacaagcauggugcugaccaaaguuucugcuuccacggugccuacagaugggagcucucggaacgaagagacccccgccgcuccgaccccugccggagcgacaggcggguccagcgccuggcucgacucuagcuccgaaaauagaggacugggcagcgagcugucuaagcccgggguccucgcuucccaaguggacagcccuuuuuccggaugcuucgaagaucuggccauuucugcuagcaccucccuuggcaugggccccugccacgggcccgaggagaacgaauacaaaucugagggaacauuuggcauccauguugccgaaaacccuagcauucagcugcucgaggggaauccgggacccccugcggaccccgauggcgggccucgcccccaggccgaccggaaguuccaagaaagagaggugccuugucaccgcccgucccccggcgcucuguggcuucaggucgccgugacgggaguccuggugguuacccuccuggugguccuguaccggagacgccuccacuga

SEQ ID NO: 7793 - protein, 128 aa, Artificial Sequence
  CD59,Beta-Defensin__Homo_sapiens__P13987
MGIQGGSVLFGLLLVLAVFCHSGHSLQCYNCPNPTADCKTAVNCSSDFDACLITKAGLQVYNKCWKFEHCNFNDVTTRLRENELTYYCCKKDLCNFNEQLENGGTSLSEKTVLLLVTPFLAAAWSLHP

SEQ ID NO: 7794 - RNA, 387 nt, Artificial Sequence
  CD59,Beta-Defensin__Homo_sapiens__AAA51952
augggaauccaaggagggucuguccuguucgggcugcugcucguccuggcugucuucugccauucaggucauagccugcagugcuacaacuguccuaacccaacugcugacugcaaaacagccgucaauuguucaucugauuuugaugcgugucucauuaccaaagcuggguuacaaguguauaacaaguguuggaaguuugagcauugcaauuucaacgacgucacaacccgcuugagggaaaaugagcuaacguacuacugcugcaagaaggaccuguguaacuuuaacgaacagcuugaaaauggugggacauccuuaucagagaaaacaguucuucugcuggugacuccauuucuggcagcagccuggagccuucaucccuaa

SEQ ID NO: 7795 - RNA, 387 nt, Artificial Sequence
  derived and/or modified sequence opt1 from CD59,Beta-Defensin__Homo_sapiens__AAA51952
augggcauccagggcgggagcgugcuguucgggcuccugcugguccucgccguguucugccacuccggccacagccugcagugcuacaacugccccaacccgaccgccgacugcaagaccgcggugaacugcuccagcgacuucgacgccugccugaucacgaaggccgggcuccaggucuacaacaagugcuggaaguucgagcacugcaacuucaacgacgugaccacccgccugcgggagaacgagcugaccuacuacugcugcaagaaggaccucugcaacuucaacgagcagcuggagaacggcggcacgucccugagcgagaagaccgugcuccugcuggucacccccuuccucgccgccgcguggucccugcaccccuga

SEQ ID NO: 7796 - RNA, 387 nt, Artificial Sequence
  derived and/or modified sequence opt2 from CD59,Beta-Defensin__Homo_sapiens__AAA51952
augggcauccagggcggcuccguccucuucggccuccuccucguccucgccgucuucugccacuccggccacucccuccagugcuacaacugccccaaccccaccgccgacugcaagaccgccgucaacugcuccuccgacuucgacgccugccucaucaccaaggccggccuccaggucuacaacaagugcuggaaguucgagcacugcaacuucaacgacgucaccacccgccuccgcgagaacgagcucaccuacuacugcugcaagaaggaccucugcaacuucaacgagcagcucgagaacggcggcaccucccucuccgagaagaccguccuccuccucgucacccccuuccucgccgccgccuggucccuccaccccuga

SEQ ID NO: 7797 - RNA, 387 nt, Artificial Sequence
  derived and/or modified sequence opt3 from CD59,Beta-Defensin__Homo_sapiens__AAA51952
augggcauccaagggggaagcgugcuguucggucuccuucuggucuuggccguguuuugccacuccggccauucuuuacaguguuacaacugccccaauccuaccgcugacuguaagacagcaguuaacugcucaagugauuucgacgccugucugauuacuaaagcggggcuacagguauauaauaagugcuggaaauuugagcacuguaacuucaaugaugugacgaccagacucagggaaaacgagcugacauacuauugcuguaagaaagaccuuugcaauuuuaacgaacagcuggagaauggaggcacuagcuuguccgaaaagaccguccuccugcuggugacaccauuccucgcugccgcauggucuuuacauccguga

SEQ ID NO: 7798 - RNA, 387 nt, Artificial Sequence
  derived and/or modified sequence opt4 from CD59,Beta-Defensin__Homo_sapiens__AAA51952
augggcauccagggcggcagcgugcuguucggccugcugcuggugcuggccguguucugccacagcggccacagccugcagugcuacaacugccccaaccccaccgccgacugcaagaccgccgugaacugcagcagcgacuucgacgccugccugaucaccaaggccggccugcagguguacaacaagugcuggaaguucgagcacugcaacuucaacgacgugaccaccagacugagagagaacgagcugaccuacuacugcugcaagaaggaccugugcaacuucaacgagcagcuggagaacggcggcaccagccugagcgagaagaccgugcugcugcuggugacccccuuccuggccgccgccuggagccugcaccccuga

SEQ ID NO: 7799 - RNA, 387 nt, Artificial Sequence
  derived and/or modified sequence opt5 from CD59,Beta-Defensin__Homo_sapiens__AAA51952
augggcauccaagggggaagcgugcuguucggccuccugcuuguccuggccguguuuugccacuccgggcauucucuccaguguuacaacugccccaauccuaccgcugacuguaagacagccguuaacugcagcuccgauuucgacgcgugucugauuacgaaagcuggacuucagguguauaauaagugcuggaaauuugagcacuguaacuucaaugaugucaccacaagacugcgggaaaacgagcucaccuacuauugcuguaagaaagaccugugcaauuuuaacgaacagcuggagaauggcgggacaucucucagcgaaaagaccgugcugcuucugguuacaccguuccucgccgccgcuuggucccugcaucccuga

SEQ ID NO: 7800 - protein, 128 aa, Artificial Sequence; identical to SEQ ID NO: 7793
  CD59,Beta-Defensin__Homo_sapiens__Q6FHM9

SEQ ID NO: 7801 - RNA, 387 nt, Artificial Sequence; identical to SEQ ID NO: 7794
  CD59,Beta-Defensin__Homo_sapiens__BAG34721

SEQ ID NO: 7802 - RNA, 387 nt, Artificial Sequence; identical to SEQ ID NO: 7795
  derived and/or modified sequence opt1 from CD59,Beta-Defensin__Homo_sapiens__BAG34721

SEQ ID NO: 7803 - RNA, 387 nt, Artificial Sequence; identical to SEQ ID NO: 7796
  derived and/or modified sequence opt2 from CD59,Beta-Defensin__Homo_sapiens__BAG34721

SEQ ID NO: 7804 - RNA, 387 nt, Artificial Sequence; identical to SEQ ID NO: 7797
  derived and/or modified sequence opt3 from CD59,Beta-Defensin__Homo_sapiens__BAG34721

SEQ ID NO: 7805 - RNA, 387 nt, Artificial Sequence; identical to SEQ ID NO: 7798
  derived and/or modified sequence opt4 from CD59,Beta-Defensin__Homo_sapiens__BAG34721

SEQ ID NO: 7806 - RNA, 387 nt, Artificial Sequence; identical to SEQ ID NO: 7799
  derived and/or modified sequence opt5 from CD59,Beta-Defensin__Homo_sapiens__BAG34721

SEQ ID NO: 7807 - protein, 191 aa, Artificial Sequence
  Cdc42__Homo_sapiens__A0A024RAE4
MQTIKCVVVGDGAVGKTCLLISYTTNKFPSEYVPTVFDNYAVTVMIGGEPYTLGLFDTAGQEDYDRLRPLSYPQTDVFLVCFSVVSPSSFENVKEKWVPEITHHCPKTPFLLVGTQIDLRDDPSTIEKLAKNKQKPITPETAEKLARDLKAVKYVECSALTQKGLKNVFDEAILAALEPPEPKKSRRCVLL

SEQ ID NO: 7808 - RNA, 576 nt, Artificial Sequence
  Cdc42__Homo_sapiens__EAW95002
augcagacaauuaaguguguuguugugggcgauggugcuguugguaaaacaugucuccugauauccuacacaacaaacaaauuuccaucggaauauguaccgacuguuuuugacaacuaugcagucacaguuaugauugguggagaaccauauacucuuggacuuuuugauacugcagggcaagaggauuaugacagauuacgaccgcugaguuauccacaaacagauguauuucuagucuguuuuucaguggucucuccaucuucauuugaaaacgugaaagaaaagugggugccugagauaacucaccacuguccaaagacuccuuucuugcuuguugggacucaaauugaucucagagaugaccccucuacuauugagaaacuugccaagaacaaacagaagccuaucacuccagagacugcugaaaagcuggcccgugaccugaaggcugucaaguauguggaguguucugcacuuacacagaaaggccuaaagaauguauuugacgaagcaauauuggcugcccuggagccuccagaaccgaagaagagccgcaggugugugcugcuauga

SEQ ID NO: 7809 - RNA, 576 nt, Artificial Sequence
  derived and/or modified sequence opt1 from Cdc42__Homo_sapiens__EAW95002
augcagaccaucaagugcguggucgugggcgacggggccgugggcaagaccugccugcucaucagcuacacgaccaacaaguuccccuccgaguacgucccgaccguguucgacaacuacgccgugaccgucaugaucgggggcgagcccuacacgcuggggcuguucgacaccgcgggccaggaggacuacgaccgccuccggccccugagcuacccccagaccgacguguuccuggugugcuucuccgucgugagcccguccagcuucgagaacgugaaggagaaguggguccccgagaucacccaccacugccccaagacgcccuuccuccuggugggcacccagaucgaccugcgcgacgacccguccaccaucgagaagcucgccaagaacaagcagaagcccaucacccccgagacggccgagaagcuggcccgggaccugaaggccgugaaguacgucgagugcagcgcgcucacccagaaggggcugaagaacguguucgacgaggccauccuggccgcccucgagcccccggagcccaagaagucccgccggugcgugcugcuguga

SEQ ID NO: 7810 - RNA, 576 nt, Artificial Sequence
  derived and/or modified sequence opt2 from Cdc42__Homo_sapiens__EAW95002
augcagaccaucaagugcgucgucgucggcgacggcgccgucggcaagaccugccuccucaucuccuacaccaccaacaaguuccccuccgaguacguccccaccgucuucgacaacuacgccgucaccgucaugaucggcggcgagcccuacacccucggccucuucgacaccgccggccaggaggacuacgaccgccuccgcccccucuccuacccccagaccgacgucuuccucgucugcuucuccgucgucucccccuccuccuucgagaacgucaaggagaaguggguccccgagaucacccaccacugccccaagacccccuuccuccucgucggcacccagaucgaccuccgcgacgaccccuccaccaucgagaagcucgccaagaacaagcagaagcccaucacccccgagaccgccgagaagcucgcccgcgaccucaaggccgucaaguacgucgagugcuccgcccucacccagaagggccucaagaacgucuucgacgaggccauccucgccgcccucgagccccccgagcccaagaagucccgccgcugcguccuccucuga

SEQ ID NO: 7811 - RNA, 576 nt, Artificial Sequence
  derived and/or modified sequence opt3 from Cdc42__Homo_sapiens__EAW95002
augcagaccaucaagugcguggucguuggcgacggggccgugggaaaaacaugucugcucauuagcuacacuacgaacaaguuccccuccgaguauguaccuaccguguuugauaauuacgcugucacagugaugauagguggcgaaccauauacucuugggcuguucgacaccgcaggacaagaggauuacgacagauugaggccguuaucuuauccccagacagauguuuuucuggugugcuucucagucgugaguccuagcuccuuugaaaacguaaaagagaaguggguuccagaaaucacccaccauugucccaaaacuccuuuccuacucgugggcacacagauugaccugcgggaugacccaucuaccaucgagaaacuugccaagaauaagcagaagcccauuacgccugagacugcggaaaaacuggcucgcgauuugaaggccgucaaauacguggagugcucggcacucacccaaaagggucugaagaacguguuugacgaagccauccuggcugcacucgagccaccggagcccaaaaagucacgacguugugucuuacuguga

SEQ ID NO: 7812 - RNA, 576 nt, Artificial Sequence
  derived and/or modified sequence opt4 from Cdc42__Homo_sapiens__EAW95002
augcagaccaucaagugcgugguggugggcgacggcgccgugggcaagaccugccugcugaucagcuacaccaccaacaaguuccccagcgaguacgugcccaccguguucgacaacuacgccgugaccgugaugaucggcggcgagcccuacacccugggccuguucgacaccgccggccaggaggacuacgacagacugagaccccugagcuacccccagaccgacguguuccuggugugcuucagcguggugagccccagcagcuucgagaacgugaaggagaagugggugcccgagaucacccaccacugccccaagacccccuuccugcuggugggcacccagaucgaccugagagacgaccccagcaccaucgagaagcuggccaagaacaagcagaagcccaucacccccgagaccgccgagaagcuggccagagaccugaaggccgugaaguacguggagugcagcgcccugacccagaagggccugaagaacguguucgacgaggccauccuggccgcccuggagccccccgagcccaagaagagcagaagaugcgugcugcuguga

SEQ ID NO: 7813 - RNA, 576 nt, Artificial Sequence
  derived and/or modified sequence opt5 from Cdc42__Homo_sapiens__EAW95002
augcagaccaucaagugcguggucguuggcgacggggccgugggaaaaacaugucugcucauuagcuacacgaccaacaaguuccccuccgaguaugugccuacagucuuugauaauuacgcugugaccguuaugaucggcggggaaccguauacacugggacuuuucgacaccgccggccaagaggauuacgacagacugcggccccucucuuauccucagacagauguguuucuggucugcuucagcgugguuucccccucuagcuuugaaaacgugaaagagaagugggucccugaaauuacccaccauugucccaaaacgccuuuccuucugguggggacccagaucgaccuccgcgaugacccguccacaauugagaagcuggcgaagaauaaacagaagcccaucaccccugagacagcugaaaaacuggccagagaucucaaggccgugaaauacgucgagugcucugcucugacccaaaagggacuuaagaacguuuuugacgaagccauccuggcugcccucgagcccccugagcccaaaaagagccggcgcugugugcugcuuuga

SEQ ID NO: 7814 - protein, 191 aa, Artificial Sequence
  Cdc42__Homo_sapiens__A0A024RAE6
MQTIKCVVVGDGAVGKTCLLISYTTNKFPSEYVPTVFDNYAVTVMIGGEPYTLGLFDTAGQEDYDRLRPLSYPQTDVFLVCFSVVSPSSFENVKEKWVPEITHHCPKTPFLLVGTQIDLRDDPSTIEKLAKNKQKPITPETAEKLARDLKAVKYVECSALTQRGLKNVFDEAILAALEPPETQPKRKCCIF

SEQ ID NO: 7815 - RNA, 576 nt, Artificial Sequence
  Cdc42__Homo_sapiens__EAW95006
augcagacaauuaaguguguuguugugggcgauggugcuguugguaaaacaugucuccugauauccuacacaacaaacaaauuuccaucggaauauguaccgacuguuuuugacaacuaugcagucacaguuaugauugguggagaaccauauacucuuggacuuuuugauacugcagggcaagaggauuaugacagauuacgaccgcugaguuauccacaaacagauguauuucuagucuguuuuucaguggucucuccaucuucauuugaaaacgugaaagaaaagugggugccugagauaacucaccacuguccaaagacuccuuucuugcuuguugggacucaaauugaucucagagaugaccccucuacuauugagaaacuugccaagaacaaacagaagccuaucacuccagagacugcugaaaagcuggcccgugaccugaaggcugucaaguauguggaguguucugcacuuacacagagaggucugaagaauguguuugaugaggcuauccuagcugcccucgagccuccggaaacucaacccaaaaggaagugcuguauauucuaa

SEQ ID NO: 7816 - RNA, 576 nt, Artificial Sequence
  derived and/or modified sequence opt1 from Cdc42__Homo_sapiens__EAW95006
augcagaccaucaagugcguggucgugggcgacggggccgugggcaagaccugccugcucaucagcuacacgaccaacaaguuccccuccgaguacgucccgaccguguucgacaacuacgccgugaccgucaugaucgggggcgagcccuacacgcuggggcuguucgacaccgcgggccaggaggacuacgaccgccuccggccccugagcuacccccagaccgacguguuccuggugugcuucuccgucgugagcccguccagcuucgagaacgugaaggagaaguggguccccgagaucacccaccacugccccaagacgcccuuccuccuggugggcacccagaucgaccugcgcgacgacccguccaccaucgagaagcucgccaagaacaagcagaagcccaucacccccgagacggccgagaagcuggcccgggaccugaaggccgugaaguacgucgagugcagcgcgcucacccagcgcgggcugaagaacguguucgacgaggccauccuggccgcccucgagcccccggagacccagcccaagcggaagugcugcaucuucuga

SEQ ID NO: 7817 - RNA, 576 nt, Artificial Sequence
  derived and/or modified sequence opt2 from Cdc42__Homo_sapiens__EAW95006
augcagaccaucaagugcgucgucgucggcgacggcgccgucggcaagaccugccuccucaucuccuacaccaccaacaaguuccccuccgaguacguccccaccgucuucgacaacuacgccgucaccgucaugaucggcggcgagcccuacacccucggccucuucgacaccgccggccaggaggacuacgaccgccuccgcccccucuccuacccccagaccgacgucuuccucgucugcuucuccgucgucucccccuccuccuucgagaacgucaaggagaaguggguccccgagaucacccaccacugccccaagacccccuuccuccucgucggcacccagaucgaccuccgcgacgaccccuccaccaucgagaagcucgccaagaacaagcagaagcccaucacccccgagaccgccgagaagcucgcccgcgaccucaaggccgucaaguacgucgagugcuccgcccucacccagcgcggccucaagaacgucuucgacgaggccauccucgccgcccucgagccccccgagacccagcccaagcgcaagugcugcaucuucuga

SEQ ID NO: 7818 - RNA, 576 nt, Artificial Sequence
  derived and/or modified sequence opt3 from Cdc42__Homo_sapiens__EAW95006
augcagaccaucaagugcguggucguuggcgacggggccgugggaaaaacaugucugcucauuagcuacacuacgaacaaguuccccuccgaguauguaccuaccguguuugauaauuacgcugucacagugaugauagguggcgaaccauauacucuugggcuguucgacaccgcaggacaagaggauuacgacagauugaggccguuaucuuauccccagacagauguuuuucuggugugcuucucagucgugaguccuagcuccuuugaaaacguaaaagagaaguggguuccagaaaucacccaccauugucccaaaacuccuuuccuacucgugggcacacagauugaccugcgggaugacccaucuaccaucgagaaacuugccaagaauaagcagaagcccauuacgccugagacugcggaaaaacuggcucgcgauuugaaggccgucaaauacguggagugcucggcacucacccaacgaggucugaagaacguguuugacgaagccauccuggcugcacucgagccaccggagacacagcccaagcguaaauguugcauauucuga

SEQ ID NO: 7819 - RNA, 576 nt, Artificial Sequence
  derived and/or modified sequence opt4 from Cdc42__Homo_sapiens__EAW95006
augcagaccaucaagugcgugguggugggcgacggcgccgugggcaagaccugccugcugaucagcuacaccaccaacaaguuccccagcgaguacgugcccaccguguucgacaacuacgccgugaccgugaugaucggcggcgagcccuacacccugggccuguucgacaccgccggccaggaggacuacgacagacugagaccccugagcuacccccagaccgacguguuccuggugugcuucagcguggugagccccagcagcuucgagaacgugaaggagaagugggugcccgagaucacccaccacugccccaagacccccuuccugcuggugggcacccagaucgaccugagagacgaccccagcaccaucgagaagcuggccaagaacaagcagaagcccaucacccccgagaccgccgagaagcuggccagagaccugaaggccgugaaguacguggagugcagcgcccugacccagagaggccugaagaacguguucgacgaggccauccuggccgcccuggagccccccgagacccagcccaagagaaagugcugcaucuucuga

SEQ ID NO: 7820 - RNA, 576 nt, Artificial Sequence
  derived and/or modified sequence opt5 from Cdc42__Homo_sapiens__EAW95006
augcagaccaucaagugcguggucguuggcgacggggccgugggaaaaacaugucugcucauuagcuacacgaccaacaaguuccccuccgaguaugugccuacagucuuugauaauuacgcugugaccguuaugaucggcggggaaccguauacacugggacuuuucgacaccgccggccaagaggauuacgacagacugcggccccucucuuauccucagacagauguguuucuggucugcuucagcgugguuucccccucuagcuuugaaaacgugaaagagaagugggucccugaaauuacccaccauugucccaaaacgccuuuccuucugguggggacccagaucgaccuccgcgaugacccguccacaauugagaagcuggcgaagaauaaacagaagcccaucaccccugagacagcugaaaaacuggccagagaucucaaggccgugaaauacgucgagugcucugcucugacccaacggggacuuaagaacguuuuugacgaagccauccuggcugcccucgagcccccugagacgcagcccaagcgcaaauguugcauuuucuga

SEQ ID NO: 7821 - protein, 191 aa, Artificial Sequence; identical to SEQ ID NO: 7807
  Cdc42__Homo_sapiens__P60953

SEQ ID NO: 7822 - RNA, 576 nt, Artificial Sequence; identical to SEQ ID NO: 7808
  Cdc42__Homo_sapiens__AAA52592

SEQ ID NO: 7823 - RNA, 576 nt, Artificial Sequence; identical to SEQ ID NO: 7809
  derived and/or modified sequence opt1 from Cdc42__Homo_sapiens__AAA52592

SEQ ID NO: 7824 - RNA, 576 nt, Artificial Sequence; identical to SEQ ID NO: 7810
  derived and/or modified sequence opt2 from Cdc42__Homo_sapiens__AAA52592

SEQ ID NO: 7825 - RNA, 576 nt, Artificial Sequence; identical to SEQ ID NO: 7811
  derived and/or modified sequence opt3 from Cdc42__Homo_sapiens__AAA52592

SEQ ID NO: 7826 - RNA, 576 nt, Artificial Sequence; identical to SEQ ID NO: 7812
  derived and/or modified sequence opt4 from Cdc42__Homo_sapiens__AAA52592

SEQ ID NO: 7827 - RNA, 576 nt, Artificial Sequence; identical to SEQ ID NO: 7813
  derived and/or modified sequence opt5 from Cdc42__Homo_sapiens__AAA52592

SEQ ID NO: 7828 - protein, 253 aa, Artificial Sequence
  CFAD__Homo_sapiens__P00746
MHSWERLAVLVLLGAAACAAPPRGRILGGREAEAHARPYMASVQLNGAHLCGGVLVAEQWVLSAAHCLEDAADGKVQVLLGAHSLSQPEPSKRLYDVLRAVPHPDSQPDTIDHDLLLLQLSEKATLGPAVRPLPWQRVDRDVAPGTLCDVAGWGIVNHAGRRPDSLQHVLLPVLDRATCNRRTHHDGAITERLMCAESNRRDSCKGDSGGPLVCGGVLEGVVTSGSRVCGNRKKPGIYTRVASYAAWIDSVLA

SEQ ID NO: 7829 - RNA, 762 nt, Artificial Sequence
  CFAD__Homo_sapiens__CCDS12046.1
augcacagcugggagcgccuggcaguucugguccuccuaggagcggccgccugcgcggcgccgccccguggucggauccugggcggcagagaggccgaggcgcacgcgcggcccuacauggcgucggugcagcugaacggcgcgcaccugugcggcggcguccugguggcggagcagugggugcugagcgcggcgcacugccuggaggacgcggccgacgggaaggugcagguucuccugggcgcgcacucccugucgcagccggagcccuccaagcgccuguacgacgugcuccgcgcagugccccacccggacagccagcccgacaccaucgaccacgaccuccugcugcuacagcugucggagaaggccacacugggcccugcugugcgcccccugcccuggcagcgcguggaccgcgacguggcaccgggaacucucugcgacguggccggcuggggcauagucaaccacgcgggccgccgcccggacagccugcagcacgugcucuugccagugcuggaccgcgccaccugcaaccggcgcacgcaccacgacggcgccaucaccgagcgcuugaugugcgcggagagcaaucgccgggacagcugcaagggugacuccgggggcccgcuggugugcgggggcgugcucgagggcguggucaccucgggcucgcgcguuugcggcaaccgcaagaagcccgggaucuacacccgcguggcgagcuaugcggccuggaucgacagcguccuggccuag

SEQ ID NO: 7830 - RNA, 762 nt, Artificial Sequence
  derived and/or modified sequence opt1 from CFAD__Homo_sapiens__CCDS12046.1
augcacagcugggagcgccuggccgugcucguccugcugggcgccgcggccugcgccgcgcccccgcgggggcgcauccucggcgggcgggaggccgaggcccacgcccgccccuacauggccuccgugcagcugaacggcgcccaccugugcgggggcgugcucgucgcggagcagugggugcugagcgccgcccacugccuggaggacgccgccgacggcaaggugcagguccuccugggggcgcacucccugagccagcccgagcccuccaagcggcucuacgacgugcugcgcgccgugccgcaccccgacagccagcccgacaccaucgaccacgaccugcuccugcugcagcucuccgagaaggccacccugggccccgccguccggccgcugcccuggcagcgcguggaccgggacguggcccccgggacgcucugcgacgucgcgggcugggggaucgugaaccacgccggccgccggcccgacagccugcagcacgugcugcucccgguccuggaccgcgcgaccugcaaccggcgcacccaccacgacggcgccaucaccgagcggcugaugugcgccgaguccaaccgccgggacagcugcaagggggacuccggcgggccccucgugugcggcggcgugcuggagggggucgugacgagcggcucccgcgugugcgggaaccggaagaagcccggcaucuacacccgcgucgccagcuacgccgccuggaucgacuccgugcuggccuga

SEQ ID NO: 7831 - RNA, 762 nt, Artificial Sequence
  derived and/or modified sequence opt2 from CFAD__Homo_sapiens__CCDS12046.1
augcacuccugggagcgccucgccguccucguccuccucggcgccgccgccugcgccgcccccccccgcggccgcauccucggcggccgcgaggccgaggcccacgcccgccccuacauggccuccguccagcucaacggcgcccaccucugcggcggcguccucgucgccgagcaguggguccucuccgccgcccacugccucgaggacgccgccgacggcaagguccagguccuccucggcgcccacucccucucccagcccgagcccuccaagcgccucuacgacguccuccgcgccgucccccaccccgacucccagcccgacaccaucgaccacgaccuccuccuccuccagcucuccgagaaggccacccucggccccgccguccgcccccuccccuggcagcgcgucgaccgcgacgucgcccccggcacccucugcgacgucgccggcuggggcaucgucaaccacgccggccgccgccccgacucccuccagcacguccuccuccccguccucgaccgcgccaccugcaaccgccgcacccaccacgacggcgccaucaccgagcgccucaugugcgccgaguccaaccgccgcgacuccugcaagggcgacuccggcggcccccucgucugcggcggcguccucgagggcgucgucaccuccggcucccgcgucugcggcaaccgcaagaagcccggcaucuacacccgcgucgccuccuacgccgccuggaucgacuccguccucgccuga

SEQ ID NO: 7832 - RNA, 762 nt, Artificial Sequence
  derived and/or modified sequence opt3 from CFAD__Homo_sapiens__CCDS12046.1
augcacagcugggagagacuggccgugcucguccuucugggcgcugcagccugcgcggcucccccuagggggcggaucuugggaggucgcgaagccgaggcacaugcccgaccauacauggcuuccguucaguuaaacggcgcacaccugugugggggagugcuaguagccgaacaaugggugcucucugcugcccauugccuggaggacgcggcagauggcaagguccaggugcuucugggugcccacucauugagucagccggaacccagcaaacgucucuaugacguucugagagcugugccucauccagauucccagcccgacaccauugaucacgaccugcucuuacugcaacuuucugagaaggccacauuggggccugcagucaggccacugcccuggcagcggguggaucgcgacguagcuccuggaacucuaugugauguugccggcuggggcauagugaaucacgcggggagaaggccagacucgcuccagcauguccugcuuccggugcuggaucgggccacgugcaaccgccgaacccaccaugacggagcaaucacagagagauugaugugugcugaaucaaauaggcgggauagcugcaaaggugacaguggcgggccccucguguguggaggcguccuggaggguguugugacuuccgggucucguguaugcggaaaccgcaagaaaccuggcauuuacaccagaguggccagcuaugcugccuggaucgacuccgucuuagcauga

SEQ ID NO: 7833 - RNA, 762 nt, Artificial Sequence
  derived and/or modified sequence opt4 from CFAD__Homo_sapiens__CCDS12046.1
augcacagcugggagagacuggccgugcuggugcugcugggcgccgccgccugcgccgccccccccagaggcagaauccugggcggcagagaggccgaggcccacgccagacccuacauggccagcgugcagcugaacggcgcccaccugugcggcggcgugcugguggccgagcagugggugcugagcgccgcccacugccuggaggacgccgccgacggcaaggugcaggugcugcugggcgcccacagccugagccagcccgagcccagcaagagacuguacgacgugcugagagccgugccccaccccgacagccagcccgacaccaucgaccacgaccugcugcugcugcagcugagcgagaaggccacccugggccccgccgugagaccccugcccuggcagagaguggacagagacguggcccccggcacccugugcgacguggccggcuggggcaucgugaaccacgccggcagaagacccgacagccugcagcacgugcugcugcccgugcuggacagagccaccugcaacagaagaacccaccacgacggcgccaucaccgagagacugaugugcgccgagagcaacagaagagacagcugcaagggcgacagcggcggcccccuggugugcggcggcgugcuggagggcguggugaccagcggcagcagagugugcggcaacagaaagaagcccggcaucuacaccagaguggccagcuacgccgccuggaucgacagcgugcuggccuga

SEQ ID NO: 7834 - RNA, 762 nt, Artificial Sequence
  derived and/or modified sequence opt5 from CFAD__Homo_sapiens__CCDS12046.1
augcacagcugggagagacuggccgugcucguccugcuuggcgcugccgcgugcgcugcucccccucgggggcgcauccugggaggcagagaagccgaggcccaugcccggccguacauggcuuccguucagcucaacggggcccaccuguguggaggcgugcuuguggcggaacaauggguccugucugccgcucauugccucgaggacgccgcugaugggaaggugcagguucugcugggagcccacagccucucccagcccgaaccuucuaaacgccuguaugacgugcuuagagcggucccccauccugauagccagcccgacaccauugaucacgaccugcuccugcuucaacuguccgagaaggccacacucggcccugcugugcggccgcugcccuggcagcgcguugauagagacguggccccuggcacgcugugugaugucgcuggguggggaaucgugaaucacgccggccggcgccccgacucucuccagcaugugcugcuuccuguccuggauagagcuaccugcaaccggcgcacacaccaugacggggccauuaccgagagacucaugugugcggaaagcaaucggcgcgauuccugcaaaggagacagcggcgggccccugguuuguggaggcgugcuugagggcguggucacaucuggguccagagugugcggaaaccggaagaaaccgggcaucuacaccagaguugccagcuaugcugccuggauugacucugugcuggccuga

SEQ ID NO: 7835 - protein, 1231 aa, Artificial Sequence
  CFAH__Homo_sapiens__P08603
MRLLAKIICLMLWAICVAEDCNELPPRRNTEILTGSWSDQTYPEGTQAIYKCRPGYRSLGNVIMVCRKGEWVALNPLRKCQKRPCGHPGDTPFGTFTLTGGNVFEYGVKAVYTCNEGYQLLGEINYRECDTDGWTNDIPICEVVKCLPVTAPENGKIVSSAMEPDREYHFGQAVRFVCNSGYKIEGDEEMHCSDDGFWSKEKPKCVEISCKSPDVINGSPISQKIIYKENERFQYKCNMGYEYSERGDAVCTESGWRPLPSCEEKSCDNPYIPNGDYSPLRIKHRTGDEITYQCRNGFYPATRGNTAKCTSTGWIPAPRCTLKPCDYPDIKHGGLYHENMRRPYFPVAVGKYYSYYCDEHFETPSGSYWDHIHCTQDGWSPAVPCLRKCYFPYLENGYNQNHGRKFVQGKSIDVACHPGYALPKAQTTVTCMENGWSPTPRCIRVKTCSKSSIDIENGFISESQYTYALKEKAKYQCKLGYVTADGETSGSITCGKDGWSAQPTCIKSCDIPVFMNARTKNDFTWFKLNDTLDYECHDGYESNTGSTTGSIVCGYNGWSDLPICYERECELPKIDVHLVPDRKKDQYKVGEVLKFSCKPGFTIVGPNSVQCYHFGLSPDLPICKEQVQSCGPPPELLNGNVKEKTKEEYGHSEVVEYYCNPRFLMKGPNKIQCVDGEWTTLPVCIVEESTCGDIPELEHGWAQLSSPPYYYGDSVEFNCSESFTMIGHRSITCIHGVWTQLPQCVAIDKLKKCKSSNLIILEEHLKNKKEFDHNSNIRYRCRGKEGWIHTVCINGRWDPEVNCSMAQIQLCPPPPQIPNSHNMTTTLNYRDGEKVSVLCQENYLIQEGEEITCKDGRWQSIPLCVEKIPCSQPPQIEHGTINSSRSSQESYAHGTKLSYTCEGGFRISEENETTCYMGKWSSPPQCEGLPCKSPPEISHGVVAHMSDSYQYGEEVTYKCFEGFGIDGPAIAKCLGEKWSHPPSCIKTDCLSLPSFENAIPMGEKKDVYKAGEQVTYTCATYYKMDGASNVTCINSRWTGRPTCRDTSCVNPPTVQNAYIVSRQMSKYPSGERVRYQCRSPYEMFGDEEVMCLNGNWTEPPQCKDSTGKCGPPPPIDNGDITSFPLSVYAPASSVEYQCQNLYQLEGNKRITCRNGQWSEPPKCLHPCVISREIMENYNIALRWTAKQKLYSRTGESVEFVCKRGYRLSSRSHTLRTTCWDGKLEYPTCAKR

SEQ ID NO: 7836 - RNA, 3696 nt, Artificial Sequence
  CFAH__Homo_sapiens__CCDS1385.1
augagacuucuagcaaagauuauuugccuuauguuaugggcuauuuguguagcagaagauugcaaugaacuuccuccaagaagaaauacagaaauucugacagguuccuggucugaccaaacauauccagaaggcacccaggcuaucuauaaaugccgcccuggauauagaucucuuggaaauguaauaaugguaugcaggaagggagaauggguugcucuuaauccauuaaggaaaugucagaaaaggcccuguggacauccuggagauacuccuuuugguacuuuuacccuuacaggaggaaauguguuugaauaugguguaaaagcuguguauacauguaaugagggguaucaauugcuaggugagauuaauuaccgugaaugugacacagauggauggaccaaugauauuccuauaugugaaguugugaaguguuuaccagugacagcaccagagaauggaaaaauugucaguagugcaauggaaccagaucgggaauaccauuuuggacaagcaguacgguuuguauguaacucaggcuacaagauugaaggagaugaagaaaugcauuguucagacgaugguuuuuggaguaaagagaaaccaaaguguguggaaauuucaugcaaauccccagauguuauaaauggaucuccuauaucucagaagauuauuuauaaggagaaugaacgauuucaauauaaauguaacauggguuaugaauacagugaaagaggagaugcuguaugcacugaaucuggauggcguccguugccuucaugugaagaaaaaucaugugauaauccuuauauuccaaauggugacuacucaccuuuaaggauuaaacacagaacuggagaugaaaucacguaccaguguagaaaugguuuuuauccugcaacccggggaaauacagcaaaaugcacaaguacuggcuggauaccugcuccgagauguaccuugaaaccuugugauuauccagacauuaaacauggaggucuauaucaugagaauaugcguagaccauacuuuccaguagcuguaggaaaauauuacuccuauuacugugaugaacauuuugagacuccgucaggaaguuacugggaucacauucauugcacacaagauggauggucgccagcaguaccaugccucagaaaauguuauuuuccuuauuuggaaaauggauauaaucaaaaucauggaagaaaguuuguacaggguaaaucuauagacguugccugccauccuggcuacgcucuuccaaaagcgcagaccacaguuacauguauggagaauggcuggucuccuacucccagaugcauccgugucaaaacauguuccaaaucaaguauagauauugagaauggguuuauuucugaaucucaguauacauaugccuuaaaagaaaaagcgaaauaucaaugcaaacuaggauauguaacagcagauggugaaacaucaggaucaauuacaugugggaaagauggauggucagcucaacccacgugcauuaaaucuugugauaucccaguauuuaugaaugccagaacuaaaaaugacuucacaugguuuaagcugaaugacacauuggacuaugaaugccaugaugguuaugaaagcaauacuggaagcaccacugguuccauagugugugguuacaaugguuggucugauuuacccauauguuaugaaagagaaugcgaacuuccuaaaauagauguacacuuaguuccugaucgcaagaaagaccaguauaaaguuggagagguguugaaauucuccugcaaaccaggauuuacaauaguuggaccuaauuccguucagugcuaccacuuuggauugucuccugaccucccaauauguaaagagcaaguacaaucaugugguccaccuccugaacuccucaaugggaauguuaaggaaaaaacgaaagaagaauauggacacagugaagugguggaauauuauugcaauccuagauuucuaaugaagggaccuaauaaaauucaauguguugauggagaguggacaacuuuaccaguguguauuguggaggagaguaccuguggagauauaccugaacuugaacauggcugggcccagcuuucuuccccuccuuauuacuauggagauucaguggaauucaauugcucagaaucauuuacaaugauuggacacagaucaauuacguguauucauggaguauggacccaacuuccccaguguguggcaauagauaaacuuaagaagugcaaaucaucaaauuuaauuauacuugaggaacauuuaaaaaacaagaaggaauucgaucauaauucuaacauaagguacagauguagaggaaaagaaggauggauacacacagucugcauaaauggaagaugggauccagaagugaacugcucaauggcacaaauacaauuaugcccaccuccaccucagauucccaauucucacaauaugacaaccacacugaauuaucgggauggagaaaaaguaucuguucuuugccaagaaaauuaucuaauucaggaaggagaagaaauuacaugcaaagauggaagauggcagucaauaccacucuguguugaaaaaauuccauguucacaaccaccucagauagaacacggaaccauuaauucauccaggucuucacaagaaaguuaugcacaugggacuaaauugaguuauacuugugagggugguuucaggauaucugaagaaaaugaaacaacaugcuacaugggaaaauggaguucuccaccucagugugaaggccuuccuuguaaaucuccaccugagauuucucaugguguuguagcucacaugucagacaguuaucaguauggagaagaaguuacguacaaauguuuugaagguuuuggaauugaugggccugcaauugcaaaaugcuuaggagaaaaauggucucacccuccaucaugcauaaaaacagauugucucaguuuaccuagcuuugaaaaugccauacccaugggagagaagaaggauguguauaaggcgggugagcaagugacuuacacuugugcaacauauuacaaaauggauggagccaguaauguaacaugcauuaauagcagauggacaggaaggccaacaugcagagacaccuccugugugaauccgcccacaguacaaaaugcuuauauagugucgagacagaugaguaaauauccaucuggugagagaguacguuaucaauguaggagcccuuaugaaauguuuggggaugaagaagugauguguuuaaauggaaacuggacggaaccaccucaaugcaaagauucuacaggaaaaugugggcccccuccaccuauugacaauggggacauuacuucauucccguugucaguauaugcuccagcuucaucaguugaguaccaaugccagaacuuguaucaacuugaggguaacaagcgaauaacauguagaaauggacaauggucagaaccaccaaaaugcuuacauccguguguaauaucccgagaaauuauggaaaauuauaacauagcauuaagguggacagccaaacagaagcuuuauucgagaacaggugaaucaguugaauuuguguguaaacggggauaucgucuuucaucacguucucacacauugcgaacaacauguugggaugggaaacuggaguauccaacuugugcaaaaagauag

SEQ ID NO: 7837 - RNA, 3696 nt, Artificial Sequence
  derived and/or modified sequence opt1 from CFAH__Homo_sapiens__CCDS1385.1
augcgccugcucgccaagaucaucugccugaugcugugggccaucugcguggcggaggacugcaacgagcuccccccgcggcgcaacaccgagauccugaccggcagcugguccgaccagacguaccccgaggggacccaggccaucuacaagugccggcccggcuaccgcagccuggggaacgucaucauggugugccggaagggcgaguggguggcccucaacccccugcgcaagugccagaagcggccgugcgggcaccccggcgacacccccuucggcaccuucacgcugaccgggggcaacgucuucgaguacggggugaaggccguguacaccugcaacgagggcuaccagcuccugggggagaucaacuaccgcgagugcgacaccgacggcuggacgaacgacauccccaucugcgaggucgugaagugccugccggugaccgcccccgagaacggcaagaucgucuccagcgcgauggagcccgaccgggaguaccacuucgggcaggccgugcgcuucgugugcaacuccggcuacaagaucgagggggacgaggagaugcacugcagcgacgacggcuucugguccaaggagaagcccaagugcgucgagaucagcugcaaguccccggacgugaucaacggcagccccaucucccagaagaucaucuacaaggagaacgagcgguuccaguacaagugcaacaugggguacgaguacagcgagcgcggcgacgccgugugcaccgaguccggguggcggccccuccccagcugcgaggagaaguccugcgacaacccguacauccccaacggcgacuacagcccccugcgcaucaagcaccggaccggggacgagaucacguaccagugccgcaacggcuucuaccccgccacccggggcaacaccgcgaagugcaccuccacgggguggaucccggccccccgcugcacccugaagcccugcgacuaccccgacaucaagcacggcgggcucuaccacgagaacaugcggcgcccguacuuccccgucgccgugggcaaguacuacagcuacuacugcgacgagcacuucgagacccccuccgggagcuacugggaccacauccacugcacccaggacggcuggagccccgccgugccgugccugcggaagugcuacuuccccuaccuggagaacggcuacaaccagaaccacgggcgcaaguucguccagggcaaguccaucgacguggccugccaccccggguacgcgcucccgaaggcccagacgaccgugaccugcauggagaacggcuggagccccaccccccgcugcauccgggucaagacgugcuccaagagcuccaucgacaucgagaacggguucaucagcgagucccaguacaccuacgcccugaaggagaaggccaaguaccagugcaagcugggcuacgugaccgccgacggcgagaccagcggguccaucacgugcggcaaggacggguggagcgcgcagcccaccugcaucaaguccugcgacaucccgguguucaugaacgcccgcaccaagaacgacuucaccugguucaagcucaacgacacgcuggacuacgagugccacgacggcuacgagagcaacaccggcuccaccaccgggagcaucgucugcggcuacaacgggugguccgaccugcccaucugcuacgagcgggagugcgagcuccccaagaucgacgugcaccugguccccgaccgcaagaaggaccaguacaaggugggcgaggugcugaaguucagcugcaagccgggguucacgaucgucggccccaacuccgugcagugcuaccacuucggccucagccccgaccugcccaucugcaaggagcaggugcaguccugcgggccgccccccgagcugcucaacggcaacgucaaggagaagaccaaggaggaguacgggcacagcgaggugguggaguacuacugcaacccccgguuccugaugaagggcccgaacaagauccagugcgucgacggggaguggaccacccugcccgugugcaucguggaggagagcaccugcggcgacauccccgagcucgagcacggcugggcccagcuguccagccccccguacuacuacggggacuccgucgaguucaacugcagcgaguccuucacgaugaucggccaccgcagcaucaccugcauccacgggguguggacccagcugccccagugcguggccaucgacaagcucaagaagugcaaguccagcaaccugaucauccuggaggagcaccucaagaacaagaaggaguucgaccacaacuccaacauccgguaccgcugccggggcaaggagggguggauccacaccgucugcaucaacggccgcugggaccccgaggugaacugcagcauggcccagauccagcugugccccccgcccccccagaucccgaacucccacaacaugacgaccacccugaacuaccgggacggcgagaaggugagcguccucugccaggagaacuaccugauccaggagggggaggagaucaccugcaaggacggccgcuggcaguccaucccccugugcguggagaagauccccugcagccagcccccgcagaucgagcacgggacgaucaacuccagccgguccagccaggagagcuacgcgcacggcaccaagcucuccuacaccugcgaggggggcuuccgcaucagcgaggagaacgagaccacgugcuacaugggcaagugguccagccccccccagugcgaggggcugcccugcaaguccccgcccgagaucagccacggcguggucgcccacauguccgacagcuaccaguacggggaggaggugaccuacaagugcuucgagggcuucggcaucgacgggcccgccaucgccaagugccugggcgagaaguggucccaccccccgagcugcaucaagaccgacugccucucccugcccagcuucgagaacgccauccccaugggggagaagaaggacguguacaaggcgggcgagcaggucaccuacacgugcgccaccuacuacaagauggacggggccuccaacgugaccugcaucaacagccgguggaccggccgccccacgugccgggacaccuccugcgugaacccgcccaccguccagaacgccuacaucgugagccgccagauguccaaguaccccagcggcgagcgggugcgcuaccagugccgcucccccuacgagauguucggggacgaggaggucaugugccugaacggcaacuggaccgagccgccccagugcaaggacagcacggggaagugcggcccccccccgcccaucgacaacggggacaucaccagcuucccccuguccguguacgcgcccgccagcuccguggaguaccagugccagaaccucuaccagcuggagggcaacaagcggaucaccugccgcaacggccaguggagcgagccgcccaagugccugcaccccugcgucaucucccgggagaucauggagaacuacaacaucgcccuccgcuggaccgccaagcagaagcuguacagccggacgggggaguccguggaguucgugugcaagcgcggcuaccggcugagcucccgcagccacacccuccggaccaccugcugggacgggaagcuggaguacccgacgugcgccaagcgcuga

SEQ ID NO: 7838 - RNA, 3696 nt, Artificial Sequence
  derived and/or modified sequence opt2 from CFAH__Homo_sapiens__CCDS1385.1
augcgccuccucgccaagaucaucugccucaugcucugggccaucugcgucgccgaggacugcaacgagcuccccccccgccgcaacaccgagauccucaccggcuccugguccgaccagaccuaccccgagggcacccaggccaucuacaagugccgccccggcuaccgcucccucggcaacgucaucauggucugccgcaagggcgagugggucgcccucaacccccuccgcaagugccagaagcgccccugcggccaccccggcgacacccccuucggcaccuucacccucaccggcggcaacgucuucgaguacggcgucaaggccgucuacaccugcaacgagggcuaccagcuccucggcgagaucaacuaccgcgagugcgacaccgacggcuggaccaacgacauccccaucugcgaggucgucaagugccuccccgucaccgcccccgagaacggcaagaucgucuccuccgccauggagcccgaccgcgaguaccacuucggccaggccguccgcuucgucugcaacuccggcuacaagaucgagggcgacgaggagaugcacugcuccgacgacggcuucugguccaaggagaagcccaagugcgucgagaucuccugcaagucccccgacgucaucaacggcucccccaucucccagaagaucaucuacaaggagaacgagcgcuuccaguacaagugcaacaugggcuacgaguacuccgagcgcggcgacgccgucugcaccgaguccggcuggcgcccccuccccuccugcgaggagaaguccugcgacaaccccuacauccccaacggcgacuacuccccccuccgcaucaagcaccgcaccggcgacgagaucaccuaccagugccgcaacggcuucuaccccgccacccgcggcaacaccgccaagugcaccuccaccggcuggauccccgccccccgcugcacccucaagcccugcgacuaccccgacaucaagcacggcggccucuaccacgagaacaugcgccgccccuacuuccccgucgccgucggcaaguacuacuccuacuacugcgacgagcacuucgagacccccuccggcuccuacugggaccacauccacugcacccaggacggcuggucccccgccguccccugccuccgcaagugcuacuuccccuaccucgagaacggcuacaaccagaaccacggccgcaaguucguccagggcaaguccaucgacgucgccugccaccccggcuacgcccuccccaaggcccagaccaccgucaccugcauggagaacggcuggucccccaccccccgcugcauccgcgucaagaccugcuccaaguccuccaucgacaucgagaacggcuucaucuccgagucccaguacaccuacgcccucaaggagaaggccaaguaccagugcaagcucggcuacgucaccgccgacggcgagaccuccggcuccaucaccugcggcaaggacggcugguccgcccagcccaccugcaucaaguccugcgacauccccgucuucaugaacgcccgcaccaagaacgacuucaccugguucaagcucaacgacacccucgacuacgagugccacgacggcuacgaguccaacaccggcuccaccaccggcuccaucgucugcggcuacaacggcugguccgaccuccccaucugcuacgagcgcgagugcgagcuccccaagaucgacguccaccucguccccgaccgcaagaaggaccaguacaaggucggcgagguccucaaguucuccugcaagcccggcuucaccaucgucggccccaacuccguccagugcuaccacuucggccucucccccgaccuccccaucugcaaggagcagguccaguccugcggccccccccccgagcuccucaacggcaacgucaaggagaagaccaaggaggaguacggccacuccgaggucgucgaguacuacugcaacccccgcuuccucaugaagggccccaacaagauccagugcgucgacggcgaguggaccacccuccccgucugcaucgucgaggaguccaccugcggcgacauccccgagcucgagcacggcugggcccagcucuccuccccccccuacuacuacggcgacuccgucgaguucaacugcuccgaguccuucaccaugaucggccaccgcuccaucaccugcauccacggcgucuggacccagcucccccagugcgucgccaucgacaagcucaagaagugcaaguccuccaaccucaucauccucgaggagcaccucaagaacaagaaggaguucgaccacaacuccaacauccgcuaccgcugccgcggcaaggagggcuggauccacaccgucugcaucaacggccgcugggaccccgaggucaacugcuccauggcccagauccagcucugccccccccccccccagauccccaacucccacaacaugaccaccacccucaacuaccgcgacggcgagaaggucuccguccucugccaggagaacuaccucauccaggagggcgaggagaucaccugcaaggacggccgcuggcaguccaucccccucugcgucgagaagauccccugcucccagcccccccagaucgagcacggcaccaucaacuccucccgcuccucccaggaguccuacgcccacggcaccaagcucuccuacaccugcgagggcggcuuccgcaucuccgaggagaacgagaccaccugcuacaugggcaagugguccucccccccccagugcgagggccuccccugcaaguccccccccgagaucucccacggcgucgucgcccacauguccgacuccuaccaguacggcgaggaggucaccuacaagugcuucgagggcuucggcaucgacggccccgccaucgccaagugccucggcgagaaguggucccacccccccuccugcaucaagaccgacugccucucccuccccuccuucgagaacgccauccccaugggcgagaagaaggacgucuacaaggccggcgagcaggucaccuacaccugcgccaccuacuacaagauggacggcgccuccaacgucaccugcaucaacucccgcuggaccggccgccccaccugccgcgacaccuccugcgucaacccccccaccguccagaacgccuacaucgucucccgccagauguccaaguaccccuccggcgagcgcguccgcuaccagugccgcucccccuacgagauguucggcgacgaggaggucaugugccucaacggcaacuggaccgagcccccccagugcaaggacuccaccggcaagugcggcccccccccccccaucgacaacggcgacaucaccuccuucccccucuccgucuacgcccccgccuccuccgucgaguaccagugccagaaccucuaccagcucgagggcaacaagcgcaucaccugccgcaacggccagugguccgagccccccaagugccuccaccccugcgucaucucccgcgagaucauggagaacuacaacaucgcccuccgcuggaccgccaagcagaagcucuacucccgcaccggcgaguccgucgaguucgucugcaagcgcggcuaccgccucuccucccgcucccacacccuccgcaccaccugcugggacggcaagcucgaguaccccaccugcgccaagcgcuga

SEQ ID NO: 7839 - RNA, 3696 nt, Artificial Sequence
  derived and/or modified sequence opt3 from CFAH__Homo_sapiens__CCDS1385.1
augagacugcucgccaagaucauuugccuuaugcugugggcuauauguguggcagaggacugcaacgaauugcccccuaggcggaauaccgagaucuuaacaggcagcugguccgaucagacuuacccagaagggacgcaagccauuuauaaaugucgcccgggauaccgaucucuggguaacgucaucaugguuugccguaagggcgaguggguggcgcuaaauccccucagaaaaugucagaagaggccuugcgggcacccaggagacacccccuucggcacauuuacucugaccggugggaacguauucgaauauggagugaaagcugucuacacauguaaugagggcuaucagcuucugggcgagauuaacuaccgggaaugcgauaccgacggguggacuaaugauaucccuauaugugaggugguuaagugcuugccagugacagcccccgaaaacggaaagaucgucucaagugcaauggagccugaccgcgaguaucauuuuggucaggccgugagauucguauguaauagcggcuacaaaauugaaggggaugaggaaaugcacugcuccgacgauggauuuuggucuaaggagaaaccaaagugcguugaaaucucguguaaaucaccggacgugauuaacggcagccccaucagucaaaagauaauuuacaaggagaaugagagguuccaguauaaaugcaacauggguuacgaauauuccgagcgcggggaugcugucuguaccgaaucuggauggcggccucucccaagcugcgaggaaaaguccugugacaaucccuacaucccuaacggcgauuauucaccacugcgaauuaaacauagaacgggcgacgagaucacuuaccagugcaggaauggguuuuaucccgcaacccggggaaacacagccaaguguacuuccaccgguuggaucccggcuccucguugcacacugaaacccugugacuacccagauauuaagcacggcgggcucuaccaugagaacaugcgcagaccuuauuuccccguggccgugggaaaauacuauagcuacuauugcgacgaacacuuugagaccccaucuggcuccuacugggaucacauacauuguacgcaggacgguuggucacccgcggucccuugcuuaaggaagugcuauuucccauaccuggaaaauggguacaaccaaaaucacggccggaaguuuguucagggaaaaagcaucgauguggcaugucauccgggcuaugcccuucccaaggcucagacuacaguaaccugcauggagaacggguggaguccuacuccacgauguauucgcgugaaaacaugcucuaaguccagcaucgacauagaaaauggauucauuucggagucucaguacaccuaugccuugaaagagaaggcaaaguaccaauguaaacuggguuaugucacggcugauggcgaaaccuccgggucaaucacaugcggaaaggacggcuggagugcccagcccacuuguaucaaaagcugcgauauuccuguguuuaugaacgcgagaaccaagaaugacuucacaugguucaaacuaaacgauacucucgacuacgagugucacgacgguuaugaauccaauaccgggucuacaaccggcagcaucguuugcggauacaacggcuggucagaucugccaauuuguuacgagagggagugcgaacuucccaagauagacgugcaccuggucccggaucggaagaaagaccaguauaaggugggggagguauugaaauuuaguugcaagccuggauucacuaucguugguccaaauuccgugcaauguuaccauuuuggccucagccccgaucugccuauuugcaaagaacagguccagucuugugggcccccaccugaguuacugaacggaaaugugaaggaaaagacgaaagaggaguauggccacucagaagucguggaguacuauugcaacccccgcuuccucaugaaggguccaaauaaaauccaguguguugacggggaauggacaacccuuccggugugcaucguagaggaaaguacuuguggcgauauuccugagcuggagcauggaugggcccaauugagcagucccccauacuauuacggcgacucugucgaauuuaacugcucggagagcuucaccaugauagggcacagauccaucacauguauucauggaguguggacccagcuaccccagugcguugcaaucgauaagcugaaaaaguguaaaucaaguaaccucauuauccuggaagaacaccuuaagaauaagaaagaauuugaccacaacucuaauauaagguaccguugccggggcaaggaggguuggauccauacugugugcauuaacgggcgaugggauccugaggucaauuguagcauggcucagauccaacugugcccacccccuccgcagauuccaaacucccacaauaugacaacgaccuugaacuauagagacggagaaaaagugucaguacucugucaggagaauuaccugauccaggaaggcgaggagauaacuugcaaggaugguagguggcaaagcauucccuuauguguggagaaaaucccuugcucucagccaccccagauugagcauggcacaaucaacuccagucgcagcucucaggaauccuaugcccacgggaccaagcugucauacacaugugagggaggcuuccggauaagugaagagaaugagacuaccugcuauauggggaaguggagcucgccuccgcaaugugaaggacuacccugcaaauccccaccugagaucucucacggcguugucgcucauaugagcgacucauaccaguauggugaagaggugacguacaaguguuuugaaggguucggaauugacggccccgccaucgcaaaaugccucggugagaaguggagucacccaccuuccugcauuaaaaccgauugucugucucuucccagcuuugagaacgccaucccaaugggcgaaaagaaggacguguacaaagcuggggagcaggucacauauacuugcgcgaccuacuauaagauggauggagcauccaauguuacauguauaaacucaagauggacuggcaggccgaccugccgcgacacgagcugugugaauccucccacagugcaaaacgccuacauuguaagucgacagaugucuaaauauccauccggggaacggguccguuaccagugcagaagccccuaugagauguucggagaugaagaggugauguguuugaacggcaauuggaccgagccuccacagugcaaggacucgacugguaaaugugggcccccuccgccaaucgauaacggagacaucacaucauuuccccugucuguuuacgcuccugccaguuccguggaauaccaaugccagaaucucuaucagcuggagggcaacaagaggauuaccugucgcaauggucaguggagcgaacccccaaagugccuucauccuugcgucaucucucgggagauuauggagaacuacaauauagcacugagauggacugccaaacaaaaguuguauagcaggaccggcgaauccguggaguucguuuguaaacgaggguaccgccucucaagucggagccacacacugagaacgaccugcugggauggaaaguuagaauaucccacuugugcuaaaagguga

SEQ ID NO: 7840 - RNA, 3696 nt, Artificial Sequence
  derived and/or modified sequence opt4 from CFAH__Homo_sapiens__CCDS1385.1
augagacugcuggccaagaucaucugccugaugcugugggccaucugcguggccgaggacugcaacgagcugccccccagaagaaacaccgagauccugaccggcagcuggagcgaccagaccuaccccgagggcacccaggccaucuacaagugcagacccggcuacagaagccugggcaacgugaucauggugugcagaaagggcgaguggguggcccugaacccccugagaaagugccagaagagacccugcggccaccccggcgacacccccuucggcaccuucacccugaccggcggcaacguguucgaguacggcgugaaggccguguacaccugcaacgagggcuaccagcugcugggcgagaucaacuacagagagugcgacaccgacggcuggaccaacgacauccccaucugcgagguggugaagugccugcccgugaccgcccccgagaacggcaagaucgugagcagcgccauggagcccgacagagaguaccacuucggccaggccgugagauucgugugcaacagcggcuacaagaucgagggcgacgaggagaugcacugcagcgacgacggcuucuggagcaaggagaagcccaagugcguggagaucagcugcaagagccccgacgugaucaacggcagccccaucagccagaagaucaucuacaaggagaacgagagauuccaguacaagugcaacaugggcuacgaguacagcgagagaggcgacgccgugugcaccgagagcggcuggagaccccugcccagcugcgaggagaagagcugcgacaaccccuacauccccaacggcgacuacagcccccugagaaucaagcacagaaccggcgacgagaucaccuaccagugcagaaacggcuucuaccccgccaccagaggcaacaccgccaagugcaccagcaccggcuggauccccgcccccagaugcacccugaagcccugcgacuaccccgacaucaagcacggcggccuguaccacgagaacaugagaagacccuacuuccccguggccgugggcaaguacuacagcuacuacugcgacgagcacuucgagacccccagcggcagcuacugggaccacauccacugcacccaggacggcuggagccccgccgugcccugccugagaaagugcuacuuccccuaccuggagaacggcuacaaccagaaccacggcagaaaguucgugcagggcaagagcaucgacguggccugccaccccggcuacgcccugcccaaggcccagaccaccgugaccugcauggagaacggcuggagccccacccccagaugcaucagagugaagaccugcagcaagagcagcaucgacaucgagaacggcuucaucagcgagagccaguacaccuacgcccugaaggagaaggccaaguaccagugcaagcugggcuacgugaccgccgacggcgagaccagcggcagcaucaccugcggcaaggacggcuggagcgcccagcccaccugcaucaagagcugcgacauccccguguucaugaacgccagaaccaagaacgacuucaccugguucaagcugaacgacacccuggacuacgagugccacgacggcuacgagagcaacaccggcagcaccaccggcagcaucgugugcggcuacaacggcuggagcgaccugcccaucugcuacgagagagagugcgagcugcccaagaucgacgugcaccuggugcccgacagaaagaaggaccaguacaaggugggcgaggugcugaaguucagcugcaagcccggcuucaccaucgugggccccaacagcgugcagugcuaccacuucggccugagccccgaccugcccaucugcaaggagcaggugcagagcugcggccccccccccgagcugcugaacggcaacgugaaggagaagaccaaggaggaguacggccacagcgaggugguggaguacuacugcaaccccagauuccugaugaagggccccaacaagauccagugcguggacggcgaguggaccacccugcccgugugcaucguggaggagagcaccugcggcgacauccccgagcuggagcacggcugggcccagcugagcagcccccccuacuacuacggcgacagcguggaguucaacugcagcgagagcuucaccaugaucggccacagaagcaucaccugcauccacggcguguggacccagcugccccagugcguggccaucgacaagcugaagaagugcaagagcagcaaccugaucauccuggaggagcaccugaagaacaagaaggaguucgaccacaacagcaacaucagauacagaugcagaggcaaggagggcuggauccacaccgugugcaucaacggcagaugggaccccgaggugaacugcagcauggcccagauccagcugugccccccccccccccagauccccaacagccacaacaugaccaccacccugaacuacagagacggcgagaaggugagcgugcugugccaggagaacuaccugauccaggagggcgaggagaucaccugcaaggacggcagauggcagagcaucccccugugcguggagaagauccccugcagccagcccccccagaucgagcacggcaccaucaacagcagcagaagcagccaggagagcuacgcccacggcaccaagcugagcuacaccugcgagggcggcuucagaaucagcgaggagaacgagaccaccugcuacaugggcaaguggagcagccccccccagugcgagggccugcccugcaagagcccccccgagaucagccacggcgugguggcccacaugagcgacagcuaccaguacggcgaggaggugaccuacaagugcuucgagggcuucggcaucgacggccccgccaucgccaagugccugggcgagaaguggagccacccccccagcugcaucaagaccgacugccugagccugcccagcuucgagaacgccauccccaugggcgagaagaaggacguguacaaggccggcgagcaggugaccuacaccugcgccaccuacuacaagauggacggcgccagcaacgugaccugcaucaacagcagauggaccggcagacccaccugcagagacaccagcugcgugaacccccccaccgugcagaacgccuacaucgugagcagacagaugagcaaguaccccagcggcgagagagugagauaccagugcagaagccccuacgagauguucggcgacgaggaggugaugugccugaacggcaacuggaccgagcccccccagugcaaggacagcaccggcaagugcggcccccccccccccaucgacaacggcgacaucaccagcuucccccugagcguguacgcccccgccagcagcguggaguaccagugccagaaccuguaccagcuggagggcaacaagagaaucaccugcagaaacggccaguggagcgagccccccaagugccugcaccccugcgugaucagcagagagaucauggagaacuacaacaucgcccugagauggaccgccaagcagaagcuguacagcagaaccggcgagagcguggaguucgugugcaagagaggcuacagacugagcagcagaagccacacccugagaaccaccugcugggacggcaagcuggaguaccccaccugcgccaagagauga

SEQ ID NO: 7841 - RNA, 3696 nt, Artificial Sequence
  derived and/or modified sequence opt5 from CFAH__Homo_sapiens__CCDS1385.1
augagacugcucgccaagaucauuugccugaugcuuugggcuaucuguguggccgaggacugcaacgaacugcccccucggcgcaauaccgagauucucacaggcagcugguccgaucagacguacccggaagggacccaagcgaucuauaaauguagacccggauaccggucucugggcaacgucauuaugguuugccgcaagggggaguggguggcucuuaauccucugagaaaaugucagaagcggcccugcggacacccuggcgacacacccuucgggaccuuuacacucaccggaggcaacguguucgaauauggcgucaaagccguguacacauguaaugagggguaucagcugcugggagagaucaacuaccgcgaaugcgauaccgacggcuggacgaaugauaucccuauuugugagguugugaagugccucccggucaccgcccccgaaaacgggaagaucgugagcuccgcuauggagccugacagagaguaucauuuuggacaggccguucgguucguguguaauucuggcuacaaaauugaaggggaugaggaaaugcacugcagcgacgauggauuuugguccaaggagaaacccaagugcgucgaaaucucuuguaaaagcccugacgugauuaacggcucccccaucagccaaaagauuaucuacaaggagaaugagcgcuuccaguauaaaugcaacaugggcuacgaauauucugagagaggggaugcuguguguacagaauccggauggcggccgcugccuagcugcgaggaaaagucuugugacaaucccuacaucccuaacggcgauuauagcccccuucgcauuaaacauagaaccggggacgagaucacauaccagugccggaauggauuuuaucccgccacccgcggcaacacggcgaaguguacauccaccggguggauuccugccccgagaugcacacugaaacccugugacuacccugauaucaagcacggaggccucuaccaugagaacaugcggagacccuauuucccugucgcuguuggcaaauacuauucuuacuauugcgacgaacacuuugagacccccuccgggagcuacugggaucacauucauuguacccaggacggaugguccccggccgugccuugccugcgcaagugcuauuuccccuaccuugaaaauggcuacaaccaaaaucacgggcggaaguuugugcagggaaaaucuaucgaugucgcuugucauccuggcuaugcccugcccaaggcgcagacaacggugaccugcauggagaacggguggagcccuacacccagauguauccgcguuaaaaccugcuccaagagcucuauugacaucgaaaauggcuucauuuccgagagccaguacacauaugcccucaaagagaaggcuaaguaccaauguaaacugggauaugugaccgccgauggcgaaacgucugggagcaucacaugcggaaaggacggcugguccgcucagccgaccuguauuaaaucuugcgauaucccugucuuuaugaacgcccggaccaagaaugacuucacaugguucaaacugaacgauacccucgacuacgagugucacgacggguaugaaagcaauacaggauccacgaccggcagcaucgugugcggguacaacggcuggucugaucugcccauuuguuacgagagagagugcgaacuucccaagaucgacguucaccuggugccugaucgcaagaaagaccaguauaaggucggagaggugcucaaauuuuccugcaagccgggcuucacaauugucgggcccaauagcgugcaauguuaccauuuuggacugucuccugaucuucccaucugcaaagaacagguucaguccuguggcccucccccugagcugcucaacgggaaugugaaggaaaagaccaaagaggaguauggacacagcgaagucguggaguacuauugcaacccccgguuccugaugaagggcccgaauaaaauucaguguguugacggggaauggacaacccugccugugugcaucgucgaggaauccacguguggcgauauucccgagcucgagcauggaugggcccaacugucuagcccucccuacuauuacggcgacuccguggaauuuaacugcucugagagcuucaccaugaucgggcacagauccaucacauguauucauggaguguggacccagcuuccgcagugcguugcuaucgauaagcugaaaaaguguaaaagcucuaaccucauuauccuggaggagcaccuuaagaauaagaaagaauuugaccacaacuccaauauucgcuaccggugcagaggcaaggagggguggauccauacagucugcaucaacggacgcugggauccugaggugaauuguagcauggcgcagauucaacugugucccccuccuccccagauccccaacucucacaauaugaccacgacacucaacuaucgggacggcgaaaaaguguccguccugugccaggagaauuaccugauucaggaaggggaggagauuaccugcaaggauggcagauggcaaagcaucccgcucuguguggagaaaauccccugcucucagccuccccagaucgaacauggaacaauuaacagcucccggagcucucaggaauccuaugcccacggcaccaagcugagcuacaccugugaagggggauuccgcaucuccgaagagaaugagacaacgugcuauaugggcaaguggucuagcccuccccaaugugaagggcuuccuugcaaauccccgcccgagauuucucacggaguuguggcucauaugagcgacuccuaccaguauggcgaagaggucaccuacaaguguuuugaaggcuucgggaucgacggaccugccauugccaaaugccugggcgagaaguggucucaucccccuagcugcaucaaaacagauugucucucccugcccagcuuugagaacgcuaucccgaugggggaaaagaaggacguguacaaagccggagagcagguuaccuauacaugcgcgaccuacuauaagauggauggcgcuucuaaugugacguguauuaacuccagauggacagggcggccuaccugcagagacaccagcugugucaauccucccacagugcaaaacgccuacaucguuucucgccagauguccaaauaucccagcggagaacgggugagauaccagugccgcucucccuaugagauguucggcgaugaagaggucaugugucugaacggcaauuggaccgagccuccgcagugcaaggacuccacagggaaauguggacccccucccccuauugauaacggcgacaucacgagcuuuccccuuuccguguacgccccggcuagcucuguggaauaccaaugccagaaucucuaucagcuggaggggaacaagagaauuaccugucggaauggacaguggagcgaaccucccaagugccugcacccuugcgucaucucccgcgagauuauggagaacuacaauaucgcccucagauggacagcuaaacaaaagcuguauucucggaccggcgaaagcguugaguucguguguaaacgcggguacagacuuuccucucggagccacacacugcgcaccacgugcugggauggaaagcucgaauaucccaccugugccaaaagauga

SEQ ID NO: 7842 - protein, 583 aa, Artificial Sequence
  CFAI__Homo_sapiens__P05156
MKLLHVFLLFLCFHLRFCKVTYTSQEDLVEKKCLAKKYTHLSCDKVFCQPWQRCIEGTCVCKLPYQCPKNGTAVCATNRRSFPTYCQQKSLECLHPGTKFLNNGTCTAEGKFSVSLKHGNTDSEGIVEVKLVDQDKTMFICKSSWSMREANVACLDLGFQQGADTQRRFKLSDLSINSTECLHVHCRGLETSLAECTFTKRRTMGYQDFADVVCYTQKADSPMDDFFQCVNGKYISQMKACDGINDCGDQSDELCCKACQGKGFHCKSGVCIPSQYQCNGEVDCITGEDEVGCAGFASVTQEETEILTADMDAERRRIKSLLPKLSCGVKNRMHIRRKRIVGGKRAQLGDLPWQVAIKDASGITCGGIYIGGCWILTAAHCLRASKTHRYQIWTTVVDWIHPDLKRIVIEYVDRIIFHENYNAGTYQNDIALIEMKKDGNKKDCELPRSIPACVPWSPYLFQPNDTCIVSGWGREKDNERVFSLQWGEVKLISNCSKFYGNRFYEKEMECAGTYDGSIDACKGDSGGPLVCMDANNVTYVWGVVSWGENCGKPEFPGVYTKVANYFDWISYHVGRPFISQYNV

SEQ ID NO: 7843 - RNA, 1752 nt, Artificial Sequence
  CFAI__Homo_sapiens__CCDS34049.1
augaagcuucuucauguuuuccuguuauuucugugcuuccacuuaagguuuugcaaggucacuuauacaucucaagaggaucugguggagaaaaagugcuuagcaaaaaaauauacucaccucuccugcgauaaagucuucugccagccauggcagagaugcauugagggcaccuguguuuguaaacuaccguaucagugcccaaagaauggcacugcagugugugcaacuaacaggagaagcuucccaacauacugucaacaaaagaguuuggaaugucuucauccagggacaaaguuuuuaaauaacggaacaugcacagccgaaggaaaguuuaguguuuccuugaagcauggaaauacagauucagagggaauaguugaaguaaaacuuguggaccaagauaagacaauguucauaugcaaaagcagcuggagcaugagggaagccaacguggccugccuugaccuuggguuucaacaaggugcugauacucaaagaagguuuaaguugucugaucucucuauaaauuccacugaaugucuacaugugcauugccgaggauuagagaccaguuuggcugaauguacuuuuacuaagagaagaacuauggguuaccaggauuucgcugaugugguuuguuauacacagaaagcagauucuccaauggaugacuucuuucagugugugaaugggaaauacauuucucagaugaaagccugugaugguaucaaugauuguggagaccaaagugaugaacuguguuguaaagcaugccaaggcaaaggcuuccauugcaaaucggguguuugcauuccaagccaguaucaaugcaauggugagguggacugcauuacaggggaagaugaaguuggcugugcaggcuuugcaucugugacucaagaagaaacagaaauuuugacugcugacauggaugcagaaagaagacggauaaaaucauuauuaccuaaacuaucuuguggaguuaaaaacagaaugcacauucgaaggaaacgaauugugggaggaaagcgagcacaacugggagaccucccauggcagguggcaauuaaggaugccaguggaaucaccugugggggaauuuauauugguggcuguuggauucugacugcugcacauugucucagagccaguaaaacucaucguuaccaaauauggacaacaguaguagacuggauacaccccgaccuuaaacguauaguaauugaauacguggauagaauuauuuuccaugaaaacuacaaugcaggcacuuaccaaaaugacaucgcuuugauugaaaugaaaaaagacggaaacaaaaaagauugugagcugccucguuccaucccugccuguguccccuggucuccuuaccuauuccaaccuaaugauacaugcaucguuucuggcuggggacgagaaaaagauaacgaaagagucuuuucacuucaguggggugaaguuaaacuaauaagcaacugcucuaaguuuuacggaaaucguuucuaugaaaaagaaauggaaugugcagguacauaugaugguuccaucgaugccuguaaaggggacucuggaggccccuuagucuguauggaugccaacaaugugacuuaugucugggguguugugaguuggggggaaaacuguggaaaaccagaguucccagguguuuacaccaaaguggccaauuauuuugacuggauuagcuaccauguaggaaggccuuuuauuucucaguacaauguauaa

SEQ ID NO: 7844 - RNA, 1752 nt, Artificial Sequence
  derived and/or modified sequence opt1 from CFAI__Homo_sapiens__CCDS34049.1
augaagcugcuccacguguuccugcuguuccucugcuuccaccuccgcuucugcaaggucaccuacaccagccaggaggaccugguggagaagaagugccuggccaagaaguacacgcaccuguccugcgacaagguguucugccagcccuggcagcggugcaucgaggggaccugcgucugcaagcugccguaccagugccccaagaacgggaccgccgugugcgcgaccaaccgccggagcuuccccacguacugccagcagaagucccucgagugccugcaccccggcaccaaguuccugaacaacgggaccugcaccgccgagggcaaguucagcgugucccucaagcacgggaacacggacagcgagggcaucgucgaggugaagcugguggaccaggacaagaccauguucaucugcaaguccagcugguccaugcgcgaggccaacgucgccugccuggaccucggcuuccagcagggggccgacacccagcggcgcuucaagcugagcgaccuguccaucaacagcaccgagugccuccacgugcacugccggggccuggagacgucccuggcggagugcaccuucaccaagcgccggaccaugggguaccaggacuucgccgacguggucugcuacacgcagaaggccgacagcccgauggacgacuucuuccagugcgugaacggcaaguacaucucccagaugaaggccugcgacgggaucaacgacugcggcgaccagagcgacgagcucugcugcaaggcgugccagggcaagggguuccacugcaaguccggcgugugcauccccagccaguaccagugcaacggggaggucgacugcaucaccggcgaggacgaggugggcugcgccggguucgccuccgugacccaggaggagaccgagauccugacggccgacauggacgccgagcgccggcgcaucaagagccugcuccccaagcugagcugcggcgucaagaaccggaugcacauccgccggaagcgcaucgucgggggcaagcgggcgcagcugggggaccuccccuggcaggucgccaucaaggacgccuccggcaucacgugcggcgggaucuacaucggcgggugcuggauccugaccgccgcccacugccugcgcgcgagcaagacccaccgguaccagaucuggaccaccgugguggacuggauccacccggaccucaagcgcaucgugaucgaguacguggaccggaucaucuuccacgagaacuacaacgccggcaccuaccagaacgacaucgcccugaucgagaugaagaaggacgggaacaagaaggacugcgagcugccccgcuccauccccgccugcgugcccuggagcccguaccucuuccagcccaacgacacgugcaucgucuccggcuggggccgcgagaaggacaacgagcggguguucagccugcaguggggcgaggugaagcugaucuccaacugcagcaaguucuacggcaaccgcuucuacgagaaggagauggagugcgccgggaccuacgacggcuccaucgacgcgugcaagggggacagcggcggcccccucgucugcauggacgccaacaacgugaccuacguguggggcgucguguccuggggcgagaacugcgggaagcccgaguucccggggguguacaccaaggucgccaacuacuucgacuggaucagcuaccacgugggccggcccuucaucucccaguacaacguguga

SEQ ID NO: 7845 - RNA, 1752 nt, Artificial Sequence
  derived and/or modified sequence opt2 from CFAI__Homo_sapiens__CCDS34049.1
augaagcuccuccacgucuuccuccucuuccucugcuuccaccuccgcuucugcaaggucaccuacaccucccaggaggaccucgucgagaagaagugccucgccaagaaguacacccaccucuccugcgacaaggucuucugccagcccuggcagcgcugcaucgagggcaccugcgucugcaagcuccccuaccagugccccaagaacggcaccgccgucugcgccaccaaccgccgcuccuuccccaccuacugccagcagaagucccucgagugccuccaccccggcaccaaguuccucaacaacggcaccugcaccgccgagggcaaguucuccgucucccucaagcacggcaacaccgacuccgagggcaucgucgaggucaagcucgucgaccaggacaagaccauguucaucugcaaguccuccugguccaugcgcgaggccaacgucgccugccucgaccucggcuuccagcagggcgccgacacccagcgccgcuucaagcucuccgaccucuccaucaacuccaccgagugccuccacguccacugccgcggccucgagaccucccucgccgagugcaccuucaccaagcgccgcaccaugggcuaccaggacuucgccgacgucgucugcuacacccagaaggccgacucccccauggacgacuucuuccagugcgucaacggcaaguacaucucccagaugaaggccugcgacggcaucaacgacugcggcgaccaguccgacgagcucugcugcaaggccugccagggcaagggcuuccacugcaaguccggcgucugcauccccucccaguaccagugcaacggcgaggucgacugcaucaccggcgaggacgaggucggcugcgccggcuucgccuccgucacccaggaggagaccgagauccucaccgccgacauggacgccgagcgccgccgcaucaagucccuccuccccaagcucuccugcggcgucaagaaccgcaugcacauccgccgcaagcgcaucgucggcggcaagcgcgcccagcucggcgaccuccccuggcaggucgccaucaaggacgccuccggcaucaccugcggcggcaucuacaucggcggcugcuggauccucaccgccgcccacugccuccgcgccuccaagacccaccgcuaccagaucuggaccaccgucgucgacuggauccaccccgaccucaagcgcaucgucaucgaguacgucgaccgcaucaucuuccacgagaacuacaacgccggcaccuaccagaacgacaucgcccucaucgagaugaagaaggacggcaacaagaaggacugcgagcucccccgcuccauccccgccugcguccccuggucccccuaccucuuccagcccaacgacaccugcaucgucuccggcuggggccgcgagaaggacaacgagcgcgucuucucccuccaguggggcgaggucaagcucaucuccaacugcuccaaguucuacggcaaccgcuucuacgagaaggagauggagugcgccggcaccuacgacggcuccaucgacgccugcaagggcgacuccggcggcccccucgucugcauggacgccaacaacgucaccuacgucuggggcgucgucuccuggggcgagaacugcggcaagcccgaguuccccggcgucuacaccaaggucgccaacuacuucgacuggaucuccuaccacgucggccgccccuucaucucccaguacaacgucuga

SEQ ID NO: 7846 - RNA, 1752 nt, Artificial Sequence
  derived and/or modified sequence opt3 from CFAI__Homo_sapiens__CCDS34049.1
augaagcugcuccacguguuccuucuguuuuugugcuuccauuuaagauuuuguaaagucaccuacacaagccaggaggaccugguugaaaagaaaugccuagccaagaaauauacucaccucuccugugauaagguguucugccaacccuggcagagguguaucgagggcacgugcguauguaagcugccuuaccagugcccgaaaaacgggaccgcugugugugcaacaaaucggcgcucuuuuccaacuuauugccagcaaaagucacuugaaugucugcaucccggaaccaaauucuugaacaaugguacaugcaccgccgagggcaaguuuagugucagccucaaacacgggaacacugacuccgaaggaauuguggagguuaagcugguggaucaggacaagacaauguucauaugcaaaucuucguggucaaugcgagaggcgaaugucgcuugucuggaucucggcuuucagcagggugccgacacccaacguagauucaaguuaagcgaucugaguaucaacuccacggaaugccuucaugugcacuguaggggguuggagacuucucuggcagaaugcaccuuuacaaaacggcgcacuaugggauaccaggacuucgccgauguaguuuguuauacccagaaggcugacagcccuauggaugacuuuuuccagugcgugaauggcaaauacauuucccaaaugaaggcaugugauggcaucaacgacugcggggaccagucagaugagcuauguugcaaagccugucagggaaaggguuuccacugcaagaguggcgucugcauuccaagccaauaucaguguaauggggagguggacugcaucacaggagaagaugaggugggcugugcugguuuugccucugucacccaggaagagacggaaauacucacugcggacauggaugcagagagaaggcggaucaaaucccugcuucccaagcugucaugcgggguuaaaaaccgcaugcauauucgaagaaagaggaucgugggaggcaaacgggcccaguugggcgaccucccuuggcaaguagcuauuaaggaugccagcgggaucacauguggagguauauacauuggcgggugcuggauccugaccgcagcucacuguuuacgugccaguaagacucaucgcuaccagauuuggacaaccguggucgacuggauccacccagaucugaaaagaaucgugauugaguauguugacaggauaaucuuccacgaaaauuacaacgcgggaacguaucagaaugauauugcccucaucgagaugaagaaagacggcaacaagaaagacugcgaacuuccccggucuauaccugcaugugugccaugguccccguaccuguuucagcccaaugauaccugcauugucagcgguugggggcgagagaaggacaacgaacgcguguucucguugcaauggggcgagguaaagcuaaucucuaacuguuccaaauuuuauggaaauagauucuacgagaaggaaauggagugcgcuggcacauaugaugggucaaucgacgccugcaaaggagauagugguggcccucugguuuguauggacgcuaacaaugugacuuacgucuggggaguggucagcuggggcgaaaacugcgggaagccagaguuucccgguguguacaccaaaguugccaauuauuucgauuggauuuccuaccauguggggaggccuuuuaucucucaguauaacguauga

SEQ ID NO: 7847 - RNA, 1752 nt, Artificial Sequence
  derived and/or modified sequence opt4 from CFAI__Homo_sapiens__CCDS34049.1
augaagcugcugcacguguuccugcuguuccugugcuuccaccugagauucugcaaggugaccuacaccagccaggaggaccugguggagaagaagugccuggccaagaaguacacccaccugagcugcgacaagguguucugccagcccuggcagagaugcaucgagggcaccugcgugugcaagcugcccuaccagugccccaagaacggcaccgccgugugcgccaccaacagaagaagcuuccccaccuacugccagcagaagagccuggagugccugcaccccggcaccaaguuccugaacaacggcaccugcaccgccgagggcaaguucagcgugagccugaagcacggcaacaccgacagcgagggcaucguggaggugaagcugguggaccaggacaagaccauguucaucugcaagagcagcuggagcaugagagaggccaacguggccugccuggaccugggcuuccagcagggcgccgacacccagagaagauucaagcugagcgaccugagcaucaacagcaccgagugccugcacgugcacugcagaggccuggagaccagccuggccgagugcaccuucaccaagagaagaaccaugggcuaccaggacuucgccgacguggugugcuacacccagaaggccgacagccccauggacgacuucuuccagugcgugaacggcaaguacaucagccagaugaaggccugcgacggcaucaacgacugcggcgaccagagcgacgagcugugcugcaaggccugccagggcaagggcuuccacugcaagagcggcgugugcauccccagccaguaccagugcaacggcgagguggacugcaucaccggcgaggacgaggugggcugcgccggcuucgccagcgugacccaggaggagaccgagauccugaccgccgacauggacgccgagagaagaagaaucaagagccugcugcccaagcugagcugcggcgugaagaacagaaugcacaucagaagaaagagaaucgugggcggcaagagagcccagcugggcgaccugcccuggcagguggccaucaaggacgccagcggcaucaccugcggcggcaucuacaucggcggcugcuggauccugaccgccgcccacugccugagagccagcaagacccacagauaccagaucuggaccaccgugguggacuggauccaccccgaccugaagagaaucgugaucgaguacguggacagaaucaucuuccacgagaacuacaacgccggcaccuaccagaacgacaucgcccugaucgagaugaagaaggacggcaacaagaaggacugcgagcugcccagaagcauccccgccugcgugcccuggagccccuaccuguuccagcccaacgacaccugcaucgugagcggcuggggcagagagaaggacaacgagagaguguucagccugcaguggggcgaggugaagcugaucagcaacugcagcaaguucuacggcaacagauucuacgagaaggagauggagugcgccggcaccuacgacggcagcaucgacgccugcaagggcgacagcggcggcccccuggugugcauggacgccaacaacgugaccuacguguggggcguggugagcuggggcgagaacugcggcaagcccgaguuccccggcguguacaccaagguggccaacuacuucgacuggaucagcuaccacgugggcagacccuucaucagccaguacaacguguga

SEQ ID NO: 7848 - RNA, 1752 nt, Artificial Sequence
  derived and/or modified sequence opt5 from CFAI__Homo_sapiens__CCDS34049.1
augaagcugcuccacguguuccugcuuuuucugugcuuccaucucagauuuuguaaagucaccuacacaagccaggaggaccugguugaaaagaaaugccuugccaagaaauauacgcaccuguccugugauaagguguucugccaacccuggcagcgguguaucgaggggaccugcguguguaagcucccuuaccagugcccgaaaaacgggacagcugucugugccaccaaucgcagaucuuuucccacauauugccagcaaaagagccuggaaugucugcauccuggaaccaaauuccucaacaauggcacaugcaccgcggaggggaaguuuuccgugucucugaaacacggaaacacggacagcgaaggcauuguugaggugaaacuugucgaucaggacaagaccauguucaucugcaaguccucuuggagcaugcgggaggcuaauguggccugucuggaucucggguuucagcagggagccgacacacaacgcagauucaagcuguccgaucuuagcauuaacucuaccgaaugccugcauguucacugucggggccucgagacaucccuggcugaaugcaccuuuacgaaacgcagaacaaugggcuaccaggacuucgccgauguggucuguuauacccagaaggcugacagccccauggaugacuuuuuccagugcgugaaugggaaauacaucucucaaaugaaggccugugauggaauuaacgacugcggcgaccaguccgaugagcuguguugcaaagcgugucaggggaagggauuccacugcaagagcggcgugugcaucccuucucaauaucaguguaauggggaggucgacugcaucacaggagaagaugagguuggcugugccggcuuugcuuccgugacccaggaagagaccgaaauucucacagccgacauggaugcugagcggcgcagaaucaaaagccugcuucccaagcuguccugcggggugaaaaaccggaugcauauucgcagaaagcggaucgucggaggcaaacgcgcccagcucggggaccugccuuggcaaguggcgauuaaggaugccucuggaaucacguguggcgggauuuacaucggaggcugcuggauccuuaccgcugcccacugucugagagcuagcaagacacaucgguaccagauuuggaccacaguuguggacuggauccacccggaucucaaaagaauugucaucgaguauguggaccgcauuaucuuccacgaaaauuacaacgccggcaccuaucagaaugauaucgcccugauugagaugaagaaagacgggaacaagaaagacugcgaacugccccgguccaucccugcuuguguucccuggagcccuuaccucuuucagcccaaugauacgugcauugugucuggauggggcagagagaaggacaacgaacgcgucuucucccugcaauggggcgaggugaaacuuaucagcaacuguucuaaguuuuauggaaaucgguucuacgagaaggaaauggagugcgcgggcacauaugaugggagcauugacgccugcaaaggcgauuccggaggcccgcuggucuguauggacgcuaacaaugugaccuacguuuggggaguggucucuuggggcgaaaacugcgggaagccugaguuucccgggguguacaccaaaguugccaauuauuucgauuggaucagcuaccaugugggaagaccuuuuaucucccaguauaacgucuga

SEQ ID NO: 7849 - protein, 573 aa, Artificial Sequence; identical to SEQ ID NO: 7657
  CH60__Homo_sapiens__NP_002147.2

SEQ ID NO: 7850 - RNA, 1722 nt, Artificial Sequence; identical to SEQ ID NO: 7658
  CH60__Homo_sapiens__NM_002156.4

SEQ ID NO: 7851 - RNA, 1722 nt, Artificial Sequence; identical to SEQ ID NO: 7659
  derived and/or modified sequence opt1 from CH60__Homo_sapiens__NM_002156.4

SEQ ID NO: 7852 - RNA, 1722 nt, Artificial Sequence; identical to SEQ ID NO: 7660
  derived and/or modified sequence opt2 from CH60__Homo_sapiens__NM_002156.4

SEQ ID NO: 7853 - RNA, 1722 nt, Artificial Sequence; identical to SEQ ID NO: 7661
  derived and/or modified sequence opt3 from CH60__Homo_sapiens__NM_002156.4

SEQ ID NO: 7854 - RNA, 1722 nt, Artificial Sequence; identical to SEQ ID NO: 7662
  derived and/or modified sequence opt4 from CH60__Homo_sapiens__NM_002156.4

SEQ ID NO: 7855 - RNA, 1722 nt, Artificial Sequence; identical to SEQ ID NO: 7663
  derived and/or modified sequence opt5 from CH60__Homo_sapiens__NM_002156.4

SEQ ID NO: 7856 - protein, 353 aa, Artificial Sequence
  CIITA__Homo_sapiens__Q29704
MRCLAPRPAGSYLSEPQGSSQCATMELGPLEGGYLELLNSDADPLCLYHFYDQMDLAGEEEIELYSEPDTDTINCDQFSRLLCDMEGDEETREAYANIAELDQYVFQDSQLEGLSKDIFKHIGPDEVIGESMEMPAEVGQKSQKRPFPEELPADLKHWKPAEPPTVVTGSLLVGPVSDCSTLPCLPLPALFNQEPASGQMRLEKTDQIPMPFSSSSLSCLNLPEGPIQFVPTISTLPHGLWQISEAGTGVSSIFIYHGEVPQASQVPPPSGFTVHGLPTSPDRPGSTSPFAPSATDLPSMPEPALTSRANMTEHKTSPTQCPAAGEVSNKLPKWPGREVPRKTQLGSSLLFGT

SEQ ID NO: 7857 - RNA, 1062 nt, Artificial Sequence
  CIITA__Homo_sapiens__AAA92364
augcguugccuggcuccacgcccugcuggguccuaccugucagagccccaaggcagcucacagugugccaccauggaguuggggccccuagaagguggcuaccuggagcuucuuaacagcgaugcugacccccugugccucuaccacuucuaugaccagauggaccuggcuggagaagaagagauugagcucuacucagaacccgacacagacaccaucaacugcgaccaguucagcaggcuguugugugacauggaaggugaugaagagaccagggaggcuuaugccaauaucgcggaacuggaccaguaugucuuccaggacucccagcuggagggccugagcaaggacauuuucaagcacauaggaccagaugaagugaucggugagaguauggagaugccagcagaaguugggcagaaaagucagaaaagacccuucccagaggagcuuccggcagaccugaagcacuggaagccagcugagccccccacuguggugacuggcagucuccuagugggaccagugagcgacugcuccacccugcccugccugccacugccugcgcuguucaaccaggagccagccuccggccagaugcgccuggagaaaaccgaccagauucccaugccuuucuccaguuccucguugagcugccugaaucucccugagggacccauccaguuuguccccaccaucuccacucugccccaugggcucuggcaaaucucugaggcuggaacaggggucuccaguauauucaucuaccauggugaggugccccaggccagccaaguacccccucccaguggauucacuguccacggccucccaacaucuccagaccggccaggcuccaccagccccuucgcuccaucagccacugaccugcccagcaugccugaaccugcccugaccucccgagcaaacaugacagagcacaagacgucccccacccaaugcccggcagcuggagaggucuccaacaagcuuccaaaauggccuggacgagaaguuccucggaagacacagcuggggagcucccugcuguucgggaccuaa

SEQ ID NO: 7858 - RNA, 1062 nt, Artificial Sequence
  derived and/or modified sequence opt1 from CIITA__Homo_sapiens__AAA92364
augcgcugccuggcgccccggccggccggcagcuaccucuccgagccccaggggagcucccagugcgccaccauggagcugggcccccuggagggcggguaccucgagcugcugaacagcgacgccgacccccucugccuguaccacuucuacgaccagauggaccuggccggggaggaggagaucgagcucuacuccgagccggacaccgacacgaucaacugcgaccaguucagccgccugcugugcgacauggagggcgacgaggagacccgggaggccuacgccaacaucgcggagcucgaccaguacguguuccaggacucccagcuggagggccugagcaaggacaucuucaagcacaucgggcccgacgaggucaucggcgaguccauggagaugcccgccgagguggggcagaagucccagaagcgccccuucccggaggagcuccccgccgaccugaagcacuggaagcccgccgagcccccgaccguggucaccggcagccugcucguggggcccgugagcgacugcuccacgcugcccugccugccccucccggcgcuguucaaccaggagcccgccagcggccagaugcggcuggagaagaccgaccagauccccaugcccuucuccagcuccagccucuccugccugaaccugccggagggccccauccaguucguccccaccaucagcacccucccccacgggcuguggcagaucagcgaggccggcacggggguguccagcaucuucaucuaccacggcgaggugccgcaggccucccaggucccgccgcccagcggcuucaccgugcacgggcugcccaccucccccgaccgccccggcagcaccucccccuucgcccccagcgcgacggaccuccccuccaugcccgagccggcccugaccagccgggccaacaugaccgagcacaagaccucccccacgcagugccccgccgccggggaggugagcaacaagcugcccaaguggccgggccgcgaggucccccggaagacccagcucggguccagccugcuguucggcaccuga

SEQ ID NO: 7859 - RNA, 1062 nt, Artificial Sequence
  derived and/or modified sequence opt2 from CIITA__Homo_sapiens__AAA92364
augcgcugccucgccccccgccccgccggcuccuaccucuccgagccccagggcuccucccagugcgccaccauggagcucggcccccucgagggcggcuaccucgagcuccucaacuccgacgccgacccccucugccucuaccacuucuacgaccagauggaccucgccggcgaggaggagaucgagcucuacuccgagcccgacaccgacaccaucaacugcgaccaguucucccgccuccucugcgacauggagggcgacgaggagacccgcgaggccuacgccaacaucgccgagcucgaccaguacgucuuccaggacucccagcucgagggccucuccaaggacaucuucaagcacaucggccccgacgaggucaucggcgaguccauggagaugcccgccgaggucggccagaagucccagaagcgccccuuccccgaggagcuccccgccgaccucaagcacuggaagcccgccgagccccccaccgucgucaccggcucccuccucgucggccccgucuccgacugcuccacccuccccugccucccccuccccgcccucuucaaccaggagcccgccuccggccagaugcgccucgagaagaccgaccagauccccaugcccuucuccuccuccucccucuccugccucaaccuccccgagggccccauccaguucguccccaccaucuccacccucccccacggccucuggcagaucuccgaggccggcaccggcgucuccuccaucuucaucuaccacggcgaggucccccaggccucccagguccccccccccuccggcuucaccguccacggccuccccaccucccccgaccgccccggcuccaccucccccuucgcccccuccgccaccgaccuccccuccaugcccgagcccgcccucaccucccgcgccaacaugaccgagcacaagaccucccccacccagugccccgccgccggcgaggucuccaacaagcuccccaaguggcccggccgcgaggucccccgcaagacccagcucggcuccucccuccucuucggcaccuga

SEQ ID NO: 7860 - RNA, 1062 nt, Artificial Sequence
  derived and/or modified sequence opt3 from CIITA__Homo_sapiens__AAA92364
augagaugccuggcccccaggccugcuggcagcuaccucuccgagccacaggggucuucacaaugugcaaccauggaacuuggaccgcuggaggguggcuauuuggaauuacugaacagugacgccgauccccuaugccucuaccacuucuaugaccagauggaucuggcgggggaggaagagaucgagcuuuacagcgaaccugacacagauacuauuaauugugaccaguuuucccggcuguugugcgauauggagggagacgaagagacgcgcgaggcuuaugccaacauagcagaacucgaucaguacguguuccaagacucucagcuggagggccugucgaaggauaucuuuaaacauauugguccagacgaagucaucggggagucaauggaaaugcccgccgagguuggacaaaagagccagaaacgaccuuucccagaggaacuccccgcugauuuaaagcacuggaaaccugcagagccaccgaccgugguaacaggcagucugcuugugggccccgucuccgacuguucuacuuugccuugccugccacuacccgcccucuuuaaucaggaaccugcuagcgggcagaugcgucuggagaagaccgaccagauuccaaugcccuucuccucaaguagccuuucuugucugaacuugccggaaggaccuauccaguuugugcccacaauauccacccucccacauggucuguggcaaaucucagaggccggcacugggguuagcaguauuuucaucuaucacggagaggugccucaggcgucucaggugcccccacccuccggcuuuacaguccaugguuuaccuaccagcccagauagaccggggucgacgucucccuucgcaccuuccgccacugaccugccaucaaugcccgaaccugcucucaccaguagggccaauaugacagagcacaagacuagcccaacccaaugccccgcagcuggagaaguauccaacaaacuuccgaaguggccuggccgggagguuccacgcaaaacacagcugggcucuagcuugcuauuugggaccuga

SEQ ID NO: 7861 - RNA, 1062 nt, Artificial Sequence
  derived and/or modified sequence opt4 from CIITA__Homo_sapiens__AAA92364
augagaugccuggcccccagacccgccggcagcuaccugagcgagccccagggcagcagccagugcgccaccauggagcugggcccccuggagggcggcuaccuggagcugcugaacagcgacgccgacccccugugccuguaccacuucuacgaccagauggaccuggccggcgaggaggagaucgagcuguacagcgagcccgacaccgacaccaucaacugcgaccaguucagcagacugcugugcgacauggagggcgacgaggagaccagagaggccuacgccaacaucgccgagcuggaccaguacguguuccaggacagccagcuggagggccugagcaaggacaucuucaagcacaucggccccgacgaggugaucggcgagagcauggagaugcccgccgaggugggccagaagagccagaagagacccuuccccgaggagcugcccgccgaccugaagcacuggaagcccgccgagccccccaccguggugaccggcagccugcuggugggccccgugagcgacugcagcacccugcccugccugccccugcccgcccuguucaaccaggagcccgccagcggccagaugagacuggagaagaccgaccagauccccaugcccuucagcagcagcagccugagcugccugaaccugcccgagggccccauccaguucgugcccaccaucagcacccugccccacggccuguggcagaucagcgaggccggcaccggcgugagcagcaucuucaucuaccacggcgaggugccccaggccagccaggugcccccccccagcggcuucaccgugcacggccugcccaccagccccgacagacccggcagcaccagccccuucgcccccagcgccaccgaccugcccagcaugcccgagcccgcccugaccagcagagccaacaugaccgagcacaagaccagccccacccagugccccgccgccggcgaggugagcaacaagcugcccaaguggcccggcagagaggugcccagaaagacccagcugggcagcagccugcuguucggcaccuga

SEQ ID NO: 7862 - RNA, 1062 nt, Artificial Sequence
  derived and/or modified sequence opt5 from CIITA__Homo_sapiens__AAA92364
augagaugccuggcuccccggccugccggcagcuaccucuccgagccgcaggggucuagccaaugugccaccauggaacugggaccccuugagggcggguaucuggaacuccugaacuccgacgcggauccucuuugccuguaccacuucuaugaccagauggaucucgcuggagaggaagagaucgagcuguacucugaacccgacacagauacgauuaauugugaccaguuuagccgccugcucugcgauauggagggcgacgaagagaccagagaggccuaugccaacaucgcugaacuggaucaguacguguuccaagacucccagcuugaggggcugucuaaggauauuuuuaaacauaucggaccugacgaagucauuggcgagagcauggaaaugcccgccgagguuggccagaagucccagaaacggccuuucccggaggaacuccccgcugaucugaagcacuggaaaccugccgagcccccuacaguggugaccgggagccuucuggucggacccgugucugacuguuccacacucccgugccugccucugcccgcgcucuuuaaucaagaaccugccagcggccagaugcgccuggagaagaccgaccagauccccaugcccuucucuuccagcucucuuuccugucugaaccucccugaagggccgauccaguuuguucccacaauuagcacccugccucauggacuuuggcaaaucuccgaggcuggcacgggggugucuagcauuuucaucuaucacggagaggucccccaggccucccaggugccucccccgagcggcuuuaccguucauggccugccuacaucucccgauagaccuggguccaccagccccuucgcuccuucugccacagaccuccccagcaugccggaaccugcgcugaccucccgggccaauaugacggagcacaagacaucucccacccaaugccccgcugccggagaagugagcaacaaacugccuaaguggccgggccgcgagguccccagaaaaacacagcucggguccagccugcuuuuuggaaccuga

SEQ ID NO: 7863 - protein, 423 aa, Artificial Sequence [sequence omitted]

SEQ ID NO: 7864 - RNA, 1272 nt, Artificial Sequence
  c-Jun__Homo_sapiens__BAG51230
auguccgccucggcugucuucauucuggacguuaagggcaagccauugaucagccgcaacuacaagggcgauguggccaugagcaagauugagcacuucaugccuuugcugguacagcgggaggaggaaggcgcccuggccccgcugcugagccacggccagguccacuuccuauggaccaaacacagcaaccucuacuugguggccaccacaucgaagaaugccaaugccucccugguguacuccuuccuguauaagacaauagagguauucugcgaauacuucaaggagcuggaggaggagagcauccgggacaacuuugucaucgucuacgaguugcuggacgagcucauggacuuuggcuucccgcagaccaccgacagcaagauccugcaggaguacaucacucagcagagcaacaagcuggagacgggcaagucacgggugccacccacugucaccaacgcuguguccuggcgcuccgaggguaucaaguauaagaagaacgaggucuucauugaugucauagagucugucaaccugcuggucaaugccaacggcagcguccuucugagcgaaaucgucgguaccaucaagcucaagguguuucugucgggaaugccagagcugcggcugggccucaaugaccgcgugcucuucgagcucacuggccgcagcaagaacaaaucaguagagcuggaggauguaaaauuccaccagugcgugcggcucucucgcuuugacaacgaccgcaccaucuccuucaucccgccugauggugacuuugagcucaugucauaccgccucagcacccaggucaagccacugaucuggauugagucugucauugagaaguucucccacagccgcguggagaucacggucaaggccaaggggcaguuuaagaaacagucaguggccaacgguguggagauaucugugccuguacccagcgaugccgacucccccagauucaagaccagugugggcagcgccaaguaugugccggagagaaacgucgugauuuggaguauuaagucuuucccggggggcaaggaguacuugaugcgagcccacuuuggccuccccaguguggaaaaggaagagguggagggccggccccccaucggggucaaguuugagauccccuacuucaccgucucugggauccagguccgauacaugaagaucauugagaaaagugguuaccaggcccugcccuggguucgcuacaucacccagaguggugauuaccaacuucguaccagcuag

SEQ ID NO: 7865 - RNA, 1272 nt, Artificial Sequence
  derived and/or modified sequence opt1 from c-Jun__Homo_sapiens__BAG51230
augagcgccuccgccguguucauccuggacgucaagggcaagccccucaucagccgcaacuacaagggggacguggcgauguccaagaucgagcacuucaugccgcugcuggugcagcgggaggaggagggcgcccucgcgccccugcugagccacgggcagguccacuuccucuggaccaagcacuccaaccuguaccugguggccaccacgagcaagaacgccaacgccucccucguguacagcuuccuguacaagaccaucgaggucuucugcgaguacuucaaggagcuggaggaggaguccauccgcgacaacuucgugaucguguacgagcuccuggacgagcugauggacuucggcuucccccagaccaccgacagcaagauccuccaggaguacaucacgcagcaguccaacaagcuggagaccggcaagagccgggugcccccgaccgucaccaacgccguguccuggcgcagcgaggggaucaaguacaagaagaacgaggucuucaucgacgugaucgaguccgugaaccugcucgucaacgccaacggcagcgugcugcuguccgagaucguggggacgaucaagcucaaggucuuccugagcggcaugcccgagcugcggcucgggcugaacgaccgcgugcuguucgagcucaccggccgguccaagaacaagagcguggagcuggaggacgucaaguuccaccagugcgugcgccugagccgguucgacaacgaccgcaccaucuccuucaucccgcccgacggggacuucgagcucaugagcuaccggcuguccacccaggugaagccccugaucuggaucgagagcgucaucgagaaguucucccacagccgcguggagaucacggucaaggccaagggccaguucaagaagcaguccguggcgaacggcguggagaucagcguccccgugcccuccgacgccgacagcccccgguucaagaccuccguggggagcgccaaguacgucccggagcgcaacguggugaucugguccaucaagagcuuccccggcgggaaggaguaccucaugcgggcccacuucggccugcccuccgucgagaaggaggagguggagggccggcccccgaucggggugaaguucgagauccccuacuucaccgucagcggcauccaggugcgcuacaugaagaucaucgagaaguccggguaccaggcccugcccugggugcgcuacaucacccagagcggcgacuaccagcuccggacguccuga

SEQ ID NO: 7866 - RNA, 1272 nt, Artificial Sequence
  derived and/or modified sequence opt2 from c-Jun__Homo_sapiens__BAG51230
auguccgccuccgccgucuucauccucgacgucaagggcaagccccucaucucccgcaacuacaagggcgacgucgccauguccaagaucgagcacuucaugccccuccucguccagcgcgaggaggagggcgcccucgccccccuccucucccacggccagguccacuuccucuggaccaagcacuccaaccucuaccucgucgccaccaccuccaagaacgccaacgccucccucgucuacuccuuccucuacaagaccaucgaggucuucugcgaguacuucaaggagcucgaggaggaguccauccgcgacaacuucgucaucgucuacgagcuccucgacgagcucauggacuucggcuucccccagaccaccgacuccaagauccuccaggaguacaucacccagcaguccaacaagcucgagaccggcaagucccgcgucccccccaccgucaccaacgccgucuccuggcgcuccgagggcaucaaguacaagaagaacgaggucuucaucgacgucaucgaguccgucaaccuccucgucaacgccaacggcuccguccuccucuccgagaucgucggcaccaucaagcucaaggucuuccucuccggcaugcccgagcuccgccucggccucaacgaccgcguccucuucgagcucaccggccgcuccaagaacaaguccgucgagcucgaggacgucaaguuccaccagugcguccgccucucccgcuucgacaacgaccgcaccaucuccuucaucccccccgacggcgacuucgagcucauguccuaccgccucuccacccaggucaagccccucaucuggaucgaguccgucaucgagaaguucucccacucccgcgucgagaucaccgucaaggccaagggccaguucaagaagcaguccgucgccaacggcgucgagaucuccguccccguccccuccgacgccgacuccccccgcuucaagaccuccgucggcuccgccaaguacguccccgagcgcaacgucgucaucugguccaucaaguccuuccccggcggcaaggaguaccucaugcgcgcccacuucggccuccccuccgucgagaaggaggaggucgagggccgcccccccaucggcgucaaguucgagauccccuacuucaccgucuccggcauccagguccgcuacaugaagaucaucgagaaguccggcuaccaggcccuccccuggguccgcuacaucacccaguccggcgacuaccagcuccgcaccuccuga

SEQ ID NO: 7867 - RNA, 1272 nt, Artificial Sequence
  derived and/or modified sequence opt3 from c-Jun__Homo_sapiens__BAG51230
augagcgccuccgcuguguucauccuggacgucaagggcaaaccccucauuucuagaaacuacaagggggauguugcaaugucaaaaauagagcacuuuaugccucuucuggugcagagggaagaggaaggagccuuggcgccauuacugagucauggucaaguacacuuccuauggaccaagcauagcaaucucuaucugguggcuacaacuuccaaaaacgccaaugcaucucuugucuacucguuucuguauaagacgaucgagguguucugcgaauacuuuaaggaguuggaggaagagucaauucgggacaacuucguuaucguguaugaacuccuggaugagcugauggacuuuggcuucccgcagaccacagauagcaaaauucuccaggaguacaucacucagcaaaguaauaaguuagaaaccgggaaaucccgcgugcccccuacagugaccaacgccguaucuuggcgaagcgagggaauaaaguauaaaaagaaugaaguuuuuaucgacgugauugaguccgucaaccugcuugugaaugcuaacggcucaguguugcugagugaaaucgucgguacuauuaagcuaaaaguuuuccucagcgggaugccagagcugcgucuuggacugaaugauagaguguuguuugagcucacaggcaggucuaagaacaaauccguagaacuggaggacgugaaguuccaccaguguguccgguuaucacgcuuugauaaugacagaaccaucagcuucauacccccugauggcgacuucgaacugaugaguuacaggcucucuacgcaggucaaaccacuuauuuggaucgaguccguuauugaaaaguuuagccauucgcggguggagaucacugucaaagcaaaggggcaguucaagaaacaaucuguggccaacggaguagagaucuccguucccgugccuucagaugcugacaguccacgcuuuaagaccagcgucgguuccgccaaauacgugccggaacgaaaugucgugauuuggucuauaaagagcuuccccggcgggaaagaguaucugaugagagcgcacuuuggauugccuucaguugaaaaggaggaaguggagggcaggccacccaucgguguaaaguucgagauuccuuacuuuacagucagugggauccaggugcgguauaugaaaauaauugaaaaguccggauaccaggcacuaccauggguucguuauaucacucagagcggcgacuaccaacugcgcaccucuuga

SEQ ID NO: 7868 - RNA, 1272 nt, Artificial Sequence
  derived and/or modified sequence opt4 from c-Jun__Homo_sapiens__BAG51230
augagcgccagcgccguguucauccuggacgugaagggcaagccccugaucagcagaaacuacaagggcgacguggccaugagcaagaucgagcacuucaugccccugcuggugcagagagaggaggagggcgcccuggccccccugcugagccacggccaggugcacuuccuguggaccaagcacagcaaccuguaccugguggccaccaccagcaagaacgccaacgccagccugguguacagcuuccuguacaagaccaucgagguguucugcgaguacuucaaggagcuggaggaggagagcaucagagacaacuucgugaucguguacgagcugcuggacgagcugauggacuucggcuucccccagaccaccgacagcaagauccugcaggaguacaucacccagcagagcaacaagcuggagaccggcaagagcagagugccccccaccgugaccaacgccgugagcuggagaagcgagggcaucaaguacaagaagaacgagguguucaucgacgugaucgagagcgugaaccugcuggugaacgccaacggcagcgugcugcugagcgagaucgugggcaccaucaagcugaagguguuccugagcggcaugcccgagcugagacugggccugaacgacagagugcuguucgagcugaccggcagaagcaagaacaagagcguggagcuggaggacgugaaguuccaccagugcgugagacugagcagauucgacaacgacagaaccaucagcuucaucccccccgacggcgacuucgagcugaugagcuacagacugagcacccaggugaagccccugaucuggaucgagagcgugaucgagaaguucagccacagcagaguggagaucaccgugaaggccaagggccaguucaagaagcagagcguggccaacggcguggagaucagcgugcccgugcccagcgacgccgacagccccagauucaagaccagcgugggcagcgccaaguacgugcccgagagaaacguggugaucuggagcaucaagagcuuccccggcggcaaggaguaccugaugagagcccacuucggccugcccagcguggagaaggaggagguggagggcagaccccccaucggcgugaaguucgagauccccuacuucaccgugagcggcauccaggugagauacaugaagaucaucgagaagagcggcuaccaggcccugcccugggugagauacaucacccagagcggcgacuaccagcugagaaccagcuga

SEQ ID NO: 7869 - RNA, 1272 nt, Artificial Sequence
  derived and/or modified sequence opt5 from c-Jun__Homo_sapiens__BAG51230
augagcgcuuccgcuguguucauccuggacgucaagggcaaaccccucauuucuagaaacuacaagggggauguugccaugagcaaaaucgagcacuuuaugccucugcuugugcagcgggaagaggaaggagcgcuggcuccgcuccugucccauggccaagugcacuuccuuuggaccaagcauucuaaucuguaucucgucgccacaacgagcaaaaacgccaaugcuucccugguguacucuuuucuguauaagaccauugagguuuucugcgaauacuuuaaggagcucgaggaagagagcauccgcgacaacuucgugauugucuaugaacugcuugaugagcugauggacuuuggguucccccagacaaccgauuccaaaauccuccaggaguacaucacacagcaaagcaauaagcuggaaaccggaaaaucuagagugccucccacaguuaccaacgccguguccuggcggagcgagggcauuaaguauaaaaagaaugaagucuuuaucgacgugauugagucugugaaccuucuggucaaugcuaacggguccguucuccugagcgaaaucgugggaacgauuaagcugaaaguguuccucucuggcaugccugagcugcgccuuggccugaaugauagaguccucuuugagcugaccgggcgguccaagaacaaaagcguggaacuugaggacguuaaguuccaccagugugugcgccuguccagauuugauaaugaccggacaaucucuuucauucccccugauggagacuucgaacucaugagcuaccgccuguccacccaggucaaaccgcugaucuggaucgagagcgugauugaaaaguuuucucauuccagaguugagaucacagugaaagccaagggccaguucaagaaacaaagcgucgcgaacgggguggagauuucuguccccgugccuagcgaugccgacucuccccgguuuaagaccuccguuggaagcgcuaaauacgugccugaacgcaaugucgugaucugguccauuaagagcuuccccggcgggaaagaguaucucaugagagcccacuuuggacugccgucuguugaaaaggaggaaguggagggccggccucccaucggcgucaaguucgagaucccuuacuuuacgguguccgggauucaggugcgcuauaugaaaaucauugaaaagagcggauaccaggcccuucccuggguuagauauaucacacagucuggcgacuaccaacugcggaccuccuga

SEQ ID NO: 7870 - protein, 247 aa, Artificial Sequence
  c-Jun__Homo_sapiens__B3KNW1
MRSALLERMPVMEKVTTNGPTEIVQTNGETEPAPLETKPPPSGPQPTSQANDLLDLLGGNDITPVIPTAPTSKPSSAGGELLDLLGDINLTGAPAAAPAPASVPQISQPPFLLDGLSSQPLFNDIAAGIPSITAYSKNGLKIEFTFERSNTNPSVTVITIQASNSTELDMTDFVFQAAVPKTFQLQLLSPSSSIVPAFNTGTITQVIKVLNPQKQQLRMRIKLTYNHKGSAMQDLAEVNNFPPQSWQ

SEQ ID NO: 7871 - RNA, 744 nt, Artificial Sequence
  c-Jun__Homo_sapiens__BAG51473
augaggucugcccuacuugagagaaugccugucauggaaaaagugaccacaaauggcccuacugagauugugcagacaaauggagagacagaaccagcuccacuagagaccaaaccgccacccucugggccacagcccaccagccaggccaaugauuuauuggauuuguugggaggaaaugacauaacaccuguuauuccaacugcgccuacaagcaaaccaucuucugcugguggagaacuucuugauuugcugggagacaucaaccuuacaggugcuccagcugcugcucccgccccugccucagucccacagauaucccagccccccuucuuguuggaugggcuuucaucacagccucucuucaaugauauugcugcaggcauccccuccaucacagcauacaguaagaauggcuugaagauagaauucaccuuugaacggucaaauaccaaccccaguguaacagugauaacgauacaggccuccaacagcacagagcuagauaugacggacuuuguuuuccaagcugcaguaccaaagacauuccagcugcagcucuugucuccuagcagcagcauugucccagcauuuaacacggggaccaucacacaagucauuaaaguucugaacccucagaagcaacagcugcgaaugcggaucaagcuuacauauaaucacaagggcucagcaaugcaagaucuagcagaggugaacaacuuucccccucaguccuggcaauga

SEQ ID NO: 7872 - RNA, 744 nt, Artificial Sequence
  derived and/or modified sequence opt1 from c-Jun__Homo_sapiens__BAG51473
augcgcagcgcccugcucgagcggaugcccgugauggagaaggucaccaccaacggccccacggagaucgugcagaccaacggggagaccgagcccgcgccccuggagaccaagcccccgcccuccggcccccagcccacgagccaggccaacgaccugcucgaccugcucgggggcaacgacaucaccccggugauccccaccgcccccaccuccaagcccagcuccgccgggggcgagcugcuggaccugcucggcgacaucaaccugacgggggccccggccgcggcccccgcccccgccagcgucccccagaucucccagccgcccuuccugcucgacggccugagcucccagccccuguucaacgacaucgcggccgggauccccagcaucaccgccuacuccaagaacggccucaagaucgaguucaccuucgagcgcagcaacaccaacccguccgugacggugaucaccauccaggccagcaacuccaccgagcuggacaugaccgacuucgucuuccaggccgcggugcccaagacguuccagcugcagcuccugagccccuccagcuccaucgugcccgccuucaacaccgggaccaucacccaggucaucaaggugcugaacccgcagaagcagcagcuccggaugcgcaucaagcugacguacaaccacaagggcagcgccaugcaggaccuggccgaggugaacaacuucccgccccagagcuggcaguga

SEQ ID NO: 7873 - RNA, 744 nt, Artificial Sequence
  derived and/or modified sequence opt2 from c-Jun__Homo_sapiens__BAG51473
augcgcuccgcccuccucgagcgcaugcccgucauggagaaggucaccaccaacggccccaccgagaucguccagaccaacggcgagaccgagcccgccccccucgagaccaagcccccccccuccggcccccagcccaccucccaggccaacgaccuccucgaccuccucggcggcaacgacaucacccccgucauccccaccgcccccaccuccaagcccuccuccgccggcggcgagcuccucgaccuccucggcgacaucaaccucaccggcgcccccgccgccgcccccgcccccgccuccgucccccagaucucccagccccccuuccuccucgacggccucuccucccagccccucuucaacgacaucgccgccggcauccccuccaucaccgccuacuccaagaacggccucaagaucgaguucaccuucgagcgcuccaacaccaaccccuccgucaccgucaucaccauccaggccuccaacuccaccgagcucgacaugaccgacuucgucuuccaggccgccguccccaagaccuuccagcuccagcuccucucccccuccuccuccaucguccccgccuucaacaccggcaccaucacccaggucaucaagguccucaacccccagaagcagcagcuccgcaugcgcaucaagcucaccuacaaccacaagggcuccgccaugcaggaccucgccgaggucaacaacuuccccccccaguccuggcaguga

SEQ ID NO: 7874 - RNA, 744 nt, Artificial Sequence
  derived and/or modified sequence opt3 from c-Jun__Homo_sapiens__BAG51473
augagaagcgcccugcucgagaggaugcccgugauggaaaaggucaccacaaacggcccuacugagaucguucagacgaauggggaaaccgagccagcuccgcuugaaacaaaacccccuccauccggaccccaaccuacuucucaggcaaacgaccuguuggauuuacuggguggcaaugacauuaccccagugauacccacagccccuaccucaaagccaaguagcgcgggaggagagcuacucgaucugcuuggcgacaucaaccugacuggugcuccggccgcagcccccgcuccugcauccguaccacagauuucucagcccccuuucuugcucgaugggcugucgucacaaccacuguucaaugacaucgccgcugggauucccagcaucacagccuacaguaaaaacggccucaagauagaguucaccuuugaacgguccaauacgaacccgucugugacugucaucaccauucaggcgagcaauuccacagaguuagauaugacugacuucguguuucaggcagccguuccuaaaaccuuccagcugcaacuuuugucacccaguagcucuaucgugccagcuuuuaacacaggcaccauuacgcaggucaucaaggugcugaauccucagaagcagcaacuacgcaugcgaauaaaacucacuuauaaccacaagggguccgccaugcaggaucuggcagaaguaaauaacuuucccccacagucauggcaauga

SEQ ID NO: 7875 - RNA, 744 nt, Artificial Sequence
  derived and/or modified sequence opt4 from c-Jun__Homo_sapiens__BAG51473
augagaagcgcccugcuggagagaaugcccgugauggagaaggugaccaccaacggccccaccgagaucgugcagaccaacggcgagaccgagcccgccccccuggagaccaagcccccccccagcggcccccagcccaccagccaggccaacgaccugcuggaccugcugggcggcaacgacaucacccccgugauccccaccgcccccaccagcaagcccagcagcgccggcggcgagcugcuggaccugcugggcgacaucaaccugaccggcgcccccgccgccgcccccgcccccgccagcgugccccagaucagccagccccccuuccugcuggacggccugagcagccagccccuguucaacgacaucgccgccggcauccccagcaucaccgccuacagcaagaacggccugaagaucgaguucaccuucgagagaagcaacaccaaccccagcgugaccgugaucaccauccaggccagcaacagcaccgagcuggacaugaccgacuucguguuccaggccgccgugcccaagaccuuccagcugcagcugcugagccccagcagcagcaucgugcccgccuucaacaccggcaccaucacccaggugaucaaggugcugaacccccagaagcagcagcugagaaugagaaucaagcugaccuacaaccacaagggcagcgccaugcaggaccuggccgaggugaacaacuuccccccccagagcuggcaguga

SEQ ID NO: 7876 - RNA, 744 nt, Artificial Sequence
  derived and/or modified sequence opt5 from c-Jun__Homo_sapiens__BAG51473
augagaagcgcccugcucgagcggaugcccgugauggaaaaggucaccacaaacggcccuacggagaucguucagaccaauggggaaacagagccggcuccccuggaaaccaaaccucccccuuccggaccccaaccuacaucucaggccaacgaccuucuggaucuccugggcgggaaugacauuaccccggugauccccacagcgccuaccagcaagcccuccucugcuggaggcgagcuucuggaucuccugggggacauuaaccugacgggagccccugccgcugcccccgcuccggccagcgugccucagaucucccagcccccuuuccuccuggauggccuuucuagccaaccccuguuuaaugacauugcggccggcauccccuccaucaccgcuuacagcaaaaacgggcucaagauugaguucacauuugaacgcucuaauaccaacccuuccgucacagugaucaccauucaggccagcaauucuacggagcuggauaugacagacuucguuuuucaggcugccgugccgaaaaccuuccagcuucaacugcucucccccucuagcuccaucgucccugcguuuaacacaggaaccauuacccaggugaucaagguucugaauccccagaagcagcaacugagaaugcggauuaaacucacauauaaccacaagggcagcgccaugcaggaucuggcugaagugaauaacuucccuccccaguccuggcaauga

SEQ ID NO: 7877 - protein, 845 aa, Artificial Sequence
  c-Jun__Homo_sapiens__B3KXW5
MEKNINLRNCQTLNTYVMLTHLRMPAPIRLRELIRTIRTARTQAEEREMIQKECAAIRSSFREEDNTYRCRNVAKLLYMHMLGYPAHFGQLECLKLIASQKFTDKRIGYLGAMLLLDERQDVHLLMTNCIKNDLNHSTQFVQGLALCTLGCMGSSEMCRDLAGEVEKLLKTSNSYLRKKAALCAVHVIRKVPELMEMFLPATKNLLNEKNHGVLHTSVVLLTEMCERSPDMLAHFRKLVPQLVRILKNLIMSGYSPEHDVSGISDPFLQVRILRLLRILGRNDDDSSEAMNDILAQVATNTETSKNVGNAILYETVLTIMDIKSESGLRVLAINILGRFLLNNDKNIRYVALTSLLKTVQTDHNAVQRHRSTIVDCLKDLDVSIKRRAMELSFALVNGNNIRGMMKELLYFLDSCEPEFKADCASGIFLAAEKYAPSKRWHIDTIMRVLTTAGSYVRDDAVPNLIQLITNSVEMHAYTVQRLYKAILGDYSQQPLVQVAAWCIGEYGDLLVSGQCEEEEPIQVTEDEVLDILESVLISNMSTSVTRGYALTAIMKLSTRFTCTVNRIKKVVSIYGSSIDVELQQRAVEYNALFKKYDHMRSALLERMPVMEKVTTNGPTEIVQTNGETEPAPLETKPPPSGPQPTSQANDLLDLLGGNDITPVIPTAPTSKPSSAGGELLDLLGDINLTGAPAAAPAPASVPQISQPPFLLDGLSSQPLFNDIAAGIPSITAYSKNGLKIEFTFERSNTNPSVTVITIQASNSTELDMTDFVFQAAVPKTFQLQLLSPSSSIVPAFNTGTITQVIKVLNPQKQQLRMRIKLTYNHKGSAMQDLAEVNNFPPQSWQ

SEQ ID NO: 7878 - RNA, 2538 nt, Artificial Sequence
  c-Jun__Homo_sapiens__BAG54627
auggagaaaaauauuaaucugaggaacugucaaacacugaacaccuauguaaugcucacucauuuaaggaugccagcccccaucagauugcgggagcugauccggaccauccggacagcccgaacccaagcugaagaacgagaaaugauccagaaagaaugugcugcaauccggucaucuuuuagagaagaagacaauacauaccgaugucggaauguggcaaaauuacuguauaugcacaugcugggcuacccugcucacuuuggacaguuggagugccucaagcuuauugccucucaaaaauuuacagacaaacgcauuggcuauuuaggggcaaugcugcuguuagaugaaagacaagauguccaucuucucaugaccaacuguaucaagaaugaucuuaaucauagcacgcaauucguacagggguuagcacuuuguacccucggcugcaugggcuccucagagaugugcagagaucuugcaggagagguagagaagcuccugaaaaccuccaacucuuacuuaagaaaaaaggcagcacugugugcuguucaugucaucaggaaaguuccugaacuuauggagauguuuuuaccagcaacaaaaaauuuauugaaugagaagaaccaugguguccuccacacaucuguaguccuccucacagaaaugugugagcgaagcccagacaugcuugcgcauuucagaaagcuugugccccaauuaguucguauuuuaaagaaccucaucauguccggauauucaccagaacaugauguuucugguaucagugaccccuuuuugcagguacgaauuuugcgguuauuaagaauuuuaggacgaaaugaugaugauucaagugaagcuaugaaugauauauuagcacagguugccacuaauacugagacuaguaaaaauguaggaaaugcuauucuuuaugaaacgguuuugacuaucauggauauuaagucagagaguggauugcgaguccuagccauaaauauccugggucguuucuuauugaacaaugacaagaauauuagauauguggcucugacaucuuuguugaagacuguacagacagaucauaaugcaguacagaggcacagaagcacaauuguggacugucuuaaagauuuggaugucucaauaaaacggcgugcaauggaauugaguuuugcccugguaaaugggaauaauauccgaggcaugaugaaagaauuacuuuauuuucuggauucgugugagccagaauuuaaagcagacugugcaucuggaaucuuucuugcugcagaaaaguaugcaccuuccaaacgauggcauauagacacaauuaugcguguuuugacaacggcaggaaguuauguucgugaugaugcaguccccaauuuaauccaguuaauaacuaauaguguggagaugcaugccuauacuguccagcgccuguacaaagcaauucuuggugauuauucucaacaaccuuugguacaaguggcugcaugguguauaggugaauauggugaucuucuuguaucuggccagugugaagaggaagagccuauucagguaacagaggaugaaguguuggauauuuuagaaaguguccuaaucucuaauauguccaccucugugacacgagguuaugcccucacugccauuaugaagcuuuccacucgauucacuuguacuguaaaccgaauuaagaaagugguuuccaucuacggaagcagcauugauguggaacuccagcagagggcaguagaauauaaugcacuuuucaagaaauaugaccacaugaggucugcccuacuugagagaaugccugucauggaaaaagugaccacaaauggcccuacugagauugugcagacaaauggagagacagaaccagcuccacuagagaccaaaccgccacccucugggccacagcccaccagccaggccaaugauuuauuggauuuguugggaggaaaugacauaacaccuguuauuccaacugcgccuacaagcaaaccaucuucugcugguggagaacuucuugauuugcugggagacaucaaccuuacaggugcuccagcugcugcuccugccccugccucagucccacagauaucccagccccccuucuuguuggaugggcuuucaucacagccucucuucaaugauauugcugcaggcauccccuccaucacagcauacaguaagaauggcuugaagauagaauucaccuuugaacggucaaauaccaaccccaguguaacagugauaacgauacaggccuccaacagcacagagcuagauaugacggacuuuguuuuccaagcugcaguaccaaagacauuccagcugcagcucuugucuccuagcagcagcauugucccagcauuuaacacggggaccaucacacaagucauuaaaguucugaacccucagaagcaacagcugcgaaugcggaucaagcuuacauauaaucacaagggcucagcaaugcaagaucuagcagaggugaacaacuuucccccucaguccuggcaauga

SEQ ID NO: 7879 - RNA, 2538 nt, Artificial Sequence
  derived and/or modified sequence opt1 from c-Jun__Homo_sapiens__BAG54627
auggagaagaacaucaaccugcgcaacugccagacccucaacaccuacgugaugcugacgcaccuccggaugcccgccccgauccgccugcgggagcugauccgcaccauccggaccgcccgcacccaggcggaggagcgggagaugauccagaaggagugcgccgccauccgcagcuccuuccgggaggaggacaacacguaccgcugccggaacgucgccaagcugcucuacaugcacaugcugggcuaccccgcccacuucgggcagcuggagugccucaagcugaucgcgagccagaaguucaccgacaagcgcaucggcuaccugggggccaugcuccugcuggacgagcggcaggacgugcaccuccugaugaccaacugcaucaagaacgaccugaaccacuccacccaguucgugcagggccucgcccugugcacgcuggggugcaugggcagcuccgagaugugccgcgaccucgccggcgaggucgagaagcugcugaagaccagcaacuccuaccuccggaagaaggcggcccugugcgccgugcacgugauccgcaagguccccgagcugauggagauguuccuccccgccaccaagaaccugcugaacgagaagaaccacggggugcuccacaccagcgugguccugcugacggagaugugcgagcgguccccggacaugcucgcccacuuccgcaagcuggugccccagcuggugcggauccucaagaaccugaucaugagcggcuacucccccgagcacgacgucagcgggaucuccgaccccuuccuccaggugcgcauccugcggcugcugcgcauccucggccgcaacgacgacgacagcuccgaggcgaugaacgacauccuggcccagguggccaccaacaccgagaccagcaagaacgucgggaacgccauccuguacgagacggugcucaccaucauggacaucaaguccgagagcggccugcgggugcuggccaucaacauccucggccgcuuccugcugaacaacgacaagaacauccgguacgucgcgcugaccucccuccugaagaccgugcagacggaccacaacgccgugcagcgccaccggagcaccaucgucgacugccugaaggaccucgacgugagcaucaagcgccgggccauggagcuguccuucgcccuggugaacgggaacaacauccgcggcaugaugaaggagcuccuguacuuccuggacagcugcgagccggaguucaaggccgacugcgcguccgggaucuuccucgccgccgagaaguacgcccccagcaagcgguggcacaucgacaccaucaugcgcguccugaccacggccggcuccuacgugcgggacgacgcgguccccaaccugauccagcucaucaccaacagcguggagaugcacgccuacaccgugcagcgccuguacaaggccauccugggcgacuacucccagcagccccucguccagguggccgcguggugcaucggggaguacggcgaccugcuggugagcgggcagugcgaggaggaggagccgauccaggucaccgaggacgaggugcucgacauccuggaguccgugcugaucagcaacauguccacgagcgucacccggggcuacgcccucaccgccaucaugaagcuguccacccgcuucacgugcaccgugaaccggaucaagaagguggucagcaucuacggguccagcaucgacguggagcugcagcagcgcgccguggaguacaacgcccucuucaagaaguacgaccacaugcgguccgcgcugcuggagcgcaugcccgucauggagaaggugaccaccaacggccccacggagaucgugcagaccaacggcgagaccgagcccgccccgcucgagaccaagcccccgcccagcgggccccagcccaccucccaggccaacgaccugcuggaccuccugggcgggaacgacaucacgcccgucauccccaccgccccgaccagcaagcccagcuccgccggcggggagcugcucgaccugcugggcgacaucaaccucaccggcgcgcccgccgccgcccccgccccggcgagcgugccccagaucucccagcccccguuccugcuggacgggcucagcucccagccccuguucaacgacaucgccgccggcauccccagcaucacggccuacuccaagaacgggcugaagaucgaguucaccuucgagcggagcaacaccaaccccuccgugaccgucaucacgauccaggcgagcaacuccaccgagcucgacaugaccgacuucguguuccaggccgccgugccgaagaccuuccagcugcagcugcucagccccuccagcuccaucguccccgccuucaacacgggcaccaucacccaggugaucaaggugcugaacccccagaagcagcagcugcgcaugcgcaucaagcucaccuacaaccacaaggggagcgccaugcaggaccuggcggaggucaacaacuucccgccccaguccuggcaguga

SEQ ID NO: 7880 - RNA, 2538 nt, Artificial Sequence
  derived and/or modified sequence opt2 from c-Jun__Homo_sapiens__BAG54627
auggagaagaacaucaaccuccgcaacugccagacccucaacaccuacgucaugcucacccaccuccgcaugcccgcccccauccgccuccgcgagcucauccgcaccauccgcaccgcccgcacccaggccgaggagcgcgagaugauccagaaggagugcgccgccauccgcuccuccuuccgcgaggaggacaacaccuaccgcugccgcaacgucgccaagcuccucuacaugcacaugcucggcuaccccgcccacuucggccagcucgagugccucaagcucaucgccucccagaaguucaccgacaagcgcaucggcuaccucggcgccaugcuccuccucgacgagcgccaggacguccaccuccucaugaccaacugcaucaagaacgaccucaaccacuccacccaguucguccagggccucgcccucugcacccucggcugcaugggcuccuccgagaugugccgcgaccucgccggcgaggucgagaagcuccucaagaccuccaacuccuaccuccgcaagaaggccgcccucugcgccguccacgucauccgcaagguccccgagcucauggagauguuccuccccgccaccaagaaccuccucaacgagaagaaccacggcguccuccacaccuccgucguccuccucaccgagaugugcgagcgcucccccgacaugcucgcccacuuccgcaagcucgucccccagcucguccgcauccucaagaaccucaucauguccggcuacucccccgagcacgacgucuccggcaucuccgaccccuuccuccagguccgcauccuccgccuccuccgcauccucggccgcaacgacgacgacuccuccgaggccaugaacgacauccucgcccaggucgccaccaacaccgagaccuccaagaacgucggcaacgccauccucuacgagaccguccucaccaucauggacaucaaguccgaguccggccuccgcguccucgccaucaacauccucggccgcuuccuccucaacaacgacaagaacauccgcuacgucgcccucaccucccuccucaagaccguccagaccgaccacaacgccguccagcgccaccgcuccaccaucgucgacugccucaaggaccucgacgucuccaucaagcgccgcgccauggagcucuccuucgcccucgucaacggcaacaacauccgcggcaugaugaaggagcuccucuacuuccucgacuccugcgagcccgaguucaaggccgacugcgccuccggcaucuuccucgccgccgagaaguacgcccccuccaagcgcuggcacaucgacaccaucaugcgcguccucaccaccgccggcuccuacguccgcgacgacgccguccccaaccucauccagcucaucaccaacuccgucgagaugcacgccuacaccguccagcgccucuacaaggccauccucggcgacuacucccagcagccccucguccaggucgccgccuggugcaucggcgaguacggcgaccuccucgucuccggccagugcgaggaggaggagcccauccaggucaccgaggacgagguccucgacauccucgaguccguccucaucuccaacauguccaccuccgucacccgcggcuacgcccucaccgccaucaugaagcucuccacccgcuucaccugcaccgucaaccgcaucaagaaggucgucuccaucuacggcuccuccaucgacgucgagcuccagcagcgcgccgucgaguacaacgcccucuucaagaaguacgaccacaugcgcuccgcccuccucgagcgcaugcccgucauggagaaggucaccaccaacggccccaccgagaucguccagaccaacggcgagaccgagcccgccccccucgagaccaagcccccccccuccggcccccagcccaccucccaggccaacgaccuccucgaccuccucggcggcaacgacaucacccccgucauccccaccgcccccaccuccaagcccuccuccgccggcggcgagcuccucgaccuccucggcgacaucaaccucaccggcgcccccgccgccgcccccgcccccgccuccgucccccagaucucccagccccccuuccuccucgacggccucuccucccagccccucuucaacgacaucgccgccggcauccccuccaucaccgccuacuccaagaacggccucaagaucgaguucaccuucgagcgcuccaacaccaaccccuccgucaccgucaucaccauccaggccuccaacuccaccgagcucgacaugaccgacuucgucuuccaggccgccguccccaagaccuuccagcuccagcuccucucccccuccuccuccaucguccccgccuucaacaccggcaccaucacccaggucaucaagguccucaacccccagaagcagcagcuccgcaugcgcaucaagcucaccuacaaccacaagggcuccgccaugcaggaccucgccgaggucaacaacuuccccccccaguccuggcaguga

SEQ ID NO: 7881 - RNA, 2538 nt, Artificial Sequence
  derived and/or modified sequence opt3 from c-Jun__Homo_sapiens__BAG54627
auggagaagaacaucaaucugagaaacugccagacccucaauacauacgugaugcuuacucaccugaggaugcccgccccuauucgguugcgcgaauuaauacgaacgauccguaccgcuagaacacaagcagaggaaagggagaugauucagaaagaaugugccgcgauccggagcuccuuccgcgaggaggacaacacuuauagaugcaggaaugucgcuaagcugcuauacaugcauaugcucggcuauccagcccacuuugggcagcuggaaugucuuaaacugauugcaucucagaaguucaccgauaaacggaucggauacuugggugccaugcuccugcuggacgagcgccaagauguucaucucuuaaugacaaacugcauaaagaaugaccugaaccacucaacccaguuugugcagggccuugcuuuguguacucuggggugcaugggaaguagcgaaaugugucgagaucuagcaggcgagguagagaagcuccugaaaacauccaauucuuaucuuagaaagaaagccgcucugugcgccgugcaugucaucaggaaggugccggaauugauggagauguuccuccccgcgaccaaaaaccuguuaaaugaaaagaaccacgguguucugcacacgucggugguccuccuuacugagaugugugaacggucaccugacaugcuggcacauuuucguaaguuggugccacagcuaguacgcauucugaaaaaucucaucaugagcggguacagucccgagcacgauguuuccggaauuucugacccuuuccugcaagugagaauccuuaggcuguugcggauacucggccgaaacgaugacgauagcuccgaggccaugaaugacauucuggcucaggucgccaccaacacagaaacuucaaagaacgugggcaaugcaaucuuauaugagaccgugcugacaauuauggauaucaaaagugaaagcgggcuacgcguccucgcuaucaacauucugggaagauuucuuuugaauaacgacaagaauauaagguacguugcccugaccucucuccugaaaacggugcagacugaccauaacgcgguacagcggcaccgcuccacaaucguggauugccuuaaggaccuggaugucucaauuaaaagaagggccauggaguugagcuucgcacucgugaaugguaacaauauccguggcaugaugaaggaacuguuauacuuucuggacaguugugagccagaguucaaggcugauugcgccucugggauauuucuagcugccgaaaaauaugcacccuccaagcgguggcacauugacaccaucaugcgaguucucacuacagccggaagcuacgugagagaugacgcugucccuaaccugauccaacuuauuaccaauucgguggagaugcaugcguauacgguacagagguuguacaaagcaauccugggcgauuauucucagcaaccacucguucagguggccgcuuggugcauuggugaauacggggaccuguuagucuccggacagugugaggaagaggagccgauacaggugaccgaagaugagguccuggacauccuugaaucaguguugauuaguaacaugagcacauccguuacucgcggcuaugcccucaccgcaaucaugaagcugucuacacgguucacuugcaccgugaauagaaucaaaaagguagucagcauuuacggcucaaguauagacguggagcuacaacagagggccguugaguacaacgcucuguuuaagaaauaugaucacaugcgcuccgcccuccuggaacgaaugcccgugauggagaaggucacaaccaaugggccuacugaaaucgugcagacgaacggagagacagaaccagcaccccuugagaccaaaccuccacccagcgguccgcagccuacuucucaagcgaacgacuugcuggauuuacucggcgggaaugacauuacccccguaaucccaacagcuccuaccucaaagcccaguagcgccggaggcgagcugcuugaucuguugggugacauuaaccucacuggggcaccagccgcugcccccgcuccugcauccgugccacagaucucucagccgcccuuccugcuagauggccugucgagccagccucucuucaaugacauagccgcgggaaucccauccauuacagccuacagcaaaaacggccugaagaucgaauuuacguucgagcggaguaauaccaaccccucuguuacugucauuacaauccaagcuagcaauuccaccgaacuugauaugacagacuuuguguuccaggcagccgugccuaagacuuuucaguugcagcuguuaucaccaucaucuuccauaguccccgcuuucaacaccgggacgauuacccaaguuaucaaagugcucaauccgcagaagcagcaacugcguaugagaauuaaacuuacauauaaccauaagggaagugccaugcaggaucuggcagaggugaauaacuuuccuccacagagcuggcaguga

SEQ ID NO: 7882 - RNA, 2538 nt, Artificial Sequence
  derived and/or modified sequence opt4 from c-Jun__Homo_sapiens__BAG54627
auggagaagaacaucaaccugagaaacugccagacccugaacaccuacgugaugcugacccaccugagaaugcccgcccccaucagacugagagagcugaucagaaccaucagaaccgccagaacccaggccgaggagagagagaugauccagaaggagugcgccgccaucagaagcagcuucagagaggaggacaacaccuacagaugcagaaacguggccaagcugcuguacaugcacaugcugggcuaccccgcccacuucggccagcuggagugccugaagcugaucgccagccagaaguucaccgacaagagaaucggcuaccugggcgccaugcugcugcuggacgagagacaggacgugcaccugcugaugaccaacugcaucaagaacgaccugaaccacagcacccaguucgugcagggccuggcccugugcacccugggcugcaugggcagcagcgagaugugcagagaccuggccggcgagguggagaagcugcugaagaccagcaacagcuaccugagaaagaaggccgcccugugcgccgugcacgugaucagaaaggugcccgagcugauggagauguuccugcccgccaccaagaaccugcugaacgagaagaaccacggcgugcugcacaccagcguggugcugcugaccgagaugugcgagagaagccccgacaugcuggcccacuucagaaagcuggugccccagcuggugagaauccugaagaaccugaucaugagcggcuacagccccgagcacgacgugagcggcaucagcgaccccuuccugcaggugagaauccugagacugcugagaauccugggcagaaacgacgacgacagcagcgaggccaugaacgacauccuggcccagguggccaccaacaccgagaccagcaagaacgugggcaacgccauccuguacgagaccgugcugaccaucauggacaucaagagcgagagcggccugagagugcuggccaucaacauccugggcagauuccugcugaacaacgacaagaacaucagauacguggcccugaccagccugcugaagaccgugcagaccgaccacaacgccgugcagagacacagaagcaccaucguggacugccugaaggaccuggacgugagcaucaagagaagagccauggagcugagcuucgcccuggugaacggcaacaacaucagaggcaugaugaaggagcugcuguacuuccuggacagcugcgagcccgaguucaaggccgacugcgccagcggcaucuuccuggccgccgagaaguacgcccccagcaagagauggcacaucgacaccaucaugagagugcugaccaccgccggcagcuacgugagagacgacgccgugcccaaccugauccagcugaucaccaacagcguggagaugcacgccuacaccgugcagagacuguacaaggccauccugggcgacuacagccagcagccccuggugcagguggccgccuggugcaucggcgaguacggcgaccugcuggugagcggccagugcgaggaggaggagcccauccaggugaccgaggacgaggugcuggacauccuggagagcgugcugaucagcaacaugagcaccagcgugaccagaggcuacgcccugaccgccaucaugaagcugagcaccagauucaccugcaccgugaacagaaucaagaagguggugagcaucuacggcagcagcaucgacguggagcugcagcagagagccguggaguacaacgcccuguucaagaaguacgaccacaugagaagcgcccugcuggagagaaugcccgugauggagaaggugaccaccaacggccccaccgagaucgugcagaccaacggcgagaccgagcccgccccccuggagaccaagcccccccccagcggcccccagcccaccagccaggccaacgaccugcuggaccugcugggcggcaacgacaucacccccgugauccccaccgcccccaccagcaagcccagcagcgccggcggcgagcugcuggaccugcugggcgacaucaaccugaccggcgcccccgccgccgcccccgcccccgccagcgugccccagaucagccagccccccuuccugcuggacggccugagcagccagccccuguucaacgacaucgccgccggcauccccagcaucaccgccuacagcaagaacggccugaagaucgaguucaccuucgagagaagcaacaccaaccccagcgugaccgugaucaccauccaggccagcaacagcaccgagcuggacaugaccgacuucguguuccaggccgccgugcccaagaccuuccagcugcagcugcugagccccagcagcagcaucgugcccgccuucaacaccggcaccaucacccaggugaucaaggugcugaacccccagaagcagcagcugagaaugagaaucaagcugaccuacaaccacaagggcagcgccaugcaggaccuggccgaggugaacaacuuccccccccagagcuggcaguga

SEQ ID NO: 7883 - RNA, 2538 nt, Artificial Sequence
  derived and/or modified sequence opt5 from c-Jun__Homo_sapiens__BAG54627
auggagaagaacaucaaucugagaaacugccagacccucaauacauacgugaugcugacgcaccuucggaugcccgccccuauucgccugagagaacucauccggaccauucgcacagcuagaacccaagccgaggaacgggagaugauccagaaagaaugugcggcuauucgcagcuccuucagagaggaggacaacacauaucggugccgcaaugucgccaagcugcuuuacaugcauaugcugggcuauccggcccacuuugggcagcucgaaugucugaaacugaucgcuucucagaaguucaccgauaaaagaaucggauaccucggcgccaugcugcuucuggacgagcggcaagauguucaucuccugaugacaaacugcauuaagaaugaccuuaaccacagcacccaguuugugcaggggcuggcucucuguacgcugggaugcaugggcuccucugaaaugugucgcgaucuggccggggagguggagaagcuccugaaaaccagcaauuccuaucuuagaaagaaagcggcccugugcgcuguccaugugauccggaagguucccgaacucauggagauguuccugccugccaccaaaaaccuucugaaugaaaagaaccacggagugcuccacaccucugucgugcugcugacagagaugugugaacgcagccccgacaugcucgcucauuuuagaaagcugguuccucagcuugugcggauucugaaaaaucucaucauguccggcuacagccccgagcacgaugucucuggcauuuccgacccuuuccugcaagugagaauccuucgccugcuccggauucuggggagaaacgaugacgauagcucugaggccaugaaugacauccuggcccagguggccaccaacacggaaacauccaagaacgucggaaaugcuauccucuaugagaccguucugacaauuauggauaucaaaagcgaaucuggccuucgcgugcuggccauuaacauccucgggcgguuucugcugaauaacgacaagaauauuagauacguggcucuuaccucccuccugaaaaccguccagacagaccauaacgccgugcagcgccaccggagcacgaucguugauugccugaaggaccucgauguguccaucaaaagacgcgccauggagcugucuuucgcucuugucaauggaaacaauauucggggcaugaugaaggaacugcucuacuuucuggacagcugugagccggaguucaaggcggauugcgccuccgggaucuuucuggcugccgaaaaauaugcccccagcaagagauggcacauugacaccaucaugcgcgugcuuacaaccgcuggaucuuacguucgggaugacgccgugccuaaccucauucaacugaucacaaauuccgucgagaugcaugcguauaccgugcagagacuguacaaagcuauccucggcgauuauagccagcaaccccugguccagguggccgccuggugcauuggcgaauacggggaccuucugguuucuggacagugugaggaagaggagccuauccaggugacggaagaugagguccucgacauucuggaaagcgugcugaucuccaacaugucuacaagcguuacccggggcuaugcucuuaccgccauuaugaagcucuccacacgcuucacaugcacagugaauagaaucaaaaaggucgugagcauuuacgggucuuccaucgacguggagcugcaacagcgggcuguugaguacaacgcccuguuuaagaaauaugaucacaugagaagcgcgcuccuggaacgcaugcccgucauggagaaggugacgaccaauggaccgacagaaaucgugcagaccaacggcgagacagaaccugcgccccuugagaccaaaccuccucccucugggccccagccgacgucccaagcuaacgaccugcucgaucugcugggaggcaaugacauuacccccgucaucccuacagcccccaccagcaagccuuccucugcuggcggggagcuucucgaucugcugggagacauuaaccucacaggcgcccccgcggccgcuccggccccugcuagcgugccccagaucucccagccucccuuccugcuugaugggcugucuagccagccucucuucaaugacauugccgccggaauccccuccaucaccgcuuacagcaaaaacggccugaagauugaauuuacguucgagcggucuaauacaaacccguccguuaccgugaucacaauucaagcgagcaauucuaccgaacuggauaugaccgacuuugucuuccaggccgcugugccuaagacauuucagcuucagcugcucucccccagcucuagcaucguucccgccuucaacacggggaccauuacacaagugaucaaaguccugaauccucagaagcagcaacucagaaugcgcaucaaacugaccuauaaccauaagggcuccgccaugcaggaucuugcugaggugaauaacuuuccgccccagagcuggcaguga

SEQ ID NO: 7884 - protein, 310 aa, Artificial Sequence
  c-Jun__Homo_sapiens__B4DED9
MADRAEMFSLSTFHSLSPPGCRPPQDISLEEFDDEDLSEITDDCGLGLSYDSDHCEKDSLSLGRSEQPHPICSFQDDFQEFEMIDVNGEEREQTHRAVFRFIPRHPDELELDVDDPVLVEAEEDDFWFRGFNMRTGERGVFPAFYAHAVPGPAKDLLGSKRSPCWVERFDVQFLGSVEVPCHQGNGILCAAMQKIATARKLTVHLRPPASCDLEISLRGVKLSLSGGGPEFQRCSHFFQMKNISFCGCHPRNSCYFGFITKHPLLSRFACHVFVSQESMRPVAQSVGRAFLEYYQEHLAYACPTEDIYLE

SEQ ID NO: 7885 - RNA, 933 nt, Artificial Sequence
  c-Jun__Homo_sapiens__BAG57050
auggcggaucgcgcggagauguuuucucucuccaccuuccacucgcugucgccgccgggcugcaggccuccccaggacauaagccuggaagaauuugacgacgaagaucugucugagaucacugaugacuguggccugggccucagcuacgacucagaccacugugagaaggacagccucucccuggggcgcucggagcagccgcaccccaucugcuccuuccaggaugacuuccaggaguuugagaugaucgaugucaacggcgaggagcgagagcagacucaccgggcuguguucagguucaucccgcggcauccagacgagcuggagcuggauguggaugacccuguguugguggaggccgaggaggacgacuucugguuccguggcuucaacaugcgcacgggggagcgcgguguguuuccugccuucuacgcccaugcggugcccggcccugccaaggaccugcuggggaguaagcggagccccugcuggguggagcgcuuugacgugcaguuccugggcuccguggaggugcccugccaccagggcaacggcauccugugugcagccaugcagaagauugccacugcccggaaacugaccguccaccugcgcccuccugccuccugugaccucgagaucucucuucggggggucaagcugagucugagcggaggagggccugaguuccagcgcugcagccauuucuuccagaugaagaacaucuccuucugcggcugccauccccgcaacagcugcuauuucggcuucaucaccaaacacccccugcugagccgcuucgccugccacgucuuugucucccaggaguccaugaggccaguggcgcagagugugggccgcgccuuccuggaguacuaccaagagcaccuggcguacgccugccccacggaggacaucuaccuggaguag

SEQ ID NO: 7886 - RNA, 933 nt, Artificial Sequence
  derived and/or modified sequence opt1 from c-Jun__Homo_sapiens__BAG57050
auggccgaccgcgccgagauguucagccuguccaccuuccacagccucuccccgcccggcugccggccgccccaggacaucagccuggaggaguucgacgacgaggaccuguccgagaucaccgacgacugcgggcucggccugagcuacgacuccgaccacugcgagaaggacagccugucccucgggcgcagcgagcagccccaccccaucugcuccuuccaggacgacuuccaggaguucgagaugaucgacgugaacggcgaggagcgggagcagacgcaccgcgcggucuuccgguucaucccccgccaccccgacgagcuggagcuggacguggacgaccccgugcucgucgaggccgaggaggacgacuucugguuccggggguucaacaugcgcaccggcgagcggggcguguucccggccuucuacgcccacgccgugcccgggcccgcgaaggaccugcugggcagcaagcgcucccccugcugggucgagcgguucgacgugcaguuccucgggagcguggaggucccgugccaccagggcaacgggauccugugcgccgccaugcagaagaucgccaccgcgcgcaagcugaccgugcaccuccggccgcccgccuccugcgaccuggagaucagccugcgcggcgugaagcucucccugagcggcgggggccccgaguuccagcggugcucccacuucuuccagaugaagaacaucagcuucugcgggugccacccccgcaacagcugcuacuucggcuucaucacgaagcacccccugcucucccgguucgccugccacgucuucgugagccaggaguccaugcgccccguggcccagagcgucggccgggccuuccuggaguacuaccaggagcaccuggcguacgccugccccaccgaggacaucuaccucgaguga

SEQ ID NO: 7887 - RNA, 933 nt, Artificial Sequence
  derived and/or modified sequence opt2 from c-Jun__Homo_sapiens__BAG57050
auggccgaccgcgccgagauguucucccucuccaccuuccacucccucuccccccccggcugccgccccccccaggacaucucccucgaggaguucgacgacgaggaccucuccgagaucaccgacgacugcggccucggccucuccuacgacuccgaccacugcgagaaggacucccucucccucggccgcuccgagcagccccaccccaucugcuccuuccaggacgacuuccaggaguucgagaugaucgacgucaacggcgaggagcgcgagcagacccaccgcgccgucuuccgcuucaucccccgccaccccgacgagcucgagcucgacgucgacgaccccguccucgucgaggccgaggaggacgacuucugguuccgcggcuucaacaugcgcaccggcgagcgcggcgucuuccccgccuucuacgcccacgccguccccggccccgccaaggaccuccucggcuccaagcgcucccccugcugggucgagcgcuucgacguccaguuccucggcuccgucgagguccccugccaccagggcaacggcauccucugcgccgccaugcagaagaucgccaccgcccgcaagcucaccguccaccuccgcccccccgccuccugcgaccucgagaucucccuccgcggcgucaagcucucccucuccggcggcggccccgaguuccagcgcugcucccacuucuuccagaugaagaacaucuccuucugcggcugccacccccgcaacuccugcuacuucggcuucaucaccaagcacccccuccucucccgcuucgccugccacgucuucgucucccaggaguccaugcgccccgucgcccaguccgucggccgcgccuuccucgaguacuaccaggagcaccucgccuacgccugccccaccgaggacaucuaccucgaguga

SEQ ID NO: 7888 - RNA, 933 nt, Artificial Sequence
  derived and/or modified sequence opt3 from c-Jun__Homo_sapiens__BAG57050
auggccgacagagcugagauguucagccuguccaccuuucacucucucucacccccuggcugcaggccaccgcaggauaucagucuugaagaguucgacgaugaagaccugagcgagauuacagaugacuguggguugggauuauccuacgauucugaccauugcgaaaaggauucgcugucacuaggucggagcgagcaaccccacccuauauguaguuuucaggacgauuuccaggaguuugaaaugaucgacgugaacggcgaggaacgcgagcagacucaucgagcagucuuccguuuuauuccaagacaccccgaugagcucgaacuggacguugacgauccugugcuuguagaggccgaagaggacgauuucugguuuaggggguucaauaugcggacgggagaacgcggcguguuuccagcguucuaugcucaugccguccccgguccugcaaaagaccuguugggguccaagagaucuccaugcuggguggagagguuugauguucaauuccucggaagcguggaggucccgugucaccagggcaacggcauccugugcgccgcuaugcagaaaauugcaaccgcccggaagcugacagugcaccuccgacccccugcuuccugugacuuagaaaucucacugcgcgggguaaaacuuaguuugagcggagguggcccagaguuccagagaugcucucacuuuuuccaaaugaagaauauauccuuuugugggugccaucccaggaacucauguuacuucggauuuaucacuaagcauccucugcuaagccgguucgccugccacguuuuugugagucaggaaucuaugcguccagucgcgcaguccgugggccgcgcauuccucgaguauuaccaggaacaccuggccuaugcuugccccaccgaggauauuuaccuugaguga

SEQ ID NO: 7889 - RNA, 933 nt, Artificial Sequence
  derived and/or modified sequence opt4 from c-Jun__Homo_sapiens__BAG57050
auggccgacagagccgagauguucagccugagcaccuuccacagccugagcccccccggcugcagacccccccaggacaucagccuggaggaguucgacgacgaggaccugagcgagaucaccgacgacugcggccugggccugagcuacgacagcgaccacugcgagaaggacagccugagccugggcagaagcgagcagccccaccccaucugcagcuuccaggacgacuuccaggaguucgagaugaucgacgugaacggcgaggagagagagcagacccacagagccguguucagauucauccccagacaccccgacgagcuggagcuggacguggacgaccccgugcugguggaggccgaggaggacgacuucugguucagaggcuucaacaugagaaccggcgagagaggcguguuccccgccuucuacgcccacgccgugcccggccccgccaaggaccugcugggcagcaagagaagccccugcuggguggagagauucgacgugcaguuccugggcagcguggaggugcccugccaccagggcaacggcauccugugcgccgccaugcagaagaucgccaccgccagaaagcugaccgugcaccugagaccccccgccagcugcgaccuggagaucagccugagaggcgugaagcugagccugagcggcggcggccccgaguuccagagaugcagccacuucuuccagaugaagaacaucagcuucugcggcugccaccccagaaacagcugcuacuucggcuucaucaccaagcacccccugcugagcagauucgccugccacguguucgugagccaggagagcaugagacccguggcccagagcgugggcagagccuuccuggaguacuaccaggagcaccuggccuacgccugccccaccgaggacaucuaccuggaguga

SEQ ID NO: 7890 - RNA, 933 nt, Artificial Sequence
  derived and/or modified sequence opt5 from c-Jun__Homo_sapiens__BAG57050
auggccgacagagcugagauguucagccuguccaccuuucacucucucagcccucccggcugccggccgccccaggauaucucccuggaagaguucgacgaugaagaccuuucugagauuacagaugacugugggcugggacucagcuacgauuccgaccauugcgaaaaggauucucugagccuuggccgcuccgagcaaccucaccccaucuguagcuuucaggacgauuuccaggaguuugaaaugauugacgugaacggggaggaaagagagcagacgcaucgggccgucuuccgcuuuaucccuagacaccccgaugagcuggaacucgacguugacgauccugugcugguggaggcggaagaggacgauuucugguuucggggauucaauaugcgcaccggcgaaagaggggucuuuccggcuuucuaugcccaugccgugcccggaccugcuaaagaccugcucggcucuaagcggucccccugcuggguugagcgcuuugaugugcaauuccugggcagcgucgaggugccuugucaccaggggaacggcauucuuugcgccgcuaugcagaaaaucgccacagcgagaaagcugaccguucaccuccggcccccggccucuugugaccuggaaaucucccuucgcggagugaaacugagccucucugggggaggcccugaguuccagagaugcucccacuuuuuccaaaugaagaauauuagcuuuugugggugccauccccggaacuccuguuacuucggauuuaucacaaagcauccucugcugucucgcuucgcuugccacgucuuugugagccaggaauccaugagacccguggcccagagcgucggccgggcuuuccucgaguauuaccaggaacaccuggccuaugcgugccccaccgaggauauuuaccuugaguga

SEQ ID NO: 7891 - protein, 547 aa, Artificial Sequence
  c-Jun__Homo_sapiens__B4DFU7
MADRAEMFSLSTFHSLSPPGCRPPQDISLEEFDDEDLSEITDDCGLGLSYDSDHCEKDSLSLGRSEQPHPICSFQDDFQEFEMIDDNEEEDDEDEEEEEEEEEGDGEGQEGGDPGSEAPAPGPLIPSPSVEEPHKHRPTTLRLTTLGAQDSLNNNGGFDLVRPASWQETALCSPAPEALRELPGPLPATDTGPGGAQSPVRPGCDCEGNRPAEPPAPGGTSPSSDPGIEADLRSRSSGGRGGRRSSQELSSPGSDSEDAGGARLGRMISSISETELELSSDGGSSSSGRSSHLTFSKKFLNVFVNSTSRSSSTESFGLFSCLVNGEEREQTHRAVFRFIPRHPDELELDVDDPVLVEAEEDDFWFRGFNMRTGERGVFPAFYAHAVPGPAKDLLGSKRSPCWVERFDVQFLGSVEVPCHQGNGILCAAMQKIATARKLTVHLRPPASCDLEISLRGVKLSLSGGGPEFQRCSHFFQMKNISFCGCHPRNSCYFGFITKHPLLSRFACHVFVSQESMRPVAQSVGRAFLEYYQEHLAYACPTEDIYLE

SEQ ID NO: 7892 - RNA, 1644 nt, Artificial Sequence
  c-Jun__Homo_sapiens__BAG57558
auggcggaucgcgcggagauguuuucucucuccaccuuccacucgcugucgccgccgggcugcaggccuccccaggacauaagccuggaagaauuugacgacgaagaucugucugagaucacugaugacuguggccugggccucagcuacgacucagaccacugugagaaggacagccucucccuggggcgcucggagcagccgcaccccaucugcuccuuccaggaugacuuccaggaguuugagaugaucgaugacaaugaagaggaggacgaugaggacgaggaagaggaggaggaggaggaggagggagauggggaaggccaggagggaggagacccuggcucagaggcaccugcccccgggccccuuauccccuccccuuccguggaggagccccacaagcaccggcccaccacccuccgucugaccacacugggggcccaggacucccuaaacaacaacggaggcuuugaccuggugcguccggccuccuggcaggagacagcgcuaugcucacccgccccggaggcccucagagagcucccgggcccccucccugccacggacaccgggcccggcggggcgcagucgccagugcgcccggguugcgacugcgaagggaaccggccugcggaaccccccgcgccaggggggacuucgcccuccucagaucccggcaucgaggcugaccugagaagccgcucgagcggcggccgcgggggacgucgcagcagccaggagcuguccucgcccggcuccgacucggaggacgcgggcggcgcgcgccuggggcgcaugaucucguccaucucggagacggagcuggagcugagcagcgauggcggaagcagcagcagcggccgcuccucgcaccucacuuucuccaagaaguuccucaaugucuucgucaacagcacaucucgguccuccagcaccgaguccuuuggccuuuucuccugucuggucaacggcgaggagcgagagcagacucaccgggcuguguucagguucaucccgcggcauccagacgagcuggagcuggauguggaugacccuguguugguggaggccgaggaggacgacuucugguuccguggcuucaacaugcgcacgggggagcgcgguguguuuccugccuucuacgcccaugcggugcccggcccugccaaggaccugcuggggaguaagcggagccccugcuggguggagcgcuuugacgugcaguuccugggcuccguggaggugcccugccaccagggcaacggcauccugugugcagccaugcagaagauugccacugcccggaaacugaccguccaccugcgcccuccugccuccugugaccucgagaucucucuucggggggucaagcugagucugagcggaggagggccugaguuccagcgcugcagccauuucuuccagaugaagaacaucuccuucugcggcugccauccccgcaacagcugcuauuucggcuucaucaccaaacacccccugcugagccgcuucgccugccacgucuuugucucccaggaguccaugaggccgguggcgcagagugugggccgcgccuuccuggaguacuaccaagagcaccuggcguacgccugccccacggaggacaucuaccuggaguag

SEQ ID NO: 7893 - RNA, 1644 nt, Artificial Sequence
  derived and/or modified sequence opt1 from c-Jun__Homo_sapiens__BAG57558
auggccgaccgcgccgagauguucagccuguccaccuuccacagccucuccccgcccggcugccggccgccccaggacaucagccuggaggaguucgacgacgaggaccuguccgagaucaccgacgacugcgggcucggccugagcuacgacuccgaccacugcgagaaggacagccugucccucgggcgcagcgagcagccccaccccaucugcuccuuccaggacgacuuccaggaguucgagaugaucgacgacaacgaggaggaggacgacgaggacgaggaggaggaggaggaggaggaggagggcgacggggagggccaggagggcggggaccccggcagcgaggcgcccgcccccgggccgcugauccccucccccagcguggaggagccccacaagcaccggccgacgacccugcgccucaccacccugggcgcccaggacucccugaacaacaacgggggcuucgaccucguccggcccgccagcuggcaggagacggcccugugcucccccgcgcccgaggcccugcgcgagcucccgggcccccugcccgccaccgacaccgggcccggcggggcccagagcccggugcggcccggcugcgacugcgagggcaaccgccccgcggagcccccggcccccgggggcaccucccccagcagcgaccccgggaucgaggccgaccugcggucccgcagcuccggcgggcggggcggccgccggagcucccaggagcucagcuccccggggagcgacuccgaggacgccggcggggcccgccugggccggaugaucagcuccaucagcgagacggagcuggagcucuccagcgacgggggcuccagcuccagcggccgcuccagccaccugaccuucagcaagaaguuccugaacguguucgucaacuccaccagccgguccagcuccaccgagagcuucgggcuguucuccugccuggugaacggcgaggagcgcgagcagacgcaccgggcgguguuccgcuucaucccccggcaccccgacgagcuggagcucgacgucgacgacccggugcugguggaggccgaggaggacgacuucugguuccgcggguucaacaugcgcaccggcgagcgcggggucuuccccgccuucuacgcccacgccgugcccggccccgcgaaggaccugcucggcagcaagcgguccccgugcuggguggagcgguucgacguccaguuccuggggagcguggaggugcccugccaccagggcaacgggauccugugcgccgccaugcagaagaucgccaccgcccgcaagcucaccguccaccuccggccgcccgcguccugcgaccuggagaucagccuccgcggcgugaagcugucccugagcggcgggggccccgaguuccagcggugcucccacuucuuccagaugaagaacaucagcuucugcgggugccacccccgcaacuccugcuacuucggcuucaucacgaagcacccccuccugagccgguucgccugccacguguucgucagccaggaguccaugcgccccguggcccagagcguggggcgggccuuccuggaguacuaccaggagcaccucgccuacgcgugcccgaccgaggacaucuaccuggaguga

SEQ ID NO: 7894 - RNA, 1644 nt, Artificial Sequence
  derived and/or modified sequence opt2 from c-Jun__Homo_sapiens__BAG57558
auggccgaccgcgccgagauguucucccucuccaccuuccacucccucuccccccccggcugccgccccccccaggacaucucccucgaggaguucgacgacgaggaccucuccgagaucaccgacgacugcggccucggccucuccuacgacuccgaccacugcgagaaggacucccucucccucggccgcuccgagcagccccaccccaucugcuccuuccaggacgacuuccaggaguucgagaugaucgacgacaacgaggaggaggacgacgaggacgaggaggaggaggaggaggaggaggagggcgacggcgagggccaggagggcggcgaccccggcuccgaggcccccgcccccggcccccucauccccucccccuccgucgaggagccccacaagcaccgccccaccacccuccgccucaccacccucggcgcccaggacucccucaacaacaacggcggcuucgaccucguccgccccgccuccuggcaggagaccgcccucugcucccccgcccccgaggcccuccgcgagcuccccggcccccuccccgccaccgacaccggccccggcggcgcccagucccccguccgccccggcugcgacugcgagggcaaccgccccgccgagccccccgcccccggcggcaccucccccuccuccgaccccggcaucgaggccgaccuccgcucccgcuccuccggcggccgcggcggccgccgcuccucccaggagcucuccucccccggcuccgacuccgaggacgccggcggcgcccgccucggccgcaugaucuccuccaucuccgagaccgagcucgagcucuccuccgacggcggcuccuccuccuccggccgcuccucccaccucaccuucuccaagaaguuccucaacgucuucgucaacuccaccucccgcuccuccuccaccgaguccuucggccucuucuccugccucgucaacggcgaggagcgcgagcagacccaccgcgccgucuuccgcuucaucccccgccaccccgacgagcucgagcucgacgucgacgaccccguccucgucgaggccgaggaggacgacuucugguuccgcggcuucaacaugcgcaccggcgagcgcggcgucuuccccgccuucuacgcccacgccguccccggccccgccaaggaccuccucggcuccaagcgcucccccugcugggucgagcgcuucgacguccaguuccucggcuccgucgagguccccugccaccagggcaacggcauccucugcgccgccaugcagaagaucgccaccgcccgcaagcucaccguccaccuccgcccccccgccuccugcgaccucgagaucucccuccgcggcgucaagcucucccucuccggcggcggccccgaguuccagcgcugcucccacuucuuccagaugaagaacaucuccuucugcggcugccacccccgcaacuccugcuacuucggcuucaucaccaagcacccccuccucucccgcuucgccugccacgucuucgucucccaggaguccaugcgccccgucgcccaguccgucggccgcgccuuccucgaguacuaccaggagcaccucgccuacgccugccccaccgaggacaucuaccucgaguga

SEQ ID NO: 7895 - RNA, 1644 nt, Artificial Sequence
  derived and/or modified sequence opt3 from c-Jun__Homo_sapiens__BAG57558
auggccgacagagcugagauguucagccuguccaccuuucacucucucucacccccuggcugcaggccaccgcaggauaucagucuugaagaguucgacgaugaagaccugagcgagauuacagaugacuguggguugggauuauccuacgauucugaccauugcgaaaaggauucgcugucacuaggucggagcgagcaaccccacccuauauguaguuuucaggacgauuuccaggaguuugaaaugaucgacgauaacgaggaagaggacgacgaggaugaagaggaagaggaagaggaggaagagggcgacggggaaggacaggagggcggugauccaggguccgaagcacccgccccuggaccacucauucccucuccuagcguggaggagccacauaaacaccgcccgacuacgcugcgacuuaccacacugggcgcgcaagacuccuugaauaacaauggcggguucgaucucguccgucccgcuucauggcaggaaacugcccugugcaguccugcaccagaggcccugagagaacuccccggaccuuuaccagcuaccgacacaggucccggcggggcacagagcccgguuaggccuggaugugauugcgagggcaaccggcccgccgaacccccugcucccggugggaccucuccauccucagaccccggaaucgaggccgaucugcgcagcagaaguucuggcggcaggggaggacggcgcuccagccaggagcuuucgucuccugguuccgacucagaagaugcgggcggggcacgauugggaagaaugauuaguagcaucuccgagacugaacuggagcuaucuagcgacggcgguucaaguuccagcgggaggucuucacaucucacauuuaguaagaaauuccugaauguguuuguaaacagcaccucccggucuucgagcacggaguccuucggccuguuuucaugucuugugaauggagaggaacgugaacaaacucaccgcgccgucuucagauuuauaccaaggcacccggacgaguuggaacucgauguggacgaucccguucugguggaggcugaggaagacgauuucugguuccggggcuuuaacaugcgaaccggggagcgcggagucuucccugccuuuuaugcacaugcugugccaggucccgccaaggacuuacugggcaguaaaagaucuccuugcuggguagaaagguucgauguucaguuucucgggagcguggaggucccaugucaccagggaaauggcauccuuugcgcggccaugcagaagauugcaacagcucggaagcugacugugcauuugcgcccaccggccuccugugaccuagaaaucucacugagaggugugaaacucagccugucugggggcggaccugaguuccaaaggugcucccacuuuuuccagaugaagaacauuaguuuuugcggcugucacccacguaauagcugcuacuucggguuuaucaccaaacauccccuucugucucgguucgcuugucacgucuuuguuucccaggagucaaugcgaccuguggcccaaaguguagggagagcauucuuggaauauuaccaggagcaucucgccuaugcuugccccacagaagauauauaccuggaguga

SEQ ID NO: 7896 - RNA, 1644 nt, Artificial Sequence
  derived and/or modified sequence opt4 from c-Jun__Homo_sapiens__BAG57558
auggccgacagagccgagauguucagccugagcaccuuccacagccugagcccccccggcugcagacccccccaggacaucagccuggaggaguucgacgacgaggaccugagcgagaucaccgacgacugcggccugggccugagcuacgacagcgaccacugcgagaaggacagccugagccugggcagaagcgagcagccccaccccaucugcagcuuccaggacgacuuccaggaguucgagaugaucgacgacaacgaggaggaggacgacgaggacgaggaggaggaggaggaggaggaggagggcgacggcgagggccaggagggcggcgaccccggcagcgaggcccccgcccccggcccccugauccccagccccagcguggaggagccccacaagcacagacccaccacccugagacugaccacccugggcgcccaggacagccugaacaacaacggcggcuucgaccuggugagacccgccagcuggcaggagaccgcccugugcagccccgcccccgaggcccugagagagcugcccggcccccugcccgccaccgacaccggccccggcggcgcccagagccccgugagacccggcugcgacugcgagggcaacagacccgccgagccccccgcccccggcggcaccagccccagcagcgaccccggcaucgaggccgaccugagaagcagaagcagcggcggcagaggcggcagaagaagcagccaggagcugagcagccccggcagcgacagcgaggacgccggcggcgccagacugggcagaaugaucagcagcaucagcgagaccgagcuggagcugagcagcgacggcggcagcagcagcagcggcagaagcagccaccugaccuucagcaagaaguuccugaacguguucgugaacagcaccagcagaagcagcagcaccgagagcuucggccuguucagcugccuggugaacggcgaggagagagagcagacccacagagccguguucagauucauccccagacaccccgacgagcuggagcuggacguggacgaccccgugcugguggaggccgaggaggacgacuucugguucagaggcuucaacaugagaaccggcgagagaggcguguuccccgccuucuacgcccacgccgugcccggccccgccaaggaccugcugggcagcaagagaagccccugcuggguggagagauucgacgugcaguuccugggcagcguggaggugcccugccaccagggcaacggcauccugugcgccgccaugcagaagaucgccaccgccagaaagcugaccgugcaccugagaccccccgccagcugcgaccuggagaucagccugagaggcgugaagcugagccugagcggcggcggccccgaguuccagagaugcagccacuucuuccagaugaagaacaucagcuucugcggcugccaccccagaaacagcugcuacuucggcuucaucaccaagcacccccugcugagcagauucgccugccacguguucgugagccaggagagcaugagacccguggcccagagcgugggcagagccuuccuggaguacuaccaggagcaccuggccuacgccugccccaccgaggacaucuaccuggaguga

SEQ ID NO: 7897 - RNA, 1644 nt, Artificial Sequence
  derived and/or modified sequence opt5 from c-Jun__Homo_sapiens__BAG57558
auggccgacagagcugagauguucagccuguccaccuuucacucucucagcccucccggcugccggccgccccaggauaucucccuggaagaguucgacgaugaagaccuuucugagauuacagaugacugugggcugggacucagcuacgauuccgaccauugcgaaaaggauucucugagccuuggccgcuccgagcaaccucaccccaucuguagcuuucaggacgauuuccaggaguuugaaaugauugacgauaacgaggaagaggacgacgaggaugaagaggaagaggaagaggaggaagagggggacggagaaggccaggaagggggagauccuggcucugaggcccccgcgccuggcccgcugauccccuccccuagcguggaggagccccauaaacacagaccuacgacccuccggcugacaacccugggggcucaagacucucucaauaacaauggaggcuucgaucugguccgccccgccuccuggcaggaaacagcccuuugcagcccggcuccugaggcccugagagaacuccccgggccucugcccgcuaccgacacaggacccggcggggcccagucuccuguucggccgggaugugauugcgagggcaaccgccccgcggaaccucccgccccuggcgggaccucccccagcuccgacccgggaauugaggcugaucuuagaucucggagcuccggcgggcgcggaggcagacggagcucucaggagcuguccagcccugggucugacagcgaagaugccggaggcgcucgccucggcagaaugaucuccucuaucagcgagacggaacuggagcuguccagcgacgggggaucuuccagcucuggccgguccagccaucucaccuuuuccaagaaauuccugaauguguuugugaacucuacaagccgcuccucuagcaccgaguccuucgggcuuuuuagcugucuggucaauggagaagagagagaacaaacacaccgggccguguucagauuuauuccccgccacccugacgagcucgaacuggauguugacgaucccgugcuugucgaggcggaggaagacgauuucugguuccggggcuuuaacaugagaaccggggagcgcggcguguucccugccuuuuaugcucaugccguucccggaccggcuaaggaccugcucggcucuaaacgguccccuugcuggguggaaagauucgauguccaguuucuggggagcguggaggugcccugucaccagggaaauggcauccugugcgccgccaugcagaagauugcuacggcgcgcaagcucacaguccaucugcggcccccugccucuugugaccuugaaaucucccugagagggguuaaacucagccugucuggaggcgggccggaguuccaacgcugcagccacuuuuuccagaugaagaacauuuccuuuugcggcugucacccccggaauagcugcuacuucggauuuaucaccaaacauccucuucugucuagauucgcuugucacguguuugugucccaggagagcaugcgccccgucgcccaauccgugggccgggccuuccucgaauauuaccaggagcaucuggcuuaugccugcccuacagaagauauuuaccuggaguga

SEQ ID NO: 7898 - protein, 176 aa, Artificial Sequence
  c-Jun__Homo_sapiens__B4DGE1
MPAPIRLRELIRTIRTARTQAEEREMIQKECAAIRSSFREEDNTYRCRNVAKLLYMHMLGYPAHFGQLECLKLIASQKFTDKRIGYLGAMLLLDERQDVHLLMTNCIKNDLNHSTQFVQGLALCTLGCMGSSEMCRDLAGEVEKLLKTSNSYLRKKEMIYKQTNVTGYILGGIPNS

SEQ ID NO: 7899 - RNA, 531 nt, Artificial Sequence
  c-Jun__Homo_sapiens__BAG57752
augccagcccccaucagauugcgggagcugauccggaccauccggacagcccgaacccaagcugaagaacgagaaaugauccagaaagaaugugcugcaauccggucaucuuuuagagaagaagacaauacauaccgaugucggaauguggcaaaauuacuguauaugcacaugcugggcuacccugcucacuuuggacaguuggagugccucaagcuuauugccucucaaaaauuuacagacaaacgcauuggcuauuuaggggcaaugcugcuguuagaugaaagacaagauguccaucuucucaugaccaacuguaucaagaaugaucuuaaucauagcacgcaauucguacagggguuagcacuuuguacccucggcugcaugggcuccucagagaugugcagagaucuugcaggagagguagagaagcuccugaaaaccuccaacucuuacuuaagaaaaaaggaaaugauuuauaaacaaacaaauguuacuggauauauccuagguggcauaccaaauuccuaa

SEQ ID NO: 7900 - RNA, 531 nt, Artificial Sequence
  derived and/or modified sequence opt1 from c-Jun__Homo_sapiens__BAG57752
augcccgccccgauccgccugcgggagcucauccgcaccauccggaccgcccgcacgcaggcggaggagcgggagaugauccagaaggagugcgccgccauccgcagcuccuuccgggaggaggacaacaccuaccgcugccggaacguggccaagcugcuguacaugcacaugcucggcuaccccgcccacuucgggcagcuggagugccugaagcucaucgcgagccagaaguucaccgacaagcgcaucggcuaccugggggccaugcugcuccuggacgagcggcaggacguccaccuccugaugaccaacugcaucaagaacgaccugaaccacuccacgcaguucgugcagggccuggcccucugcacccuggggugcaugggcagcuccgagaugugccgcgaccuggccggcgagguggagaagcuccugaagaccagcaacuccuaccugcggaagaaggagaugaucuacaagcagaccaacgucacgggguacauccucggcgggauccccaacagcuga

SEQ ID NO: 7901 - RNA, 531 nt, Artificial Sequence
  derived and/or modified sequence opt2 from c-Jun__Homo_sapiens__BAG57752
augcccgcccccauccgccuccgcgagcucauccgcaccauccgcaccgcccgcacccaggccgaggagcgcgagaugauccagaaggagugcgccgccauccgcuccuccuuccgcgaggaggacaacaccuaccgcugccgcaacgucgccaagcuccucuacaugcacaugcucggcuaccccgcccacuucggccagcucgagugccucaagcucaucgccucccagaaguucaccgacaagcgcaucggcuaccucggcgccaugcuccuccucgacgagcgccaggacguccaccuccucaugaccaacugcaucaagaacgaccucaaccacuccacccaguucguccagggccucgcccucugcacccucggcugcaugggcuccuccgagaugugccgcgaccucgccggcgaggucgagaagcuccucaagaccuccaacuccuaccuccgcaagaaggagaugaucuacaagcagaccaacgucaccggcuacauccucggcggcauccccaacuccuga

SEQ ID NO: 7902 - RNA, 531 nt, Artificial Sequence
  derived and/or modified sequence opt3 from c-Jun__Homo_sapiens__BAG57752
augccggccccuaucagacugagggagcucauucggaccauacgcacagcucgaacucaggcagaggaacgugaaaugauccaaaaggagugcgccgcgauuagaagcuccuucagggaagaggacaacacguaccggugucgcaauguggcuaaacuucuguauaugcacauguugggauacccagcccauuuugggcaguuagagugccugaagcuaaucgcaucucagaaauucaccgauaagagaauuggauaucucggugccaugcugcuucuggacgaaaggcaggauguccacuugcucaugacaaacuguaucaaaaaugaccugaaccauucaacucaauuuguucagggccuggcucucugcaccuuaggguguaugggaaguagcgagaugugccgggaucuggcaggcgaaguggagaaacuuuugaagacauccaauucuuaccugcgcaagaaggagaugauauauaaacagaccaacguaacugguuacauccuagggggcauucccaauucguga

SEQ ID NO: 7903 - RNA, 531 nt, Artificial Sequence
  derived and/or modified sequence opt4 from c-Jun__Homo_sapiens__BAG57752
augcccgcccccaucagacugagagagcugaucagaaccaucagaaccgccagaacccaggccgaggagagagagaugauccagaaggagugcgccgccaucagaagcagcuucagagaggaggacaacaccuacagaugcagaaacguggccaagcugcuguacaugcacaugcugggcuaccccgcccacuucggccagcuggagugccugaagcugaucgccagccagaaguucaccgacaagagaaucggcuaccugggcgccaugcugcugcuggacgagagacaggacgugcaccugcugaugaccaacugcaucaagaacgaccugaaccacagcacccaguucgugcagggccuggcccugugcacccugggcugcaugggcagcagcgagaugugcagagaccuggccggcgagguggagaagcugcugaagaccagcaacagcuaccugagaaagaaggagaugaucuacaagcagaccaacgugaccggcuacauccugggcggcauccccaacagcuga

SEQ ID NO: 7904 - RNA, 531 nt, Artificial Sequence
  derived and/or modified sequence opt5 from c-Jun__Homo_sapiens__BAG57752
augcccgccccuaucagacugcgggagcucauucgcaccaucagaacagcucggacgcaggccgaggaacgcgaaaugauucaaaaggagugcgcggcuaucagaagcuccuuccgggaagaggacaacaccuaccgcuguagaaauguggccaaacugcuuuauaugcacaugcugggcuacccggcccauuuugggcagcucgagugccugaaacuuauugcuucucagaaguucacagauaagcggaucggauaucugggcgccaugcuccugcuggacgaacgccaggauguccaccuccugaugaccaacuguaucaaaaaugaccuuaaccauagcacacaauuuguucaggggcuggcucucugcacccugggauguaugggcuccucugagaugugcagagaucuugccggggaaguggagaagcugcucaagacaagcaauuccuaccugcggaaaaaggagaugauuuauaaacagaccaacgugacgggauacauccugggcggcauucccaauucuuga

SEQ ID NO: 7905 - protein, 467 aa, Artificial Sequence
  c-Jun__Homo_sapiens__B4DJ64
MAPPGGPPAAPPGGRGHSHRDRIHYQADVRLEATEEIYLTPVQRPPDAAEPTSAFLPPTESRMSVSSDPDPAAYPSTAGRPHPSISEEEEGFDCLSSPERAEPPGGGWRGSLGEPPPPPRASLSSDTSALSYDSVKYTLVVDEHAQLELVSLRPCFGDYSDESDSATVYDNCASVSSPYESAIGEEYEEAPRPQPPACLSEDSTPDEPDVHFSKKFLNVFMSGRSRSSSAESFGLFSCIINGEEQEQTHRAIFRFVPRHEDELELEVDDPLLVELQAEDYWYEAYNMRTGARGVFPAYYAIEVTKEPEHMAALAKNSDWVDQFRVKFLGSVQVPYHKGNDVLCAAMQKIATTRRLTVHFNPPSSCVLEISVRGVKIGVKADDSQEAKGNKCSHFFQLKNISFCGYHPKNNKYFGFITKHPADHRFACHVFVSEDSTKALAESVGRAFQQFYKQFVEYTCPTEDIYLE

SEQ ID NO: 7906 - RNA, 1404 nt, Artificial Sequence
  c-Jun__Homo_sapiens__BAG58726
auggcaccuccggguggucccccugcugccccgccugggggucggggccacucgcaucgagaccgaauccacuaccaggccgaugugcgacuagaggccacugaggagaucuaccugaccccagugcagaggcccccagacgcugcagagcccaccuccgccuuccugccgcccacugagagccggaugucagucagcuccgauccagacccugccgccuaccccuccacggcagggcggccgcaccccuccaucagugaagaggaagagggcuucgacugccugucguccccagagcgggcugagcccccaggcggaggguggcgggggagccugggggagccgccgccaccuccacgggccucucugagcucggacaccagcgcccuguccuaugacucugucaaguacacgcuggugguagaugagcaugcacagcuggagcuggugagccugcggccgugcuucggagacuacagugacgagagugacucugccaccgucuaugacaacugugccuccgucuccucgcccuaugagucggccaucggagaggaauaugaggaggccccgcggccccagcccccugccugccucuccgaggacuccacgccugaugaacccgacguccauuucuccaagaaauuccugaacgucuucaugaguggccgcucccgcuccuccagugcugaguccuucgggcuguucuccugcaucaucaacggggaggagcaggagcagacccaccgggccauauucagguuugugccucgacacgaagacgaacuugagcuggaaguggaugacccucugcuaguggagcuccaggcugaagacuacugguacgaggccuacaacaugcgcacuggugcccggggugucuuuccugccuauuacgccaucgaggucaccaaggagcccgagcacauggcagcccuggccaaaaacagugacuggguggaccaguuccgggugaaguuccugggcucaguccagguucccuaucacaagggcaaugacguccucugugcugcuaugcaaaagauugccaccacccgccggcucaccgugcacuuuaacccgcccuccagcuguguccuggagaucagcgugcggggugugaagauaggcgucaaggccgaugacucccaggaggccaaggggaauaaauguagccacuuuuuccaguuaaaaaacaucucuuucugcggauaucauccaaagaacaacaaguacuuuggguucaucaccaagcaccccgccgaccaccgguuugccugccacgucuuugugucugaagacuccaccaaagcccuggcagaguccguggggagagcauuccagcaguucuacaagcaguuuguggaguacaccugccccacagaagauaucuaccuggaguag

SEQ ID NO: 7907 - RNA, 1404 nt, Artificial Sequence
  derived and/or modified sequence opt1 from c-Jun__Homo_sapiens__BAG58726
auggccccgcccggcgggccgcccgccgcgccgcccggcgggcgcggccacagccaccgggaccgcauccacuaccaggccgacgugcggcuggaggccaccgaggagaucuaccucacccccguccagcgcccgcccgacgccgccgagcccacguccgcguuccugccgcccaccgagagccggauguccgugagcuccgaccccgaccccgccgccuaccccagcaccgccgggcgcccccaccccuccaucagcgaggaggaggagggcuucgacugccuguccagccccgagcgggcggagccgcccggcgggggcuggcgcgggucccucggcgagcccccgcccccgccccgggccagccuguccagcgacaccuccgcccugagcuacgacuccgugaaguacacgcucgucguggacgagcacgcccagcuggagcuggugagccuccgccccugcuucggggacuacuccgacgagagcgacagcgccaccgucuacgacaacugcgcguccgugagcucccccuacgagagcgccaucggcgaggaguacgaggaggcgccccggccccagccgcccgccugccuguccgaggacagcacccccgacgagcccgacgugcacuucuccaagaaguuccugaacgucuucaugagcggccgcucccggagcuccagcgccgaguccuucggccucuucagcugcaucaucaacggggaggagcaggagcagacccaccgcgccaucuuccgguucgugccccgccacgaggacgagcuggagcuggagguggacgacccccuccuggucgagcugcaggccgaggacuacugguacgaggccuacaacaugcggacgggggcccgcggcguguuccccgccuacuacgcgaucgaggugaccaaggagccggagcacauggccgcccucgccaagaacuccgacugggucgaccaguuccgggugaaguuccugggcagcgugcagguccccuaccacaaggggaacgacgugcugugcgccgcgaugcagaagaucgccaccacccgccggcucacggugcacuucaacccgcccuccagcugcguccuggagaucuccgugcgcggcgugaagaucggggucaaggccgacgacagccaggaggccaagggcaacaagugcagccacuucuuccagcugaagaacaucuccuucugcggguaccaccccaagaacaacaaguacuucggcuucaucaccaagcaccccgcggaccaccgcuucgccugccacguguucgucagcgaggacuccaccaaggcccucgccgagagcgugggccgggccuuccagcaguucuacaagcaguucguggaguacacgugccccaccgaggacaucuaccuggaguga

SEQ ID NO: 7908 - RNA, 1404 nt, Artificial Sequence
  derived and/or modified sequence opt2 from c-Jun__Homo_sapiens__BAG58726
auggccccccccggcggcccccccgccgccccccccggcggccgcggccacucccaccgcgaccgcauccacuaccaggccgacguccgccucgaggccaccgaggagaucuaccucacccccguccagcgcccccccgacgccgccgagcccaccuccgccuuccucccccccaccgagucccgcauguccgucuccuccgaccccgaccccgccgccuaccccuccaccgccggccgcccccaccccuccaucuccgaggaggaggagggcuucgacugccucuccucccccgagcgcgccgagccccccggcggcggcuggcgcggcucccucggcgagccccccccccccccccgcgccucccucuccuccgacaccuccgcccucuccuacgacuccgucaaguacacccucgucgucgacgagcacgcccagcucgagcucgucucccuccgccccugcuucggcgacuacuccgacgaguccgacuccgccaccgucuacgacaacugcgccuccgucuccucccccuacgaguccgccaucggcgaggaguacgaggaggccccccgcccccagccccccgccugccucuccgaggacuccacccccgacgagcccgacguccacuucuccaagaaguuccucaacgucuucauguccggccgcucccgcuccuccuccgccgaguccuucggccucuucuccugcaucaucaacggcgaggagcaggagcagacccaccgcgccaucuuccgcuucgucccccgccacgaggacgagcucgagcucgaggucgacgacccccuccucgucgagcuccaggccgaggacuacugguacgaggccuacaacaugcgcaccggcgcccgcggcgucuuccccgccuacuacgccaucgaggucaccaaggagcccgagcacauggccgcccucgccaagaacuccgacugggucgaccaguuccgcgucaaguuccucggcuccguccagguccccuaccacaagggcaacgacguccucugcgccgccaugcagaagaucgccaccacccgccgccucaccguccacuucaacccccccuccuccugcguccucgagaucuccguccgcggcgucaagaucggcgucaaggccgacgacucccaggaggccaagggcaacaagugcucccacuucuuccagcucaagaacaucuccuucugcggcuaccaccccaagaacaacaaguacuucggcuucaucaccaagcaccccgccgaccaccgcuucgccugccacgucuucgucuccgaggacuccaccaaggcccucgccgaguccgucggccgcgccuuccagcaguucuacaagcaguucgucgaguacaccugccccaccgaggacaucuaccucgaguga

SEQ ID NO: 7909 - RNA, 1404 nt, Artificial Sequence
  derived and/or modified sequence opt3 from c-Jun__Homo_sapiens__BAG58726
auggcucccccuggcgggccaccggccgcacccccuggagguagaggccacagccauagggaccggauccacuaccaggccgaugugcgccuggaggcgaccgaagagauuuaucucacaccaguccaacgacccccugacgcugccgaaccaacuuccgcauuccuucccccuacggagucucguaugucaguuaguagcgauccagacccggccgcuuaccccuccaccgcagggagaccucauccaucuauaucggaagaggaggaaggauuugauugccugucaagccccgagagggccgaaccuccaggcgguggguggcggggaaguuugggcgagcccccgccucccccacgcgcuuccuuaucuagcgacacauccgcccugucauaugauagugugaaguacacucuaguaguggacgagcacgcgcagcucgaacuggucagccuuagaccuuguuucggcgauuauucugacgaguccgauucagcaaccguguacgacaacugcgccagcguuaguucucccuaugaauccgcuaucggggaggaauacgaggaggccccaaggccccagccuccagcaugucugagcgaagauucgacaccggacgagcccgacgugcauuuuucuaaaaaguucuugaaugucuuuauguccggacggucacgcaguagcuccgcugaaucuuucggucucuuuagcugcauuaucaacggcgaggaacaggagcaaacccaccgagccauuuucagauuugugccuaggcacgaggaugaacuggagcuggaaguagacgauccacucuuaguugagcugcaggcggaagacuacugguaugaggccuacaauaugcggacuggggcacguggaguguuccccgcuuauuacgccaucgaggucacaaaagaaccugagcauauggcugcccuugcaaagaacucagauuggguggaccaguuucgcgugaaauucuugggcaguguccagguuccauaucacaaggguaaugaugugcugugugccgcuaugcaaaagauagcgaccacgagaaggcuaacuguacauuuuaaucccccguccagcugcgugcucgaaaucucuguccgaggggugaaaauuggaguuaaggcagacgauucacaggaggccaaaggcaacaaguguagucacuucuuccagcugaaaaacaucagcuuuugcggcuaccacccuaagaauaacaaguauuucggguuuauuaccaaacauccagcugaccaccgguucgccugucauguguuugucuccgaggauucuacaaaggcacuugccgaaucggugggacgcgcuuuccagcaauuuuacaaacaguucguagaguacacuugccccaccgaagacaucuaucuggaguga

SEQ ID NO: 7910 - RNA, 1404 nt, Artificial Sequence
  derived and/or modified sequence opt4 from c-Jun__Homo_sapiens__BAG58726
auggccccccccggcggcccccccgccgccccccccggcggcagaggccacagccacagagacagaauccacuaccaggccgacgugagacuggaggccaccgaggagaucuaccugacccccgugcagagaccccccgacgccgccgagcccaccagcgccuuccugccccccaccgagagcagaaugagcgugagcagcgaccccgaccccgccgccuaccccagcaccgccggcagaccccaccccagcaucagcgaggaggaggagggcuucgacugccugagcagccccgagagagccgagccccccggcggcggcuggagaggcagccugggcgagcccccccccccccccagagccagccugagcagcgacaccagcgcccugagcuacgacagcgugaaguacacccuggugguggacgagcacgcccagcuggagcuggugagccugagacccugcuucggcgacuacagcgacgagagcgacagcgccaccguguacgacaacugcgccagcgugagcagccccuacgagagcgccaucggcgaggaguacgaggaggcccccagaccccagccccccgccugccugagcgaggacagcacccccgacgagcccgacgugcacuucagcaagaaguuccugaacguguucaugagcggcagaagcagaagcagcagcgccgagagcuucggccuguucagcugcaucaucaacggcgaggagcaggagcagacccacagagccaucuucagauucgugcccagacacgaggacgagcuggagcuggagguggacgacccccugcugguggagcugcaggccgaggacuacugguacgaggccuacaacaugagaaccggcgccagaggcguguuccccgccuacuacgccaucgaggugaccaaggagcccgagcacauggccgcccuggccaagaacagcgacuggguggaccaguucagagugaaguuccugggcagcgugcaggugcccuaccacaagggcaacgacgugcugugcgccgccaugcagaagaucgccaccaccagaagacugaccgugcacuucaacccccccagcagcugcgugcuggagaucagcgugagaggcgugaagaucggcgugaaggccgacgacagccaggaggccaagggcaacaagugcagccacuucuuccagcugaagaacaucagcuucugcggcuaccaccccaagaacaacaaguacuucggcuucaucaccaagcaccccgccgaccacagauucgccugccacguguucgugagcgaggacagcaccaaggcccuggccgagagcgugggcagagccuuccagcaguucuacaagcaguucguggaguacaccugccccaccgaggacaucuaccuggaguga

SEQ ID NO: 7911 - RNA, 1404 nt, Artificial Sequence
  derived and/or modified sequence opt5 from c-Jun__Homo_sapiens__BAG58726
auggcucccccuggcgggccgcccgccgccccucccggaggcagagggcacagccaucgggaccgcauccacuaccaggcggaugugagacuggaggcuaccgaagagauuuaucucacaccuguccaacggcccccugacgccgccgaaccgacguccgcuuuccugcccccuaccgagucucgcaugagcguuuccucugaucccgacccugccgcuuaccccagcacagccggaagaccgcauccuuccaucucugaagaggaggaaggcuuugauugccuuagcucccccgagcgggcggaaccucccgggggaggcuggcgcggcagccugggggagcccccuccgcccccuagagccucucucuccagcgacaccucugcucuguccuaugauagcgugaaguacacacuuguggucgacgagcacgcccagcuggaacucgugucucugcggcccuguuucggagauuauuccgacgagagcgauuccgcuaccguuuacgacaacugcgccucugugagcuccccuuaugaaagcgcgauuggcgaggaauacgaggaggcuccccgcccgcagccucccgccugucugucugaagauuccacaccugacgagcccgacguccauuuuagcaaaaaguuccucaauguguuuaugucugggagaagccgguccucuagcgccgaauccuucggacuguuuagcugcaucauuaacggcgaggaacaggagcaaacccaccgcgcuaucuucagauuuguuccucggcacgaggaugaacuugagcuggaaguggacgauccccuccuggucgagcuucaggccgaagacuacugguaugaggccuacaauaugcgcacgggggcuagaggaguguucccggcguauuacgccaucgaggugaccaaagaaccugagcauauggcugcccuggccaagaacucugauugggucgaccaguuucggguuaaauuccucggcuccguccaggugcccuaucacaagggcaaugaugugcugugugcugccaugcaaaagauugcgacaaccagacgccugacagugcauuuuaaucccccuagcucuugcguucucgaaaucuccgugagaggggucaaaauuggagugaaggcugacgauagccaggaggccaaaggcaacaaguguucccacuucuuccagcugaaaaacaucucuuuuugcggguaccacccgaagaauaacaaguauuucggauuuauuaccaaacaucccgccgaccaccgguucgcuugucauguuuuugugagcgaggauuccacgaaggcccuugcugaaucugucggccgcgccuuccagcaauuuuacaaacaguucguggaguacacaugcccuaccgaagacaucuaucuggaguga

SEQ ID NO: 7912 - protein, 921 aa, Artificial Sequence [sequence omitted]

SEQ ID NO: 7913 - RNA, 2766 nt, Artificial Sequence
  c-Jun__Homo_sapiens__BAG61498
augguuaugagguggggagaacggaaugacgucaucgcuugggagcugcugcaggauggaguggaaaccaaaaaugcuuugaacauagugaagaaugauuugauagcaaaaguggaugaacugaccugugagaaagaugugcugcaaggggaauuggaggcugugaagcaagccaaacugaaacuagaggaaaagaacagagaauuggaggaagagcuuaggaaagcucgggcagaaacugaagaugcaaggcaaaaagcaaaagaugacgaugauagugauauucccacagcccagaggaagcgguuuacuagaguagaaauggcccguguucucauggagcgaaaccaguauaaagagagauugauggagcuucaggaagcuguucgauggacagagaugauucgggcaucacgagaaaauccagccaugcaggaaaaaaaaaggucaagcauuuggcaguuuuucagccgacuuuucagcuccucaaguaacacgacuaagaagccugaaccaccuguuaaucugaaguacaaugcacccacgucucauguuacuccguccgucaagaaaagaagcagcaccuuaucucagcucccuggggauaaguccaaagccuuugauuuccuuagugaagaaacugaagcuaguuuagccucacgcagagaacaaaagagagagcaguaucgucagguaaaagcacauguucagaaggaagacgguagagugcaggcuuuuggcuggagucugccucagaaguacaaacagguaaccaauggucaaggcgaaaauaagaugaaaaauuuaccugugccugucuaucucagaccucuggaugaaaaagauacaucaaugaagcuguggugugcuguuggagucaauuuaucuggugggaagaccagagauggugguucuguuguuggagcaaguguauuuuacaaggauguugcugguuuggauacagaaggcaguaaacagcgaagugccucucagaguaguuuagauaaguuagaucaggaacuuaaggaacagcagaaggaguuaaaaaaucaagaagaauuauccagucuaguuuggaucuguaccagcacucauucggcuacaaaaguucuuauuauugaugcuguucaaccuggcaacauccuagacaguuucacuguuugcaacucucauguucugugcauugcaagugugccaggugcacgagaaacagacuacccugcaggagaagaucuuucagaaucuggucagguagacaaagcaucuuuauguggaaguaugacaagcaacagcucagcagagacagacagccuguuaggaggcaucacagugguugguuguucugcagaaggugugacgggagcugccacuuccccuaguacaaauggugcuucuccagugauggauaaaccaccagaaauggaagcagaaaauagugagguugaugaaaauguuccaacagcagaagaagcaacugaagcuacagaagggaaugcggggucagcugaagacacaguggacaucucccaaacuggcgucuacacagagcaugucuuuacagauccuuugggaguucagaucccagaagaccucuccccaguguaucagucgagcaaugacucagaugcauauaaagaucaaauaucaguacugccaaaugaacaagacuuggugagagaagaagcccagaaaaugaguagucuuuuaccaacuauguggcuuggagcucaaaauggcuguuuguauguccauucaucuguagcccaguggaggaaaugucuccauuccauuaaacuuaaagauucgauucucaguauuguacacgugaagggaaucguguuaguagcccuggcugacggcacccuugcaaucuuucacagaggaguggaugggcagugggauuugucaaacuaucaccucuuagaccuuggacggccucaucauuccauccguugcaugacugugguacaugacaaagucugguguggcuauaggaacaaaaucuauguggugcagccaaaggccaugaaaauagagaaaucuuuugaugcacaucccaggaaggagagccaagugcgacagcuugcgugggugggggauggcgugugggucuccauucgcuuggauucuacgcuccgucucuaucaugcacacacuuaucaacaucuacaggauguggacauugagccuuauguaagcaaaauguuagguacuggaaaacugggcuucucuuuugugagaauuacagcucuuauggugucuuguaaucguuuguggguggggacaggaaauggugucauuaucuccaucccauugacagaaacaaauaaaaccucagguguaccaggaaaucguccuggaaguguaauccguguauauggugaugaaaacagugauaaagugacuccagggacauuuauacccuauuguucaauggcacaugcacagcuuugcuuccaugggcaccgggaugcugugaaauucuuuguggcagucccaggucaagucaucagcccacaaaguagcaguaguggcacggaucugacgggugacaaagcagggccaucugcacaggagccugguagucagacgcccuugaagucuaugcuugucaucaguggaggagagggcuacaucgacuuccgaaugggugaugaagguggagaaucagaacuucuuggagaggaucuuccucuugaaccuucuaucaccaaagcagaaaggagucacuugauaguguggcaagugauguauggcaaugaguga

SEQ ID NO: 7914 - RNA, 2766 nt, Artificial Sequence
  derived and/or modified sequence opt1 from c-Jun__Homo_sapiens__BAG61498
auggugaugcgcuggggcgagcggaacgacgugaucgccugggagcugcuccaggacgggguggagaccaagaacgcccugaacaucgugaagaacgaccugaucgcgaaggucgacgagcugaccugcgagaaggacgugcugcagggcgagcuggaggccgugaagcaggccaagcucaagcuggaggagaagaaccgcgagcuggaggaggagcuccggaaggcccgcgccgagaccgaggacgcgcggcagaaggccaaggacgacgacgacagcgacauccccaccgcccagcgcaagcgguucacccgcgucgagauggcccgggugcugauggagcgcaaccaguacaaggagcggcugauggagcuccaggaggcggugcgcuggaccgagaugauccgggccucccgcgagaacccggccaugcaggagaagaagcggagcuccaucuggcaguucuucagccgccuguucuccagcuccagcaacacgaccaagaagcccgagccgcccgucaaccugaaguacaacgcccccaccucccacgugacccccagcgugaagaagcgguccagcacgcucucccagcugcccggggacaagagcaaggccuucgacuuccuguccgaggagaccgaggcgagccucgccucccgccgggagcagaagcgcgagcaguaccggcaggucaaggcccacgugcagaaggaggacggccgcgugcaggccuucggguggagccugccccagaaguacaagcaggucaccaacggccagggcgagaacaagaugaagaaccugccggugcccguguaccuccgcccccuggacgagaaggacaccuccaugaagcuguggugcgccgucggggugaaccucagcggcgggaagacgcgggacggcgggagcguggucggcgcguccguguucuacaaggacguggccggccuggacaccgaggggagcaagcagcgcuccgccagccaguccagccuggacaagcucgaccaggagcugaaggagcagcagaaggagcugaagaaccaggaggagcucuccagccuggucuggaucugcaccuccacccacagcgccacgaaggugcugaucaucgacgccguccagcccggcaacauccucgacuccuucaccgugugcaacagccacgugcugugcaucgcguccgucccgggggcccgggagaccgacuaccccgccggcgaggaccugagcgaguccggccagguggacaaggccagccucugcggguccaugaccagcaacuccagcgccgagacggacagccugcugggcgggaucaccguggucggcugcuccgcggagggggugaccggcgccgccaccagccccuccacgaacggcgccagccccgugauggacaagccgcccgagauggaggcggagaacuccgaggucgacgagaacgugcccaccgccgaggaggccaccgaggccaccgaggggaacgccggcagcgcggaggacacgguggacaucucccagaccggggucuacaccgagcacguguucaccgacccccucggcgugcagaucccggaggaccugagccccgucuaccaguccagcaacgacuccgacgccuacaaggaccagaucagcgugcugcccaacgagcaggaccucgugcgcgaggaggcccagaagauguccagccugcugcccacgauguggcucggggcccagaacggcugccuguacguccacuccagcguggcccaguggcggaagugccugcacuccaucaagcucaaggacagcauccugagcaucgugcacgucaagggcaucgugcugguggcgcuggccgacgggacccucgccaucuuccaccgcggcgucgacgggcagugggaccuguccaacuaccaccuccucgaccugggccggccgcaccacagcauccgcugcaugaccguggugcacgacaaggucuggugcggguaccggaacaagaucuacguggugcagcccaaggccaugaagaucgagaaguccuucgacgcccacccccgcaaggagagccagguccggcagcuggcgugggugggcgacggcgugugggucuccauccgccucgacagcacccugcggcuguaccacgcccacacguaccagcaccuccaggacguggacaucgagcccuacguguccaagaugcuggggaccggcaagcugggguucagcuucguccgcaucaccgcccucaugguguccugcaaccggcugugggugggcaccggcaacggggucaucaucagcaucccgcugaccgagacgaacaagaccuccggcgugcccgggaaccgccccggcagcgugauccgggucuacggggacgagaacuccgacaaggugaccccgggcaccuucauccccuacugcagcauggcccacgcgcagcucugcuuccacggccaccgcgacgccgugaaguucuucgucgccgugcccggccaggugaucagcccccaguccuccagcuccgggacggaccugaccggggacaaggccggcccgagcgcccaggagcccgggagccagacgccccugaaguccaugcucgucaucagcggcggcgagggguacaucgacuuccggaugggcgacgagggcggggaguccgagcugcugggggaggaccucccccuggagccgagcaucaccaaggcggagcgcucccaccugaucguguggcaggucauguacggcaacgaguga

SEQ ID NO: 7915 - RNA, 2766 nt, Artificial Sequence
  derived and/or modified sequence opt2 from c-Jun__Homo_sapiens__BAG61498
auggucaugcgcuggggcgagcgcaacgacgucaucgccugggagcuccuccaggacggcgucgagaccaagaacgcccucaacaucgucaagaacgaccucaucgccaaggucgacgagcucaccugcgagaaggacguccuccagggcgagcucgaggccgucaagcaggccaagcucaagcucgaggagaagaaccgcgagcucgaggaggagcuccgcaaggcccgcgccgagaccgaggacgcccgccagaaggccaaggacgacgacgacuccgacauccccaccgcccagcgcaagcgcuucacccgcgucgagauggcccgcguccucauggagcgcaaccaguacaaggagcgccucauggagcuccaggaggccguccgcuggaccgagaugauccgcgccucccgcgagaaccccgccaugcaggagaagaagcgcuccuccaucuggcaguucuucucccgccucuucuccuccuccuccaacaccaccaagaagcccgagccccccgucaaccucaaguacaacgcccccaccucccacgucacccccuccgucaagaagcgcuccuccacccucucccagcuccccggcgacaaguccaaggccuucgacuuccucuccgaggagaccgaggccucccucgccucccgccgcgagcagaagcgcgagcaguaccgccaggucaaggcccacguccagaaggaggacggccgcguccaggccuucggcuggucccucccccagaaguacaagcaggucaccaacggccagggcgagaacaagaugaagaaccuccccguccccgucuaccuccgcccccucgacgagaaggacaccuccaugaagcucuggugcgccgucggcgucaaccucuccggcggcaagacccgcgacggcggcuccgucgucggcgccuccgucuucuacaaggacgucgccggccucgacaccgagggcuccaagcagcgcuccgccucccaguccucccucgacaagcucgaccaggagcucaaggagcagcagaaggagcucaagaaccaggaggagcucuccucccucgucuggaucugcaccuccacccacuccgccaccaagguccucaucaucgacgccguccagcccggcaacauccucgacuccuucaccgucugcaacucccacguccucugcaucgccuccguccccggcgcccgcgagaccgacuaccccgccggcgaggaccucuccgaguccggccaggucgacaaggccucccucugcggcuccaugaccuccaacuccuccgccgagaccgacucccuccucggcggcaucaccgucgucggcugcuccgccgagggcgucaccggcgccgccaccucccccuccaccaacggcgccucccccgucauggacaagccccccgagauggaggccgagaacuccgaggucgacgagaacguccccaccgccgaggaggccaccgaggccaccgagggcaacgccggcuccgccgaggacaccgucgacaucucccagaccggcgucuacaccgagcacgucuucaccgacccccucggcguccagauccccgaggaccucucccccgucuaccaguccuccaacgacuccgacgccuacaaggaccagaucuccguccuccccaacgagcaggaccucguccgcgaggaggcccagaagauguccucccuccuccccaccauguggcucggcgcccagaacggcugccucuacguccacuccuccgucgcccaguggcgcaagugccuccacuccaucaagcucaaggacuccauccucuccaucguccacgucaagggcaucguccucgucgcccucgccgacggcacccucgccaucuuccaccgcggcgucgacggccagugggaccucuccaacuaccaccuccucgaccucggccgcccccaccacuccauccgcugcaugaccgucguccacgacaaggucuggugcggcuaccgcaacaagaucuacgucguccagcccaaggccaugaagaucgagaaguccuucgacgcccacccccgcaaggagucccagguccgccagcucgccugggucggcgacggcgucugggucuccauccgccucgacuccacccuccgccucuaccacgcccacaccuaccagcaccuccaggacgucgacaucgagcccuacgucuccaagaugcucggcaccggcaagcucggcuucuccuucguccgcaucaccgcccucauggucuccugcaaccgccucugggucggcaccggcaacggcgucaucaucuccaucccccucaccgagaccaacaagaccuccggcguccccggcaaccgccccggcuccgucauccgcgucuacggcgacgagaacuccgacaaggucacccccggcaccuucauccccuacugcuccauggcccacgcccagcucugcuuccacggccaccgcgacgccgucaaguucuucgucgccguccccggccaggucaucuccccccaguccuccuccuccggcaccgaccucaccggcgacaaggccggccccuccgcccaggagcccggcucccagaccccccucaaguccaugcucgucaucuccggcggcgagggcuacaucgacuuccgcaugggcgacgagggcggcgaguccgagcuccucggcgaggaccucccccucgagcccuccaucaccaaggccgagcgcucccaccucaucgucuggcaggucauguacggcaacgaguga

SEQ ID NO: 7916 - RNA, 2766 nt, Artificial Sequence
  derived and/or modified sequence opt3 from c-Jun__Homo_sapiens__BAG61498
auggugaugagauggggcgagaggaacgacgucaucgccugggaacugcuccaggaugggguugagaccaagaaugcucuuaacauugugaaaaaugaccugauagcaaagguagaugaauugacaugcgagaaagacguguuacaaggagaacuggaggccgucaagcaggcgaaacuaaagcucgaggaaaagaaccgggagcuggaagaggagcuucgcaaagcucgagccgaaacugaggaugcacgucagaaggccaaagacgaugacgauagcgacauccccacggcucagagaaagagguucacccggguggaaauggcacgcguucugauggagagaaaucaauacaaagaaagguugauggagcuccaggaggccgugcgguggacagaaaugauucgcgcuucccgagagaacccugccaugcaggaaaagaagagaucuucaaucuggcaguuuuucaguaggcuguuuagcuccucuucgaauacuaccaaaaagccagagccgcccgucaaccugaaauauaaugcgccuacaucacacgugaccccaagcguaaagaaacggaguuccacucucucucaauuacccggugauaagagcaaagcauucgacuuucuguccgaagagacagaggccucacuugcuagucgucgcgaacagaagagagagcaguacaggcagguuaaggcccaugugcaaaaagaagauggccggguccaggcauucggguggagcuugccucagaaguauaaacaagugaccaacggacagggcgagaauaagaugaaaaaccugccagugcccgucuaccuacgaccucucgacgaaaaggacacgucuaugaagcuguggugugcuguuggugugaaucuuuccgggggaaaaacucgcgauggcggcucaguagugggggccagcgucuuuuauaaggacguggcgggacuggauaccgaggguaguaaacagagaucugccucccagagcucguuggacaagcucgaucaagagcugaaagaacagcagaaggaguuaaagaaccaggaggaacugucuucccucguuuggauuugcacaucaacucacagugcaaccaaagugcuuaucauagacgcuguccaaccaggcaauauccuggauagcuucacaguguguaacucccauguauugugcauugccucuguuccgggggcuagggagaccgacuaccccgccggagaagaucuaagcgagucaggccagguggacaaggcaagucugugugguuccaugacgagcaacucuucagccgaaacugauagucuccuugggggaaucacagucgugggcugcagcgcugagggcgucaccggggcggcaacuuccccuucuacaaauggagccucgccagugauggacaaacccccugaaauggaggcugagaacagcgaaguugacgagaaugugccaaccgccgaagaggcaacggaagccaccgaggguaacgcuggcuccgccgaggauacaguagacauuucacagacuggggucuauaccgaacacguguuuacagauccccugggaguucagaucccggaggaccugaguccuguguaccaaucuagcaaugauuccgacgcauacaaggaucagauaucagucuugcccaacgaacaggaccucgugcgggaggaagcgcagaaaaugagcucucuguuaccaacuauguggcugggcgcucaaaaugguugucuauauguacauuccaguguggcccaguggcgcaagugccuccacagcauuaagcugaaagauucuauccuuuccauuguucacgucaaggggaucguguugguggcacuggccgacggcacccucgcuaucuuccauagaggagucgauggccagugggaccugucaaacuaccaccuucuggauuuggggaggccucaucacaguauucguuguaugacaguugugcacgacaaaguguggugcggauaucggaauaagauauacguaguccaacccaaagccaugaagaucgagaaaucguuugacgcacauccacgaaaggagagccaggugagacagcucgcuuggguuggugauggcgugugggucuccauuaggcuggacucuaccuuacgccuguaucacgcccauacuuaccagcaccuacaagauguggacaucgaacccuauguuagcaagaugcucgggacgggaaaacugggcuucucauuugugcggauaacagcgcuuaugguaaguuguaacagauugugggucgguaccgggaauggcgugauuaucuccaucccucugacugagaccaacaagacaucuggagugccaggcaauaggccggggagcgucauucgcguuuacggagaugaaaacuccgacaaagugacccccgguacuuucaucccuuacugcucaauggcccaugcucagcucugcuuccacggccaccgagaugcaguaaaguuuuucguggccgucccaggacaggugauuagcccccagaguucuuccagcgggacagaccugacgggcgauaaagcugguccuucggcccaagagccagggucacagacccccuuaaagucuaugcugguuauaaguggcggagagggcuauaucgacuuucggaugggggaugaaggaggcgaguccgaacuuuugggugaggaccucccgcuggaaccuagcauuacuaaggcagagcguucucaucuaaucguguggcaggucauguacgggaaugaguga

SEQ ID NO: 7917 - RNA, 2766 nt, Artificial Sequence
  derived and/or modified sequence opt4 from c-Jun__Homo_sapiens__BAG61498
auggugaugagauggggcgagagaaacgacgugaucgccugggagcugcugcaggacggcguggagaccaagaacgcccugaacaucgugaagaacgaccugaucgccaagguggacgagcugaccugcgagaaggacgugcugcagggcgagcuggaggccgugaagcaggccaagcugaagcuggaggagaagaacagagagcuggaggaggagcugagaaaggccagagccgagaccgaggacgccagacagaaggccaaggacgacgacgacagcgacauccccaccgcccagagaaagagauucaccagaguggagauggccagagugcugauggagagaaaccaguacaaggagagacugauggagcugcaggaggccgugagauggaccgagaugaucagagccagcagagagaaccccgccaugcaggagaagaagagaagcagcaucuggcaguucuucagcagacuguucagcagcagcagcaacaccaccaagaagcccgagccccccgugaaccugaaguacaacgcccccaccagccacgugacccccagcgugaagaagagaagcagcacccugagccagcugcccggcgacaagagcaaggccuucgacuuccugagcgaggagaccgaggccagccuggccagcagaagagagcagaagagagagcaguacagacaggugaaggcccacgugcagaaggaggacggcagagugcaggccuucggcuggagccugccccagaaguacaagcaggugaccaacggccagggcgagaacaagaugaagaaccugcccgugcccguguaccugagaccccuggacgagaaggacaccagcaugaagcuguggugcgccgugggcgugaaccugagcggcggcaagaccagagacggcggcagcguggugggcgccagcguguucuacaaggacguggccggccuggacaccgagggcagcaagcagagaagcgccagccagagcagccuggacaagcuggaccaggagcugaaggagcagcagaaggagcugaagaaccaggaggagcugagcagccugguguggaucugcaccagcacccacagcgccaccaaggugcugaucaucgacgccgugcagcccggcaacauccuggacagcuucaccgugugcaacagccacgugcugugcaucgccagcgugcccggcgccagagagaccgacuaccccgccggcgaggaccugagcgagagcggccagguggacaaggccagccugugcggcagcaugaccagcaacagcagcgccgagaccgacagccugcugggcggcaucaccguggugggcugcagcgccgagggcgugaccggcgccgccaccagccccagcaccaacggcgccagccccgugauggacaagccccccgagauggaggccgagaacagcgagguggacgagaacgugcccaccgccgaggaggccaccgaggccaccgagggcaacgccggcagcgccgaggacaccguggacaucagccagaccggcguguacaccgagcacguguucaccgacccccugggcgugcagauccccgaggaccugagccccguguaccagagcagcaacgacagcgacgccuacaaggaccagaucagcgugcugcccaacgagcaggaccuggugagagaggaggcccagaagaugagcagccugcugcccaccauguggcugggcgcccagaacggcugccuguacgugcacagcagcguggcccaguggagaaagugccugcacagcaucaagcugaaggacagcauccugagcaucgugcacgugaagggcaucgugcugguggcccuggccgacggcacccuggccaucuuccacagaggcguggacggccagugggaccugagcaacuaccaccugcuggaccugggcagaccccaccacagcaucagaugcaugaccguggugcacgacaagguguggugcggcuacagaaacaagaucuacguggugcagcccaaggccaugaagaucgagaagagcuucgacgcccaccccagaaaggagagccaggugagacagcuggccugggugggcgacggcgugugggugagcaucagacuggacagcacccugagacuguaccacgcccacaccuaccagcaccugcaggacguggacaucgagcccuacgugagcaagaugcugggcaccggcaagcugggcuucagcuucgugagaaucaccgcccugauggugagcugcaacagacugugggugggcaccggcaacggcgugaucaucagcaucccccugaccgagaccaacaagaccagcggcgugcccggcaacagacccggcagcgugaucagaguguacggcgacgagaacagcgacaaggugacccccggcaccuucauccccuacugcagcauggcccacgcccagcugugcuuccacggccacagagacgccgugaaguucuucguggccgugcccggccaggugaucagcccccagagcagcagcagcggcaccgaccugaccggcgacaaggccggccccagcgcccaggagcccggcagccagaccccccugaagagcaugcuggugaucagcggcggcgagggcuacaucgacuucagaaugggcgacgagggcggcgagagcgagcugcugggcgaggaccugccccuggagcccagcaucaccaaggccgagagaagccaccugaucguguggcaggugauguacggcaacgaguga

SEQ ID NO: 7918 - RNA, 2766 nt, Artificial Sequence
  derived and/or modified sequence opt5 from c-Jun__Homo_sapiens__BAG61498
auggugaugagauggggcgagcggaacgacgucaucgccugggaacugcuccaggaugggguugagaccaagaaugcucugaacauugugaaaaaugaccuuaucgccaagguggaugaacugacaugcgagaaagacguccuccagggagaacuggaggcggugaagcaggcuaaacuuaagcuggaggaaaagaaccgcgagcucgaagaggagcugagaaaagcccgggccgaaacggaggaugcucgccagaaggccaaagacgaugacgauagcgacauucccaccgcucagagaaagcgguucacacgcguugaaauggccagagugcugauggagcggaaucaauacaaagaacgccucauggagcugcaggaggcggucagauggaccgaaaugauccgggccucccgcgagaacccugcuaugcaggaaaagaagagaucuagcauuuggcaguuuuucucccggcuguuuucuagcuccucuaauacaaccaaaaagccggagcccccugugaaccugaaauauaaugcccccacaagccacguuaccccuuccgugaagaaacgcagcucuacgcucucccaacugcccggcgauaagagcaaggcuuucgacuuucuuucugaagagaccgaggccucccuggcgagcagacgggaacagaaaagagagcaguaccgccaggucaaggcccaugugcaaaaagaagaugggcgggugcaggcuuucggauggucucucccucagaaguauaaacaagucacaaacggccagggggagaauaagaugaaaaaccugccgguucccguguaccugagaccucucgacgaaaaggacaccuccaugaagcuguggugugccgugggagucaaucuuagcggcggcaaaacacgcgaugggggauccgugguuggcgcuucuguguuuuauaaggacgucgccgggcuggauaccgagggaagcaaacagcgguccgccagccagucuucccucgacaagcuggaucaagagcuuaaagaacagcagaaggagcugaagaaccaggaggaacucagcucucugguguggaucugcacgagcacacacuccgcuaccaaaguucugaucauugacgcggugcaacccggcaauauccucgauucuuucacagucuguaacagccaugugcugugcauugccuccgucccuggggcuagagagaccgacuaccccgccggagaagaucuuagcgagucuggccagguggacaaggccucccuguguggcagcaugaccucuaacuccagcgcugaaacagauucccuccuugggggaaucacgguugugggcugcucugccgagggggucaccggagcggcuacaagcccguccaccaauggcgccucuccugugauggacaaacccccugaaauggaggccgagaacagcgaaguugacgagaaugugcccacagcugaagaggccaccgaagcuacggaggggaacgccggauccgcggaggauacagucgacauuagccagaccggcguguauaccgaacacguguuuacagauccccuuggcguucagaucccugaggaccugucuccggucuaccaauccagcaaugauucugacgccuacaaggaucagauuuccgugcuccccaacgaacaggaccuggugcgcgaggaagcucagaaaaugagcucucugcucccuaccauguggcugggggcccaaaauggaugucuuuauguccauagcuccguggcucaguggcggaagugccugcacagcaucaagcucaaagauucuauccuguccauuguucacgugaagggcaucguccugguggcccuugcggacgggacacucgccauuuuccauagaggaguugauggccagugggaccugagcaacuaccaucugcucgaucuggggcgcccccaccacuccauccgguguaugacggugguccacgacaaaguguggugcggcuauagaaauaagauuuacguugugcaaccuaaagcuaugaagaucgagaaaucuuuugacgcccauccccgcaaggagagccagguccggcagcuugcuugggugggagauggcgugugggucuccaucagacuggacucuacccuccggcuguaucacgcccauacauaccagcaucugcaagauguugacauugaaccguaugugagcaagaugcuugggaccggaaaacucggcuucuccuuugugcgcaucacagcccugauggucucuuguaacagacuguggguggggaccggaaauggcguuauuaucagcauuccucucacggagaccaacaagacauccggggugcccggcaaucggccuggaagcgucaucagaguguacggcgaugaaaacucugacaaaguuacccccgggacauucaucccuuacugcuccauggcucacgcgcagcugugcuuccacggacaccgcgaugccgugaaguuuuucgucgcugugcccggccagguuauuagcccgcagucuuccagcucugggaccgaccuuacgggagauaaagccggcccuuccgcccaagagcccgggagccagacaccccugaaguccaugcucgugaucagcggcggagagggcuauauugacuuucggaugggggaugaaggaggcgagucugaacugcugggggaggaccuuccucucgaaccgagcaucaccaaggcugagagaucccaucugauugucuggcaagugauguacggaaaugaguga

SEQ ID NO: 7919 - protein, 357 aa, Artificial Sequence [sequence omitted]

SEQ ID NO: 7920 - RNA, 1074 nt, Artificial Sequence
  c-Jun__Homo_sapiens__BAH11553
augcagcuggugcugaagauggauucgagcccagacaaugacagcugguuggaggaucaaugggagcgcuggcucacccaugacaucagccuggaggaguuugaggaugaagaccucucggagaucacugaugaguguggcaucagcuuacagugcaaagacacccuguccuuacggcccccgcgcgccgggcugcucucugcgggcggcggcggcgcggggagccgguugcaggccgagaugcugcagauggaccugaucgacgcgacggaggacuccacgccugaugaacccgacguccauuucuccaagaaauuccugaacgucuucaugaguggccgcucccgcuccuccagugcugaguccuucgggcuguucuccugcaucaucaacggggaggagcaggagcagacccaccgggccauauucagguuugugccucgacacgaagacgaacuugagcuggaaguggaugacccucugcuaguggagcuccaggcugaagacuacugguacgagaccuacaacaugcgcacuggugcccggggugucuuuccugccuauuacgccaucgaggucaccaaggagcccgagcacauggcagcccuggccaaaaacagugacuggguggaccaguuccgggugaaguuccugggcucaguccagguucccuaucacaagggcaaugacguccucugugcugcuaugcaaaagauugccaccacccgccggcucaccgugcacuuuaacccgcccuccagcuguguccuggagaucagcgugcggggugugaagauaggcgucaaggccgaugacucccaggaggccaaggggaauaaauguagccacuuuuuccaguuaaaaaacaucucuuucugcggauaucauccaaagaacaacaaguacuuuggguucaucaccaagcaccccgccgaccaccgguuugccugccacgccuuugugucugaagacuccaccaaagcccuggcagaguccguggggagagcauuccagcaguucuacaagcaguuuguggaguacaccugccccacagaagauaucuaccuggaguag

SEQ ID NO: 7921 - RNA, 1074 nt, Artificial Sequence
  derived and/or modified sequence opt1 from c-Jun__Homo_sapiens__BAH11553
augcagcuggugcucaagauggacagcucccccgacaacgacagcuggcuggaggaccagugggagcgcuggcugacccacgacaucucccucgaggaguucgaggacgaggaccugagcgagaucaccgacgagugcggcaucucccugcagugcaaggacacgcucagccugcggccgccccgcgccgggcugcucuccgccggcgggggcggggcgggcagccggcugcaggccgagaugcugcagauggaccucaucgacgccaccgaggacuccacccccgacgagcccgacguccacuucagcaagaaguuccugaacguguucauguccggccgcagccgguccagcuccgccgagagcuucgggcuguucuccugcaucaucaacggcgaggagcaggagcagacccaccgcgccaucuuccgguucgugccgcgccacgaggacgagcucgagcuggaggucgacgacccccugcucguggagcugcaggcggaggacuacugguacgagacguacaacaugcggaccggggcccgcggcguguuccccgccuacuacgccaucgaggucaccaaggagcccgagcacauggcggcccuggccaagaacagcgacuggguggaccaguuccgggugaaguuccucggguccguccaggugccguaccacaagggcaacgacgugcugugcgccgccaugcagaagaucgcgaccacgcgccggcugaccguccacuucaacccgcccagcagcugcgugcucgagaucuccgugcgcggcgucaagaucggggugaaggccgacgacagccaggaggccaagggcaacaagugcucccacuucuuccagcugaagaacaucagcuucugcggguaccaccccaagaacaacaaguacuucggcuucaucaccaagcaccccgccgaccaccgguucgccugccacgcguucguguccgaggacagcaccaaggcccuggccgaguccgucggccgcgccuuccagcaguucuacaagcaguucguggaguacacgugccccaccgaggacaucuaccucgaguga

SEQ ID NO: 7922 - RNA, 1074 nt, Artificial Sequence
  derived and/or modified sequence opt2 from c-Jun__Homo_sapiens__BAH11553
augcagcucguccucaagauggacuccucccccgacaacgacuccuggcucgaggaccagugggagcgcuggcucacccacgacaucucccucgaggaguucgaggacgaggaccucuccgagaucaccgacgagugcggcaucucccuccagugcaaggacacccucucccuccgccccccccgcgccggccuccucuccgccggcggcggcggcgccggcucccgccuccaggccgagaugcuccagauggaccucaucgacgccaccgaggacuccacccccgacgagcccgacguccacuucuccaagaaguuccucaacgucuucauguccggccgcucccgcuccuccuccgccgaguccuucggccucuucuccugcaucaucaacggcgaggagcaggagcagacccaccgcgccaucuuccgcuucgucccccgccacgaggacgagcucgagcucgaggucgacgacccccuccucgucgagcuccaggccgaggacuacugguacgagaccuacaacaugcgcaccggcgcccgcggcgucuuccccgccuacuacgccaucgaggucaccaaggagcccgagcacauggccgcccucgccaagaacuccgacugggucgaccaguuccgcgucaaguuccucggcuccguccagguccccuaccacaagggcaacgacguccucugcgccgccaugcagaagaucgccaccacccgccgccucaccguccacuucaacccccccuccuccugcguccucgagaucuccguccgcggcgucaagaucggcgucaaggccgacgacucccaggaggccaagggcaacaagugcucccacuucuuccagcucaagaacaucuccuucugcggcuaccaccccaagaacaacaaguacuucggcuucaucaccaagcaccccgccgaccaccgcuucgccugccacgccuucgucuccgaggacuccaccaaggcccucgccgaguccgucggccgcgccuuccagcaguucuacaagcaguucgucgaguacaccugccccaccgaggacaucuaccucgaguga

SEQ ID NO: 7923 - RNA, 1074 nt, Artificial Sequence
  derived and/or modified sequence opt3 from c-Jun__Homo_sapiens__BAH11553
augcagcuggugcucaagauggacagcucccccgauaacgacucuuggcuugaggaucaaugggaaagauggcugacccacgacaucucauuggaggaguucgaagaugaagacuuaagugagauuacagaugagugcggcauaagccugcaguguaaagacacucuaucccucaggccuccacgggccgggcugcuuucugcuggagguggcggggcaggaucgcgccugcaggccgaaauguugcagauggaucucaucgacgcgacggaggauucaaccccggacgaacccgauguccauuuuagcaagaaauuccugaauguuuuuaugaguggccgaucccguucuagcuccgcugagucauucggucuguuuaguugcauuaucaacggggaggaacaagagcagacacacagagccauuuucagguuugugccucggcaugaagacgagcucgaauuagagguagacgauccacugcuuguggaguugcaggcagaagacuacugguaugagacuuacaauaugcgcaccggagccagaggcgucuuccccgcuuauuacgcaaucgaagugacaaaggagccugaacacauggccgcucuggccaaaaacagcgauuggguugaccaguuuagggugaaguuccuaggcucuguccaagugccauaucauaaggggaaugauguacucugugcggcaaugcagaaaauagccaccacucggcgccugacaguucacuuuaaucccccuuccucaugcgugcuugagaucagcguccgaggagugaagauuggugugaaagcugacgauagucaggaggccaagggcaacaaauguucucacuucuuucagcugaagaacaucuccuucugcggguaccauccaaagaauaacaaauauuucggauuuauuaccaagcacccggcagaccauagauucgcuugucacgccuuugucagcgaagauucgacgaaagcguuggccgagucuguuggcagggcauuccaacaguuuuacaagcaguucguggaauacacuugccccaccgaggacaucuaucucgaauga

SEQ ID NO: 7924 - RNA, 1074 nt, Artificial Sequence
  derived and/or modified sequence opt4 from c-Jun__Homo_sapiens__BAH11553
augcagcuggugcugaagauggacagcagccccgacaacgacagcuggcuggaggaccagugggagagauggcugacccacgacaucagccuggaggaguucgaggacgaggaccugagcgagaucaccgacgagugcggcaucagccugcagugcaaggacacccugagccugagaccccccagagccggccugcugagcgccggcggcggcggcgccggcagcagacugcaggccgagaugcugcagauggaccugaucgacgccaccgaggacagcacccccgacgagcccgacgugcacuucagcaagaaguuccugaacguguucaugagcggcagaagcagaagcagcagcgccgagagcuucggccuguucagcugcaucaucaacggcgaggagcaggagcagacccacagagccaucuucagauucgugcccagacacgaggacgagcuggagcuggagguggacgacccccugcugguggagcugcaggccgaggacuacugguacgagaccuacaacaugagaaccggcgccagaggcguguuccccgccuacuacgccaucgaggugaccaaggagcccgagcacauggccgcccuggccaagaacagcgacuggguggaccaguucagagugaaguuccugggcagcgugcaggugcccuaccacaagggcaacgacgugcugugcgccgccaugcagaagaucgccaccaccagaagacugaccgugcacuucaacccccccagcagcugcgugcuggagaucagcgugagaggcgugaagaucggcgugaaggccgacgacagccaggaggccaagggcaacaagugcagccacuucuuccagcugaagaacaucagcuucugcggcuaccaccccaagaacaacaaguacuucggcuucaucaccaagcaccccgccgaccacagauucgccugccacgccuucgugagcgaggacagcaccaaggcccuggccgagagcgugggcagagccuuccagcaguucuacaagcaguucguggaguacaccugccccaccgaggacaucuaccuggaguga

SEQ ID NO: 7925 - RNA, 1074 nt, Artificial Sequence
  derived and/or modified sequence opt5 from c-Jun__Homo_sapiens__BAH11553
augcagcuggugcucaagauggacagcucccccgauaacgacucuuggcuggaggaucaaugggaaagauggcuuacccacgacaucagccuggaggaguucgaagaugaagaccucuccgagauuacagaugagugcggcaucucucugcaguguaaagacacgcuuagccugcggccuccgcgcgccgggcuccuguccgcuggaggcgggggagccggcucuagacugcaggcggaaaugcuccagauggaucugauugacgcuaccgaggauagcacacccgacgaaccugauguccauuuuuccaagaaauuccuuaauguuuuuaugagcgggcggucucgcuccagcucugccgaguccuucggacuguuuagcugcaucauuaacggcgaggaacaagagcagacccacagagccaucuuccgguuugugccccgccaugaagacgagcucgaacuggagguggacgauccucuucuggucgagcuccaggcugaagacuacugguaugagacauacaauaugagaaccggcgcccgcgggguguuccccgcuuauuacgccaucgaaguuacaaaggagccugaacacauggcggcccuggcuaaaaacucugauuggguggaccaguuucgggucaaguuccugggauccgugcaaguuccguaucauaagggcaaugaugugcucugugccgcuaugcagaaaauugccaccacgagacggcugaccguccacuuuaaucccccuagcuccugcgugcuugagaucucugugcgcggggucaagauuggaguuaaagcggacgauagccaggaggccaagggcaacaaauguucccacuucuuucagcugaagaacaucagcuucugcggguaccaucccaagaauaacaaauauuucggauuuauuacaaagcacccugcugaccauagauucgccugucacgcuuuugugucugaagauuccaccaaagcccucgccgagagcgugggccgggcuuuccaacaguuuuacaagcaguucgucgaauacacaugccccaccgaggacaucuaucuggaauga

SEQ ID NO: 7926 - protein, 251 aa, Artificial Sequence [sequence omitted]

SEQ ID NO: 7927 - RNA, 756 nt, Artificial Sequence
  c-Jun__Homo_sapiens__BAK64147
augauggagauccagauggacgagggcggcggcguggugguguaccaggacgacuacugcuccggcucggugaugucggagcgggugucgggccuggcgggcuccaucuaccgcgaguucgagcgccucauccacugcuacgacgaggagguggucaaggagcucaugccgcugguggugaacgugcuggagaaccuagacucggugcucagcgagaaccaggagcacgagguggagcuggagcugcugcgcgaggacaacgagcagcugcucacccaguacgagcgugagaaggcgcugcgcaggcaggcggaggagaaauucauugaguuugaagaugcucuggaacaagagaagaaagagcugcaaauccagguggagcacuacgaguuccagacgcgccagcuggagcugaaggccaagaacuaugccgaucagauuucccgguuggaggagcgggagucggagaugaagaaggaguacaaugcccugcaccagcggcacacagagaugauacagaccuacguggagcacauugagagguccaagaugcagcaggucggaggaaacagccagaccgagagcagccugccggggcggagcaggaaggagcgccccaccucccugaacguguucccccuggcugacggcacgguacgugcacagaucgggggcaagcucgugccugcgggggaccacuggcaccugagugaccucggccagcugcaguccagcuccagcuaccagguuuuguag

SEQ ID NO: 7928 - RNA, 756 nt, Artificial Sequence
  derived and/or modified sequence opt1 from c-Jun__Homo_sapiens__BAK64147
augauggagauccagauggacgagggcgggggcguggucguguaccaggacgacuacugcagcggguccgugaugagcgagcgcgucuccggccuggccgggagcaucuaccgggaguucgagcgccucauccacugcuacgacgaggagguggugaaggagcugaugccccuggucgugaacgugcucgagaaccuggacuccguccugagcgagaaccaggagcacgagguggagcucgagcugcugcgggaggacaacgagcagcuccugacccaguacgagcgcgagaaggcccugcggcgccaggcggaggagaaguucaucgaguucgaggacgcccucgagcaggagaagaaggagcugcagauccagguggagcacuacgaguuccagacccggcagcuggagcucaaggccaagaacuacgccgaccagaucucccgccuggaggagcgggagagcgagaugaagaaggaguacaacgcccugcaccagcgccacacggagaugauccagaccuacgucgagcacaucgagcgguccaagaugcagcaggucggcggcaacagccagaccgaguccagccucccggggcgcucccggaaggagcgccccaccagccugaacguguucccccuggcggacggcacggugcgggcccagaucgggggcaagcucgugcccgccggggaccacuggcaccuguccgaccugggccagcuccagagcuccagcuccuaccaggugcuguga

SEQ ID NO: 7929 - RNA, 756 nt, Artificial Sequence
  derived and/or modified sequence opt2 from c-Jun__Homo_sapiens__BAK64147
augauggagauccagauggacgagggcggcggcgucgucgucuaccaggacgacuacugcuccggcuccgucauguccgagcgcgucuccggccucgccggcuccaucuaccgcgaguucgagcgccucauccacugcuacgacgaggaggucgucaaggagcucaugccccucgucgucaacguccucgagaaccucgacuccguccucuccgagaaccaggagcacgaggucgagcucgagcuccuccgcgaggacaacgagcagcuccucacccaguacgagcgcgagaaggcccuccgccgccaggccgaggagaaguucaucgaguucgaggacgcccucgagcaggagaagaaggagcuccagauccaggucgagcacuacgaguuccagacccgccagcucgagcucaaggccaagaacuacgccgaccagaucucccgccucgaggagcgcgaguccgagaugaagaaggaguacaacgcccuccaccagcgccacaccgagaugauccagaccuacgucgagcacaucgagcgcuccaagaugcagcaggucggcggcaacucccagaccgaguccucccuccccggccgcucccgcaaggagcgccccaccucccucaacgucuucccccucgccgacggcaccguccgcgcccagaucggcggcaagcucguccccgccggcgaccacuggcaccucuccgaccucggccagcuccaguccuccuccuccuaccagguccucuga

SEQ ID NO: 7930 - RNA, 756 nt, Artificial Sequence
  derived and/or modified sequence opt3 from c-Jun__Homo_sapiens__BAK64147
augauggagauccagauggacgaaggcgggggaguggucguuuaccaagaugacuauugcagcgguuccgugaugucugagagaguaucaggccuggccgggaguauuuacagggaguucgaacggcucauacacuguuaugaugaagagguggucaaggagcuuaugccccuggugguuaacguguuggaaaauuuagacagcguccuguccgagaaccaggaacaugagguggagcuagaacuccugcgcgaggauaaugaacagcuucugacccaguacgagcgagaaaaggcuuugcguagacaagcagaggagaaauuuaucgaguucgaagacgcccucgaacaggagaaaaaggaacugcagauucagguagagcacuaugaguuucaaacaaggcagcuggaacucaaagcgaagaacuacgcugaucagaucucucgguuagaggaacgcgagucggaaaugaagaaagaguauaaugcccugcaucagagacacacugagaugauucaaacguacguugaacauaucgagaggucaaagaugcaacaggugggaggcaacagccagaccgaaaguucccuuccuggucggucucgcaaagagcgaccaacuagcuugaaugucuucccgcuggcagacgggacagugagagcccagauaggaggcaagcuagugcccgcuggcgaucacuggcaccucuccgaccuggggcagcuucagucaaguagcucuuaccaaguccuguga

SEQ ID NO: 7931 - RNA, 756 nt, Artificial Sequence
  derived and/or modified sequence opt4 from c-Jun__Homo_sapiens__BAK64147
augauggagauccagauggacgagggcggcggcguggugguguaccaggacgacuacugcagcggcagcgugaugagcgagagagugagcggccuggccggcagcaucuacagagaguucgagagacugauccacugcuacgacgaggagguggugaaggagcugaugccccugguggugaacgugcuggagaaccuggacagcgugcugagcgagaaccaggagcacgagguggagcuggagcugcugagagaggacaacgagcagcugcugacccaguacgagagagagaaggcccugagaagacaggccgaggagaaguucaucgaguucgaggacgcccuggagcaggagaagaaggagcugcagauccagguggagcacuacgaguuccagaccagacagcuggagcugaaggccaagaacuacgccgaccagaucagcagacuggaggagagagagagcgagaugaagaaggaguacaacgcccugcaccagagacacaccgagaugauccagaccuacguggagcacaucgagagaagcaagaugcagcaggugggcggcaacagccagaccgagagcagccugcccggcagaagcagaaaggagagacccaccagccugaacguguucccccuggccgacggcaccgugagagcccagaucggcggcaagcuggugcccgccggcgaccacuggcaccugagcgaccugggccagcugcagagcagcagcagcuaccaggugcuguga

SEQ ID NO: 7932 - RNA, 756 nt, Artificial Sequence
  derived and/or modified sequence opt5 from c-Jun__Homo_sapiens__BAK64147
augauggagauccagauggacgaaggcgggggaguggucguuuaccaagaugacuauugcagcggcuccgugaugucugagagagugagcgggcuggccggauccauuuaccgggaguucgaacgccucauccacuguuaugaugaagaggucgugaaggagcugaugccccuuguugugaacguccuggaaaaucucgacucugugcugagcgagaaccaggaacaugagguugagcuugaacugcucagagaggauaaugaacagcugcugacccaguacgagcgggaaaaagcucuccgcagacaagccgaggagaaguuuauugaguucgaagacgcgcuggaacaggagaaaaaggaacuucagauccagguggagcacuaugaguuucaaacacggcagcuggaacucaaagcuaagaacuacgccgaucagauuucccgccuggaggaaagagagucugaaaugaagaaagaguauaaugcccuucaucagcggcacacggagaugauccaaaccuacgucgaacauaucgagcgcagcaagaugcaacaggugggcgggaacucccagacagaaagcucucugccuggaagaucccggaaagagcgcccgaccagccucaauguguucccccuggcugacggcacagucagagcccagauuggcgggaagcugguuccugcuggagaucacuggcaccucucugaccugggccagcuucaguccucuagcuccuaccaagugcuguga

SEQ ID NO: 7933 - protein, 81 aa, Artificial Sequence
  c-Jun__Homo_sapiens__G5E966
MIHFILLFSRQGKLRLQKWYITLPDKERKKITREIVQIILSRGHRTSSFVDWKELKLVYKRSVSWILSLILKRLISSWTSL

SEQ ID NO: 7934 - RNA, 246 nt, Artificial Sequence
  c-Jun__Homo_sapiens__EAW70814
augauacauuucauauugcucuucagucgacaagggaaauuacggcuacagaaaugguacaucacucucccugauaaagagaggaagaagaucacccgggaaauuguucagauuauucucucccguggucacaggacaagcaguuuuguugacuggaaggagcuaaaacuuguuuauaaaaggucugugagcuggauauuaucuuuaauuuugaaaaggcuuauuucauccuggacgaguuuauaa

SEQ ID NO: 7935 - RNA, 246 nt, Artificial Sequence
  derived and/or modified sequence opt1 from c-Jun__Homo_sapiens__EAW70814
augauccacuucauccuccuguucagccgccagggcaagcugcggcugcagaagugguacaucacccuccccgacaaggagcgcaagaagaucacccgggagaucgugcagaucauccugucccgcgggcaccggacgagcuccuucgucgacuggaaggagcugaagcucguguacaagcgcagcguguccuggauccugagccugauccucaagcggcugaucuccagcuggaccucccuguga

SEQ ID NO: 7936 - RNA, 246 nt, Artificial Sequence
  derived and/or modified sequence opt2 from c-Jun__Homo_sapiens__EAW70814
augauccacuucauccuccucuucucccgccagggcaagcuccgccuccagaagugguacaucacccuccccgacaaggagcgcaagaagaucacccgcgagaucguccagaucauccucucccgcggccaccgcaccuccuccuucgucgacuggaaggagcucaagcucgucuacaagcgcuccgucuccuggauccucucccucauccucaagcgccucaucuccuccuggaccucccucuga

SEQ ID NO: 7937 - RNA, 246 nt, Artificial Sequence
  derived and/or modified sequence opt3 from c-Jun__Homo_sapiens__EAW70814
augauccacuucauucugcucuuuagcagacagggcaaacuuaggcugcaaaagugguacauaaccuugcccgacaaggagcggaaaaagaucacacgcgaaauugugcagaucauuuuaucccgagggcaucguacuucuucauucgucgauuggaaagagcugaagcuaguuuauaagagaagugugagcuggauccucucccugauacuuaaaaggcugaucucuucguggacgucauuguga

SEQ ID NO: 7938 - RNA, 246 nt, Artificial Sequence
  derived and/or modified sequence opt4 from c-Jun__Homo_sapiens__EAW70814
augauccacuucauccugcuguucagcagacagggcaagcugagacugcagaagugguacaucacccugcccgacaaggagagaaagaagaucaccagagagaucgugcagaucauccugagcagaggccacagaaccagcagcuucguggacuggaaggagcugaagcugguguacaagagaagcgugagcuggauccugagccugauccugaagagacugaucagcagcuggaccagccuguga

SEQ ID NO: 7939 - RNA, 246 nt, Artificial Sequence
  derived and/or modified sequence opt5 from c-Jun__Homo_sapiens__EAW70814
augauccacuucauucugcucuuuagcagacagggcaagcugcggcuucaaaaaugguacaucacccugcccgacaaggagcgcaaaaagauuacaagagaaaucgugcagauuauccucucccgggggcaucgcacgucuagcuucgucgauuggaaagagcugaaacuuguuuauaagagauccgugucuuggauccugagccucauucugaagcggcugaucuccucuuggaccagccucuga

SEQ ID NO: 7940 - protein, 785 aa, Artificial Sequence
  c-Jun__Homo_sapiens__O75843
MVVPSLKLQDLIEEIRGAKTQAQEREVIQKECAHIRASFRDGDPVHRHRQLAKLLYVHMLGYPAHFGQMECLKLIASSRFTDKRVGYLGAMLLLDERHDAHLLITNSIKNDLSQGIQPVQGLALCTLSTMGSAEMCRDLAPEVEKLLLQPSPYVRKKAILTAVHMIRKVPELSSVFLPPCAQLLHERHHGILLGTITLITELCERSPAALRHFRKVVPQLVHILRTLVTMGYSTEHSISGVSDPFLQVQILRLLRILGRNHEESSETMNDLLAQVATNTDTSRNAGNAVLFETVLTIMDIRSAAGLRVLAVNILGRFLLNSDRNIRYVALTSLLRLVQSDHSAVQRHRPTVVECLRETDASLSRRALELSLALVNSSNVRAMMQELQAFLESCPPDLRADCASGILLAAERFAPTKRWHIDTILHVLTTAGTHVRDDAVANLTQLIGGAQELHAYSVRRLYNALAEDISQQPLVQVAAWCIGEYGDLLLAGNCEEIEPLQVDEEEVLALLEKVLQSHMSLPATRGYALTALMKLSTRLCGDNNRIRQVVSIYGSCLDVELQQRAVEYDTLFRKYDHMRAAILEKMPLVERDGPQADEEAKESKEAAQLSEAAPVPTEPQASQLLDLLDLLDGASGDVQHPPHLDPSPGGALVHLLDLPCVPPPPAPIPDLKVFEREGVQLNLSFIRPPENPALLLITITATNFSEGDVTHFICQAAVPKSLQLQLQAPSGNTVPARGGLPITQLFRILNPNKAPLRLKLRLTYDHFHQSVQEIFEVNNLPVESWQ

SEQ ID NO: 7941 - RNA, 2358 nt, Artificial Sequence
  c-Jun__Homo_sapiens__BAA33390
augguggugccuucgcugaagcuucaggaccucaucgaagagauucgcggggccaagacucaggcccaggagcgggaggugauccaaaaggagugugcccacauccgggccuccuuccgcgacggggacccagugcacaggcaccggcagcuggccaaacugcucuacguccacauguugggcuaccccgcccacuuuggacagauggagugccugaaacugaucgccuccuccagauucacagacaagagggugggcuaccugggggccaugcuucuauuggaugagaggcacgaugcccaccugcucauuaccaacagcaucaagaaugaccugagccaggggauucagccaguacaaggccuggccuugugcacuuugagcaccaugggcucugcugagaugugccgagaccuggccccagagguggagaaacugcuccugcagcccagucccuacgugcgcaagaaggcuauucugacugcagugcacaugauccggaaggucccugaacucuccagugucuuccucccacccugugcccaacugcuucaugagcgucaccauggcauccugcugggcaccaucacgcugaucacggagcucugcgaacgaagcccugcagcccucaggcacuuccgaaaggugguaccccagcugguacacauccuccggacucuggugacaaugggauacuccacagaacacagcauaucuggagucagcgaccccuuccugcagguccagauacuucgucugcuucggauccugggccggaaccacgaggagagcagugagaccaugaaugacuugcuggcccagguggccacuaacacggacaccagccgaaaugccggaaaugcgguccuguuugagacaguacucaccaucauggauauccgcucugcagcuggccuacggguucuagcugucaacauucuuggucgcuuccuacucaacagugacaggaacauuagguauguagcccugacaucacugcuucgacuggugcagucugaucacagugcugugcagcggcaucggcccacugugguggaaugucuacgggaaacugaugccucccucagccggagagcccuggaacuaagccuggcucugguaaauagcuccaaugugcgagccaugaugcaagagcugcaggccuuucuggaguccugcccuccugaccuacgggcugacugugccucaggcauccugcuggcugcagagagguuugcuccaaccaaacgcuggcacauagacaccauccugcaugugcugacaacggcgggcacccaugugcgggaugaugcaguggccaaccugacccagcugauugggggggcccaggagcuacaugccuacucugugcgccgccucuacaaugcccuggcagaagacauuucccagcaaccacuggugcagguggcagccuggugcauuggggaguauggggaccuccugcuggcagggaacugcgaggagauugagccccuucagguggacgaagaggaagugcuggcauugcuggaaaaggugcugcagucccacaugucccugccagccacucgaggauaugcccucacagcccucaugaagcucagcacucgccucuguggggacaacaaccgcauccgccaggugguguccaucuacgggagcugcuuggacguggagcugcagcagcgggcuguggaguaugacacacucuuccggaaauacgaccacaugagggcugccauccuggaaaaaaugccucuuguggagcgagauggcccucaggcugaugaggaagcaaaggaaagcaaagaagcagcccagcuuucagaagcagccccagugcccacagagccccaggccucacagcuccuggaucugcuagaucuccuggauggggcuucuggggauguccagcauccuccccaucuggaccccuccccaggaggugcccugguacaccugcuugaccuucccuguguaccuccacccccagcucccaucccagaucucaaaguguuugagcgugagggaguacagcugaaucugucuuucauucgacccccugaaaacccugcuuugcuguuaaucaccaucacugccaccaacuucucagagggugaugucacccauuucaucugccaggcugcugugcccaagagucuccagcugcagcugcaggcccccagugggaacacaguuccagcucgggguggccuuccuaucacccagcucuucagaauccucaauccuaacaaggccccccugcggcuaaagcugcgccucaccuacgaccacuuucaccagucggugcaggagaucuuugaggugaacaacuugccuguggaaucguggcaguaa

SEQ ID NO: 7942 - RNA, 2358 nt, Artificial Sequence
  derived and/or modified sequence opt1 from c-Jun__Homo_sapiens__BAA33390
auggugguccccagccugaagcuccaggaccugaucgaggagauccgcggcgccaagacccaggcccaggagcgggaggugauccagaaggagugcgcgcacauccgcgccuccuuccgggacggggacccggugcaccgccaccggcagcuggccaagcuccuguacguccacaugcugggcuaccccgcccacuucgggcagauggagugccucaagcugaucgccagcucccgcuucaccgacaagcgggugggcuaccugggggcgaugcuccugcuggacgagcgccacgacgcccaccuccugaucacgaacagcaucaagaacgaccugucccagggcauccagcccgugcagggccucgcccugugcacccugagcaccaugggguccgccgagaugugccgggaccucgcgcccgaggucgagaagcugcugcuccagccgagccccuacgugcgcaagaaggccauccugaccgccgugcacaugauccggaagguccccgagcuguccagcguguuccugcccccgugcgcccagcugcugcacgagcgccaccacggcauccuccuggggacgaucacccugaucaccgagcucugcgagcggucccccgccgcgcugcgccacuuccggaagguggucccccagcuggugcacauccuccgcacccuggugacgaugggcuacagcaccgagcacuccaucagcggggucuccgaccccuuccuccaggugcagauccuccggcugcugcgcauccucggccggaaccacgaggagagcuccgagaccaugaacgaccugcuggcccagguggccaccaacacggacaccagccgcaacgccggcaacgccguccucuucgagaccgugcugaccaucauggacauccgguccgcggccgggcugcgcgugcucgccgucaacauccugggccgcuuccugcucaacagcgaccggaacauccgcuacguggcccugacgagccugcugcggcucgugcaguccgaccacagcgccguccagcgccaccggccgaccguggucgagugccugcgcgagaccgacgcgucccugagccggcgcgcccucgagcugucccuggcccucgugaacagcuccaacgugcgggccaugaugcaggagcugcaggccuuccuggagagcugcccgcccgaccuccgcgcggacugcgccuccgggauccugcuggccgccgagcgguucgcgcccaccaagcgcuggcacaucgacacgauccuccacguccugaccaccgccggcacccacgugcgggacgacgccguggccaaccugacgcagcucaucggcggggcccaggagcugcacgcguacagcguccgccggcuguacaacgcccucgccgaggacaucucccagcagccccugguccagguggccgccuggugcaucggcgaguacggggaccugcuccuggcgggcaacugcgaggagaucgagccccuccagguggacgaggaggaggugcuggcccugcuggagaaggugcuccagagccacaugucccugcccgccacccgcggguacgcccugaccgcccucaugaagcugagcacccggcugugcggcgacaacaaccgcauccggcaggucguguccaucuacggcagcugccucgacguggagcugcagcagcgcgcggucgaguacgacacgcuguuccgcaaguacgaccacaugcgggccgccauccucgagaagaugccccugguggagcgcgacgggccgcaggccgacgaggaggcgaaggaguccaaggaggccgcccagcugagcgaggccgcccccgugcccaccgagccccaggcgucccagcuccuggaccugcucgaccugcuggacggcgccagcggggacguccagcacccgccccaccucgaccccagccccggcggggcccuggugcaccuccucgaccugccgugcgugcccccgccgcccgcccccauccccgaccugaaggucuucgagcgggagggcgugcagcucaaccuguccuucauccgcccgcccgagaaccccgcccugcuccugaucaccaucaccgcgacgaacuucagcgagggcgacgugacccacuucaucugccaggccgccguccccaagucccugcagcuccagcugcaggcccccagcgggaacaccgugcccgcccggggcgggcugcccaucacccagcuguuccgcauccugaaccccaacaaggcgccgcugcggcucaagcugcgccugacguacgaccacuuccaccaguccgugcaggagaucuucgaggucaacaaccuccccguggagagcuggcaguga

SEQ ID NO: 7943 - RNA, 2358 nt, Artificial Sequence
  derived and/or modified sequence opt2 from c-Jun__Homo_sapiens__BAA33390
auggucguccccucccucaagcuccaggaccucaucgaggagauccgcggcgccaagacccaggcccaggagcgcgaggucauccagaaggagugcgcccacauccgcgccuccuuccgcgacggcgaccccguccaccgccaccgccagcucgccaagcuccucuacguccacaugcucggcuaccccgcccacuucggccagauggagugccucaagcucaucgccuccucccgcuucaccgacaagcgcgucggcuaccucggcgccaugcuccuccucgacgagcgccacgacgcccaccuccucaucaccaacuccaucaagaacgaccucucccagggcauccagcccguccagggccucgcccucugcacccucuccaccaugggcuccgccgagaugugccgcgaccucgcccccgaggucgagaagcuccuccuccagcccucccccuacguccgcaagaaggccauccucaccgccguccacaugauccgcaagguccccgagcucuccuccgucuuccucccccccugcgcccagcuccuccacgagcgccaccacggcauccuccucggcaccaucacccucaucaccgagcucugcgagcgcucccccgccgcccuccgccacuuccgcaaggucgucccccagcucguccacauccuccgcacccucgucaccaugggcuacuccaccgagcacuccaucuccggcgucuccgaccccuuccuccagguccagauccuccgccuccuccgcauccucggccgcaaccacgaggaguccuccgagaccaugaacgaccuccucgcccaggucgccaccaacaccgacaccucccgcaacgccggcaacgccguccucuucgagaccguccucaccaucauggacauccgcuccgccgccggccuccgcguccucgccgucaacauccucggccgcuuccuccucaacuccgaccgcaacauccgcuacgucgcccucaccucccuccuccgccucguccaguccgaccacuccgccguccagcgccaccgccccaccgucgucgagugccuccgcgagaccgacgccucccucucccgccgcgcccucgagcucucccucgcccucgucaacuccuccaacguccgcgccaugaugcaggagcuccaggccuuccucgaguccugcccccccgaccuccgcgccgacugcgccuccggcauccuccucgccgccgagcgcuucgcccccaccaagcgcuggcacaucgacaccauccuccacguccucaccaccgccggcacccacguccgcgacgacgccgucgccaaccucacccagcucaucggcggcgcccaggagcuccacgccuacuccguccgccgccucuacaacgcccucgccgaggacaucucccagcagccccucguccaggucgccgccuggugcaucggcgaguacggcgaccuccuccucgccggcaacugcgaggagaucgagccccuccaggucgacgaggaggagguccucgcccuccucgagaagguccuccagucccacaugucccuccccgccacccgcggcuacgcccucaccgcccucaugaagcucuccacccgccucugcggcgacaacaaccgcauccgccaggucgucuccaucuacggcuccugccucgacgucgagcuccagcagcgcgccgucgaguacgacacccucuuccgcaaguacgaccacaugcgcgccgccauccucgagaagaugccccucgucgagcgcgacggcccccaggccgacgaggaggccaaggaguccaaggaggccgcccagcucuccgaggccgcccccguccccaccgagccccaggccucccagcuccucgaccuccucgaccuccucgacggcgccuccggcgacguccagcaccccccccaccucgaccccucccccggcggcgcccucguccaccuccucgaccuccccugcgucccccccccccccgcccccauccccgaccucaaggucuucgagcgcgagggcguccagcucaaccucuccuucauccgcccccccgagaaccccgcccuccuccucaucaccaucaccgccaccaacuucuccgagggcgacgucacccacuucaucugccaggccgccguccccaagucccuccagcuccagcuccaggcccccuccggcaacaccguccccgcccgcggcggccuccccaucacccagcucuuccgcauccucaaccccaacaaggccccccuccgccucaagcuccgccucaccuacgaccacuuccaccaguccguccaggagaucuucgaggucaacaaccuccccgucgaguccuggcaguga

SEQ ID NO: 7944 - RNA, 2358 nt, Artificial Sequence
  derived and/or modified sequence opt3 from c-Jun__Homo_sapiens__BAA33390
auggugguccccagccugaagcuccaggaccuuaucgaggaaauuagaggcgccaaaacccaagcucaggagagggaaguuauacagaaggagugcgcacacauccgggccuccuuccgcgauggggacccugugcaucgacaccgucagcuggcgaaauuguuauacguacauaugcugggauauccagcucacuuuggucaaauggaaugucuaaagcucauugccucuucaagauucacagauaaaagggugggcuaccugggggcaaugcuucuguuggacgagcggcaugaugcccaccuccugaucacuaacaguauuaagaaugaccugagccagggaauccagccgguccagggccucgcuuuaugcacgcuguccaccauggguucugcagagaugugucgcgaucuugcccccgaaguggagaaguugcugcuacaaccuucgccauauguuagaaagaaagcuauacucacagccgugcacaugaucaggaaaguccccgaacugucaagcguguuucuuccuccaugcgcgcagcuguugcaugagcggcaccaugggauucuccugggaacuaucaccuuaauuacagagcugugugaacgcagucccgcagcccuccgacacuucagaaagguaguuccucagcuugugcacauccugaggaccuuggucacuaugggcuacuccacagagcauucuauaagcggcguguccgacccauuucuacaggugcaaauucugcggcuccugcguauccuugggcgcaaccacgaagagucaagugaaaccaugaaugaucuguuggcucaggucgccacgaacacugacaccagcagaaaugcaggaaacgcuguucucuucgagacagugcugacuauuauggauaucaggucugccgcggguuuacggguacuggccgugaauauccuaggccgauuucuccugaacuccgaccgcaauauuagauaugucgcacuuaccucauugcugaggcucgugcagagcgaucauagugcuguucaacggcaccgcccgacaguggucgagugccugagagaaaccgacgccucucuuuccaggcgugcucuggaguugagccucgcccuggugaacucgucuaauguacgggcaaugaugcaggaauuacaggccuuccuggaguccugucccccugaccuacgagcugauugcgcgucagggauacuccuggcagccgaaagauuugcuccaacgaaaagguggcauaucgacacuauucuucacguuuugacaaccgccggaacucacgugcgcgaugacgcagucgccaaccugacacagcucaucggcggugcucaagagcugcaugccuacagugugcggagauuauauaaugcacuggcggaggauauaagccagcagccccuuguccagguggcugccugguguauuggggaauacggagacuugcuccuggcaggcaacugcgaggaaaucgagccucuacaaguugaugaagaggaggugcuggcccuccuggaaaagguacuucagucccacaugucuuugccagcuaccaggggcuacgcccugacggcauuaaugaagcucagcacccgccuguguggggacaauaaccgaauccggcaggucgugucaauuuauggaaguugccuugauguugagcugcagcaacgugcuguggaauacgacacauuguucagaaaauaugaucauaugagggccgcgauccucgagaagaugccccuggucgagcgcgacgguccgcaggccgacgaagaggcuaaagaauccaaggaggcagcccagcuaagcgaagcugccccugugcccacugagccacaggcaucucaacugcucgaucugcuugacuugcuggauggcgcgucaggggacguacagcacccuccccacuuagauccaagucccggaggcgcccucgugcaucugcuugaccugccuugcguuccaccgcccccugcuccaauucccgaucuaaaagucuuugagcgggaaggugugcagcucaaccugagcuucauaagaccuccagagaaucccgccuugcuguuaaucaccauuacagcaacuaacuuuuccgaaggggacgugacccacuucaucugucaagcugccgucccgaagucucuccagcugcagcuucaggcaccuucgggcaauacaguuccagccaggggaggccugcccaucacccaauuguuccgcauucucaacccuaauaaagcuccccugcgacuaaagcugcggcuuacuuacgaucauuuucaccagagcgugcaggagauauucgaagugaacaaucucccaguagaguccuggcaguga

SEQ ID NO: 7945 - RNA, 2358 nt, Artificial Sequence
  derived and/or modified sequence opt4 from c-Jun__Homo_sapiens__BAA33390
augguggugcccagccugaagcugcaggaccugaucgaggagaucagaggcgccaagacccaggcccaggagagagaggugauccagaaggagugcgcccacaucagagccagcuucagagacggcgaccccgugcacagacacagacagcuggccaagcugcuguacgugcacaugcugggcuaccccgcccacuucggccagauggagugccugaagcugaucgccagcagcagauucaccgacaagagagugggcuaccugggcgccaugcugcugcuggacgagagacacgacgcccaccugcugaucaccaacagcaucaagaacgaccugagccagggcauccagcccgugcagggccuggcccugugcacccugagcaccaugggcagcgccgagaugugcagagaccuggcccccgagguggagaagcugcugcugcagcccagccccuacgugagaaagaaggccauccugaccgccgugcacaugaucagaaaggugcccgagcugagcagcguguuccugccccccugcgcccagcugcugcacgagagacaccacggcauccugcugggcaccaucacccugaucaccgagcugugcgagagaagccccgccgcccugagacacuucagaaagguggugccccagcuggugcacauccugagaacccuggugaccaugggcuacagcaccgagcacagcaucagcggcgugagcgaccccuuccugcaggugcagauccugagacugcugagaauccugggcagaaaccacgaggagagcagcgagaccaugaacgaccugcuggcccagguggccaccaacaccgacaccagcagaaacgccggcaacgccgugcuguucgagaccgugcugaccaucauggacaucagaagcgccgccggccugagagugcuggccgugaacauccugggcagauuccugcugaacagcgacagaaacaucagauacguggcccugaccagccugcugagacuggugcagagcgaccacagcgccgugcagagacacagacccaccgugguggagugccugagagagaccgacgccagccugagcagaagagcccuggagcugagccuggcccuggugaacagcagcaacgugagagccaugaugcaggagcugcaggccuuccuggagagcugcccccccgaccugagagccgacugcgccagcggcauccugcuggccgccgagagauucgcccccaccaagagauggcacaucgacaccauccugcacgugcugaccaccgccggcacccacgugagagacgacgccguggccaaccugacccagcugaucggcggcgcccaggagcugcacgccuacagcgugagaagacuguacaacgcccuggccgaggacaucagccagcagccccuggugcagguggccgccuggugcaucggcgaguacggcgaccugcugcuggccggcaacugcgaggagaucgagccccugcagguggacgaggaggaggugcuggcccugcuggagaaggugcugcagagccacaugagccugcccgccaccagaggcuacgcccugaccgcccugaugaagcugagcaccagacugugcggcgacaacaacagaaucagacagguggugagcaucuacggcagcugccuggacguggagcugcagcagagagccguggaguacgacacccuguucagaaaguacgaccacaugagagccgccauccuggagaagaugccccugguggagagagacggcccccaggccgacgaggaggccaaggagagcaaggaggccgcccagcugagcgaggccgcccccgugcccaccgagccccaggccagccagcugcuggaccugcuggaccugcuggacggcgccagcggcgacgugcagcaccccccccaccuggaccccagccccggcggcgcccuggugcaccugcuggaccugcccugcgugccccccccccccgcccccauccccgaccugaagguguucgagagagagggcgugcagcugaaccugagcuucaucagaccccccgagaaccccgcccugcugcugaucaccaucaccgccaccaacuucagcgagggcgacgugacccacuucaucugccaggccgccgugcccaagagccugcagcugcagcugcaggcccccagcggcaacaccgugcccgccagaggcggccugcccaucacccagcuguucagaauccugaaccccaacaaggccccccugagacugaagcugagacugaccuacgaccacuuccaccagagcgugcaggagaucuucgaggugaacaaccugcccguggagagcuggcaguga

SEQ ID NO: 7946 - RNA, 2358 nt, Artificial Sequence
  derived and/or modified sequence opt5 from c-Jun__Homo_sapiens__BAA33390
auggugguccccagccugaagcuccaggaccugaucgaggaaauuagaggcgccaaaacccaagcucaggagcgggaaguuauccagaaggagugcgcccacauucgcgcguccuucagagauggggacccugugcaucggcaccgccagcuugcuaaacugcucuacgugcauaugcugggauauccggcccacuuuggccaaauggaaugucuuaagcugaucgccucuagcagauucacagauaaacgggucggguaccucggagcuaugcugcugcucgacgagcgccaugaugcccaucugcuuauuacgaacuccaucaagaaugaccugucucagggcauccagcccgugcaggggcucgcucugugcacccuuagcacaaugggauccgccgagauguguagagaucuggcgccugaaguugagaagcuccugcugcaacccucuccuuaugugcggaaaaaggccauucucaccgcuguccacaugauccgcaaagugcccgaacugagcuccguuuuucuuccuccgugcgcccagcugcuccacgagagacaccauggcauucugcuuggcacaaucacccugauuacagagcucugugaacggagccccgcugcccugcgccacuucagaaagguggucccucagcuggugcacauccuccggacccuggugacgaugggguacucuaccgagcauuccauuagcggagucucugaccccuuucuucagguucaaauccugcgccuccugagaauccuuggccggaaccacgaagaguccagcgaaacaaugaaugaucugcucgcccagguggcgaccaacacagacaccucuagaaaugcugggaacgccgugcuguucgagacgguccugacaauuauggauauccgcuccgcugccggacuccgggugcuggccguuaauauucuuggcagauuucugcucaacagcgaccgcaauauccgguauguggcucugaccucccugcuuagacucguccagucugaucauagcgcggugcaacgccaccggccuacaguuguggagugccugagagaaaccgacgccucccugagccgccgggcucucgagcugucucuugcccuggucaacuccagcaaugugagagccaugaugcaggaacuccaggcuuuccuggagucuugucccccggaccugcgcgccgauugcgcgagcgggauucuucucgcugccgaacgguuugccccuaccaaaagauggcauaucgacacaauccugcacguccugacgaccgcuggaacacacgugcgggaugacgccguugcuaaccucacccagcugauuggcggcgcccaagagcuucaugcguacuccgugcgcagacuguauaaugcccucgcugaggauaucucucagcagccccugguccagguggccgcuugguguauuggggaauacggagaccugcuucucgccggcaacugcgaggaaaucgagccucugcaaguugaugaagaggaggugcuggcgcuccuggaaaagguccuucagagccacaugucccugcccgccacacggggguacgcucucaccgcccugaugaagcugagcacgagacuuuguggagacaauaaccgcauuagacagguggugucuaucuauggcuccugccucgauguugagcugcagcaacgggcugucgaauacgacacacuguuccgcaaauaugaucauaugagagccgccauccucgagaagaugccccugguggagcgggacgggccucaggcugacgaagaggcgaaagaaagcaaggaggccgcucagcuuucugaagccgccccggugcccaccgagccucaggcuucccaacugcucgaucugcuggaccuucuggauggagccagcggcgacguccagcaucccccucaccucgaucccuccccgggcggggcgcuggugcaccuccuggaccuuccuugcguucccccucccccugcucccauuccggaucugaaaguguuugagcgcgaaggaguccagcucaaccugucuuucaucagaccucccgagaaucccgcccugcuucugauuaccaucacagccaccaacuuuagcgaaggcgacgugacacacuucauuugucaagcugccguuccuaagucccuccagcugcagcuccaggcgccgucugggaauacggugcccgcucggggaggccugccuaucacccaacuuuuccgcauucugaaccccaauaaagccccucucagacugaagcugcggcuuacauacgaucauuuucaccagagcguccaggagaucuucgaagugaacaaucugcccguugaguccuggcaguga

SEQ ID NO: 7947 - protein, 331 aa, Artificial Sequence
  c-Jun__Homo_sapiens__P05412
MTAKMETTFYDDALNASFLPSESGPYGYSNPKILKQSMTLNLADPVGSLKPHLRAKNSDLLTSPDVGLLKLASPELERLIIQSSNGHITTTPTPTQFLCPKNVTDEQEGFAEGFVRALAELHSQNTLPSVTSAAQPVNGAGMVAPAVASVAGGSGSGGFSASLHSEPPVYANLSNFNPGALSSGGGAPSYGAAGLAFPAQPQQQQQPPHHLPQQMPVQHPRLQALKEEPQTVPEMPGETPPLSPIDMESQERIKAERKRMRNRIAASKCRKRKLERIARLEEKVKTLKAQNSELASTANMLREQVAQLKQKVMNHVNSGCQLMLTQQLQTF

SEQ ID NO: 7948 - RNA, 996 nt, Artificial Sequence
  c-Jun__Homo_sapiens__AAA59197
augacugcaaagauggaaacgaccuucuaugacgaugcccucaacgccucguuccucccguccgagagcggaccuuauggcuacaguaaccccaagauccugaaacagagcaugacccugaaccuggccgacccaguggggagccugaagccgcaccuccgcgccaagaacucggaccuccucaccucgcccgacguggggcugcucaagcuggcgucgcccgagcuggagcgccugauaauccaguccagcaacgggcacaucaccaccacgccgacccccacccaguuccugugccccaagaacgugacagaugagcaggagggguucgccgagggcuucgugcgcgcccuggccgaacugcacagccagaacacgcugcccagcgucacgucggcggcgcagccggucaacggggcaggcaugguggcucccgcgguagccucgguggcagggggcagcggcagcggcggcuucagcgccagccugcacagcgagccgccggucuacgcaaaccucagcaacuucaacccaggcgcgcugagcagcggcggcggggcgcccuccuacggcgcggccggccuggccuuucccgcgcaaccccagcagcagcagcagccgccgcaccaccugccccagcagaugcccgugcagcacccgcggcugcaggcccugaaggaggagccucagacagugcccgagaugcccggcgagacaccgccccugucccccaucgacauggagucccaggagcggaucaaggcggagaggaagcgcaugaggaaccgcaucgcugccuccaagugccgaaaaaggaagcuggagagaaucgcccggcuggaggaaaaagugaaaaccuugaaagcucagaacucggagcuggcguccacggccaacaugcucagggaacagguggcacagcuuaaacagaaagucaugaaccacguuaacagugggugccaacucaugcuaacgcagcaguugcaaacauuuuga

SEQ ID NO: 7949 - RNA, 996 nt, Artificial Sequence
  derived and/or modified sequence opt1 from c-Jun__Homo_sapiens__AAA59197
augaccgccaagauggagaccacguucuacgacgacgcccugaacgcgagcuuccuccccuccgagagcggcccguacggguacuccaaccccaagauccugaagcagagcaugacccugaaccucgccgaccccgugggcucccugaagccccaccuccgcgccaagaacagcgaccugcugaccuccccggacgucgggcugcucaagcuggccagccccgagcuggagcggcucaucauccaguccagcaacggccacaucaccacgacccccacccccacccaguuccugugcccgaagaacgugacggacgagcaggagggguucgccgagggcuucgugcgcgcgcuggccgagcuccacucccagaacacccugcccagcgucaccuccgccgcccagcccgugaacggcgcggggaugguggcccccgccgucgccagcguggccggcggguccggcagcgggggcuucuccgcgagccugcacuccgagccgcccguguacgccaaccucagcaacuucaaccccggcgcccugagcuccgggggcggggcccccagcuacggcgccgcgggccuggccuucccggcccagccccagcagcagcagcagccgccccaccaccucccccagcagaugcccguccagcacccccggcugcaggcccugaaggaggagccccagaccgugccggagaugcccggggagacgccgccccucucccccaucgacauggagagccaggagcgcaucaaggccgagcggaagcgcaugcggaaccgcaucgcggccuccaagugccggaagcgcaagcuggagcggaucgcccgccuggaggagaaggugaagacccucaaggcccagaacagcgagcuggccuccaccgcgaacaugcugcgggagcaggucgcccagcucaagcagaaggugaugaaccacgugaacagcggcugccagcugaugcugacccagcagcuccagacguucuga

SEQ ID NO: 7950 - RNA, 996 nt, Artificial Sequence
  derived and/or modified sequence opt2 from c-Jun__Homo_sapiens__AAA59197
augaccgccaagauggagaccaccuucuacgacgacgcccucaacgccuccuuccuccccuccgaguccggccccuacggcuacuccaaccccaagauccucaagcaguccaugacccucaaccucgccgaccccgucggcucccucaagccccaccuccgcgccaagaacuccgaccuccucaccucccccgacgucggccuccucaagcucgccucccccgagcucgagcgccucaucauccaguccuccaacggccacaucaccaccacccccacccccacccaguuccucugccccaagaacgucaccgacgagcaggagggcuucgccgagggcuucguccgcgcccucgccgagcuccacucccagaacacccuccccuccgucaccuccgccgcccagcccgucaacggcgccggcauggucgcccccgccgucgccuccgucgccggcggcuccggcuccggcggcuucuccgccucccuccacuccgagccccccgucuacgccaaccucuccaacuucaaccccggcgcccucuccuccggcggcggcgcccccuccuacggcgccgccggccucgccuuccccgcccagccccagcagcagcagcagcccccccaccaccucccccagcagaugcccguccagcacccccgccuccaggcccucaaggaggagccccagaccguccccgagaugcccggcgagacccccccccucucccccaucgacauggagucccaggagcgcaucaaggccgagcgcaagcgcaugcgcaaccgcaucgccgccuccaagugccgcaagcgcaagcucgagcgcaucgcccgccucgaggagaaggucaagacccucaaggcccagaacuccgagcucgccuccaccgccaacaugcuccgcgagcaggucgcccagcucaagcagaaggucaugaaccacgucaacuccggcugccagcucaugcucacccagcagcuccagaccuucuga

SEQ ID NO: 7951 - RNA, 996 nt, Artificial Sequence
  derived and/or modified sequence opt3 from c-Jun__Homo_sapiens__AAA59197
augaccgccaagauggagacaacuuucuacgacgaugcucugaacgcauccuuucuccccuccgaaucuggcccuuauggguacucaaauccaaaaauccuuaagcagaguaugacgcugaacuuggccgacccgguggguagcuuaaaaccccaccugagagcgaagaauagcgaucuacucaccucuccugacgucggacugcuuaaacuggcuucgccagaguuggaaaggcucauuauacaaucaagcaacggccauaucacaacuacccccacaccuacccaguuccugugcccaaagaauguuacugaugagcaggaaggguuugccgagggauucgugcgggcacuggccgagcuccacagucagaacacauuacccuccguaaccucugcugcacaaccugugaauggcgccgguauggucgcuccagccguggcgagcguugcagggggauccggcucaggcggguuuagugccagccugcauucugaaccgcccguguaugcuaaccuuuccaauuucaacccuggagccuugucaagcgguggcggggcaccaaguuacggagcugccggccuggcguuucccgcccagccucagcagcaacagcagccaccccaccaucuaccgcagcaaaugccuguccagcacccccgccuccaggcacugaaggaggaaccacaaacggugccugagaugcccggugagacuccaccccuuucuccuauugacauggaaucccaggagcgaaucaaagcugaacguaagagaaugaggaaucggauugccgcuagcaaaugucgcaagagaaaacuggagaggaucgcccgguuggaagagaagguaaagacccucaaagcacagaacucggagcuggccucuacagcuaauauguuacgcgaacagguugcgcaacugaagcagaaagugaugaaccacgucaauuccgggugccagcucaugcuuacucagcaacugcagaccuucuga

SEQ ID NO: 7952 - RNA, 996 nt, Artificial Sequence
  derived and/or modified sequence opt4 from c-Jun__Homo_sapiens__AAA59197
augaccgccaagauggagaccaccuucuacgacgacgcccugaacgccagcuuccugcccagcgagagcggccccuacggcuacagcaaccccaagauccugaagcagagcaugacccugaaccuggccgaccccgugggcagccugaagccccaccugagagccaagaacagcgaccugcugaccagccccgacgugggccugcugaagcuggccagccccgagcuggagagacugaucauccagagcagcaacggccacaucaccaccacccccacccccacccaguuccugugccccaagaacgugaccgacgagcaggagggcuucgccgagggcuucgugagagcccuggccgagcugcacagccagaacacccugcccagcgugaccagcgccgcccagcccgugaacggcgccggcaugguggcccccgccguggccagcguggccggcggcagcggcagcggcggcuucagcgccagccugcacagcgagccccccguguacgccaaccugagcaacuucaaccccggcgcccugagcagcggcggcggcgcccccagcuacggcgccgccggccuggccuuccccgcccagccccagcagcagcagcagcccccccaccaccugccccagcagaugcccgugcagcaccccagacugcaggcccugaaggaggagccccagaccgugcccgagaugcccggcgagacccccccccugagccccaucgacauggagagccaggagagaaucaaggccgagagaaagagaaugagaaacagaaucgccgccagcaagugcagaaagagaaagcuggagagaaucgccagacuggaggagaaggugaagacccugaaggcccagaacagcgagcuggccagcaccgccaacaugcugagagagcagguggcccagcugaagcagaaggugaugaaccacgugaacagcggcugccagcugaugcugacccagcagcugcagaccuucuga

SEQ ID NO: 7953 - RNA, 996 nt, Artificial Sequence
  derived and/or modified sequence opt5 from c-Jun__Homo_sapiens__AAA59197
augaccgccaagauggagacaacguucuacgacgaugcucugaacgccagcuuucuccccuccgaaucuggcccuuauggguacagcaauccgaaaauccugaagcaguccaugacccuuaaccuggcggaccccgugggaucucucaaaccucaccugagagcuaagaauagcgaucuucugacaucccccgacgugggccuccugaaacuggccucuccugagcucgaacggcugauuauccaaagcuccaacgggcauauuaccacaacccccacaccuacccaguuccuuugcccgaagaauguuacggaugagcaggaaggauuugccgagggcuucgugcgcgcucuggccgagcuccacagccagaacacccugcccucugugacauccgcugcccaaccugucaauggggcgggaaugguggcccccgcuguugccagcguggcuggcggcucuggguccggaggcuuuagcgccucucuucauuccgaaccucccgucuaugcgaaccugagcaauuucaacccgggggcccucuccucuggaggcggggcuccuagcuacggagccgcuggccuggccuuucccgcccagccucagcagcaacagcagccuccccaccaucugccccagcaaaugccggugcagcaccccagacuccaggcucugaaggaggaaccucaaaccguucccgagaugccuggcgagacacccccgcuuuccccuaucgacauggaaagccaggagcggauuaaagcggaacgcaagagaaugcggaaucgcaucgccgcuucuaaauguagaaagcggaaacuggagcgcaucgccagacucgaagagaaggugaagacccugaaagcccagaacuccgagcuugcuagcacggccaauaugcugcgggaacaggucgcgcaacucaagcagaaagugaugaaccacgucaauucugggugccagcugaugcugacacagcaacuccagaccuucuga

SEQ ID NO: 7954 - protein, 418 aa, Artificial Sequence
  c-Jun__Homo_sapiens__P53677
MIHSLFLINSSGDIFLEKHWKSVVSRSVCDYFFEAQERATEAENVPPVIPTPHHYLLSVYRHKIFFVAVIQTEVPPLFVIEFLHRVVDTFQDYFGVCSEPVIKDNVVVVYEVLEEMLDNGFPLATESNILKELIKPPTILRTVVNTITGSTNVGDQLPTGQLSVVPWRRTGVKYTNNEAYFDVIEEIDAIIDKSGSTITAEIQGVIDACVKLTGMPDLTLSFMNPRLLDDVSFHPCVRFKRWESERILSFIPPDGNFRLLSYHVSAQNLVAIPVYVKHNISFRDSSSLGRFEITVGPKQTMGKTIEGVTVTSQMPKGVLNMSLTPSQGTHTFDPVTKMLSWDVGKINPQKLPSLKGTMSLQAGASKPDENPTINLQFKIQQLAISGLKVNRLDMYGEKYKPFKGIKYMTKAGKFQVRT

SEQ ID NO: 7955 - RNA, 1257 nt, Artificial Sequence
  c-Jun__Homo_sapiens__AAH56398
augauccauagucuuuucuugaucaacuccucuggagacauuuuccuggagaaacauuggaaaaguguggucagccguucuguuugugauuacuuuuuugaggcgcaagagagagcuacugaggcagaaaaugugccuccgguuaucccuaccccucaccacuaucucuuaaguguuuaccgccacaagaucuuuuuuguggccgugauccagacggagguccccccucuguuugucauugaguuucuucaccgagugguggacacauuucaggauuauuuuggagucuguucagagccagugaucaaagacaauguaguugugguuuaugagguauuggaagagaugcuugacaaugguuuuccauuggcuaccgagucgaacauucuuaaagaacucauaaagccuccuaccauccuucgaacgguugucaacaccaucacaggaagcacgaaugugggugaccagcuucccacugggcagcugucaguggugccuuggcgacggacuggggugaaauauaccaacaaugaggccuauuuugaugugauugaagagauugaugcaauuauugauaaaucaggcuccacaauuacugcugagauccagggggugauugaugccugugucaagcugacuggcaugccagaccuuacacuuuccuucaugaacccuagguuguuggaugaugucagcuuccauccuuguguucguuucaaacgcugggaaucugagcgcauccucuccuucaucccuccugauggaaacuuccgccugcugucuuaccaugucagugcacagaaucugguugcaaucccaguguaugucaaacauaacaucaguuuccgggacaguaguucccuuggacgcuuugaaauaacggugggacccaagcagacgauggggaagaccauugagggagugacugucaccagccagaugcccaaggggguccugaacaugagccuuacuccaucacaggggacacacacauucgacccagucacaaagaugcugucuugggauguaggaaaaauaaauccacaaaagcuaccaaguuugaaggggaccaugagucuucaggcuggagcuuccaaaccagaugaaaaccccacaauuaaccugcaguuuaagauccagcagcuggccauuucuggacucaaggugaaucgucuggauauguauggagaaaaguacaaacccuuuaagggcauaaaauacaugaccaaagcugggaaguuccaaguucgaaccuga

SEQ ID NO: 7956 - RNA, 1257 nt, Artificial Sequence
  derived and/or modified sequence opt1 from c-Jun__Homo_sapiens__AAH56398
augauccacagccuguuccucaucaacuccagcggcgacaucuuccuggagaagcacuggaaguccguggucagccgcuccgugugcgacuacuucuucgaggcccaggagcgggccaccgaggcggagaacgugcccccggucauccccacgccccaccacuaccugcucagcguguaccgccacaagaucuucuucguggccgucauccagaccgaggugcccccgcuguucgugaucgaguuccugcaccgggucguggacaccuuccaggacuacuucggggugugcuccgagcccgucaucaaggacaacgugguggucguguacgaggugcucgaggagaugcuggacaacggcuucccccuggccaccgagagcaacauccucaaggagcugaucaagcccccgaccauccugcgcacggucgugaacaccaucaccggguccaccaacgugggcgaccagcuccccacggggcagcugagcgucgugcccuggcggcgcaccggcgugaaguacaccaacaacgaggccuacuucgacgucaucgaggagaucgacgccaucaucgacaaguccggcagcaccaucacggcggagauccagggggugaucgacgccugcgucaagcugaccggcaugcccgaccucacccuguccuucaugaacccgcggcugcucgacgacgugagcuuccaccccugcgugcgcuucaagcggugggaguccgagcgcauccugagcuucaucccgcccgacgggaacuuccggcugcucuccuaccacgucagcgcccagaaccugguggccauccccguguacgucaagcacaacaucuccuuccgcgacagcagcucccugggccgguucgagaucaccguggggcccaagcagacgaugggcaagaccaucgagggcgugaccgucaccagccagaugcccaagggggugcucaacaugucccugacgcccagccagggcacccacaccuucgacccggugaccaagaugcuguccugggacgucgggaagaucaacccccagaagcuccccagccugaagggcacgaugucccugcaggcgggcgccagcaagcccgacgagaacccgaccaucaaccuccaguucaagauccagcagcuggccaucuccgggcugaaggugaaccgccucgacauguacggcgagaaguacaagcccuucaaggggaucaaguacaugaccaaggccggcaaguuccaggugcggaccuga

SEQ ID NO: 7957 - RNA, 1257 nt, Artificial Sequence
  derived and/or modified sequence opt2 from c-Jun__Homo_sapiens__AAH56398
augauccacucccucuuccucaucaacuccuccggcgacaucuuccucgagaagcacuggaaguccgucgucucccgcuccgucugcgacuacuucuucgaggcccaggagcgcgccaccgaggccgagaacgucccccccgucauccccaccccccaccacuaccuccucuccgucuaccgccacaagaucuucuucgucgccgucauccagaccgagguccccccccucuucgucaucgaguuccuccaccgcgucgucgacaccuuccaggacuacuucggcgucugcuccgagcccgucaucaaggacaacgucgucgucgucuacgagguccucgaggagaugcucgacaacggcuucccccucgccaccgaguccaacauccucaaggagcucaucaagccccccaccauccuccgcaccgucgucaacaccaucaccggcuccaccaacgucggcgaccagcuccccaccggccagcucuccgucguccccuggcgccgcaccggcgucaaguacaccaacaacgaggccuacuucgacgucaucgaggagaucgacgccaucaucgacaaguccggcuccaccaucaccgccgagauccagggcgucaucgacgccugcgucaagcucaccggcaugcccgaccucacccucuccuucaugaacccccgccuccucgacgacgucuccuuccaccccugcguccgcuucaagcgcugggaguccgagcgcauccucuccuucaucccccccgacggcaacuuccgccuccucuccuaccacgucuccgcccagaaccucgucgccauccccgucuacgucaagcacaacaucuccuuccgcgacuccuccucccucggccgcuucgagaucaccgucggccccaagcagaccaugggcaagaccaucgagggcgucaccgucaccucccagaugcccaagggcguccucaacaugucccucacccccucccagggcacccacaccuucgaccccgucaccaagaugcucuccugggacgucggcaagaucaacccccagaagcuccccucccucaagggcaccaugucccuccaggccggcgccuccaagcccgacgagaaccccaccaucaaccuccaguucaagauccagcagcucgccaucuccggccucaaggucaaccgccucgacauguacggcgagaaguacaagcccuucaagggcaucaaguacaugaccaaggccggcaaguuccagguccgcaccuga

SEQ ID NO: 7958 - RNA, 1257 nt, Artificial Sequence
  derived and/or modified sequence opt3 from c-Jun__Homo_sapiens__AAH56398
augauccacagccuguuccucauuaacuccucuggcgacauauuucuugagaagcauuggaaaucaguggucaguagaagcguuugcgauuacuucuuugaagcccaggagagggcuaccgaagcagagaaugugcccccuguaaucccaacaccgcaccauuaucuguuguccguguaccggcacaagauuuucuuugucgccgugauccaaacugaaguucccccuuuauucgugauugaguuucugcaucgcgucguggacacguuccaggauuauuuugggguauguucugagccaguuaucaaagacaacguggucgugguguacgaaguccuagaggaaaugcucgauaauggauucccccuggcgaccgagucgaacauacuuaaggagcugaucaaaccuccaacaauuuugcgaacuguugugaauaccaucacagguucaaccaacguaggcgaccagcuccccacugggcagcugagcguggucccuuggcguagaacaggagugaaguauaccaauaacgaggcuuacuuugauguuauugaagaaaucgacgccauaauugauaagaguggcuccacgaucacugcagagauucaaggugugaucgacgccugcgucaaacugaccgggaugccagaucucacauuaucuuucaugaauccgaggcugcuugacgaugugagcuuucaccccuguguacgguucaagcgcugggaauccgagagaaucuugucauucauuccuccagacggaaacuuuaggcugcuaaguuaucacguuagcgcucagaaucucguggcaauacccgucuacgugaaacauaacaucucuuuccgggacuccucaagccugggccgcuuugagauuacugucggcccuaagcagaccauggggaaaacaaucgaaggagugaccguuacgagucagaugccaaagggugugcuuaauaugucucugacucccucccaaggcacacacaccuucgauccgguaacuaagauguugagcugggacgucgggaaaauaaacccucagaagcuccccucgcugaaaggaacaaugucuuuacaggccggcgcuuccaagccagaugagaauccuaccauuaaccugcaguuuaaaauccaacagcucgccaucucaggucuuaaggugaaccgacuggacauguacggggaaaaauauaagcccuucaagggaauuaaauacaugacgaaggcgggcaaauuucagguuagaaccuga

SEQ ID NO: 7959 - RNA, 1257 nt, Artificial Sequence
  derived and/or modified sequence opt4 from c-Jun__Homo_sapiens__AAH56398
augauccacagccuguuccugaucaacagcagcggcgacaucuuccuggagaagcacuggaagagcguggugagcagaagcgugugcgacuacuucuucgaggcccaggagagagccaccgaggccgagaacgugccccccgugauccccaccccccaccacuaccugcugagcguguacagacacaagaucuucuucguggccgugauccagaccgaggugcccccccuguucgugaucgaguuccugcacagagugguggacaccuuccaggacuacuucggcgugugcagcgagcccgugaucaaggacaacgugguggugguguacgaggugcuggaggagaugcuggacaacggcuucccccuggccaccgagagcaacauccugaaggagcugaucaagccccccaccauccugagaaccguggugaacaccaucaccggcagcaccaacgugggcgaccagcugcccaccggccagcugagcguggugcccuggagaagaaccggcgugaaguacaccaacaacgaggccuacuucgacgugaucgaggagaucgacgccaucaucgacaagagcggcagcaccaucaccgccgagauccagggcgugaucgacgccugcgugaagcugaccggcaugcccgaccugacccugagcuucaugaaccccagacugcuggacgacgugagcuuccaccccugcgugagauucaagagaugggagagcgagagaauccugagcuucaucccccccgacggcaacuucagacugcugagcuaccacgugagcgcccagaaccugguggccauccccguguacgugaagcacaacaucagcuucagagacagcagcagccugggcagauucgagaucaccgugggccccaagcagaccaugggcaagaccaucgagggcgugaccgugaccagccagaugcccaagggcgugcugaacaugagccugacccccagccagggcacccacaccuucgaccccgugaccaagaugcugagcugggacgugggcaagaucaacccccagaagcugcccagccugaagggcaccaugagccugcaggccggcgccagcaagcccgacgagaaccccaccaucaaccugcaguucaagauccagcagcuggccaucagcggccugaaggugaacagacuggacauguacggcgagaaguacaagcccuucaagggcaucaaguacaugaccaaggccggcaaguuccaggugagaaccuga

SEQ ID NO: 7960 - RNA, 1257 nt, Artificial Sequence
  derived and/or modified sequence opt5 from c-Jun__Homo_sapiens__AAH56398
augauccacagccuguuccucauuaacuccucuggcgacaucuuucuggagaagcauuggaaaagcguggucuccagaucuguuugcgauuacuucuuugaagcccaggagcgggcuaccgaagccgagaaugugcccccugugauuccgacaccccaccauuaucuucugagcgucuaccgccacaagaucuucuuuguggcgguuauucaaacggaagugccuccccucuucgucaucgaguuucugcauagagugguugacaccuuccaggauuauuuugggguguguuccgagccugucaucaaagacaacgugguggucguuuacgaagugcuugaggaaaugcuggauaauggauucccccucgcuacagagucuaacauucugaaggagcugaucaaaccuccgaccauucuccggacaguggucaauaccaucacaggcagcaccaacgugggggaccagcugcccacgggacagcuuuccguugugccuuggcgcagaaccggcgucaaguauacaaauaacgaagccuacuuugaugugauugaggaaaucgacgccauuaucgauaagagcgggucuaccaucacagcugagauucaaggaguuaucgacgccugcgugaaacugaccggcaugcccgaucucacgcuguccuucaugaauccucggcuucuggacgaugucagcuuucaccccugugugcgcuucaagagaugggaaucugagcggauucucuccuucaucccgccugacggcaacuuucgccugcugagcuaucacgucucugcucagaaucucguggccauucccguuuacgugaaacauaacaucuccuucagagacagcuccucucuggggcgguuugagaucacagucggaccuaagcagaccaugggcaaaacaauugaaggggugaccguuaccagccagaugcccaagggagugcuuaauaugucccugacacccagccaaggcacgcacaccuucgauccugucacaaagaugcucucuugggacguggggaaaaucaacccgcagaagcugcccucccuuaaaggaaccaugagccugcaggcgggcgccucuaagccugaugagaaucccacaauuaaccuccaguuuaaaauccaacagcuggcuauuagcggccugaaggugaaccgccucgacauguacggggaaaaauauaagccuuucaagggaaucaaauacaugaccaaggccggcaaauuucagguuagaacguga

SEQ ID NO: 7961 - protein, 158 aa, Artificial Sequence
  c-Jun__Homo_sapiens__P61966
MMRFMLLFSRQGKLRLQKWYLATSDKERKKMVRELMQVVLARKPKMCSFLEWRDLKVVYKRYASLYFCCAIEGQDNELITLELIHRYVELLDKYFGSVCELDIIFNFEKAYFILDEFLMGGDVQDTSKKSVLKAIEQADLLQEEDESPRSVLEEMGLA

SEQ ID NO: 7962 - RNA, 477 nt, Artificial Sequence
  c-Jun__Homo_sapiens__BAA33391
augaugcgguucaugcuauuauucagccggcagggaaaacugcggcugcaaaaaugguaccuggccacuucggacaaggaacggaagaagauggugcgcgagcucaugcagguuguccuggcucgaaagcccaagaugugcagcuuccuggaguggagggaccucaaaguugucuauaagagauaugccagccucuacuucugcugcgccaucgagggccaagacaaugagcucaucacacuggagcugauccaccgauacguggagcucuuagacaaauacuuuggcagugugugcgagcuggacaucaucuucaacuuugagaaggccuacuucauccuggaugaguuuuugauggggggggauguccaggacaccuccaagaagagugugcugaaagccaucgagcaggcugaccuacugcaagaggaggaugagucgccacggagugugcuggaggagauggguuuggcauag

SEQ ID NO: 7963 - RNA, 477 nt, Artificial Sequence
  derived and/or modified sequence opt1 from c-Jun__Homo_sapiens__BAA33391
augaugcgcuucaugcuccuguucagccggcagggcaagcugcgccugcagaagugguaccucgccaccuccgacaaggagcggaagaagauggugcgcgagcugaugcaggucgugcuggcccggaagcccaagaugugcagcuuccucgaguggcgcgaccugaagguggucuacaagcgguacgcgucccuguacuucugcugcgccaucgaggggcaggacaacgagcucaucacccuggagcugauccaccgcuacguggagcuccuggacaaguacuucggcagcgugugcgagcuggacaucaucuucaacuucgagaaggccuacuucauccucgacgaguuccugaugggcggggacguccaggacacguccaagaaguccgugcugaaggccaucgagcaggccgaccuccugcaggaggaggacgagagcccgcggagcgugcuggaggagauggggcucgcguga

SEQ ID NO: 7964 - RNA, 477 nt, Artificial Sequence
  derived and/or modified sequence opt2 from c-Jun__Homo_sapiens__BAA33391
augaugcgcuucaugcuccucuucucccgccagggcaagcuccgccuccagaagugguaccucgccaccuccgacaaggagcgcaagaagaugguccgcgagcucaugcaggucguccucgcccgcaagcccaagaugugcuccuuccucgaguggcgcgaccucaaggucgucuacaagcgcuacgccucccucuacuucugcugcgccaucgagggccaggacaacgagcucaucacccucgagcucauccaccgcuacgucgagcuccucgacaaguacuucggcuccgucugcgagcucgacaucaucuucaacuucgagaaggccuacuucauccucgacgaguuccucaugggcggcgacguccaggacaccuccaagaaguccguccucaaggccaucgagcaggccgaccuccuccaggaggaggacgaguccccccgcuccguccucgaggagaugggccucgccuga

SEQ ID NO: 7965 - RNA, 477 nt, Artificial Sequence
  derived and/or modified sequence opt3 from c-Jun__Homo_sapiens__BAA33391
augaugagauucaugcugcucuuuagcaggcagggcaaacuucggcugcaaaagugguacuuggccaccuccgacaaggagcgcaaaaagauggugcgagaauuaaugcaggucguucuggcucguaaacccaagaugugcucuuuccuagaguggagagaucucaaggugguauauaaaagguacgcaucacuguauuuuuguugcgccaucgaagggcaggacaacgagcuuauuacacuggaauugauacaccgguacguggagcuccuggauaaguauuucggaagugucugugagcuggacaucauuuuuaauuucgaaaaagcguacuuuauccucgaugaguucuuaauggguggcgacgugcaggauacuagcaagaaauccguucugaaggcuauugaacaagccgaccuuuugcaggaggaggaugaaucuccucgcucggugcuggaggaaauggggcuagcauga

SEQ ID NO: 7966 - RNA, 477 nt, Artificial Sequence
  derived and/or modified sequence opt4 from c-Jun__Homo_sapiens__BAA33391
augaugagauucaugcugcuguucagcagacagggcaagcugagacugcagaagugguaccuggccaccagcgacaaggagagaaagaagauggugagagagcugaugcagguggugcuggccagaaagcccaagaugugcagcuuccuggaguggagagaccugaaggugguguacaagagauacgccagccuguacuucugcugcgccaucgagggccaggacaacgagcugaucacccuggagcugauccacagauacguggagcugcuggacaaguacuucggcagcgugugcgagcuggacaucaucuucaacuucgagaaggccuacuucauccuggacgaguuccugaugggcggcgacgugcaggacaccagcaagaagagcgugcugaaggccaucgagcaggccgaccugcugcaggaggaggacgagagccccagaagcgugcuggaggagaugggccuggccuga

SEQ ID NO: 7967 - RNA, 477 nt, Artificial Sequence
  derived and/or modified sequence opt5 from c-Jun__Homo_sapiens__BAA33391
augaugagauucaugcugcucuuuagccggcagggcaagcugcgccuucaaaaaugguaccuggccaccuccgacaaggagcggaaaaagauggugagagaacucaugcaggucguucuggcucgcaaacccaagaugugcucuuuccuugaguggagagaucugaaggugguguauaaacgguacgccagccucuauuuuuguugcgcgaucgaagggcaggacaacgagcugauuacacuggaacucauccaccgcuacgucgagcugcuugauaaguauuucggauccgugugugagcuggacauuaucuuuaauuucgaaaaagccuacuuuauucucgaugaguuccugaugggcggggacguucaggauacgucuaagaaaagcgugcuuaaggcuaucgaacaagccgaccugcuccaggaggaggaugaauccccuagaucuguccuggaggaaaugggacuggcuuga

SEQ ID NO: 7968 - protein, 302 aa, Artificial Sequence
  c-Jun__Homo_sapiens__Q63HQ0
MGNCCWTQCFGLLRKEAGRLQRVGGGGGSKYFRTCSRGEHLTIEFENLVESDEGESPGSSHRPLTEEEIVDLRERHYDSIAEKQKDLDKKIQKELALQEEKLRLEEEALYAAQREAARAAKQRKLLEQERQRIVQQYHPSNNGEYQSSGPEDDFESCLRNMKSQYEVFRSSRLSSDATVLTPNTESSCDLMTKTKSTSGNDDSTSLDLEWEDEEGMNRMLPMRERSKTEEDILRAALKYSNKKTGSNPTSASDDSNGLEWENDFVSAEMDDNGNSEYSGFVNPVLELSDSGIRHSDTDQQTR

SEQ ID NO: 7969 - RNA, 909 nt, Artificial Sequence
  c-Jun__Homo_sapiens__AAY40962
auggggaacugcugcuggacgcagugcuucggacugcuucgcaaggaagcggggcggcugcagcgaguaggcggcggcggaggauccaaguauuuuagaacaugcucaagaggugagcacuuaacaauagaguuugagaaucuaguagaaagugaugaaggggagagcccaggaagcagucauaggccucuuacugaggaagaaauuguugaccuaagagaaaggcauuaugauuccauugccgaaaaacaaaaagaucuugauaagaaaauucaaaaagaguuagccuuacaagaagagaaguuaagacuagaagaagaagcuuuauacgcugcacagcgugaagcagccagggcagcaaagcagcgaaagcucuuggagcaagaaaggcagagaauugugcagcaauaucauccuuccaacaauggagaauaucaaaguucaggaccagaagaugacuucgaaucuuguuugagaaauaugaagucacaguaugaaguuuuucgaaguaguagacucucaucagaugcuacaguuuugacaccaaauacagaaagcaguugugauuuaaugaccaaaacuaaaucaacuaguggaaaugacgacagcacauccuuagaucuagagugggaagaugaagaaggaaugaauagaaugcuuccaaugagagaacguuccaaaacagaggaagacauucuacgggcagcacuuaaguauagcaacaagaagacuggaaguaauccuacaucagccucugaugauuccaaugggcuggagugggaaaaugauuuuguuagugccgaaauggaugauaauggaaauuccgaguauucuggauuuguaaauccuguauuagaacugucugauucuggcauaaggcauucugacacagaucaacagacucgauag

SEQ ID NO: 7970 - RNA, 909 nt, Artificial Sequence
  derived and/or modified sequence opt1 from c-Jun__Homo_sapiens__AAY40962
augggcaacugcugcuggacccagugcuucgggcugcuccgcaaggaggccggccggcugcagcgcgucgggggcgggggcggcagcaaguacuuccggaccugcucccgcggggagcaccugacgaucgaguucgagaaccucguggagagcgacgagggcgagucccccgggagcucccaccggccgcugaccgaggaggagaucguggaccugcgcgagcggcacuacgacagcaucgccgagaagcagaaggaccucgacaagaagauccagaaggagcuggcgcugcaggaggagaagcuccgccuggaggaggaggcccuguacgccgcccagcgggaggccgcgcgcgccgccaagcagcggaagcuccuggagcaggagcgccagcggaucgugcagcaguaccaccccuccaacaacggcgaguaccagagcuccgggcccgaggacgacuucgagagcugccugcgcaacaugaagucccaguacgaggucuuccggagcucccgccucagcuccgacgccaccgugcugacccccaacacggagagcuccugcgaccugaugaccaagaccaagagcaccuccggcaacgacgacagcacgagccucgaccuggagugggaggacgaggagggcaugaaccggaugcugccgaugcgcgagcgguccaagaccgaggaggacauccuccgcgcggcccugaaguacagcaacaagaagaccggguccaaccccaccagcgccuccgacgacagcaacggccuggagugggagaacgacuucguguccgccgagauggacgacaacgggaacagcgaguacuccggcuucgucaaccccgugcucgagcugagcgacuccggcauccggcacagcgacacggaccagcagacccgcuga

SEQ ID NO: 7971 - RNA, 909 nt, Artificial Sequence
  derived and/or modified sequence opt2 from c-Jun__Homo_sapiens__AAY40962
augggcaacugcugcuggacccagugcuucggccuccuccgcaaggaggccggccgccuccagcgcgucggcggcggcggcggcuccaaguacuuccgcaccugcucccgcggcgagcaccucaccaucgaguucgagaaccucgucgaguccgacgagggcgagucccccggcuccucccaccgcccccucaccgaggaggagaucgucgaccuccgcgagcgccacuacgacuccaucgccgagaagcagaaggaccucgacaagaagauccagaaggagcucgcccuccaggaggagaagcuccgccucgaggaggaggcccucuacgccgcccagcgcgaggccgcccgcgccgccaagcagcgcaagcuccucgagcaggagcgccagcgcaucguccagcaguaccaccccuccaacaacggcgaguaccaguccuccggccccgaggacgacuucgaguccugccuccgcaacaugaagucccaguacgaggucuuccgcuccucccgccucuccuccgacgccaccguccucacccccaacaccgaguccuccugcgaccucaugaccaagaccaaguccaccuccggcaacgacgacuccaccucccucgaccucgagugggaggacgaggagggcaugaaccgcaugcuccccaugcgcgagcgcuccaagaccgaggaggacauccuccgcgccgcccucaaguacuccaacaagaagaccggcuccaaccccaccuccgccuccgacgacuccaacggccucgagugggagaacgacuucgucuccgccgagauggacgacaacggcaacuccgaguacuccggcuucgucaaccccguccucgagcucuccgacuccggcauccgccacuccgacaccgaccagcagacccgcuga

SEQ ID NO: 7972 - RNA, 909 nt, Artificial Sequence
  derived and/or modified sequence opt3 from c-Jun__Homo_sapiens__AAY40962
augggcaacugcuguuggacccagugcuucgggcugcucagaaaggaggccggaaggcuucaacggguggguggcgggggaggcagcaaauacuuucgcacauguucccgaggugaacaccugacuaucgaguucgaaaauuuggucgagucugacgaaggggagucacccggaaguagccaucguccuuuaacggaggaagagauuguugaucugagagaaaggcacuaugacuccauagcugagaagcagaaagaucuagacaagaaaauccagaaggagcucgcacugcaggaagagaaacuucggcuggaagaggaagccuuguacgcggcucaacgcgaggccgcaagagccgcuaagcagaggaagcuccuggagcaggaacggcagcgcauugugcaacaguaucauccaucuaacaauggcgaguaccagucgucaggcccggaagaugacuuugagagcugccugcgaaacaugaaaagucaguaugaaguauucagauccucuaggcucagcuccgaugcaaccguguuaacacccaauacugagucaaguugugaccugaugaccaagacaaaaagcaccucugggaacgaugacuccacuucacuugauuuggagugggaagacgaggaaggaaugaaucggaugcugccuaugcgugagcgcagcaagacagaagaggauauccuaagagccgcucucaaguacaguaacaaaaagaccgguucuaauccaacguccgccagcgacgacucgaacggccuggagugggaaaaugauuuugucucugcggagauggacgauaacggaaauuccgaauauucaggguucgugaaccccguucuugagcugagugacagcggcauuaggcacuccgauacugaccaacagacccgguga

SEQ ID NO: 7973 - RNA, 909 nt, Artificial Sequence
  derived and/or modified sequence opt4 from c-Jun__Homo_sapiens__AAY40962
augggcaacugcugcuggacccagugcuucggccugcugagaaaggaggccggcagacugcagagagugggcggcggcggcggcagcaaguacuucagaaccugcagcagaggcgagcaccugaccaucgaguucgagaaccugguggagagcgacgagggcgagagccccggcagcagccacagaccccugaccgaggaggagaucguggaccugagagagagacacuacgacagcaucgccgagaagcagaaggaccuggacaagaagauccagaaggagcuggcccugcaggaggagaagcugagacuggaggaggaggcccuguacgccgcccagagagaggccgccagagccgccaagcagagaaagcugcuggagcaggagagacagagaaucgugcagcaguaccaccccagcaacaacggcgaguaccagagcagcggccccgaggacgacuucgagagcugccugagaaacaugaagagccaguacgagguguucagaagcagcagacugagcagcgacgccaccgugcugacccccaacaccgagagcagcugcgaccugaugaccaagaccaagagcaccagcggcaacgacgacagcaccagccuggaccuggagugggaggacgaggagggcaugaacagaaugcugcccaugagagagagaagcaagaccgaggaggacauccugagagccgcccugaaguacagcaacaagaagaccggcagcaaccccaccagcgccagcgacgacagcaacggccuggagugggagaacgacuucgugagcgccgagauggacgacaacggcaacagcgaguacagcggcuucgugaaccccgugcuggagcugagcgacagcggcaucagacacagcgacaccgaccagcagaccagauga

SEQ ID NO: 7974 - RNA, 909 nt, Artificial Sequence
  derived and/or modified sequence opt5 from c-Jun__Homo_sapiens__AAY40962
augggcaacugcuguuggacccagugcuucgggcugcucagaaaggaggccggacggcugcaacgcgugggcgggggaggcgggagcaaauacuuuagaacauguucccggggagaacaccuuacgaucgaguucgaaaaucuggucgagucugacgaaggcgagagccccggcuccucucaucgcccucucaccgaggaagagauuguugaucugagagaacggcacuaugacagcaucgcugagaagcagaaagaucuugacaagaaaauucagaaggagcuggcccuccaggaagagaagcugcgccuggaagaggaagcgcucuacgcugcccaaagagaggccgcucgggccgcuaaacagcgcaagcugcuugagcaggaaagacagcggaucgugcaacaguaucauccguccaacaauggggaguaccagucuagcggacccgaagaugacuuugaguccugccugcgcaacaugaaaagccaguaugaaguguucagaucuucccggcucagcucugaugccacaguccugaccccuaauacagaguccagcugugaccuuaugaccaagacaaaaucuaccuccggcaacgaugacagcacgucccuggaucucgagugggaagacgaggaagggaugaaucgcaugcugcccaugagagagcggucuaagaccgaagaggauauucugagagcggcccucaaguacagcaacaaaaagacaggauccaauccuaccagcgcuucugacgacuccaacggccuggagugggaaaaugauuuugugagcgccgagauggacgauaacggaaauucugaauauagcggguucguuaaccccgugcuugagcuguccgacucuggcauccgccacagcgauacagaccaacagacccgguga

SEQ ID NO: 7975 - protein, 200 aa, Artificial Sequence
  c-Jun__Homo_sapiens__Q7Z5Q8
MLGTGKLGFSFVRITALMVSCNRLWVGTGNGVIISIPLTETVILHQGRLLGLRANKTSGVPGNRPGSVIRVYGDENSDKVTPGTFIPYCSMAHAQLCFHGHRDAVKFFVAVPGQVISPQSSSSGTDLTGDKAGPSAQEPGSQTPLKSMLVISGGEGYIDFRMGDEGGESELLGEDLPLEPSVTKAERSHLIVWQVMYGNE

SEQ ID NO: 7976 - RNA, 603 nt, Artificial Sequence
  c-Jun__Homo_sapiens__AAN12270
auguuagguacuggaaaacugggcuucucuuuugugagaauuacagcucuuauggugucuuguaaucguuuguggguggggacaggaaauggugucauuaucuccaucccauugacagaaaccguaauccuccaccagggacguuuacuggggcugagggcaaauaaaaccucagguguaccaggaaaucguccuggaaguguaauccguguauauggugaugaaaacagugauaaagugacuccagggacauuuauacccuauuguucaauggcacaugcacagcuuugcuuccaugggcaccgggaugcugugaaauucuuuguggcagucccaggucaagucaucagcccacaaaguagcaguaguggcacggaucugacgggugacaaagcagggccaucugcacaggagccugguagucagacgcccuugaagucuaugcuugucaucaguggaggagagggcuacaucgacuuccgaaugggugaugaagguggagaaucagaacuucuuggagaggaucuuccacuugaaccuucugucaccaaagcagaaaggagucacuugauaguguggcaagugauguauggcaaugaguga

SEQ ID NO: 7977 - RNA, 603 nt, Artificial Sequence
  derived and/or modified sequence opt1 from c-Jun__Homo_sapiens__AAN12270
augcugggcaccgggaagcucggcuucagcuucgugcgcaucaccgcccugauggucuccugcaaccggcuguggguggggacgggcaacggggugaucaucagcaucccccucaccgagaccgucauccugcaccagggccgccugcucggccugcgggccaacaagaccuccggggugccgggcaaccgccccgggagcgugauccgggucuacggcgacgagaacuccgacaaggugacgcccgggaccuucauccccuacugcagcauggcgcacgcccagcugugcuuccacggccaccgcgacgccgugaaguucuucgucgccgugccgggccaggugaucagcccccagagcuccagcuccgggaccgaccucaccggcgacaaggccgggcccagcgcgcaggagcccggcucccagacgccgcugaaguccaugcuggucaucuccggcggggagggcuacaucgacuuccggaugggggacgagggcggggagagcgagcuccugggcgaggaccugccccucgagcccuccgugaccaaggccgagcgcagccaccugaucguguggcaggucauguacggcaacgaguga

SEQ ID NO: 7978 - RNA, 603 nt, Artificial Sequence
  derived and/or modified sequence opt2 from c-Jun__Homo_sapiens__AAN12270
augcucggcaccggcaagcucggcuucuccuucguccgcaucaccgcccucauggucuccugcaaccgccucugggucggcaccggcaacggcgucaucaucuccaucccccucaccgagaccgucauccuccaccagggccgccuccucggccuccgcgccaacaagaccuccggcguccccggcaaccgccccggcuccgucauccgcgucuacggcgacgagaacuccgacaaggucacccccggcaccuucauccccuacugcuccauggcccacgcccagcucugcuuccacggccaccgcgacgccgucaaguucuucgucgccguccccggccaggucaucuccccccaguccuccuccuccggcaccgaccucaccggcgacaaggccggccccuccgcccaggagcccggcucccagaccccccucaaguccaugcucgucaucuccggcggcgagggcuacaucgacuuccgcaugggcgacgagggcggcgaguccgagcuccucggcgaggaccucccccucgagcccuccgucaccaaggccgagcgcucccaccucaucgucuggcaggucauguacggcaacgaguga

SEQ ID NO: 7979 - RNA, 603 nt, Artificial Sequence
  derived and/or modified sequence opt3 from c-Jun__Homo_sapiens__AAN12270
augcugggcaccgggaagcucggauucagcuuugugagaaucacagcccuuauggucuccugcaacaggcuguggguugguacuggcaauggggugauuauaucuauccccuugacggagaccguaauuuuacaccagggacggcugcuaggccuccgcgcuaacaaaacaucaggugugccugggaaucgaccaggaagugucauccguguguacggcgacgaaaacagcgauaagguuacuccgggcaccuucauucccuauuguuccauggcacaugcccagcugugcuuucacgggcauagagacgcggugaaauucuuugucgcugugccuggacagguaaucucuccacagucgucaagcagugguacagaucuuaccggcgacaaggccgggcccuccgcacaggagccuggaucucaaacuccacugaaaagcauguugguuauauccggcggugaaggguacaucgauuucaggaugggagacgagggcggcgaaucagagcuccugggggaggaucugccccucgaaccuagugugacaaaggccgagcggagccacuuaauugucuggcaagugauguauggaaaugaauga

SEQ ID NO: 7980 - RNA, 603 nt, Artificial Sequence
  derived and/or modified sequence opt4 from c-Jun__Homo_sapiens__AAN12270
augcugggcaccggcaagcugggcuucagcuucgugagaaucaccgcccugauggugagcugcaacagacugugggugggcaccggcaacggcgugaucaucagcaucccccugaccgagaccgugauccugcaccagggcagacugcugggccugagagccaacaagaccagcggcgugcccggcaacagacccggcagcgugaucagaguguacggcgacgagaacagcgacaaggugacccccggcaccuucauccccuacugcagcauggcccacgcccagcugugcuuccacggccacagagacgccgugaaguucuucguggccgugcccggccaggugaucagcccccagagcagcagcagcggcaccgaccugaccggcgacaaggccggccccagcgcccaggagcccggcagccagaccccccugaagagcaugcuggugaucagcggcggcgagggcuacaucgacuucagaaugggcgacgagggcggcgagagcgagcugcugggcgaggaccugccccuggagcccagcgugaccaaggccgagagaagccaccugaucguguggcaggugauguacggcaacgaguga

SEQ ID NO: 7981 - RNA, 603 nt, Artificial Sequence
  derived and/or modified sequence opt5 from c-Jun__Homo_sapiens__AAN12270
augcugggcaccgggaagcucggauucagcuuugugagaaucacagcccugauggucuccugcaaccggcuuuggguuggcacggggaauggagugauuaucucuauuccccugaccgagacagugauccuccaccagggccgccugcuugggcugagagcuaacaaaaccagcggagucccuggcaaucggccgggcuccgugauucgcguuuacggggacgaaaacucugauaaggugacacccggaaccuucaucccuuauuguagcauggcccaugcgcaacucugcuuucacggccauagagacgcugucaaauucuuuguggccguucccggacaggugaucuccccucagucuagcuccagcgggacagaucugaccggcgacaaggccgggcccucugcucaggagccuggaucccaaacgccgcugaaaagcaugcucgucauuucuggcggcgaaggguacaucgauuuccggaugggagacgagggcggggaauccgagcugcuuggagaggaucugccccucgaaccuagcgugaccaaggccgagcgcucucaccugauuguguggcaggucauguauggcaaugaauga

SEQ ID NO: 7982 - protein, 154 aa, Artificial Sequence
  c-Jun__Homo_sapiens__Q96PC3
MIHFILLFSRQGKLRLQKWYITLPDKERKKITREIVQIILSRGHRTSSFVDWKELKLVYKRYASLYFCCAIENQDNELLTLEIVHRYVELLDKYFGNVCELDIIFNFEKAYFILDEFIIGGEIQETSKKIAVKAIEDSDMLQEVSTVSQTMGER

SEQ ID NO: 7983 - RNA, 465 nt, Artificial Sequence
  c-Jun__Homo_sapiens__AAL09586
augauacauuucauauugcucuucagucgacaagggaaauuacggcuacagaaaugguacaucacucucccugauaaagagaggaagaagaucacccgggaaauuguucagauuauucucucccguggucacaggacaagcaguuuuguugacuggaaggagcuaaaacuuguuuauaaaagguaugcuaguuuauauuuuugcugugcaauagaaaaucaggacaaugagcucuugacgcuagagauugugcaucguuacguggagcugcuggacaaauauuuuggaaaugucugugagcuggauauuaucuuuaauuuugaaaaggcuuauuucauccuggacgaguuuauaauagguggggaaauucaggaaacauccaagaaaauugcugucaaagccauugaagacucugauauguuacaggaggucaguacgguuucccaaaccaugggagaaagauga

SEQ ID NO: 7984 - RNA, 465 nt, Artificial Sequence
  derived and/or modified sequence opt1 from c-Jun__Homo_sapiens__AAL09586
augauccacuucauccuccuguucagccgccagggcaagcugcggcugcagaagugguacaucacccuccccgacaaggagcgcaagaagaucacccgggagaucgugcagaucauccugucccgcgggcaccggacgagcuccuucgucgacuggaaggagcugaagcucguguacaagcgcuacgccagccuguacuucugcugcgccaucgagaaccaggacaacgagcugcucacccuggagaucgugcaccgguacgucgagcugcucgacaaguacuucggcaacgugugcgagcuggacaucaucuucaacuucgagaaggcguacuucauccuggacgaguucaucaucgggggcgagauccaggagaccuccaagaagaucgccgugaaggccaucgaggacagcgacaugcuccaggaggucuccaccgugagccagacgaugggggagcgcuga

SEQ ID NO: 7985 - RNA, 465 nt, Artificial Sequence
  derived and/or modified sequence opt2 from c-Jun__Homo_sapiens__AAL09586
augauccacuucauccuccucuucucccgccagggcaagcuccgccuccagaagugguacaucacccuccccgacaaggagcgcaagaagaucacccgcgagaucguccagaucauccucucccgcggccaccgcaccuccuccuucgucgacuggaaggagcucaagcucgucuacaagcgcuacgccucccucuacuucugcugcgccaucgagaaccaggacaacgagcuccucacccucgagaucguccaccgcuacgucgagcuccucgacaaguacuucggcaacgucugcgagcucgacaucaucuucaacuucgagaaggccuacuucauccucgacgaguucaucaucggcggcgagauccaggagaccuccaagaagaucgccgucaaggccaucgaggacuccgacaugcuccaggaggucuccaccgucucccagaccaugggcgagcgcuga

SEQ ID NO: 7986 - RNA, 465 nt, Artificial Sequence
  derived and/or modified sequence opt3 from c-Jun__Homo_sapiens__AAL09586
augauccacuucauucugcucuuuagcagacagggcaaacuuaggcugcaaaagugguacauaaccuugcccgacaaggagcggaaaaagaucacacgcgaaauugugcagaucauuuuaucccgagggcaucguacuucuucauucgucgauuggaaagagcugaagcuaguuuauaagagauacgccagucucuauuuuugcugugcuaucgaaaaccaggacaaugagcugcuuacgcuggaaauagugcacagguacguagaguugcucgauaaauauuucggaaacgugugcgagcuggacaucauuuuuaauuucgaaaaggcauacuuuauccuggaugaguucauuaucgguggcgaaauacaggagaccagcaaaaagauugccgucaaagcgaucgaggacuccgauaugcuccaagaagugucuacaguuucgcagacuaugggggagcgguga

SEQ ID NO: 7987 - RNA, 465 nt, Artificial Sequence
  derived and/or modified sequence opt4 from c-Jun__Homo_sapiens__AAL09586
augauccacuucauccugcuguucagcagacagggcaagcugagacugcagaagugguacaucacccugcccgacaaggagagaaagaagaucaccagagagaucgugcagaucauccugagcagaggccacagaaccagcagcuucguggacuggaaggagcugaagcugguguacaagagauacgccagccuguacuucugcugcgccaucgagaaccaggacaacgagcugcugacccuggagaucgugcacagauacguggagcugcuggacaaguacuucggcaacgugugcgagcuggacaucaucuucaacuucgagaaggccuacuucauccuggacgaguucaucaucggcggcgagauccaggagaccagcaagaagaucgccgugaaggccaucgaggacagcgacaugcugcaggaggugagcaccgugagccagaccaugggcgagagauga

SEQ ID NO: 7988 - RNA, 465 nt, Artificial Sequence
  derived and/or modified sequence opt5 from c-Jun__Homo_sapiens__AAL09586
augauccacuucauucugcucuuuagcagacagggcaagcugcggcuucaaaaaugguacaucacccugcccgacaaggagcgcaaaaagauuacaagagaaaucgugcagauuauccucucccgggggcaucgcacgucuagcuucgucgauuggaaagagcugaaacuuguuuauaagagauacgccucccuguauuuuugcugugcuaucgaaaaccaggacaaugagcuccugacccuggaaauugugcaccgguacguggagcuccuggauaaguauuucggaaacgucugcgagcuugacaucauuuuuaauuucgaaaaggccuacuuuauccuggaugaguucauuaucggcggggaaauucaggagacaucuaaaaagaucgcggugaaagcuaucgaggacagcgauaugcuccaagaaguuuccaccgugucucagacaaugggagagcgcuga

SEQ ID NO: 7989 - protein, 423 aa, Artificial Sequence
  c-Jun__Homo_sapiens__Q9BXS5
MSASAVYVLDLKGKVLICRNYRGDVDMSEVEHFMPILMEKEEEGMLSPILAHGGVRFMWIKHNNLYLVATSKKNACVSLVFSFLYKVVQVFSEYFKELEEESIRDNFVIIYELLDELMDFGYPQTTDSKILQEYITQEGHKLETGAPRPPATVTNAVSWRSEGIKYRKNEVFLDVIESVNLLVSANGNVLRSEIVGSIKMRVFLSGMPELRLGLNDKVLFDNTGRGKSKSVELEDVKFHQCVRLSRFENDRTISFIPPDGEFELMSYRLNTHVKPLIWIESVIEKHSHSRIEYMIKAKSQFKRRSTANNVEIHIPVPNDADSPKFKTTVGSVKWVPENSEIVWSIKSFPGGKEYLMRAHFGLPSVEAEDKEGKPPISVKFEIPYFTTSGIQVRYLKIIEKSGYQALPWVRYITQNGDYQLRTQ

SEQ ID NO: 7990 - RNA, 1272 nt, Artificial Sequence
  c-Jun__Homo_sapiens__AAK28024
auguccgccagcgccgucuacgugcuggaccugaagggcaaggugcucaucugccggaacuaccguggcgacguggacaugucagagguggagcacuucaugcccauccugauggagaaggaggaggaggggaugcugucgcccauccuggcccacggggggguccguuucauguggaucaaacacaacaaccuguaucugguugccacauccaagaagaacgcgugcgugucgcuggucuuuucuuuccucuauaagguggugcagguguuuuccgaguacuucaaggagcuggaggaggagagcauccgggacaacuuuguuaucaucuacgagcugcuggacgagcucauggacuucggcuacccccagaccaccgacagcaagauccugcaggaguacaucacucaggaaggccacaagcuggaaacaggggccccgcggccaccagccaccgucaccaacgcgguguccuggcgguccgaaggcaucaaguaucggaagaaugagguguucuuggacgucaucgagucugucaaccucuuggucagcgccaacggcaauguccugcgcagcgagaucgugggcuccaucaagaugcgagucuuccucucgggcaugcccgagcugcgccugggccucaacgacaagguccucuuugacaacacgggccgcggcaaaagcaaauccguggagcuggaggaugugaaguuccaccagugugugcggcuaucacgcuucgagaaugaccgcaccaucuccuucaucccacccgacggcgaguucgagcucauguccuaccggcucaacacccacgucaagccuuugauauggaucgagucggugaucgagaagcacucccacagccgcaucgaguacaugaucaaggccaaaagccaguucaagcggcggucaacagccaacaacguggagauccacauucccgugcccaaugaugccgacucacccaaguucaagacgacgguggggagcguuaaguggguccccgagaacagcgagaucgugugguccaucaaguccuucccgggcggcaaggaguaccugaugcgggcccacuucggccugccuaguguggaggccgaagacaaggagggcaagcccccgaucagugucaaguucgagaucccuuacuucacuaccuccggcauccaggugcgcuaccugaagaucauugagaagaguggguaccaggcccugcccugggugcguuauaucacgcagaauggagauuaccagcuccggacccaguga

SEQ ID NO: 7991 - RNA, 1272 nt, Artificial Sequence
  derived and/or modified sequence opt1 from c-Jun__Homo_sapiens__AAK28024
augagcgccagcgccguguacguccuggaccucaagggcaaggugcugaucugccgcaacuaccgcggggacguggacaugagcgaggucgagcacuucaugcccauccugauggagaaggaggaggagggcaugcucuccccgauccuggcgcacgggggcgugcgcuucauguggaucaagcacaacaaccuguaccucguggccaccagcaagaagaacgccugcgucucccugguguucagcuuccuguacaaggugguccagguguucuccgaguacuucaaggagcucgaggaggagagcauccgggacaacuucgugaucaucuacgagcugcuggacgagcucauggacuucggguacccccagaccacggacuccaagauccugcaggaguacaucacccaggagggccacaagcuggagaccggcgcgccccggcccccggccaccgucacgaacgccgugagcuggcgguccgaggggaucaaguaccgcaagaacgagguguuccucgacgucaucgagagcgugaaccugcugguguccgccaacggcaacguccuccggagcgagaucgugggguccaucaagaugcgcguguuccugagcggcaugcccgagcugcggcucgggcugaacgacaagguccuguucgacaacaccggccgcggcaaguccaagagcguggagcucgaggacgugaaguuccaccagugcguccggcugucccgcuucgagaacgaccggaccaucagcuucaucccgcccgacggggaguucgagcugaugagcuaccgccucaacacccacgugaagccccugaucuggaucgaguccgucaucgagaagcacagccacucccggaucgaguacaugaucaaggccaagagccaguucaagcgccgguccacggccaacaacguggagauccacauccccgugcccaacgacgcggacagccccaaguucaagaccaccgucggcuccgugaagugggugccggagaacagcgagaucgucugguccaucaagagcuuccccgggggcaaggaguaccugaugcgcgcccacuucggccuccccuccguggaggccgaggacaaggaggggaagcccccgaucagcgugaaguucgagauccccuacuucaccacguccggcauccagguccgguaccugaagaucaucgagaaguccggguaccaggcccugcccugggugcgcuacaucacccagaacggcgacuaccagcuccggacccaguga

SEQ ID NO: 7992 - RNA, 1272 nt, Artificial Sequence
  derived and/or modified sequence opt2 from c-Jun__Homo_sapiens__AAK28024
auguccgccuccgccgucuacguccucgaccucaagggcaagguccucaucugccgcaacuaccgcggcgacgucgacauguccgaggucgagcacuucaugcccauccucauggagaaggaggaggagggcaugcucucccccauccucgcccacggcggcguccgcuucauguggaucaagcacaacaaccucuaccucgucgccaccuccaagaagaacgccugcgucucccucgucuucuccuuccucuacaaggucguccaggucuucuccgaguacuucaaggagcucgaggaggaguccauccgcgacaacuucgucaucaucuacgagcuccucgacgagcucauggacuucggcuacccccagaccaccgacuccaagauccuccaggaguacaucacccaggagggccacaagcucgagaccggcgccccccgcccccccgccaccgucaccaacgccgucuccuggcgcuccgagggcaucaaguaccgcaagaacgaggucuuccucgacgucaucgaguccgucaaccuccucgucuccgccaacggcaacguccuccgcuccgagaucgucggcuccaucaagaugcgcgucuuccucuccggcaugcccgagcuccgccucggccucaacgacaagguccucuucgacaacaccggccgcggcaaguccaaguccgucgagcucgaggacgucaaguuccaccagugcguccgccucucccgcuucgagaacgaccgcaccaucuccuucaucccccccgacggcgaguucgagcucauguccuaccgccucaacacccacgucaagccccucaucuggaucgaguccgucaucgagaagcacucccacucccgcaucgaguacaugaucaaggccaagucccaguucaagcgccgcuccaccgccaacaacgucgagauccacauccccguccccaacgacgccgacucccccaaguucaagaccaccgucggcuccgucaaguggguccccgagaacuccgagaucgucugguccaucaaguccuuccccggcggcaaggaguaccucaugcgcgcccacuucggccuccccuccgucgaggccgaggacaaggagggcaagccccccaucuccgucaaguucgagauccccuacuucaccaccuccggcauccagguccgcuaccucaagaucaucgagaaguccggcuaccaggcccuccccuggguccgcuacaucacccagaacggcgacuaccagcuccgcacccaguga

SEQ ID NO: 7993 - RNA, 1272 nt, Artificial Sequence
  derived and/or modified sequence opt3 from c-Jun__Homo_sapiens__AAK28024
augagcgccuccgcuguguacguccuggaccucaagggcaaaguucuuaucugcagaaacuauaggggagauguggacaugucugagguagaacacuucaugcccauucugauggagaaggaagaggaagggauguugucaccuauauuagcacaugguggcgugcgguuuauguggaucaaacacaauaaccuguaccuagucgccaccaguaagaaaaaugcgugugugagccucguuuucuccuuucuguauaaggugguccagguguucucugaguacuuuaaggagcuugaagaggaaucgauucgcgauaacuucguaaucauuuaugagcuguuggacgagcucauggauuuuggguacccacaaacaacugacucaaaaauccugcaggaauauauaacgcaggagggacauaagcuggaaaccggcgcuccgcgacccccugccacaguuacuaaugcagugagcuggcguagugaggguaucaaauacagaaagaacgaagucuuccucgaugugauugaguccgugaauuuacuggucucugccaacgggaauguucuuaggagcgagaucgugggauccauuaaaaugcggguauuuuugucaggcaugccagaacugcgccuaggccucaacgacaaggugcuguucgauaauaccgggagaggaaagaguaaaagcgucgagcuugaagacgugaaguuucaccagugcguuaggcugucucgguucgagaacgaucgcacaaucuccuuuauacccccugacggugaguucgaauugaugucauaccgacucaauacccaugugaaaccacugauuuggaucgagagcgucauugaaaagcacagucacucuagaaucgaguauaugaucaaagcuaagucccaauucaaaaggcggagcacugcaaacaauguggaaauucauauacccguaccuaacgaugccgacucgccaaaguuuaagacaaccguuggcucugugaaaugggucccggagaacuccgaaaucguguggucaauuaagaguuuccccgggggaaaagaguacuuaaugcgugcucacuuuggccugccuagcgucgaggccgaagacaaggaggguaaaccacccaucuccgugaaguucgaaauaccuuauuuuacgacuucugggauucagguucgcuaccucaagaucaucgagaaaagcggauaucaggcgcuuccaugggugagauacauuacccagaauggcgauuaucaacugaggacacaguga

SEQ ID NO: 7994 - RNA, 1272 nt, Artificial Sequence
  derived and/or modified sequence opt4 from c-Jun__Homo_sapiens__AAK28024
augagcgccagcgccguguacgugcuggaccugaagggcaaggugcugaucugcagaaacuacagaggcgacguggacaugagcgagguggagcacuucaugcccauccugauggagaaggaggaggagggcaugcugagccccauccuggcccacggcggcgugagauucauguggaucaagcacaacaaccuguaccugguggccaccagcaagaagaacgccugcgugagccugguguucagcuuccuguacaagguggugcagguguucagcgaguacuucaaggagcuggaggaggagagcaucagagacaacuucgugaucaucuacgagcugcuggacgagcugauggacuucggcuacccccagaccaccgacagcaagauccugcaggaguacaucacccaggagggccacaagcuggagaccggcgcccccagaccccccgccaccgugaccaacgccgugagcuggagaagcgagggcaucaaguacagaaagaacgagguguuccuggacgugaucgagagcgugaaccugcuggugagcgccaacggcaacgugcugagaagcgagaucgugggcagcaucaagaugagaguguuccugagcggcaugcccgagcugagacugggccugaacgacaaggugcuguucgacaacaccggcagaggcaagagcaagagcguggagcuggaggacgugaaguuccaccagugcgugagacugagcagauucgagaacgacagaaccaucagcuucaucccccccgacggcgaguucgagcugaugagcuacagacugaacacccacgugaagccccugaucuggaucgagagcgugaucgagaagcacagccacagcagaaucgaguacaugaucaaggccaagagccaguucaagagaagaagcaccgccaacaacguggagauccacauccccgugcccaacgacgccgacagccccaaguucaagaccaccgugggcagcgugaagugggugcccgagaacagcgagaucguguggagcaucaagagcuuccccggcggcaaggaguaccugaugagagcccacuucggccugcccagcguggaggccgaggacaaggagggcaagccccccaucagcgugaaguucgagauccccuacuucaccaccagcggcauccaggugagauaccugaagaucaucgagaagagcggcuaccaggcccugcccugggugagauacaucacccagaacggcgacuaccagcugagaacccaguga

SEQ ID NO: 7995 - RNA, 1272 nt, Artificial Sequence
  derived and/or modified sequence opt5 from c-Jun__Homo_sapiens__AAK28024
augagcgccuccgcuguguacguccuggaccucaagggcaaaguucugaucugcagaaacuaucgcggggauguggacaugucugagguggaacacuucaugcccauucuuauggagaaggaagaggaaggaaugcugagcccuauccucgcccauggcgggguccgguuuauguggauuaaacacaauaaccuguaccuuguggcgaccuccaagaaaaaugcuuguguuucucugguguucagcuuucucuauaaggucgugcagguuuucuccgaguacuuuaaggagcuggaagaggaaucuaucagagauaacuucgugauuaucuaugagcugcucgacgagcugauggauuuuggauacccgcaaacaacggacagcaaaauccuucaggaauauauuacccaggagggccauaagcuggaaacaggggcuccccggccucccgccaccgucacaaaugccguguccuggcgcagcgagggaaucaaauacagaaagaacgaaguguuccucgaugucauugagucuguuaaucugcuuguguccgccaacggcaaugugcugcggagcgagaucgucggcucuauuaaaaugcgcguguuucucuccgggaugccugaacugagacugggacucaacgacaagguucuguucgauaauaccggccggggaaagagcaaaucuguggagcuugaagacgucaaguuucaccagugcgugcgccuguccagauucgagaacgaucggacaaucagcuuuauucccccugacggggaguucgaacucauguccuaccgccugaauacccauguuaaaccgcuuaucuggaucgagucugugauugaaaagcacagccacuccagaaucgaguauaugauuaaagcuaagagccaauucaaacggcgcucuacggccaacaaugucgaaauccauauucccgugccuaacgaugcggacucccccaaguuuaagaccacagucggcagcgugaaauggguuccugagaacucugaaaucguguggagcaucaaguccuuccccgggggaaaagaguaccugaugagagcccacuuuggccucccgucugucgaggcugaagacaaggagggcaaaccucccauuagcgugaaguucgaaaucccuuauuuuaccacauccgggauucagguucgguaccugaagaucauugagaaaagcggauaucaggcccugcccugggugagauacaucacccagaauggcgauuaucaacuccgcacgcaguga

SEQ ID NO: 7996 - protein, 423 aa, Artificial Sequence
  c-Jun__Homo_sapiens__Q9Y6Q5
MSASAVFILDVKGKPLISRNYKGDVAMSKIEHFMPLLVQREEEGALAPLLSHGQVHFLWIKHSNLYLVATTSKNANASLVYSFLYKTIEVFCEYFKELEEESIRDNFVIVYELLDELMDFGFPQTTDSKILQEYITQQSNKLETGKSRVPPTVTNAVSWRSEGIKYKKNEVFIDVIESVNLLVNANGSVLLSEIVGTIKLKVFLSGMPELRLGLNDRVLFELTGRSKNKSVELEDVKFHQCVRLSRFDNDRTISFIPPDGDFELMSYRLSTQVKPLIWIESVIEKFSHSRVEIMVKAKGQFKKQSVANGVEISVPVPSDADSPRFKTSVGSAKYVPERNVVIWSIKSFPGGKEYLMRAHFGLPSVEKEEVEGRPPIGVKFEIPYFTVSGIQVRYMKIIEKSGYQALPWVRYITQSGDYQLRTS

SEQ ID NO: 7997 - RNA, 1272 nt, Artificial Sequence
  c-Jun__Homo_sapiens__AAD25870
auguccgccucggcugucuucauucuggacguuaagggcaagccauugaucagccgcaacuacaagggcgauguggccaugagcaagauugagcacuucaugccuuugcugguacagcgggaggaggaaggcgcccuggccccgcugcugagccacggccagguccacuuccuauggaucaaacacagcaaccucuacuugguggccaccacaucgaagaaugccaaugccucccugguguacuccuuccuguauaagacaauagagguauucugcgaauacuucaaggagcuggaggaggagagcauccgggacaacuuugucaucgucuacgaguugcuggacgagcucauggacuuuggcuucccgcagaccaccgacagcaagauccugcaggaguacaucacucagcagagcaacaagcuggagacgggcaagucacgggugccacccacugucaccaacgcuguguccuggcgcuccgaggguaucaaguauaagaagaacgaggucuucauugaugucauagagucugucaaccugcuggucaaugccaacggcagcguccuucugagcgaaaucgucgguaccaucaagcucaagguguuucugucaggaaugccagagcugcggcugggccucaaugaccgcgugcucuucgagcucacuggccgcagcaagaacaaaucaguagagcuggaggauguaaaauuccaccagugcgugcggcucucucgcuuugacaacgaccgcaccaucuccuucaucccgccugauggugacuuugagcucaugucauaccgccucagcacccaggucaagccacugaucuggauugagucugucauugagaaguucucccacagccgcguggagaucauggucaaggccaaggggcaguuuaagaaacagucaguggccaacgguguggagauaucugugccuguacccagcgaugccgacucccccagauucaagaccagugugggcagcgccaaguaugugccggagagaaacgucgugauuuggaguauuaagucuuucccggggggcaaggaguacuugaugcgagcccacuuuggccuccccaguguggaaaaggaagagguggagggccggccccccaucggggucaaguuugagauccccuacuucaccgucucugggauccagguccgauacaugaagaucauugagaaaagugguuaccaggcccugcccuggguucgcuacaucacccagaguggcgauuaccaacuucguaccagcuag

SEQ ID NO: 7998 - RNA, 1272 nt, Artificial Sequence
  derived and/or modified sequence opt1 from c-Jun__Homo_sapiens__AAD25870
augagcgccuccgccguguucauccuggacgucaagggcaagccccucaucagccgcaacuacaagggggacguggcgauguccaagaucgagcacuucaugccgcugcuggugcagcgggaggaggagggcgcccucgcgccccugcugagccacgggcagguccacuuccucuggaucaagcacuccaaccuguaccugguggccaccaccagcaagaacgccaacgccucccucguguacagcuuccuguacaagacgaucgaggucuucugcgaguacuucaaggagcuggaggaggaguccauccgcgacaacuucgugaucguguacgagcuccuggacgagcugauggacuucggcuucccccagaccaccgacagcaagauccuccaggaguacaucacccagcaguccaacaagcuggagacgggcaagagccgggugcccccgaccgucaccaacgccguguccuggcgcagcgaggggaucaaguacaagaagaacgaggucuucaucgacgugaucgaguccgugaaccugcucgucaacgccaacggcagcgugcugcuguccgagaucguggggaccaucaagcucaaggucuuccugagcggcaugcccgagcugcggcucgggcugaacgaccgcgugcuguucgagcucacgggccgguccaagaacaagagcguggagcuggaggacgucaaguuccaccagugcgugcgccugagccgguucgacaacgaccgcaccaucuccuucaucccgcccgacggggacuucgagcucaugagcuaccggcuguccacccaggugaagccccugaucuggaucgagagcgucaucgagaaguucucccacagccgcguggagaucauggucaaggccaagggccaguucaagaagcaguccguggcgaacggcguggagaucagcguccccgugcccuccgacgccgacagcccccgguucaagaccuccguggggagcgccaaguacgucccggagcgcaacguggugaucugguccaucaagagcuuccccggcgggaaggaguaccucaugcgggcccacuucggccugcccuccgucgagaaggaggagguggagggccggcccccgaucggggugaaguucgagauccccuacuucacggucagcggcauccaggugcgcuacaugaagaucaucgagaaguccggguaccaggcccugcccugggugcgcuacaucacccagagcggcgacuaccagcuccggaccuccuga

SEQ ID NO: 7999 - RNA, 1272 nt, Artificial Sequence
  derived and/or modified sequence opt2 from c-Jun__Homo_sapiens__AAD25870
auguccgccuccgccgucuucauccucgacgucaagggcaagccccucaucucccgcaacuacaagggcgacgucgccauguccaagaucgagcacuucaugccccuccucguccagcgcgaggaggagggcgcccucgccccccuccucucccacggccagguccacuuccucuggaucaagcacuccaaccucuaccucgucgccaccaccuccaagaacgccaacgccucccucgucuacuccuuccucuacaagaccaucgaggucuucugcgaguacuucaaggagcucgaggaggaguccauccgcgacaacuucgucaucgucuacgagcuccucgacgagcucauggacuucggcuucccccagaccaccgacuccaagauccuccaggaguacaucacccagcaguccaacaagcucgagaccggcaagucccgcgucccccccaccgucaccaacgccgucuccuggcgcuccgagggcaucaaguacaagaagaacgaggucuucaucgacgucaucgaguccgucaaccuccucgucaacgccaacggcuccguccuccucuccgagaucgucggcaccaucaagcucaaggucuuccucuccggcaugcccgagcuccgccucggccucaacgaccgcguccucuucgagcucaccggccgcuccaagaacaaguccgucgagcucgaggacgucaaguuccaccagugcguccgccucucccgcuucgacaacgaccgcaccaucuccuucaucccccccgacggcgacuucgagcucauguccuaccgccucuccacccaggucaagccccucaucuggaucgaguccgucaucgagaaguucucccacucccgcgucgagaucauggucaaggccaagggccaguucaagaagcaguccgucgccaacggcgucgagaucuccguccccguccccuccgacgccgacuccccccgcuucaagaccuccgucggcuccgccaaguacguccccgagcgcaacgucgucaucugguccaucaaguccuuccccggcggcaaggaguaccucaugcgcgcccacuucggccuccccuccgucgagaaggaggaggucgagggccgcccccccaucggcgucaaguucgagauccccuacuucaccgucuccggcauccagguccgcuacaugaagaucaucgagaaguccggcuaccaggcccuccccuggguccgcuacaucacccaguccggcgacuaccagcuccgcaccuccuga

SEQ ID NO: 8000 - RNA, 1272 nt, Artificial Sequence
  derived and/or modified sequence opt3 from c-Jun__Homo_sapiens__AAD25870
augagcgccuccgcuguguucauccuggacgucaagggcaaaccccucauuucuagaaacuacaagggggauguugcaaugucaaaaauagagcacuuuaugccucuucuggugcagagggaagaggaaggagccuuggcgccauuacugagucauggucaaguacacuuccuauggaucaagcauagcaaucucuaucugguggcuaccacauccaaaaacgccaaugcaucucuugucuacucguuucuguauaagacuauugagguguucugcgaauacuuuaaggaguuggaggaagagucaauccgggacaacuucguuauuguguaugaacuccuggaugagcugauggacuuuggcuucccgcagacgaccgauagcaaaauccuccaggaguacauaacacagcaaaguaauaaguuagaaacugggaaaucccgcgugcccccuaccgucacaaacgccguaucuuggcgaagcgagggaaucaaguauaaaaagaaugaaguuuuuauugacgugaucgaguccgucaaccugcuugugaaugcuaacggcucaguguugcugagugaaauugucgguaccaucaagcuaaaaguuuuccucagcgggaugccagagcugcgucuuggacugaaugauagaguguuguuugagcucacuggcaggucuaagaacaaauccguagaacuggaggacgugaaguuccaccaguguguccgguuaucacgcuuugauaaugacagaacaauuagcuucauacccccugauggcgacuucgaacugaugaguuacaggcucucuacccaggugaaaccacuuaucuggauugaguccguuaucgaaaaguuuagccauucgcggguggagaucauggucaaagcaaaggggcaguucaagaaacaaucuguggccaacggaguagagauuuccguucccgugccuucagaugcugacaguccacgcuuuaagacgagcgucgguuccgccaaauacgugccggaacgaaaugucgugauauggucuaucaagagcuuccccggcgggaaagaguaucugaugagagcgcacuuuggauugccuucaguugaaaaggaggaaguggagggcaggccacccauugguguaaaguucgagaucccuuacuuuacugucagugggauacaggugcgguauaugaaaauuaucgaaaaguccggauaccaggcacuaccauggguucguuauaucacccagagcggcgacuaccaacugcgcacaucuuga

SEQ ID NO: 8001 - RNA, 1272 nt, Artificial Sequence
  derived and/or modified sequence opt4 from c-Jun__Homo_sapiens__AAD25870
augagcgccagcgccguguucauccuggacgugaagggcaagccccugaucagcagaaacuacaagggcgacguggccaugagcaagaucgagcacuucaugccccugcuggugcagagagaggaggagggcgcccuggccccccugcugagccacggccaggugcacuuccuguggaucaagcacagcaaccuguaccugguggccaccaccagcaagaacgccaacgccagccugguguacagcuuccuguacaagaccaucgagguguucugcgaguacuucaaggagcuggaggaggagagcaucagagacaacuucgugaucguguacgagcugcuggacgagcugauggacuucggcuucccccagaccaccgacagcaagauccugcaggaguacaucacccagcagagcaacaagcuggagaccggcaagagcagagugccccccaccgugaccaacgccgugagcuggagaagcgagggcaucaaguacaagaagaacgagguguucaucgacgugaucgagagcgugaaccugcuggugaacgccaacggcagcgugcugcugagcgagaucgugggcaccaucaagcugaagguguuccugagcggcaugcccgagcugagacugggccugaacgacagagugcuguucgagcugaccggcagaagcaagaacaagagcguggagcuggaggacgugaaguuccaccagugcgugagacugagcagauucgacaacgacagaaccaucagcuucaucccccccgacggcgacuucgagcugaugagcuacagacugagcacccaggugaagccccugaucuggaucgagagcgugaucgagaaguucagccacagcagaguggagaucauggugaaggccaagggccaguucaagaagcagagcguggccaacggcguggagaucagcgugcccgugcccagcgacgccgacagccccagauucaagaccagcgugggcagcgccaaguacgugcccgagagaaacguggugaucuggagcaucaagagcuuccccggcggcaaggaguaccugaugagagcccacuucggccugcccagcguggagaaggaggagguggagggcagaccccccaucggcgugaaguucgagauccccuacuucaccgugagcggcauccaggugagauacaugaagaucaucgagaagagcggcuaccaggcccugcccugggugagauacaucacccagagcggcgacuaccagcugagaaccagcuga

SEQ ID NO: 8002 - RNA, 1272 nt, Artificial Sequence
  derived and/or modified sequence opt5 from c-Jun__Homo_sapiens__AAD25870
augagcgcuuccgcuguguucauccuggacgucaagggcaaaccccucauuucuagaaacuacaagggggauguugccaugagcaaaaucgagcacuuuaugccucugcuugugcagcgggaagaggaaggagcgcuggcuccgcuccugucccauggccaagugcacuuccuuuggauuaagcauucuaaucuguaucucgucgccaccacaagcaaaaacgccaaugcuucccugguguacucuuuucuguauaagacgaucgagguuuucugcgaauacuuuaaggagcucgaggaagagagcauucgcgacaacuucgugaucgucuaugaacugcuugaugagcugauggacuuuggguucccccagaccacagauuccaaaauccuccaggaguacauuacccagcaaagcaauaagcuggaaacaggaaaaucuagagugccucccaccguuacaaacgccguguccuggcggagcgagggcaucaaguauaaaaagaaugaagucuuuauugacgugaucgagucugugaaccuucuggucaaugcuaacggguccguucuccugagcgaaauugugggaaccaucaagcugaaaguguuccucucuggcaugccugagcugcgccuuggccugaaugauagaguccucuuugagcugacggggcgguccaagaacaaaagcguggaacuugaggacguuaaguuccaccagugugugcgccuguccagauuugauaaugaccggaccauuucuuucauucccccugauggagacuucgaacucaugagcuaccgccuguccacacaggucaaaccgcugaucuggaucgagagcgugaucgaaaaguuuucucauuccagaguugagauuauggugaaagccaagggccaguucaagaaacaaagcgucgcgaacgggguggagaucucuguccccgugccuagcgaugccgacucuccccgguuuaagaccuccguuggaagcgcuaaauacgugccugaacgcaaugucgugauuugguccaucaagagcuuccccggcgggaaagaguaucucaugagagcccacuuuggacugccgucuguugaaaaggaggaaguggagggccggccucccaucggcgucaaguucgagauuccuuacuuuacaguguccgggauccaggugcgcuauaugaaaauuaucgaaaagagcggauaccaggcccuucccuggguuagauauauuacccagucuggcgacuaccaacugcggacguccuga

SEQ ID NO: 8003 - protein, 584 aa, Artificial Sequence
  CO8A__Homo_sapiens__P07357
MFAVVFFILSLMTCQPGVTAQEKVNQRVRRAATPAAVTCQLSNWSEWTDCFPCQDKKYRHRSLLQPNKFGGTICSGDIWDQASCSSSTTCVRQAQCGQDFQCKETGRCLKRHLVCNGDQDCLDGSDEDDCEDVRAIDEDCSQYEPIPGSQKAALGYNILTQEDAQSVYDASYYGGQCETVYNGEWRELRYDSTCERLYYGDDEKYFRKPYNFLKYHFEALADTGISSEFYDNANDLLSKVKKDKSDSFGVTIGIGPAGSPLLVGVGVSHSQDTSFLNELNKYNEKKFIFTRIFTKVQTAHFKMRKDDIMLDEGMLQSLMELPDQYNYGMYAKFINDYGTHYITSGSMGGIYEYILVIDKAKMESLGITSRDITTCFGGSLGIQYEDKINVGGGLSGDHCKKFGGGKTERARKAMAVEDIISRVRGGSSGWSGGLAQNRSTITYRSWGRSLKYNPVVIDFEMQPIHEVLRHTSLGPLEAKRQNLRRALDQYLMEFNACRCGPCFNNGVPILEGTSCRCQCRLGSLGAACEQTQTEGAKADGSWSCWSSWSVCRAGIQERRRECDNPAPQNGGASCPGRKVQTQAC

SEQ ID NO: 8004 - RNA, 1755 nt, Artificial Sequence
  CO8A__Homo_sapiens__AAA52200
auguuugcuguuguuuucuucaucuugucuuugaugacuugucagccugggguaacugcacaggagaaggugaaccagagaguaagacgggcagcuacacccgcagcaguuaccugccagcugagcaacuggucagaguggacagauugcuuuccgugccaggacaaaaaguaccgacaccggagccucuugcagccaaacaaguuugggggaaccaucugcaguggugacaucugggaucaagccagcugcuccaguucuacaacuuguguaaggcaagcacaguguggacaggauuuccaguguaaggagacaggucgcugccugaaacgccaccuuguguguaauggagaccaggacugccuugauggcucugaugaggacgacugugaagaugucagggccauugacgaagacugcagccaguaugaaccaauuccaggaucacagaaggcagccuugggguacaauauccugacccaggaagaugcucagaguguguacgaugccaguuauuaugggggccagugugagacgguauacaauggggaauggagggagcuucgauaugacuccaccugugaacgucucuacuauggagaugaugagaaauacuuucggaaacccuacaacuuucugaaguaccacuuugaagcccuggcagauacuggaaucuccucagaguuuuaugauaaugcaaaugaccuucuuuccaaaguuaaaaaagacaagucugacucauuuggagugaccaucggcauaggcccagccggcagcccuuuauugguggguguagguguaucccacucacaagacacuucauucuugaacgaauuaaacaaguauaaugagaagaaauucauuuucacaagaaucuucacaaaggugcagacugcacauuuuaagaugaggaaggaugacauuaugcuggaugaaggaaugcugcagucauuaauggagcuuccagaucaguacaauuauggcauguaugccaaguucaucaaugacuauggcacccauuacaucacaucuggauccauggguggcauuuaugaauauauccuggugauugacaaagcaaaaauggaaucccuugguauuaccagcagagauaucacgacauguuuuggaggcuccuugggcauucaauaugaagacaaaauaaauguugguggagguuuaucaggagaccauuguaaaaaauuuggagguggcaaaacugaaagggccaggaaggccauggcuguggaagacauuauuucucgggugcgagguggcaguucuggcuggagcgguggcuuggcacagaacaggagcaccauuacauaccguuccugggggaggucauuaaaguauaauccuguuguuaucgauuuugagaugcagccuauccacgaggugcugcggcacacaagccuggggccucuggaggccaagcgccagaaccugcgccgcgccuuggaccaguaucugauggaauucaaugccugccgaugugggccuugcuucaacaauggggugcccauccucgagggcaccagcugcaggugccagugccgccuggguagcuugggugcugccugugagcaaacacagacagaaggagccaaagcagaugggagcuggaguugcuggagcuccuggucuguaugcagagcaggcauccaggaaaggagaagagagugugacaauccagcaccucagaauggaggggccucguguccagggcggaaaguacagacgcaggcuugcuga

SEQ ID NO: 8005 - RNA, 1755 nt, Artificial Sequence
  derived and/or modified sequence opt1 from CO8A__Homo_sapiens__AAA52200
auguucgccguggucuucuucauccugagccucaugaccugccagcccggcgugaccgcccaggagaaggugaaccagcgcguccggcgcgccgccacgccggccgccgugaccugccagcuguccaacuggagcgaguggaccgacugcuuccccugccaggacaagaaguaccggcaccgcucccugcuccagcccaacaaguucgggggcaccaucugcagcggggacaucugggaccaggccuccugcagcuccagcacgaccugcgugcggcaggcgcagugcggccaggacuuccagugcaaggagaccgggcgcugccugaagcggcaccuggucugcaacggcgaccaggacugccucgacggcuccgacgaggacgacugcgaggacgugcgcgccaucgacgaggacugcagccaguacgagcccaucccggggucccagaaggccgcccugggcuacaacauccugacccaggaggacgcgcagagcguguacgacgccuccuacuacgggggccagugcgagacggucuacaacggggaguggcgggagcuccgcuacgacagcacgugcgagcggcuguacuacggcgacgacgagaaguacuuccgcaagcccuacaacuuccugaaguaccacuucgaggcccucgccgacaccggcaucuccagcgaguucuacgacaacgccaacgaccugcuguccaaggugaagaaggacaagagcgacuccuucggggugaccaucggcaucgggcccgcgggcagcccccuccuggucggcgugggggugagccacucccaggacaccagcuuccugaacgagcucaacaaguacaacgagaagaaguucaucuucacccggaucuucaccaagguccagaccgcccacuucaagaugcgcaaggacgacaucaugcuggacgagggcaugcugcagucccucauggagcugccggaccaguacaacuacgggauguacgccaaguucaucaacgacuacggcacgcacuacaucaccagcggguccaugggcggcaucuacgaguacauccuggugaucgacaaggccaagauggagagccucgggaucaccucccgggacaucaccacgugcuucggcgggagccugggcauccaguacgaggacaagaucaacgucgggggcggccuguccggggaccacugcaagaaguucggcgggggcaagaccgagcgcgcccggaaggcgauggccguggaggacaucaucagccgcgugcgcgggggcuccagcggcugguccgggggccucgcccagaaccggagcaccaucaccuaccgguccugggggcgcagccugaaguacaaccccguggucaucgacuucgagaugcagcccauccacgaggugcugcgccacacgucccucggcccccuggaggccaagcggcagaaccugcgccgggcccucgaccaguaccugauggaguucaacgcgugccgcugcggcccgugcuucaacaacggggugcccauccuggagggcaccagcugccggugccagugccgccucgggucccugggcgccgccugcgagcagacccagaccgagggggccaaggccgacggcagcuggagcugcugguccagcugguccgucugccgggcgggcauccaggagcgccggcgcgagugcgacaaccccgcgccccagaacgggggcgccagcugcccggggcggaaggugcagacgcaggccugcuga

SEQ ID NO: 8006 - RNA, 1755 nt, Artificial Sequence
  derived and/or modified sequence opt2 from CO8A__Homo_sapiens__AAA52200
auguucgccgucgucuucuucauccucucccucaugaccugccagcccggcgucaccgcccaggagaaggucaaccagcgcguccgccgcgccgccacccccgccgccgucaccugccagcucuccaacugguccgaguggaccgacugcuuccccugccaggacaagaaguaccgccaccgcucccuccuccagcccaacaaguucggcggcaccaucugcuccggcgacaucugggaccaggccuccugcuccuccuccaccaccugcguccgccaggcccagugcggccaggacuuccagugcaaggagaccggccgcugccucaagcgccaccucgucugcaacggcgaccaggacugccucgacggcuccgacgaggacgacugcgaggacguccgcgccaucgacgaggacugcucccaguacgagcccauccccggcucccagaaggccgcccucggcuacaacauccucacccaggaggacgcccaguccgucuacgacgccuccuacuacggcggccagugcgagaccgucuacaacggcgaguggcgcgagcuccgcuacgacuccaccugcgagcgccucuacuacggcgacgacgagaaguacuuccgcaagcccuacaacuuccucaaguaccacuucgaggcccucgccgacaccggcaucuccuccgaguucuacgacaacgccaacgaccuccucuccaaggucaagaaggacaaguccgacuccuucggcgucaccaucggcaucggccccgccggcuccccccuccucgucggcgucggcgucucccacucccaggacaccuccuuccucaacgagcucaacaaguacaacgagaagaaguucaucuucacccgcaucuucaccaagguccagaccgcccacuucaagaugcgcaaggacgacaucaugcucgacgagggcaugcuccagucccucauggagcuccccgaccaguacaacuacggcauguacgccaaguucaucaacgacuacggcacccacuacaucaccuccggcuccaugggcggcaucuacgaguacauccucgucaucgacaaggccaagauggagucccucggcaucaccucccgcgacaucaccaccugcuucggcggcucccucggcauccaguacgaggacaagaucaacgucggcggcggccucuccggcgaccacugcaagaaguucggcggcggcaagaccgagcgcgcccgcaaggccauggccgucgaggacaucaucucccgcguccgcggcggcuccuccggcugguccggcggccucgcccagaaccgcuccaccaucaccuaccgcuccuggggccgcucccucaaguacaaccccgucgucaucgacuucgagaugcagcccauccacgagguccuccgccacaccucccucggcccccucgaggccaagcgccagaaccuccgccgcgcccucgaccaguaccucauggaguucaacgccugccgcugcggccccugcuucaacaacggcguccccauccucgagggcaccuccugccgcugccagugccgccucggcucccucggcgccgccugcgagcagacccagaccgagggcgccaaggccgacggcuccugguccugcugguccuccugguccgucugccgcgccggcauccaggagcgccgccgcgagugcgacaaccccgccccccagaacggcggcgccuccugccccggccgcaagguccagacccaggccugcuga

SEQ ID NO: 8007 - RNA, 1755 nt, Artificial Sequence
  derived and/or modified sequence opt3 from CO8A__Homo_sapiens__AAA52200
auguucgccguggucuuuuucauccugagccucaugaccugccagcccggcguuacagcucaagagaaggugaaccagagaguaaggcgggcagccacuccugcggcugugacgugucagcuuuccaauuggucugaauggaccgacugcuuuccaugucaggauaaaaaguaccgccaccgaucacuguugcaaccgaacaaauucgggggaacaauuugcaguggugacauaugggaucaggccagcuguuccucuucgacuaccugcguccgucaggcacaguguggccaagacuuucagugcaaggagacagggagauguuuaaaaaggcaucuggugugcaauggagaucaggacugucuagauggcucagacgaagaugacugcgaggauguucgggccaucgacgaagauugcagccaguaugagcccauuccugguagucaaaaggcugcacucggguacaacauccugacccaggaggacgcccaguccguguaugacgcuucuuacuauggaggccaaugugaaacugucuacaauggcgaguggcgcgaacuuagauaugauagcacaugcgagaggcuguacuacggggacgaugagaaguauuuccggaaaccauacaacuuuuugaaguaucacuucgaagcccucgcggacaccggaauuuccucagaguuuuacgauaaugcaaacgaccugcugaguaaagugaagaaagauaagagcgacucuuucgguguaacgaucggcauagggcccgccggauccccucucuuaguuggcgugggugucucacauagccaggauaccaguuuucugaaugaacuuaacaaguauaaugagaaaaaguucaucuuuacucgcauuuucacaaaagugcagacugcucacuucaagaugcgaaaagacgauaucauguuggacgaagggaugcugcagucucuaauggagcucccagaccaauacaacuauggaauguacgccaaguuuauuaaugauuacggcacccauuauaucacauccggcagcaugggagggauauacgaguauauucuggugaucgacaaagcaaagauggaaucgcuugguauuaccucuagagauaucacgacuuguuucggcgggucccugggaauccaguacgaggacaagauuaacgucggcgguggguugucaggcgaucacugcaaaaaguuuggaggcgggaaaacagaaagggcucggaaggccauggcgguugaggacauaaucagucgugugcgcggagguagcuccggcuggucugggggacucgcccagaauagaagcaccauuacuuauaggucauggggccggagucugaaauacaaccccguagugaucgauuucgaaaugcagccuauacacgaggucuuacgacauacaucccuggguccacucgaggcaaagcgccaaaaccuuagaagggcucuggaccaguauuugauggaauuuaaugccugucggugcgggccguguuucaacaauggcgugcccauucuagagggaaccagcugccgcugucagugcagacugggcucucucggggcugccugugaacagacgcaaaccgagggagcaaaggccgaugguucauggaguugcuggagcuccuggucuguuugcagggcuggcauccaggaacgucggcgagagugugacaacccugcgccacagaaugggggagcaucgugccccggcagaaaagugcagacacaagccuguuga

SEQ ID NO: 8008 - RNA, 1755 nt, Artificial Sequence
  derived and/or modified sequence opt4 from CO8A__Homo_sapiens__AAA52200
auguucgccgugguguucuucauccugagccugaugaccugccagcccggcgugaccgcccaggagaaggugaaccagagagugagaagagccgccacccccgccgccgugaccugccagcugagcaacuggagcgaguggaccgacugcuuccccugccaggacaagaaguacagacacagaagccugcugcagcccaacaaguucggcggcaccaucugcagcggcgacaucugggaccaggccagcugcagcagcagcaccaccugcgugagacaggcccagugcggccaggacuuccagugcaaggagaccggcagaugccugaagagacaccuggugugcaacggcgaccaggacugccuggacggcagcgacgaggacgacugcgaggacgugagagccaucgacgaggacugcagccaguacgagcccauccccggcagccagaaggccgcccugggcuacaacauccugacccaggaggacgcccagagcguguacgacgccagcuacuacggcggccagugcgagaccguguacaacggcgaguggagagagcugagauacgacagcaccugcgagagacuguacuacggcgacgacgagaaguacuucagaaagcccuacaacuuccugaaguaccacuucgaggcccuggccgacaccggcaucagcagcgaguucuacgacaacgccaacgaccugcugagcaaggugaagaaggacaagagcgacagcuucggcgugaccaucggcaucggccccgccggcagcccccugcuggugggcgugggcgugagccacagccaggacaccagcuuccugaacgagcugaacaaguacaacgagaagaaguucaucuucaccagaaucuucaccaaggugcagaccgcccacuucaagaugagaaaggacgacaucaugcuggacgagggcaugcugcagagccugauggagcugcccgaccaguacaacuacggcauguacgccaaguucaucaacgacuacggcacccacuacaucaccagcggcagcaugggcggcaucuacgaguacauccuggugaucgacaaggccaagauggagagccugggcaucaccagcagagacaucaccaccugcuucggcggcagccugggcauccaguacgaggacaagaucaacgugggcggcggccugagcggcgaccacugcaagaaguucggcggcggcaagaccgagagagccagaaaggccauggccguggaggacaucaucagcagagugagaggcggcagcagcggcuggagcggcggccuggcccagaacagaagcaccaucaccuacagaagcuggggcagaagccugaaguacaaccccguggugaucgacuucgagaugcagcccauccacgaggugcugagacacaccagccugggcccccuggaggccaagagacagaaccugagaagagcccuggaccaguaccugauggaguucaacgccugcagaugcggccccugcuucaacaacggcgugcccauccuggagggcaccagcugcagaugccagugcagacugggcagccugggcgccgccugcgagcagacccagaccgagggcgccaaggccgacggcagcuggagcugcuggagcagcuggagcgugugcagagccggcauccaggagagaagaagagagugcgacaaccccgccccccagaacggcggcgccagcugccccggcagaaaggugcagacccaggccugcuga

SEQ ID NO: 8009 - RNA, 1755 nt, Artificial Sequence
  derived and/or modified sequence opt5 from CO8A__Homo_sapiens__AAA52200
auguucgccguggucuuuuucauccugagccucaugaccugccagcccggcguuacagcucaagagaaggugaaccagagagugcggcgcgccgcgacgccugcugccgucaccugucagcuguccaauuggucugaauggacagacugcuuuccgugucaggauaaaaaguacagacaccggagccuucugcaacccaacaaauucgggggaaccauuugcuccggcgacaucugggaucaggccucuuguagcuccucuacaaccugcgugcgccaggcucagugugggcaagacuuucagugcaaggagacaggaagaugucucaaacggcaucugguuugcaauggcgaucaggacugucuugaugggagcgacgaagaugacugcgaggaugugcgcgccauugacgaagauugcucccaguaugagccuauccccggaagccaaaaggcugcccugggcuacaacauucucacccaggaggacgcgcagucugucuaugacgccuccuacuauggcgggcaaugugaaacgguguacaauggagaguggagagaacugcgguaugauagcacaugcgagcgccuguacuacggcgacgaugagaaguauuucagaaaaccuuacaacuuucucaaguaucacuucgaagcucuggccgacacagggaucucuuccgaguuuuacgauaaugcuaacgaccuucugagcaaaguuaagaaagauaagucugacuccuucggagugaccaucggcauugggcccgccggaagcccucuccuggucggcgugggcgugucccauucucaggauaccagcuuucuuaaugaacugaacaaguauaaugagaaaaaguucaucuuuacccggauuuucacgaaaguccagacagcgcacuucaagaugcgcaaagacgauaucaugcucgacgaagggaugcugcagucccugauggagcucccggaccaauacaacuauggaauguacgccaaguuuauuaaugauuacggcacccauuauaucacaagcgggucuaugggaggcauuuacgaguauauccugguuaucgacaaagcuaagauggaaucccuugggauuaccagcagagauaucaccacauguuucggaggcucucugggcauucaguacgaggacaagaucaacgucgggggaggccucagcggggaucacugcaaaaaguuuggaggcgggaaaacggaacgggcccgcaaggcuauggccguggaggacauuaucuccagagugcggggcggaucuagcggcugguccgggggacuggcccagaauagaagcaccaucacauaucgcucuuggggccggucccuuaaauacaaccccgugguuauugauuucgaaaugcagccuauccacgaggugcugagacauaccagccucgggccccuggaggcuaagcgccaaaaccugcggagagcgcucgaccaguaucugauggaauuuaaugccugucgcugcggaccuuguuucaacaauggcguccccauucuugaggggacaucuugccggugucagugcagacugggcucccucggagcugccugugaacagacccaaacggagggcgccaaggcugaugggagcugguccugcuggucuagcugguccgugugccgcgccggaauccaggaacggagacgcgagugugacaacccggcgccucagaauggcggggcuucuugccccggacggaaaguucagacacaagccuguuga

SEQ ID NO: 8010 - protein, 591 aa, Artificial Sequence
  CO8B__Homo_sapiens__P07358
MKNSRTWAWRAPVELFLLCAALGCLSLPGSRGERPHSFGSNAVNKSFAKSRQMRSVDVTLMPIDCELSSWSSWTTCDPCQKKRYRYAYLLQPSQFHGEPCNFSDKEVEDCVTNRPCRSQVRCEGFVCAQTGRCVNRRLLCNGDNDCGDQSDEANCRRIYKKCQHEMDQYWGIGSLASGINLFTNSFEGPVLDHRYYAGGCSPHYILNTRFRKPYNVESYTPQTQGKYEFILKEYESYSDFERNVTEKMASKSGFSFGFKIPGIFELGISSQSDRGKHYIRRTKRFSHTKSVFLHARSDLEVAHYKLKPRSLMLHYEFLQRVKRLPLEYSYGEYRDLFRDFGTHYITEAVLGGIYEYTLVMNKEAMERGDYTLNNVHACAKNDFKIGGAIEEVYVSLGVSVGKCRGILNEIKDRNKRDTMVEDLVVLVRGGASEHITTLAYQELPTADLMQEWGDAVQYNPAIIKVKVEPLYELVTATDFAYSSTVRQNMKQALEEFQKEVSSCHCAPCQGNGVPVLKGSRCDCICPVGSQGLACEVSYRKNTPIDGKWNCWSNWSSCSGRRKTRQRQCNNPPPQNGGSPCSGPASETLDCS

SEQ ID NO: 8011 - RNA, 1776 nt, Artificial Sequence
  CO8B__Homo_sapiens__AAI30576
augaagaauuccaggacaugggcuuggagggcgccgguggagcuauuucuucucugugcugcccugggcugucucaguuugccuggcuccagaggugaaaggccacauuccuuugggucaaaugcagucaacaagagcuuugcuaagagcagacagaugcggaguguggauguuacccugaugcccauugauugugagcugucuaguugguccucuuggaccacaugugaccccugucagaagaaaagguacagguaugccuacuugcuccagcccucucaguuccauggggaaccgugcaacuucucugacaaggaagucgaagacuguguuaccaacagaccaugcagaagucaagugcgaugugaaggcuuugugugugcacagacaggaagguguguaaaccgcagacuucuuugcaauggggacaaugacuguggagaccagucagaugaagcaaacuguagaaggauuuauaaaaaaugucagcaugaaauggaccaauacuggggaauuggcagucuggccagugggauaaauuuguucacaaacaguuuugagggcccaguucuugaucacagguauuaugcagguggaugcuccccgcauuacauccugaacacgagguuuaggaagcccuacaauguggaaagcuacacgccacagacccaaggcaaauacgaauucauauuaaaagaguaugaaucauacucagauuuugaacgcaaugucacagagaaaauggcaagcaagucugguuucaguuuugguuuuaaaauaccuggaauauuugaacuuggcaucaguagucaaagugaucgaggcaaacacuauauuaggagaaccaaacgauucucucauacuaaaagcguauuucugcaugcacgcucugaccuugaaguagcacauuacaagcugaaacccagaagccucaugcuccauuacgaguuccuucagagaguuaagcggcugccccuggaguacagcuacggggaauacagagaucucuuccgugauuuugggacccacuacaucacagaggcugugcuugggggcauuuaugaauacacccucguuaugaacaaagaggccauggagagaggagauuauacucuuaacaacguccaugccugugccaaaaaugauuuuaaaauugguggugccauugaagaggucuacgucagucugggugugucuguaggcaaaugcagagguauucugaaugaaauaaaagacagaaacaagagggacaccaugguggaggacuuggugguccugguacgaggaggggcaagugagcacaucaccacccuggcauaccaggagcugccgacggcggaccugaugcaggaguggggagacgcugugcaguacaacccagccaucaucaaaguuaagguggagccucuguaugaacuagugacagccacagauuuugccuauuccagcacagugaggcagaacaugaagcaggcacuggaggaguuccagaaggaaguuaguuccugccacugugcucccugccaaggaaauggagucccuguccugaaaggaucacgcugugacugcaucuguccuguuggaucccaaggccuagccugugaggucuccuaucggaagaauacccccauugaugggaaguggaauugcuggucaaauuggucuucaugcucuggaagacguaagacaagacaaaggcaguguaacaauccaccuccucaaaauggggguagccccuguucaggcccugcuucagaaacacuugacugcuccuag

SEQ ID NO: 8012 - RNA, 1776 nt, Artificial Sequence
  derived and/or modified sequence opt1 from CO8B__Homo_sapiens__AAI30576
augaagaacagccgcaccugggccuggcgggcccccguggagcuguuccuccugugcgcggcccugggcugccucucccugcccgggagccgcggcgagcggccccacuccuucgggagcaacgccgucaacaaguccuucgccaagagccgccagaugcgguccguggacgugacccugaugcccaucgacugcgagcucagcuccuggagcuccuggacgaccugcgaccccugccagaagaagcgcuaccgguacgccuaccugcugcagccgagccaguuccacggcgagcccugcaacuucuccgacaaggaggucgaggacugcgugaccaaccgccccugccggagccaggugcgcugcgagggguucgucugcgcgcagaccggccggugcgugaaccgccggcuccugugcaacggcgacaacgacugcggggaccaguccgacgaggccaacugccgccggaucuacaagaagugccagcacgagauggaccaguacuggggcaucgggagccuggccuccggcaucaaccucuucacgaacagcuucgaggggcccgugcuggaccaccgcuacuacgccggcggcugcuccccgcacuacauccugaacacccgguuccgcaagcccuacaacgucgagagcuacacgccccagacccaggggaaguacgaguucauccucaaggaguacgagagcuacuccgacuucgagcggaacgugaccgagaagauggcgagcaaguccggcuucagcuucggguucaagauccccggcaucuucgagcugggcaucuccagccaguccgaccgcgggaagcacuacauccggcgcaccaagcgcuucagccacaccaaguccguguuccugcacgcccggagcgaccucgaggucgcccacuacaagcugaagccgcgcucccugaugcuccacuacgaguuccugcagcgggugaagcgccugccccucgaguacagcuacggcgaguaccgggaccuguuccgcgacuucgggacccacuacaucacggaggccgugcugggcgggaucuacgaguacacccucgucaugaacaaggaggccauggagcggggcgacuacacccugaacaacgugcacgcgugcgccaagaacgacuucaagaucggcggggccaucgaggagguguacgucucccugggcgugagcguggggaagugccgcggcauccucaacgagaucaaggaccggaacaagcgcgacaccauggucgaggaccugguggugcugguccgcgggggcgccuccgagcacaucacgacccucgccuaccaggagcugcccaccgcggaccugaugcaggaguggggcgacgccgugcaguacaaccccgccaucaucaaggucaagguggagccgcucuacgagcuggugaccgccacggacuucgccuacagcuccaccguccggcagaacaugaagcaggcgcuggaggaguuccagaaggaggugagcuccugccacugcgcccccugccaggggaacggcgugcccguccucaaggggagccggugcgacugcaucugccccgugggcagccaggggcuggccugcgagguguccuaccgcaagaacaccccgaucgacggcaaguggaacugcuggagcaacugguccagcugcuccggccggcgcaagacccggcagcgccagugcaacaacccgccgccccagaacgggggcagccccugcuccgggcccgccagcgagacgcuggacugcuccuga

SEQ ID NO: 8013 - RNA, 1776 nt, Artificial Sequence
  derived and/or modified sequence opt2 from CO8B__Homo_sapiens__AAI30576
augaagaacucccgcaccugggccuggcgcgcccccgucgagcucuuccuccucugcgccgcccucggcugccucucccuccccggcucccgcggcgagcgcccccacuccuucggcuccaacgccgucaacaaguccuucgccaagucccgccagaugcgcuccgucgacgucacccucaugcccaucgacugcgagcucuccuccugguccuccuggaccaccugcgaccccugccagaagaagcgcuaccgcuacgccuaccuccuccagcccucccaguuccacggcgagcccugcaacuucuccgacaaggaggucgaggacugcgucaccaaccgccccugccgcucccagguccgcugcgagggcuucgucugcgcccagaccggccgcugcgucaaccgccgccuccucugcaacggcgacaacgacugcggcgaccaguccgacgaggccaacugccgccgcaucuacaagaagugccagcacgagauggaccaguacuggggcaucggcucccucgccuccggcaucaaccucuucaccaacuccuucgagggccccguccucgaccaccgcuacuacgccggcggcugcuccccccacuacauccucaacacccgcuuccgcaagcccuacaacgucgaguccuacaccccccagacccagggcaaguacgaguucauccucaaggaguacgaguccuacuccgacuucgagcgcaacgucaccgagaagauggccuccaaguccggcuucuccuucggcuucaagauccccggcaucuucgagcucggcaucuccucccaguccgaccgcggcaagcacuacauccgccgcaccaagcgcuucucccacaccaaguccgucuuccuccacgcccgcuccgaccucgaggucgcccacuacaagcucaagccccgcucccucaugcuccacuacgaguuccuccagcgcgucaagcgccucccccucgaguacuccuacggcgaguaccgcgaccucuuccgcgacuucggcacccacuacaucaccgaggccguccucggcggcaucuacgaguacacccucgucaugaacaaggaggccauggagcgcggcgacuacacccucaacaacguccacgccugcgccaagaacgacuucaagaucggcggcgccaucgaggaggucuacgucucccucggcgucuccgucggcaagugccgcggcauccucaacgagaucaaggaccgcaacaagcgcgacaccauggucgaggaccucgucguccucguccgcggcggcgccuccgagcacaucaccacccucgccuaccaggagcuccccaccgccgaccucaugcaggaguggggcgacgccguccaguacaaccccgccaucaucaaggucaaggucgagccccucuacgagcucgucaccgccaccgacuucgccuacuccuccaccguccgccagaacaugaagcaggcccucgaggaguuccagaaggaggucuccuccugccacugcgcccccugccagggcaacggcguccccguccucaagggcucccgcugcgacugcaucugccccgucggcucccagggccucgccugcgaggucuccuaccgcaagaacacccccaucgacggcaaguggaacugcugguccaacugguccuccugcuccggccgccgcaagacccgccagcgccagugcaacaacccccccccccagaacggcggcucccccugcuccggccccgccuccgagacccucgacugcuccuga

SEQ ID NO: 8014 - RNA, 1776 nt, Artificial Sequence
  derived and/or modified sequence opt3 from CO8B__Homo_sapiens__AAI30576
augaagaacagcagaaccugggccuggagggcucccguggagcuguuccuccuuugcgcagcccugggcuguuuguccuuaccugggucucggggagaacgcccacacucauuugguaguaaugcggucaacaagagcuucgcuaaaucccgacagaugcguucuguugacgugacacugaugccgaucgauugcgagcuaucgucauggagcaguuggacuacgugugaccccugccagaaaaagagauacagguaugccuaccuccugcaaccuucccaguuucauggcgaaccauguaauuucucugauaaagagguagaagacugcgugaccaaccggcccugucgcagccaggucagaugcgagggguuugugugugcacaaacaggaaggugcguuaaucggcgccuucuguguaacggcgauaaugacugcggugaucaguccgacgaggccaacugccgaagaauuuauaagaagugucagcacgaaauggaucaguacugggggauaggaucauuggcuaguggcaucaaucucuucacuaacagcuuugagggcccugugcuggaccauagguauuacgcagggggaugcucuccacacuauauucugaauacccgguuccguaaacccuacaacgucgaauccuacacaccucaaacccaggguaaguaugaguuuauccucaaagaguacgaaucauauagcgauuucgagcgcaaugugacugaaaagauggccaguaaaucuggcuuuuccuucggguuuaagauuccaggaaucuucgaguuaggcauaagcucgcagucugacagagguaagcauuacaucaggcggacaaaacgauucucccacaccaagucaguauuucugcacgcucgcagugaucuugaaguugcccauuauaaauugaagccgagaagccugaugcuacacuacgaguuccuccagagggugaaacggcugccccuugaguauuccuacggggaauaccgcgaccuguuuagagacuucggaacgcauuauauuacugaggcggucuugggcggcaucuacgaauauacccucgugaugaacaaggaggcaauggaacguggggauuacacacugaauaacgugcacgccugugcuaaaaacgacuuuaagauuggaggugccaucgaggaggucuauguuucuuuaggcgugagcguagggaagugcaggggaauacugaaugaaauuaaagaucggaacaagcgagacacuaugguggaggaucucgucgugcuuguuagaggcggugcaucagaacacaucaccacacuggcuuaccaagaguugccuaccgccgaccuaaugcaggaauggggcgaugcggugcaguauaauccagccauuaucaaagucaagguggagccccuguacgagcucguaacggcaacugacuucgcuuacaguuccacaguuaggcaaaacaugaaacaggcccuggaagaguuucagaaggaagugagcucuugucauugcgcuccuugucaggggaauggagucccagugcuuaagggcucacgcugcgauuguaucugccccgucgggagucaaggacuggccugugaggugagcuaucggaaaaacaccccgauugacgguaaguggaauugcugguccaacuggucuucgugcagcggcagaaggaaaacucgccagcgacaguguaauaacccucccccacagaaugggggauccccuugcucaggccccgcaagugagacauuggauuguucuuga

SEQ ID NO: 8015 - RNA, 1776 nt, Artificial Sequence
  derived and/or modified sequence opt4 from CO8B__Homo_sapiens__AAI30576
augaagaacagcagaaccugggccuggagagcccccguggagcuguuccugcugugcgccgcccugggcugccugagccugcccggcagcagaggcgagagaccccacagcuucggcagcaacgccgugaacaagagcuucgccaagagcagacagaugagaagcguggacgugacccugaugcccaucgacugcgagcugagcagcuggagcagcuggaccaccugcgaccccugccagaagaagagauacagauacgccuaccugcugcagcccagccaguuccacggcgagcccugcaacuucagcgacaaggagguggaggacugcgugaccaacagacccugcagaagccaggugagaugcgagggcuucgugugcgcccagaccggcagaugcgugaacagaagacugcugugcaacggcgacaacgacugcggcgaccagagcgacgaggccaacugcagaagaaucuacaagaagugccagcacgagauggaccaguacuggggcaucggcagccuggccagcggcaucaaccuguucaccaacagcuucgagggccccgugcuggaccacagauacuacgccggcggcugcagcccccacuacauccugaacaccagauucagaaagcccuacaacguggagagcuacaccccccagacccagggcaaguacgaguucauccugaaggaguacgagagcuacagcgacuucgagagaaacgugaccgagaagauggccagcaagagcggcuucagcuucggcuucaagauccccggcaucuucgagcugggcaucagcagccagagcgacagaggcaagcacuacaucagaagaaccaagagauucagccacaccaagagcguguuccugcacgccagaagcgaccuggagguggcccacuacaagcugaagcccagaagccugaugcugcacuacgaguuccugcagagagugaagagacugccccuggaguacagcuacggcgaguacagagaccuguucagagacuucggcacccacuacaucaccgaggccgugcugggcggcaucuacgaguacacccuggugaugaacaaggaggccauggagagaggcgacuacacccugaacaacgugcacgccugcgccaagaacgacuucaagaucggcggcgccaucgaggagguguacgugagccugggcgugagcgugggcaagugcagaggcauccugaacgagaucaaggacagaaacaagagagacaccaugguggaggaccugguggugcuggugagaggcggcgccagcgagcacaucaccacccuggccuaccaggagcugcccaccgccgaccugaugcaggaguggggcgacgccgugcaguacaaccccgccaucaucaaggugaagguggagccccuguacgagcuggugaccgccaccgacuucgccuacagcagcaccgugagacagaacaugaagcaggcccuggaggaguuccagaaggaggugagcagcugccacugcgcccccugccagggcaacggcgugcccgugcugaagggcagcagaugcgacugcaucugccccgugggcagccagggccuggccugcgaggugagcuacagaaagaacacccccaucgacggcaaguggaacugcuggagcaacuggagcagcugcagcggcagaagaaagaccagacagagacagugcaacaacccccccccccagaacggcggcagccccugcagcggccccgccagcgagacccuggacugcagcuga

SEQ ID NO: 8016 - RNA, 1776 nt, Artificial Sequence
  derived and/or modified sequence opt5 from CO8B__Homo_sapiens__AAI30576
augaagaacagcagaaccugggccuggcgggcucccguggagcuguuccuccugugcgccgcgcuuggcugucugucccucccugggucucgcggagaaagaccgcacagcuuuggcuccaaugcugucaacaaaucuuucgccaagagccggcagaugcgcuccguugacgugacacugaugcccaucgauugcgagcuuucuagcugguccagcuggacgaccugugacccuugccagaaaaagagauaccgguaugccuaccugcuccaacccucucaguuucauggggaaccuuguaauuucuccgauaaagagguggaagacugcgucacaaaccgccccuguagaagccaggugcggugcgagggauuuguuugugcucaaaccggccgcugcgugaauagacggcugcuguguaacggggauaaugacugcggagaucagucugacgaggccaacugccgcagaauuuauaagaagugucagcacgaaauggaucaguacuggggcaucggcucccucgcuagcgggauuaaucuguucacaaacucuuuugagggaccuguccuugaccaucgguauuacgccggcgggugcuccccgcacuauauccugaauacccgcuucagaaaacccuacaacguggaaagcuacacaccucaaacccagggaaaguaugaguuuauucucaaagaguacgaauccuauucugauuucgagcggaauguuacggaaaagauggcgagcaaauccggcuuuagcuucggguuuaagauccccggaaucuucgagcugggcauuucuucccagagcgacagaggcaagcauuacauccgccggaccaaaagauucucucacacaaagagcguguuucuucacgcccgcuccgaucuggaagucgcucauuauaaacucaagccucggucucugaugcugcacuacgaguuccuccagagagugaaacgccugccccuugaguauagcuacggggaauaccgggaccuguuuagagacuucggaacccauuauauuacagaggccgugcucggcgggaucuacgaauauacccuggucaugaacaaggaggcuauggaacgcggagauuacacgcuuaauaacguucacgccugugcgaaaaacgacuuuaagauuggcggggccaucgaggagguguaugugucccugggagucagcgugggcaagugccggggcauucucaaugaaaucaaagauagaaacaagcgcgacacaaugguugaggaucuggugguccuggugagagggggagcuucugaacacaucaccacacucgccuaccaagagcugccgaccgcugaccuuaugcaggaauggggcgaugccguucaguauaauccugccauuaucaaagugaaggucgagccccuguacgagcucgugaccgcuacagacuucgcguacuccagcacgguccggcaaaacaugaaacaggcccuggaagaguuucagaaggaagugucuuccugucauugcgcuccuugucaggggaauggaguucccgugcuuaagggcagccggugcgauuguauuugccccgucgggucccaaggccuggccugugaggugucuuaucgcaaaaacaccccuaucgacggaaaguggaauugcuggagcaacugguccucuugcagcggcagacggaaaacaagacagcgccaguguaauaacccgcccccucagaaugggggaucccccugcagcggcccugccucugagacccucgauuguuccuga

SEQ ID NO: 8017 - protein, 202 aa, Artificial Sequence
  CO8G__Homo_sapiens__P07360
MLPPGTATLLTLLLAAGSLGQKPQRPRRPASPISTIQPKANFDAQQFAGTWLLVAVGSACRFLQEQGHRAEATTLHVAPQGTAMAVSTFRKLDGICWQVRQLYGDTGVLGRFLLQARDARGAVHVVVAETDYQSFAVLYLERAGQLSVKLYARSLPVSDSVLSGFEQRVQEAHLTEDQIFYFPKYGFCEAADQFHVLDEVRR

SEQ ID NO: 8018 - RNA, 609 nt, Artificial Sequence
  CO8G__Homo_sapiens__CCDS7017.1
augcugcccccugggacugcgacccucuugacucugcuccuggcagcuggcucgcugggccagaagccucagaggccacgccggcccgcaucccccaucagcaccauccagcccaaggccaauuuugaugcucagcaguuugcagggaccuggcuccuuguggcugugggcuccgcuugccguuuccugcaggagcagggccaccgggccgaggccaccacacugcauguggcuccccagggcacagccauggcugucaguaccuuccgaaagcuggaugggaucugcuggcaggugcgccagcucuauggagacacagggguccucggccgcuuccugcuucaagcccgagacgcccgaggggcugugcacgugguugucgcugagaccgacuaccagaguuucgcuguccuguaccuggagcgggcggggcagcugucagugaagcucuacgcccgcucgcucccugugagcgacucgguccugaguggguuugagcagcggguccaggaggcccaccugacugaggaccagaucuucuacuuccccaaguacggcuucugcgaggcugcagaccaguuccacguccuggacgaagugaggagguga

SEQ ID NO: 8019 - RNA, 609 nt, Artificial Sequence
  derived and/or modified sequence opt1 from CO8G__Homo_sapiens__CCDS7017.1
augcugcccccgggcaccgccacccuccugacgcugcuccuggccgcggggagccugggccagaagccccagcgcccccggcgccccgccuccccgaucagcaccauccagcccaaggccaacuucgacgcccagcaguucgccgggaccuggcuccugguggcggucggcuccgccugccgguuccugcaggagcaggggcaccgcgccgaggccaccacgcuccacguggcgccccagggcaccgccauggccgugagcaccuuccggaagcuggacggcaucugcuggcagguccgccagcuguacggggacaccggcgugcucgggcgguuccugcugcaggcccgcgacgcccggggcgcggugcacgucgugguggccgagacggacuaccaguccuucgccguccucuaccuggagcgcgccgggcagcugagcgugaagcucuacgcccggucccugcccgugagcgacuccguccugagcggcuucgagcagcgcgugcaggaggcgcaccucaccgaggaccagaucuucuacuucccgaaguacggcuucugcgaggccgccgaccaguuccacgugcuggacgagguccggcgcuga

SEQ ID NO: 8020 - RNA, 609 nt, Artificial Sequence
  derived and/or modified sequence opt2 from CO8G__Homo_sapiens__CCDS7017.1
augcucccccccggcaccgccacccuccucacccuccuccucgccgccggcucccucggccagaagccccagcgcccccgccgccccgccucccccaucuccaccauccagcccaaggccaacuucgacgcccagcaguucgccggcaccuggcuccucgucgccgucggcuccgccugccgcuuccuccaggagcagggccaccgcgccgaggccaccacccuccacgucgccccccagggcaccgccauggccgucuccaccuuccgcaagcucgacggcaucugcuggcagguccgccagcucuacggcgacaccggcguccucggccgcuuccuccuccaggcccgcgacgcccgcggcgccguccacgucgucgucgccgagaccgacuaccaguccuucgccguccucuaccucgagcgcgccggccagcucuccgucaagcucuacgcccgcucccuccccgucuccgacuccguccucuccggcuucgagcagcgcguccaggaggcccaccucaccgaggaccagaucuucuacuuccccaaguacggcuucugcgaggccgccgaccaguuccacguccucgacgagguccgccgcuga

SEQ ID NO: 8021 - RNA, 609 nt, Artificial Sequence
  derived and/or modified sequence opt3 from CO8G__Homo_sapiens__CCDS7017.1
augcugcccccuggcaccgccacacuccuuacucuguuguuagcugcagggagccugggacagaagccacaaagaccgaggcggcccgccuccccuaucucuacgauucagccaaaagcgaacuucgacgcucagcaguuugccgguaccuggcuacucguggcagucggcucagccugccgcuuccugcaagagcaggggcaccgagcugaagcaacaacucuucauguugcuccccagggaaccgccauggccgugaguacauuucguaagcuggauggcauauguuggcagguaagacaauuguacggugacaccggggugcucggaagguuccugcugcaggcgcgggaugcacgcggcgccguccacgugguuguggcugagacugacuaucagagcuuugccguccucuacuuagaaagagcaggccagcuguccgugaaacuuuaugcuaggucuuugccuguaucggauucaguucugagcggguucgagcaacgggugcaggaagcccaucuaacagaggaccagaucuuuuacuucccaaaguauggauuuugcgaggcggccgaucaauuccacguccucgacgaagugcgccgauga

SEQ ID NO: 8022 - RNA, 609 nt, Artificial Sequence
  derived and/or modified sequence opt4 from CO8G__Homo_sapiens__CCDS7017.1
augcugccccccggcaccgccacccugcugacccugcugcuggccgccggcagccugggccagaagccccagagacccagaagacccgccagccccaucagcaccauccagcccaaggccaacuucgacgcccagcaguucgccggcaccuggcugcugguggccgugggcagcgccugcagauuccugcaggagcagggccacagagccgaggccaccacccugcacguggccccccagggcaccgccauggccgugagcaccuucagaaagcuggacggcaucugcuggcaggugagacagcuguacggcgacaccggcgugcugggcagauuccugcugcaggccagagacgccagaggcgccgugcacguggugguggccgagaccgacuaccagagcuucgccgugcuguaccuggagagagccggccagcugagcgugaagcuguacgccagaagccugcccgugagcgacagcgugcugagcggcuucgagcagagagugcaggaggcccaccugaccgaggaccagaucuucuacuuccccaaguacggcuucugcgaggccgccgaccaguuccacgugcuggacgaggugagaagauga

SEQ ID NO: 8023 - RNA, 609 nt, Artificial Sequence
  derived and/or modified sequence opt5 from CO8G__Homo_sapiens__CCDS7017.1
augcugcccccuggcaccgccacacuccugacgcuucugcucgcugccgggagccugggacagaagccgcaaagaccccggcgcccugcgucccccauuucuaccauucagccuaaagcuaacuucgacgcccagcaguuugccggcacauggcuucugguggcugucgggagcgccugcagauuccuccaagagcagggacaccgggcugaagccaccacacugcauguugcgccccagggcaccgccauggcuguguccacauuucgcaagcuggaugggaucuguuggcaagugagacagcucuacggagacaccggcguccugggccgguuccuucugcaggcccgcgaugcuagaggggccgugcacguuguggucgcggagacggacuaucagucuuuugccgugcucuaccuggaacgggcuggacagcuuagcguuaaacuguaugcccgcucccucccugugucugauagcguccuguccggcuucgagcaaagagugcaggaagcucaucugaccgaggaccagaucuuuuacuucccgaaguauggguuuugcgaggccgccgaucaauuccacgugcucgacgaaguccggcgcuga

SEQ ID NO: 8024 - protein, 500 aa, Artificial Sequence
  complement_system_component_C1INH__Homo_sapiens__P05155
MASRLTLLTLLLLLLAGDRASSNPNATSSSSQDPESLQDRGEGKVATTVISKMLFVEPILEVSSLPTTNSTTNSATKITANTTDEPTTQPTTEPTTQPTIQPTQPTTQLPTDSPTQPTTGSFCPGPVTLCSDLESHSTEAVLGDALVDFSLKLYHAFSAMKKVETNMAFSPFSIASLLTQVLLGAGENTKTNLESILSYPKDFTCVHQALKGFTTKGVTSVSQIFHSPDLAIRDTFVNASRTLYSSSPRVLSNNSDANLELINTWVAKNTNNKISRLLDSLPSDTRLVLLNAIYLSAKWKTTFDPKKTRMEPFHFKNSVIKVPMMNSKKYPVAHFIDQTLKAKVGQLQLSHNLSLVILVPQNLKHRLEDMEQALSPSVFKAIMEKLEMSKFQPTLLTLPRIKVTTSQDMLSIMEKLEFFDFSYDLNLCGLTEDPDLQVSAMQHQTVLELTETGVEAAAASAISVARTLLVFEVQQPFLFVLWDQQHKFPVFMGRVYDPRA

SEQ ID NO: 8025 - RNA, 1503 nt, Artificial Sequence
  complement_system_component_C1INH__Homo_sapiens__AAM21515
auggccuccaggcugacccugcugacccuccugcugcugcugcuggcuggggauagagccuccucaaauccaaaugcuaccagcuccagcucccaggauccagagaguuugcaagacagaggcgaagggaaggucgcaacaacaguuaucuccaagaugcuauucguugaacccauccuggagguuuccagcuugccgacaaccaacucaacaaccaauucagccaccaaaauaacagcuaauaccacugaugaacccaccacacaacccaccacagagcccaccacccaacccaccauccaacccacccaaccaacuacccagcucccaacagauucuccuacccagcccacuacuggguccuucugcccaggaccuguuacucucugcucugacuuggagagucauucaacagaggccguguugggggaugcuuugguagauuucucccugaagcucuaccacgccuucucagcaaugaagaagguggagaccaacauggccuuuuccccauucagcaucgccagccuccuuacccagguccugcucggggcuggggagaacaccaaaacaaaccuggagagcauccucucuuaccccaaggacuucaccuguguccaccaggcccugaagggcuucacgaccaaaggugucaccucagucucucagaucuuccacagcccagaccuggccauaagggacaccuuugugaaugccucucggacccuguacagcagcagccccagaguccuaagcaacaacagugacgccaacuuggagcucaucaacaccuggguggccaagaacaccaacaacaagaucagccggcugcuagacagucugcccuccgauacccgccuuguccuccucaaugcuaucuaccugagugccaaguggaagacaacauuugaucccaagaaaaccagaauggaacccuuucacuucaaaaacucaguuauaaaagugcccaugaugaauagcaagaaguacccuguggcccauuucauugaccaaacuuugaaagccaagguggggcagcugcagcucucccacaaucugaguuuggugauccugguaccccagaaccugaaacaucgucuugaagacauggaacaggcucucagcccuucuguuuucaaggccaucauggagaaacuggagauguccaaguuccagcccacucuccuaacacuaccccgcaucaaagugacgaccagccaggauaugcucucaaucauggagaaauuggaauucuucgauuuuucuuaugaccuuaaccugugugggcugacagaggacccagaucuucagguuucugcgaugcagcaccagacagugcuggaacugacagagacugggguggaggcggcugcagccuccgccaucucuguggcccgcacccugcuggucuuugaagugcagcagcccuuccucuucgugcucugggaccagcagcacaaguucccugucuucauggggcgaguauaugaccccagggccuga

SEQ ID NO: 8026 - RNA, 1503 nt, Artificial Sequence
  derived and/or modified sequence opt1 from complement_system_component_C1INH__Homo_sapiens__AAM21515
auggccagccgccugacccuccugacccugcuccugcugcuccuggccggcgaccgggcguccagcaaccccaacgccacguccagcuccagccaggacccggagucccugcaggaccgcggggagggcaagguggccaccaccgucaucagcaagaugcuguucguggagcccauccuggagguguccagccugcccaccacgaacuccaccaccaacagcgccaccaagaucacggccaacaccaccgacgagcccaccacgcagccgaccaccgagcccaccacgcagcccaccauccagcccacccagccgaccacgcagcuccccaccgacucccccacccagcccaccacggggagcuucugcccgggccccgucacccugugcuccgaccuggagagccacuccaccgaggcggugcucggggacgcccugguggacuucagccugaagcucuaccacgccuucuccgccaugaagaaggucgagaccaacauggcguucagccccuucagcaucgccucccugcugacccaggugcuccugggcgccggcgagaacaccaagaccaaccuggagagcauccucuccuaccccaaggacuucacgugcgugcaccaggcccugaagggguucacgaccaagggcgucaccagcgugucccagaucuuccacagcccggaccuggccauccgggacaccuucgugaacgcgucccgcacgcucuacagcuccagcccccggguccuguccaacaacagcgacgccaaccuggagcucaucaacaccuggguggccaagaacaccaacaacaagaucucccgccugcuggacagccuccccuccgacacccggcuggugcugcucaacgccaucuaccugagcgccaaguggaagaccacguucgaccccaagaagacccgcauggagccguuccacuucaagaacuccgucaucaaggugcccaugaugaacagcaagaaguaccccguggcgcacuucaucgaccagacccugaaggccaaggucgggcagcuccagcugucccacaaccugagccucgugauccuggugccccagaaccugaagcaccggcucgaggacauggagcaggcccugagcccguccgucuucaaggccaucauggagaagcuggagaugagcaaguuccagcccacccuccugacgcugccccgcaucaaggugaccaccucccaggacaugcugagcaucauggagaagcucgaguucuucgacuucuccuacgaccugaaccugugcggccucaccgaggaccccgaccuccaggugagcgccaugcagcaccagacgguccuggagcucaccgagaccgggguggaggcggccgccgccuccgccaucagcgucgcgcggacccugcugguguucgaggugcagcagccguuccucuucguccugugggaccagcagcacaaguuccccguguucaugggccgcguguacgacccccgggccuga

SEQ ID NO: 8027 - RNA, 1503 nt, Artificial Sequence
  derived and/or modified sequence opt2 from complement_system_component_C1INH__Homo_sapiens__AAM21515
auggccucccgccucacccuccucacccuccuccuccuccuccucgccggcgaccgcgccuccuccaaccccaacgccaccuccuccuccucccaggaccccgagucccuccaggaccgcggcgagggcaaggucgccaccaccgucaucuccaagaugcucuucgucgagcccauccucgaggucuccucccuccccaccaccaacuccaccaccaacuccgccaccaagaucaccgccaacaccaccgacgagcccaccacccagcccaccaccgagcccaccacccagcccaccauccagcccacccagcccaccacccagcuccccaccgacucccccacccagcccaccaccggcuccuucugccccggccccgucacccucugcuccgaccucgagucccacuccaccgaggccguccucggcgacgcccucgucgacuucucccucaagcucuaccacgccuucuccgccaugaagaaggucgagaccaacauggccuucucccccuucuccaucgccucccuccucacccagguccuccucggcgccggcgagaacaccaagaccaaccucgaguccauccucuccuaccccaaggacuucaccugcguccaccaggcccucaagggcuucaccaccaagggcgucaccuccgucucccagaucuuccacucccccgaccucgccauccgcgacaccuucgucaacgccucccgcacccucuacuccuccuccccccgcguccucuccaacaacuccgacgccaaccucgagcucaucaacaccugggucgccaagaacaccaacaacaagaucucccgccuccucgacucccuccccuccgacacccgccucguccuccucaacgccaucuaccucuccgccaaguggaagaccaccuucgaccccaagaagacccgcauggagcccuuccacuucaagaacuccgucaucaagguccccaugaugaacuccaagaaguaccccgucgcccacuucaucgaccagacccucaaggccaaggucggccagcuccagcucucccacaaccucucccucgucauccucgucccccagaaccucaagcaccgccucgaggacauggagcaggcccucucccccuccgucuucaaggccaucauggagaagcucgagauguccaaguuccagcccacccuccucacccucccccgcaucaaggucaccaccucccaggacaugcucuccaucauggagaagcucgaguucuucgacuucuccuacgaccucaaccucugcggccucaccgaggaccccgaccuccaggucuccgccaugcagcaccagaccguccucgagcucaccgagaccggcgucgaggccgccgccgccuccgccaucuccgucgcccgcacccuccucgucuucgagguccagcagcccuuccucuucguccucugggaccagcagcacaaguuccccgucuucaugggccgcgucuacgacccccgcgccuga

SEQ ID NO: 8028 - RNA, 1503 nt, Artificial Sequence
  derived and/or modified sequence opt3 from complement_system_component_C1INH__Homo_sapiens__AAM21515
auggccagcagacugacccuccuuacacuguuguuacugcuacucgcuggcgacagggcauccucuaaccccaaugccacuucaaguagcucccaggauccugagucucugcaagaccgcggggaaggaaagguggcgacgaccgucaucucgaaaaugcuuuucguugagccaauucuggaagugagcucauugccgacaacuaacaguaccacaaauuccgcuaccaagauaacugccaacacaaccgaugagcccacgacucagccuaccacagaaccaacuacccagcccacaauccagccuacccaaccaacgacucagcuccccacagacucuccuacccagccaacuacagguagcuuuugcccgggccccguaacccuguguuccgaucuggagucacacaguacggaggcagugcucggggacgccuuagucgauuucagccugaaacuuuaccaugcuuuuucugcaaugaagaaaguggaaaccaauauggccuucuccccuuuuucaauugcuagcuugcugacacagguucuacucggagccggcgagaacacuaagaccaaucuggaaaguauccuuucuuauccaaaggacuucacaugcgugcaccaagcgcugaaagguuuuacuaccaagggggucacauccgugagccagauuuuccauucgcccgauuuggcaauccgggacaccuuuguaaacgccucucgaacucucuacuccucaaguccucguguucugagcaauaacuccgaugcuaauuuagagcugauaaacacguggguggccaaaaauacaaacaauaagaucucuagacuccuugacagccugccaucagauaccagguugguccuacugaacgcaauuuaucucagugcuaaauggaagacuaccuucgaccccaagaaaacacggauggagccguuucacuucaagaacuccgugaucaaagugccuaugaugaauagcaagaaauaccccgucgcccauuuuauugaccagacccugaaggcgaaaguuggacagcuucaacugucucacaacuugucacucgugauccugguaccacagaauuuaaagcaccgccuggaagauauggagcaggcccuaaguccuagcguguucaaggcaauaauggaaaaacucgagauguccaaguuccaacccacucugcuuacauugccaagaauuaaagucacgaccucucaggacaugcugucgaucauggaaaagcucgaguuuuucgauuuuagcuaugaccugaaccuuuguggccugacugaggaucccgaccuccagguguccgcuaugcagcaucaaacaguuuuggaacugaccgagacaggcguggaagccgcugccgcaucagccauuagugucgcuaggacuuuacugguguucgagguacagcagccuuuucuauucguucucugggaucagcaacacaaauuuccaguguucauggggcgggucuacgacccgcgcgcguga

SEQ ID NO: 8029 - RNA, 1503 nt, Artificial Sequence
  derived and/or modified sequence opt4 from complement_system_component_C1INH__Homo_sapiens__AAM21515
auggccagcagacugacccugcugacccugcugcugcugcugcuggccggcgacagagccagcagcaaccccaacgccaccagcagcagcagccaggaccccgagagccugcaggacagaggcgagggcaagguggccaccaccgugaucagcaagaugcuguucguggagcccauccuggaggugagcagccugcccaccaccaacagcaccaccaacagcgccaccaagaucaccgccaacaccaccgacgagcccaccacccagcccaccaccgagcccaccacccagcccaccauccagcccacccagcccaccacccagcugcccaccgacagccccacccagcccaccaccggcagcuucugccccggccccgugacccugugcagcgaccuggagagccacagcaccgaggccgugcugggcgacgcccugguggacuucagccugaagcuguaccacgccuucagcgccaugaagaagguggagaccaacauggccuucagccccuucagcaucgccagccugcugacccaggugcugcugggcgccggcgagaacaccaagaccaaccuggagagcauccugagcuaccccaaggacuucaccugcgugcaccaggcccugaagggcuucaccaccaagggcgugaccagcgugagccagaucuuccacagccccgaccuggccaucagagacaccuucgugaacgccagcagaacccuguacagcagcagccccagagugcugagcaacaacagcgacgccaaccuggagcugaucaacaccuggguggccaagaacaccaacaacaagaucagcagacugcuggacagccugcccagcgacaccagacuggugcugcugaacgccaucuaccugagcgccaaguggaagaccaccuucgaccccaagaagaccagaauggagcccuuccacuucaagaacagcgugaucaaggugcccaugaugaacagcaagaaguaccccguggcccacuucaucgaccagacccugaaggccaaggugggccagcugcagcugagccacaaccugagccuggugauccuggugccccagaaccugaagcacagacuggaggacauggagcaggcccugagccccagcguguucaaggccaucauggagaagcuggagaugagcaaguuccagcccacccugcugacccugcccagaaucaaggugaccaccagccaggacaugcugagcaucauggagaagcuggaguucuucgacuucagcuacgaccugaaccugugcggccugaccgaggaccccgaccugcaggugagcgccaugcagcaccagaccgugcuggagcugaccgagaccggcguggaggccgccgccgccagcgccaucagcguggccagaacccugcugguguucgaggugcagcagcccuuccuguucgugcugugggaccagcagcacaaguuccccguguucaugggcagaguguacgaccccagagccuga

SEQ ID NO: 8030 - RNA, 1503 nt, Artificial Sequence
  derived and/or modified sequence opt5 from complement_system_component_C1INH__Homo_sapiens__AAM21515
auggccagcagacugacccuccugacacuucugcuccugcuucuggcuggcgaccgggccuccucuaaccccaaugcgacgagcuccucuagccaggauccugagucccuccaagaccgcggggaaggaaagguggcuaccacagucaucucuaaaaugcuguucguugagccgauucuggaagugagcucccuccccaccacaaacagcaccacaaauucugccaccaagaucacggccaacaccacagaugagccuaccacacagcccaccacggaaccuacaacccagcccacaauucagccuacccaaccgaccacacagcugcccacggacuccccuacccagcccacaaccggcagcuuuugcccugggcccgugacacuuuguucugaucuggagucccacagcaccgaggcuguccucggagacgcccugguggauuucucucuuaaacuguaccaugcuuuuuccgccaugaagaaaguugaaacgaauauggcguucagcccguuuuccaucgccucucuccugacacaggugcugcucggcgcuggggagaacaccaagaccaaucuggaaagcauucuuuccuauccuaaggacuucacaugcguccaccaagcccugaaaggauuuaccacaaagggcgugacgagcguuucucagaucuuccauucccccgaucucgcuaucagagacaccuuugugaacgccagccggacacuguacucuagcuccccucgcguccuuucuaauaacagcgaugcgaaucuggagcucauuaacaccuggguggccaaaaauacaaacaauaagaucuccagacugcuggacagccuccccucugauacccggcuggugcuucugaacgcuauuuaucucuccgccaaauggaagacgaccuucgaccccaagaaaacacgcauggagccuuuucacuucaagaacagcgucaucaaaguuccgaugaugaacucuaagaaauaccccguggcucauuuuauugaccagacccugaaggccaaagugggccagcuucaacugucccacaaucucagccuggucauccuggugccucagaaucucaagcacagacuggaagauauggagcaggcccuuucccccucuguuuucaaggcuauuauggaaaaacuggagaugagcaaguuccaaccuacacuccugacccugccccggaucaaagugacgacaucccaggacaugcuuucuaucauggaaaagcucgaguuuuucgauuuuagcuaugaccugaaccugugugggcucaccgaggauccggaccugcaggucuccgcgaugcagcaucaaacagugcuugaacugaccgagaccggaguugaagccgcugccgccagcgcuauuucuguggcccgcacacuccuggucuucgaggugcagcagccuuuucuguucguccuuugggaucagcaacacaaauuucccguguucaugggcagaguuuacgacccucgggcguga

SEQ ID NO: 8031 - protein, 652 aa, Artificial Sequence [sequence omitted]

SEQ ID NO: 8032 - RNA, 1959 nt, Artificial Sequence
  complement_system_component_C1qR__Homo_sapiens__CAC82720
auggccaccuccaugggccugcugcugcugcugcugcugcuccugacccagcccggggcggggacgggagcugacacggaggcgguggucugcguggggaccgccugcuacacggcccacucgggcaagcugagcgcugccgaggcccagaaccacugcaaccagaacgggggcaaccuggccacugugaagagcaaggaggaggcccagcacguccagcgaguacuggcccagcuccugaggcgggaggcagcccugacggcgaggaugagcaaguucuggauugggcuccagcgagagaagggcaagugccuggacccuagucugccgcugaagggcuucagcugggugggcgggggggaggacacgccuuacucuaacuggcacaaggagcuccggaacucgugcaucuccaagcgcugugugucucugcugcuggaccugucccagccgcuccuucccagccgccuccccaaguggucugagggccccugugggagcccaggcucccccggaaguaacauugagggcuucgugugcaaguucagcuucaaaggcaugugccggccucuggcccuggggggcccaggucaggugaccuacaccacccccuuccagaccaccaguuccuccuuggaggcugugcccuuugccucugcggccaauguagccuguggggaaggugacaaggacgagacucagagucauuauuuccugugcaaggagaaggcccccgauguguucgacuggggcagcucgggcccccucugugucagccccaaguauggcugcaacuucaacaaugggggcugccaccaggacugcuuugaagggggggauggcuccuuccucugcggcugccgaccaggauuccggcugcuggaugaccuggugaccugugccucucgaaacccuugcagcuccagcccaugucgugggggggccacgugcgcccugggaccccaugggaaaaacuacacgugccgcugcccccaaggguaccagcuggacucgagucagcuggacuguguggacguggaugaaugccaggacucccccugugcccaggagugugucaacaccccugggggcuuccgcugcgaaugcuggguuggcuaugagccgggcgguccuggagagggggccugucaggauguggaugagugugcucugggucgcucgccuugcgcccagggcugcaccaacacagauggcucauuucacugcuccugugaggagggcuacguccuggccggggaggacgggacucagugccaggacguggaugagugugugggcccggggggcccccucugcgacagcuugugcuucaacacacaaggguccuuccacuguggcugccugccaggcugggugcuggccccaaauggggucucuugcaccauggggccugugucucugggaccaccaucugggccccccgaugaggaggacaaaggagagaaagaagggagcaccgugccccgcgcugcaacagccagucccacaaggggccccgagggcacccccaaggcuacacccaccacaaguagaccuucgcugucaucugacgcccccaucacaucugccccacucaagaugcuggcccccaguggguccucaggcgucuggagggagcccagcauccaucacgccacagcugccucuggcccccaggagccugcagguggggacuccuccguggccacacaaaacaacgauggcacugacgggcaaaagcugcuuuuauucuacauccuaggcaccgugguggccauccuacuccugcuggcccuggcucuggggcuacuggucuaucgcaagcggagagcgaagagggaggagaagaaggagaagaagccccagaaugcggcagacaguuacuccuggguuccagagcgagcugagagcagggccauggagaaccaguacaguccgacaccugggacagacugcuga

SEQ ID NO: 8033 - RNA, 1959 nt, Artificial Sequence
  derived and/or modified sequence opt1 from complement_system_component_C1qR__Homo_sapiens__CAC82720
auggccaccagcaugggccugcuccugcugcuccugcugcuccugacccagcccggggccggcacgggggcggacaccgaggccguggucugcgugggcaccgccugcuacaccgcccacuccgggaagcugagcgccgcggaggcccagaaccacugcaaccagaacggcggcaaccucgccacggugaaguccaaggaggaggcccagcacguccagcgcgugcuggcgcagcugcuccggcgcgaggccgcccugaccgcccggaugagcaaguucuggaucgggcugcagcgcgagaagggcaagugccucgacccgucccugccccugaagggguucagcugggugggcgggggcgaggacacccccuacuccaacuggcacaaggagcuccggaacagcugcaucuccaagcgcugcgucagccugcugcucgaccugucccagccccugcucccgagccggcugcccaagugguccgagggccccugcgggagccccggcuccccggggagcaacaucgagggcuucgugugcaaguucuccuucaagggcaugugccgcccccuggcccucgggggccccggccaggugaccuacacgacccccuuccagaccaccagcuccagccuggaggcggucccguucgccagcgccgccaacguggccugcggggagggggacaaggacgagacgcagucccacuacuuccugugcaaggagaaggcgcccgacguguucgacuggggcagcuccggcccccucugcgucagccccaaguacgggugcaacuucaacaacggcgggugccaccaggacugcuucgagggcggggacggcuccuuccugugcggcugccggccgggguuccgccugcucgacgaccuggugaccugcgccagccggaaccccugcuccagcucccccugccgcggcggggcgaccugcgcccugggcccccacgggaagaacuacacgugccggugcccgcagggcuaccagcucgacagcucccagcuggacugcguggacgucgacgagugccaggacagccccugcgcccaggagugcgugaacacccccggcggguuccgcugcgagugcugggugggcuacgagcccgggggcccgggcgagggggccugccaggacgucgacgagugcgcccugggccggucccccugcgcccaggggugcaccaacaccgacggcagcuuccacugcuccugcgaggagggguacgugcucgccggcgaggacggcacccagugccaggacguggacgagugcgucgggcccggcgggccccugugcgacagccugugcuucaacacgcagggcuccuuccacugcgggugccucccgggcugggugcuggcccccaacggcgugagcugcaccauggggcccgucucccugggcccgcccagcgggccgcccgacgaggaggacaagggcgagaaggaggggagcaccgugccccgcgcggccaccgccucccccacgcggggccccgagggcacccccaaggccaccccgaccacgagccgccccucccucagcuccgacgcgcccaucaccagcgcgccccugaagaugcuggccccguccgggagcuccggcgucuggcgggagcccagcauccaccacgccaccgccgccuccgggccccaggagcccgccggcggggacagcuccguggccacccagaacaacgacggcacggacggccagaagcuccugcuguucuacauccuggggaccguggucgccauccuccugcugcucgcccuggcgcugggccuccugguguaccgcaagcggcgcgccaagcgcgaggagaagaaggagaagaagccgcagaacgccgccgacagcuacuccugggugcccgagcgggccgagagccgcgcgauggagaaccaguacucccccacccccgggaccgacugcuga

SEQ ID NO: 8034 - RNA, 1959 nt, Artificial Sequence
  derived and/or modified sequence opt2 from complement_system_component_C1qR__Homo_sapiens__CAC82720
auggccaccuccaugggccuccuccuccuccuccuccuccuccucacccagcccggcgccggcaccggcgccgacaccgaggccgucgucugcgucggcaccgccugcuacaccgcccacuccggcaagcucuccgccgccgaggcccagaaccacugcaaccagaacggcggcaaccucgccaccgucaaguccaaggaggaggcccagcacguccagcgcguccucgcccagcuccuccgccgcgaggccgcccucaccgcccgcauguccaaguucuggaucggccuccagcgcgagaagggcaagugccucgaccccucccucccccucaagggcuucuccugggucggcggcggcgaggacacccccuacuccaacuggcacaaggagcuccgcaacuccugcaucuccaagcgcugcgucucccuccuccucgaccucucccagccccuccuccccucccgccuccccaagugguccgagggccccugcggcucccccggcucccccggcuccaacaucgagggcuucgucugcaaguucuccuucaagggcaugugccgcccccucgcccucggcggccccggccaggucaccuacaccacccccuuccagaccaccuccuccucccucgaggccguccccuucgccuccgccgccaacgucgccugcggcgagggcgacaaggacgagacccagucccacuacuuccucugcaaggagaaggcccccgacgucuucgacuggggcuccuccggcccccucugcgucucccccaaguacggcugcaacuucaacaacggcggcugccaccaggacugcuucgagggcggcgacggcuccuuccucugcggcugccgccccggcuuccgccuccucgacgaccucgucaccugcgccucccgcaaccccugcuccuccucccccugccgcggcggcgccaccugcgcccucggcccccacggcaagaacuacaccugccgcugcccccagggcuaccagcucgacuccucccagcucgacugcgucgacgucgacgagugccaggacucccccugcgcccaggagugcgucaacacccccggcggcuuccgcugcgagugcugggucggcuacgagcccggcggccccggcgagggcgccugccaggacgucgacgagugcgcccucggccgcucccccugcgcccagggcugcaccaacaccgacggcuccuuccacugcuccugcgaggagggcuacguccucgccggcgaggacggcacccagugccaggacgucgacgagugcgucggccccggcggcccccucugcgacucccucugcuucaacacccagggcuccuuccacugcggcugccuccccggcuggguccucgcccccaacggcgucuccugcaccaugggccccgucucccucggcccccccuccggcccccccgacgaggaggacaagggcgagaaggagggcuccaccgucccccgcgccgccaccgccucccccacccgcggccccgagggcacccccaaggccacccccaccaccucccgccccucccucuccuccgacgcccccaucaccuccgccccccucaagaugcucgcccccuccggcuccuccggcgucuggcgcgagcccuccauccaccacgccaccgccgccuccggcccccaggagcccgccggcggcgacuccuccgucgccacccagaacaacgacggcaccgacggccagaagcuccuccucuucuacauccucggcaccgucgucgccauccuccuccuccucgcccucgcccucggccuccucgucuaccgcaagcgccgcgccaagcgcgaggagaagaaggagaagaagccccagaacgccgccgacuccuacuccuggguccccgagcgcgccgagucccgcgccauggagaaccaguacucccccacccccggcaccgacugcuga

SEQ ID NO: 8035 - RNA, 1959 nt, Artificial Sequence
  derived and/or modified sequence opt3 from complement_system_component_C1qR__Homo_sapiens__CAC82720
auggccaccagcaugggccugcuccuucuguuguuacugcuacucacacagcccggggcuggaacuggugcagacacggaggccguggucugcguuggcaccgcguguuacacagcucacuccgggaagcugucugccgcagaagcccaaaaccauugcaaucagaacggaggcaaucuugcuacugugaaaucaaaggaggaagcacagcacguacagagagugcuggcccaauugcucaggcgggaggcugcccugaccgcgcgcaugaguaaauucuggaucggucugcagcgagaaaaggggaaaugucucgauccuagcuuaccacugaagggauuuuccugggucggcggcggggaggacacaccguauucuaacuggcauaaggagcuucguaauucgugcauuucaaaaagaugugugagcuugcugcuagaucucagucagccccugcuuccuuccaggcugccaaaguggucugaaggacccugcgguagcccuggcuccccagggucaaacauagagggauucguuuguaaauuuaguuucaagggcaugugccggcccuuggcacucggugggccuggacaggugaccuacacuacaccauuucaaaccacgucuagcucccuggaagccgucccguucgcuucagccgcaaauguggcuuguggcgagggcgacaaagaugagacucagagccacuacuuuuuaugcaaggaaaaggcccccgacguauucgauugggggaguucuggaccucuguguguuuccccaaaauaugguugcaacuuuaauaacggcgggugccaucaggacuguuucgagggaggcgaugguagcuuucucugcgggugucgccccggcuucagacuucuggacgauuuggugaccugcgcgucgaggaauccuuguucuuccucaccaugccggggaggcgccacaugugcacuagggccccacggaaagaacuauacuugccgcuguccgcaggguuaccaacuggacaguagccagcucgauugcgucgacguggacgaaugucaggauuccccuugcgcucaagagugcgugaauacccccggcggguuucgaugugaaugcugggucggauaugagccaggcgguccuggggagggcgccugucaggacguugaugaaugcgcucugggaagaucucccugugcccagggcugcacaaacaccgacgggagcuuccacuguucaugcgaggaaggauacgugcuugccggugaggauggcacgcagugucaagacguagaugaaugcguggggccaggaggcccccugugugacaguuugugcuucaauacucaggguuccuuucauugcgggugucucccuggcuggguccuggcaccaaacggagugagcugcacaaugggcccgguuucuuuagggcccccuucaggaccacccgaugaggaggacaaaggcgaaaaggaggguaguaccgugccuagggcugcgacugcaagcccaacacgggggcccgaaggaaccccgaaagccacgccuaccacaucccguccaucucugucgagcgaugcucccaucacuuccgccccucuaaagaugcucgcacccucaggcaguucuggugucuggcgcgagccaagcauucaccaugccaccgcugccuccggcccucaggaacccgcagggggagacucaagcguggcgacacagaacaaugacggcacugaugggcaaaaacugcuuuuguucuacauccugggaaccguaguugcuauucuccugcuucuggccuuggcacucggccuguuaguguauagaaagaggcgggccaagcgagaggagaaaaaggagaaaaagccacagaacgcugccgacucuuacuccugggucccggaacgcgcagaaaguagagcuauggagaaucaguauagcccuacacccgguaccgauuguuga

SEQ ID NO: 8036 - RNA, 1959 nt, Artificial Sequence
  derived and/or modified sequence opt4 from complement_system_component_C1qR__Homo_sapiens__CAC82720
auggccaccagcaugggccugcugcugcugcugcugcugcugcugacccagcccggcgccggcaccggcgccgacaccgaggccguggugugcgugggcaccgccugcuacaccgcccacagcggcaagcugagcgccgccgaggcccagaaccacugcaaccagaacggcggcaaccuggccaccgugaagagcaaggaggaggcccagcacgugcagagagugcuggcccagcugcugagaagagaggccgcccugaccgccagaaugagcaaguucuggaucggccugcagagagagaagggcaagugccuggaccccagccugccccugaagggcuucagcugggugggcggcggcgaggacacccccuacagcaacuggcacaaggagcugagaaacagcugcaucagcaagagaugcgugagccugcugcuggaccugagccagccccugcugcccagcagacugcccaaguggagcgagggccccugcggcagccccggcagccccggcagcaacaucgagggcuucgugugcaaguucagcuucaagggcaugugcagaccccuggcccugggcggccccggccaggugaccuacaccacccccuuccagaccaccagcagcagccuggaggccgugcccuucgccagcgccgccaacguggccugcggcgagggcgacaaggacgagacccagagccacuacuuccugugcaaggagaaggcccccgacguguucgacuggggcagcagcggcccccugugcgugagccccaaguacggcugcaacuucaacaacggcggcugccaccaggacugcuucgagggcggcgacggcagcuuccugugcggcugcagacccggcuucagacugcuggacgaccuggugaccugcgccagcagaaaccccugcagcagcagccccugcagaggcggcgccaccugcgcccugggcccccacggcaagaacuacaccugcagaugcccccagggcuaccagcuggacagcagccagcuggacugcguggacguggacgagugccaggacagccccugcgcccaggagugcgugaacacccccggcggcuucagaugcgagugcugggugggcuacgagcccggcggccccggcgagggcgccugccaggacguggacgagugcgcccugggcagaagccccugcgcccagggcugcaccaacaccgacggcagcuuccacugcagcugcgaggagggcuacgugcuggccggcgaggacggcacccagugccaggacguggacgagugcgugggccccggcggcccccugugcgacagccugugcuucaacacccagggcagcuuccacugcggcugccugcccggcugggugcuggcccccaacggcgugagcugcaccaugggccccgugagccugggcccccccagcggcccccccgacgaggaggacaagggcgagaaggagggcagcaccgugcccagagccgccaccgccagccccaccagaggccccgagggcacccccaaggccacccccaccaccagcagacccagccugagcagcgacgcccccaucaccagcgccccccugaagaugcuggcccccagcggcagcagcggcguguggagagagcccagcauccaccacgccaccgccgccagcggcccccaggagcccgccggcggcgacagcagcguggccacccagaacaacgacggcaccgacggccagaagcugcugcuguucuacauccugggcaccgugguggccauccugcugcugcuggcccuggcccugggccugcugguguacagaaagagaagagccaagagagaggagaagaaggagaagaagccccagaacgccgccgacagcuacagcugggugcccgagagagccgagagcagagccauggagaaccaguacagccccacccccggcaccgacugcuga

SEQ ID NO: 8037 - RNA, 1959 nt, Artificial Sequence
  derived and/or modified sequence opt5 from complement_system_component_C1qR__Homo_sapiens__CAC82720
auggccaccagcaugggccugcuccugcuucugcuccugcuucugacacagcccggggcuggaacgggcgccgacaccgaggcgguggucugcguugggacagcuuguuacaccgcccacuccggaaagcucucugccgcugaagcccaaaaccauugcaaucagaacggcgggaaucuggcuacagugaaaagcaaggaggaagcccagcacgugcagagaguccuggcgcaacuccugcggcgcgaggccgcucuuaccgccagaauguccaaauucuggaucggacugcagcgggaaaagggcaaaugucucgauccuucucugccgcuuaagggcuuuagcugggugggaggaggcgaggacacacccuauuccaacuggcauaaggagcugcgcaauucuugcauuagcaaaagauguguuucccuccugcuggaucucagccagccucugcuucccucucggcugccuaagugguccgaagggcccugcggaagcccuggcucuccgggguccaacaucgagggauucguguguaaauuuagcuucaagggcaugugccgcccccucgcucugggcgggccuggacaggucaccuacacgacccccuuucaaacaaccucuuccagccuugaagccgugccuuucgcguccgccgcuaauguugccuguggcgagggggacaaagaugagacacagucucacuauuuucugugcaaggaaaaggcucccgacguguucgauuggggaagcuccggcccgcucugugucagcccuaaauacgggugcaacuuuaauaacggaggcugccaucaggacuguuucgagggcggggauggaucuuuucugugcggcuguagacccggguuccggcugcucgacgaucuggugaccugcgccucccgcaauccuuguagcucuagccccugcagaggaggcgccacgugugcucuugggccccacggcaagaacuauacaugccgguguccucagggauaccaacuggacuccucucagcucgauugcguggacgucgacgaaugucaggauagcccgugcgcgcaagagugcguuaauacccccggcggguuucgcugugaaugcugggugggauaugagccuggcgggcccggagagggcgccugucaggacguggaugaaugcgcucuggggagauccccuugugcccagggcugcacaaacaccgacgggagcuuccacuguucuugcgaggaaggcuacguccuugccggggaggauggaacccagugucaagacguggaugaaugcguuggccccgggggaccgcugugugacucccucugcuucaauacacagggcagcuuucauugcgggugucugccuggcugggugcuggcucccaacggagucucuugcacgaugggcccugugucccucgggcccccuagcggacccccggaugaggaggacaaaggcgaaaaggagggguccaccguuccucgggccgcgacagcuucucccacccgcggacccgaaggcacaccuaaagccaccccgacgacaagcagacccucccugucuagcgaugccccuauuaccuccgcuccccuuaagaugcuggccccuagcgggucuuccggcguguggcgggagcccagcauccaccaugcuaccgccgcgucuggaccucaggaacccgccggcggggacuccagcgucgcuacacagaacaaugacggaaccgauggccaaaaacuccugcuguucuacauucuugggacaguggucgccauccuccugcugcucgcucuggcccuuggacugcucguguauagaaagcgccgggcgaagagagaggagaaaaaggagaaaaagccgcagaacgccgcugacucuuacagcuggguuccugaacgcgccgaaucccgggcuauggagaaucaguauagccccacgccuggcaccgauuguuga

SEQ ID NO: 8038 - protein, 688 aa, Artificial Sequence
  complement_system_component_C1s__Homo_sapiens__P09871
MWCIVLFSLLAWVYAEPTMYGEILSPNYPQAYPSEVEKSWDIEVPEGYGIHLYFTHLDIELSENCAYDSVQIISGDTEEGRLCGQRSSNNPHSPIVEEFQVPYNKLQVIFKSDFSNEERFTGFAAYYVATDINECTDFVDVPCSHFCNNFIGGYFCSCPPEYFLHDDMKNCGVNCSGDVFTALIGEIASPNYPKPYPENSRCEYQIRLEKGFQVVVTLRREDFDVEAADSAGNCLDSLVFVAGDRQFGPYCGHGFPGPLNIETKSNALDIIFQTDLTGQKKGWKLRYHGDPMPCPKEDTPNSVWEPAKAKYVFRDVVQITCLDGFEVVEGRVGATSFYSTCQSNGKWSNSKLKCQPVDCGIPESIENGKVEDPESTLFGSVIRYTCEEPYYYMENGGGGEYHCAGNGSWVNEVLGPELPKCVPVCGVPREPFEEKQRIIGGSDADIKNFPWQVFFDNPWAGGALINEYWVLTAAHVVEGNREPTMYVGSTSVQTSRLAKSKMLTPEHVFIHPGWKLLEVPEGRTNFDNDIALVRLKDPVKMGPTVSPICLPGTSSDYNLMDGDLGLISGWGRTEKRDRAVRLKAARLPVAPLRKCKEVKVEKPTADAEAYVFTPNMICAGGEKGMDSCKGDSGGAFAVQDPNDKTKFYAAGLVSWGPQCGTYGLYTRVKNYVDWIMKTMQENSTPRED

SEQ ID NO: 8039 - RNA, 2067 nt, Artificial Sequence
  complement_system_component_C1s__Homo_sapiens__AAA51852
auguggugcauuguccuguuuucacuuuuggcauggguuuaugcugagccuaccauguauggggagauccuguccccuaacuauccucaggcauaucccagugagguagagaaaucuugggacauagaaguuccugaaggguaugggauucaccucuacuucacccaucuggacauugagcugucagagaacugugcguaugacucagugcagauaaucucaggagacacugaagaagggaggcucuguggacagaggagcaguaacaauccccacucuccaauuguggaagaguuccaagucccauacaacaaacuccaggugaucuuuaagucagacuuuuccaaugaagagcguuuuacgggguuugcugcauacuauguugccacagacauaaaugaaugcacagauuuuguagaugucccuuguagccacuucugcaacaauuucauuggugguuacuucugcuccugccccccggaauauuuccuccaugaugacaugaagaauugcggaguuaauugcaguggggauguauucacugcacugauuggggagauugcaagucccaauuaucccaaaccauauccagagaacucaaggugugaauaccagauccgguuggagaaaggguuccaagugguggugaccuugcggagagaagauuuugauguggaagcagcugacucagcgggaaacugccuugacaguuuaguuuuuguugcaggagaucggcaauuugguccuuacuguggucauggauucccugggccucuaaauauugaaaccaagaguaaugcucuugauaucaucuuccaaacugaucuaacagggcaaaaaaagggcuggaaacuucgcuaucauggagauccaaugcccugcccuaaggaagacacucccaauucuguuugggagccugcgaaggcaaaauaugucuuuagagauguggugcagauaaccugucuggauggguuugaaguuguggagggacguguuggugcaacaucuuucuauucgacuugucaaagcaauggaaaguggaguaauuccaaacugaaaugucaaccuguggacuguggcauuccugaauccauugagaaugguaaaguugaagacccagagagcacuuuguuugguucugucauccgcuacacuugugaggagccauauuacuacauggaaaauggaggagguggggaguaucacugugcugguaacgggagcugggugaaugaggugcugggcccggagcugccgaaauguguuccagucuguggaguccccagagaacccuuugaagaaaaacagaggauaauuggaggauccgaugcagauauuaaaaacuuccccuggcaagucuucuuugacaacccaugggcugguggagcgcucauuaaugaguacugggugcugacggcugcucauguuguggagggaaacagggagccaacaauguauguuggguccaccucagugcagaccucacggcuggcaaaauccaagaugcucacuccugagcauguguuuauucauccgggauggaagcugcuggaagucccagaaggacgaaccaauuuugauaaugacauugcacuggugcggcugaaagacccagugaaaaugggacccaccgucucucccaucugccuaccaggcaccucuuccgacuacaaccucauggauggggaccugggacugaucucaggcuggggccgaacagagaagagagaucgugcuguucgccucaaggcggcaagguuaccuguagcuccuuuaagaaaaugcaaagaagugaaaguggagaaacccacagcagaugcagaggccuauguuuucacuccuaacaugaucugugcuggaggagagaagggcauggauagcuguaaaggggacagugguggggccuuugcuguacaggaucccaaugacaagaccaaauucuacgcagcuggccugguguccugggggccccagugugggaccuaugggcucuacacacggguaaagaacuauguugacuggauaaugaagacuaugcaggaaaauagcaccccccgugaggacuaa

SEQ ID NO: 8040 - RNA, 2067 nt, Artificial Sequence
  derived and/or modified sequence opt1 from complement_system_component_C1s__Homo_sapiens__AAA51852
auguggugcaucgugcuguucagccuccuggccugggucuacgccgagcccaccauguacggcgagauccuguccccgaacuacccccaggcguaccccagcgagguggagaaguccugggacaucgaggugcccgagggguacggcauccaccucuacuucacccaccuggacaucgagcugagcgagaacugcgccuacgacuccguccagaucaucagcggggacacggaggagggccgccucugcgggcagcgguccagcaacaacccgcacucccccaucguggaggaguuccaggugcccuacaacaagcugcaggucaucuucaagagcgacuucuccaacgaggagcgcuucaccggcuucgccgccuacuacguggccaccgacaucaacgagugcaccgacuucguggacguccccugcagccacuucugcaacaacuucaucggcggguacuucugcuccugcccgcccgaguacuuccugcacgacgacaugaagaacugcggcgugaacugcagcggggacguguucacggcgcucaucggcgagaucgccucccccaacuaccccaagccguaccccgagaacagccggugcgaguaccagauccgccuggagaagggguuccaggucguggugacccugcggcgcgaggacuucgacgucgaggccgccgacuccgcgggcaacugccucgacagccugguguucguggccggcgaccggcaguucgggcccuacugcggccacggguuccccggcccgcugaacaucgagaccaaguccaacgcccucgacaucaucuuccagaccgaccugacgggccagaagaagggguggaagcugcgcuaccacggcgaccccaugcccugccccaaggaggacaccccgaacagcgucugggagcccgccaaggccaaguacguguuccgggacgugguccagaucaccugccucgacggguucgaggugguggagggccgcgucggggcgaccagcuucuacuccacgugccagagcaacggcaagugguccaacagcaagcugaagugccagcccguggacugcggcauccccgaguccaucgagaacgggaaggucgaggacccggagagcacccuguucggcuccgugauccgguacaccugcgaggagcccuacuacuacauggagaacgggggcgggggcgaguaccacugcgccggcaacgggagcugggugaacgagguccucggccccgagcugcccaagugcgugccggugugcggggucccccgcgagcccuucgaggagaagcagcggaucaucggcggguccgacgccgacaucaagaacuucccguggcagguguucuucgacaaccccugggccggcggcgcccugaucaacgaguacugggugcucaccgcggcccacgucguggaggggaaccgcgagcccacgauguacgugggcagcaccuccguccagaccagccggcuggccaaguccaagaugcugacccccgagcacguguucauccacccgggguggaagcuccuggaggugcccgagggccgcacgaacuucgacaacgacaucgcccugguccggcucaaggaccccgugaagaugggccccaccgugagcccgaucugccugcccgggaccuccagcgacuacaaccugauggacggcgaccucgggcugaucuccggcugggggcgcaccgagaagcgggaccgcgccguccggcugaaggcggcccgccuccccguggccccccugcgcaagugcaaggaggugaaggucgagaagccgacggccgacgccgaggcguacguguucacccccaacaugaucugcgccggcggcgagaaggggauggacagcugcaagggcgacuccgggggcgccuucgccgugcaggaccccaacgacaagaccaaguucuacgcggccgggcuggucagcuggggcccccagugcggcaccuacgggcucuacacgcgggugaagaacuacguggacuggaucaugaagaccaugcaggagaacagcaccccgcgcgaggacuga

SEQ ID NO: 8041 - RNA, 2067 nt, Artificial Sequence
  derived and/or modified sequence opt2 from complement_system_component_C1s__Homo_sapiens__AAA51852
auguggugcaucguccucuucucccuccucgccugggucuacgccgagcccaccauguacggcgagauccucucccccaacuacccccaggccuaccccuccgaggucgagaaguccugggacaucgagguccccgagggcuacggcauccaccucuacuucacccaccucgacaucgagcucuccgagaacugcgccuacgacuccguccagaucaucuccggcgacaccgaggagggccgccucugcggccagcgcuccuccaacaacccccacucccccaucgucgaggaguuccagguccccuacaacaagcuccaggucaucuucaaguccgacuucuccaacgaggagcgcuucaccggcuucgccgccuacuacgucgccaccgacaucaacgagugcaccgacuucgucgacguccccugcucccacuucugcaacaacuucaucggcggcuacuucugcuccugcccccccgaguacuuccuccacgacgacaugaagaacugcggcgucaacugcuccggcgacgucuucaccgcccucaucggcgagaucgccucccccaacuaccccaagcccuaccccgagaacucccgcugcgaguaccagauccgccucgagaagggcuuccaggucgucgucacccuccgccgcgaggacuucgacgucgaggccgccgacuccgccggcaacugccucgacucccucgucuucgucgccggcgaccgccaguucggccccuacugcggccacggcuuccccggcccccucaacaucgagaccaaguccaacgcccucgacaucaucuuccagaccgaccucaccggccagaagaagggcuggaagcuccgcuaccacggcgaccccaugcccugccccaaggaggacacccccaacuccgucugggagcccgccaaggccaaguacgucuuccgcgacgucguccagaucaccugccucgacggcuucgaggucgucgagggccgcgucggcgccaccuccuucuacuccaccugccaguccaacggcaagugguccaacuccaagcucaagugccagcccgucgacugcggcauccccgaguccaucgagaacggcaaggucgaggaccccgaguccacccucuucggcuccgucauccgcuacaccugcgaggagcccuacuacuacauggagaacggcggcggcggcgaguaccacugcgccggcaacggcuccugggucaacgagguccucggccccgagcuccccaagugcguccccgucugcggcgucccccgcgagcccuucgaggagaagcagcgcaucaucggcggcuccgacgccgacaucaagaacuuccccuggcaggucuucuucgacaaccccugggccggcggcgcccucaucaacgaguacuggguccucaccgccgcccacgucgucgagggcaaccgcgagcccaccauguacgucggcuccaccuccguccagaccucccgccucgccaaguccaagaugcucacccccgagcacgucuucauccaccccggcuggaagcuccucgagguccccgagggccgcaccaacuucgacaacgacaucgcccucguccgccucaaggaccccgucaagaugggccccaccgucucccccaucugccuccccggcaccuccuccgacuacaaccucauggacggcgaccucggccucaucuccggcuggggccgcaccgagaagcgcgaccgcgccguccgccucaaggccgcccgccuccccgucgccccccuccgcaagugcaaggaggucaaggucgagaagcccaccgccgacgccgaggccuacgucuucacccccaacaugaucugcgccggcggcgagaagggcauggacuccugcaagggcgacuccggcggcgccuucgccguccaggaccccaacgacaagaccaaguucuacgccgccggccucgucuccuggggcccccagugcggcaccuacggccucuacacccgcgucaagaacuacgucgacuggaucaugaagaccaugcaggagaacuccaccccccgcgaggacuga

SEQ ID NO: 8042 - RNA, 2067 nt, Artificial Sequence
  derived and/or modified sequence opt3 from complement_system_component_C1s__Homo_sapiens__AAA51852
auguggugcaucgugcuguucagccuccuugccugggucuacgcugagcccaccauguauggcgaaauucuguccccuaacuacccacaggcauauccgucugagguugaaaagucaugggacauagaggugcccgaaggguacggaauccacuuguauuuuacacauuuagauauugagcugagugagaauugugccuacgacagcguacaaaucauuuccggugauacugaagagggcagacuaugcgggcagaggucuucgaacaauccucacucaccaaucguggaagaguuccagguccccuauaacaaacuccaggugauauuuaagagcgacuucaguaaugaggaacgguuuacgggauucgcggcuuacuacguugccaccgauaucaacgaguguacagacuuuguggaugucccuugcucccauuucuguaauaacuuuauuggcgguuauuucugcucuuguccacccgaauacuuucugcacgacgauaugaaaaauugcggggugaacuguagcggagacguauucacugcacuuaucggcgagauugccuccccuaauuauccaaagccguaccccgaaaacucacgcugcgaguaucaaauccgacuggagaaaggcuuucagguuguggucaccuugcguagagaagauuucgacguggaggcugcagauagugccgggaauugucucgacagccugguguucgucgcuggagacaggcaguuugguccuuacugcggccauggguucccaggaccccugaacauagaaacaaagucuaaugcccucgauauuaucuuucagaccgacuuaacuggccaaaagaaagguuggaagcugcgguaucacggggauccuaugccaugccccaaagaggacacaccgaacuccguuugggaaccugcgaaggcaaaauacguguuccgcgauguagugcagauuaccugucuugacggauuugaggucguggagggcagaguuggcgccacgucauucuacagcacuugccagaguaacgggaaguggucuaauuccaaguugaaaugucagcccguggauugcggaaucccagaaagcaucgagaacgguaaggucgaagacccugagucgacccuguuuggcucugugauuagguauacaugugaggaacccuacuauuacauggagaaugggggaggcggugaauaucacugcgcugggaacggcuccuggguaaaugagguucuaggaccagaacuccccaaaugugugccugucugcggcgugccacgggagccguucgaggaaaagcaacgcauaaucgggggaucagaugccgacauuaaaaacuuucccuggcaggucuucuuugauaauccuugggcugguggcgcacugaucaacgaguacugggugcuuacugccgcgcauguuguggaagggaaucgagagccaaccauguauguaggaaguacaagcguccagaccuccagacuggccaagucuaaaauguugacgcccgaacacguguucauacauccuggcuggaagcuccuggagguuccagaggguaggacuaacuuugacaaugacauugcauuagugcggcugaaggaucccgucaaaauggggccgacagugagcccuaucugucucccaggcaccucaagugacuacaaccuuauggauggagaccugggcuugaucuccggguggggacguacugaaaagcgcgauagagcuguaaggcuaaaagccgcucggcugcccguggccccucuccgaaagugcaaagagguuaaggucgaaaagcccacagcagacgccgaggcuuacguguucaccccaaauaugauuugugcggguggcgaaaaagggauggauagcugcaagggagacucuggcggugcauucgccgugcaagauccuaacgacaaaacgaaguuuuaugcugccgggcuggucucauggggcccccagugcggaaccuacggccuuuauacacgcguuaaaaauuacguggauuggaucaugaagacuaugcaggagaacaguaccccaagagaggacuga

SEQ ID NO: 8043 - RNA, 2067 nt, Artificial Sequence
  derived and/or modified sequence opt4 from complement_system_component_C1s__Homo_sapiens__AAA51852
auguggugcaucgugcuguucagccugcuggccuggguguacgccgagcccaccauguacggcgagauccugagccccaacuacccccaggccuaccccagcgagguggagaagagcugggacaucgaggugcccgagggcuacggcauccaccuguacuucacccaccuggacaucgagcugagcgagaacugcgccuacgacagcgugcagaucaucagcggcgacaccgaggagggcagacugugcggccagagaagcagcaacaacccccacagccccaucguggaggaguuccaggugcccuacaacaagcugcaggugaucuucaagagcgacuucagcaacgaggagagauucaccggcuucgccgccuacuacguggccaccgacaucaacgagugcaccgacuucguggacgugcccugcagccacuucugcaacaacuucaucggcggcuacuucugcagcugcccccccgaguacuuccugcacgacgacaugaagaacugcggcgugaacugcagcggcgacguguucaccgcccugaucggcgagaucgccagccccaacuaccccaagcccuaccccgagaacagcagaugcgaguaccagaucagacuggagaagggcuuccaggugguggugacccugagaagagaggacuucgacguggaggccgccgacagcgccggcaacugccuggacagccugguguucguggccggcgacagacaguucggccccuacugcggccacggcuuccccggcccccugaacaucgagaccaagagcaacgcccuggacaucaucuuccagaccgaccugaccggccagaagaagggcuggaagcugagauaccacggcgaccccaugcccugccccaaggaggacacccccaacagcgugugggagcccgccaaggccaaguacguguucagagacguggugcagaucaccugccuggacggcuucgaggugguggagggcagagugggcgccaccagcuucuacagcaccugccagagcaacggcaaguggagcaacagcaagcugaagugccagcccguggacugcggcauccccgagagcaucgagaacggcaagguggaggaccccgagagcacccuguucggcagcgugaucagauacaccugcgaggagcccuacuacuacauggagaacggcggcggcggcgaguaccacugcgccggcaacggcagcugggugaacgaggugcugggccccgagcugcccaagugcgugcccgugugcggcgugcccagagagcccuucgaggagaagcagagaaucaucggcggcagcgacgccgacaucaagaacuuccccuggcagguguucuucgacaaccccugggccggcggcgcccugaucaacgaguacugggugcugaccgccgcccacgugguggagggcaacagagagcccaccauguacgugggcagcaccagcgugcagaccagcagacuggccaagagcaagaugcugacccccgagcacguguucauccaccccggcuggaagcugcuggaggugcccgagggcagaaccaacuucgacaacgacaucgcccuggugagacugaaggaccccgugaagaugggccccaccgugagccccaucugccugcccggcaccagcagcgacuacaaccugauggacggcgaccugggccugaucagcggcuggggcagaaccgagaagagagacagagccgugagacugaaggccgccagacugcccguggccccccugagaaagugcaaggaggugaagguggagaagcccaccgccgacgccgaggccuacguguucacccccaacaugaucugcgccggcggcgagaagggcauggacagcugcaagggcgacagcggcggcgccuucgccgugcaggaccccaacgacaagaccaaguucuacgccgccggccuggugagcuggggcccccagugcggcaccuacggccuguacaccagagugaagaacuacguggacuggaucaugaagaccaugcaggagaacagcacccccagagaggacuga

SEQ ID NO: 8044 - RNA, 2067 nt, Artificial Sequence
  derived and/or modified sequence opt5 from complement_system_component_C1s__Homo_sapiens__AAA51852
auguggugcaucgugcuguucagccuccuggccugggucuacgcugagcccaccauguauggcgaaauucuuuccccuaacuacccgcaggccuaucccucugagguugaaaagagcugggacaucgaggugccugaaggguacggcauucaccuguauuuuacacaucucgauaucgagcuguccgagaauugugcguacgacucugugcaaauuaucagcggagauacggaagaggggagacuuugcggacagcgguccucuaacaauccccacagcccuaucgucgaagaguuccaggugcccuauaacaaacugcagguuauuuuuaaguccgacuucagcaaugaggaacgcuuuaccggcuucgcugccuacuacguggccacagauaucaacgaguguaccgacuuugucgaugugccuugcucucauuucuguaauaacuuuauugggggauauuucugcuccuguccgcccgaauacuuucuccacgacgauaugaaaaauugcggcguuaacuguagcggcgacguguucacagcucugaucggggagauugccucuccuaauuaucccaagccuuaccccgaaaacuccagaugcgaguaucaaauccggcuggagaaaggauuucaggucguggugacccuccgcagagaagauuucgacgucgaggcugccgauagcgcgggcaauugucuggacucucuuguuuucguggccggggaccggcaguuuggaccguacugcggccauggguucccuggaccccugaacauugaaacaaaguccaaugcucucgauaucaucuuucagaccgaccugacgggccaaaagaaaggcuggaaacuucgcuaucacggggauccuaugcccugccccaaggaggacaccccuaacagcgugugggaaccggccaaggcuaaauacgucuucagagaugugguucagauuacaugucuggacggauuugagguggucgagggccgggugggggccaccuccuucuacucuacaugccagagcaacggaaagugguccaauagcaagcucaaaugucagcccguugauugcggcaucccugaaucuauugagaacgggaagguggaagaccccgaguccacccuguuuggaagcgucauccgcuauacgugugaggaaccuuacuauuacauggagaauggcggcgggggagaauaucacugcgcgggcaacgggucuugggugaaugagguccugggacccgaacucccgaaaugugugccuguuugcggcgugcccagagagccuuucgaggaaaagcaacggauuaucgggggcagcgaugccgacaucaaaaacuuucccuggcaggucuucuuugauaauccuugggcuggaggcgcccugauuaacgaguacugggugcuuacagcugcccauguuguggaagggaaucgcgagcccaccauguaugucggauccacaucugugcagaccagcagacuggccaaguccaaaaugcucaccccggaacacguguucauccauccuggcuggaagcugcuugagguucccgaggggcggacaaacuuugacaaugacauugcucugguccgccucaaggaucccgugaaaaugggaccuacggugagcccgaucugucugcccggcaccucuuccgacuacaaccugauggauggggaccucggccugauuagcggauggggcagaacagaaaagcgggauagagcgguccgccuuaaagccgcucggcugccuguggcgccccucagaaagugcaaagagguuaagguggaaaagccuaccgccgacgcugaggccuacgucuucacacccaauaugaucugugccgggggagaaaaaggcauggauucuugcaagggggacuccggaggcgcuuucgccgugcaagauccuaacgacaaaaccaaguuuuaugccgcugggcugguuagcuggggcccccagugcggaacguacggccuuuauacacgcgugaaaaauuacgucgauuggaucaugaagaccaugcaggagaacuccaccccgcgggaggacuga

SEQ ID NO: 8045 - protein, 597 aa, Artificial Sequence
  complement_system_component_C4bp__Homo_sapiens__P04003
MHPPKTPSGALHRKRKMAAWPFSRLWKVSDPILFQMTLIAALLPAVLGNCGPPPTLSFAAPMDITLTETRFKTGTTLKYTCLPGYVRSHSTQTLTCNSDGEWVYNTFCIYKRCRHPGELRNGQVEIKTDLSFGSQIEFSCSEGFFLIGSTTSRCEVQDRGVGWSHPLPQCEIVKCKPPPDIRNGRHSGEENFYAYGFSVTYSCDPRFSLLGHASISCTVENETIGVWRPSPPTCEKITCRKPDVSHGEMVSGFGPIYNYKDTIVFKCQKGFVLRGSSVIHCDADSKWNPSPPACEPNSCINLPDIPHASWETYPRPTKEDVYVVGTVLRYRCHPGYKPTTDEPTTVICQKNLRWTPYQGCEALCCPEPKLNNGEITQHRKSRPANHCVYFYGDEISFSCHETSRFSAICQGDGTWSPRTPSCGDICNFPPKIAHGHYKQSSSYSFFKEEIIYECDKGYILVGQAKLSCSYSHWSAPAPQCKALCRKPELVNGRLSVDKDQYVEPENVTIQCDSGYGVVGPQSITCSGNRTWYPEVPKCEWETPEGCEQVLTGKRLMQCLPNPEDVKMALEVYKLSLEIEQLELQRDSARQSTLDKEL

SEQ ID NO: 8046 - RNA, 1794 nt, Artificial Sequence
  complement_system_component_C4bp__Homo_sapiens__AAA36506
augcaccccccaaaaacuccaucuggggcucuucauagaaaaaggaaaauggcagccuggcccuucuccaggcuguggaaagucucugauccaauucucuuccaaaugaccuugaucgcugcucuguugccugcuguucuuggcaauugugguccuccacccacuuuaucauuugcugccccgauggauauuacguugacugagacacgcuucaaaacuggaacuacucugaaauacaccugccucccuggcuacgucagaucccauucaacucagacgcuuaccuguaauucugauggcgaauggguguauaacaccuucuguaucuacaaacgaugcagacacccaggagaguuacguaaugggcaaguagagauuaagacagauuuaucuuuuggaucacaaauagaauucagcuguucagaaggauuuuucuuaauuggcucaaccacuagucguugugaaguccaagauagaggaguuggcuggagucauccucucccacaaugugaaauugucaaguguaagccuccuccagacaucaggaauggaaggcacagcggugaagaaaauuucuacgcauacggcuuuucugucaccuacagcugugacccccgcuucucacucuugggccaugccuccauuucuugcacuguggagaaugaaacaauaggcguuuggagaccaagcccuccuaccugugaaaaaaucaccugucgcaagccagauguuucacauggggaaauggucucuggauuuggacccaucuauaauuacaaagacacuauuguguuuaagugccaaaaagguuuuguucucagaggcagcaguguaauucauugugaugcugauagcaaauggaauccuucuccuccugcuugugagcccaauaguuguauuaauuuaccagacauuccacaugcuuccugggaaacauauccuaggccgacaaaagaggauguguauguuguugggacuguguuaagguaccgcugucauccuggcuacaaacccacuacagaugagccuacgacugugauuugucagaaaaauuugagauggaccccauaccaaggaugugaggcguuauguugcccugaaccaaagcuaaauaauggugaaaucacucaacacaggaaaagucguccugccaaucacuguguuuauuucuauggagaugagauuucauuuucaugucaugagaccaguagguuuucagcuauaugccaaggagauggcacguggaguccccgaacaccaucauguggagacauuugcaauuuuccuccuaaaauugcccaugggcauuauaaacaaucuaguucauacagcuuuuucaaagaagagauuauauaugaaugugauaaaggcuacauucuggucggacaggcgaaacucuccugcaguuauucacacuggucagcuccagccccucaauguaaagcucugugucggaaaccagaauuagugaauggaagguugucuguggauaaggaucaguauguugagccugaaaaugucaccauccaaugugauucuggcuauggugugguugguccccaaaguaucacuugcucugggaacagaaccugguacccagaggugcccaagugugagugggagacccccgaaggcugugaacaagugcucacaggcaaaagacucaugcagugucucccaaacccagaggaugugaaaauggcccuggagguauauaagcugucucuggaaauugaacaacuggaacuacagagagacagcgcaagacaauccacuuuggauaaagaacuauaa

SEQ ID NO: 8047 - RNA, 1794 nt, Artificial Sequence
  derived and/or modified sequence opt1 from complement_system_component_C4bp__Homo_sapiens__AAA36506
augcacccgcccaagacccccagcggcgcccugcaccgcaagcggaagauggccgcguggcccuucucccgccucuggaaggugagcgaccccauccuguuccagaugacccugaucgccgcccuccugccggccguccuggggaacugcggcccgccgcccacgcucuccuucgccgcgcccauggacaucacccugaccgagacccgguucaagacggggaccacccugaaguacacgugccuccccggcuacgugcgcagccacuccacgcagacccugaccugcaacagcgacggggaguggguguacaacaccuucugcaucuacaagcggugccgccaccccggcgagcugcggaacggccaggucgagaucaagacggaccucuccuucgggagccagaucgaguucuccugcagcgagggcuucuuccugaucggguccaccaccagccgcugcgaggugcaggaccggggcgugggguggucccacccccugccccagugcgagaucgucaagugcaagcccccgcccgacauccgcaacggccggcacagcggcgaggagaacuucuacgccuacggguucuccgugaccuacagcugcgacccccgcuucucccuccugggccacgccagcaucuccugcaccguggagaacgagaccaucggggucuggcggcccagcccgcccacgugcgagaagaucacgugccgcaagcccgacgugagccacggcgagaugguguccggcuucgggcccaucuacaacuacaaggacaccaucgucuucaagugccagaagggcuucgugcugcgggggagcuccgugauccacugcgacgccgacagcaaguggaaccccagcccgcccgcgugcgagcccaacuccugcaucaaccuccccgacaucccccacgccuccugggagaccuacccgcgccccaccaaggaggacgucuacguggugggcaccguccugcgguaccgcugccaccccggguacaagccgaccaccgacgagcccaccaccgugaucugccagaagaaccugcgguggacgcccuaccagggcugcgaggcccucugcugccccgagccgaagcugaacaacggcgagaucacccagcaccgcaagagccggcccgccaaccacugcguguacuucuacggggacgagaucuccuucagcugccacgagaccucccgcuucagcgccaucugccagggcgacgggaccuggagcccccgcacgcccuccugcggcgacaucugcaacuucccgcccaagaucgcgcacgggcacuacaagcaguccagcuccuacagcuucuucaaggaggagaucaucuacgagugcgacaagggcuacauccuggucggccaggccaagcucuccugcagcuacagccacugguccgcccccgcgccccagugcaaggcccugugccggaagccggagcuggugaacgggcgccucagcguggacaaggaccaguacgucgagcccgagaacgugaccauccagugcgacuccggcuacggggucgugggcccccagagcaucacgugcuccgggaaccggaccugguaccccgaggugccgaagugcgagugggagacccccgagggcugcgagcagguccugaccggcaagcgccugaugcagugccuccccaaccccgaggacgugaagauggcccuggagguguacaagcugagccucgagaucgagcagcuggagcugcagcgggacuccgcccgccagagcacccucgacaaggagcuguga

SEQ ID NO: 8048 - RNA, 1794 nt, Artificial Sequence
  derived and/or modified sequence opt2 from complement_system_component_C4bp__Homo_sapiens__AAA36506
augcacccccccaagacccccuccggcgcccuccaccgcaagcgcaagauggccgccuggcccuucucccgccucuggaaggucuccgaccccauccucuuccagaugacccucaucgccgcccuccuccccgccguccucggcaacugcggccccccccccacccucuccuucgccgcccccauggacaucacccucaccgagacccgcuucaagaccggcaccacccucaaguacaccugccuccccggcuacguccgcucccacuccacccagacccucaccugcaacuccgacggcgagugggucuacaacaccuucugcaucuacaagcgcugccgccaccccggcgagcuccgcaacggccaggucgagaucaagaccgaccucuccuucggcucccagaucgaguucuccugcuccgagggcuucuuccucaucggcuccaccaccucccgcugcgagguccaggaccgcggcgucggcuggucccacccccucccccagugcgagaucgucaagugcaagcccccccccgacauccgcaacggccgccacuccggcgaggagaacuucuacgccuacggcuucuccgucaccuacuccugcgacccccgcuucucccuccucggccacgccuccaucuccugcaccgucgagaacgagaccaucggcgucuggcgccccuccccccccaccugcgagaagaucaccugccgcaagcccgacgucucccacggcgagauggucuccggcuucggccccaucuacaacuacaaggacaccaucgucuucaagugccagaagggcuucguccuccgcggcuccuccgucauccacugcgacgccgacuccaaguggaaccccuccccccccgccugcgagcccaacuccugcaucaaccuccccgacaucccccacgccuccugggagaccuacccccgccccaccaaggaggacgucuacgucgucggcaccguccuccgcuaccgcugccaccccggcuacaagcccaccaccgacgagcccaccaccgucaucugccagaagaaccuccgcuggacccccuaccagggcugcgaggcccucugcugccccgagcccaagcucaacaacggcgagaucacccagcaccgcaagucccgccccgccaaccacugcgucuacuucuacggcgacgagaucuccuucuccugccacgagaccucccgcuucuccgccaucugccagggcgacggcaccugguccccccgcacccccuccugcggcgacaucugcaacuucccccccaagaucgcccacggccacuacaagcaguccuccuccuacuccuucuucaaggaggagaucaucuacgagugcgacaagggcuacauccucgucggccaggccaagcucuccugcuccuacucccacugguccgcccccgccccccagugcaaggcccucugccgcaagcccgagcucgucaacggccgccucuccgucgacaaggaccaguacgucgagcccgagaacgucaccauccagugcgacuccggcuacggcgucgucggcccccaguccaucaccugcuccggcaaccgcaccugguaccccgagguccccaagugcgagugggagacccccgagggcugcgagcagguccucaccggcaagcgccucaugcagugccuccccaaccccgaggacgucaagauggcccucgaggucuacaagcucucccucgagaucgagcagcucgagcuccagcgcgacuccgcccgccaguccacccucgacaaggagcucuga

SEQ ID NO: 8049 - RNA, 1794 nt, Artificial Sequence
  derived and/or modified sequence opt3 from complement_system_component_C4bp__Homo_sapiens__AAA36506
augcacccuccuaagaccccaagcggcgcccugcauagaaaaaggaagauggcugcauggccguucucccggcucuggaaagugucugaccccauccuuuuucagaugacacugauugccgcguuguuaccugcuguccuggggaacugcggaccacccccuacucuaucauucgccgcaccaauggauauaacgcucaccgagacacgcuuuaagacugguaccacacugaaauacaccugucuucccggcuauguucgaagucacagcacucaaacacugaccugcaauuccgacggggaauggguguacaacacguucuguaucuauaagcguugcagacauccuggagaguugaggaauggccagguagaaauuaagacugaucucucuuuugguucgcagaucgaguucucauguagcgaaggguuuuuccugauuggaaguaccacaucccggugcgaggugcaggaccgcggcgucggcuggucucacccacugccgcaaugugagaucgugaaaugcaagcccccuccagauauaagaaacgggaggcauagcggagaagagaauuuuuacgccuaugguuucuccguuacuuacucaugugacccccgguuuagucucuuaggccacgcuagcaucucuugcaccguggaaaacgagacaauuggggucuggcgcccuuccccacccaccugugagaaaaucacgugccgaaagccggaugugucacacggagaaaugguaagcggcuucgguccuauuuauaauuacaaagacacuaucguuuuuaagugccagaagggguucgugcugagaggaaguucugucauacauugugaugcagacuccaaauggaaccccagcccacccgccugcgagcccaauucguguauuaaccuuccagauaucccccacgcuucuugggaaacauacccuaggccaaccaaggaggacguguauguggucggcacuguuuugcgguaccguugccauccgggcuauaaacccacaaccgaugaaccuacgaccgugauuugucagaagaaucugcgcuggacaccauaccaggggugcgaggcccuauguugccccgagccuaaacucaacaauggagaaaucacucaacacagaaaguccaggccagcgaaccacuguguauauuucuacggugacgagaucucauuuaguugccaugaaaccagccgguucuccgcaauuugucagggcgacgggacauggucuccccgaacuccgagcugcggagauauaugcaauuuuccuccaaaaaucgcccacggccauuauaagcagucaaguuccuacagcuucuuuaaggaggaaauuaucuacgagugugacaaagguuauauacugguggggcaggcuaaacuuucuugcucauacagucacuggagcgcccccgcaccucaauguaaggcucugugccgcaagcccgaguuggucaacggcagacucuccguggauaaagaccaguauguugaaccagagaacgugaccauucagugugauucuggauacggcgucguggggccucaaucgaucacaugcagcggaaauaggaccugguaucccgaaguaccaaagugugagugggaaacuccggaggguugcgagcagguucugacgggcaagcgguuaaugcagugucugccuaaccccgaagacgugaaaauggcccucgaggucuacaaacuuucccuggaaaucgagcaguuggagcuacaacgcgauucagcgagacagaguacacuggacaaggaacucuga

SEQ ID NO: 8050 - RNA, 1794 nt, Artificial Sequence
  derived and/or modified sequence opt4 from complement_system_component_C4bp__Homo_sapiens__AAA36506
augcacccccccaagacccccagcggcgcccugcacagaaagagaaagauggccgccuggcccuucagcagacuguggaaggugagcgaccccauccuguuccagaugacccugaucgccgcccugcugcccgccgugcugggcaacugcggccccccccccacccugagcuucgccgcccccauggacaucacccugaccgagaccagauucaagaccggcaccacccugaaguacaccugccugcccggcuacgugagaagccacagcacccagacccugaccugcaacagcgacggcgaguggguguacaacaccuucugcaucuacaagagaugcagacaccccggcgagcugagaaacggccagguggagaucaagaccgaccugagcuucggcagccagaucgaguucagcugcagcgagggcuucuuccugaucggcagcaccaccagcagaugcgaggugcaggacagaggcgugggcuggagccacccccugccccagugcgagaucgugaagugcaagcccccccccgacaucagaaacggcagacacagcggcgaggagaacuucuacgccuacggcuucagcgugaccuacagcugcgaccccagauucagccugcugggccacgccagcaucagcugcaccguggagaacgagaccaucggcguguggagacccagcccccccaccugcgagaagaucaccugcagaaagcccgacgugagccacggcgagauggugagcggcuucggccccaucuacaacuacaaggacaccaucguguucaagugccagaagggcuucgugcugagaggcagcagcgugauccacugcgacgccgacagcaaguggaaccccagcccccccgccugcgagcccaacagcugcaucaaccugcccgacaucccccacgccagcugggagaccuaccccagacccaccaaggaggacguguacguggugggcaccgugcugagauacagaugccaccccggcuacaagcccaccaccgacgagcccaccaccgugaucugccagaagaaccugagauggacccccuaccagggcugcgaggcccugugcugccccgagcccaagcugaacaacggcgagaucacccagcacagaaagagcagacccgccaaccacugcguguacuucuacggcgacgagaucagcuucagcugccacgagaccagcagauucagcgccaucugccagggcgacggcaccuggagccccagaacccccagcugcggcgacaucugcaacuucccccccaagaucgcccacggccacuacaagcagagcagcagcuacagcuucuucaaggaggagaucaucuacgagugcgacaagggcuacauccuggugggccaggccaagcugagcugcagcuacagccacuggagcgcccccgccccccagugcaaggcccugugcagaaagcccgagcuggugaacggcagacugagcguggacaaggaccaguacguggagcccgagaacgugaccauccagugcgacagcggcuacggcguggugggcccccagagcaucaccugcagcggcaacagaaccugguaccccgaggugcccaagugcgagugggagacccccgagggcugcgagcaggugcugaccggcaagagacugaugcagugccugcccaaccccgaggacgugaagauggcccuggagguguacaagcugagccuggagaucgagcagcuggagcugcagagagacagcgccagacagagcacccuggacaaggagcuguga

SEQ ID NO: 8051 - RNA, 1794 nt, Artificial Sequence
  derived and/or modified sequence opt5 from complement_system_component_C4bp__Homo_sapiens__AAA36506
augcaucccccuaagaccccgagcggcgcccugcacagaaaacggaagauggcugccuggcccuucucccgccucuggaaagugucugacccuauccuguuucagaugacacuuauugcggcucugcuccccgccguccuggggaacugcggaccucccccuacgcuuagcuucgccgcuccgauggauaucacccugacagagaccagauuuaagacaggcaccacacucaaauacaccugucugcccggguauguucggucccacucuacgcaaacccugacaugcaauagcgacggagaauggguguacaacaccuucuguauuuauaagcgcugcagacauccuggcgagcuccggaauggacagguggaaaucaagacagaucuguccuuugggucucagauugaguucagcuguuccgaaggcuuuuuccuuaucggcagcaccacgucucgcugcgagguccaggacagaggggugggauggucccacccccugccucaaugugagaucguuaaaugcaagcccccgccugauauucggaacggccgccauagcggggaagagaauuuuuacgccuauggauucucugugacauacuccugugaccccagauuuagccuccugggccacgcuucuaucuccugcaccgucgaaaacgagacaauugggguguggcggccuagcccucccaccugugagaaaauuaccugccgcaagcccgauguuucccacggagaaauggugucuggcuucggcccgaucuauaauuacaaagacacaaucgucuuuaagugccagaagggguucgugcuuagaggaagcuccgugauucauugugaugccgacagcaaauggaaccccucuccucccgcgugcgagccuaauuccuguaucaaccugcccgauaucccgcacgccagcugggaaacguacccucggcccaccaaggaggacgucuauguugugggcacagugcuccgcuacagaugccauccuggguauaaacccaccacagaugaaccuaccacggucauuugucagaagaaucugcgguggacacccuaccagggaugcgaggcucuguguugcccggagccuaaacucaacaauggcgaaaucacccaacacagaaagucucgccccgccaaccacuguguguauuucuacggggacgagauuagcuuuuccugccaugaaaccucucgguucagcgcuaucugucagggagacggcacauggucccccagaaccccuagcugcggcgauauuugcaauuuuccgcccaaaaucgcccacgggcauuauaagcagucuuccagcuacucuuucuuuaaggaggaaaucauuuacgagugugacaaaggauauauccugguuggccaggcgaaacuuuccugcagcuacucccacuggucugccccugcuccccaauguaaggcccugugccgcaagccugagcucgugaacgggcggcugagcgucgauaaagaccaguauguggaacccgagaacguuacaauucagugugauuccggauacggcguggucgggccucaaucuaucacgugcagcggcaauagaaccugguaucccgaagugccgaagugugagugggaaacaccugagggaugcgagcagguccuuaccggcaagcgccugaugcagugucuccccaacccugaagacgugaaaauggcucuggagguuuacaagcugucccucgaaauugagcagcuggagcuucaacgggauagcgccagacagucuacacuggacaaagaacucuga

SEQ ID NO: 8052 - protein, 934 aa, Artificial Sequence
  complement_system_component_C6__Homo_sapiens__P13671
MARRSVLYFILLNALINKGQACFCDHYAWTQWTSCSKTCNSGTQSRHRQIVVDKYYQENFCEQICSKQETRECNWQRCPINCLLGDFGPWSDCDPCIEKQSKVRSVLRPSQFGGQPCTAPLVAFQPCIPSKLCKIEEADCKNKFRCDSGRCIARKLECNGENDCGDNSDERDCGRTKAVCTRKYNPIPSVQLMGNGFHFLAGEPRGEVLDNSFTGGICKTVKSSRTSNPYRVPANLENVGFEVQTAEDDLKTDFYKDLTSLGHNENQQGSFSSQGGSSFSVPIFYSSKRSENINHNSAFKQAIQASHKKDSSFIRIHKVMKVLNFTTKAKDLHLSDVFLKALNHLPLEYNSALYSRIFDDFGTHYFTSGSLGGVYDLLYQFSSEELKNSGLTEEEAKHCVRIETKKRVLFAKKTKVEHRCTTNKLSEKHEGSFIQGAEKSISLIRGGRSEYGAALAWEKGSSGLEEKTFSEWLESVKENPAVIDFELAPIVDLVRNIPCAVTKRNNLRKALQEYAAKFDPCQCAPCPNNGRPTLSGTECLCVCQSGTYGENCEKQSPDYKSNAVDGQWGCWSSWSTCDATYKRSRTRECNNPAPQRGGKRCEGEKRQEEDCTFSIMENNGQPCINDDEEMKEVDLPEIEADSGCPQPVPPENGFIRNEKQLYLVGEDVEISCLTGFETVGYQYFRCLPDGTWRQGDVECQRTECIKPVVQEVLTITPFQRLYRIGESIELTCPKGFVVAGPSRYTCQGNSWTPPISNSLTCEKDTLTKLKGHCQLGQKQSGSECICMSPEEDCSHHSEDLCVFDTDSNDYFTSPACKFLAEKCLNNQQLHFLHIGSCQDGRQLEWGLERTRLSSNSTKKESCGYDTCYDWEKCSASTSKCVCLLPPQCFKGGNQLYCVKMGSSTSEKTLNICEVGTIRCANRKMEILHPGKCLA

SEQ ID NO: 8053 - RNA, 2805 nt, Artificial Sequence
  complement_system_component_C6__Homo_sapiens__AAA51860
auggccagacgcucugucuuguacuucauccugcugaaugcucugaucaacaagggccaagccugcuucugugaucacuaugcauggacucaguggaccagcugcucaaaaacuugcaauucuggaacccagagcagacacagacaaauaguaguagauaaguacuaccaggaaaacuuuugugaacagauuugcagcaagcaggagacuagagaauguaacuggcaaagaugccccaucaacugccuccugggagauuuuggaccauggucagacugugacccuuguauugaaaaacagucuaaaguuagaucugucuugcgucccagucaguuugggggacagccaugcacugcgccucugguagccuuucaaccaugcauuccaucuaagcucugcaaaauugaagaggcugacugcaagaauaaauuucgcugugacaguggccgcugcauugccagaaaguuagaaugcaauggagaaaaugacuguggagacaauucagaugaaagggacugugggaggacaaaggcaguaugcacacggaaguauaaucccaucccuaguguacaguugaugggcaauggguuucauuuucuggcaggagagcccagaggagaaguccuugauaacucuuucacuggaggaauauguaaaacugucaaaagcaguaggacaaguaauccauaccguguuccggccaaucuggaaaaugucggcuuugagguacaaacugcagaagaugacuugaaaacagauuucuacaaggauuuaacuucucuuggacacaaugaaaaucaacaaggcucauucucaagucagggggggagcucuuucaguguaccaauuuuuuauuccucaaagagaagugaaaauaucaaccauaauucugccuucaaacaagccauucaagccucucacaaaaaggauucuaguuuuauuaggauccauaaagugaugaaagucuuaaacuucacaacgaaagcuaaagaucugcaccuuucugaugucuuuuugaaagcacuuaaccaucugccucuagaauacaacucugcuuuguacagccgaauauucgaugacuuugggacucauuacuucaccucuggcucccugggaggcguguaugaccuucucuaucaguuuagcagugaggaacuaaagaacucagguuuaaccgaggaagaagccaaacacugugucaggauugaaacaaagaaacgcguuuuauuugcuaagaaaacaaaaguggaacauaggugcaccaccaacaagcugucagagaaacaugaagguucauuuauacagggagcagagaaauccauaucccugauucgagguggaaggagugaauauggagcagcuuuggcaugggagaaagggagcucuggucuggaggagaagacauuuucugagugguuagaaucagugaaggaaaauccugcugugauugacuuugagcuugcccccaucguggacuugguaagaaacauccccugugcagugacaaaacggaacaaccucaggaaagcuuugcaagaguaugcagccaaguucgauccuugccagugugcuccaugcccuaauaauggccgacccacccucucagggacugaaugucugugugugugucagaguggcaccuauggugagaacugugagaaacagucuccagauuauaaauccaaugcaguagacggacagugggguuguuggucuuccuggaguaccugugaugcuacuuauaagagaucgagaacccgagaaugcaauaauccugccccccaacgaggagggaaacgcugugagggggagaagcgacaagaggaagacugcacauuuucaaucauggaaaacaauggacaaccauguaucaaugaugaugaagaaaugaaagaggucgaucuuccugagauagaagcagauuccggguguccucagccaguuccuccagaaaauggauuuauccggaaugaaaagcaacuauacuugguuggagaagauguugaaauuucaugccuuacuggcuuugaaacuguuggauaccaguacuucagaugcuuaccagacgggaccuggagacaaggggauguggaaugccaacggacggagugcaucaagccaguugugcaggaaguccugacaauuacaccauuucagagauuguauagaauuggugaauccauugagcuaacuugccccaaaggcuuuguuguugcugggccaucaagguacacaugccaggggaauuccuggacaccacccauuucaaacucucucaccugugaaaaagauacucuaacaaaauuaaaaggccauugucagcugggacagaaacaaucaggaucugaaugcauuuguaugucuccagaagaagacuguagccaucauucagaagaucucuguguguuugacacagacuccaacgauuacuuuacuucacccgcuuguaaguuuuuggcugagaaauguuuaaauaaucagcaacuccauuuucuacauauugguuccugccaagacggccgccaguuagaauggggucuugaaaggacaagacuuucauccaacagcacaaagaaagaauccuguggcuaugacaccugcuaugacugggaaaaauguucagccuccacuuccaaaugugucugccuauugcccccacagugcuucaaggguggaaaccaacucuacugugucaaaaugggaucaucaacaagugagaaaacauugaacaucugugaagugggaacuauaagaugugcaaacaggaagauggaaauacugcauccuggaaaguguuuggccuag

SEQ ID NO: 8054 - RNA, 2805 nt, Artificial Sequence
  derived and/or modified sequence opt1 from complement_system_component_C6__Homo_sapiens__AAA51860
auggcccgccggagcgugcuguacuucauccuccugaacgcccugaucaacaagggccaggcgugcuucugcgaccacuacgccuggacccaguggaccuccugcagcaagacgugcaacuccgggacccagagccgccaccggcagaucgucguggacaaguacuaccaggagaacuucugcgagcagaucugcuccaagcaggagacccgcgagugcaacuggcagcggugccccaucaacugccuccugggcgacuucgggccguggagcgacugcgaccccugcaucgagaagcaguccaaggugcgcagcguccugcggcccucccaguucggcgggcagcccugcaccgccccgcucguggccuuccagcccugcauccccagcaagcugugcaagaucgaggaggccgacugcaagaacaaguuccgcugcgacuccggccggugcaucgcgcgcaagcuggagugcaacggcgagaacgacugcggggacaacagcgacgagcgggacugcggccgcacgaaggccgugugcacccggaaguacaaccccaucccguccguccagcucauggggaacggcuuccacuuccuggccggggagccccgcggcgaggugcuggacaacagcuucaccggcgggaucugcaagaccgugaaguccagccggacguccaaccccuaccgcguccccgccaaccucgagaacgugggcuucgaggugcagaccgcggaggacgaccugaagaccgacuucuacaaggaccugaccagccucgggcacaacgagaaccagcagggcuccuucagcagccagggcggguccagcuucuccgucccgaucuucuacagcuccaagcggagcgagaacaucaaccacaacuccgccuucaagcaggccauccaggccagccacaagaaggacuccagcuucauccgcauccacaaggugaugaaggugcugaacuucacgaccaaggccaaggaccugcaccucuccgacgucuuccugaaggcgcugaaccaccucccccuggaguacaacagcgcccuguacucccggaucuucgacgacuucggcacccacuacuucaccagcgggucccucggcgggguguacgaccugcuguaccaguucagcuccgaggagcucaagaacagcggccugacggaggaggaggccaagcacugcgugcgcaucgagaccaagaagcggguccuguucgccaagaagaccaagguggagcaccgcugcaccacgaacaagcucuccgagaagcacgagggcagcuucauccagggggccgagaaguccaucagccugauccgcggcgggcggagcgaguacggcgcggcccuggccugggagaagggguccagcggccucgaggagaagaccuucuccgaguggcuggagagcgugaaggagaaccccgccgucaucgacuucgagcuggcccccaucguggaccucgugcgcaacaucccgugcgcggucaccaagcggaacaaccugcgcaaggcccugcaggaguacgccgccaaguucgaccccugccagugcgcccccugccccaacaacggccggccgacccucuccgggacggagugccugugcgugugccagagcggcaccuacggggagaacugcgagaagcagucccccgacuacaagagcaacgcggucgacggccagugggggugcugguccagcugguccacgugcgacgccaccuacaagcgcagccggacccgcgagugcaacaaccccgcgccccagcggggcggcaagcgcugcgagggggagaagcggcaggaggaggacugcaccuucuccaucauggagaacaacggccagccgugcaucaacgacgacgaggagaugaaggagguggaccugcccgagaucgaggccgacagcgggugcccccagcccgugccgcccgagaacggcuucauccgcaacgagaagcagcucuaccuggucggcgaggacguggagaucuccugccugaccggguucgagaccgugggcuaccaguacuuccggugccuccccgacgggacguggcgccagggcgacgucgagugccagcggaccgagugcaucaagccgguggugcaggagguccugaccaucacccccuuccagcgccuguaccggaucggggagagcaucgagcucacgugccccaagggcuucgugguggccggccccagccgcuacacgugccaggggaacuccuggaccccgcccaucagcaacucccugaccugcgagaaggacacccugaccaagcugaagggccacugccagcucgggcagaagcagagcggcuccgagugcaucugcaugagccccgaggaggacugcucccaccacagcgaggaccugugcgucuucgacaccgacuccaacgacuacuucaccagccccgccugcaaguuccuggccgagaagugccucaacaaccagcagcugcacuuccugcacaucggguccugccaggacggccggcagcucgaguggggccuggagcgcacccgccugagcuccaacagcacgaagaaggaguccugcggguacgacacgugcuacgacugggagaagugcagcgccuccaccagcaagugcgugugccuccugccgccccagugcuucaagggcgggaaccagcuguacugcgugaagaugggcuccagcaccagcgagaagacccucaacaucugcgaggucgggaccauccggugcgccaaccgcaagauggagauccugcaccccggcaagugccuggcguga

SEQ ID NO: 8055 - RNA, 2805 nt, Artificial Sequence
  derived and/or modified sequence opt2 from complement_system_component_C6__Homo_sapiens__AAA51860
auggcccgccgcuccguccucuacuucauccuccucaacgcccucaucaacaagggccaggccugcuucugcgaccacuacgccuggacccaguggaccuccugcuccaagaccugcaacuccggcacccagucccgccaccgccagaucgucgucgacaaguacuaccaggagaacuucugcgagcagaucugcuccaagcaggagacccgcgagugcaacuggcagcgcugccccaucaacugccuccucggcgacuucggccccugguccgacugcgaccccugcaucgagaagcaguccaagguccgcuccguccuccgccccucccaguucggcggccagcccugcaccgccccccucgucgccuuccagcccugcauccccuccaagcucugcaagaucgaggaggccgacugcaagaacaaguuccgcugcgacuccggccgcugcaucgcccgcaagcucgagugcaacggcgagaacgacugcggcgacaacuccgacgagcgcgacugcggccgcaccaaggccgucugcacccgcaaguacaaccccauccccuccguccagcucaugggcaacggcuuccacuuccucgccggcgagccccgcggcgagguccucgacaacuccuucaccggcggcaucugcaagaccgucaaguccucccgcaccuccaaccccuaccgcguccccgccaaccucgagaacgucggcuucgagguccagaccgccgaggacgaccucaagaccgacuucuacaaggaccucaccucccucggccacaacgagaaccagcagggcuccuucuccucccagggcggcuccuccuucuccguccccaucuucuacuccuccaagcgcuccgagaacaucaaccacaacuccgccuucaagcaggccauccaggccucccacaagaaggacuccuccuucauccgcauccacaaggucaugaagguccucaacuucaccaccaaggccaaggaccuccaccucuccgacgucuuccucaaggcccucaaccaccucccccucgaguacaacuccgcccucuacucccgcaucuucgacgacuucggcacccacuacuucaccuccggcucccucggcggcgucuacgaccuccucuaccaguucuccuccgaggagcucaagaacuccggccucaccgaggaggaggccaagcacugcguccgcaucgagaccaagaagcgcguccucuucgccaagaagaccaaggucgagcaccgcugcaccaccaacaagcucuccgagaagcacgagggcuccuucauccagggcgccgagaaguccaucucccucauccgcggcggccgcuccgaguacggcgccgcccucgccugggagaagggcuccuccggccucgaggagaagaccuucuccgaguggcucgaguccgucaaggagaaccccgccgucaucgacuucgagcucgcccccaucgucgaccucguccgcaacauccccugcgccgucaccaagcgcaacaaccuccgcaaggcccuccaggaguacgccgccaaguucgaccccugccagugcgcccccugccccaacaacggccgccccacccucuccggcaccgagugccucugcgucugccaguccggcaccuacggcgagaacugcgagaagcagucccccgacuacaaguccaacgccgucgacggccaguggggcugcugguccuccugguccaccugcgacgccaccuacaagcgcucccgcacccgcgagugcaacaaccccgccccccagcgcggcggcaagcgcugcgagggcgagaagcgccaggaggaggacugcaccuucuccaucauggagaacaacggccagcccugcaucaacgacgacgaggagaugaaggaggucgaccuccccgagaucgaggccgacuccggcugcccccagcccgucccccccgagaacggcuucauccgcaacgagaagcagcucuaccucgucggcgaggacgucgagaucuccugccucaccggcuucgagaccgucggcuaccaguacuuccgcugccuccccgacggcaccuggcgccagggcgacgucgagugccagcgcaccgagugcaucaagcccgucguccaggagguccucaccaucacccccuuccagcgccucuaccgcaucggcgaguccaucgagcucaccugccccaagggcuucgucgucgccggccccucccgcuacaccugccagggcaacuccuggaccccccccaucuccaacucccucaccugcgagaaggacacccucaccaagcucaagggccacugccagcucggccagaagcaguccggcuccgagugcaucugcaugucccccgaggaggacugcucccaccacuccgaggaccucugcgucuucgacaccgacuccaacgacuacuucaccucccccgccugcaaguuccucgccgagaagugccucaacaaccagcagcuccacuuccuccacaucggcuccugccaggacggccgccagcucgaguggggccucgagcgcacccgccucuccuccaacuccaccaagaaggaguccugcggcuacgacaccugcuacgacugggagaagugcuccgccuccaccuccaagugcgucugccuccuccccccccagugcuucaagggcggcaaccagcucuacugcgucaagaugggcuccuccaccuccgagaagacccucaacaucugcgaggucggcaccauccgcugcgccaaccgcaagauggagauccuccaccccggcaagugccucgccuga

SEQ ID NO: 8056 - RNA, 2805 nt, Artificial Sequence
  derived and/or modified sequence opt3 from complement_system_component_C6__Homo_sapiens__AAA51860
auggccagaaggagcgugcuguacuucauccuccuuaacgcucugauuaauaagggccaggcaugcuuuugugaccacuaugccuggacccaauggacauccugcucuaaaacuuguaacucagggacgcagagucggcaucgccagauagucguugauaaguacuaucaggagaauuucugcgaacaaaucuguagcaaacaggagacccgagaaugcaacuggcagcguugucccauuaauugcuuguuaggagacuuugguccuugguccgauugugacccaugcaucgagaagcagucuaaagugagaucgguacugaggccgucacaauucggcgggcagcccuguacagcgccucuaguggcuuuucagccaugcauucccagcaagcucugcaagaucgaagaggccgauuguaaaaacaaguuccggugcgacaguggacgcuguauagcaagaaaacuggagugcaauggcgaaaacgauuguggugacaauuccgaugagagggacugcgggcggacuaaggccgucuguacccgcaaauacaacccuaucccaucugugcagcuuaugggaaauggcuuucacuuccuggcuggcgaaccccgaggggagguuuuggauaacagcuuuacaggagguauuugcaagaccgugaaguccucaagaacaaguaauccuuauagggucccagcaaaccucgagaaugugggcuucgaaguacaaacagccgaggacgaucugaaaaccgacuuuuacaaggaccugacgagccucgggcauaacgaaaaccagcagggaucuuucuccucacaaggcgguagcaguuuuucuguuccgaucuucuauuccagcaaacggucggagaauauuaaccacaauucugcuuucaagcaggccauccaggcgucccauaaaaaggauucaaguuuuauacguauucacaaagugaugaaggucuuaaacuucacuaccaaggcaaaagaccugcaccuuagcgauguguuuuugaaggcccugaaucaucuaccccucgaauacaacuccgcucuguacucucgcaucuucgacgauuuugggacacacuauuucacuagcggaucacuuggcggcguguacgaccuguuguaucaguuuaguuccgaggagcucaaaaauagcgggcugaccgaagaggaagccaagcauugugucagaauugagacuaaaaagaggguuuuauucgcaaagaaaaccaagguggaacaccggugcacgacuaacaaacugucugagaagcacgagggaucauuuauccaaggugcugagaaaaguaucagccucauucgaggcgggcgcuccgaauacggagccgcgcuugccugggaaaaggggucuucgggucuggaggaaaagacauucagcgagugguuggaguccguaaaagaaaauccugcagugauagauuuugagcuagcuccaaucgucgaccuggugagaaacauucccugugccguuaccaagaggaauaaccuccggaaagcucugcaggaauaugccgcaaaguucgauccuugccagugcgccccaugucccaauaacgggcgcccgacucuuucaggcacagagugccugugugugugccagaguggaaccuacggcgagaauugugaaaaacaaucuccugacuauaagagcaacgcugucgaugggcaguggggaugcugguccucauggagcacgugugacgcgaccuacaagagaucuaggacacgugagugcaacaaucccgcaccacagcgggguggcaaacgaugugaaggggagaagagacaggaagaggacugcacuuuuuccaucauggagaacaauggacaaccuuguauaaacgaugacgaagagaugaaagaaguggauuugcccgagauugaagccgacaguggcugcccacagcccguaccuccagagaaugguuucaucaggaacgagaagcagcucuaccugguuggggaagauguggagaucagcugcuuaaccggcuucgaaacagucggauaucaguacuuucgcugucugccggacggcacuuggcggcaaggggauguggagugccagagaaccgaauguauuaaacccgucgugcaggagguucuaacaaucaccccuuuccaaaggcucuaucgcauuggagagucuauagaacugacuugcccaaaggguuuugugguagcuggccccucccgauacacgugucagggcaauucauggacaccuccaaucaguaacagccuuaccugcgagaaagacacuuugaccaagcugaagggacauugucagcucggccagaaacaaucggguuccgaaugcauuuguaugucucccgaggaggauugcagccaccauucagaagaccugugugucuucgauacagacaguaaugauuauuuuaccuccccggccugcaaguuccuugcagagaaaugccugaacaaucagcaguugcacuuucuccauaucgggucuugucaggacggccggcaacuggaauggggauuagagcguacuagacugagcuccaacucaacaaagaaagaaagcugcggcuacgacacguguuaugauugggagaagugcagugccucuaccuccaagugugugugccuacucccuccacaguguuucaaagggggaaaucagcuguacugcguuaagaugggcagcucgacuucagagaaaacacuuaacaucugugaaguggguaccauuaggugcgcuaaucgcaagauggagauauugcaccccgggaaaugucuggccuga

SEQ ID NO: 8057 - RNA, 2805 nt, Artificial Sequence
  derived and/or modified sequence opt4 from complement_system_component_C6__Homo_sapiens__AAA51860
auggccagaagaagcgugcuguacuucauccugcugaacgcccugaucaacaagggccaggccugcuucugcgaccacuacgccuggacccaguggaccagcugcagcaagaccugcaacagcggcacccagagcagacacagacagaucgugguggacaaguacuaccaggagaacuucugcgagcagaucugcagcaagcaggagaccagagagugcaacuggcagagaugccccaucaacugccugcugggcgacuucggccccuggagcgacugcgaccccugcaucgagaagcagagcaaggugagaagcgugcugagacccagccaguucggcggccagcccugcaccgccccccugguggccuuccagcccugcauccccagcaagcugugcaagaucgaggaggccgacugcaagaacaaguucagaugcgacagcggcagaugcaucgccagaaagcuggagugcaacggcgagaacgacugcggcgacaacagcgacgagagagacugcggcagaaccaaggccgugugcaccagaaaguacaaccccauccccagcgugcagcugaugggcaacggcuuccacuuccuggccggcgagcccagaggcgaggugcuggacaacagcuucaccggcggcaucugcaagaccgugaagagcagcagaaccagcaaccccuacagagugcccgccaaccuggagaacgugggcuucgaggugcagaccgccgaggacgaccugaagaccgacuucuacaaggaccugaccagccugggccacaacgagaaccagcagggcagcuucagcagccagggcggcagcagcuucagcgugcccaucuucuacagcagcaagagaagcgagaacaucaaccacaacagcgccuucaagcaggccauccaggccagccacaagaaggacagcagcuucaucagaauccacaaggugaugaaggugcugaacuucaccaccaaggccaaggaccugcaccugagcgacguguuccugaaggcccugaaccaccugccccuggaguacaacagcgcccuguacagcagaaucuucgacgacuucggcacccacuacuucaccagcggcagccugggcggcguguacgaccugcuguaccaguucagcagcgaggagcugaagaacagcggccugaccgaggaggaggccaagcacugcgugagaaucgagaccaagaagagagugcuguucgccaagaagaccaagguggagcacagaugcaccaccaacaagcugagcgagaagcacgagggcagcuucauccagggcgccgagaagagcaucagccugaucagaggcggcagaagcgaguacggcgccgcccuggccugggagaagggcagcagcggccuggaggagaagaccuucagcgaguggcuggagagcgugaaggagaaccccgccgugaucgacuucgagcuggcccccaucguggaccuggugagaaacauccccugcgccgugaccaagagaaacaaccugagaaaggcccugcaggaguacgccgccaaguucgaccccugccagugcgcccccugccccaacaacggcagacccacccugagcggcaccgagugccugugcgugugccagagcggcaccuacggcgagaacugcgagaagcagagccccgacuacaagagcaacgccguggacggccaguggggcugcuggagcagcuggagcaccugcgacgccaccuacaagagaagcagaaccagagagugcaacaaccccgccccccagagaggcggcaagagaugcgagggcgagaagagacaggaggaggacugcaccuucagcaucauggagaacaacggccagcccugcaucaacgacgacgaggagaugaaggagguggaccugcccgagaucgaggccgacagcggcugcccccagcccgugccccccgagaacggcuucaucagaaacgagaagcagcuguaccuggugggcgaggacguggagaucagcugccugaccggcuucgagaccgugggcuaccaguacuucagaugccugcccgacggcaccuggagacagggcgacguggagugccagagaaccgagugcaucaagcccguggugcaggaggugcugaccaucacccccuuccagagacuguacagaaucggcgagagcaucgagcugaccugccccaagggcuucgugguggccggccccagcagauacaccugccagggcaacagcuggaccccccccaucagcaacagccugaccugcgagaaggacacccugaccaagcugaagggccacugccagcugggccagaagcagagcggcagcgagugcaucugcaugagccccgaggaggacugcagccaccacagcgaggaccugugcguguucgacaccgacagcaacgacuacuucaccagccccgccugcaaguuccuggccgagaagugccugaacaaccagcagcugcacuuccugcacaucggcagcugccaggacggcagacagcuggaguggggccuggagagaaccagacugagcagcaacagcaccaagaaggagagcugcggcuacgacaccugcuacgacugggagaagugcagcgccagcaccagcaagugcgugugccugcugcccccccagugcuucaagggcggcaaccagcuguacugcgugaagaugggcagcagcaccagcgagaagacccugaacaucugcgaggugggcaccaucagaugcgccaacagaaagauggagauccugcaccccggcaagugccuggccuga

SEQ ID NO: 8058 - RNA, 2805 nt, Artificial Sequence
  derived and/or modified sequence opt5 from complement_system_component_C6__Homo_sapiens__AAA51860
auggccagacggagcgugcuguacuucauccuccugaacgcucuuauuaauaagggccaggccugcuuuugugaccacuaugcguggacccaauggacauccugcucuaaaacguguaacagcgggacccagucccgccauagacagaucgucguugauaaguacuaucaggagaauuucugcgaacaaauuuguucuaaacaggagacacgggaaugcaacuggcagcgcugucccaucaauugccugcucggagacuuuggcccuuggagcgauugugacccgugcauugagaagcaguccaaagugagaucugugcugcggcccagccaauucgggggacagccuuguaccgcuccccuugucgccuuucagccuugcauccccuccaagcugugcaagaucgaagaggccgauuguaaaaacaaguuccgcugcgacagcggcagauguauugcucggaaacucgagugcaauggggaaaacgauuguggagacaauucugaugagcgcgacugcggcagaacaaaggccguguguacccggaaauacaacccuaucccguccguucagcugaugggcaauggguuucacuuccuggcuggagaaccccgcggcgaggugcucgauaacagcuuuacagggggaauuugcaagaccgucaagucuuccagaacgagcaauccuuaucgggugcccgccaaccuggagaauguuggcuucgaagugcaaaccgcggaggacgaucuuaaaacagacuuuuacaaggaccugaccucucucgggcauaacgaaaaccagcagggauccuucagcucccaaggcggcucuagcuuuuccgucccuaucuucuauagcucuaaacgcuccgagaauauuaaccacaauagcgccuucaagcaggcuauccaggccucucauaaaaaggauagcuccuuuauuagaauccacaaagugaugaaggugcugaacuucacaaccaaggcuaaagaccuucaccugucugaugucuuucucaaggcccugaaucaucugccccucgaauacaacagcgcgcuguacucccggaucuucgacgauuuugggacgcacuauuucacaagcggaucucuuggcgggguuuacgaccugcucuaucaguuuuccagcgaggagcugaaaaauucuggacuuaccgaagaggaagccaagcauugugugagaauugagacaaagaagcgcgugcuguucgcuaagaaaaccaaggucgaacaccggugcaccacaaacaaacucuccgagaagcacgagggcagcuuuauccaaggggccgaaaaauccauuucucugaucagaggaggccgcagcgaguacggcgcugcccuggccugggaaaagggguccucuggacucgaggaaaagacguucagcgaguggcuggaguccgugaaagaaaauccggcuguuauugauuuugagcuugcgccuaucguggaccugguccggaacauccccugugccgugaccaagagaaauaaccuccgcaaagcucugcaggaauaugccgccaaguucgauccuugccagugcgcucccugucccaauaacggccggccuacacuuagcgggaccgagugccuguguguuugccagucuggaacauacggcgagaauugugaaaaacaauccccggacuauaagagcaacgccguggaugggcaguggggcugcuggucuuccuggagcaccugugacgcgacguacaagagaucucgcacacgggagugcaacaaucccgcuccucagagaggaggcaaacgcugugaaggggagaagcggcaggaagaggacugcaccuuuagcauuauggagaacaauggacaacccuguaucaacgaugacgaagagaugaaagaagucgaucucccugagauugaagccgacuccggcugcccccagccggugccucccgagaauggguucaucagaaacgagaagcagcuguaccuggucggagaagauguggagauuagcugccucaccggcuucgaaacaguuggguaucaguacuuucggugucugccugacggcaccuggcgccaaggagauguggagugccagagaacagaauguaucaaacccgucgugcaggagguucuuacgaucaccccuuuccaacggcuguauagaauuggcgagucuaucgaacucacaugccccaagggguuuguggucgccggaccgucccgcuacaccugucagggcaauagcuggacaccucccauuuccaacucucugaccugcgagaaagacacgcugaccaaacuuaaggggcauugucagcucggacagaaacaaagcggcuccgaaugcaucuguaugucucccgaggaggauugcagccaccauuccgaagaccuguguguguucgauacagacucuaaugauuauuuuaccagcccugcuugcaaguuccuggccgagaaaugccucaacaaucagcagcugcacuuucuucauauuggguccugucaggacggccggcaacuggaauggggacucgagagaacacgccugagcucuaacuccaccaagaaagaaagcugcggcuacgacacguguuaugauugggagaagugcucugcuuccacaagcaagugugugugccugcuuccgccccaguguuucaaagggggaaaucagcucuacugcguuaagauggggucuuccaccagcgagaaaacacugaacaucugugaagucggcaccauuagaugcgccaaucggaagauggagauccugcacccuggaaaaugucucgcguga

SEQ ID NO: 8059 - protein, 843 aa, Artificial Sequence
  complement_system_component_C7__Homo_sapiens__P10643
MKVISLFILVGFIGEFQSFSSASSPVNCQWDFYAPWSECNGCTKTQTRRRSVAVYGQYGGQPCVGNAFETQSCEPTRGCPTEEGCGERFRCFSGQCISKSLVCNGDSDCDEDSADEDRCEDSERRPSCDIDKPPPNIELTGNGYNELTGQFRNRVINTKSFGGQCRKVFSGDGKDFYRLSGNVLSYTFQVKINNDFNYEFYNSTWSYVKHTSTEHTSSSRKRSFFRSSSSSSRSYTSHTNEIHKGKSYQLLVVENTVEVAQFINNNPEFLQLAEPFWKELSHLPSLYDYSAYRRLIDQYGTHYLQSGSLGGEYRVLFYVDSEKLKQNDFNSVEEKKCKSSGWHFVVKFSSHGCKELENALKAASGTQNNVLRGEPFIRGGGAGFISGLSYLELDNPAGNKRRYSAWAESVTNLPQVIKQKLTPLYELVKEVPCASVKKLYLKWALEEYLDEFDPCHCRPCQNGGLATVEGTHCLCHCKPYTFGAACEQGVLVGNQAGGVDGGWSCWSSWSPCVQGKKTRSRECNNPPPSGGGRSCVGETTESTQCEDEELEHLRLLEPHCFPLSLVPTEFCPSPPALKDGFVQDEGTMFPVGKNVVYTCNEGYSLIGNPVARCGEDLRWLVGEMHCQKIACVLPVLMDGIQSHPQKPFYTVGEKVTVSCSGGMSLEGPSAFLCGSSLKWSPEMKNARCVQKENPLTQAVPKCQRWEKLQNSRCVCKMPYECGPSLDVCAQDERSKRILPLTVCKMHVLHCQGRNYTLTGRDSCTLPASAEKACGACPLWGKCDAESSKCVCREASECEEEGFSICVEVNGKEQTMSECEAGALRCRGQSISVTSIRPCAAETQ

SEQ ID NO: 8060 - RNA, 2532 nt, Artificial Sequence
  complement_system_component_C7__Homo_sapiens__AAH63851
augaaggugauaagcuuauucauuuuggugggauuuauaggagaguuccaaaguuuuucaagugccuccucuccagucaacugccagugggacuucuaugccccuuggucagaaugcaauggcuguaccaagacucagacucgcaggcggucaguugcuguguaugggcaguauggaggccagccuuguguuggaaaugcuuuugaaacacaguccugugaaccuacaagaggauguccaacagaggagggauguggagagcguuucaggugcuuuucaggucagugcaucagcaaaucauugguuugcaauggggauucugacugugaugaagacagugcugaugaagacagaugugaggacucagaaaggagaccuuccugugauaucgauaaaccuccuccuaacauagaacuuacuggaaaugguuacaaugaacucacuggccaguuuaggaacagagucaucaauaccaaaaguuuugguggucaauguagaaagguguuuaguggggauggaaaagauuucuacaggcugaguggaaauguccuguccuauacauuccaggugaaaauaaauaaugauuuuaauuaugaauuuuacaauaguacuuggucuuauguaaaacauacgucgacagaacacacaucaucuagucggaagcgcuccuuuuuuagaucuucaucaucuucuucacgcaguuauacuucacauaccaaugaaauccauaaaggaaagaguuaccaacugcugguuguugagaacacuguugaaguggcucaguucauuaauaacaauccagaauuuuuacaacuugcugagccauucuggaaggagcuuucccaccuccccucucuguaugacuacagugccuaccgaagauuaaucgaccaguacgggacacauuaucugcaaucugggucguuaggaggagaauacagaguucuauuuuauguggacucagaaaaauuaaaacaaaaugauuuuaauucagucgaagaaaagaaauguaaauccucagguuggcauuuugucguuaaauuuucaagucauggaugcaaggaacuggaaaacgcuuuaaaagcugcuucaggaacccagaacaauguauugcgaggagaaccguucaucagagggggaggugcaggcuucauaucuggccuuaguuaccuagagcuggacaauccugcuggaaacaaaaggcgauauucugccugggcagaaucugugacuaaucuuccucaagucauaaaacaaaagcugacaccuuuauaugagcugguaaaggaaguaccuugugccucugugaaaaaacuauaccugaaaugggcucuugaagaguaucuggaugaauuugaccccugucauugccggccuugucaaaauggugguuuggcuacuguugaggggacccauugucugugccauugcaaaccguacacauuuggugcggcgugugagcaaggaguccucguagggaaucaagcaggagggguugauggagguuggaguugcugguccucuuggagccccuguguccaagggaagaaaacaagaagccgugaaugcaauaacccaccucccagugggggugggagauccugcguuggagaaacgacagaaagcacacaaugcgaagaugaggagcuggagcacuugagguugcuugaaccacauugcuuuccuuugucuuugguuccaacagaauucuguccaucaccuccugccuugaaagauggauuuguucaagaugaagguacaauguuuccuguggggaaaaauguaguguacacuugcaaugaaggauacucucuuauuggaaacccaguggccagauguggagaagauuuacgguggcuuguuggggaaaugcauugucagaaaauugccuguguucuaccuguacugauggauggcauacagagucacccccaaaaaccuuucuacacaguuggugagaaggugacuguuuccuguucagguggcauguccuuagaagguccuucagcauuucucuguggcuccagccuuaaguggaguccugagaugaagaaugcccgcuguguacaaaaagaaaauccguuaacacaggcagugccuaaaugucagcgcugggagaaacugcagaauucaagauguguuuguaaaaugcccuacgaauguggaccuuccuuggauguaugugcucaagaugagagaagcaaaaggauacugccucugacaguuugcaagaugcauguucuccacugucaggguagaaauuacacccuuacugguagggacagcuguacucugccugccucagcugagaaagcuuguggugccugcccacuguggggaaaaugugaugcugagagcagcaaaugugucugccgagaagcaucggagugcgaggaagaaggguuuagcauuuguguggaagugaacggcaaggagcagacgaugucugagugugaggcgggcgcucugagaugcagagggcagagcaucucugucaccagcauaaggccuugugcugcggaaacccaguag

SEQ ID NO: 8061 - RNA, 2532 nt, Artificial Sequence
  derived and/or modified sequence opt1 from complement_system_component_C7__Homo_sapiens__AAH63851
augaaggugaucagccuguucauccucgucggcuucaucggggaguuccaguccuucagcuccgccagcucccccgugaacugccagugggacuucuacgccccguggagcgagugcaacggcugcaccaagacccagacgcgccggcgcuccguggcggucuacgggcaguacggcgggcagcccugcgugggcaacgccuucgagacccagagcugcgagcccacccggggcugccccaccgaggaggggugcggcgagcgcuuccggugcuucuccgggcagugcaucagcaagucccuggugugcaacggcgacagcgacugcgacgaggacuccgccgacgaggaccgcugcgaggacagcgagcggcgcccguccugcgacaucgacaagcccccgcccaacaucgagcugacggggaacggcuacaacgagcucaccggccaguuccggaaccgcgucaucaacaccaagagcuucgggggccagugccggaagguguucuccggggacggcaaggacuucuaccgccugagcggcaacgugcuguccuacaccuuccaggucaagaucaacaacgacuucaacuacgaguucuacaacagcacguggagcuacgugaagcacaccuccaccgagcacaccagcuccagccggaagcgcuccuucuuccggagcuccagcuccagcucccgcagcuacacgucccacaccaacgagauccacaagggcaagagcuaccagcuccugguggucgagaacaccguggagguggcccaguucaucaacaacaaccccgaguuccugcagcucgccgagcccuucuggaaggagcugucccaccuccccagccuguacgacuacuccgcguaccggcgccugaucgaccaguacgggacccacuaccugcagagcgggucccucggcggggaguaccggguccuguucuacguggacagcgagaagcugaagcagaacgacuucaacagcguggaggagaagaagugcaaguccagcggcuggcacuucgucgugaaguucuccagccacggcugcaaggagcucgagaacgcccugaaggccgccuccgggacgcagaacaacgugcugcgcggcgagcccuucauccgcgggggcggggcgggcuucaucagcggccucuccuaccuggagcuggacaacccggccgggaacaagcggcgcuacagcgccugggccgaguccgucaccaaccucccccaggugaucaagcagaagcugacgccccuguacgagcucgugaaggagguccccugcgccagcgugaagaagcuguaccugaagugggcgcucgaggaguaccuggacgaguucgacccgugccacugccggcccugccagaacggcgggcuggccaccgucgagggcacccacugccucugccacugcaagcccuacaccuucggggccgccugcgagcagggcgugcuggugggcaaccaggccgggggcgucgacgggggcugguccugcuggagcuccuggagccccugcgugcagggcaagaagacccgcucccgggagugcaacaacccgccgcccagcgggggcgggcgcuccugcgugggcgagaccacggagagcacccagugcgaggacgaggagcuggagcaccuccggcugcuggagccccacugcuucccccucagccugguccccaccgaguucugccccuccccgcccgcgcugaaggacggguucgugcaggacgagggcaccauguuccccgugggcaagaacgucguguacacgugcaacgagggguacagccucaucggcaaccccguggcccgcugcggggaggaccugcgguggcuggucggcgagaugcacugccagaagaucgccugcgugcucccggugcugauggacgggauccagucccacccccagaagcccuucuacaccgucggcgagaaggugaccgugagcugcuccggcgggaugagccuggagggccccuccgccuuccucugcgggagcucccugaaguggagcccggagaugaagaacgcccgcugcguccagaaggagaacccccugacccaggcggugcccaagugccagcggugggagaagcugcagaacucccgcugcgugugcaagaugcccuacgagugcggcccgagccucgacgucugcgcccaggacgagcgguccaagcgcauccugccccugacggugugcaagaugcacgugcuccacugccaggggcggaacuacacccugaccggccgcgacagcugcacccugcccgccuccgccgagaaggccugcggcgcgugcccccucugggggaagugcgacgccgagagcuccaagugcgucugccgggaggccagcgagugcgaggaggagggcuucuccaucugcguggaggugaacgggaaggagcagacgaugagcgagugcgaggccggcgcgcugcgcugccgggggcagagcaucuccgucaccagcauccgcccgugcgccgccgagacccaguga

SEQ ID NO: 8062 - RNA, 2532 nt, Artificial Sequence
  derived and/or modified sequence opt2 from complement_system_component_C7__Homo_sapiens__AAH63851
augaaggucaucucccucuucauccucgucggcuucaucggcgaguuccaguccuucuccuccgccuccucccccgucaacugccagugggacuucuacgcccccugguccgagugcaacggcugcaccaagacccagacccgccgccgcuccgucgccgucuacggccaguacggcggccagcccugcgucggcaacgccuucgagacccaguccugcgagcccacccgcggcugccccaccgaggagggcugcggcgagcgcuuccgcugcuucuccggccagugcaucuccaagucccucgucugcaacggcgacuccgacugcgacgaggacuccgccgacgaggaccgcugcgaggacuccgagcgccgccccuccugcgacaucgacaagcccccccccaacaucgagcucaccggcaacggcuacaacgagcucaccggccaguuccgcaaccgcgucaucaacaccaaguccuucggcggccagugccgcaaggucuucuccggcgacggcaaggacuucuaccgccucuccggcaacguccucuccuacaccuuccaggucaagaucaacaacgacuucaacuacgaguucuacaacuccaccugguccuacgucaagcacaccuccaccgagcacaccuccuccucccgcaagcgcuccuucuuccgcuccuccuccuccuccucccgcuccuacaccucccacaccaacgagauccacaagggcaaguccuaccagcuccucgucgucgagaacaccgucgaggucgcccaguucaucaacaacaaccccgaguuccuccagcucgccgagcccuucuggaaggagcucucccaccuccccucccucuacgacuacuccgccuaccgccgccucaucgaccaguacggcacccacuaccuccaguccggcucccucggcggcgaguaccgcguccucuucuacgucgacuccgagaagcucaagcagaacgacuucaacuccgucgaggagaagaagugcaaguccuccggcuggcacuucgucgucaaguucuccucccacggcugcaaggagcucgagaacgcccucaaggccgccuccggcacccagaacaacguccuccgcggcgagcccuucauccgcggcggcggcgccggcuucaucuccggccucuccuaccucgagcucgacaaccccgccggcaacaagcgccgcuacuccgccugggccgaguccgucaccaaccucccccaggucaucaagcagaagcucaccccccucuacgagcucgucaaggagguccccugcgccuccgucaagaagcucuaccucaagugggcccucgaggaguaccucgacgaguucgaccccugccacugccgccccugccagaacggcggccucgccaccgucgagggcacccacugccucugccacugcaagcccuacaccuucggcgccgccugcgagcagggcguccucgucggcaaccaggccggcggcgucgacggcggcugguccugcugguccuccuggucccccugcguccagggcaagaagacccgcucccgcgagugcaacaaccccccccccuccggcggcggccgcuccugcgucggcgagaccaccgaguccacccagugcgaggacgaggagcucgagcaccuccgccuccucgagccccacugcuucccccucucccucguccccaccgaguucugccccuccccccccgcccucaaggacggcuucguccaggacgagggcaccauguuccccgucggcaagaacgucgucuacaccugcaacgagggcuacucccucaucggcaaccccgucgcccgcugcggcgaggaccuccgcuggcucgucggcgagaugcacugccagaagaucgccugcguccuccccguccucauggacggcauccagucccacccccagaagcccuucuacaccgucggcgagaaggucaccgucuccugcuccggcggcaugucccucgagggccccuccgccuuccucugcggcuccucccucaaguggucccccgagaugaagaacgcccgcugcguccagaaggagaacccccucacccaggccguccccaagugccagcgcugggagaagcuccagaacucccgcugcgucugcaagaugcccuacgagugcggccccucccucgacgucugcgcccaggacgagcgcuccaagcgcauccucccccucaccgucugcaagaugcacguccuccacugccagggccgcaacuacacccucaccggccgcgacuccugcacccuccccgccuccgccgagaaggccugcggcgccugcccccucuggggcaagugcgacgccgaguccuccaagugcgucugccgcgaggccuccgagugcgaggaggagggcuucuccaucugcgucgaggucaacggcaaggagcagaccauguccgagugcgaggccggcgcccuccgcugccgcggccaguccaucuccgucaccuccauccgccccugcgccgccgagacccaguga

SEQ ID NO: 8063 - RNA, 2532 nt, Artificial Sequence
  derived and/or modified sequence opt3 from complement_system_component_C7__Homo_sapiens__AAH63851
augaaggugaucagccuguucauucucgucggcuuuauaggggaguuccaguccuuuucuucagccaguagccccguuaacugccaaugggacuucuacgcuccuugguccgaauguaauggaugcaccaaaacacagacuagaaggcggucuguggcaguauauggucaguacggcgggcagccaugugugggaaacgccuuugagacgcaaucgugcgaaccgacccgcggcugucccacagaggaagguugcggggagcgauuccguuguuuuucaggacagugcaucagcaagagucuugucuguaauggcgauuccgacugcgaugaggacucugcggaugaagacagaugugaggauagcgaaaggcggccuuccugcgacauugauaaaccacccccuaacaucgagcugacuggcaauggguauaacgaguugaccggacaguuccgcaauagagugauuaacacaaagucauuugguggccagugcaggaaaguuuucaguggggacggaaaggauuuuuaccgguuaagcggcaaugugcugucuuauaccuuccaagucaagaucaacaaugacuuuaacuacgaguucuauaauuccacuuggucauacgugaaacacacaagcaccgagcauacgaguucuucccgcaagaggagcuucuuuagaucgucuuccucaaguagcagguccuacacuucucacaccaacgaaauacauaaagguaagagcuaucagcuacucguaguugagaauacaguggaagucgcucaguucaucaacaacaauccagaguuucugcagcuugccgagcccuucuggaaagaacugucacacuugccuagucucuacgauuauuccgcauaccggcgucugauugaccaauaugggacucauuaccugcagagcggaucucucggcggcgaguaucgcguguuauuuuacguggacucagaaaagcugaagcagaacgauuucaauagugucgaggagaaaaaguguaaaagcuccggguggcacuuuguugugaaguucucuucgcacggaugcaaagaacuugagaacgccuugaaggcugcaagcgguacccaaaauaacguacugagaggcgaaccauuuauccgagggggaggcgccgguuucauuuccgggcuaucauaccucgagcuggacaauccggcuggcaacaaacggcgauauagugccugggcggaaucugugacaaaucuuccccaggucaucaagcagaagcugaccccuuuguacgagcucgugaaagaaguuccaugugcaagcgugaagaaacuguauuuaaagugggcccuggaggaguaccucgaugaauuugaccccugccauugucgcccuugccagaacggaggccuugcuacggucgaggggacucacugucugugccauuguaaaccauauacauucggagccgcaugcgaacaagguguguugguaggcaaucaggcugggggaguugauggcgguugguccuguuggucaagcuggucucccugcgugcaggggaagaagaccagauccagggagugcaacaauccgccucccaguggcggaggccggagcugugucggggagacuacagaaucuacccagugcgaggacgaagaacuagaacaucugcgccuccuggagccacacuguuuuccucuuucccuggugcccacggaguucugcccaucacccccugccuugaaagauggauucguccaagacgaagguaccauguuuccagugggcaagaacguuguguacacauguaaugagggguauagucucauaggaaacccgguagcgagaugcggcgaagaucugaggugguuagucggugagaugcacugucagaaaauugccugcgugcugcccguucuaauggacgggauccagagccacccucagaagccauucuacacugugggcgaaaaagucaccgugucguguuccggaggcaugucucucgaggggcccagcgcauuucugugcggaucaagucuuaagugguccccugagaugaagaacgcucguuguguacaaaaagaaaauccauugacacaggccgugcccaagugccagcggugggagaaacugcagaacucucgaugcguuuguaagaugccguacgaaugcggcccuagccucgaugucugugcucaagacgagagauccaaaaggauucugccacuuacugugugcaagaugcaugugcugcacugucagggucgcaauuauaccuugacagggcgggacucaugcacccuccccgccagcgcagaaaaggccuguggagcuugcccucuguggggcaaaugugaugcggagaguucuaagugcgucuguagagaggcauccgaaugcgaggaagaggguuucagcaucugcguugaggugaacggcaaagaacagacuaugucggagugugaagccggggcuuuaaggugccgcggacaaucaaucucugugacgaguauucgacccugugccgcagagacacaguga

SEQ ID NO: 8064 - RNA, 2532 nt, Artificial Sequence
  derived and/or modified sequence opt4 from complement_system_component_C7__Homo_sapiens__AAH63851
augaaggugaucagccuguucauccuggugggcuucaucggcgaguuccagagcuucagcagcgccagcagccccgugaacugccagugggacuucuacgcccccuggagcgagugcaacggcugcaccaagacccagaccagaagaagaagcguggccguguacggccaguacggcggccagcccugcgugggcaacgccuucgagacccagagcugcgagcccaccagaggcugccccaccgaggagggcugcggcgagagauucagaugcuucagcggccagugcaucagcaagagccuggugugcaacggcgacagcgacugcgacgaggacagcgccgacgaggacagaugcgaggacagcgagagaagacccagcugcgacaucgacaagcccccccccaacaucgagcugaccggcaacggcuacaacgagcugaccggccaguucagaaacagagugaucaacaccaagagcuucggcggccagugcagaaagguguucagcggcgacggcaaggacuucuacagacugagcggcaacgugcugagcuacaccuuccaggugaagaucaacaacgacuucaacuacgaguucuacaacagcaccuggagcuacgugaagcacaccagcaccgagcacaccagcagcagcagaaagagaagcuucuucagaagcagcagcagcagcagcagaagcuacaccagccacaccaacgagauccacaagggcaagagcuaccagcugcuggugguggagaacaccguggagguggcccaguucaucaacaacaaccccgaguuccugcagcuggccgagcccuucuggaaggagcugagccaccugcccagccuguacgacuacagcgccuacagaagacugaucgaccaguacggcacccacuaccugcagagcggcagccugggcggcgaguacagagugcuguucuacguggacagcgagaagcugaagcagaacgacuucaacagcguggaggagaagaagugcaagagcagcggcuggcacuucguggugaaguucagcagccacggcugcaaggagcuggagaacgcccugaaggccgccagcggcacccagaacaacgugcugagaggcgagcccuucaucagaggcggcggcgccggcuucaucagcggccugagcuaccuggagcuggacaaccccgccggcaacaagagaagauacagcgccugggccgagagcgugaccaaccugccccaggugaucaagcagaagcugaccccccuguacgagcuggugaaggaggugcccugcgccagcgugaagaagcuguaccugaagugggcccuggaggaguaccuggacgaguucgaccccugccacugcagacccugccagaacggcggccuggccaccguggagggcacccacugccugugccacugcaagcccuacaccuucggcgccgccugcgagcagggcgugcuggugggcaaccaggccggcggcguggacggcggcuggagcugcuggagcagcuggagccccugcgugcagggcaagaagaccagaagcagagagugcaacaaccccccccccagcggcggcggcagaagcugcgugggcgagaccaccgagagcacccagugcgaggacgaggagcuggagcaccugagacugcuggagccccacugcuucccccugagccuggugcccaccgaguucugccccagcccccccgcccugaaggacggcuucgugcaggacgagggcaccauguuccccgugggcaagaacgugguguacaccugcaacgagggcuacagccugaucggcaaccccguggccagaugcggcgaggaccugagauggcuggugggcgagaugcacugccagaagaucgccugcgugcugcccgugcugauggacggcauccagagccacccccagaagcccuucuacaccgugggcgagaaggugaccgugagcugcagcggcggcaugagccuggagggccccagcgccuuccugugcggcagcagccugaaguggagccccgagaugaagaacgccagaugcgugcagaaggagaacccccugacccaggccgugcccaagugccagagaugggagaagcugcagaacagcagaugcgugugcaagaugcccuacgagugcggccccagccuggacgugugcgcccaggacgagagaagcaagagaauccugccccugaccgugugcaagaugcacgugcugcacugccagggcagaaacuacacccugaccggcagagacagcugcacccugcccgccagcgccgagaaggccugcggcgccugcccccuguggggcaagugcgacgccgagagcagcaagugcgugugcagagaggccagcgagugcgaggaggagggcuucagcaucugcguggaggugaacggcaaggagcagaccaugagcgagugcgaggccggcgcccugagaugcagaggccagagcaucagcgugaccagcaucagacccugcgccgccgagacccaguga

SEQ ID NO: 8065 - RNA, 2532 nt, Artificial Sequence
  derived and/or modified sequence opt5 from complement_system_component_C7__Homo_sapiens__AAH63851
augaaggugaucagccuguucauucucgucggcuuuaucggggaguuccaguccuuuucuagcgccuccucucccguuaacugccaaugggacuucuacgcuccuuggagcgaauguaauggaugcaccaaaacacagacgagacggcgcuccguggccguguauggccaguacgggggacagccgugugucggcaacgcguuugagacccaaucuugcgaacccacaagaggguguccuaccgaggaaggaugcggcgagcgguuccgcuguuuuagcggccagugcauuuccaagagccugguguguaauggggauucugacugcgaugaggacuccgcugaugaagacagaugugaggauagcgaacggcgccccucuugcgacaucgauaaaccucccccuaacauugagcuuacaggaaauggcuauaacgagcugaccgggcaguucagaaaucggguuaucaacacaaaguccuuuggaggccagugccgcaaaguguucagcggggacggaaaggauuuuuacagacucucuggcaauguccuguccuauaccuuccaagugaagaucaacaaugacuuuaacuacgaguucuauaauagcacgugguccuacguuaaacacaccucuacagagcauaccagcuccagccggaagcgcucuuucuuuagauccagcucuagcuccucucggagcuacacaucccacaccaacgaaauucauaaaggcaagagcuaucagcuucugguggucgagaauacgguggaaguggcccaguucaucaacaacaauccggaguuucuccagcuggccgagcccuucuggaaagaacugucucaccucccuucccuguacgauuauagcgcuuaccgcagacuuauugaccaauaugggacacauuaccugcagucuggaucccucggcggggaguaucggguccuguuuuacguugacagcgaaaaacuuaagcagaacgauuucaauuccguggaggaaaagaaguguaaaucuagcggauggcacuuuguggucaaguucuccucucacggcugcaaagagcuggagaacgcccucaaggcugccagcgggacccaaaauaacgugcugagaggagaacccuuuauccgcggcggcggggcgggauucauuuccggccugagcuaccucgagcuggacaauccugccgggaacaaacggagauauucugcuugggccgaauccguuacaaaucuuccccaggugaucaagcagaagcugaccccgcucuacgagcuggucaaagaagugccuugugcuagcguuaagaaacuuuaucugaagugggcccucgaggaguaccuggaugaauuugaccccugccauugucgcccuugccagaacggaggccuggcgaccguggaggggacacacugucucugccauuguaaacccuauacguucggcgccgcuugcgaacaaggaguccuggugggcaaucaggccgggggagucgauggcggguggucuuguugguccagcuggucucccugcgugcagggaaagaagacccggagcagagagugcaacaauccuccgcccuccggcgggggccgcagcuguguuggagagacaaccgaaucuacacagugcgaggacgaagaacuugaacaucugcggcuccuggagccucacuguuuuccccuuucccuggugccuaccgaguucugccccagcccgccugcucucaaagauggcuucguccaagacgaagggacgauguuucccgugggaaagaacguuguguacacauguaaugagggcuauucccugauugggaacccugucgccagaugcggagaagaucugcgcuggcucgugggcgagaugcacugucagaaaaucgccugcgugcugcccguucuuauggacgggauccagucucacccucagaagcccuucuacaccgucggcgaaaaagugaccgugagcuguuccggaggcaugucucuggaggggccgagcgcuuuucucugcggauccucucugaaguggagcccugagaugaagaacgcgcgguguguccaaaaagaaaauccccugacacaggccgugcccaagugccagagaugggagaaacuucagaacucccgcugcguuuguaagaugccuuacgaaugcggcccgagccucgaugugugugcucaagacgagcggucuaaacggauucugccccugaccgucugcaagaugcaugugcuccacugucaggggagaaauuauacacugacgggacgcgacuccugcacccuuccugccagcgccgaaaaggcuuguggcgccugcccccugugggggaaaugugaugcggagucuuccaagugcguuuguagagaggcuagcgaaugcgaggaagagggcuucucuaucugcguggaggucaacggaaaagaacagacaauguccgagugugaagccggcgcccuccggugcagagggcaaagcauuuccgugaccagcauccgcccuugugcugccgagacacaguga

SEQ ID NO: 8066 - protein, 268 aa, Artificial Sequence
  complement_system_component_C8__Homo_sapiens__Q99618
MGSAKSVPVTPARPPPHNKHLARVADPRSPSAGILRTPIQVESSPQPGLPAGEQLEGLKHAQDSDPRSPTLGIARTPMKTSSGDPPSPLVKQLSEVFETEDSKSNLPPEPVLPPEAPLSSELDLPLGTQLSVEEQMPPWNQTEFPSKQVFSKEEARQPTETPVASQSSDKPSRDPETPRSSGSMRNRWKPNSSKVLGRSPLTILQDDNSPGTLTLRQGKRPSPLSENVSELKEGAILGTGRLLKTGGRAWEQGQDHDKENQHFPLVES

SEQ ID NO: 8067 - RNA, 807 nt, Artificial Sequence
  complement_system_component_C8__Homo_sapiens__AAB51327
augggcucagccaagagcgucccagucacaccagcgcggccuccgccgcacaacaagcaucuggcucgaguggcggacccccguucaccuagugcuggcauccugcgcacucccauccagguggagagcucuccacagccaggccuaccagcaggggagcaacuggagggucuuaaacaugcccaggacucagauccccgcucuccuacucuugguauugcacggacaccuaugaagaccagcaguggagaccccccaagcccacuggugaaacagcugagugaaguauuugaaacugaagacucuaaaucaaaucuucccccagagccuguucugcccccagaggcaccuuuaucuucugaauuggacuugccucuggguacccaguuaucuguugaggaacagaugccaccuuggaaccagacugaguuccccuccaaacagguguuuuccaaggaggaagcaagacagcccacagaaaccccuguggccagccagagcuccgacaagcccucaagggacccugagacucccagaucuucagguucuaugcgcaauagauggaaaccaaacagcagcaagguacuagggagauccccccucaccauccugcaggaugacaacuccccuggcacccugacacuacgacaggguaagcggccuucaccccuaagugaaaauguuagugaacuaaaggaaggagccauucuuggaacuggacgacuucugaaaacuggaggacgagcaugggagcaaggccaggaccaugacaaggaaaaucagcacuuucccuugguggagagcuag

SEQ ID NO: 8068 - RNA, 807 nt, Artificial Sequence
  derived and/or modified sequence opt1 from complement_system_component_C8__Homo_sapiens__AAB51327
augggcagcgccaaguccgugcccgucaccccggcccgcccgccgccccacaacaagcaccuggcgcggguggccgacccccgcagccccuccgccgggauccuccggacccccauccagguggagagcagcccccagcccggccugcccgccggggagcagcuggagggccucaagcacgcccaggacuccgacccccgcucccccacgcuggggaucgcgcggaccccgaugaagaccagcuccggcgacccgcccagcccccuggucaagcagcucuccgagguguucgagaccgaggacagcaaguccaaccugccgcccgagcccgugcugccgcccgaggcgccccucagcuccgagcuggaccugccccucggcacgcagcugagcgucgaggagcagaugccgcccuggaaccagaccgaguuccccuccaagcaggucuucagcaaggaggaggcccgccagcccaccgagacccccguggccucccagagcagcgacaagcccucccgggaccccgagacgccccgcagcuccgggagcaugcggaaccgcuggaagccgaacuccagcaaggugcugggccggagcccccucaccauccugcaggacgacaacucccccgggacccugacccuccgccagggcaagcggcccuccccgcugagcgagaacguguccgagcugaaggagggggccauccucggcacgggccgccugcugaagaccgggggccgggccugggagcaggggcaggaccacgacaaggagaaccagcacuucccccucguggagagcuga

SEQ ID NO: 8069 - RNA, 807 nt, Artificial Sequence
  derived and/or modified sequence opt2 from complement_system_component_C8__Homo_sapiens__AAB51327
augggcuccgccaaguccguccccgucacccccgcccgcccccccccccacaacaagcaccucgcccgcgucgccgacccccgcucccccuccgccggcauccuccgcacccccauccaggucgaguccuccccccagcccggccuccccgccggcgagcagcucgagggccucaagcacgcccaggacuccgacccccgcucccccacccucggcaucgcccgcacccccaugaagaccuccuccggcgacccccccuccccccucgucaagcagcucuccgaggucuucgagaccgaggacuccaaguccaaccucccccccgagcccguccucccccccgaggccccccucuccuccgagcucgaccucccccucggcacccagcucuccgucgaggagcagaugccccccuggaaccagaccgaguuccccuccaagcaggucuucuccaaggaggaggcccgccagcccaccgagacccccgucgccucccaguccuccgacaagcccucccgcgaccccgagaccccccgcuccuccggcuccaugcgcaaccgcuggaagcccaacuccuccaagguccucggccgcuccccccucaccauccuccaggacgacaacucccccggcacccucacccuccgccagggcaagcgccccuccccccucuccgagaacgucuccgagcucaaggagggcgccauccucggcaccggccgccuccucaagaccggcggccgcgccugggagcagggccaggaccacgacaaggagaaccagcacuucccccucgucgaguccuga

SEQ ID NO: 8070 - RNA, 807 nt, Artificial Sequence
  derived and/or modified sequence opt3 from complement_system_component_C8__Homo_sapiens__AAB51327
augggcagcgccaaguccgugcccgucaccccugcuagaccaccgccccacaacaaacaucuggcaaggguugccgacccucggucuccaucagcggggauccuccgcacacccauucagguggagaguagcccucaaccaggacuucccgcuggugaacagcuggagggcuugaagcacgcccaggauuccgacccucgaucuccaacuuuagggauagcacguacgccgaugaaaaccucgucaggagaucccccuagcccacugguaaagcagcuaagugaaguguucgagacagaagacuccaaaucuaaucucccucccgagccaguccugcccccggaggccccucuuagcuccgaacuggauuugccccucggcacucaacugucaguggaggaacagaugccaccuuggaaccagaccgaguuucccaguaagcagguuuucagcaaggaggaagcuagacaaccaacagagacccccguggcaucucaguccucagacaaaccuagcagggauccagaaacuccgcggaguucugguuccaugcgcaauagauggaagcccaacagcucgaaaguccuggggaggucuccucucacaaucuuacaggacgauaauuccccaggaacccugacgcuucggcagggcaagcgccccucaccuuugagugagaacgugagcgaacugaaagagggcgccauucuagggacuggacgacuccugaagaccgguggcagagcuugggagcaagggcaggaccaugauaaggaaaaucagcacuuuccacuuguagaguccuga

SEQ ID NO: 8071 - RNA, 807 nt, Artificial Sequence
  derived and/or modified sequence opt4 from complement_system_component_C8__Homo_sapiens__AAB51327
augggcagcgccaagagcgugcccgugacccccgccagaccccccccccacaacaagcaccuggccagaguggccgaccccagaagccccagcgccggcauccugagaacccccauccagguggagagcagcccccagcccggccugcccgccggcgagcagcuggagggccugaagcacgcccaggacagcgaccccagaagccccacccugggcaucgccagaacccccaugaagaccagcagcggcgacccccccagcccccuggugaagcagcugagcgagguguucgagaccgaggacagcaagagcaaccugccccccgagcccgugcugccccccgaggccccccugagcagcgagcuggaccugccccugggcacccagcugagcguggaggagcagaugccccccuggaaccagaccgaguuccccagcaagcagguguucagcaaggaggaggccagacagcccaccgagacccccguggccagccagagcagcgacaagcccagcagagaccccgagacccccagaagcagcggcagcaugagaaacagauggaagcccaacagcagcaaggugcugggcagaagcccccugaccauccugcaggacgacaacagccccggcacccugacccugagacagggcaagagacccagcccccugagcgagaacgugagcgagcugaaggagggcgccauccugggcaccggcagacugcugaagaccggcggcagagccugggagcagggccaggaccacgacaaggagaaccagcacuucccccugguggagagcuga

SEQ ID NO: 8072 - RNA, 807 nt, Artificial Sequence
  derived and/or modified sequence opt5 from complement_system_component_C8__Homo_sapiens__AAB51327
augggcagcgccaaguccgugcccgucaccccugcuagaccgcccccucacaacaaacaucuggcccggguugcggacccccgcucuccuagcgcugggauccucagaacacccauucagguggaguccucuccucaaccgggacugcccgccggcgaacagcuugaggggcugaagcacgcccaggauagcgacccucggucccccacgcucggaaucgcucgcaccccuaugaaaacaucuagcggcgaucccccguccccucuggugaagcagcuuagcgaagucuucgagaccgaagacucuaaauccaaucugcccccugagcccgugcugcccccugaggccccgcucagcucugaacuggaucucccccuggggacacaacuuuccguugaggaacagaugccucccuggaaccagaccgaguuuccuagcaaacagguguucucuaaggaggaagcuagacaacccacagagaccccggucgccucccagagcuccgacaagccuucucgggaucccgaaacgccucgcagcuccggaagcaugagaaaucgguggaagcccaacucuuccaaagugcugggccgcagcccucucaccauucugcaggacgauaauucucccggcacacuuacccugagacaggggaagcggccgagcccucucuccgagaacguuucugaacugaaagagggagcgauccugggcacagggcgccuccugaagaccggaggcagagccugggagcaagggcaggaccaugauaaggaaaaucagcacuuuccccuuguggagagcuga

SEQ ID NO: 8073 - protein, 559 aa, Artificial Sequence [sequence omitted]

SEQ ID NO: 8074 - RNA, 1680 nt, Artificial Sequence
  complement_system_component_C9__Homo_sapiens__EAW55986
augucagccugcuggagcuuugcaguugcaaucugcauuuuagaaauaagcauccucacagcacaguacacgaccaguuaugacccagagcuaacagaaagcaguggcucugcaucacacauagacugcagaaugagccccuggagugaauggucacaaugcgauccuugucucagacaaauguuucguucaagaagcauugaggucuuuggacaauuuaaugggaaaagaugcaccgacgcugugggagacagacgacagugugugcccacagagcccugugaggaugcugaggaugacugcggaaaugacuuucaaugcaguacaggcagaugcauaaagaugcgacuucgguguaauggugacaaugacugcggagacuuuucagaugaggaugauugugaaagugagccccguccccccugcagagacagagugguagaagagucugagcuggcacgaacagcaggcuaugggaucaacauuuuagggauggauccccuaagcacaccuuuugacaaugaguucuacaauggacucuguaaccgggaucgggauggaaacacucugacauacuaccgaagaccuuggaacguggcuucuuugaucuaugaaaccaaaggcgagaaaaauuucagaaccgaacauuacgaagaacaaauugaagcauuuaaaaguaucauccaagagaagacaucaaauuuuaaugcagcuauaucucuaaaauuuacacccacugaaacaaauaaagcugaacaauguugugaggaaacagccuccucaauuucuuuacauggcaaggguaguuuucgguuuucauauuccaaaaaugaaacuuaccaacuauuuuugucauauucuucaaagaaggaaaaaauguuucugcaugugaaaggagaaauucaucugggaagauuuguaaugagaaaucgcgauguugugcucacaacaacuuuuguggaugauauaaaagcuuugccaacuaccuaugaaaagggagaauauuuugccuuuuuggaaaccuauggaacucacuacaguagcucugggucucuaggaggacucuaugaacuaauauauguuuuggauaaagcuuccaugaagcggaaagguguugaacuaaaagacauaaagagaugccuuggguaucaucuggauguaucucuggcuuucucugaaaucucuguuggagcugaauuuaauaaagaugauuguguaaagaggggagaggguagagcuguaaacaucaccagugaaaaccucauagaugauguuguuucacucauaagagguggaaccagaaaauaugcauuugaacugaaagaaaagcuucuccgaggaaccgugauugaugugacugacuuugucaacugggccucuuccauaaaugaugcuccuguucucauuagucaaaaacugucuccuauauauaaucugguuccagugaaaaugaaaaaugcacaccuaaagaaacaaaacuuggaaagagccauugaagacuauaucaaugaauuuaguguaagaaaaugccacacaugccaaaauggagguacagugauucuaauggauggaaaguguuugugugccugcccauucaaauuugagggaauugccugugaaaucaguaaacaaaaaauuucugaaggauugccagcccuagaguuccccaaugaaaaauag

SEQ ID NO: 8075 - RNA, 1680 nt, Artificial Sequence
  derived and/or modified sequence opt1 from complement_system_component_C9__Homo_sapiens__EAW55986
augagcgccugcugguccuucgccguggcgaucugcauccuggagaucagcauccucaccgcccaguacaccacguccuacgaccccgagcugaccgagagcuccggcagcgccucccacaucgacugccgcaugagcccgugguccgaguggagccagugcgaccccugccugcggcagauguuccgcucccggagcaucgaggucuucgggcaguucaacggcaagcgcugcaccgacgccgugggggaccggcgccagugcgugcccaccgagcccugcgaggacgccgaggacgacugcggcaacgacuuccagugcuccacggggcggugcaucaagaugcgccuccggugcaacggcgacaacgacugcggcgacuucagcgacgaggacgacugcgaguccgagccgcgcccgcccugccgggaccgcgucguggaggagagcgagcuggcgcggaccgccggguacggcaucaacauccuggggauggacccccucuccacccccuucgacaacgaguucuacaacggccugugcaaccgcgaccgggacgggaacacccugacguacuaccgccggcccuggaacguggccagccucaucuacgagaccaagggcgagaagaacuuccgcaccgagcacuacgaggagcagaucgaggccuucaaguccaucauccaggagaagaccagcaacuucaacgcggccaucagccugaaguucacgcccaccgagaccaacaaggccgagcagugcugcgaggagaccgccuccagcaucucccugcacggcaaggggagcuuccgguucuccuacagcaagaacgagacguaccagcuguuccucuccuacagcuccaagaaggagaagauguuccugcacgucaagggcgagauccaccucgggcgcuucgugaugcggaaccgcgacgugguccugaccaccaccuucguggacgacaucaaggcccugcccacgaccuacgagaagggcgaguacuucgcguuccucgagaccuacggcacccacuacagcuccagcgggucccugggcgggcuguacgagcucaucuacgugcuggacaaggccagcaugaagcgcaagggcgucgagcugaaggacaucaagcggugccucggguaccaccuggacgugucccuggccuucagcgagaucuccgugggcgccgaguucaacaaggacgacugcgucaagcgcggcgaggggcgggccgugaacaucacgagcgagaaccucaucgacgacguggucucccugauccgcggcgggacccggaaguacgcguucgagcugaaggagaagcuccugcgcggcaccgugaucgacgugaccgacuucgucaacugggccagcagcaucaacgacgccccggugcugaucucccagaagcucagccccaucuacaaccuggugcccgucaagaugaagaacgcccaccugaagaagcagaaccucgagcgggccaucgaggacuacaucaacgaguucuccgugcgcaagugccacacgugccagaacgggggcaccgucauccugauggacggcaagugccugugcgcgugccccuucaaguucgaggggaucgccugcgagaucagcaagcagaagaucuccgagggccucccggcccuggaguuccccaacgagaaguga

SEQ ID NO: 8076 - RNA, 1680 nt, Artificial Sequence
  derived and/or modified sequence opt2 from complement_system_component_C9__Homo_sapiens__EAW55986
auguccgccugcugguccuucgccgucgccaucugcauccucgagaucuccauccucaccgcccaguacaccaccuccuacgaccccgagcucaccgaguccuccggcuccgccucccacaucgacugccgcaugucccccugguccgaguggucccagugcgaccccugccuccgccagauguuccgcucccgcuccaucgaggucuucggccaguucaacggcaagcgcugcaccgacgccgucggcgaccgccgccagugcguccccaccgagcccugcgaggacgccgaggacgacugcggcaacgacuuccagugcuccaccggccgcugcaucaagaugcgccuccgcugcaacggcgacaacgacugcggcgacuucuccgacgaggacgacugcgaguccgagccccgcccccccugccgcgaccgcgucgucgaggaguccgagcucgcccgcaccgccggcuacggcaucaacauccucggcauggacccccucuccacccccuucgacaacgaguucuacaacggccucugcaaccgcgaccgcgacggcaacacccucaccuacuaccgccgccccuggaacgucgccucccucaucuacgagaccaagggcgagaagaacuuccgcaccgagcacuacgaggagcagaucgaggccuucaaguccaucauccaggagaagaccuccaacuucaacgccgccaucucccucaaguucacccccaccgagaccaacaaggccgagcagugcugcgaggagaccgccuccuccaucucccuccacggcaagggcuccuuccgcuucuccuacuccaagaacgagaccuaccagcucuuccucuccuacuccuccaagaaggagaagauguuccuccacgucaagggcgagauccaccucggccgcuucgucaugcgcaaccgcgacgucguccucaccaccaccuucgucgacgacaucaaggcccuccccaccaccuacgagaagggcgaguacuucgccuuccucgagaccuacggcacccacuacuccuccuccggcucccucggcggccucuacgagcucaucuacguccucgacaaggccuccaugaagcgcaagggcgucgagcucaaggacaucaagcgcugccucggcuaccaccucgacgucucccucgccuucuccgagaucuccgucggcgccgaguucaacaaggacgacugcgucaagcgcggcgagggccgcgccgucaacaucaccuccgagaaccucaucgacgacgucgucucccucauccgcggcggcacccgcaaguacgccuucgagcucaaggagaagcuccuccgcggcaccgucaucgacgucaccgacuucgucaacugggccuccuccaucaacgacgcccccguccucaucucccagaagcucucccccaucuacaaccucguccccgucaagaugaagaacgcccaccucaagaagcagaaccucgagcgcgccaucgaggacuacaucaacgaguucuccguccgcaagugccacaccugccagaacggcggcaccgucauccucauggacggcaagugccucugcgccugccccuucaaguucgagggcaucgccugcgagaucuccaagcagaagaucuccgagggccuccccgcccucgaguuccccaacgagaaguga

SEQ ID NO: 8077 - RNA, 1680 nt, Artificial Sequence
  derived and/or modified sequence opt3 from complement_system_component_C9__Homo_sapiens__EAW55986
augagcgccugcugguccuucgcuguggcaaucuguauucuggagauaucuauccucaccgcccaauacacaacuucauaugaccccgaacuuacggagaguagcggcuccgcgucucacauugauugcagaaugucgccuuggucagaauggagccaaugugacccaugccugaggcagauguuucggagucgcuccaucgaggucuucgggcaguuuaacggaaagcgauguaccgaugcuguuggugaccguagacagugcgugccgacagaacccugugaggaugccgaggacgauugcggcaaugacuuccaauguucuacugggaggugcauuaaaaugcgguugcgcuguaacggagauaaugacugcggcgauuuuagcgacgaagaugacugcgaguccgaaccuagaccacccuguagggaccggguaguggaggagucagaauuagcacgcaccgccgguuacgggaucaacauacugggaauggauccucuaaguacaccauucgacaaugaguuuuauaacggccucugcaaucgagauagagacggcaacacccugacuuacuauaggcggcccuggaaugucgcuagccuuaucuacgaaacaaagggggagaaaaacuuccguaccgaacauuaugaggagcagauugaagcauuuaagucuaucauucaggagaaaacguccaauuucaacgccgcuaucucacugaaguuuacuccuaccgaaacaaauaaggccgagcaguguugcgaagagacugcgagcaguauaucuuugcacggaaaagguuccuuccgcuuuagcuacucgaagaacgagaccuaccaacucuuccugucuuauuccaguaaaaaggagaaaauguuccugcaugugaagggcgaaauucaccucgggagauuuguuaugaggaaucgggauguggucuuaacaaccacguucguggacgauaucaaggcacugccaacuacauacgaaaaaggagaguauuuugccuuccuugaaaccuacggcacucauuauucaagcuccgguucuuugggagggcuguacgagcuaauuuauguacucgacaaggcuagcaugaaacgaaagggcguugagcugaaagauaucaagcgcugucuuggcuaccaccuggacgugucauuggccuuuagugaaaucuccgucggggcagaguucaacaaagaugacugcgugaagagaggagaagguagggcugugaacauuacaagcgagaaucucauagacgaugucguuucucugauccggggcgggacccgcaaguacgccuuugaguuaaaagaaaagcugcucagaggaacggugauugacguaaccgauuucgugaacugggcgucaaguaucaaugacgccccgguccuuauaagccagaaacugucccccauuuauaacuuggugccuguuaagaugaaaaaugcacaccuaaagaagcagaaccuggagagggcuaucgaagauuacaucaaugaguuuucugugcguaaaugucauacaugccagaacggcgguacugucauucucauggacgggaagugucugugcgccuguccauucaaauuugaaggcaucgcuugcgagauuucgaagcagaaaauaagcgagggacuucccgcccuggaguucccuaaugaaaaguga

SEQ ID NO: 8078 - RNA, 1680 nt, Artificial Sequence
  derived and/or modified sequence opt4 from complement_system_component_C9__Homo_sapiens__EAW55986
augagcgccugcuggagcuucgccguggccaucugcauccuggagaucagcauccugaccgcccaguacaccaccagcuacgaccccgagcugaccgagagcagcggcagcgccagccacaucgacugcagaaugagccccuggagcgaguggagccagugcgaccccugccugagacagauguucagaagcagaagcaucgagguguucggccaguucaacggcaagagaugcaccgacgccgugggcgacagaagacagugcgugcccaccgagcccugcgaggacgccgaggacgacugcggcaacgacuuccagugcagcaccggcagaugcaucaagaugagacugagaugcaacggcgacaacgacugcggcgacuucagcgacgaggacgacugcgagagcgagcccagaccccccugcagagacagagugguggaggagagcgagcuggccagaaccgccggcuacggcaucaacauccugggcauggacccccugagcacccccuucgacaacgaguucuacaacggccugugcaacagagacagagacggcaacacccugaccuacuacagaagacccuggaacguggccagccugaucuacgagaccaagggcgagaagaacuucagaaccgagcacuacgaggagcagaucgaggccuucaagagcaucauccaggagaagaccagcaacuucaacgccgccaucagccugaaguucacccccaccgagaccaacaaggccgagcagugcugcgaggagaccgccagcagcaucagccugcacggcaagggcagcuucagauucagcuacagcaagaacgagaccuaccagcuguuccugagcuacagcagcaagaaggagaagauguuccugcacgugaagggcgagauccaccugggcagauucgugaugagaaacagagacguggugcugaccaccaccuucguggacgacaucaaggcccugcccaccaccuacgagaagggcgaguacuucgccuuccuggagaccuacggcacccacuacagcagcagcggcagccugggcggccuguacgagcugaucuacgugcuggacaaggccagcaugaagagaaagggcguggagcugaaggacaucaagagaugccugggcuaccaccuggacgugagccuggccuucagcgagaucagcgugggcgccgaguucaacaaggacgacugcgugaagagaggcgagggcagagccgugaacaucaccagcgagaaccugaucgacgacguggugagccugaucagaggcggcaccagaaaguacgccuucgagcugaaggagaagcugcugagaggcaccgugaucgacgugaccgacuucgugaacugggccagcagcaucaacgacgcccccgugcugaucagccagaagcugagccccaucuacaaccuggugcccgugaagaugaagaacgcccaccugaagaagcagaaccuggagagagccaucgaggacuacaucaacgaguucagcgugagaaagugccacaccugccagaacggcggcaccgugauccugauggacggcaagugccugugcgccugccccuucaaguucgagggcaucgccugcgagaucagcaagcagaagaucagcgagggccugcccgcccuggaguuccccaacgagaaguga

SEQ ID NO: 8079 - RNA, 1680 nt, Artificial Sequence
  derived and/or modified sequence opt5 from complement_system_component_C9__Homo_sapiens__EAW55986
augagcgccugcugguccuucgcuguggccaucuguauucuggagaucucuauucucaccgcgcaauacacaacgagcuaugaccccgaacugaccgaguccucuggcagcgcuucccacaucgauugcagaaugucuccuuggagcgaauggucccaaugugacccgugccuucggcagauguuucgcagcagaucuauugaggucuucgggcaguuuaacggaaagcgguguacagaugccguuggcgaccgcagacagugcgugcccaccgaaccuugugaggaugccgaggacgauugcgggaaugacuuccaauguuccacaggacggugcaucaaaaugcgccugagauguaacggcgauaaugacugcggggauuuuagcgacgaagaugacugcgagucugaaccccggccucccugucgcgacagaguggucgaggaguccgaacucgcucggaccgccggauacggcaucaacauucugggcauggauccucuuagcacaccguucgacaaugaguuuuauaacgggcugugcaaucgcgauagagacggaaacacccucacguacuaucggcgccccuggaauguggcuucucugaucuacgaaaccaagggcgagaaaaacuucagaacagaacauuaugaggagcagauugaagccuuuaaguccaucauucaggagaaaaccagcaauuucaacgcggccaucucccugaaguuuacaccuaccgaaacgaauaaggcugagcaguguugcgaagagacagccucuagcauuucccuccacgggaaaggcagcuuccgguuuucuuacuccaagaacgagaccuaccaacuguuccuuagcuauucuagcaaaaaggagaaaauguuccugcauguuaagggagaaauccaccucgggagauuugugaugcgcaaucgggaugucgugcugacaaccaccuucguugacgauaucaaggcccuucccacaacguacgaaaaaggagaguauuuugcuuuccuggaaaccuacggcacacauuauuccucuagcggcucccucgggggacuguacgagcugauuuaugugcucgacaaggcgagcaugaaaagaaagggcgucgagcugaaagauaucaagcgcugucuuggguaccaccuggacgugucucucgccuuuuccgaaauuagcgugggagcugaguucaacaaagaugacugcgucaagcggggcgaagggagagccguuaacaucaccucugagaaucugauugacgauguggugucccuuauccgcggaggcacacggaaguacgcuuuugagcugaaagaaaagcuccugagaggcaccgucaucgacgugacggauuucguuaacugggccagcuccauuaaugacgccccugugcugaucucucagaaacucagccccauuuauaaccuggucccggugaagaugaaaaaugcucaccuuaagaagcagaaccuggagcgcgcgaucgaagauuacauuaaugaguuuuccguucggaaaugucauacaugccagaacgggggaaccgugauccucauggacggcaagugucugugcgccuguccuuucaaauuugaagggaucgcuugcgagauuucuaagcagaaaaucagcgagggacuucccgcccuggaguucccuaaugaaaaguga

SEQ ID NO: 8080 - protein, 559 aa, Artificial Sequence
  complement_system_component_C9__Homo_sapiens__P02748
MSACRSFAVAICILEISILTAQYTTSYDPELTESSGSASHIDCRMSPWSEWSQCDPCLRQMFRSRSIEVFGQFNGKRCTDAVGDRRQCVPTEPCEDAEDDCGNDFQCSTGRCIKMRLRCNGDNDCGDFSDEDDCESEPRPPCRDRVVEESELARTAGYGINILGMDPLSTPFDNEFYNGLCNRDRDGNTLTYYRRPWNVASLIYETKGEKNFRTEHYEEQIEAFKSIIQEKTSNFNAAISLKFTPTETNKAEQCCEETASSISLHGKGSFRFSYSKNETYQLFLSYSSKKEKMFLHVKGEIHLGRFVMRNRDVVLTTTFVDDIKALPTTYEKGEYFAFLETYGTHYSSSGSLGGLYELIYVLDKASMKRKGVELKDIKRCLGYHLDVSLAFSEISVGAEFNKDDCVKRGEGRAVNITSENLIDDVVSLIRGGTRKYAFELKEKLLRGTVIDVTDFVNWASSINDAPVLISQKLSPIYNLVPVKMKNAHLKKQNLERAIEDYINEFSVRKCHTCQNGGTVILMDGKCLCACPFKFEGIACEISKQKISEGLPALEFPNEK

SEQ ID NO: 8081 - RNA, 1680 nt, Artificial Sequence
  complement_system_component_C9__Homo_sapiens__AAH20721
augucagccugccggagcuuugcaguugcaaucugcauuuuagaaauaagcauccucacagcacaguacacgaccaguuaugacccagagcuaacagaaagcaguggcucugcaucacacauagacugcagaaugagccccuggagugaauggucacaaugcgauccuugucucagacaaauguuucguucaagaagcauugaggucuuuggacaauuuaaugggaaaagaugcaccgacgcugugggagacagacgacagugugugcccacagagcccugugaggaugcugaggaugacugcggaaaugacuuucaaugcaguacaggcagaugcauaaagaugcgacuucgguguaauggugacaaugacugcggagacuuuucagaugaggaugauugugaaagugagccccguccccccugcagagacagagugguagaagagucugagcuggcacgaacagcaggcuaugggaucaacauuuuagggauggauccccuaagcacaccuuuugacaaugaguucuacaauggacucuguaaccgggaucgggauggaaacacucugacauacuaccgaagaccuuggaacguggcuucuuugaucuaugaaaccaaaggcgagaaaaauuucagaaccgaacauuacgaagaacaaauugaagcauuuaaaaguaucauccaagagaagacaucaaauuuuaaugcagcuauaucucuaaaauuuacacccacugaaacaaauaaagcugaacaauguugugaggaaacagccuccucaauuucuuuacauggcaaggguaguuuucgguuuucauauuccaaaaaugaaacuuaccaacuauuuuugucauauucuucaaagaaggaaaaaauguuucugcaugugaaaggagaaauucaucugggaagauuuguaaugagaaaucgcgauguugugcucacaacaacuuuuguggaugauauaaaagcuuugccaacuaccuaugaaaagggagaauauuuugccuuuuuggaaaccuauggaacucacuacaguagcucugggucucuaggaggacucuaugaacuaauauauguuuuggauaaagcuuccaugaagcggaaagguguugaacuaaaagacauaaagagaugccuuggguaucaucuggauguaucucuggcuuucucugaaaucucuguuggagcugaauuuaauaaagaugauuguguaaagaggggagaggguagagcuguaaacaucaccagugaaaaccucauagaugauguuguuucacucauaagagguggaaccagaaaauaugcauuugaacugaaagaaaagcuucuccgaggaaccgugauugaugugacugacuuugucaacugggccucuuccauaaaugaugcuccuguucucauuagucaaaaacugucuccuauauauaaucugguuccagugaaaaugaaaaaugcacaccuaaagaaacaaaacuuggaaagagccauugaagacuauaucaaugaauuuaguguaagaaaaugccacacaugccaaaauggagguacagugauucuaauggauggaaaguguuugugugccugcccauucaaauuugagggaauugccugugaaaucaguaaacaaaaaauuucugaaggauugccagcccuagaguuccccaaugaaaaauag

SEQ ID NO: 8082 - RNA, 1680 nt, Artificial Sequence
  derived and/or modified sequence opt1 from complement_system_component_C9__Homo_sapiens__AAH20721
augagcgccugccgcuccuucgccguggcgaucugcauccuggagaucagcauccucaccgcccaguacaccacguccuacgaccccgagcugaccgagagcuccggcagcgccucccacaucgacugccggaugagcccgugguccgaguggagccagugcgaccccugccugcgccagauguuccggucccgcagcaucgaggucuucgggcaguucaacggcaagcggugcaccgacgccgugggggaccgccggcagugcgugcccaccgagcccugcgaggacgccgaggacgacugcggcaacgacuuccagugcuccacggggcgcugcaucaagaugcggcuccgcugcaacggcgacaacgacugcggcgacuucagcgacgaggacgacugcgaguccgagccgcggccgcccugccgcgaccgggucguggaggagagcgagcuggcgcgcaccgccggguacggcaucaacauccuggggauggacccccucuccacccccuucgacaacgaguucuacaacggccugugcaaccgggaccgcgacgggaacacccugacguacuaccggcgccccuggaacguggccagccucaucuacgagaccaagggcgagaagaacuuccggaccgagcacuacgaggagcagaucgaggccuucaaguccaucauccaggagaagaccagcaacuucaacgcggccaucagccugaaguucacgcccaccgagaccaacaaggccgagcagugcugcgaggagaccgccuccagcaucucccugcacggcaaggggagcuuccgcuucuccuacagcaagaacgagacguaccagcuguuccucuccuacagcuccaagaaggagaagauguuccugcacgucaagggcgagauccaccucgggcgguucgugaugcgcaaccgcgacgugguccugaccaccaccuucguggacgacaucaaggcccugcccacgaccuacgagaagggcgaguacuucgcguuccucgagaccuacggcacccacuacagcuccagcgggucccugggcgggcuguacgagcucaucuacgugcuggacaaggccagcaugaagcggaagggcgucgagcugaaggacaucaagcgcugccucggguaccaccuggacgugucccuggccuucagcgagaucuccgugggcgccgaguucaacaaggacgacugcgucaagcggggcgaggggcgcgccgugaacaucacgagcgagaaccucaucgacgacguggucucccugauccggggcgggacccgcaaguacgcguucgagcugaaggagaagcuccugcggggcaccgugaucgacgugaccgacuucgucaacugggccagcagcaucaacgacgccccggugcugaucucccagaagcucagccccaucuacaaccuggugcccgucaagaugaagaacgcccaccugaagaagcagaaccucgagcgcgccaucgaggacuacaucaacgaguucuccgugcggaagugccacacgugccagaacgggggcaccgucauccugauggacggcaagugccugugcgcgugccccuucaaguucgaggggaucgccugcgagaucagcaagcagaagaucuccgagggccucccggcccuggaguuccccaacgagaaguga

SEQ ID NO: 8083 - RNA, 1680 nt, Artificial Sequence
  derived and/or modified sequence opt2 from complement_system_component_C9__Homo_sapiens__AAH20721
auguccgccugccgcuccuucgccgucgccaucugcauccucgagaucuccauccucaccgcccaguacaccaccuccuacgaccccgagcucaccgaguccuccggcuccgccucccacaucgacugccgcaugucccccugguccgaguggucccagugcgaccccugccuccgccagauguuccgcucccgcuccaucgaggucuucggccaguucaacggcaagcgcugcaccgacgccgucggcgaccgccgccagugcguccccaccgagcccugcgaggacgccgaggacgacugcggcaacgacuuccagugcuccaccggccgcugcaucaagaugcgccuccgcugcaacggcgacaacgacugcggcgacuucuccgacgaggacgacugcgaguccgagccccgcccccccugccgcgaccgcgucgucgaggaguccgagcucgcccgcaccgccggcuacggcaucaacauccucggcauggacccccucuccacccccuucgacaacgaguucuacaacggccucugcaaccgcgaccgcgacggcaacacccucaccuacuaccgccgccccuggaacgucgccucccucaucuacgagaccaagggcgagaagaacuuccgcaccgagcacuacgaggagcagaucgaggccuucaaguccaucauccaggagaagaccuccaacuucaacgccgccaucucccucaaguucacccccaccgagaccaacaaggccgagcagugcugcgaggagaccgccuccuccaucucccuccacggcaagggcuccuuccgcuucuccuacuccaagaacgagaccuaccagcucuuccucuccuacuccuccaagaaggagaagauguuccuccacgucaagggcgagauccaccucggccgcuucgucaugcgcaaccgcgacgucguccucaccaccaccuucgucgacgacaucaaggcccuccccaccaccuacgagaagggcgaguacuucgccuuccucgagaccuacggcacccacuacuccuccuccggcucccucggcggccucuacgagcucaucuacguccucgacaaggccuccaugaagcgcaagggcgucgagcucaaggacaucaagcgcugccucggcuaccaccucgacgucucccucgccuucuccgagaucuccgucggcgccgaguucaacaaggacgacugcgucaagcgcggcgagggccgcgccgucaacaucaccuccgagaaccucaucgacgacgucgucucccucauccgcggcggcacccgcaaguacgccuucgagcucaaggagaagcuccuccgcggcaccgucaucgacgucaccgacuucgucaacugggccuccuccaucaacgacgcccccguccucaucucccagaagcucucccccaucuacaaccucguccccgucaagaugaagaacgcccaccucaagaagcagaaccucgagcgcgccaucgaggacuacaucaacgaguucuccguccgcaagugccacaccugccagaacggcggcaccgucauccucauggacggcaagugccucugcgccugccccuucaaguucgagggcaucgccugcgagaucuccaagcagaagaucuccgagggccuccccgcccucgaguuccccaacgagaaguga

SEQ ID NO: 8084 - RNA, 1680 nt, Artificial Sequence
  derived and/or modified sequence opt3 from complement_system_component_C9__Homo_sapiens__AAH20721
augagcgccugcagauccuucgcuguggcaaucuguauucuggagauaucuauccucaccgcccaauacacaacuucauaugaccccgaacuuacggagaguagcggcuccgcgucucacauugauugcaggaugucgccuuggucagaauggagccaaugugacccaugccugcggcagauguuucgcagucgauccaucgaggucuucgggcaguuuaacggaaagcguuguaccgaugcuguuggugacagaaggcagugcgugccgacagaacccugugaggaugccgaggacgauugcggcaaugacuuccaauguucuacugggcggugcauuaaaaugcgcuugagauguaacggagauaaugacugcggcgauuuuagcgacgaagaugacugcgaguccgaaccuaggccacccugucgggaccgcguaguggaggagucagaauuagcacgaaccgccgguuacgggaucaacauacugggaauggauccucuaaguacaccauucgacaaugaguuuuauaacggccucugcaauagagauagggacggcaacacccugacuuacuaucggcgucccuggaaugucgcuagccuuaucuacgaaacaaagggggagaaaaacuuccgcaccgaacauuaugaggagcagauugaagcauuuaagucuaucauucaggagaaaacguccaauuucaacgccgcuaucucacugaaguuuacuccuaccgaaacaaauaaggccgagcaguguugcgaagagacugcgagcaguauaucuuugcacggaaaagguuccuucagauuuagcuacucgaagaacgagaccuaccaacucuuccugucuuauuccaguaaaaaggagaaaauguuccugcaugugaagggcgaaauucaccucgggagguuuguuaugcggaaucgagauguggucuuaacaaccacguucguggacgauaucaaggcacugccaacuacauacgaaaaaggagaguauuuugccuuccuugaaaccuacggcacucauuauucaagcuccgguucuuugggagggcuguacgagcuaauuuauguacucgacaaggcuagcaugaaacgcaagggcguugagcugaaagauaucaagagaugucuuggcuaccaccuggacgugucauuggccuuuagugaaaucuccgucggggcagaguucaacaaagaugacugcgugaagaggggagaaggucgggcugugaacauuacaagcgagaaucucauagacgaugucguuucucugauccgcggcgggaccagaaaguacgccuuugaguuaaaagaaaagcugcucaggggaacggugauugacguaaccgauuucgugaacugggcgucaaguaucaaugacgccccgguccuuauaagccagaaacugucccccauuuauaacuuggugccuguuaagaugaaaaaugcacaccuaaagaagcagaaccuggagcgugcuaucgaagauuacaucaaugaguuuucugugcggaaaugucauacaugccagaacggcgguacugucauucucauggacgggaagugucugugcgccuguccauucaaauuugaaggcaucgcuugcgagauuucgaagcagaaaauaagcgagggacuucccgcccuggaguucccuaaugaaaaguga

SEQ ID NO: 8085 - RNA, 1680 nt, Artificial Sequence
  derived and/or modified sequence opt4 from complement_system_component_C9__Homo_sapiens__AAH20721
augagcgccugcagaagcuucgccguggccaucugcauccuggagaucagcauccugaccgcccaguacaccaccagcuacgaccccgagcugaccgagagcagcggcagcgccagccacaucgacugcagaaugagccccuggagcgaguggagccagugcgaccccugccugagacagauguucagaagcagaagcaucgagguguucggccaguucaacggcaagagaugcaccgacgccgugggcgacagaagacagugcgugcccaccgagcccugcgaggacgccgaggacgacugcggcaacgacuuccagugcagcaccggcagaugcaucaagaugagacugagaugcaacggcgacaacgacugcggcgacuucagcgacgaggacgacugcgagagcgagcccagaccccccugcagagacagagugguggaggagagcgagcuggccagaaccgccggcuacggcaucaacauccugggcauggacccccugagcacccccuucgacaacgaguucuacaacggccugugcaacagagacagagacggcaacacccugaccuacuacagaagacccuggaacguggccagccugaucuacgagaccaagggcgagaagaacuucagaaccgagcacuacgaggagcagaucgaggccuucaagagcaucauccaggagaagaccagcaacuucaacgccgccaucagccugaaguucacccccaccgagaccaacaaggccgagcagugcugcgaggagaccgccagcagcaucagccugcacggcaagggcagcuucagauucagcuacagcaagaacgagaccuaccagcuguuccugagcuacagcagcaagaaggagaagauguuccugcacgugaagggcgagauccaccugggcagauucgugaugagaaacagagacguggugcugaccaccaccuucguggacgacaucaaggcccugcccaccaccuacgagaagggcgaguacuucgccuuccuggagaccuacggcacccacuacagcagcagcggcagccugggcggccuguacgagcugaucuacgugcuggacaaggccagcaugaagagaaagggcguggagcugaaggacaucaagagaugccugggcuaccaccuggacgugagccuggccuucagcgagaucagcgugggcgccgaguucaacaaggacgacugcgugaagagaggcgagggcagagccgugaacaucaccagcgagaaccugaucgacgacguggugagccugaucagaggcggcaccagaaaguacgccuucgagcugaaggagaagcugcugagaggcaccgugaucgacgugaccgacuucgugaacugggccagcagcaucaacgacgcccccgugcugaucagccagaagcugagccccaucuacaaccuggugcccgugaagaugaagaacgcccaccugaagaagcagaaccuggagagagccaucgaggacuacaucaacgaguucagcgugagaaagugccacaccugccagaacggcggcaccgugauccugauggacggcaagugccugugcgccugccccuucaaguucgagggcaucgccugcgagaucagcaagcagaagaucagcgagggccugcccgcccuggaguuccccaacgagaaguga

SEQ ID NO: 8086 - RNA, 1680 nt, Artificial Sequence
  derived and/or modified sequence opt5 from complement_system_component_C9__Homo_sapiens__AAH20721
augagcgccugcagauccuucgcuguggccaucuguauucuggagaucucuauucucaccgcgcaauacacaacgagcuaugaccccgaacugaccgaguccucuggcagcgcuucccacaucgauugccggaugucuccuuggagcgaauggucccaaugugacccgugccuucgccagauguuuagaagccggucuauugaggucuucgggcaguuuaacggaaagcgcuguacagaugccguuggcgacagacggcagugcgugcccaccgaaccuugugaggaugccgaggacgauugcgggaaugacuuccaauguuccacaggacgcugcaucaaaaugagacugcgguguaacggcgauaaugacugcggggauuuuagcgacgaagaugacugcgagucugaaccccgcccucccuguagagaccggguggucgaggaguccgaacucgcucgcaccgccggauacggcaucaacauucugggcauggauccucuuagcacaccguucgacaaugaguuuuauaacgggcugugcaauagagaucgggacggaaacacccucacguacuaucgcagacccuggaauguggcuucucugaucuacgaaaccaagggcgagaaaaacuuccggacagaacauuaugaggagcagauugaagccuuuaaguccaucauucaggagaaaaccagcaauuucaacgcggccaucucccugaaguuuacaccuaccgaaacgaauaaggcugagcaguguugcgaagagacagccucuagcauuucccuccacgggaaaggcagcuucagauuuucuuacuccaagaacgagaccuaccaacuguuccuuagcuauucuagcaaaaaggagaaaauguuccugcauguuaagggagaaauccaccucgggcgcuuugugaugcggaauagagaugucgugcugacaaccaccuucguugacgauaucaaggcccuucccacaacguacgaaaaaggagaguauuuugcuuuccuggaaaccuacggcacacauuauuccucuagcggcucccucgggggacuguacgagcugauuuaugugcucgacaaggcgagcaugaaacgcaagggcgucgagcugaaagauaucaagcggugucuuggguaccaccuggacgugucucucgccuuuuccgaaauuagcgugggagcugaguucaacaaagaugacugcgucaagagaggcgaagggcgcgccguuaacaucaccucugagaaucugauugacgauguggugucccuuauccggggaggcacaagaaaguacgcuuuugagcugaaagaaaagcuccugcgcggcaccgucaucgacgugacggauuucguuaacugggccagcuccauuaaugacgccccugugcugaucucucagaaacucagccccauuuauaaccuggucccggugaagaugaaaaaugcucaccuuaagaagcagaaccuggagcgggcgaucgaagauuacauuaaugaguuuuccguuagaaaaugucauacaugccagaacgggggaaccgugauccucauggacggcaagugucugugcgccuguccuuucaaauuugaagggaucgcuugcgagauuucuaagcagaaaaucagcgagggacuucccgcccuggaguucccuaaugaaaaguga

SEQ ID NO: 8087 - protein, 1033 aa, Artificial Sequence
  complement_system_component_CR2__Homo_sapiens__P20023
MGAAGLLGVFLALVAPGVLGISCGSPPPILNGRISYYSTPIAVGTVIRYSCSGTFRLIGEKSLLCITKDKVDGTWDKPAPKCEYFNKYSSCPEPIVPGGYKIRGSTPYRHGDSVTFACKTNFSMNGNKSVWCQANNMWGPTRLPTCVSVFPLECPALPMIHNGHHTSENVGSIAPGLSVTYSCESGYLLVGEKIINCLSSGKWSAVPPTCEEARCKSLGRFPNGKVKEPPILRVGVTANFFCDEGYRLQGPPSSRCVIAGQGVAWTKMPVCEEIFCPSPPPILNGRHIGNSLANVSYGSIVTYTCDPDPEEGVNFILIGESTLRCTVDSQKTGTWSGPAPRCELSTSAVQCPHPQILRGRMVSGQKDRYTYNDTVIFACMFGFTLKGSKQIRCNAQGTWEPSAPVCEKECQAPPNILNGQKEDRHMVRFDPGTSIKYSCNPGYVLVGEESIQCTSEGVWTPPVPQCKVAACEATGRQLLTKPQHQFVRPDVNSSCGEGYKLSGSVYQECQGTIPWFMEIRLCKEITCPPPPVIYNGAHTGSSLEDFPYGTTVTYTCNPGPERGVEFSLIGESTIRCTSNDQERGTWSGPAPLCKLSLLAVQCSHVHIANGYKISGKEAPYFYNDTVTFKCYSGFTLKGSSQIRCKADNTWDPEIPVCEKETCQHVRQSLQELPAGSRVELVNTSCQDGYQLTGHAYQMCQDAENGIWFKKIPLCKVIHCHPPPVIVNGKHTGMMAENFLYGNEVSYECDQGFYLLGEKKLQCRSDSKGHGSWSGPSPQCLRSPPVTRCPNPEVKHGYKLNKTHSAYSHNDIVYVDCNPGFIMNGSRVIRCHTDNTWVPGVPTCIKKAFIGCPPPPKTPNGNHTGGNIARFSPGMSILYSCDQGYLLVGEALLLCTHEGTWSQPAPHCKEVNCSSPADMDGIQKGLEPRKMYQYGAVVTLECEDGYMLEGSPQSQCQSDHQWNPPLAVCRSRSLAPVLCGIAAGLILLTFLIVITLYVISKHRARNYYTDTSQKEAFHLEAREVYSVDPYNPAS

SEQ ID NO: 8088 - RNA, 3102 nt, Artificial Sequence
  complement_system_component_CR2__Homo_sapiens__CCDS1478.1
augggcgccgcgggccugcucgggguuuucuuggcucucgucgcaccggggguccucgggauuucuuguggcucuccuccgccuauccuaaauggccggauuaguuauuauucuacccccauugcuguugguaccgugauaagguacaguuguucagguaccuuccgccucauuggagaaaaaagucuauuaugcauaacuaaagacaaaguggauggaaccugggauaaaccugcuccuaaaugugaauauuucaauaaauauucuucuugcccugagcccauaguaccaggaggauacaaaauuagaggcucuacacccuacagacauggugauucugugacauuugccuguaaaaccaacuucuccaugaacggaaacaagucuguuuggugucaagcaaauaauaugugggggccgacacgacuaccaaccuguguaaguguuuucccucucgaguguccagcacuuccuaugauccacaauggacaucacacaagugagaauguuggcuccauugcuccaggauugucugugacuuacagcugugaaucugguuacuugcuuguuggagaaaagaucauuaacuguuugucuucgggaaaauggagugcugucccccccacaugugaagaggcacgcuguaaaucucuaggacgauuucccaaugggaagguaaaggagccuccaauucuccggguugguguaacugcaaacuuuuucugugaugaaggguaucgacugcaaggcccaccuucuagucgguguguaauugcuggacagggaguugcuuggaccaaaaugccaguaugugaagaaauuuuuugcccaucaccucccccuauucucaauggaagacauauaggcaacucacuagcaaaugucucauauggaagcauagucacuuacacuugugacccggacccagaggaaggagugaacuucauccuuauuggagagagcacucuccguuguacaguugauagucagaagacugggaccuggaguggcccugccccacgcugugaacuuucuacuucugcgguucaguguccacauccccagauccuaagaggccgaaugguaucugggcagaaagaucgauauaccuauaacgacacugugauauuugcuugcauguuuggcuucaccuugaagggcagcaagcaaauccgaugcaaugcccaaggcacaugggagccaucugcaccagucugugaaaaggaaugccaggccccuccuaacauccucaaugggcaaaaggaagauagacacaugguccgcuuugacccuggaacaucuauaaaauauagcuguaacccuggcuaugugcuggugggagaagaauccauacaguguaccucugaggggguguggacacccccuguaccccaaugcaaaguggcagcgugugaagcuacaggaaggcaacucuugacaaaaccccagcaccaauuuguuagaccagaugucaacucuucuuguggugaaggguacaaguuaagugggaguguuuaucaggagugucaaggcacaauuccuugguuuauggagauucgucuuuguaaagaaaucaccugcccaccacccccuguuaucuacaauggggcacacaccgggaguuccuuagaagauuuuccauauggaaccacggucacuuacacauguaacccugggccagaaagaggaguggaauucagccucauuggagagagcaccauccguuguacaagcaaugaucaagaaagaggcaccuggaguggcccugcuccccuguguaaacuuucccuccuugcuguccagugcucacauguccauauugcaaauggauacaagauaucuggcaaggaagccccauauuucuacaaugacacugugacauucaaguguuauaguggauuuacuuugaagggcaguagucagauucguugcaaagcugauaacaccugggauccugaaauaccaguuugugaaaaagaaacaugccagcaugugagacagagucuucaagaacuuccagcugguucacguguggagcuaguuaauacguccugccaagauggguaccaguugacuggacaugcuuaucagaugugucaagaugcugaaaauggaauuugguucaaaaagauuccacuuuguaaaguuauucacugucacccuccaccagugauugucaaugggaagcacacaggcaugauggcagaaaacuuucuauauggaaaugaagucucuuaugaaugugaccaaggauucuaucuccugggagagaaaaaauugcagugcagaagugauucuaaaggacauggaucuuggagcgggccuuccccacagugcuuacgaucuccuccugugacucgcugcccuaauccagaagucaaacauggguacaagcucaauaaaacacauucugcauauucccacaaugacauaguguauguugacugcaauccuggcuucaucaugaaugguagucgcgugauuaggugucauacugauaacacaugggugccaggugugccaacuuguaucaaaaaagccuucauaggguguccaccuccgccuaagaccccuaacgggaaccauacugguggaaacauagcucgauuuucuccuggaaugucaauccuguacagcugugaccaaggcuaccugcuggugggagaggcacuccuucuuugcacacaugagggaaccuggagccaaccugccccucauuguaaagagguaaacuguagcucaccagcagauauggauggaauccagaaagggcuggaaccaaggaaaauguaucaguauggagcuguuguaacucuggagugugaagauggguauaugcuggaaggcaguccccagagccagugccaaucggaucaccaauggaacccuccccuggcgguuugcagaucccguucacuugcuccuguccuuugugguauugcugcagguuugauacuucuuaccuucuugauugucauuaccuuauacgugauaucaaaacacagagcacgcaauuauuauacagauacaagccagaaagaagcuuuucauuuagaagcacgagaaguauauucuguugauccauacaacccagccagcuga

SEQ ID NO: 8089 - RNA, 3102 nt, Artificial Sequence
  derived and/or modified sequence opt1 from complement_system_component_CR2__Homo_sapiens__CCDS1478.1
augggcgccgccgggcugcucggcguguuccuggcgcuggucgcccccggggugcucggcaucagcugcggguccccgccccccauccugaacggccgcaucagcuacuacuccacccccaucgccgugggcaccgucauccgguacagcugcuccgggacguuccgccugaucggcgagaagagccuccugugcaucaccaaggacaagguggacgggaccugggacaagccggcccccaagugcgaguacuucaacaaguacuccagcugccccgagcccaucgugccgggcggguacaagauccggggcuccacccccuaccgccacggcgacagcgucacguucgccugcaagaccaacuucuccaugaacgggaacaagagcguguggugccaggcgaacaacauguggggccccacccggcugcccaccugcguguccgucuucccgcucgagugccccgcccugcccaugauccacaacgggcaccacacgagcgagaacgugggcuccaucgcccccggccugagcgugaccuacuccugcgagagcggguaccuccuggucggcgagaagaucaucaacugccuguccagcgggaaguggagcgccgugccgcccaccugcgaggaggcgcgcugcaagucccucggccgguuccccaacgggaaggugaaggagcccccgauccugcgcgucggcgugaccgccaacuucuucugcgacgagggcuaccggcugcaggggccccccagcucccgcugcgugaucgccggccagggggucgccuggacgaagaugcccgugugcgaggagaucuucugcccgagccccccccccauccucaacggccggcacaucgggaacucccuggccaacgugagcuacggcuccaucgucaccuacaccugcgacccggaccccgaggagggcgugaacuucauccugaucggggagagcacccuccgcugcacgguggacucccagaagaccggcaccuggagcgggcccgcgccgcggugcgagcuguccaccagcgccguccagugcccccacccccagauccugcgcggccggaugguguccgggcagaaggaccgcuacacguacaacgacaccgucaucuucgccugcauguucggcuucacccucaagggcagcaagcagauccggugcaacgcccaggggaccugggagcccuccgccccggugugcgagaaggagugccaggcgccccccaacauccugaacggccagaaggaggaccgccacauggugcgguucgaccccgggacgagcaucaaguacuccugcaacccgggcuacguccuggugggcgaggagagcauccagugcaccuccgaggggguguggaccccccccgucccccagugcaagguggccgccugcgaggccaccggccgccagcuccugacgaagccgcagcaccaguucgugcggcccgacgucaacagcagcugcggggagggcuacaagcuguccgggagcguguaccaggagugccagggcaccauccccugguucauggagauccgccucugcaaggagaucaccugccccccgccccccgugaucuacaacggcgcccacaccggguccagccuggaggacuuccccuacggcacgaccgucaccuacaccugcaacccggggcccgagcgcggcguggaguucucccugaucggggagagcacgauccggugcaccuccaacgaccaggagcgcggcaccuggagcggccccgcgccccucugcaagcugucccugcucgccgugcagugcagccacguccacaucgccaacggguacaagaucuccggcaaggaggccccguacuucuacaacgacaccgugaccuucaagugcuacagcggguucacgcugaagggcuccagccagauccggugcaaggccgacaacaccugggaccccgagauccccgugugcgagaaggagaccugccagcacguccgccagucccugcaggagcucccggcggggagccggguggagcuggugaacaccuccugccaggacggcuaccagcugacgggccacgccuaccagaugugccaggacgccgagaacgggaucugguucaagaagaucccccucugcaaggucauccacugccacccccccccggugaucgugaacggcaagcacaccgggaugauggccgagaacuuccuguacggcaacgaggucagcuacgagugcgaccagggguucuaccugcucggcgagaagaagcugcagugccgcagcgacuccaagggccacgggagcugguccggccccagcccccagugccugcggucccccccggugacccgcugccccaaccccgaggugaagcacggguacaagcucaacaagacccacagcgcguacucccacaacgacaucgucuacguggacugcaaccccggcuucaucaugaacggcagccgggugauccgcugccacacggacaacaccugggucccgggggugcccaccugcaucaagaaggccuucaucggcugcccccccccgcccaagacccccaacgggaaccacacgggcgggaacaucgcccgguucucccccggcaugagcauccuguacuccugcgaccagggcuaccugcuggugggggaggcccuccugcugugcacccacgagggcaccuggagccagccggccccccacugcaaggaggucaacugcuccagccccgcggacauggacgggauccagaagggccucgagccccgcaagauguaccaguacggggccguggugacccuggagugcgaggacggcuacaugcuggagggcuccccgcagagccagugccaguccgaccaccaguggaaccccccccucgccgucugccggagccgcucccuggcccccgugcugugcgggaucgccgcgggccucauccugcugacguuccucaucgugaucacccuguacgucaucagcaagcaccgggcccgcaacuacuacaccgacaccagccagaaggaggccuuccaccuggaggcccgggagguguacuccguggacccguacaaccccgccagcuga

SEQ ID NO: 8090 - RNA, 3102 nt, Artificial Sequence
  derived and/or modified sequence opt2 from complement_system_component_CR2__Homo_sapiens__CCDS1478.1
augggcgccgccggccuccucggcgucuuccucgcccucgucgcccccggcguccucggcaucuccugcggcucccccccccccauccucaacggccgcaucuccuacuacuccacccccaucgccgucggcaccgucauccgcuacuccugcuccggcaccuuccgccucaucggcgagaagucccuccucugcaucaccaaggacaaggucgacggcaccugggacaagcccgcccccaagugcgaguacuucaacaaguacuccuccugccccgagcccaucguccccggcggcuacaagauccgcggcuccacccccuaccgccacggcgacuccgucaccuucgccugcaagaccaacuucuccaugaacggcaacaaguccgucuggugccaggccaacaacauguggggccccacccgccuccccaccugcgucuccgucuucccccucgagugccccgcccuccccaugauccacaacggccaccacaccuccgagaacgucggcuccaucgcccccggccucuccgucaccuacuccugcgaguccggcuaccuccucgucggcgagaagaucaucaacugccucuccuccggcaagugguccgccgucccccccaccugcgaggaggcccgcugcaagucccucggccgcuuccccaacggcaaggucaaggagccccccauccuccgcgucggcgucaccgccaacuucuucugcgacgagggcuaccgccuccagggcccccccuccucccgcugcgucaucgccggccagggcgucgccuggaccaagaugcccgucugcgaggagaucuucugccccucccccccccccauccucaacggccgccacaucggcaacucccucgccaacgucuccuacggcuccaucgucaccuacaccugcgaccccgaccccgaggagggcgucaacuucauccucaucggcgaguccacccuccgcugcaccgucgacucccagaagaccggcaccugguccggccccgccccccgcugcgagcucuccaccuccgccguccagugcccccacccccagauccuccgcggccgcauggucuccggccagaaggaccgcuacaccuacaacgacaccgucaucuucgccugcauguucggcuucacccucaagggcuccaagcagauccgcugcaacgcccagggcaccugggagcccuccgcccccgucugcgagaaggagugccaggccccccccaacauccucaacggccagaaggaggaccgccacaugguccgcuucgaccccggcaccuccaucaaguacuccugcaaccccggcuacguccucgucggcgaggaguccauccagugcaccuccgagggcgucuggaccccccccgucccccagugcaaggucgccgccugcgaggccaccggccgccagcuccucaccaagccccagcaccaguucguccgccccgacgucaacuccuccugcggcgagggcuacaagcucuccggcuccgucuaccaggagugccagggcaccauccccugguucauggagauccgccucugcaaggagaucaccugcccccccccccccgucaucuacaacggcgcccacaccggcuccucccucgaggacuuccccuacggcaccaccgucaccuacaccugcaaccccggccccgagcgcggcgucgaguucucccucaucggcgaguccaccauccgcugcaccuccaacgaccaggagcgcggcaccugguccggccccgccccccucugcaagcucucccuccucgccguccagugcucccacguccacaucgccaacggcuacaagaucuccggcaaggaggcccccuacuucuacaacgacaccgucaccuucaagugcuacuccggcuucacccucaagggcuccucccagauccgcugcaaggccgacaacaccugggaccccgagauccccgucugcgagaaggagaccugccagcacguccgccagucccuccaggagcuccccgccggcucccgcgucgagcucgucaacaccuccugccaggacggcuaccagcucaccggccacgccuaccagaugugccaggacgccgagaacggcaucugguucaagaagaucccccucugcaaggucauccacugccaccccccccccgucaucgucaacggcaagcacaccggcaugauggccgagaacuuccucuacggcaacgaggucuccuacgagugcgaccagggcuucuaccuccucggcgagaagaagcuccagugccgcuccgacuccaagggccacggcuccugguccggccccuccccccagugccuccgcuccccccccgucacccgcugccccaaccccgaggucaagcacggcuacaagcucaacaagacccacuccgccuacucccacaacgacaucgucuacgucgacugcaaccccggcuucaucaugaacggcucccgcgucauccgcugccacaccgacaacaccuggguccccggcguccccaccugcaucaagaaggccuucaucggcugcccccccccccccaagacccccaacggcaaccacaccggcggcaacaucgcccgcuucucccccggcauguccauccucuacuccugcgaccagggcuaccuccucgucggcgaggcccuccuccucugcacccacgagggcaccuggucccagcccgccccccacugcaaggaggucaacugcuccucccccgccgacauggacggcauccagaagggccucgagccccgcaagauguaccaguacggcgccgucgucacccucgagugcgaggacggcuacaugcucgagggcuccccccagucccagugccaguccgaccaccaguggaaccccccccucgccgucugccgcucccgcucccucgcccccguccucugcggcaucgccgccggccucauccuccucaccuuccucaucgucaucacccucuacgucaucuccaagcaccgcgcccgcaacuacuacaccgacaccucccagaaggaggccuuccaccucgaggcccgcgaggucuacuccgucgaccccuacaaccccgccuccuga

SEQ ID NO: 8091 - RNA, 3102 nt, Artificial Sequence
  derived and/or modified sequence opt3 from complement_system_component_CR2__Homo_sapiens__CCDS1478.1
augggcgccgcugggcugcucggaguguuccuugcacuggucgcccccgguguuuugggcaucagcugcggguccccuccaccgauuuuaaacggaagaauaucuuacuauucaacccccaucgcggugggcacaguaauuagguacaguuguagcgguacuuuucggcugaucggggagaagucccuacucugcauuacgaaagacaagguggauggaaccugggacaaaccugcuccaaagugugaauauuucaauaaauacucuucgugccccgagccuaucgucccaggcggcuauaagauacgcgggucaacacccuaccgacacggagauagcgugacuuuugccuguaagaccaacuucaguaugaaugguaacaaauccguuuggugccaggcaaauaacauguggggcccuacacgucugccaaccugugugucugucuuuccgcuugaaugccccgcccugccuaugauccauaaugggcaccauacuagcgagaacgugggauccauugcuccaggcuugucaguaacauauaguugugaaagcgguuaccuccugguuggggagaagaucauuaauugccugucuuccggaaaauggucagcagugcccccuaccugugaggaagccagaugcaagagccucggcagguucccaaacggcaaagucaaggagcccccgaucuuacgggugggggugacggcuaacuuuuucugcgacgaaggauaccgccugcaagguccucccaguucuagaugugucauagccggccaggggguugcguggacuaagaugccagugugcgaggagaucuuuuguccuuccccaccacccauucuuaauggaaggcacauuggcaauagcuuggcaaacguaucguaugguucuaucgugaccuacacaugcgauccugacccagaagagggggucaauuucauccugauuggcgaauccacucuacgguguaccguggauucacagaaaacaggaaccuggaguggcccggcuccccgcugcgagcucagcacguccgcuguucaguguccucauccacaaauacugcgagggagaauggugucuggacagaaggacagguauacuuacaacgauacagucaucuuugccugcauguucgguuuuacccuuaaaggcagcaagcagauucgguguaacgcacaggggacuugggaacccucagcuccugugugcgagaaagagugucaagccccacccaauauccugaacggacagaaggaagaccgucacaugguacgcuucgauccgggcacaaguauaaaauauuccugcaauccugguuacguuuuggugggggaggaaagcauucagugcaccucugagggcgucuggacgccacccgugccucaguguaaggucgcggccugcgaagcaaccggaagacaacuccugacaaagccccagcaccaguucgugaggccagacguuaacucaaguuguggcgagggguauaaauuaagcggauccguguaccaagagugccaggguacuaucccuugguuuauggaaauccggcuguguaaggagauuaccugcccacccccgccuguaaucuacaauggcgcucauacagggucuucgcucgaagauuuccccuauggaacuaccgucacauacaccuguaacccaggccccgagcgagguguggaauuuagccuuauuggggaguccacuauacgcugcacgucaaaugaccaggagagaggcacauggaguggaccugccccacuguguaaauugucucuacuggcuguucagugcagccacgugcauaucgccaacggcuauaagauuuccgggaaagaagcacccuacuucuauaaugacaccgucacuuuuaaguguuacucaggauucacccucaagggcagcucucaaaucaggugcaaagccgauaacacaugggacccugagaucccggugugcgaaaaggagaccugucagcacguacggcagucccugcaggagcuuccagcugguagucgcguggaacugguuaauacuagcugccaagauggguaucaguugacaggacacgcguaccagaugugucaggacgcagagaacggcauuugguuuaaaaagauaccccucugcaaagucauccauugucacccuccacccgugauugugaaugguaagcauacgggcaugauggccgaaaacuuccuguacgggaaugaggucucuuaugaaugcgaucaaggauuuuacuuacugggcgagaagaaacuacaguguagauccgacucaaaggggcacggaaguuggagcggcccuucgccgcagugccucagguccccucccguuacccguugucccaaccccgaggugaaacaugguuauaagcugaacaaaacucacucugcuuacagccacaaugauaucguguauguagacugcaacccaggguucauuaugaauggaucacgggucauccgaugucauacagauaacaccugggugccuggcguucccacaugcauaaagaaggccuuuaucgguugcccaccgccucccaaaacuccaaauggcaaccacaccgggggaaauauugcaagauucagucccggcauguccauccuuuacucuugugaccagggguauuugcuggugggagaagcccuccugcuuugcacgcaugagggcaccuggagccaaccugcuccacacuguaaggaagucaacugcuccucacccgccgauauggacgguauucagaaagggcuggagccuaggaagauguaccaguacggagcagugguuacauuggaaugugaggacggcuauaugcucgaggguagcccgcaaagucagugccagucugaucaccaguggaauccaccccuggcggugugucgcucccggagcuuagcuccuguacugugcggcaucgccgcagggcuaauacuccugacuuuucuuauugucaucaccuuguacgugauuucgaaacauagagccaggaacuauuacacagacacuucacaaaaggaagccuuccaccuggaggcccgcgaaguguauucugucgaucccuacaauccagcaaguuga

SEQ ID NO: 8092 - RNA, 3102 nt, Artificial Sequence
  derived and/or modified sequence opt4 from complement_system_component_CR2__Homo_sapiens__CCDS1478.1
augggcgccgccggccugcugggcguguuccuggcccugguggcccccggcgugcugggcaucagcugcggcagccccccccccauccugaacggcagaaucagcuacuacagcacccccaucgccgugggcaccgugaucagauacagcugcagcggcaccuucagacugaucggcgagaagagccugcugugcaucaccaaggacaagguggacggcaccugggacaagcccgcccccaagugcgaguacuucaacaaguacagcagcugccccgagcccaucgugcccggcggcuacaagaucagaggcagcacccccuacagacacggcgacagcgugaccuucgccugcaagaccaacuucagcaugaacggcaacaagagcguguggugccaggccaacaacauguggggccccaccagacugcccaccugcgugagcguguucccccuggagugccccgcccugcccaugauccacaacggccaccacaccagcgagaacgugggcagcaucgcccccggccugagcgugaccuacagcugcgagagcggcuaccugcuggugggcgagaagaucaucaacugccugagcagcggcaaguggagcgccgugccccccaccugcgaggaggccagaugcaagagccugggcagauuccccaacggcaaggugaaggagccccccauccugagagugggcgugaccgccaacuucuucugcgacgagggcuacagacugcagggcccccccagcagcagaugcgugaucgccggccagggcguggccuggaccaagaugcccgugugcgaggagaucuucugccccagccccccccccauccugaacggcagacacaucggcaacagccuggccaacgugagcuacggcagcaucgugaccuacaccugcgaccccgaccccgaggagggcgugaacuucauccugaucggcgagagcacccugagaugcaccguggacagccagaagaccggcaccuggagcggccccgcccccagaugcgagcugagcaccagcgccgugcagugcccccacccccagauccugagaggcagaauggugagcggccagaaggacagauacaccuacaacgacaccgugaucuucgccugcauguucggcuucacccugaagggcagcaagcagaucagaugcaacgcccagggcaccugggagcccagcgcccccgugugcgagaaggagugccaggccccccccaacauccugaacggccagaaggaggacagacacauggugagauucgaccccggcaccagcaucaaguacagcugcaaccccggcuacgugcuggugggcgaggagagcauccagugcaccagcgagggcguguggaccccccccgugccccagugcaagguggccgccugcgaggccaccggcagacagcugcugaccaagccccagcaccaguucgugagacccgacgugaacagcagcugcggcgagggcuacaagcugagcggcagcguguaccaggagugccagggcaccauccccugguucauggagaucagacugugcaaggagaucaccugcccccccccccccgugaucuacaacggcgcccacaccggcagcagccuggaggacuuccccuacggcaccaccgugaccuacaccugcaaccccggccccgagagaggcguggaguucagccugaucggcgagagcaccaucagaugcaccagcaacgaccaggagagaggcaccuggagcggccccgccccccugugcaagcugagccugcuggccgugcagugcagccacgugcacaucgccaacggcuacaagaucagcggcaaggaggcccccuacuucuacaacgacaccgugaccuucaagugcuacagcggcuucacccugaagggcagcagccagaucagaugcaaggccgacaacaccugggaccccgagauccccgugugcgagaaggagaccugccagcacgugagacagagccugcaggagcugcccgccggcagcagaguggagcuggugaacaccagcugccaggacggcuaccagcugaccggccacgccuaccagaugugccaggacgccgagaacggcaucugguucaagaagaucccccugugcaaggugauccacugccaccccccccccgugaucgugaacggcaagcacaccggcaugauggccgagaacuuccuguacggcaacgaggugagcuacgagugcgaccagggcuucuaccugcugggcgagaagaagcugcagugcagaagcgacagcaagggccacggcagcuggagcggccccagcccccagugccugagaagcccccccgugaccagaugccccaaccccgaggugaagcacggcuacaagcugaacaagacccacagcgccuacagccacaacgacaucguguacguggacugcaaccccggcuucaucaugaacggcagcagagugaucagaugccacaccgacaacaccugggugcccggcgugcccaccugcaucaagaaggccuucaucggcugcccccccccccccaagacccccaacggcaaccacaccggcggcaacaucgccagauucagccccggcaugagcauccuguacagcugcgaccagggcuaccugcuggugggcgaggcccugcugcugugcacccacgagggcaccuggagccagcccgccccccacugcaaggaggugaacugcagcagccccgccgacauggacggcauccagaagggccuggagcccagaaagauguaccaguacggcgccguggugacccuggagugcgaggacggcuacaugcuggagggcagcccccagagccagugccagagcgaccaccaguggaaccccccccuggccgugugcagaagcagaagccuggcccccgugcugugcggcaucgccgccggccugauccugcugaccuuccugaucgugaucacccuguacgugaucagcaagcacagagccagaaacuacuacaccgacaccagccagaaggaggccuuccaccuggaggccagagagguguacagcguggaccccuacaaccccgccagcuga

SEQ ID NO: 8093 - RNA, 3102 nt, Artificial Sequence
  derived and/or modified sequence opt5 from complement_system_component_CR2__Homo_sapiens__CCDS1478.1
augggcgccgcugggcugcucggaguguuccuggcccuugucgcgcccggcguucuggggaucagcugcggauccccuccgcccauucucaacggcagaaucucuuacuauagcaccccuauugcuguggggacagugauccgguacuccuguucuggaacguuucgccugauuggcgaaaagagccuucugugcaucaccaaagacaaggucgauggcacaugggacaaacccgccccuaagugugaguauuucaauaaauacuccucuugccccgagccuaucgugcccgggggauauaagauuagaggcagcacccccuaccggcacggggauuccguuacauuugccuguaagaccaacuucagcaugaauggaaacaaaucuguguggugccaggcuaauaacauguggggcccuacacgccuccccaccugugucuccguguuuccucuggaaugccccgcccugccgaugauccauaaugggcaccauacgagcgagaacguuggaucuauugcuccuggccucuccgugaccuauagcugugaaucuggcuaccugcuugucggggagaagaucauuaauugccuguccagcggaaaaugguccgccgugcccccuacaugugaggaagcgagaugcaagucucucggccgguuccccaacgggaaagugaaggagcccccuauccugcgcgucggaguuaccgccaacuuuuucugcgacgaaggcuacagacuucaagggccgcccagcucccggugugugauugcuggacagggcguggccuggacaaagaugccugucugcgaggagaucuuuugucccagcccucccccgauccugaauggccgccacauuggaaauucucucgcuaacguguccuaugggagcaucguuaccuacacgugcgauccugaccccgaagagggcgugaauuucauucugaucggggaaucuacacugagauguaccgucgauagccagaaaacaggaaccugguccggcccugcgccccggugcgagcucucuaccagcgccgugcaguguccucauccccaaauucugcgcgggagaaugguuuccggccagaaggaccgguauacauacaacgauacggugaucuuugccugcauguucggauuuacccuuaaaggcagcaagcagauccgcuguaacgcucaggggacaugggaaccgucugccccugucugcgagaaagagugucaagcuccgcccaauauucugaacggacagaaggaagacagacacauggugcgguucgauccuggcaccuccaucaaauauagcugcaauccgggguacguccucgugggagaggaaucuauucagugcacauccgagggcguuuggacgcccccugugccccaguguaaggucgccgccugcgaagcuaccgggagacaacugcuuacaaagccucagcaccaguucgugcgccccgacguuaacagcuccuguggcgagggauauaaacugucuggcagcguguaccaagagugccaggggaccaucccuugguuuauggaaauucggcucuguaaggagauuaccugcccgcccccucccgucaucuacaauggagcgcauacaggcuccucucuggaagauuucccuuaugggaccacagugacguacaccuguaaccccggaccggagagaggcguggaauuuagccugaucggggaguccacaauccgcugcaccagcaaugaccaggagcggggcacauggucuggaccugcuccccucuguaaacugucccuucuggccguucagugcagccacguccauauugccaacggcuauaagaucucugggaaagaagccccuuacuucuauaaugacaccgugacguuuaaguguuacuccggauucacccucaagggcagcucucaaauuagaugcaaagcugauaacacaugggaccccgagauccccgugugcgaaaaggagaccugucagcacguccgccagagccugcaggagcuuccugccgggucccggguggaacugguuaauacaagcugccaagauggauaucagcucaccggccacgcguaccagaugugucaggacgcugagaacgggauuugguuuaaaaagaucccgcugugcaaagugauccauugucaucccccucccgucauugugaauggcaagcacacgggaaugauggccgaaaacuuccuguacggcaaugagguuucuuaugaaugcgaucaaggguuuuaccuccugggagagaagaaacuucaguguagauccgacagcaagggccacggguccuggucuggaccuagcccccagugccugcgcuccccuccggugacacggugucccaacccugaggucaaacauggcuauaagcucaacaaaacccacucugccuacagccacaaugauaucguguauguugacugcaaccccggcuucauuaugaauggguccagagugauccgcugucauacagauaacaccugggucccuggagugccgaccugcauuaagaaggcuuuuaucggcugucccccuccucccaaaacacccaaugggaaccacacgggaggcaauaucgcccgguucucucccgggaugagcauucuguacuccugcgaccagggauaucugcuugugggcgaagcucuccugcugugcacccaugagggcacauggagccaaccugccccgcacuguaaggaagucaacuguucuucccccgcggauauggacgggauccagaaaggacucgagccuagaaagauguaccaguacggcgccguugugacccuggaaugcgaggacggguauaugcuugagggaagcccccaaucucagugccaguccgaucaccaguggaauccuccccuggcugugugucggagccgcucucucgccccgguccugugcggcauugcugccgggcugauccuucucacauuucugauugugaucacccuguacguuaucuccaaacauagagcgcggaacuauuacacggacacaagccaaaaggaagccuuccaccucgaggcuagagaaguguauuccgucgauccuuacaaucccgccagcuga

SEQ ID NO: 8094 - protein, 712 aa, Artificial Sequence
  complement_system_component_CR3__Homo_sapiens__D3DSM0
MLGLRPPLLALVGLLSLGCVLSQECTKFKVSSCRECIESGPGCTWCQKLNFTGPGDPDSIRCDTRPQLLMRGCAADDIMDPTSLAETQEDHNGGQKQLSPQKVTLYLRPGFGSFVDKTVLPFVNTHPDKLRNPCPNKEKECQPPFAFRHVLKLTNNSNQFQTEVGKQLISGNLDAPEGGLDAMMQVAACPEEIGWRNVTRLLVFATDDGFHFAGDGKLGAILTPNDGRCHLEDNLYKRSNEFDYPSVGQLAHKLAENNIQPIFAVTSRMVKTYEKLTEIIPKSAVGELSEDSSNVVHLIKNAYNKLSSRVFLDHNALPDTLKVTYDSFCSNGVTHRNQPRGDCDGVQINVPITFQVKVTATECIQEQSFVIRALGFTDIVTVQVLPQCECRCRDQSRDRSLCHGKGFLECGICRCDTGYIGKNCECQTQGRSSQELEGSCRKDNNSIICSGLGDCVCGQCLCHTSDVPGKLIYGQYCECDTINCERYNGQVCGGPGRGLCFCGKCRCHPGFEGSACQCERTTEGCLNPRRVECSGRGRCRCNVCECHSGYQLPLCQECPGCPSPCGKYISCAECLKFEKGPFGKNCSAACPGLQLSNNPVKGRTCKERDSEGCWVAYTLEQQDGMDRYLIYVDESRECVAGPNIAAIVGGTVAGIVLIGILLLVIWKALIHLSDLREYRRFEKEKLKSQWNNDNPLFKSATTTVMNPKFAES

SEQ ID NO: 8095 - RNA, 2139 nt, Artificial Sequence
  complement_system_component_CR3__Homo_sapiens__EAX09383
augcugggccugcgccccccacugcucgcccugguggggcugcucucccucgggugcguccucucucaggagugcacgaaguucaaggucagcagcugccgggaaugcaucgagucggggcccggcugcaccuggugccagaagcugaacuucacagggccgggggauccugacuccauucgcugcgacacccggccacagcugcucaugaggggcugugcggcugacgacaucauggaccccacaagccucgcugaaacccaggaagaccacaaugggggccagaagcagcuguccccacaaaaagugacgcuuuaccugcgaccaggcuucggguccuucguggacaagaccgugcugccguucgugaacacgcacccugauaagcugcgaaacccaugccccaacaaggagaaagagugccagcccccguuugccuucaggcacgugcugaagcugaccaacaacuccaaccaguuucagaccgaggucgggaagcagcugauuuccggaaaccuggaugcacccgagggugggcuggacgccaugaugcaggucgccgccugcccggaggaaaucggcuggcgcaacgucacgcggcugcugguguuugccacugaugacggcuuccauuucgcgggcgacgggaagcugggcgccauccugacccccaacgacggccgcugucaccuggaggacaacuuguacaagaggagcaacgaauucgacuacccaucggugggccagcuggcgcacaagcuggcugaaaacaacauccagcccaucuucgcggugaccaguaggauggugaagaccuacgagaaacucaccgagaucauccccaagucagccgugggggagcugucugaggacuccagcaaugugguccaucucauuaagaaugcuuacaauaaacucuccuccagggucuuccuggaucacaacgcccuccccgacacccugaaagucaccuacgacuccuucugcagcaauggagugacgcacaggaaccagcccagaggugacugugauggcgugcagaucaaugucccgaucaccuuccaggugaaggucacggccacagagugcauccaggagcagucguuugucauccgggcgcugggcuucacggacauagugaccgugcagguccuuccccagugugagugccggugccgggaccagagcagagaccgcagccucugccauggcaagggcuucuuggagugcggcaucugcaggugugacacuggcuacauugggaaaaacugugagugccagacacagggccggagcagccaggagcuggaaggaagcugccggaaggacaacaacuccaucaucugcucagggcugggggacugugucugcgggcagugccugugccacaccagcgacguccccggcaagcugauauacgggcaguacugcgagugugacaccaucaacugugagcgcuacaacggccaggucugcggcggcccggggagggggcucugcuucugcgggaagugccgcugccacccgggcuuugagggcucagcgugccagugcgagaggaccacugagggcugccugaacccgcggcguguugaguguaguggucguggccggugccgcugcaacguaugcgagugccauucaggcuaccagcugccucugugccaggagugccccggcugccccucacccuguggcaaguacaucuccugcgccgagugccugaaguucgaaaagggccccuuugggaagaacugcagcgcggcguguccgggccugcagcugucgaacaaccccgugaagggcaggaccugcaaggagagggacucagagggcugcuggguggccuacacgcuggagcagcaggacgggauggaccgcuaccucaucuauguggaugagagccgagaguguguggcaggccccaacaucgccgccaucgucgggggcaccguggcaggcaucgugcugaucggcauucuccugcuggucaucuggaaggcucugauccaccugagcgaccuccgggaguacaggcgcuuugagaaggagaagcucaagucccaguggaacaaugauaauccccuuuucaagagcgccaccacgacggucaugaaccccaaguuugcugagaguuag

SEQ ID NO: 8096 - RNA, 2139 nt, Artificial Sequence
  derived and/or modified sequence opt1 from complement_system_component_CR3__Homo_sapiens__EAX09383
augcugggccuccggcccccgcugcuggcccucguggggcugcugagccucggcugcguccugucccaggagugcaccaaguucaaggugagcuccugccgcgagugcaucgagagcgggcccggcugcaccuggugccagaagcugaacuucacggggcccggcgaccccgacuccauccgcugcgacacccggccgcagcuccugaugcgcggcugcgccgcggacgacaucauggaccccaccagccuggccgagacccaggaggaccacaacgggggccagaagcagcucagcccccagaaggugacgcuguaccugcggcccggguucggcuccuucgucgacaagaccgugcucccguucgugaacacccaccccgacaagcugcgcaaccccugccccaacaaggagaaggagugccagccgcccuucgccuuccggcacguccugaagcucaccaacaacuccaaccaguuccagacggagguggggaagcagcugaucagcggcaaccuggacgcccccgagggcgggcucgacgccaugaugcaggucgcggccugccccgaggagaucggcuggcgcaacgugacccggcugcugguguucgccaccgacgacggguuccacuucgccggcgacggcaagcucggggcgauccugaccccgaacgacggccgcugccaccuggaggacaaccucuacaagcgguccaacgaguucgacuaccccagcguggggcagcuggcccacaagcuggccgagaacaacauccagcccaucuucgccgucacgucccgcauggugaagaccuacgagaagcucaccgagaucauccccaagagcgccgugggcgagcuguccgaggacagcuccaacgucgugcaccugaucaagaacgcguacaacaagcucagcucccggguguuccuggaccacaacgcccugccggacacccucaaggucacguacgacagcuucugcagcaacggggugacccaccgcaaccagccccggggcgacugcgacggcgugcagaucaacguccccaucaccuuccaggugaaggugaccgccacggagugcauccaggagcaguccuucgucauccgcgcccugggguucaccgacaucgugaccguccaggugcugccccagugcgagugccggugccgcgaccagagccgggaccgcucccucugccacggcaagggguuccuggagugcggcaucugccggugcgacaccggguacaucggcaagaacugcgagugccagacgcagggccgcagcucccaggagcuggaggggagcugccgcaaggacaacaacuccaucaucugcagcggccucggggacugcgugugcggccagugccugugccacaccuccgacgucccggggaagcugaucuacggccaguacugcgagugcgacaccaucaacugcgagcgguacaacggccaggugugcgggggccccgggcgcggccucugcuucugcggcaagugccggugccaccccggguucgagggcagcgccugccagugcgagcgcaccacggaggggugccugaacccccggcgcguggagugcuccggccgggggcgcugccggugcaacgucugcgagugccacagcggcuaccagcugccgcucugccaggagugccccggcugccccuccccgugcgggaaguacaucagcugcgcggagugccugaaguucgagaagggccccuucgggaagaacugcuccgccgccugccccggccugcagcugagcaacaaccccgugaaggggcggaccugcaaggagcgcgacuccgagggcugcuggguggccuacacccucgagcagcaggacggcauggaccgcuaccugaucuacgucgacgagagccgggagugcguggccgggccgaacaucgcggccaucgugggcgggaccgucgccggcaucgugcugaucgggauccuccugcuggugaucuggaaggcccucauccaccuguccgaccugcgcgaguaccggcgcuucgagaaggagaagcucaagagccaguggaacaacgacaacccccuguucaagagcgccacgaccaccgucaugaaccccaaguucgcggaguccuga

SEQ ID NO: 8097 - RNA, 2139 nt, Artificial Sequence
  derived and/or modified sequence opt2 from complement_system_component_CR3__Homo_sapiens__EAX09383
augcucggccuccgccccccccuccucgcccucgucggccuccucucccucggcugcguccucucccaggagugcaccaaguucaaggucuccuccugccgcgagugcaucgaguccggccccggcugcaccuggugccagaagcucaacuucaccggccccggcgaccccgacuccauccgcugcgacacccgcccccagcuccucaugcgcggcugcgccgccgacgacaucauggaccccaccucccucgccgagacccaggaggaccacaacggcggccagaagcagcucuccccccagaaggucacccucuaccuccgccccggcuucggcuccuucgucgacaagaccguccuccccuucgucaacacccaccccgacaagcuccgcaaccccugccccaacaaggagaaggagugccagccccccuucgccuuccgccacguccucaagcucaccaacaacuccaaccaguuccagaccgaggucggcaagcagcucaucuccggcaaccucgacgcccccgagggcggccucgacgccaugaugcaggucgccgccugccccgaggagaucggcuggcgcaacgucacccgccuccucgucuucgccaccgacgacggcuuccacuucgccggcgacggcaagcucggcgccauccucacccccaacgacggccgcugccaccucgaggacaaccucuacaagcgcuccaacgaguucgacuaccccuccgucggccagcucgcccacaagcucgccgagaacaacauccagcccaucuucgccgucaccucccgcauggucaagaccuacgagaagcucaccgagaucauccccaaguccgccgucggcgagcucuccgaggacuccuccaacgucguccaccucaucaagaacgccuacaacaagcucuccucccgcgucuuccucgaccacaacgcccuccccgacacccucaaggucaccuacgacuccuucugcuccaacggcgucacccaccgcaaccagccccgcggcgacugcgacggcguccagaucaacguccccaucaccuuccaggucaaggucaccgccaccgagugcauccaggagcaguccuucgucauccgcgcccucggcuucaccgacaucgucaccguccagguccucccccagugcgagugccgcugccgcgaccagucccgcgaccgcucccucugccacggcaagggcuuccucgagugcggcaucugccgcugcgacaccggcuacaucggcaagaacugcgagugccagacccagggccgcuccucccaggagcucgagggcuccugccgcaaggacaacaacuccaucaucugcuccggccucggcgacugcgucugcggccagugccucugccacaccuccgacguccccggcaagcucaucuacggccaguacugcgagugcgacaccaucaacugcgagcgcuacaacggccaggucugcggcggccccggccgcggccucugcuucugcggcaagugccgcugccaccccggcuucgagggcuccgccugccagugcgagcgcaccaccgagggcugccucaacccccgccgcgucgagugcuccggccgcggccgcugccgcugcaacgucugcgagugccacuccggcuaccagcucccccucugccaggagugccccggcugccccucccccugcggcaaguacaucuccugcgccgagugccucaaguucgagaagggccccuucggcaagaacugcuccgccgccugccccggccuccagcucuccaacaaccccgucaagggccgcaccugcaaggagcgcgacuccgagggcugcugggucgccuacacccucgagcagcaggacggcauggaccgcuaccucaucuacgucgacgagucccgcgagugcgucgccggccccaacaucgccgccaucgucggcggcaccgucgccggcaucguccucaucggcauccuccuccucgucaucuggaaggcccucauccaccucuccgaccuccgcgaguaccgccgcuucgagaaggagaagcucaagucccaguggaacaacgacaacccccucuucaaguccgccaccaccaccgucaugaaccccaaguucgccgaguccuga

SEQ ID NO: 8098 - RNA, 2139 nt, Artificial Sequence
  derived and/or modified sequence opt3 from complement_system_component_CR3__Homo_sapiens__EAX09383
augcugggccucagacccccucuucuggccuuggugggguuacugagccuaggaugcguccucucccaggaguguaccaaguucaaaguuucuucaugcagggaauguaucgagagugguccaggcugcacauggugucaaaagcugaacuuuacugggccgggagaccccgauagcauucggugcgacacgcgcccucagcuucugaugcgaggcugugcugcagaugacauaauggauccaaccuccuuggccgaaacacaggaggaccacaauggugggcagaaacaacucucuccccagaaggugacucuguaccugcguccuggauucggcucguuuguagauaaaaccgugcucccauucgucaacacacaucccgacaaguuaagaaauccuugcccaaacaaggaaaaagagugucagccgcccuuugcguucaggcacgugcugaaacuuaccaauaacucaaaucaguuucaaacugagguuggcaagcaguugaucagcgggaaccuggaugcuccugaaggaggucuagacgccaugaugcaaguggcagccugcccagaggaaauuggcuggcggaaugucacacgccuccugguguucgcuaccgaugacggguuucauuucgcaggagauggcaaacuuggugccauccugacgcccaacgacgggagaugucacuuggaggacaaucucuauaagaggaguaacgaguuugauuacccuuccguaggacagcuggcucauaaguuagccgaaaauaacauucagccaaucuucgcgguuacuucucggauggugaagaccuaugagaaacugacagaaauaauccccaagagcgcagucggcgagcucuccgaagacucaaguaauguggugcaccuuauuaaaaacgccuacaacaagcugagcucucgcgucuuuuuggaucacaaugcucuaccggacacucugaaaguuaccuaugauuccuucugcucaaacggcgugacacaucgaaaucagccuagaggggacugcgauggaguacagaucaacgugcccauuaccuuccaagucaaggugacggccacugaguguauccaggagcagagcuuuguuauaagggcacucgguuucacagacauugugaccguccaggugcugccacaaugcgaaugucggugccgugaucagagucgcgacagaucucuuugucacggcaaaggguuucuggagugcggaaucuguaggugcgauacuggcuacauugguaagaauugugaaugccagacacaggggcgguccagccaagaguuggaaggcucgugucgaaaggacaacaauucuaucaucugcuccggacucggcgacugcguaugugggcagugccugugucauaccucagauguuccuggaaaauuaauuuauggucaguacugcgagugugacacgauaaacugcgagcgcuacaauggccaggugugugggggacccggcagaggucugugcuucugugggaaguguaggugccacccaggcuuugaaggaagugcuugccaaugcgagcggaccacagaaggcugucuaaacccccgcagagucgagugcagcgggaggggacguugucggugcaaugugugugaaugccacuccgguuaucagcucccucugugucaggagugcccaggcuguccgucucccugcgggaaauacaucagcugugccgagugccuuaaguucgaaaaaggaccuuuuggcaagaacugcucagcggccuguccagguuugcagcugaguaauaaccccgucaaggggcgaacuugcaaagagagagauuccgaaggcuguuggguggcauauacccucgagcaacaggacggaauggauagguaccugauuuauguugacgagagccgcgaaugcguggcuggcccuaauaucgccgcuauaguagggggaacagucgccggcauugugcuuaucgguauccuguugcucguuauuuggaaggcacugauccauuuaucugaucugcgggaguacagaagguucgaaaaagagaagcuaaaaucacaguggaacaacgacaauccacucuuuaagagugccacuaccacagugaugaaccccaaguucgcugaaagcuga

SEQ ID NO: 8099 - RNA, 2139 nt, Artificial Sequence
  derived and/or modified sequence opt4 from complement_system_component_CR3__Homo_sapiens__EAX09383
augcugggccugagacccccccugcuggcccuggugggccugcugagccugggcugcgugcugagccaggagugcaccaaguucaaggugagcagcugcagagagugcaucgagagcggccccggcugcaccuggugccagaagcugaacuucaccggccccggcgaccccgacagcaucagaugcgacaccagaccccagcugcugaugagaggcugcgccgccgacgacaucauggaccccaccagccuggccgagacccaggaggaccacaacggcggccagaagcagcugagcccccagaaggugacccuguaccugagacccggcuucggcagcuucguggacaagaccgugcugcccuucgugaacacccaccccgacaagcugagaaaccccugccccaacaaggagaaggagugccagccccccuucgccuucagacacgugcugaagcugaccaacaacagcaaccaguuccagaccgaggugggcaagcagcugaucagcggcaaccuggacgcccccgagggcggccuggacgccaugaugcagguggccgccugccccgaggagaucggcuggagaaacgugaccagacugcugguguucgccaccgacgacggcuuccacuucgccggcgacggcaagcugggcgccauccugacccccaacgacggcagaugccaccuggaggacaaccuguacaagagaagcaacgaguucgacuaccccagcgugggccagcuggcccacaagcuggccgagaacaacauccagcccaucuucgccgugaccagcagaauggugaagaccuacgagaagcugaccgagaucauccccaagagcgccgugggcgagcugagcgaggacagcagcaacguggugcaccugaucaagaacgccuacaacaagcugagcagcagaguguuccuggaccacaacgcccugcccgacacccugaaggugaccuacgacagcuucugcagcaacggcgugacccacagaaaccagcccagaggcgacugcgacggcgugcagaucaacgugcccaucaccuuccaggugaaggugaccgccaccgagugcauccaggagcagagcuucgugaucagagcccugggcuucaccgacaucgugaccgugcaggugcugccccagugcgagugcagaugcagagaccagagcagagacagaagccugugccacggcaagggcuuccuggagugcggcaucugcagaugcgacaccggcuacaucggcaagaacugcgagugccagacccagggcagaagcagccaggagcuggagggcagcugcagaaaggacaacaacagcaucaucugcagcggccugggcgacugcgugugcggccagugccugugccacaccagcgacgugcccggcaagcugaucuacggccaguacugcgagugcgacaccaucaacugcgagagauacaacggccaggugugcggcggccccggcagaggccugugcuucugcggcaagugcagaugccaccccggcuucgagggcagcgccugccagugcgagagaaccaccgagggcugccugaaccccagaagaguggagugcagcggcagaggcagaugcagaugcaacgugugcgagugccacagcggcuaccagcugccccugugccaggagugccccggcugccccagccccugcggcaaguacaucagcugcgccgagugccugaaguucgagaagggccccuucggcaagaacugcagcgccgccugccccggccugcagcugagcaacaaccccgugaagggcagaaccugcaaggagagagacagcgagggcugcuggguggccuacacccuggagcagcaggacggcauggacagauaccugaucuacguggacgagagcagagagugcguggccggccccaacaucgccgccaucgugggcggcaccguggccggcaucgugcugaucggcauccugcugcuggugaucuggaaggcccugauccaccugagcgaccugagagaguacagaagauucgagaaggagaagcugaagagccaguggaacaacgacaacccccuguucaagagcgccaccaccaccgugaugaaccccaaguucgccgagagcuga

SEQ ID NO: 8100 - RNA, 2139 nt, Artificial Sequence
  derived and/or modified sequence opt5 from complement_system_component_CR3__Homo_sapiens__EAX09383
augcugggccucagacccccucugcuugcccugguggggcuccugagccuuggaugcguccugucccaggaguguaccaaguucaaaguuucuagcugccgggaauguaucgaguccggcccggggugcacauggugucaaaagcucaacuuuacgggacccggcgacccugauucuauucgcugcgacaccagaccccagcugcugaugcgggggugugcugccgaugacaucauggauccuacaagccucgcggaaacccaggaggaccacaauggaggccagaaacaacugucuccccagaaggugacacuuuaccugcgcccuggcuucggguccuuuguggauaaaaccguccucccguucgugaacacacaucccgacaagcugagaaauccuugccccaacaaggaaaaagagugucagccucccuuugcuuuccggcacguucuuaagcugaccaauaacagcaaucaguuucaaacggaggugggaaaacagcucauuuccggcaaccuggaugccccggaagggggacuggacgccaugaugcaggucgcugccugcccugaggaaaucggcuggcgcaaugugaccagacuccugguuuucgcuacagaugacggguuucauuucgccggagauggcaaacuuggcgcgauucugacccccaacgacgggcggugucaccucgaggacaaucuguauaagcgcagcaacgaguuugauuacccuucugugggacagcuugcccauaagcuggcugaaaauaacauccaacccaucuucgccgucacauccagaauggugaagaccuaugagaaacucacggaaauuauccccaagagcgcugugggcgagcugucugaagacuccagcaaugucguucaccugauuaaaaacgccuacaacaagcucucuucccggguguuucuggaucacaaugcgcuuccugacacacugaaagugaccuaugauagcuucugcuccaacggggucacacaucgcaaucagccgagaggagacugcgauggcgugcagaucaacguucccauuaccuuccaagugaaggucaccgccacagaguguauccaggagcagucuuuugugauucgggcucucggguucacggacaucguuaccgugcagguccugccucaaugcgaaugucgcugcagagaucagagccgggacagaucccuuugucacggaaaaggcuuucuggagugcggcaucugucgcugcgauacaggguacauuggaaagaauugugaaugccagacccagggccggagcucucaagagcucgaaggguccuguagaaaggacaacaauagcaucauuugcucuggacugggcgacugcgugugugggcagugccugugucauacaagcgauguccccggcaaacucaucuauggacaguacugcgagugugacaccauuaacugcgagcgcuacaauggccaggugugugggggaccuggccgggggcugugcuucuguggaaagugcagaugucaccccggcuuugaaggguccgccugccaaugcgagcgcacgacagaaggcugucuuaacccgcggagaguugagugcucuggacgcggccgguguagaugcaaugugugugaaugccacagcggguaucagcugccucucugucaggagugccccggauguccuucccccugcggcaaauacaucagcugugcugagugccugaaguucgaaaaagggccuuuuggaaagaacugcucugccgccugucccggccugcagcuuuccaauaacccggucaaggggcggaccugcaaagagcgcgauagcgaaggcuguuggguggcuuauacccucgagcaacaggacggaauggauagauaccugaucuauguugacgagucucgggaaugcguggcgggcccuaauauugccgcuaucgucgggggaacaguggccggcauugugcugaucgggauucuccugcuuguuaucuggaaggcccugauccaucucuccgaucugcgcgaguacagacgguucgaaaaagagaagcugaaaagccaguggaacaacgacaauccccuuuuuaaguccgcuaccacaacggucaugaaccccaaguucgccgaaucuuga

SEQ ID NO: 8101 - protein, 769 aa, Artificial Sequence
  complement_system_component_CR3__Homo_sapiens__P05107
MLGLRPPLLALVGLLSLGCVLSQECTKFKVSSCRECIESGPGCTWCQKLNFTGPGDPDSIRCDTRPQLLMRGCAADDIMDPTSLAETQEDHNGGQKQLSPQKVTLYLRPGQAAAFNVTFRRAKGYPIDLYYLMDLSYSMLDDLRNVKKLGGDLLRALNEITESGRIGFGSFVDKTVLPFVNTHPDKLRNPCPNKEKECQPPFAFRHVLKLTNNSNQFQTEVGKQLISGNLDAPEGGLDAMMQVAACPEEIGWRNVTRLLVFATDDGFHFAGDGKLGAILTPNDGRCHLEDNLYKRSNEFDYPSVGQLAHKLAENNIQPIFAVTSRMVKTYEKLTEIIPKSAVGELSEDSSNVVQLIKNAYNKLSSRVFLDHNALPDTLKVTYDSFCSNGVTHRNQPRGDCDGVQINVPITFQVKVTATECIQEQSFVIRALGFTDIVTVQVLPQCECRCRDQSRDRSLCHGKGFLECGICRCDTGYIGKNCECQTQGRSSQELEGSCRKDNNSIICSGLGDCVCGQCLCHTSDVPGKLIYGQYCECDTINCERYNGQVCGGPGRGLCFCGKCRCHPGFEGSACQCERTTEGCLNPRRVECSGRGRCRCNVCECHSGYQLPLCQECPGCPSPCGKYISCAECLKFEKGPFGKNCSAACPGLQLSNNPVKGRTCKERDSEGCWVAYTLEQQDGMDRYLIYVDESRECVAGPNIAAIVGGTVAGIVLIGILLLVIWKALIHLSDLREYRRFEKEKLKSQWNNDNPLFKSATTTVMNPKFAES

SEQ ID NO: 8102 - RNA, 2310 nt, Artificial Sequence
  complement_system_component_CR3__Homo_sapiens__CAB90553
augcugggccugcgccccccacugcucgcccugguggggcugcucucccucgggugcguccucucucaggagugcacgaaguucaaggucagcagcugccgggaaugcaucgagucggggcccggcugcaccuggugccagaagcugaacuucacagggccgggggauccugacuccauucgcugcgacacccggccacagcugcucaugaggggcugugcggcugacgacaucauggaccccacaagccucgcugaaacccaggaagaccacaaugggggccagaagcagcuguccccacaaaaagugacgcuuuaccugcgaccaggccaggcagcagcguucaacgugaccuuccggcgggccaagggcuaccccaucgaccuguacuaucugauggaccucuccuacuccaugcuugaugaccucaggaaugucaagaagcuagguggcgaccugcuccgggcccucaacgagaucaccgaguccggccgcauuggcuucggguccuucguggacaagaccgugcugccguucgugaacacgcacccugauaagcugcgaaacccaugccccaacaaggagaaagagugccagcccccguuugccuucaggcacgugcugaagcugaccaacaacuccaaccaguuucagaccgaggucgggaagcagcugauuuccggaaaccuggaugcacccgagggugggcuggacgccaugaugcaggucgccgccugcccggaggaaaucggcuggcgcaacgucacgcggcugcugguguuugccacugaugacggcuuccauuucgcgggcgacgggaagcugggcgccauccugacccccaacgacggccgcugucaccuggaggacaacuuguacaagaggagcaacgaauucgacuacccaucggugggccagcuggcgcacaagcuggcugaaaacaacauccagcccaucuucgcggugaccaguaggauggugaagaccuacgagaaacucaccgagaucauccccaagucagccgugggggagcugucugaggacuccagcaaugugguccaacucauuaagaaugcuuacaauaaacucuccuccagggucuuccuggaucacaacgcccuccccgacacccugaaagucaccuacgacuccuucugcagcaauggagugacgcacaggaaccagcccagaggugacugugauggcgugcagaucaaugucccgaucaccuuccaggugaaggucacggccacagagugcauccaggagcagucguuugucauccgggcgcugggcuucacggacauagugaccgugcagguucuuccccagugugagugccggugccgggaccagagcagagaccgcagccucugccauggcaagggcuucuuggagugcggcaucugcaggugugacacuggcuacauugggaaaaacugugagugccagacacagggccggagcagccaggagcuggaaggaagcugccggaaggacaacaacuccaucaucugcucagggcugggggacugugucugcgggcagugccugugccacaccagcgacguccccggcaagcugauauacgggcaguacugcgagugugacaccaucaacugugagcgcuacaacggccaggucugcggcggcccggggagggggcucugcuucugcgggaagugccgcugccacccgggcuuugagggcucagcgugccagugcgagaggaccacugagggcugccugaacccgcggcguguugaguguaguggucguggccggugccgcugcaacguaugcgagugccauucaggcuaccagcugccucugugccaggagugccccggcugccccucacccuguggcaaguacaucuccugcgccgagugccugaaguucgaaaagggccccuuugggaagaacugcagcgcggcguguccgggccugcagcugucgaacaaccccgugaagggcaggaccugcaaggagagggacucagagggcugcuggguggccuacacgcuggagcagcaggacgggauggaccgcuaccucaucuauguggaugagagccgagaguguguggcaggccccaacaucgccgccaucgucgggggcaccguggcaggcaucgugcugaucggcauucuccugcuggucaucuggaaggcucugauccaccugagcgaccuccgggaguacaggcgcuuugagaaggagaagcucaagucccaguggaacaaugauaauccccuuuucaagagcgccaccacgacggucaugaaccccaaguuugcugagaguuag

SEQ ID NO: 8103 - RNA, 2310 nt, Artificial Sequence
  derived and/or modified sequence opt1 from complement_system_component_CR3__Homo_sapiens__CAB90553
augcugggccuccggcccccgcugcuggcccucguggggcugcugagccucggcugcguccugucccaggagugcaccaaguucaaggugagcuccugccgcgagugcaucgagagcgggcccggcugcaccuggugccagaagcugaacuucacggggcccggcgaccccgacuccauccgcugcgacacccggccgcagcuccugaugcgcggcugcgccgcggacgacaucauggaccccaccagccuggccgagacccaggaggaccacaacgggggccagaagcagcucagcccccagaaggugacgcuguaccugcggcccgggcaggccgccgccuucaacgucaccuuccgccgggcgaagggcuacccgaucgaccucuacuaccugauggaccuguccuacuccaugcucgacgaccugcgcaacgugaagaagcucgggggcgaccugcugcgggcccugaacgagaucaccgagagcggccgcaucggguucggcuccuucguggacaagaccguccuccccuucgugaacacgcaccccgacaagcugcggaaccccugcccgaacaaggagaaggagugccagccgcccuucgccuuccgccacgugcugaagcucaccaacaacagcaaccaguuccagaccgaggucgggaagcagcugaucuccggcaaccuggacgcccccgagggcgggcucgacgcgaugaugcaggucgccgccugccccgaggagaucggcuggcggaacgugacccgccugcugguguucgccacggacgacggguuccacuucgccggcgacgggaagcucggcgcgauccugacccccaacgacggccggugccaccuggaggacaaccucuacaagcgcagcaacgaguucgacuaccccuccguggggcagcuggcccacaagcuggccgagaacaacauccagcccaucuucgccgugaccagccggauggucaagaccuacgagaagcucacggagaucaucccgaaguccgccgugggcgagcugagcgaggacuccagcaacgugguccagcugaucaagaacgcguacaacaagcucagcucccgcguguuccuggaccacaacgcccugcccgacacccucaaggugaccuacgacagcuucugcuccaacggggucacccaccggaaccagccccgcggcgacugcgacggggugcagaucaacgugcccaucacguuccaggucaaggugaccgccaccgagugcauccaggagcagagcuucgucauccgggcccugggcuucaccgacaucgugacggugcagguccugccgcagugcgagugccgcugccgcgaccagucccgggaccgcagccucugccacggcaagggguuccuggagugcggcaucugccggugcgacaccggguacaucggcaagaacugcgagugccagacccaggggcgcuccagccaggagcuggagggcuccugccggaaggacaacaacagcaucaucugcuccggccugggggacugcgugugcggccagugccucugccacaccagcgacgugcccgggaagcugaucuacggccaguacugcgagugcgacacgaucaacugcgagcgcuacaacggccaggucugcgggggccccgggcggggccugugcuucugcgggaagugccgcugccaccccggcuucgagggcuccgccugccagugcgagcggaccaccgaggggugccucaacccgcgccggguggagugcagcggccgcgggcggugccgcugcaacgugugcgagugccacuccggcuaccagcugccccugugccaggagugccccgggugcccgagccccugcggcaaguacaucuccugcgcggagugccucaaguucgagaagggccccuucgggaagaacugcagcgccgccugccccggccugcagcuguccaacaacccggucaaggggcggaccugcaaggagcgcgacagcgagggcugcuggguggccuacacgcucgagcagcaggacgggauggaccgguaccugaucuacguggacgagagccgcgagugcgucgccggccccaacaucgcggccaucgugggcgggaccguggccggcaucguccugaucgggauccuccugcuggugaucuggaaggcccucauccaccuguccgaccugcgggaguaccgccgcuucgagaaggagaagcucaagagccaguggaacaacgacaacccccuguucaaguccgcgaccaccacggugaugaaccccaaguucgccgagagcuga

SEQ ID NO: 8104 - RNA, 2310 nt, Artificial Sequence
  derived and/or modified sequence opt2 from complement_system_component_CR3__Homo_sapiens__CAB90553
augcucggccuccgccccccccuccucgcccucgucggccuccucucccucggcugcguccucucccaggagugcaccaaguucaaggucuccuccugccgcgagugcaucgaguccggccccggcugcaccuggugccagaagcucaacuucaccggccccggcgaccccgacuccauccgcugcgacacccgcccccagcuccucaugcgcggcugcgccgccgacgacaucauggaccccaccucccucgccgagacccaggaggaccacaacggcggccagaagcagcucuccccccagaaggucacccucuaccuccgccccggccaggccgccgccuucaacgucaccuuccgccgcgccaagggcuaccccaucgaccucuacuaccucauggaccucuccuacuccaugcucgacgaccuccgcaacgucaagaagcucggcggcgaccuccuccgcgcccucaacgagaucaccgaguccggccgcaucggcuucggcuccuucgucgacaagaccguccuccccuucgucaacacccaccccgacaagcuccgcaaccccugccccaacaaggagaaggagugccagccccccuucgccuuccgccacguccucaagcucaccaacaacuccaaccaguuccagaccgaggucggcaagcagcucaucuccggcaaccucgacgcccccgagggcggccucgacgccaugaugcaggucgccgccugccccgaggagaucggcuggcgcaacgucacccgccuccucgucuucgccaccgacgacggcuuccacuucgccggcgacggcaagcucggcgccauccucacccccaacgacggccgcugccaccucgaggacaaccucuacaagcgcuccaacgaguucgacuaccccuccgucggccagcucgcccacaagcucgccgagaacaacauccagcccaucuucgccgucaccucccgcauggucaagaccuacgagaagcucaccgagaucauccccaaguccgccgucggcgagcucuccgaggacuccuccaacgucguccagcucaucaagaacgccuacaacaagcucuccucccgcgucuuccucgaccacaacgcccuccccgacacccucaaggucaccuacgacuccuucugcuccaacggcgucacccaccgcaaccagccccgcggcgacugcgacggcguccagaucaacguccccaucaccuuccaggucaaggucaccgccaccgagugcauccaggagcaguccuucgucauccgcgcccucggcuucaccgacaucgucaccguccagguccucccccagugcgagugccgcugccgcgaccagucccgcgaccgcucccucugccacggcaagggcuuccucgagugcggcaucugccgcugcgacaccggcuacaucggcaagaacugcgagugccagacccagggccgcuccucccaggagcucgagggcuccugccgcaaggacaacaacuccaucaucugcuccggccucggcgacugcgucugcggccagugccucugccacaccuccgacguccccggcaagcucaucuacggccaguacugcgagugcgacaccaucaacugcgagcgcuacaacggccaggucugcggcggccccggccgcggccucugcuucugcggcaagugccgcugccaccccggcuucgagggcuccgccugccagugcgagcgcaccaccgagggcugccucaacccccgccgcgucgagugcuccggccgcggccgcugccgcugcaacgucugcgagugccacuccggcuaccagcucccccucugccaggagugccccggcugccccucccccugcggcaaguacaucuccugcgccgagugccucaaguucgagaagggccccuucggcaagaacugcuccgccgccugccccggccuccagcucuccaacaaccccgucaagggccgcaccugcaaggagcgcgacuccgagggcugcugggucgccuacacccucgagcagcaggacggcauggaccgcuaccucaucuacgucgacgagucccgcgagugcgucgccggccccaacaucgccgccaucgucggcggcaccgucgccggcaucguccucaucggcauccuccuccucgucaucuggaaggcccucauccaccucuccgaccuccgcgaguaccgccgcuucgagaaggagaagcucaagucccaguggaacaacgacaacccccucuucaaguccgccaccaccaccgucaugaaccccaaguucgccgaguccuga

SEQ ID NO: 8105 - RNA, 2310 nt, Artificial Sequence
  derived and/or modified sequence opt3 from complement_system_component_CR3__Homo_sapiens__CAB90553
augcugggccucagacccccucuucuggccuuggugggguuacugagccuaggaugcguccucucccaggaguguaccaaguucaaaguuucuucaugcagggaauguaucgagagugguccaggcugcacauggugucaaaagcugaacuuuacugggccgggagaccccgauagcauucggugcgacacgcgcccucagcuucugaugcgaggcugugcugcagaugacauaauggauccaaccuccuuggccgaaacacaggaggaccacaauggugggcagaaacaacucucuccccagaaggugacucuguaccugcguccuggacaggcggcugccuucaacguaaccuuuagaagggcaaaaggcuauccaaucgaucucuacuauuuaauggaccugucguacucaaugcuugaugacuugcggaaugugaagaagcugggcggggaucuacuccgcgcccugaacgaaauuacagagagcggaagaaucgguuucggcaguuuugucgacaaaaccgugcuucccuucguuaauacucauccugauaagcugaggaacccaugcccgaauaaagagaaggaaugucagcccccuuuugcuuuccggcacguguugaaacucacaaacaauuccaaccaauuucagaccgaggucgggaagcagcugauuucuggaaauuuagacgcaccagaaggcggucuggacgccaugaugcaaguggcugccugccccgaggagaucggguggcgcaacguaacgcgacuccuuguuuucgcgacugaugacggauuucauuucgcaggcgauggcaagcugggggccauauugaccccuaaugacggaagaugucaccuagaagauaaccuguauaaaaggagcaaugaguuugacuacccauccgugggucagcucgcucauaagcuggccgaaaacaacauccagcccauuuucgcagucacaucacggauggugaaaacuuaugagaaacuuaccgaaaucauuccgaagagugcugugggcgagcugagcgaggauucuuccaaugucguucaguugaucaagaacgccuacaauaaacucucaagccguguguuccuggaccacaacgcguuaccugauacacugaagguaaccuacgacaguuuuugcucuaauggggugacgcaccgcaaccaacccagaggagauugcgacggcguccagauaaaugugccaauuacuuuccagguuaaggugacagccaccgaauguauccaggagcaauccuuugucauuagggcacuagguuucacugacaucgugacaguacagguucucccucagugcgaaugucggugccgagaucagagccgcgacagaucgcugugucaugggaaaggcuuucuugagugcggaaucuguaggugcgauaccggcuauauugggaagaacugugaaugccaaacgcagggacggucuucccaggaguuggaggguucaugucgcaaagacaauaacaguauaaucugcagcggccugggggauugcguguguggacagugccucugucacaccuccgacguccccggcaagcugauuuacggucaauauugcgaaugugauacaaucaauugcgagagauacaacggccaggugugugggggaccaggcagggggcuuugcuucuguggaaaaugccguugucaucccgguuuugaaggcucugcuugccagugcgagcggacuaccgaagggugucugaauccucgaagagucgagugcagcggaaggggccgcugucggugcaacgugugugagugccacucagguuaucaguugccacucugucaagaaugcccggggugucccaguccuugcggcaaguacauauccugugccgagugccugaaguucgaaaaaggaccauuuggcaagaauugcagcgcugccugucccggguuacagcugucuaacaacccuguuaaaggaagaacaugcaaggagagggacucagagggcuguuggguggcauauacucuagaacagcaagaugguauggaccgcuaccucauuuacguagaugagagucgagaaugcgucgccgggccaaauaucgcugcgaucgugggaggcaccguugcagguauugugcugaucggcauucuuuugcuggucauauggaaagcccucauccaccugagcgacuuacgggaguaucguagauucgaaaaggagaagcugaaaucccaguggaacaaugauaacccccuuuuuaagucugcuacaaccacugugaugaauccgaaauucgccgagucguga

SEQ ID NO: 8106 - RNA, 2310 nt, Artificial Sequence
  derived and/or modified sequence opt4 from complement_system_component_CR3__Homo_sapiens__CAB90553
augcugggccugagacccccccugcuggcccuggugggccugcugagccugggcugcgugcugagccaggagugcaccaaguucaaggugagcagcugcagagagugcaucgagagcggccccggcugcaccuggugccagaagcugaacuucaccggccccggcgaccccgacagcaucagaugcgacaccagaccccagcugcugaugagaggcugcgccgccgacgacaucauggaccccaccagccuggccgagacccaggaggaccacaacggcggccagaagcagcugagcccccagaaggugacccuguaccugagacccggccaggccgccgccuucaacgugaccuucagaagagccaagggcuaccccaucgaccuguacuaccugauggaccugagcuacagcaugcuggacgaccugagaaacgugaagaagcugggcggcgaccugcugagagcccugaacgagaucaccgagagcggcagaaucggcuucggcagcuucguggacaagaccgugcugcccuucgugaacacccaccccgacaagcugagaaaccccugccccaacaaggagaaggagugccagccccccuucgccuucagacacgugcugaagcugaccaacaacagcaaccaguuccagaccgaggugggcaagcagcugaucagcggcaaccuggacgcccccgagggcggccuggacgccaugaugcagguggccgccugccccgaggagaucggcuggagaaacgugaccagacugcugguguucgccaccgacgacggcuuccacuucgccggcgacggcaagcugggcgccauccugacccccaacgacggcagaugccaccuggaggacaaccuguacaagagaagcaacgaguucgacuaccccagcgugggccagcuggcccacaagcuggccgagaacaacauccagcccaucuucgccgugaccagcagaauggugaagaccuacgagaagcugaccgagaucauccccaagagcgccgugggcgagcugagcgaggacagcagcaacguggugcagcugaucaagaacgccuacaacaagcugagcagcagaguguuccuggaccacaacgcccugcccgacacccugaaggugaccuacgacagcuucugcagcaacggcgugacccacagaaaccagcccagaggcgacugcgacggcgugcagaucaacgugcccaucaccuuccaggugaaggugaccgccaccgagugcauccaggagcagagcuucgugaucagagcccugggcuucaccgacaucgugaccgugcaggugcugccccagugcgagugcagaugcagagaccagagcagagacagaagccugugccacggcaagggcuuccuggagugcggcaucugcagaugcgacaccggcuacaucggcaagaacugcgagugccagacccagggcagaagcagccaggagcuggagggcagcugcagaaaggacaacaacagcaucaucugcagcggccugggcgacugcgugugcggccagugccugugccacaccagcgacgugcccggcaagcugaucuacggccaguacugcgagugcgacaccaucaacugcgagagauacaacggccaggugugcggcggccccggcagaggccugugcuucugcggcaagugcagaugccaccccggcuucgagggcagcgccugccagugcgagagaaccaccgagggcugccugaaccccagaagaguggagugcagcggcagaggcagaugcagaugcaacgugugcgagugccacagcggcuaccagcugccccugugccaggagugccccggcugccccagccccugcggcaaguacaucagcugcgccgagugccugaaguucgagaagggccccuucggcaagaacugcagcgccgccugccccggccugcagcugagcaacaaccccgugaagggcagaaccugcaaggagagagacagcgagggcugcuggguggccuacacccuggagcagcaggacggcauggacagauaccugaucuacguggacgagagcagagagugcguggccggccccaacaucgccgccaucgugggcggcaccguggccggcaucgugcugaucggcauccugcugcuggugaucuggaaggcccugauccaccugagcgaccugagagaguacagaagauucgagaaggagaagcugaagagccaguggaacaacgacaacccccuguucaagagcgccaccaccaccgugaugaaccccaaguucgccgagagcuga

SEQ ID NO: 8107 - RNA, 2310 nt, Artificial Sequence
  derived and/or modified sequence opt5 from complement_system_component_CR3__Homo_sapiens__CAB90553
augcugggacucagacccccucugcuugcccugguggggcuccugagccuuggaugcguccugucccaggaguguaccaaguucaaaguuucuagcugccgggaauguaucgaguccggcccggggugcacauggugucaaaagcucaacuuuacgggacccggcgacccugauucuauucgcugcgacaccagaccccagcugcugaugcgggggugugcugccgaugacaucauggauccuacaagccucgcggaaacccaggaggaccacaauggaggccagaaacaacugagcccccagaaggugacacuuuaccugcgcccuggccaggcugccgccuucaacgugaccuuuagacgggcuaaaggguauccgauugaucucuacuaucugauggaccuuucuuacagcaugcuggaugaccuccgcaaugucaagaagcugggaggcgaucugcucagagcccugaacgaaaucacagaguccgggcggauuggauucggcagcuuuguggacaaaaccguucuucccuucgugaauacgcauccugauaagcugcgcaaccccugcccuaauaaagagaaggaaugucagcccccguuugcuuucagacacguccucaaacugaccaacaauucuaaccaauuucagacagagguggggaagcagcuuaucuccggaaaucuggacgccccugaaggcggccucgacgcgaugaugcagguugccgcuugccccgaggagaucggguggcggaacgugacccgccugcuggucuucgccacagaugacggauuucauuucgcuggcgaugggaagcucggagccauucugaccccuaaugacggcagaugucaccuugaagauaaccuguauaaacggagcaaugaguuugacuaccccucuguggggcaacucgcgcauaagcuggccgaaaacaacauccagcccauuuucgcugugacgucccgcauggucaaaacauaugagaaacuuaccgaaaucauuccuaagagcgccguuggagagcugucugaggauuccagcaauguggugcagcucaucaagaacgcuuacaauaaacuguccucuagagucuuccuggaccacaacgcccucccggauacacugaaggugaccuacgacagcuuuugcuccaauggcguuacccaccggaaccaacccagaggcgauugcgacggggugcagauuaaugucccuaucacauuccaggugaagguuacggccaccgaauguauccaggagcaauccuuugugauucgcgcucuuggauucacagacaucgucaccgugcagguccugccccagugcgaaugucggugcagagaucagucucgcgaccggucccucugucauggcaaaggguuucuggagugcggaauuuguagaugcgauacaggcuauaucgggaagaacugugaaugccaaacccagggccgcagcucucaggagcuggagggaagcugucggaaagacaauaacuccauuaucugcucuggccuuggggauugcguguguggacagugccucugucacacgagcgacguuccuggcaagcugaucuacgggcaauauugcgaaugugauacaauuaauugcgagagauacaacggacagguguguggcgggcccggccgcggacugugcuucuguggcaaaugccggugucauccgggguuugaaggauccgcgugccagugcgagagaaccaccgaaggcugucucaauccucgccgggucgagugcagcgggagaggacggugucgcugcaacgugugugagugccacucuggcuaucagcugccccuuugucaagaaugcccugggugucccuccccuugcggcaaguacaucagcugugccgagugccugaaguucgaaaaaggacccuuuggcaagaauugcucugcugccuguccggggcuccagcuguccaacaacccuguuaaaggaagaacaugcaaggagcgggacagcgagggcuguuggguggccuauacccuggaacagcaagaugggauggacagauaccuuauuuacgucgaugagucccgcgaaugcguggcuggacccaauaucgccgcgauugugggcgggacaguugcuggcaucguccucaucggcauucugcugcucgugaucuggaaagcccugauucaccuuucugaccugcgggaguauagacgcuucgaaaaggagaagcucaaaagccaguggaacaaugauaacccccuguuuaaguccgccacgaccacagugaugaauccuaaauucgcugagucuuga

SEQ ID NO: 8108 - protein, 699 aa, Artificial Sequence
  complement_system_component_MASP-1__Homo_sapiens__P48740
MRWLLLYYALCFSLSKASAHTVELNNMFGQIQSPGYPDSYPSDSEVTWNITVPDGFRIKLYFMHFNLESSYLCEYDYVKVETEDQVLATFCGRETTDTEQTPGQEVVLSPGSFMSITFRSDFSNEERFTGFDAHYMAVDVDECKEREDEELSCDHYCHNYIGGYYCSCRFGYILHTDNRTCRVECSDNLFTQRTGVITSPDFPNPYPKSSECLYTIELEEGFMVNLQFEDIFDIEDHPEVPCPYDYIKIKVGPKVLGPFCGEKAPEPISTQSHSVLILFHSDNSGENRGWRLSYRAAGNECPELQPPVHGKIEPSQAKYFFKDQVLVSCDTGYKVLKDNVEMDTFQIECLKDGTWSNKIPTCKIVDCRAPGELEHGLITFSTRNNLTTYKSEIKYSCQEPYYKMLNNNTGIYTCSAQGVWMNKVLGRSLPTCLPVCGLPKFSRKLMARIFNGRPAQKGTTPWIAMLSHLNGQPFCGGSLLGSSWIVTAAHCLHQSLDPEDPTLRDSDLLSPSDFKIILGKHWRLRSDENEQHLGVKHTTLHPQYDPNTFENDVALVELLESPVLNAFVMPICLPEGPQQEGAMVIVSGWGKQFLQRFPETLMEIEIPIVDHSTCQKAYAPLKKKVTRDMICAGEKEGGKDACAGDSGGPMVTLNRERGQWYLVGTVSWGDDCGKKDRYGVYSYIHHNKDWIQRVTGVRN

SEQ ID NO: 8109 - RNA, 2100 nt, Artificial Sequence
  complement_system_component_MASP-1__Homo_sapiens__CCDS33907.1
augagguggcugcuucucuauuaugcucugugcuucucccugucaaaggcuucagcccacaccguggagcuaaacaauauguuuggccagauccagucgccugguuauccagacuccuaucccagugauucagaggugacuuggaauaucacugucccagauggguuucggaucaagcuuuacuucaugcacuucaacuuggaauccuccuaccuuugugaauaugacuaugugaagguagaaacugaggaccaggugcuggcaaccuucuguggcagggagaccacagacacagagcagacucccggccaggaggugguccucuccccuggcuccuucauguccaucacuuuccggucagauuucuccaaugaggagcguuucacaggcuuugaugcccacuacauggcuguggauguggacgagugcaaggagagggaggacgaggagcuguccugugaccacuacugccacaacuacauuggcggcuacuacugcuccugccgcuucggcuacauccuccacacagacaacaggaccugccgaguggagugcagugacaaccucuucacucaaaggacuggggugaucaccagcccugacuucccaaacccuuaccccaagagcucugaaugccuguauaccaucgagcuggaggaggguuucauggucaaccugcaguuugaggacauauuugacauugaggaccauccugaggugcccugccccuaugacuacaucaagaucaaaguugguccaaaaguuuuggggccuuucuguggagagaaagccccagaacccaucagcacccagagccacaguguccugauccuguuccauagugacaacucgggagagaaccggggcuggaggcucucauacagggcugcaggaaaugagugcccagagcuacagccuccuguccaugggaaaaucgagcccucccaagccaaguauuucuucaaagaccaagugcucgucagcugugacacaggcuacaaagugcugaaggauaauguggagauggacacauuccagauugagugucugaaggaugggacguggaguaacaagauucccaccuguaaaauuguagacuguagagccccaggagagcuggaacacgggcugaucaccuucucuacaaggaacaaccucaccacauacaagucugagaucaaauacuccugucaggagcccuauuacaagaugcucaacaauaacacagguauauauaccuguucugcccaaggagucuggaugaauaaaguauuggggagaagccuacccaccugccuuccagugugugggcuccccaaguucucccggaagcugauggccaggaucuucaauggacgcccagcccagaaaggcaccacucccuggauugccaugcugucacaccugaaugggcagcccuucugcggaggcucccuucuaggcuccagcuggaucgugaccgccgcacacugccuccaccagucacucgauccggaagauccgacccuacgugauucagacuugcucagcccuucugacuucaaaaucauccugggcaagcauuggaggcuccggucagaugaaaaugaacagcaucucggcgucaaacacaccacucuccacccccaguaugaucccaacacauucgagaaugacguggcucugguggagcuguuggagagcccagugcugaaugccuucgugaugcccaucugucugccugagggaccccagcaggaaggagccauggucaucgucagcggcugggggaagcaguucuugcaaagguucccagagacccugauggagauugaaaucccgauuguugaccacagcaccugccagaaggcuuaugccccgcugaagaagaaagugaccagggacaugaucugugcuggggagaaggaagggggaaaggacgccugugcgggugacucuggaggccccauggugacccugaauagagaaagaggccagugguaccuggugggcacuguguccuggggugaugacugugggaagaaggaccgcuacggaguauacucuuacauccaccacaacaaggacuggauccagagggucaccggagugaggaacuga

SEQ ID NO: 8110 - RNA, 2100 nt, Artificial Sequence
  derived and/or modified sequence opt1 from complement_system_component_MASP-1__Homo_sapiens__CCDS33907.1
augcgcuggcugcuccuguacuacgcccugugcuucagccucuccaaggccagcgcgcacaccguggagcugaacaacauguucggccagauccagucccccggguacccggacagcuaccccuccgacagcgaggucaccuggaacaucacggugcccgacggcuuccggaucaagcuguacuucaugcacuucaaccucgaguccagcuaccugugcgaguacgacuacgugaaggucgagaccgaggaccaggugcuggccaccuucugcgggcgcgagaccacggacaccgagcagacccccggccaggaggugguccucuccccggggagcuucauguccaucaccuuccggagcgacuucuccaacgaggagcgcuucacgggcuucgacgcccacuacauggccguggacguggacgagugcaaggagcgggaggacgaggagcugagcugcgaccacuacugccacaacuacaucggcggguacuacugcuccugccgcuucggcuacauccugcacaccgacaaccggaccugccgcgucgagugcagcgacaaccucuucacccagcggacgggggugaucaccucccccgacuuccccaaccccuaccccaagagcuccgagugccuguacaccaucgagcuggaggagggcuucauggugaaccuccaguucgaggacaucuucgacaucgaggaccaccccgagguccccugccccuacgacuacaucaagaucaagguggggccgaaggugcugggccccuucugcggcgagaaggcccccgagcccaucagcacccagagccacuccguccugauccucuuccacagcgacaacuccggggagaaccgcggcuggcggcugagcuaccgcgcggccgggaacgagugcccggagcugcagccgcccgugcacggcaagaucgagcccucccaggccaaguacuucuucaaggaccaggugcucgucagcugcgacacgggcuacaaggugcugaaggacaacguggagauggacaccuuccagaucgagugccugaaggacgggaccugguccaacaagaucccgaccugcaagaucgucgacugccgggcccccggcgagcucgagcacgggcugaucacguucagcacccgcaacaaccugaccaccuacaaguccgagaucaaguacagcugccaggagcccuacuacaagaugcucaacaacaacacgggcaucuacacgugcuccgcgcaggggguguggaugaacaaggugcugggccggagccugccgaccugccuccccgucugcggccugcccaaguucucccgcaagcugauggcccggaucuucaacgggcgccccgcccagaagggcaccacccccuggaucgccaugcucagccaccugaacgggcagccguucugcggcgggucccugcucggcagcuccuggaucgugaccgccgcgcacugccugcaccagagccuggaccccgaggaccccacccuccgggacuccgaccugcugagcccgagcgacuucaagaucauccucggcaagcacuggcgccugcgguccgacgagaacgagcagcaccugggggucaagcacaccacgcuccacccccaguacgaccccaacaccuucgagaacgacguggcccugguggagcugcucgagagccccguccugaacgccuucgugaugccgaucugccugcccgagggcccccagcaggagggggccauggugaucgucuccggcugggggaagcaguuccugcagcgcuuccccgagacccucauggagaucgagaucccgaucguggaccacagcacgugccagaaggccuacgcgccccugaagaagaaggugacccgcgacaugaucugcgccggcgagaaggagggcgggaaggacgccugcgccggcgacuccgggggccccauggucacccugaaccgggagcgcggccagugguaccucguggggaccgugagcuggggcgacgacugcgggaagaaggaccgguacggcgucuacuccuacauccaccacaacaaggacuggauccagcgcgugaccggggugcggaacuga

SEQ ID NO: 8111 - RNA, 2100 nt, Artificial Sequence
  derived and/or modified sequence opt2 from complement_system_component_MASP-1__Homo_sapiens__CCDS33907.1
augcgcuggcuccuccucuacuacgcccucugcuucucccucuccaaggccuccgcccacaccgucgagcucaacaacauguucggccagauccagucccccggcuaccccgacuccuaccccuccgacuccgaggucaccuggaacaucaccguccccgacggcuuccgcaucaagcucuacuucaugcacuucaaccucgaguccuccuaccucugcgaguacgacuacgucaaggucgagaccgaggaccagguccucgccaccuucugcggccgcgagaccaccgacaccgagcagacccccggccaggaggucguccucucccccggcuccuucauguccaucaccuuccgcuccgacuucuccaacgaggagcgcuucaccggcuucgacgcccacuacauggccgucgacgucgacgagugcaaggagcgcgaggacgaggagcucuccugcgaccacuacugccacaacuacaucggcggcuacuacugcuccugccgcuucggcuacauccuccacaccgacaaccgcaccugccgcgucgagugcuccgacaaccucuucacccagcgcaccggcgucaucaccucccccgacuuccccaaccccuaccccaaguccuccgagugccucuacaccaucgagcucgaggagggcuucauggucaaccuccaguucgaggacaucuucgacaucgaggaccaccccgagguccccugccccuacgacuacaucaagaucaaggucggccccaagguccucggccccuucugcggcgagaaggcccccgagcccaucuccacccagucccacuccguccucauccucuuccacuccgacaacuccggcgagaaccgcggcuggcgccucuccuaccgcgccgccggcaacgagugccccgagcuccagccccccguccacggcaagaucgagcccucccaggccaaguacuucuucaaggaccagguccucgucuccugcgacaccggcuacaagguccucaaggacaacgucgagauggacaccuuccagaucgagugccucaaggacggcaccugguccaacaagauccccaccugcaagaucgucgacugccgcgcccccggcgagcucgagcacggccucaucaccuucuccacccgcaacaaccucaccaccuacaaguccgagaucaaguacuccugccaggagcccuacuacaagaugcucaacaacaacaccggcaucuacaccugcuccgcccagggcgucuggaugaacaagguccucggccgcucccuccccaccugccuccccgucugcggccuccccaaguucucccgcaagcucauggcccgcaucuucaacggccgccccgcccagaagggcaccacccccuggaucgccaugcucucccaccucaacggccagcccuucugcggcggcucccuccucggcuccuccuggaucgucaccgccgcccacugccuccaccagucccucgaccccgaggaccccacccuccgcgacuccgaccuccucucccccuccgacuucaagaucauccucggcaagcacuggcgccuccgcuccgacgagaacgagcagcaccucggcgucaagcacaccacccuccacccccaguacgaccccaacaccuucgagaacgacgucgcccucgucgagcuccucgagucccccguccucaacgccuucgucaugcccaucugccuccccgagggcccccagcaggagggcgccauggucaucgucuccggcuggggcaagcaguuccuccagcgcuuccccgagacccucauggagaucgagauccccaucgucgaccacuccaccugccagaaggccuacgccccccucaagaagaaggucacccgcgacaugaucugcgccggcgagaaggagggcggcaaggacgccugcgccggcgacuccggcggccccauggucacccucaaccgcgagcgcggccagugguaccucgucggcaccgucuccuggggcgacgacugcggcaagaaggaccgcuacggcgucuacuccuacauccaccacaacaaggacuggauccagcgcgucaccggcguccgcaacuga

SEQ ID NO: 8112 - RNA, 2100 nt, Artificial Sequence
  derived and/or modified sequence opt3 from complement_system_component_MASP-1__Homo_sapiens__CCDS33907.1
augagauggcugcuccuuuacuaugcccugugcuucagcuuguccaaggcuucugcacacaccguggaguuaaacaauauguuuggccagauccaaucacccggguacccugacaguuauccaagcgauuccgaagucacauggaacauuacuguuccggacggauucaggauaaaacuguacuuuaugcauuucaaucuagagucuucguaucucugugaauacgauuaugugaagguagagacggaagaccaggugcuggccaccuuuugcggucgggagacaacugauaccgagcagacacccggccaggaagucgugcuuucaccugggagcuucaugaguaucaccuuucgcuccgacuucucuaacgaggaacgauuuacuggauucgaugcgcacuacauggcuguugacguggaugaguguaaagagcgugaagacgaggaacugagcugcgaucauuacugucacaauuauauuggcgguuacuauugcuccuguagauuuggguacaucuugcauacagacaacaggaccugccgggucgaguguucagauaaucucuucacgcaacgcacuggagugauuaccaguccagacuuucccaacccuuauccaaagagcucugaaugccuguacacaaucgagcuggaggaaggcuucaugguaaaucuccaguucgaggacauauuugauaucgaagaccaccccgagguuccuuguccauaugauuacauuaaaaucaaggugggcccgaaggucuuagggcccuucugcggagaaaaagccccugagccaauuuccacucagucacacagcgugcugauccuuuuucauagugacaacucuggugagaauagaggcuggagguuguccuaccgggcagccgggaacgaaugccccgagcugcagccuccagugcacggaaagauagaacccagccaagcuaaauauuucuuuaaggaucagguccuaguuucgugugacaccggcuacaaagugcucaaggauaauguagagauggacacauuccagauugaaugccugaaggaugguaccuggucuaacaaaaucccgacguguaagauuguggacugccgcgcaccuggggagcuugagcauggacugaucacuuuuuccacacgaaauaacuugaccacuuauaaaucagaaaucaaguacaguugucaggagcccuauuacaaaaugcucaacaauaacacaggcauuuauaccugcagcgcccaaggcgucuggaugaauaaggugcuggggagauccuuaccaacgugucugccuguuugcggacuccccaaauucucuaggaaacuuauggcucggauauuuaacggucguccagcccagaagggcaccacacccuggaucgcgaugcugagccacuugaaugggcagccuuucuguggaggcucacuacuggguaguuccuggauugugacugcagcccacugccuccaucaaagccuggauccagaagacccgacccuucgcgacucugaucuguugucacccagugacuuuaaaaucauacucgggaagcacuggagacugaggagcgaugagaacgagcagcauuuaggcgucaaacacacaacucugcauccucaguacgacccaaauaccuucgaaaacgauguggcucuaguagagcuccuggaaucccccguucuuaaugccuuugugaugccuauuuguuugccagagggaccccagcaagaaggcgcaauggucaucgugucuggguggggaaagcaguuccugcagcgguucccggagacacucauggagaucgaaauuccuaucgucgaccacucgaccugccagaaggcuuacgccccacugaagaagaaagugacucgagauaugauuugcgcgggugagaaggaaggcgggaaagacgccugugcaggagauagcggcggucccaugguuacgcuuaaccgcgagagagggcaaugguaucuggugggcacaguauccuggggagacgauugcggcaagaaagacagguacggggucuauucauacauacaccauaauaaggauuggauccagcgggugaccggaguucgcaacuga

SEQ ID NO: 8113 - RNA, 2100 nt, Artificial Sequence
  derived and/or modified sequence opt4 from complement_system_component_MASP-1__Homo_sapiens__CCDS33907.1
augagauggcugcugcuguacuacgcccugugcuucagccugagcaaggccagcgcccacaccguggagcugaacaacauguucggccagauccagagccccggcuaccccgacagcuaccccagcgacagcgaggugaccuggaacaucaccgugcccgacggcuucagaaucaagcuguacuucaugcacuucaaccuggagagcagcuaccugugcgaguacgacuacgugaagguggagaccgaggaccaggugcuggccaccuucugcggcagagagaccaccgacaccgagcagacccccggccaggagguggugcugagccccggcagcuucaugagcaucaccuucagaagcgacuucagcaacgaggagagauucaccggcuucgacgcccacuacauggccguggacguggacgagugcaaggagagagaggacgaggagcugagcugcgaccacuacugccacaacuacaucggcggcuacuacugcagcugcagauucggcuacauccugcacaccgacaacagaaccugcagaguggagugcagcgacaaccuguucacccagagaaccggcgugaucaccagccccgacuuccccaaccccuaccccaagagcagcgagugccuguacaccaucgagcuggaggagggcuucauggugaaccugcaguucgaggacaucuucgacaucgaggaccaccccgaggugcccugccccuacgacuacaucaagaucaaggugggccccaaggugcugggccccuucugcggcgagaaggcccccgagcccaucagcacccagagccacagcgugcugauccuguuccacagcgacaacagcggcgagaacagaggcuggagacugagcuacagagccgccggcaacgagugccccgagcugcagccccccgugcacggcaagaucgagcccagccaggccaaguacuucuucaaggaccaggugcuggugagcugcgacaccggcuacaaggugcugaaggacaacguggagauggacaccuuccagaucgagugccugaaggacggcaccuggagcaacaagauccccaccugcaagaucguggacugcagagcccccggcgagcuggagcacggccugaucaccuucagcaccagaaacaaccugaccaccuacaagagcgagaucaaguacagcugccaggagcccuacuacaagaugcugaacaacaacaccggcaucuacaccugcagcgcccagggcguguggaugaacaaggugcugggcagaagccugcccaccugccugcccgugugcggccugcccaaguucagcagaaagcugauggccagaaucuucaacggcagacccgcccagaagggcaccacccccuggaucgccaugcugagccaccugaacggccagcccuucugcggcggcagccugcugggcagcagcuggaucgugaccgccgcccacugccugcaccagagccuggaccccgaggaccccacccugagagacagcgaccugcugagccccagcgacuucaagaucauccugggcaagcacuggagacugagaagcgacgagaacgagcagcaccugggcgugaagcacaccacccugcacccccaguacgaccccaacaccuucgagaacgacguggcccugguggagcugcuggagagccccgugcugaacgccuucgugaugcccaucugccugcccgagggcccccagcaggagggcgccauggugaucgugagcggcuggggcaagcaguuccugcagagauuccccgagacccugauggagaucgagauccccaucguggaccacagcaccugccagaaggccuacgccccccugaagaagaaggugaccagagacaugaucugcgccggcgagaaggagggcggcaaggacgccugcgccggcgacagcggcggccccauggugacccugaacagagagagaggccagugguaccuggugggcaccgugagcuggggcgacgacugcggcaagaaggacagauacggcguguacagcuacauccaccacaacaaggacuggauccagagagugaccggcgugagaaacuga

SEQ ID NO: 8114 - RNA, 2100 nt, Artificial Sequence
  derived and/or modified sequence opt5 from complement_system_component_MASP-1__Homo_sapiens__CCDS33907.1
augagauggcugcuccuguacuaugcccuuugcuucagccuguccaaggcuucugcccacaccguggagcucaacaauauguuuggccagauccaaagccccggguacccugacuccuauccgucugauagcgaagucacauggaacauuacgguucccgacggauuccggaucaaacuguacuuuaugcauuucaaucuugaguccucuuaucugugugaauacgauuaugugaagguggagaccgaagaccagguccucgcgacauuuugcggccgcgagaccacagauaccgagcagacaccugggcaggaagugguucugagccccggauccuucaugagcauuaccuuuagaucugacuucuccaacgaggaacgguuuacgggcuucgaugcucacuacauggccguggacgucgaugaguguaaagagcgcgaagacgaggaacugagcugcgaucauuacugucacaauuauaucgggggauacuauugcucuuguagauuuggcuacauucuccauaccgacaaccggacaugccgcguggaguguuccgauaaucuguucacccaaagaacaggcguuaucaccagcccugacuuucccaacccuuauccgaagucuuccgaaugccuuuacacgaucgagcuggaggaaggguucauggugaaucuccaguucgaggacauuuuugauaucgaagaccaccccgaggucccuugucccuaugauuacauuaaaaucaaggugggaccuaaggugcugggccccuucugcggggaaaaagccccggagccuauuagcacacagucccacucuguccuuauccuguuucauagcgacaacuccggagagaaucggggcuggcgccucagcuacagagcugccgggaacgaaugccccgagcugcagccucccguucacggaaagauugaacccucucaagcuaaauauuucuuuaaggaucaggugcugguguccugugacaccggcuacaaaguccucaaggauaauguggagauggacacauuccagaucgaaugccugaaggauggcaccuggagcaacaaaaucccuaccuguaagauuguugacugccgggccccgggggagcuugagcauggacugaucacauuuucuacgcgcaauaaccucaccacauauaaaagcgaaauuaaguacuccugucaggagcccuauuacaaaaugcugaacaauaacaccggcaucuauacaugcucugcgcaagggguguggaugaauaagguccuuggaagaagccugccuaccugucuccccgugugcggccugccuaaauucucccggaagcugauggcccgcauuuuuaacgggagacccgcucagaagggaacgacaccguggaucgccaugcucagccaccugaauggccagccuuucuguggcgggucucuucugggauccagcuggaucguuaccgcugcccacugccuccaucaaucucuggaucccgaagacccuacccuucgggacuccgaucugcucagccccuccgacuuuaaaauuauccugggcaagcacuggagacugcgcucugaugagaacgagcagcaucucggggugaaacacacaacccugcauccucaguacgaccccaauacauucgaaaacgaugucgcgcuuguggagcugcucgaaagcccgguccugaaugccuuugugaugccuauuugucugcccgagggaccccagcaagaaggcgcuaugguuaucguguccggguggggcaagcaguuccuucagcgguucccugagacgcucauggagauugaaaucccgaucgucgaccacucuaccugccagaaagccuacgcuccccugaagaagaaagugacaagagauaugauuugcgccggagagaaggaaggcgggaaagacgccugugcuggagauagcggcgggccuaugguuacccugaaccgcgagcggggacaaugguaucucgugggcacagucuccuggggcgacgauugcgggaagaaagacagauacggaguguauagcuacauccaccauaauaaggauuggauucagcgcgugaccggcguucggaacuga

SEQ ID NO: 8115 - protein, 686 aa, Artificial Sequence
  complement_system_component_MASP-2__Homo_sapiens__O00187
MRLLTLLGLLCGSVATPLGPKWPEPVFGRLASPGFPGEYANDQERRWTLTAPPGYRLRLYFTHFDLELSHLCEYDFVKLSSGAKVLATLCGQESTDTERAPGKDTFYSLGSSLDITFRSDYSNEKPFTGFEAFYAAEDIDECQVAPGEAPTCDHHCHNHLGGFYCSCRAGYVLHRNKRTCSALCSGQVFTQRSGELSSPEYPRPYPKLSSCTYSISLEEGFSVILDFVESFDVETHPETLCPYDFLKIQTDREEHGPFCGKTLPHRIETKSNTVTITFVTDESGDHTGWKIHYTSTAQPCPYPMAPPNGHVSPVQAKYILKDSFSIFCETGYELLQGHLPLKSFTAVCQKDGSWDRPMPACSIVDCGPPDDLPSGRVEYITGPGVTTYKAVIQYSCEETFYTMKVNDGKYVCEADGFWTSSKGEKSLPVCEPVCGLSARTTGGRIYGGQKAKPGDFPWQVLILGGTTAAGALLYDNWVLTAAHAVYEQKHDASALDIRMGTLKRLSPHYTQAWSEAVFIHEGYTHDAGFDNDIALIKLNNKVVINSNITPICLPRKEAESFMRTDDIGTASGWGLTQRGFLARNLMYVDIPIVDHQKCTAAYEKPPYPRGSVTANMLCAGLESGGKDSCRGDSGGALVFLDSETERWFVGGIVSWGSMNCGEAGQYGVYTKVINYIPWIENIISDF

SEQ ID NO: 8116 - RNA, 2061 nt, Artificial Sequence
  complement_system_component_MASP-2__Homo_sapiens__CCDS123.1
augaggcugcugacccuccugggccuucuguguggcucgguggccacccccuugggcccgaaguggccugaaccuguguucgggcgccuggcaucccccggcuuuccaggggaguaugccaaugaccaggagcggcgcuggacccugacugcaccccccggcuaccgccugcgccucuacuucacccacuucgaccuggagcucucccaccucugcgaguacgacuucgucaagcugagcucgggggccaaggugcuggccacgcugugcgggcaggagagcacagacacggagcgggccccuggcaaggacacuuucuacucgcugggcuccagccuggacauuaccuuccgcuccgacuacuccaacgagaagccguucacgggguucgaggccuucuaugcagccgaggacauugacgagugccagguggccccgggagaggcgcccaccugcgaccaccacugccacaaccaccugggcgguuucuacugcuccugccgcgcaggcuacguccugcaccguaacaagcgcaccugcucagcccugugcuccggccaggucuucacccagaggucuggggagcucagcagcccugaauacccacggccguaucccaaacucuccaguugcacuuacagcaucagccuggaggagggguucagugucauucuggacuuuguggaguccuucgauguggagacacacccugaaacccugugucccuacgacuuucucaagauucaaacagacagagaagaacauggcccauucugugggaagacauugccccacaggauugaaacaaaaagcaacacggugaccaucaccuuugucacagaugaaucaggagaccacacaggcuggaagauccacuacacgagcacagcgcagccuugcccuuauccgauggcgccaccuaauggccacguuucaccugugcaagccaaauacauccugaaagacagcuucuccaucuuuugcgagacuggcuaugagcuucugcaaggucacuugccccugaaauccuuuacugcaguuugucagaaagauggaucuugggaccggccaaugcccgcgugcagcauuguugacuguggcccuccugaugaucuacccaguggccgaguggaguacaucacagguccuggagugaccaccuacaaagcugugauucaguacagcugugaagagaccuucuacacaaugaaagugaaugaugguaaauaugugugugaggcugauggauucuggacgagcuccaaaggagaaaaaucacucccagucugugagccuguuuguggacuaucagcccgcacaacaggagggcguauauauggagggcaaaaggcaaaaccuggugauuuuccuuggcaaguccugauauuagguggaaccacagcagcaggugcacuuuuauaugacaacuggguccuaacagcugcucaugccgucuaugagcaaaaacaugaugcauccgcccuggacauucgaaugggcacccugaaaagacuaucaccucauuauacacaagccuggucugaagcuguuuuuauacaugaagguuauacucaugaugcuggcuuugacaaugacauagcacugauuaaauugaauaacaaaguuguaaucaauagcaacaucacgccuauuugucugccaagaaaagaagcugaauccuuuaugaggacagaugacauuggaacugcaucuggauggggauuaacccaaagggguuuucuugcuagaaaucuaauguaugucgacauaccgauuguugaccaucaaaaauguacugcugcauaugaaaagccacccuauccaaggggaaguguaacugcuaacaugcuuugugcuggcuuagaaagugggggcaaggacagcugcagaggugacagcggaggggcacugguguuucuagauagugaaacagagaggugguuugugggaggaauaguguccugggguuccaugaauuguggggaagcaggucaguauggagucuacacaaaaguuauuaacuauauucccuggaucgagaacauaauuagugauuuuuaa

SEQ ID NO: 8117 - RNA, 2061 nt, Artificial Sequence
  derived and/or modified sequence opt1 from complement_system_component_MASP-2__Homo_sapiens__CCDS123.1
augcgccugcucacccugcugggccuccugugcgggagcguggccacgccccugggcccgaaguggcccgagcccgucuucgggcggcucgccucccccggcuucccgggggaguacgcgaacgaccaggagcgccgguggacccugaccgccccgcccggcuaccgccugcggcucuacuucacccacuucgaccuggagcugagccaccucugcgaguacgacuucgugaagcuguccagcggcgccaaggugcuggccacccucugcgggcaggaguccacggacaccgagcgcgcccccggcaaggacaccuucuacagccugggguccagccuggacaucaccuuccgguccgacuacagcaacgagaagcccuucacgggcuucgaggcguucuacgccgccgaggacaucgacgagugccaggucgcccccggggaggcgccgaccugcgaccaccacugccacaaccaccucggcggcuucuacugcuccugccgcgccggguacgugcugcaccggaacaagcggaccugcagcgcccugugcuccggccagguguucacccagcgcagcggggagcucuccagccccgaguacccccgccccuaccccaagcuguccagcugcacguacuccaucagccuggaggagggcuucagcgucauccucgacuucguggaguccuucgacguggagacccaccccgagacccugugcccguacgacuuccugaagauccagaccgaccgggaggagcacggccccuucugcgggaagacgcucccccaccgcaucgagaccaagagcaacaccgucaccaucacguucgugaccgacgaguccggcgaccacaccggguggaagauccacuacaccagcacggcccagcccugcccguaccccauggccccgcccaacggccacgugucccccguccaggcgaaguacauccugaaggacagcuucuccaucuucugcgagaccggguacgagcugcuccagggccaccucccccucaagagcuucaccgccgugugccagaaggacggcuccugggaccggcccaugcccgccugcagcaucguggacugcgggccgcccgacgaccugcccuccggccgcgucgaguacaucaccgggccgggcgugacgaccuacaaggccgugauccaguacagcugcgaggagaccuucuacaccaugaaggucaacgacgggaaguacgugugcgaggccgacggcuucuggacguccagcaagggcgagaagucccugcccgugugcgagcccgucugcgggcugagcgcgcggaccaccggcgggcgcaucuacggcgggcagaaggccaagcccggcgacuucccguggcagguccugauccugggcgggaccacggccgccggcgcccugcucuacgacaacugggugcugaccgcggcccacgccguguacgagcagaagcacgacgccuccgcccuggacauccggauggggacccucaagcgccugagcccccacuacacccaggcgugguccgaggccguguucauccacgagggcuacacccacgacgccggcuucgacaacgacaucgcccugaucaagcucaacaacaaggucgugaucaacagcaacaucacgcccaucugccugccccggaaggaggcggagagcuucaugcgcaccgacgacaucgggaccgccuccggcugggggcugacccagcgcggcuuccucgcccggaaccugauguacguggacaucccgaucgucgaccaccagaagugcacggccgccuacgagaagccgcccuacccccgcgggagcgugaccgcgaacaugcugugcgccggccuggaguccggcgggaaggacagcugccggggcgacuccgggggcgcccucguguuccuggacagcgagaccgagcgcugguucgucgggggcaucguguccuggggcagcaugaacugcggggaggccggccaguacgggguguacaccaaggucaucaacuacauccccuggaucgagaacaucaucuccgacuucuga

SEQ ID NO: 8118 - RNA, 2061 nt, Artificial Sequence
  derived and/or modified sequence opt2 from complement_system_component_MASP-2__Homo_sapiens__CCDS123.1
augcgccuccucacccuccucggccuccucugcggcuccgucgccaccccccucggccccaaguggcccgagcccgucuucggccgccucgccucccccggcuuccccggcgaguacgccaacgaccaggagcgccgcuggacccucaccgccccccccggcuaccgccuccgccucuacuucacccacuucgaccucgagcucucccaccucugcgaguacgacuucgucaagcucuccuccggcgccaagguccucgccacccucugcggccaggaguccaccgacaccgagcgcgcccccggcaaggacaccuucuacucccucggcuccucccucgacaucaccuuccgcuccgacuacuccaacgagaagcccuucaccggcuucgaggccuucuacgccgccgaggacaucgacgagugccaggucgcccccggcgaggcccccaccugcgaccaccacugccacaaccaccucggcggcuucuacugcuccugccgcgccggcuacguccuccaccgcaacaagcgcaccugcuccgcccucugcuccggccaggucuucacccagcgcuccggcgagcucuccucccccgaguacccccgccccuaccccaagcucuccuccugcaccuacuccaucucccucgaggagggcuucuccgucauccucgacuucgucgaguccuucgacgucgagacccaccccgagacccucugccccuacgacuuccucaagauccagaccgaccgcgaggagcacggccccuucugcggcaagacccucccccaccgcaucgagaccaaguccaacaccgucaccaucaccuucgucaccgacgaguccggcgaccacaccggcuggaagauccacuacaccuccaccgcccagcccugccccuaccccauggccccccccaacggccacgucucccccguccaggccaaguacauccucaaggacuccuucuccaucuucugcgagaccggcuacgagcuccuccagggccaccucccccucaaguccuucaccgccgucugccagaaggacggcuccugggaccgccccaugcccgccugcuccaucgucgacugcggcccccccgacgaccuccccuccggccgcgucgaguacaucaccggccccggcgucaccaccuacaaggccgucauccaguacuccugcgaggagaccuucuacaccaugaaggucaacgacggcaaguacgucugcgaggccgacggcuucuggaccuccuccaagggcgagaagucccuccccgucugcgagcccgucugcggccucuccgcccgcaccaccggcggccgcaucuacggcggccagaaggccaagcccggcgacuuccccuggcagguccucauccucggcggcaccaccgccgccggcgcccuccucuacgacaacuggguccucaccgccgcccacgccgucuacgagcagaagcacgacgccuccgcccucgacauccgcaugggcacccucaagcgccucuccccccacuacacccaggccugguccgaggccgucuucauccacgagggcuacacccacgacgccggcuucgacaacgacaucgcccucaucaagcucaacaacaaggucgucaucaacuccaacaucacccccaucugccucccccgcaaggaggccgaguccuucaugcgcaccgacgacaucggcaccgccuccggcuggggccucacccagcgcggcuuccucgcccgcaaccucauguacgucgacauccccaucgucgaccaccagaagugcaccgccgccuacgagaagccccccuacccccgcggcuccgucaccgccaacaugcucugcgccggccucgaguccggcggcaaggacuccugccgcggcgacuccggcggcgcccucgucuuccucgacuccgagaccgagcgcugguucgucggcggcaucgucuccuggggcuccaugaacugcggcgaggccggccaguacggcgucuacaccaaggucaucaacuacauccccuggaucgagaacaucaucuccgacuucuga

SEQ ID NO: 8119 - RNA, 2061 nt, Artificial Sequence
  derived and/or modified sequence opt3 from complement_system_component_MASP-2__Homo_sapiens__CCDS123.1
augagacugcucacccuucugggcuuguuaugcgggagcguggccacaccccugggaccuaaguggccagagccggucuucgguaggcuagcuucccccggcuuuccuggggaauacgcaaacgaccaggagcggcgcuggacucucacggccccacccggauaucgacugcgucuuuacuucacccacuuugaucuggaauugucucaucucugugaguaugacuucguuaaacugucaaguggcgcgaaggugcuggcuacacucugcggucaagaaagcacugauaccgagagagccccugggaaagacacauuuuacuccuuaggaucuucgcuggauaucaccuucaggucagacuauagcaaugagaagccauuuacuggcuucgaagcauuuuacgccgcugaggauauugacgaaugucagguagcacccggcgaggccccuacaugcgaucaccauugucacaaccaucuugggggauucuauugcaguugucgggcugguuacguguugcaccgcaauaaaagaaccugcuccgcccuguguucuggccaggucuuuacgcagaggagcggggagcuauccucaccagaauacccgcggcccuauccuaagcucaguagcugcacuuacucuauaucccuggaggaaggauucucagugauccuugacuuuguugagagcuucgauguggaaacccacccagagacacugugucccuaugacuucuugaagauucaaacugaucgcgaggaacauggcccuuuuugcgguaaaacccucccacaccgaaucgagacaaagaguaacaccgucacgauuacuuucgugacagacgaaucuggggaccauaccggauggaaaauccacuacacuuccacagcgcagcccugcccguauccuauggcacccccaaauggccacguaagcccuguucaggccaaguacauacugaaagauucguuuucuaucuucugugagaccggcuaugaauuacugcaggggcaucucccccuuaaguccuuuacggcugugugccaaaaggacggaucaugggauagaccaaugcccgccuguaguauugucgacugcgguccuccagaugaccugccgagcggcaggguggaguacaucaccgggcccggagugacaacuuacaaagcagucauucaguauuccugugaggaaaccuucuacacaaugaagguuaacgauggcaaauaugugugcgaggcugacgguuuuuggacuucuagcaagggggaaaaaucauugccuguaugugagccagugugcggccuaagugcccggaccacaggaggccguaucuacgggggacagaaggcgaaacccggugauuucccuuggcagguccugauacucggcgggaccacugccgcaggagcucugcuuuaugacaauugggugcugacggccgcucacgccguuuacgaacaaaagcaugaugcauccgccuuggacauucgcaugggcacacucaagagacugagcccacacuauacccaggcuuggucugaggcgguguuuauccaugaggguuacacucacgacgcaggguucgauaacgacauugccuuaaucaaacugaauaacaaggucgugaucaauucaaacauuacccccauaugucuaccgaggaaagaagcugagaguuuuaugcggacagaugacaucggcaccgccagcggauggggccucacucagcgaggguuccuggcacgcaaucuuauguacguagauauuccuaucguugaccaccaaaagugcacagccgcuuaugaaaaaccacccuacccuagaggauccgugacggccaacauguugugugcaggucuggagucuggcgggaaggauucgugcaggggagacagcggcggugcgcucgucuuucuggauuccgagaccgaacggugguucgucgggggcauagugucauggggaaguaugaauugcggcgaggcugggcaguauggaguguacacuaagguuauuaacuauauccccuggaucgaaaacauuaucucugacuucuga

SEQ ID NO: 8120 - RNA, 2061 nt, Artificial Sequence
  derived and/or modified sequence opt4 from complement_system_component_MASP-2__Homo_sapiens__CCDS123.1
augagacugcugacccugcugggccugcugugcggcagcguggccaccccccugggccccaaguggcccgagcccguguucggcagacuggccagccccggcuuccccggcgaguacgccaacgaccaggagagaagauggacccugaccgccccccccggcuacagacugagacuguacuucacccacuucgaccuggagcugagccaccugugcgaguacgacuucgugaagcugagcagcggcgccaaggugcuggccacccugugcggccaggagagcaccgacaccgagagagcccccggcaaggacaccuucuacagccugggcagcagccuggacaucaccuucagaagcgacuacagcaacgagaagcccuucaccggcuucgaggccuucuacgccgccgaggacaucgacgagugccagguggcccccggcgaggcccccaccugcgaccaccacugccacaaccaccugggcggcuucuacugcagcugcagagccggcuacgugcugcacagaaacaagagaaccugcagcgcccugugcagcggccagguguucacccagagaagcggcgagcugagcagccccgaguaccccagacccuaccccaagcugagcagcugcaccuacagcaucagccuggaggagggcuucagcgugauccuggacuucguggagagcuucgacguggagacccaccccgagacccugugccccuacgacuuccugaagauccagaccgacagagaggagcacggccccuucugcggcaagacccugccccacagaaucgagaccaagagcaacaccgugaccaucaccuucgugaccgacgagagcggcgaccacaccggcuggaagauccacuacaccagcaccgcccagcccugccccuaccccauggccccccccaacggccacgugagccccgugcaggccaaguacauccugaaggacagcuucagcaucuucugcgagaccggcuacgagcugcugcagggccaccugccccugaagagcuucaccgccgugugccagaaggacggcagcugggacagacccaugcccgccugcagcaucguggacugcggcccccccgacgaccugcccagcggcagaguggaguacaucaccggccccggcgugaccaccuacaaggccgugauccaguacagcugcgaggagaccuucuacaccaugaaggugaacgacggcaaguacgugugcgaggccgacggcuucuggaccagcagcaagggcgagaagagccugcccgugugcgagcccgugugcggccugagcgccagaaccaccggcggcagaaucuacggcggccagaaggccaagcccggcgacuuccccuggcaggugcugauccugggcggcaccaccgccgccggcgcccugcuguacgacaacugggugcugaccgccgcccacgccguguacgagcagaagcacgacgccagcgcccuggacaucagaaugggcacccugaagagacugagcccccacuacacccaggccuggagcgaggccguguucauccacgagggcuacacccacgacgccggcuucgacaacgacaucgcccugaucaagcugaacaacaagguggugaucaacagcaacaucacccccaucugccugcccagaaaggaggccgagagcuucaugagaaccgacgacaucggcaccgccagcggcuggggccugacccagagaggcuuccuggccagaaaccugauguacguggacauccccaucguggaccaccagaagugcaccgccgccuacgagaagccccccuaccccagaggcagcgugaccgccaacaugcugugcgccggccuggagagcggcggcaaggacagcugcagaggcgacagcggcggcgcccugguguuccuggacagcgagaccgagagaugguucgugggcggcaucgugagcuggggcagcaugaacugcggcgaggccggccaguacggcguguacaccaaggugaucaacuacauccccuggaucgagaacaucaucagcgacuucuga

SEQ ID NO: 8121 - RNA, 2061 nt, Artificial Sequence
  derived and/or modified sequence opt5 from complement_system_component_MASP-2__Homo_sapiens__CCDS123.1
augagacugcucacccugcuuggccugcucugcgggagcguggccacaccccugggaccuaaguggccggagcccgucuucggccggcuugcuuccccuggguuucccggagaauacgccaacgaccaggagcgcagauggacgcugaccgcgccucccggcuaucggcuccgccuguacuucacacacuuugaucuggaacucucucaucugugugaguaugacuucguuaaacuuagcuccggggcuaaggugcuggccacccucugcggacaagaaucuacagauaccgagagagccccuggcaaagacacauuuuacagccugggcuccucucuugauaucaccuuccggagcgacuauuccaaugagaagccguuuacgggguucgaggcuuuuuacgccgcugaagauauugacgaaugucagguggcccccggagaggcgccuaccugcgaucaccauugucacaaccaucugggcggguucuauugcagcugucgcgccggauacguccuccacagaaauaaacggacaugcucugcucuguguuccggccagguguuuacccagcgcagcggggagcugucuucccccgaauacccuagacccuauccgaagcucagcucuugcacauacuccaucagccuggaggaaggauucuccguuauucuugacuuuguggagucuuucgaugucgaaacccacccugagacgcugugucccuaugacuuccucaagauccaaacagaucgggaggaacauggcccuuuuugcggcaaaacccugccccaccgcauugagacaaagagcaacaccgugaccaucacauucguuacggacgaauccggggaccauaccggauggaaaauccacuacacaagcaccgcccagcccugcccuuauccgauggcucccccuaauggccacgugucucccguccaggccaaguacauucuuaaagauuccuuuagcaucuucugugagacaggguaugaacugcuccagggacaucugccucugaagucuuuuaccgcggugugccaaaaggacggcagcugggauagacccaugccggccuguuccauuguggacugcgggccucccgaugaccucccuucuggacgggucgaguacaucacgggccccggcguuacaaccuacaaagcugugauucaguauagcugugaggaaaccuucuacacaaugaaggugaacgaugggaaauaugucugcgaggccgacggauuuuggaccuccagcaagggcgaaaaaucucugccugugugugagcccguuugcgggcuuuccgcucgcacaacgggaggcagaaucuacgggggccagaaggccaaaccgggagauuucccuuggcaagugcugauucucggcgggaccacagccgcuggagcgcugcuuuaugacaauuggguccugaccgccgcucacgccguguacgaacagaagcaugaugccagcgcucucgacauccggaugggcacacugaagagacugucuccccacuauacccaggccugguccgaggcgguuuuuauccaugagggguacacgcacgacgcuggauucgauaacgacauugcccucaucaaacugaauaacaagguggucauuaauagcaacaucacccccauuugucuuccucgcaaagaagccgaguccuuuaugcggacagaugacaucggcaccgcuucuggguggggccugacacagagaggauuccucgcccgcaaucugauguacguggauaucccgauugucgaccaccaaaagugcaccgcugccuaugaaaaacccccuuacccccggggcagcgugacggcgaacaugcugugugccgggcuugaguccggaggcaaggauucuugcagaggggacagcggaggcgcucucguuuuucuggauuccgagacagaacgcugguucgucgggggcaucgugagcuggggaucuaugaauugcggcgaggccgggcaguauggaguguacaccaagguuauuaacuauaucccuuggauugaaaacaucaucuccgacuucuga

SEQ ID NO: 8122 - protein, 248 aa, Artificial Sequence
  complement_system_component_MBL__Homo_sapiens__P11226
MSLFPSLPLLLLSMVAASYSETVTCEDAQKTCPAVIACSSPGINGFPGKDGRDGTKGEKGEPGQGLRGLQGPPGKLGPPGNPGPSGSPGPKGQKGDPGKSPDGDSSLAASERKALQTEMARIKKWLTFSLGKQVGNKFFLTNGEIMTFEKVKALCVKFQASVATPRNAAENGAIQNLIKEEAFLGITDEKTEGQFVDLTGNRLTYTNWNEGEPNNAGSDEDCVLLLKNGQWNDVPCSTSHLAVCEFPI

SEQ ID NO: 8123 - RNA, 747 nt, Artificial Sequence
  complement_system_component_MBL__Homo_sapiens__AAC31937
augucccuguuuccaucacucccucuccuucuccugaguaugguggcagcgucuuacucagaaacugugaccugugaggaugcccaaaagaccugcccugcagugauugccuguagcucuccaggcaucaacggcuucccaggcaaagaugggcgugauggcaccaagggagaaaagggggaaccaggccaagggcucagaggcuuacagggccccccuggaaaguuggggccuccaggaaauccagggccuucugggucaccaggaccaaagggccaaaaaggagacccuggaaaaaguccggauggugauaguagccuggcugccucagaaagaaaagcucugcaaacagaaauggcacguaucaaaaaguggcugaccuucucucugggcaaacaaguugggaacaaguucuuccugaccaauggugaaauaaugaccuuugaaaaagugaaggccuugugugucaaguuccaggccucuguggccacccccaggaaugcugcagagaauggagccauucagaaucucaucaaggaggaagccuuccugggcaucacugaugagaagacagaagggcaguuuguggaucugacaggaaauagacugaccuacacaaacuggaacgagggugaacccaacaaugcugguucugaugaagauuguguauugcuacugaaaaauggccaguggaaugacguccccugcuccaccucccaucuggccgucugugaguucccuaucuga

SEQ ID NO: 8124 - RNA, 747 nt, Artificial Sequence
  derived and/or modified sequence opt1 from complement_system_component_MBL__Homo_sapiens__AAC31937
augagccuguuccccucccucccgcugcugcuccugagcaugguggccgccuccuacagcgagaccgugaccugcgaggacgcgcagaagacgugccccgccgugaucgccugcuccagccccggcaucaacggguuccccggcaaggacgggcgcgacggcaccaagggggagaagggcgagccgggccaggggcugcggggccuccaggggccgcccggcaagcuggggccgcccggcaaccccggccccuccgggagccccggccccaaggggcagaagggcgaccccggcaagucccccgacggggacagcucccuggccgccagcgagcgcaaggcgcuccagaccgagauggcccggaucaagaaguggcugaccuucucccugggcaagcaggucgggaacaaguucuuccucacgaacggcgagaucaugaccuucgagaaggucaaggcccugugcgugaaguuccaggccagcguggcgacgccccgcaacgccgccgagaacggggccauccagaaccugaucaaggaggaggccuuccucggcaucaccgacgagaagaccgagggccaguucgucgaccugaccgggaaccggcugaccuacaccaacuggaacgagggcgagccgaacaacgcgggguccgacgaggacugcgugcuccugcugaagaacggccaguggaacgacgugcccugcagcacgucccaccucgccgucugcgaguuccccaucuga

SEQ ID NO: 8125 - RNA, 747 nt, Artificial Sequence
  derived and/or modified sequence opt2 from complement_system_component_MBL__Homo_sapiens__AAC31937
augucccucuuccccucccucccccuccuccuccucuccauggucgccgccuccuacuccgagaccgucaccugcgaggacgcccagaagaccugccccgccgucaucgccugcuccucccccggcaucaacggcuuccccggcaaggacggccgcgacggcaccaagggcgagaagggcgagcccggccagggccuccgcggccuccagggcccccccggcaagcucggcccccccggcaaccccggccccuccggcucccccggccccaagggccagaagggcgaccccggcaagucccccgacggcgacuccucccucgccgccuccgagcgcaaggcccuccagaccgagauggcccgcaucaagaaguggcucaccuucucccucggcaagcaggucggcaacaaguucuuccucaccaacggcgagaucaugaccuucgagaaggucaaggcccucugcgucaaguuccaggccuccgucgccaccccccgcaacgccgccgagaacggcgccauccagaaccucaucaaggaggaggccuuccucggcaucaccgacgagaagaccgagggccaguucgucgaccucaccggcaaccgccucaccuacaccaacuggaacgagggcgagcccaacaacgccggcuccgacgaggacugcguccuccuccucaagaacggccaguggaacgacguccccugcuccaccucccaccucgccgucugcgaguuccccaucuga

SEQ ID NO: 8126 - RNA, 747 nt, Artificial Sequence
  derived and/or modified sequence opt3 from complement_system_component_MBL__Homo_sapiens__AAC31937
augagccuguuccccucccucccucuucuguuguuaucuaugguggccgcuucauacagugagacugucacaugcgaagacgcacagaagacuuguccagccguuaucgcgugcagcuccccgggcauuaacggguuucccggaaaagaugguagagacggcacgaagggggagaaaggagaaccuggccaaggucugagggggcuacagggaccacccggcaagcucggcccuccagggaaucccggaccuucugguucgccaggcccgaaagggcagaagggagaucccggcaagucaccugacggugauagcagucuggcugccuccgagcggaaagcacuucagaccgaaauggcccgcauaaagaaauggcugacauucucuuuggggaagcaagugggaaacaaauuuuuccucacuaauggcgagaucaugaccuuugagaagguaaaggcucugugugugaaauuccaggcaagcgucgccacaccacgaaacgcugccgaaaauggcgcgauucagaaccugaucaaggaggaagcauuucucgggauuaccgacgagaaaacugagggacaguucguggauuuaacagguaaucgucugaccuauacgaacuggaaugaaggcgagcccaacaaugccggguccgacgaagauugcguucuuuugcugaagaacggacaauggaaugacgugccuuguucaaccagucaccuagcugucugcgaguuuccaaucuga

SEQ ID NO: 8127 - RNA, 747 nt, Artificial Sequence
  derived and/or modified sequence opt4 from complement_system_component_MBL__Homo_sapiens__AAC31937
augagccuguuccccagccugccccugcugcugcugagcaugguggccgccagcuacagcgagaccgugaccugcgaggacgcccagaagaccugccccgccgugaucgccugcagcagccccggcaucaacggcuuccccggcaaggacggcagagacggcaccaagggcgagaagggcgagcccggccagggccugagaggccugcagggcccccccggcaagcugggcccccccggcaaccccggccccagcggcagccccggccccaagggccagaagggcgaccccggcaagagccccgacggcgacagcagccuggccgccagcgagagaaaggcccugcagaccgagauggccagaaucaagaaguggcugaccuucagccugggcaagcaggugggcaacaaguucuuccugaccaacggcgagaucaugaccuucgagaaggugaaggcccugugcgugaaguuccaggccagcguggccacccccagaaacgccgccgagaacggcgccauccagaaccugaucaaggaggaggccuuccugggcaucaccgacgagaagaccgagggccaguucguggaccugaccggcaacagacugaccuacaccaacuggaacgagggcgagcccaacaacgccggcagcgacgaggacugcgugcugcugcugaagaacggccaguggaacgacgugcccugcagcaccagccaccuggccgugugcgaguuccccaucuga

SEQ ID NO: 8128 - RNA, 747 nt, Artificial Sequence
  derived and/or modified sequence opt5 from complement_system_component_MBL__Homo_sapiens__AAC31937
augagccuguuccccucccucccucugcuucugcucucuaugguggccgcuagcuacuccgagaccgucacaugcgaagacgcccagaagacguguccggcgguuaucgcuugcucuagccccggcauuaacggguuuccuggaaaagauggcagagacgggaccaagggagagaaaggcgaacccgggcaaggacugcggggccuucagggcccucccgggaagcugggaccuccgggcaaucccgggccuuccggaucucccggcccuaaagggcagaagggagaucccggcaagagcccggacggcgauuccagccucgccgccucugagcgcaaagcucugcagacagaaauggccagaaucaagaaauggcugaccuucucccucgggaagcaagugggaaacaaauuuuuccugacaaauggcgagauuaugaccuuugagaaggugaaggcucuuugugucaaauuccaggccagcguggcgacaccucggaacgccgcugaaaauggggccauccagaaccugauuaaggaggaagccuuucucggaaucaccgacgagaaaacggagggccaguucguugaucugaccgggaaucgccuuacauauaccaacuggaaugaaggagagcccaacaaugcuggcucugacgaagauugcgugcugcuccugaagaacggccaauggaaugacgucccuuguuccacaagccaccuggcggugugcgaguuucccaucuga

SEQ ID NO: 8129 - protein, 392 aa, Artificial Sequence [sequence omitted]

SEQ ID NO: 8130 - RNA, 1179 nt, Artificial Sequence
  complement_system_component_MCP__Homo_sapiens__AAW82433
auggagccucccggccgccgcgagugucccuuuccuuccuggcgcuuuccuggguugcuucuggcggccaugguguugcugcuguacuccuucuccgaugccugugaggagccaccaacauuugaagcuauggagcucauugguaaaccaaaacccuacuaugagauuggugaacgaguagauuauaaguguaaaaaaggauacuucuauauaccuccucuugccacccauacuauuugugaucggaaucauacauggcuaccugucucagaugacgccuguuauagagaaacauguccauauauacgggauccuuuaaauggccaagcagucccugcaaaugggacuuacgaguuugguuaucagaugcacuuuauuuguaaugaggguuauuacuuaauuggugaagaaauucuauauugugaacuuaaaggaucaguagcaauuuggagcgguaagcccccaauaugugaaaagguuuuguguacaccaccuccaaaaauaaaaaauggaaaacacaccuuuagugaaguagaaguauuugaguaucuugaugcaguaacuuauaguugugauccugcaccuggaccagauccauuuucacuuauuggagagagcacgauuuauuguggugacaauucaguguggagucgugcugcuccagaguguaaaguggucaaaugucgauuuccaguagucgaaaauggaaaacagauaucaggauuuggaaaaaaauuuuacuacaaagcaacaguuauguuugaaugcgauaaggguuuuuaccucgauggcagcgacacaauugucugugacaguaacaguacuugggaucccccaguuccaaagugucuuaaagugcugccuccaucuaguacaaaaccuccagcuuugagucauucagugucgacuucuuccacuacaaaaucuccagcguccagugccucagguccuaggccuacuuacaagccuccagucucaaauuauccaggauauccuaaaccugaggaaggaauacuugacaguuuggauguuugggucauugcugugauuguuauugccauaguuguuggaguugcaguaauuuguguugucccguacagauaucuucaaaggaggaagaagaaaggcacauaccuaacugaugagacccacagagaaguaaaauuuacuucucucuga

SEQ ID NO: 8131 - RNA, 1179 nt, Artificial Sequence
  derived and/or modified sequence opt1 from complement_system_component_MCP__Homo_sapiens__AAW82433
auggagcccccgggccgccgggagugccccuuccccagcuggcgcuuccccgggcugcuccuggccgccauggugcugcuccuguacuccuucagcgacgcgugcgaggagccgcccaccuucgaggccauggagcugaucggcaagcccaagcccuacuacgagaucggggagcgggucgacuacaagugcaagaagggcuacuucuacaucccgccccucgccacccacacgaucugcgaccgcaaccacaccuggcugcccguguccgacgacgccugcuaccgggagaccugccccuacauccgcgacccgcugaacgggcaggccgugcccgcgaacggcaccuacgaguucggcuaccagaugcacuucaucugcaacgagggguacuaccucaucggcgaggagauccuguacugcgagcugaaggggagcgucgccaucugguccggcaagccgcccaucugcgagaaggugcucugcacgcccccgcccaagaucaagaacgggaagcacaccuucagcgagguggaggucuucgaguaccuggacgccgugaccuacuccugcgaccccgcccccggccccgaccccuucagccugaucggcgaguccaccaucuacugcggggacaacagcguguggucccgggcggcccccgagugcaaggucgugaagugccgcuucccgguggucgagaacggcaagcagaucagcggguucggcaagaaguucuacuacaaggccacggugauguucgagugcgacaagggcuucuaccucgacggguccgacaccaucgugugcgacagcaacuccaccugggacccgcccguccccaagugccugaaggugcugccgcccagcuccaccaagccgcccgcccucagccacuccgugagcacgagcuccaccaccaagagccccgccuccagcgcguccggcccccggcccaccuacaagccgcccgucagcaacuaccccggguaccccaagcccgaggagggcauccuggacucccuggacgugugggugaucgccgucaucgugaucgccaucguggucgggguggccgucaucugcguggugcccuaccgcuaccuccagcggcgcaagaagaagggcacguaccugaccgacgagacccaccgggaggucaaguucaccagccuguga

SEQ ID NO: 8132 - RNA, 1179 nt, Artificial Sequence
  derived and/or modified sequence opt2 from complement_system_component_MCP__Homo_sapiens__AAW82433
auggagccccccggccgccgcgagugccccuuccccuccuggcgcuuccccggccuccuccucgccgccaugguccuccuccucuacuccuucuccgacgccugcgaggagccccccaccuucgaggccauggagcucaucggcaagcccaagcccuacuacgagaucggcgagcgcgucgacuacaagugcaagaagggcuacuucuacauccccccccucgccacccacaccaucugcgaccgcaaccacaccuggcuccccgucuccgacgacgccugcuaccgcgagaccugccccuacauccgcgacccccucaacggccaggccguccccgccaacggcaccuacgaguucggcuaccagaugcacuucaucugcaacgagggcuacuaccucaucggcgaggagauccucuacugcgagcucaagggcuccgucgccaucugguccggcaagccccccaucugcgagaagguccucugcacccccccccccaagaucaagaacggcaagcacaccuucuccgaggucgaggucuucgaguaccucgacgccgucaccuacuccugcgaccccgcccccggccccgaccccuucucccucaucggcgaguccaccaucuacugcggcgacaacuccgucuggucccgcgccgcccccgagugcaaggucgucaagugccgcuuccccgucgucgagaacggcaagcagaucuccggcuucggcaagaaguucuacuacaaggccaccgucauguucgagugcgacaagggcuucuaccucgacggcuccgacaccaucgucugcgacuccaacuccaccugggacccccccguccccaagugccucaagguccucccccccuccuccaccaagccccccgcccucucccacuccgucuccaccuccuccaccaccaagucccccgccuccuccgccuccggcccccgccccaccuacaagccccccgucuccaacuaccccggcuaccccaagcccgaggagggcauccucgacucccucgacgucugggucaucgccgucaucgucaucgccaucgucgucggcgucgccgucaucugcgucguccccuaccgcuaccuccagcgccgcaagaagaagggcaccuaccucaccgacgagacccaccgcgaggucaaguucaccucccucuga

SEQ ID NO: 8133 - RNA, 1179 nt, Artificial Sequence
  derived and/or modified sequence opt3 from complement_system_component_MCP__Homo_sapiens__AAW82433
auggagcccccuggcagaagggaaugcccauucccgagcuggcgguuucccgggcugcuccuugccgcuauggugcuguuguuauacuccuucucugacgcaugugaggaaccuccaaccuuugaggccauggaacugaucggaaagcccaaaccuuauuacgagauuggugagcgcgucgauuauaagugcaaaaagggcuacuucuauauaccaccccuagcgacacacacuaucugugaccgaaaccauacguggcucccuguuucagaugacgcuugcuaccgugaaaccuguccauauauuagagauccgcugaaugggcaggccgugcccgcaaacggaacauacgaguuuggcuaccaaaugcacuucaucugcaaugaagguuauuaccuuauuggggaggagauccuguauugugaauugaaaggaaguguagccauauggagcggcaagccuccaaucugcgagaaggugcucuguacucccccuccaaaaauuaagaacggcaaacauaccuuuuccgaagucgagguguucgaauaccuggacgcuguuacauauucuugcgaucccgcaccggggccugaccccuuuucgcugaucggagagucaaccauuuacuguggugauaauagcguguggaguagggccgcuccagagugcaaggucgugaaaugccgguucccuguaguugaaaacggcaagcagaucuccggguuuggaaagaaauucuauuacaaggccacugugauguuugagugugacaaaggcuucuaccucgaugguucugacacaauagucugcgauagcaauuccaccugggaucccccagugcccaaguguuuaaaagugcugccuccaucaaguacgaagccgcccgcgcuuagccacucugucuccacuucaagcaccacaaaaaguccugcaucuuccgccagcgggccacgccccacuuauaagccuccaguuucgaacuaccccggauauccgaagccugaagagggcauuuuggacucucuggacguguggguaaucgcugugauugucaucgccaucgugguuggcguggcagucauuugcgugguaccauacagauaucuacagaggcggaaaaagaaagggaccuaccucacagacgaaacccaucgcgagguuaaguucacgucccuguga

SEQ ID NO: 8134 - RNA, 1179 nt, Artificial Sequence
  derived and/or modified sequence opt4 from complement_system_component_MCP__Homo_sapiens__AAW82433
auggagccccccggcagaagagagugccccuuccccagcuggagauuccccggccugcugcuggccgccauggugcugcugcuguacagcuucagcgacgccugcgaggagccccccaccuucgaggccauggagcugaucggcaagcccaagcccuacuacgagaucggcgagagaguggacuacaagugcaagaagggcuacuucuacauccccccccuggccacccacaccaucugcgacagaaaccacaccuggcugcccgugagcgacgacgccugcuacagagagaccugccccuacaucagagacccccugaacggccaggccgugcccgccaacggcaccuacgaguucggcuaccagaugcacuucaucugcaacgagggcuacuaccugaucggcgaggagauccuguacugcgagcugaagggcagcguggccaucuggagcggcaagccccccaucugcgagaaggugcugugcacccccccccccaagaucaagaacggcaagcacaccuucagcgagguggagguguucgaguaccuggacgccgugaccuacagcugcgaccccgcccccggccccgaccccuucagccugaucggcgagagcaccaucuacugcggcgacaacagcguguggagcagagccgcccccgagugcaagguggugaagugcagauuccccgugguggagaacggcaagcagaucagcggcuucggcaagaaguucuacuacaaggccaccgugauguucgagugcgacaagggcuucuaccuggacggcagcgacaccaucgugugcgacagcaacagcaccugggacccccccgugcccaagugccugaaggugcugccccccagcagcaccaagccccccgcccugagccacagcgugagcaccagcagcaccaccaagagccccgccagcagcgccagcggccccagacccaccuacaagccccccgugagcaacuaccccggcuaccccaagcccgaggagggcauccuggacagccuggacgugugggugaucgccgugaucgugaucgccaucguggugggcguggccgugaucugcguggugcccuacagauaccugcagagaagaaagaagaagggcaccuaccugaccgacgagacccacagagaggugaaguucaccagccuguga

SEQ ID NO: 8135 - RNA, 1179 nt, Artificial Sequence
  derived and/or modified sequence opt5 from complement_system_component_MCP__Homo_sapiens__AAW82433
auggagcccccuggcagacgggaaugcccguuccccagcuggcgcuuuccugggcugcuccuggccgcuauggugcuucugcucuacuccuucucugacgccugugaggaacccccuaccuuugaggcgauggaacugaucggaaagcccaaaccuuauuacgagauuggcgagagagucgauuauaagugcaaaaagggguacuucuauaucccgccccuugcuacacacacgauuugugaccggaaccauaccuggcugccuguuagcgaugacgccugcuaccgcgaaacaugucccuauaucagagauccucucaauggacaggccgugcccgcuaacggcaccuacgaguuuggguaccaaaugcacuucauuugcaaugaaggauauuaccugaucggcgaggagauccuguauugugaacucaaaggcuccguggccauuuggucugggaagccgccuaucugcgagaagguccuguguacacccccucccaaaauuaagaacggaaaacauaccuuuagcgaaguggagguuuucgaauaccuugacgcugugacauauuccugcgaucccgccccuggcccggaccccuuuucucugaucggggagagcaccauuuacuguggagauaauuccgucuggagccgggcggccccugagugcaaggugguuaaaugccgcuuccccguggucgaaaacggcaagcagaucucuggguuuggaaagaaauucuauuacaaggcuacggugauguuugagugugacaaaggcuucuaccucgauggcuccgacaccauugugugcgauagcaauucuacaugggacccucccgucccgaagugucugaaaguucuuccucccuccagcaccaagccucccgcccugucucacuccgugagcacauccucuaccacgaaaagcccugcuuccagcgccucugggcccagaccgacauauaagccucccguguccaacuaccccggauauccuaagccggaagagggcauccucgacagccuggaugucugggugaucgcgguuauugugaucgccauugucguggggguugcugugaucugcgucgugcccuaccgguaucugcagcgccggaaaaagaaaggaaccuaccucacagacgaaacccauagagaggucaaguucaccucucuguga

SEQ ID NO: 8136 - protein, 348 aa, Artificial Sequence
  complement_system_component_MCP__Homo_sapiens__P40121
MYTAIPQSGSPFPGSVQDPGLHVWRVEKLKPVPVAQENQGVFFSGDSYLVLHNGPEEVSHLHLWIGQQSSRDEQGACAVLAVHLNTLLGERPVQHREVQGNESDLFMSYFPRGLKYQEGGVESAFHKTSTGAPAAIKKLYQVKGKKNIRATERALNWDSFNTGDCFILDLGQNIFAWCGGKSNILERNKARDLALAIRDSERQGKAQVEIVTDGEEPAEMIQVLGPKPALKEGNPEEDLTADKANAQAAALYKVSDATGQMNLTKVADSSPFALELLISDDCFVLDNGLCGKIYIWKGRKANEKERQAALQVAEGFISRMQYAPNTQVEILPQGHESPIFKQFFKDWK

SEQ ID NO: 8137 - RNA, 1047 nt, Artificial Sequence
  complement_system_component_MCP__Homo_sapiens__AAY24128
auguacacagccauuccccagaguggcucuccauucccaggcucagugcaggauccaggccugcauguguggcggguggagaagcugaagccggugccuguggcgcaagagaaccagggcgucuucuucucgggggacuccuaccuagugcugcacaauggcccagaagagguuucccaucugcaccuguggauaggccagcagucaucccgggaugagcagggggccugugccgugcuggcugugcaccucaacacgcugcugggagagcggccugugcagcaccgcgaggugcagggcaaugagucugaccucuucaugagcuacuucccacggggccucaaguaccaggaaggugguguggagucagcauuucacaagaccuccacaggagccccagcugccaucaagaaacucuaccaggugaaggggaagaagaacauccgugccaccgagcgggcacugaacugggacagcuucaacacuggggacugcuucauccuggaccugggccagaacaucuucgccuggugugguggaaaguccaacauccuggaacgcaacaaggcgagggaccuggcccuggccauccgggacagugagcgacagggcaaggcccagguggagauugucacugauggggaggagccugcugagaugauccagguccugggccccaagccugcucugaaggagggcaacccugaggaagaccucacagcugacaaggcaaaugcccaggccgcagcucuguauaaggucucugaugccacuggacagaugaaccugaccaagguggcugacuccagcccauuugcccuugaacugcugauaucugaugacugcuuugugcuggacaacgggcucuguggcaagaucuauaucuggaaggggcgaaaagcgaaugagaaggagcggcaggcagcccugcagguggccgagggcuucaucucgcgcaugcaguacgccccgaacacucagguggagauucugccucagggccaugagagucccaucuucaagcaauuuuucaaggacuggaaauga

SEQ ID NO: 8138 - RNA, 1047 nt, Artificial Sequence
  derived and/or modified sequence opt1 from complement_system_component_MCP__Homo_sapiens__AAY24128
auguacacggccaucccccagagcggcuccccguuccccgggagcgugcaggaccccggccugcacgucuggcgcguggagaagcugaagcccgugccggucgcccaggagaaccaggggguguucuucuccggcgacagcuaccuggugcugcacaacgggcccgaggaggucucccaccuccaccuguggaucggccagcagagcucccgggacgagcagggcgcgugcgccgugcuggccgugcaccucaacacccugcugggggagcgccccguccagcaccgggaggugcagggcaacgagagcgaccucuucauguccuacuucccccgcgggcugaaguaccaggagggcgggguggagagcgccuuccacaagacguccaccggcgccccggcggccaucaagaagcuguaccaggucaagggcaagaagaacauccgggccaccgagcgcgcccucaacugggacagcuucaacaccggggacugcuucauccuggaccugggccagaacaucuucgcguggugcgggggcaaguccaacauccucgagcggaacaaggcccgcgaccuggcccuggccauccgggacagcgagcgccagggcaaggcccagguggagaucgugacggacggggaggagcccgcggagaugauccagguccucggccccaagcccgcccugaaggaggggaacccggaggaggaccugaccgccgacaaggccaacgcccaggcggccgcccucuacaagguguccgacgccaccggccagaugaaccugaccaagguggccgacagcucccccuucgcgcuggagcuccugaucagcgacgacugcuucguccuggacaacgggcucugcggcaagaucuacaucuggaagggccggaaggccaacgagaaggagcgccaggccgcccuccagguggccgagggguucaucucccggaugcaguacgcgcccaacacccagguggagauccugccccagggccacgagagcccgaucuucaagcaguucuucaaggacuggaaguga

SEQ ID NO: 8139 - RNA, 1047 nt, Artificial Sequence
  derived and/or modified sequence opt2 from complement_system_component_MCP__Homo_sapiens__AAY24128
auguacaccgccaucccccaguccggcucccccuuccccggcuccguccaggaccccggccuccacgucuggcgcgucgagaagcucaagcccguccccgucgcccaggagaaccagggcgucuucuucuccggcgacuccuaccucguccuccacaacggccccgaggaggucucccaccuccaccucuggaucggccagcaguccucccgcgacgagcagggcgccugcgccguccucgccguccaccucaacacccuccucggcgagcgccccguccagcaccgcgagguccagggcaacgaguccgaccucuucauguccuacuucccccgcggccucaaguaccaggagggcggcgucgaguccgccuuccacaagaccuccaccggcgcccccgccgccaucaagaagcucuaccaggucaagggcaagaagaacauccgcgccaccgagcgcgcccucaacugggacuccuucaacaccggcgacugcuucauccucgaccucggccagaacaucuucgccuggugcggcggcaaguccaacauccucgagcgcaacaaggcccgcgaccucgcccucgccauccgcgacuccgagcgccagggcaaggcccaggucgagaucgucaccgacggcgaggagcccgccgagaugauccagguccucggccccaagcccgcccucaaggagggcaaccccgaggaggaccucaccgccgacaaggccaacgcccaggccgccgcccucuacaaggucuccgacgccaccggccagaugaaccucaccaaggucgccgacuccucccccuucgcccucgagcuccucaucuccgacgacugcuucguccucgacaacggccucugcggcaagaucuacaucuggaagggccgcaaggccaacgagaaggagcgccaggccgcccuccaggucgccgagggcuucaucucccgcaugcaguacgcccccaacacccaggucgagauccucccccagggccacgagucccccaucuucaagcaguucuucaaggacuggaaguga

SEQ ID NO: 8140 - RNA, 1047 nt, Artificial Sequence
  derived and/or modified sequence opt3 from complement_system_component_MCP__Homo_sapiens__AAY24128
auguacaccgccaucccccagagcggcuccccuuucccagggucugugcaagacccgggacugcacgucuggagaguugagaagcucaaacccgugccuguagcucaggaaaaccaggguguguuuuucucaggcgauaguuaucuuguccugcauaaugggccagaggaagugagccacuugcauuuauggauuggacagcaauccucuagggacgagcagggcgcaugcgccguucuggcggugcaccuaaacacacuccugggugaacggcccguccagcaucgcgaggugcaggggaaugagucggaucuuuuuaugucauacuucccucgaggacugaaguaucaagaaggcggcguagagagcgcuuuucacaaaacgaguacuggggccccagcagccauaaagaaauuguaccagguuaagggaaagaaaaacauccgugcuaccgaaagagcacucaauugggacuccuucaacacaggugauuguuuuauucuggaccugggccagaauaucuucgccuggugcgggggaaagucuaacauucucgagaggaauaaagcucgggauuuagcccuggcgauccgcgacagcgagagacagggcaaggcacaaguggaaauagucacugauggugaggaacccgccgagaugauccaggugcuugggccuaaaccagcuuugaaggaaggaaacccggaggaggaccugaccgccgauaaggcaaaugcucaggccgcggcccuauauaaaguguccgacgcaacaggccaaaugaaccucaccaaggucgcugauucaagucccuuugcccuggaacuucugauuagcgacgacuguuucguuuuggauaauggccucugcgggaaaaucuacauuuggaagggaaggaaagcuaacgagaaggaacggcaggccgcauuacagguggccgaggguuuuaucucucgcaugcaguaugcuccuaauacucaaguagaaauacugccacagggccacgagucccccauuuucaaacaguuuuucaaggacuggaaguga

SEQ ID NO: 8141 - RNA, 1047 nt, Artificial Sequence
  derived and/or modified sequence opt4 from complement_system_component_MCP__Homo_sapiens__AAY24128
auguacaccgccaucccccagagcggcagccccuuccccggcagcgugcaggaccccggccugcacguguggagaguggagaagcugaagcccgugcccguggcccaggagaaccagggcguguucuucagcggcgacagcuaccuggugcugcacaacggccccgaggaggugagccaccugcaccuguggaucggccagcagagcagcagagacgagcagggcgccugcgccgugcuggccgugcaccugaacacccugcugggcgagagacccgugcagcacagagaggugcagggcaacgagagcgaccuguucaugagcuacuuccccagaggccugaaguaccaggagggcggcguggagagcgccuuccacaagaccagcaccggcgcccccgccgccaucaagaagcuguaccaggugaagggcaagaagaacaucagagccaccgagagagcccugaacugggacagcuucaacaccggcgacugcuucauccuggaccugggccagaacaucuucgccuggugcggcggcaagagcaacauccuggagagaaacaaggccagagaccuggcccuggccaucagagacagcgagagacagggcaaggcccagguggagaucgugaccgacggcgaggagcccgccgagaugauccaggugcugggccccaagcccgcccugaaggagggcaaccccgaggaggaccugaccgccgacaaggccaacgcccaggccgccgcccuguacaaggugagcgacgccaccggccagaugaaccugaccaagguggccgacagcagccccuucgcccuggagcugcugaucagcgacgacugcuucgugcuggacaacggccugugcggcaagaucuacaucuggaagggcagaaaggccaacgagaaggagagacaggccgcccugcagguggccgagggcuucaucagcagaaugcaguacgcccccaacacccagguggagauccugccccagggccacgagagccccaucuucaagcaguucuucaaggacuggaaguga

SEQ ID NO: 8142 - RNA, 1047 nt, Artificial Sequence
  derived and/or modified sequence opt5 from complement_system_component_MCP__Homo_sapiens__AAY24128
auguacaccgccaucccccagagcggcuccccuuucccggggucugugcaagaccccggacugcacgucuggagaguugagaagcucaaaccugugcccguggcucaggaaaaccagggcgucuuuuucagcggggauuccuaucuggugcuucauaauggaccugaggaaguuucucaucugcaccucuggauuggccagcaaagcucccgggacgagcagggggccugcgcggugcuggcuguccaccuuaacacacugcucggagaacgccccgugcagcauagagagguucagggcaaugagucugaucuguuuaugagcuacuucccucggggccugaaguaucaagaagggggaguggaguccgccuuucacaaaacgagcaccggcgccccggcugccaucaagaaacucuaccaggucaaggggaagaaaaacauucgcgcuacagaaagagcccugaauugggacucuuucaacaccggagauuguuuuauccuugaccugggccagaauauuuucgcguggugcgggggaaaguccaacauccucgagcggaauaaagcccgcgaucuggcucuugccaucagagacagcgagcggcagggcaaggcucaaguggaaauugugacagauggcgaggaacccgccgagaugauccagguccuggggccuaaacccgcgcucaaggaaggaaacccugaggaggaccugaccgccgauaaggcuaaugcccaggcugccgcccuguauaaaguuucugacgcuacaggccaaaugaaccucaccaagguggcggauuccagccccuuugcccuggaacuucugauuucugacgacuguuucgugcucgauaaugggcugugcggaaaaaucuacauuuggaagggccgcaaagcuaacgagaaggaaagacaggccgcccuucaggucgcugagggguuuaucucccggaugcaguaugccccgaauacgcaaguggaaauucugccucagggacacgagagccccaucuucaaacaguuuuucaaggacuggaaguga

SEQ ID NO: 8143 - protein, 371 aa, Artificial Sequence
  CREB3__Homo_sapiens__CCDS6588.1
MELELDAGDQDLLAFLLEESGDLGTAPDEAVRAPLDWALPLSEVPSDWEVDDLLCSLLSPPASLNILSSSNPCLVHHDHTYSLPRETVSMDLESESCRKEGTQMTPQHMEELAEQEIARLVLTDEEKSLLEKEGLILPETLPLTKTEEQILKRVRRKIRNKRSAQESRRKKKVYVGGLESRVLKYTAQNMELQNKVQLLEEQNLSLLDQLRKLQAMVIEISNKTSSSSTCILVLLVSFCLLLVPAMYSSDTRGSLPAEHGVLSRQLRALPSEDPYQLELPALQSEVPKDSTHQWLDGSDCVLQAPGNTSCLLHYMPQAPSAEPPLEWPFPDLFSEPLCRGPILPLQANLTRKGGWLPTGSPSVILQDRYSG

SEQ ID NO: 8144 - RNA, 1116 nt, Artificial Sequence
  CREB3__Homo_sapiens__CCDS6588.1
auggagcuggaauuggaugcuggugaccaagaccugcuggccuuccugcuagaggaaaguggagauuuggggacggcacccgaugaggccgugagggccccacuggacugggcgcugccgcuuucugagguaccgagcgacugggaaguagaugauuugcugugcucccugcugagucccccagcgucguugaacauucucagcuccuccaaccccugccuuguccaccaugaccacaccuacucccucccacgggaaacugucucuauggaucuagagagugagagcuguagaaaagaggggacccagaugacuccacagcauauggaggagcuggcagagcaggagauugcuaggcuaguacugacagaugaggagaagagucuauuggagaaggaggggcuuauucugccugagacacuuccucucacuaagacagaggaacaaauucugaaacgugugcggaggaagauucgaaauaaaagaucugcucaagagagccgcaggaaaaagaagguguauguuggggguuuagagagcagggucuugaaauacacagcccagaauauggagcuucagaacaaaguacagcuucuggaggaacagaauuugucccuucuagaucaacugaggaaacuccaggccauggugauugagauaucaaacaaaaccagcagcagcagcaccugcaucuugguccuacuagucuccuucugccuccuccuuguaccugcuauguacuccucugacacaagggggagccugccagcugagcauggaguguugucccgccagcuucgugcccuccccagugaggacccuuaccagcuggagcugccugcccugcagucagaagugccgaaagacagcacacaccagugguuggacggcucagacuguguacuccaggccccuggcaacacuuccugccugcugcauuacaugccucaggcucccagugcagagccuccccuggaguggccauucccugaccucuucucagagccucucugccgaggucccauccucccccugcaggcaaaucucacaaggaagggaggauggcuuccuacugguagccccucugucauuuugcaggacagauacucaggcuag

SEQ ID NO: 8145 - RNA, 1116 nt, Artificial Sequence
  derived and/or modified sequence opt1 from CREB3__Homo_sapiens__CCDS6588.1
auggagcuggagcucgacgccggcgaccaggaccugcuggccuuccuccuggaggagagcggggaccugggcaccgcgcccgacgaggccgugcgcgccccgcucgacugggcccugccccuguccgagguccccagcgacugggagguggacgaccuccugugcucccugcucagcccgcccgccucccugaacauccugagcuccagcaaccccugccucgugcaccacgaccacaccuacucccugccccgggagacggucagcauggaccuggaguccgagagcugccgcaaggaggggacccagaugacgccccagcacauggaggagcucgcggagcaggagaucgcccggcuggugcugaccgacgaggagaagucccuccuggagaaggagggccugauccucccggagacccugccccugaccaagaccgaggagcagauccucaagcgcgugcggcgcaagauccggaacaagcgcagcgcccaggagucccggcgcaagaagaaggucuacgucgggggccuggagagccgggugcugaaguacaccgcccagaacauggagcuccagaacaaggugcagcugcuggaggagcagaaccucucccugcuggaccagcuccgcaagcugcaggcgauggugaucgagaucagcaacaagacguccagcagcuccacgugcauccuggugcuccuggucagcuucugccugcuccuggugcccgccauguacuccagcgacacccggggcucccugcccgccgagcacggggugcucagccgccagcugcgggcccugccguccgaggaccccuaccagcucgagcugcccgcccugcagagcgagguccccaaggacuccacccaccaguggcuggacggcagcgacugcgugcuccaggcgccggggaacaccuccugccugcugcacuacaugccccaggcccccagcgccgagcccccgcucgaguggcccuuccccgaccuguucuccgagccccugugccgcggcccgauccucccccugcaggccaaccugacccggaagggcggguggcuccccaccggcagccccuccgugauccugcaggaccgcuacagcggguga

SEQ ID NO: 8146 - RNA, 1116 nt, Artificial Sequence
  derived and/or modified sequence opt2 from CREB3__Homo_sapiens__CCDS6588.1
auggagcucgagcucgacgccggcgaccaggaccuccucgccuuccuccucgaggaguccggcgaccucggcaccgcccccgacgaggccguccgcgccccccucgacugggcccucccccucuccgagguccccuccgacugggaggucgacgaccuccucugcucccuccucuccccccccgccucccucaacauccucuccuccuccaaccccugccucguccaccacgaccacaccuacucccucccccgcgagaccgucuccauggaccucgaguccgaguccugccgcaaggagggcacccagaugaccccccagcacauggaggagcucgccgagcaggagaucgcccgccucguccucaccgacgaggagaagucccuccucgagaaggagggccucauccuccccgagacccucccccucaccaagaccgaggagcagauccucaagcgcguccgccgcaagauccgcaacaagcgcuccgcccaggagucccgccgcaagaagaaggucuacgucggcggccucgagucccgcguccucaaguacaccgcccagaacauggagcuccagaacaagguccagcuccucgaggagcagaaccucucccuccucgaccagcuccgcaagcuccaggccauggucaucgagaucuccaacaagaccuccuccuccuccaccugcauccucguccuccucgucuccuucugccuccuccucguccccgccauguacuccuccgacacccgcggcucccuccccgccgagcacggcguccucucccgccagcuccgcgcccuccccuccgaggaccccuaccagcucgagcuccccgcccuccaguccgagguccccaaggacuccacccaccaguggcucgacggcuccgacugcguccuccaggcccccggcaacaccuccugccuccuccacuacaugccccaggcccccuccgccgagcccccccucgaguggcccuuccccgaccucuucuccgagccccucugccgcggccccauccucccccuccaggccaaccucacccgcaagggcggcuggcuccccaccggcucccccuccgucauccuccaggaccgcuacuccggcuga

SEQ ID NO: 8147 - RNA, 1116 nt, Artificial Sequence
  derived and/or modified sequence opt3 from CREB3__Homo_sapiens__CCDS6588.1
auggagcuggaacucgacgccggcgaucaggaccuucuggcuuucuuguuagaggaaagcggggaucugggaaccgcacccgacgaggccgugagagcgccucuagauugggcucucccacuguccgaagucccgucugacugggagguugaugaccuucugugcucauugcucagucccccugccagccugaacauccuguccucuucgaauccaugucucgugcaccaugaucacacauacucauuacccagggagacuguaagcauggaccuggaaagugaguccugccggaaggaagguacgcaaaugaccccucagcauauggaggagcuugcagaacaggagauugcccgcuuggugcugacagaugaagagaaaucucuacucgaaaaggagggccugauacuuccagagacucugcccuugaccaaaacagaggaacagauccucaagcgaguccguagaaaaauuaggaacaagcggagcgcucaagaaucccgcagaaagaaaaagguguauguugggggacuggagucaaggguguuaaaauacaccgcacagaauauggaacugcagaacaagguccagcuccuugaggagcaaaaucugaguuugcuagaccagcugcggaaacuccaggccauggugaucgaaauuagcaacaagacuucuuccucaagcacauguauccugguacuucugguuaguuuuugcuugcuccuggugccugcuauguauucuuccgauacccgcggcagcuuaccagccgagcacgguguccugucgcgacagcuaagagcgcucccgucugaagaccccuaccaacuggagcuuccugcauugcaguccgaagugccaaaggacucaacgcaucaguggcuggaugggagugacugugugcuccaagcccccggaaauacuagcugccugcuucacuauaugccucaggcuccauccgccgagcccccgcuggaguggccuuuccccgauuuguuuucugaaccacucuguaggggcccuauacugcccuuacaggcaaaccugacccggaaaggcggguggcuaccaacaggaagccccucagucauccuccaggaccguuacagugguuga

SEQ ID NO: 8148 - RNA, 1116 nt, Artificial Sequence
  derived and/or modified sequence opt4 from CREB3__Homo_sapiens__CCDS6588.1
auggagcuggagcuggacgccggcgaccaggaccugcuggccuuccugcuggaggagagcggcgaccugggcaccgcccccgacgaggccgugagagccccccuggacugggcccugccccugagcgaggugcccagcgacugggagguggacgaccugcugugcagccugcugagcccccccgccagccugaacauccugagcagcagcaaccccugccuggugcaccacgaccacaccuacagccugcccagagagaccgugagcauggaccuggagagcgagagcugcagaaaggagggcacccagaugaccccccagcacauggaggagcuggccgagcaggagaucgccagacuggugcugaccgacgaggagaagagccugcuggagaaggagggccugauccugcccgagacccugccccugaccaagaccgaggagcagauccugaagagagugagaagaaagaucagaaacaagagaagcgcccaggagagcagaagaaagaagaagguguacgugggcggccuggagagcagagugcugaaguacaccgcccagaacauggagcugcagaacaaggugcagcugcuggaggagcagaaccugagccugcuggaccagcugagaaagcugcaggccauggugaucgagaucagcaacaagaccagcagcagcagcaccugcauccuggugcugcuggugagcuucugccugcugcuggugcccgccauguacagcagcgacaccagaggcagccugcccgccgagcacggcgugcugagcagacagcugagagcccugcccagcgaggaccccuaccagcuggagcugcccgcccugcagagcgaggugcccaaggacagcacccaccaguggcuggacggcagcgacugcgugcugcaggcccccggcaacaccagcugccugcugcacuacaugccccaggcccccagcgccgagcccccccuggaguggcccuuccccgaccuguucagcgagccccugugcagaggccccauccugccccugcaggccaaccugaccagaaagggcggcuggcugcccaccggcagccccagcgugauccugcaggacagauacagcggcuga

SEQ ID NO: 8149 - RNA, 1116 nt, Artificial Sequence
  derived and/or modified sequence opt5 from CREB3__Homo_sapiens__CCDS6588.1
auggagcuggaacucgacgccggcgaucaggaccugcuugcuuuccugcucgaggaaagcggggaucugggaaccgcccccgacgaggcggugagagcuccucuugauugggcccugccgcucuccgaaguccccucugacugggagguugaugaccugcugugcagccuccuguccccucccgccucucuuaacauccugagcuccucuaauccuugucucgugcaccaugaucacacauacagccugccccgggagacgguguccauggaccuugaaagcgagucuugccgcaaggaaggcacccaaaugacaccucagcauauggaggagcuggcugaacaggagauugccagacucguccugaccgaugaagagaaaucccugcucgaaaaggaggggcugauccuuccggagacacugccccucaccaaaacagaggaacagauucugaagcgggugcgcagaaaaauccggaacaagcgcagcgcucaagaaucuagacggaagaaaaagguuuaugugggaggccuugagucccgcguccugaaauacaccgcccagaauauggaacuccagaacaaggugcagcugcuggaggagcaaaaucucagccugcuugaccagcugagaaaacuccaggcgaugguuauugaaaucucuaacaagacguccagcuccucuaccuguauccuggugcuucuggucagcuuuugccuccugcuggugccugccauguauuccagcgauacacgggggucucuccccgcugagcacggagugcugucccgccagcuuagagcccugccuagcgaagaccccuaccaacucgagcugccggcucugcagucugaagucccuaaggacagcacccaucaguggcuugauggcuccgacuguguucuccaagcccccggcaauacaucuugccugcugcacuauaugccucaggcgcccagcgccgagcccccucucgaguggccguuccccgaucuguuuuccgaaccucuuugucgggggcccauucugccucuccaggcuaaccugacccgcaaaggaggcuggcugcccacggggagcccgucugugauccuucaggacagauacuccggauga

SEQ ID NO: 8150 - protein, 519 aa, Artificial Sequence
  CREB3L1__Homo_sapiens__Q96BA8
MDAVLEPFPADRLFPGSSFLDLGDLNESDFLNNAHFPEHLDHFTENMEDFSNDLFSSFFDDPVLDEKSPLLDMELDSPTPGIQAEHSYSLSGDSAPQSPLVPIKMEDTTQDAEHGAWALGHKLCSIMVKQEQSPELPVDPLAAPSAMAAAAAMATTPLLGLSPLSRLPIPHQAPGEMTQLPVIKAEPLEVNQFLKVTPEDLVQMPPTPPSSHGSDSDGSQSPRSLPPSSPVRPMARSSTAISTSPLLTAPHKLQGTSGPLLLTEEEKRTLIAEGYPIPTKLPLTKAEEKALKRVRRKIKNKISAQESRRKKKEYVECLEKKVETFTSENNELWKKVETLENANRTLLQQLQKLQTLVTNKISRPYKMAATQTGTCLMVAALCFVLVLGSLVPCLPEFSSGSQTVKEDPLAADGVYTASQMPSRSLLFYDDGAGLWEDGRSTLLPMEPPDGWEINPGGPAEQRPRDHLQHDHLDSTHETTKYLSEAWPKDGGNGTSPDFSHSKEWFHDRDLGPNTTIKLS

SEQ ID NO: 8151 - RNA, 1560 nt, Artificial Sequence
  CREB3L1__Homo_sapiens__CCDS53620.1
auggacgccgucuuggaacccuucccggccgacaggcuguuccccggauccagcuuccuggacuugggggaucugaacgagucggacuuccucaacaaugcgcacuuuccugagcaccuggaccacuuuacggagaacauggaggacuucuccaaugaccuguucagcagcuucuuugaugacccugugcuggaugagaagagcccucuauuggacauggaacuggacuccccuacgccaggcauccaggcggagcacagcuacucccugagcggcgacucagcgccccagagcccccuugugcccaucaagauggaggacaccacccaagaugcagagcauggagcaugggcgcugggacacaaacugugcuccaucauggugaagcaggagcagagcccggagcugcccguggacccucuggcugcccccucggccauggcugccgcggccgccauggccaccaccccgcugcugggccucagccccuuguccaggcugcccaucccccaccaggccccgggagagaugacucagcugccagugaucaaagcagagccucuggaggugaaccaguuccucaaagugacaccggaggaccuggugcagaugccuccgacgccccccagcagccauggcagugacagcgacggcucccagaguccccgcucucugccccccuccagcccugucaggcccauggcgcgcuccuccacggccaucuccaccuccccacuccucacugccccucacaaauuacaggggacaucagggccacugcuccugacagaggaggagaagcggacccugauugcugagggcuaccccauccccacaaaacucccccucaccaaagccgaggagaaggccuugaagagaguccggaggaaaaucaagaacaagaucucagcccaggagagccgucguaagaagaaggaguauguggagugucuagaaaagaagguggagacauuuacaucugagaacaaugaacuguggaagaagguggagacccuggagaaugccaacaggacccugcuccagcagcugcagaaacuccagacucuggucaccaacaagaucuccagaccuuacaagauggccgccacccagacugggaccugccucaugguggcagccuugugcuuuguucuggugcugggcucccucgugcccugccuucccgaguucuccuccggcucccagacugugaaggaagacccccuggccgcagacggcgucuacacggccagccagaugcccucccgaagccuccuauucuacgaugacggggcaggcuuaugggaagauggccgcagcacccugcugcccauggagcccccagauggcugggaaaucaaccccggggggccggcagagcagcggccccgggaccaccugcagcaugaucaccuggacagcacccacgagaccaccaaguaccugagugaggccuggccuaaagacgguggaaacggcaccagccccgacuucucccacuccaaggagugguuccacgacagggaucugggccccaacaccaccaucaaacucuccuag

SEQ ID NO: 8152 - RNA, 1560 nt, Artificial Sequence
  derived and/or modified sequence opt1 from CREB3L1__Homo_sapiens__CCDS53620.1
auggacgccgugcuggagcccuucccggccgaccgccucuuccccggcagcuccuuccuggaccugggggaccucaacgagagcgacuuccugaacaacgcgcacuuccccgagcaccuggaccacuucaccgagaacauggaggacuucuccaacgaccucuucagcuccuucuucgacgaccccguccuggacgagaaguccccgcugcucgacauggagcuggacagccccacccccggcauccaggccgagcacagcuacucccugagcggggacuccgcgccccagagcccgcucgugcccaucaagauggaggacacgacccaggacgccgagcacggcgccugggcccuggggcacaagcugugcuccaucauggugaagcaggagcagagccccgagcuccccgucgacccgcuggccgcccccuccgccauggcggccgccgccgccauggcgaccacgccccugcucggccugagcccccugucccggcucccgaucccccaccaggcccccggcgagaugacccagcugcccgugaucaaggccgagccgcuggaggugaaccaguuccucaaggucacccccgaggaccuggugcagaugccgcccaccccgcccagcucccacgggagcgacagcgacggcucccagagcccccgcucccugccgcccagcucccccgugcggcccauggcccgcagcuccaccgccaucagcacgagcccccuccugaccgcgccccacaagcugcaggggaccuccggcccccuccugcugaccgaggaggagaagcggacgcucaucgccgagggguaccccaucccgaccaagcugccccugaccaaggccgaggagaaggcccucaagcgcguccggcgcaagaucaagaacaagaucuccgcccaggagagccggcgcaagaagaaggaguacguggagugccuggagaagaagguggagaccuucacguccgagaacaacgagcuguggaagaaggucgagacccucgagaacgcgaaccggacccugcugcagcagcuccagaagcugcagacccuggugacgaacaagaucagccgccccuacaagauggccgccacccagaccgggaccugccucaugguggccgcccugugcuucguccuggugcucggcucccuggugcccugccugccggaguucagcuccggcagccagacggucaaggaggacccccuggcggccgacggcguguacaccgccucccagaugcccagccggagccuccuguucuacgacgacggggccggccugugggaggacggccgcuccacccuccugcccauggagccgcccgacgggugggagaucaaccccggcgggcccgcggagcagcggccgcgcgaccaccuccagcacgaccaccuggacagcacccacgagacgaccaaguaccuguccgaggccuggcccaaggacggcgggaacggcaccagccccgacuucucccacagcaaggagugguuccacgaccgggaccugggccccaacaccacgaucaagcucuccuga

SEQ ID NO: 8153 - RNA, 1560 nt, Artificial Sequence
  derived and/or modified sequence opt2 from CREB3L1__Homo_sapiens__CCDS53620.1
auggacgccguccucgagcccuuccccgccgaccgccucuuccccggcuccuccuuccucgaccucggcgaccucaacgaguccgacuuccucaacaacgcccacuuccccgagcaccucgaccacuucaccgagaacauggaggacuucuccaacgaccucuucuccuccuucuucgacgaccccguccucgacgagaaguccccccuccucgacauggagcucgacucccccacccccggcauccaggccgagcacuccuacucccucuccggcgacuccgccccccaguccccccucguccccaucaagauggaggacaccacccaggacgccgagcacggcgccugggcccucggccacaagcucugcuccaucauggucaagcaggagcagucccccgagcuccccgucgacccccucgccgcccccuccgccauggccgccgccgccgccauggccaccaccccccuccucggccucuccccccucucccgccuccccaucccccaccaggcccccggcgagaugacccagcuccccgucaucaaggccgagccccucgaggucaaccaguuccucaaggucacccccgaggaccucguccagaugccccccaccccccccuccucccacggcuccgacuccgacggcucccaguccccccgcucccucccccccuccucccccguccgccccauggcccgcuccuccaccgccaucuccaccuccccccuccucaccgccccccacaagcuccagggcaccuccggcccccuccuccucaccgaggaggagaagcgcacccucaucgccgagggcuaccccauccccaccaagcucccccucaccaaggccgaggagaaggcccucaagcgcguccgccgcaagaucaagaacaagaucuccgcccaggagucccgccgcaagaagaaggaguacgucgagugccucgagaagaaggucgagaccuucaccuccgagaacaacgagcucuggaagaaggucgagacccucgagaacgccaaccgcacccuccuccagcagcuccagaagcuccagacccucgucaccaacaagaucucccgccccuacaagauggccgccacccagaccggcaccugccucauggucgccgcccucugcuucguccucguccucggcucccucguccccugccuccccgaguucuccuccggcucccagaccgucaaggaggacccccucgccgccgacggcgucuacaccgccucccagaugcccucccgcucccuccucuucuacgacgacggcgccggccucugggaggacggccgcuccacccuccuccccauggagccccccgacggcugggagaucaaccccggcggccccgccgagcagcgcccccgcgaccaccuccagcacgaccaccucgacuccacccacgagaccaccaaguaccucuccgaggccuggcccaaggacggcggcaacggcaccucccccgacuucucccacuccaaggagugguuccacgaccgcgaccucggccccaacaccaccaucaagcucuccuga

SEQ ID NO: 8154 - RNA, 1560 nt, Artificial Sequence
  derived and/or modified sequence opt3 from CREB3L1__Homo_sapiens__CCDS53620.1
auggacgccgugcuggagcccuucccugcugauagacucuuuccaggcagcuccuuccuugaccugggggauuugaacgaaucugacuuuuuaaauaacgcacacuucccggagcaucuggaucacuuuaccgaaaauauggaggacuucucaaacgaucuauuuaguagcuucuuugacgaucccguccucgacgaaaaguccccucugcuugauauggagcuggacucuccaacacccggaauccaggccgagcauucguacucauugagcggugauagugcgccucaauccccacucguucccauuaaaauggaagacacuacgcaggacgcugagcacggcgccugggcacuggggcauaagcugugcucuauaauggugaaacaggaacagagcccugagcucccaguagauccguuagccgcucccuccgcaauggccgcugccgcggcaauggccaccacaccucugcuuggauugucaccacugaguaggcuacccaucccucaccaagcuccaggcgagaugacucagcuccccgugauuaaggccgaaccgcuggaggucaaucaguuccuuaaagugaccccugaagaccugguucagaugcccccaacaccucccagcucucacgguuccgauucagacgggagccaaaguccacggucuuugcccccuuccagcccagugcgcccgauggcacgaucgucuaccgcuaucuccacuucaccccuccugacagccccucauaaguuacagggaaccaguggcccacugcuccuuacggaggaagagaagcguacucugauugcggagggcuaucccaucccuaccaaauugccacuaacaaaggccgaagagaaagcacugaagagagucaggcggaaaauaaagaacaagaucagcgcucaggaaucccgcaggaaaaagaaagaguacguggaaugucucgagaagaaaguagagacuuuuaccucugaaaauaacgagcuguggaagaaaguugaaacacuugagaaugccaacagaacccuguugcagcaacuccagaagcugcagacguuagugacuaauaagauuagccggcccuauaaaauggcugccacacaaaccgggacuugccugauggucgcagcccuauguuucgugcucgugcugggaucacuugucccgugcuugccugaauuuaguuccgguagccagacaguuaaggaggauccacuggcugcggacggcguguacaccgcaucucagaugcccucacgcagucuccuguucuaugaugacggggccggacuuugggaggauggccgaagcacgcuguugccuauggaacccccagacgguugggagaucaacccugggggacccgcugaacagagaccaagggaucaccuccaacaugaccaccuggacuccacccacgagacaacuaaauacuuaucugaggccuggccgaaggauggcggcaaugggaccucgccugacuucagccauuccaaagaaugguuucacgaucgggaccugggacccaacacaacuauuaagcuaucauga

SEQ ID NO: 8155 - RNA, 1560 nt, Artificial Sequence
  derived and/or modified sequence opt4 from CREB3L1__Homo_sapiens__CCDS53620.1
auggacgccgugcuggagcccuuccccgccgacagacuguuccccggcagcagcuuccuggaccugggcgaccugaacgagagcgacuuccugaacaacgcccacuuccccgagcaccuggaccacuucaccgagaacauggaggacuucagcaacgaccuguucagcagcuucuucgacgaccccgugcuggacgagaagagcccccugcuggacauggagcuggacagccccacccccggcauccaggccgagcacagcuacagccugagcggcgacagcgccccccagagcccccuggugcccaucaagauggaggacaccacccaggacgccgagcacggcgccugggcccugggccacaagcugugcagcaucauggugaagcaggagcagagccccgagcugcccguggacccccuggccgcccccagcgccauggccgccgccgccgccauggccaccaccccccugcugggccugagcccccugagcagacugcccaucccccaccaggcccccggcgagaugacccagcugcccgugaucaaggccgagccccuggaggugaaccaguuccugaaggugacccccgaggaccuggugcagaugccccccaccccccccagcagccacggcagcgacagcgacggcagccagagccccagaagccugccccccagcagccccgugagacccauggccagaagcagcaccgccaucagcaccagcccccugcugaccgccccccacaagcugcagggcaccagcggcccccugcugcugaccgaggaggagaagagaacccugaucgccgagggcuaccccauccccaccaagcugccccugaccaaggccgaggagaaggcccugaagagagugagaagaaagaucaagaacaagaucagcgcccaggagagcagaagaaagaagaaggaguacguggagugccuggagaagaagguggagaccuucaccagcgagaacaacgagcuguggaagaagguggagacccuggagaacgccaacagaacccugcugcagcagcugcagaagcugcagacccuggugaccaacaagaucagcagacccuacaagauggccgccacccagaccggcaccugccugaugguggccgcccugugcuucgugcuggugcugggcagccuggugcccugccugcccgaguucagcagcggcagccagaccgugaaggaggacccccuggccgccgacggcguguacaccgccagccagaugcccagcagaagccugcuguucuacgacgacggcgccggccugugggaggacggcagaagcacccugcugcccauggagccccccgacggcugggagaucaaccccggcggccccgccgagcagagacccagagaccaccugcagcacgaccaccuggacagcacccacgagaccaccaaguaccugagcgaggccuggcccaaggacggcggcaacggcaccagccccgacuucagccacagcaaggagugguuccacgacagagaccugggccccaacaccaccaucaagcugagcuga

SEQ ID NO: 8156 - RNA, 1560 nt, Artificial Sequence
  derived and/or modified sequence opt5 from CREB3L1__Homo_sapiens__CCDS53620.1
auggacgccgugcuggagcccuucccugcugauagacucuuuccgggcagcuccuuccuggaccuuggggaucugaacgaaucugacuuucucaauaacgcccacuuccccgagcaucuggaucacuuuaccgaaaauauggaggacuucagcaacgaucuguuuuccucuuucuuugacgauccuguccuugacgaaaagagcccccuccuggauauggagcuggacuccccuacacccggaauccaggcggagcauucuuacagccucuccggcgauagcgcuccucaaucuccgcugguucccauuaaaauggaagacacgacccaggacgccgagcacggggccugggcucuuggacauaagcugugcuccaucauggugaaacaggaacagagcccugagcuccccguggauccucuggccgcucccucugccauggcggccgcugccgcuauggccacaaccccgcuucugggccucuccccucugagccggcugcccauuccucaccaagcgcccggggagaugacacagcuccccgucaucaaggccgaaccucuggaggugaaucaguuccuuaaaguuaccccggaagaccuggugcagaugcccccuacacccccuucuucccacggaagcgauuccgacggcucucaaagcccccgcucccucccgccuagcucucccgucagaccuauggcucgguccagcaccgccauuucuacgagcccccugcuuaccgcuccucauaagcugcagggcacauccgggccccuccugcugaccgaggaagagaagcgcacacucaucgccgagggauauccgaucccuaccaaacugccccuuacgaaggccgaagagaaagcucugaagagagugcggcgcaaaauuaagaacaagaucucugcgcaggaaagcagacggaaaaagaaagaguacguugaaugucucgagaagaaaguggagacauuuaccuccgaaaauaacgagcuguggaagaaagucgaaacacuugagaaugccaaccgcacccugcuccagcaacugcagaagcugcagacccucgugacaaauaagauuagcagacccuauaaaauggcugccacgcaaaccggcacaugccugaugguggccgcucuuuguuucguccugguucucgggucucuggugccuugccugccggaauuuuccagcggaucucagaccgugaaggaggauccccuugccgcggacggcgucuacacagcuucccagaugccuagccggucccuccuguucuaugaugacggggccggacugugggaggauggccgcucuacccuccugcccauggaaccucccgacggcugggagaucaacccugggggacccgccgaacagagaccgcgggaucaccuucaacaugaccaccuggacagcacgcacgagacaaccaaauaccucuccgaggcuuggccuaaggauggcgggaauggaaccucucccgacuucagccauuccaaagaaugguuucacgaucgcgaccugggcccuaacacaaccauuaagcugagcuga

SEQ ID NO: 8157 - protein, 461 aa, Artificial Sequence
  CREB3L3__Homo_sapiens__Q68CJ9
MNTDLAAGKMASAACSMDPIDSFELLDLLFDRQDGILRHVELGEGWGHVKDQQVLPNPDSDDFLSSILGSGDSLPSSPLWSPEGSDSGISEDLPSDPQDTPPRSGPATSPAGCHPAQPGKGPCLSYHPGNSCSTTTPGPVIQVPEASVTIDLEMWSPGGRICAEKPADPVDLSPRCNLTVKDLLLSGSSGDLQQHHLGASYLLRPGAGHCQELVLTEDEKKLLAKEGITLPTQLPLTKYEERVLKKIRRKIRNKQSAQESRKKKKEYIDGLETRMSACTAQNQELQRKVLHLEKQNLSLLEQLKKLQAIVVQSTSKSAQTGTCVAVLLLSFALIILPSISPFGPNKTESPGDFAPVRVFSRTLHNDAASRVAADAVPGSEAPGPRPEADTTREESPGSPGADWGFQDTANLTNSTEELDNATLVLRNATEGLGQVALLDWVAPGPSTGSGRAGLEAAGDEL

SEQ ID NO: 8158 - RNA, 1386 nt, Artificial Sequence
  CREB3L3__Homo_sapiens__CCDS12121.1
augaauacggauuuagcugcuggaaagauggcuucugcugccugcuccauggaccccaucgacagcuuugagcuccuggaucuccuguuugaccggcaggacggcauccugagacacguggagcugggcgagggcuggggucacgucaaggaccagcagguccugccaaaccccgacucugacgacuuccucagcuccauccugggcucuggagacucacugcccagcuccccacucuggucccccgaaggcagugauaguggcaucuccgaagaccuccccuccgacccccaggacaccccuccacgcagcggaccagccaccucccccgccggcugccauccugcccagccuggcaaggggcccugccucuccuaucauccuggcaacucuugcuccaccacaaccccagggccagugauccaaguaccugaagccucugugaccauagaccuggaaauguggagcccaggaggaaggaucugugcugagaagccggcugauccgguggaccuguccccacgaugcaaucucaccgugaaagaccuccuccuuucgggcagcaguggggaccugcaacagcaucaccugggggccuccuaccuccugcgaccuggggcugggcacugucaggagcuggugcucaccgaggaugagaagaagcugcuggcuaaagaaggcaucacccugcccacucagcugccccucacuaaguacgaggagcgagugcugaaaaaaauccgccggaaaauccggaacaagcagucggcgcaagaaagcaggaagaagaagaaggaauauaucgauggccuggagacucggaugucagcuugcacugcucagaaucaggaguuacagaggaaagucuugcaucucgagaagcaaaaccugucccucuuggagcaacugaagaaacuccaggccauuguggugcaguccaccagcaagucagcccagacaggcaccugugucgcaguccuguugcuguccuuugcccucaucauccuccccuccaucagcccuuuuggccccaacaaaaccgagagcccuggggacuuugcgccuguacgaguguucuccagaacuuugcacaacgaugcugccucccgcguggcugcugaugcugugccaggcuccgaggccccaggaccccgacccgaggcugacacaacccgagaagagucuccaggaagccccggggcagacuggggcuuccaggacaccgcgaaccugaccaauucgacggaggagcuggacaacgccacccugguccugaggaaugcaacagaggggcugggccaggucgcccugcuggacuggguggcgccugggccgagcacuggcucaggacgugcagggcuggaggcggcgggagacgagcuguga

SEQ ID NO: 8159 - RNA, 1386 nt, Artificial Sequence
  derived and/or modified sequence opt1 from CREB3L3__Homo_sapiens__CCDS12121.1
augaacaccgaccuggccgccggcaagauggcgagcgccgccugcuccauggaccccaucgacagcuucgagcuccuggaccuccuguucgaccgccaggacgggauccugcggcacguggagcugggcgagggguggggccacgucaaggaccagcagguccucccgaaccccgacuccgacgacuuccugagcuccauccuggggagcggcgacucccuccccagcagcccccugugguccccggagggcuccgacagcgggaucuccgaggaccugcccagcgacccccaggacacgcccccgcgcuccggccccgccaccagccccgccgggugccaccccgcgcagccgggcaaggggcccugccucuccuaccaccccggcaacagcugcuccaccaccacccccggcccggugauccaggugcccgaggccagcgugacgaucgaccuggagauguggagccccgggggccggaucugcgccgagaagcccgccgacccgguggaccugagcccccgcugcaaccucaccgucaaggaccugcugcucuccggguccagcggcgaccugcagcagcaccaccugggcgcguccuaccuccugcggcccggggccggccacugccaggagcuggugcucaccgaggacgagaagaagcugcuggccaaggaggggaucacccuccccacgcagcugccgcugaccaaguacgaggagcgcgugcucaagaagauccggcgcaagauccggaacaagcagagcgcccaggagucccgcaagaagaagaaggaguacaucgacggccuggagacccggaugagcgccugcaccgcgcagaaccaggagcugcagcgcaagguccuccaccuggagaagcagaaccugucccuccuggagcagcugaagaagcuccaggccaucguggugcagagcacguccaagagcgcccagaccgggaccugcgucgccgugcugcugcucuccuucgcccugaucauccugcccagcaucucccccuucggccccaacaagaccgagagcccgggcgacuucgcgcccgugcgggucuucucccgcacgcuccacaacgacgccgccagccggguggccgccgacgcggugcccggguccgaggccccgggcccccgccccgaggccgacaccacccgggaggagagccccgggagcccgggcgccgacuggggguuccaggacaccgccaaccugacgaacuccaccgaggagcuggacaacgcgacccucguccugcgcaacgccaccgagggccugggccagguggcccugcucgacuggguggcccccgggcccagcacgggcuccgggcgggcgggccuggaggccgccggggacgagcuguga

SEQ ID NO: 8160 - RNA, 1386 nt, Artificial Sequence
  derived and/or modified sequence opt2 from CREB3L3__Homo_sapiens__CCDS12121.1
augaacaccgaccucgccgccggcaagauggccuccgccgccugcuccauggaccccaucgacuccuucgagcuccucgaccuccucuucgaccgccaggacggcauccuccgccacgucgagcucggcgagggcuggggccacgucaaggaccagcagguccuccccaaccccgacuccgacgacuuccucuccuccauccucggcuccggcgacucccuccccuccuccccccucuggucccccgagggcuccgacuccggcaucuccgaggaccuccccuccgacccccaggacacccccccccgcuccggccccgccaccucccccgccggcugccaccccgcccagcccggcaagggccccugccucuccuaccaccccggcaacuccugcuccaccaccacccccggccccgucauccagguccccgaggccuccgucaccaucgaccucgagauguggucccccggcggccgcaucugcgccgagaagcccgccgaccccgucgaccucuccccccgcugcaaccucaccgucaaggaccuccuccucuccggcuccuccggcgaccuccagcagcaccaccucggcgccuccuaccuccuccgccccggcgccggccacugccaggagcucguccucaccgaggacgagaagaagcuccucgccaaggagggcaucacccuccccacccagcucccccucaccaaguacgaggagcgcguccucaagaagauccgccgcaagauccgcaacaagcaguccgcccaggagucccgcaagaagaagaaggaguacaucgacggccucgagacccgcauguccgccugcaccgcccagaaccaggagcuccagcgcaagguccuccaccucgagaagcagaaccucucccuccucgagcagcucaagaagcuccaggccaucgucguccaguccaccuccaaguccgcccagaccggcaccugcgucgccguccuccuccucuccuucgcccucaucauccuccccuccaucucccccuucggccccaacaagaccgagucccccggcgacuucgcccccguccgcgucuucucccgcacccuccacaacgacgccgccucccgcgucgccgccgacgccguccccggcuccgaggcccccggcccccgccccgaggccgacaccacccgcgaggagucccccggcucccccggcgccgacuggggcuuccaggacaccgccaaccucaccaacuccaccgaggagcucgacaacgccacccucguccuccgcaacgccaccgagggccucggccaggucgcccuccucgacugggucgcccccggccccuccaccggcuccggccgcgccggccucgaggccgccggcgacgagcucuga

SEQ ID NO: 8161 - RNA, 1386 nt, Artificial Sequence
  derived and/or modified sequence opt3 from CREB3L3__Homo_sapiens__CCDS12121.1
augaacaccgaccuggccgcuggcaagauggcaagcgccgcgugcuccauggaucccaucgacucuuucgagcuccuugaucuguuguuugacagacaggaugggauuuuaaggcacguggaacugggagaggguuggggccaugucaaagaccaacagguucuaccuaauccagauucagacgauuuccucaguagcauacugggguccggagacucucuuccgucgucaccccuguggagcccugaaggcagugauuccgguaucucugaggacuugccaagcgauccccaggacacaccuccacgguccgggcccgcuacuucaccagccggaugucacccugcacagccgggcaagggccccugccucaguuaccauccugggaacagcuguucuacgaccacaccaggacccgugauucaaguaccugaagccuccgugacuaucgaccuggagauguggucaccagguggccgcauuugcgcugagaaacccgcagauccggucgaccugagcccucgauguaaucucaccgugaaggauuuacugcuuagugggucuuccggagacuugcagcagcaccaucugggcgccagcuaucuacuccgucccggugcugggcacugccaggaacugguucuuacagaggaugagaaaaagcuguuggccaaggaaggaaucacccucccaacucaacugccuuuaacaaaauacgaggaaagagugcugaagaaaauaaggcggaagauccgcaacaaacagucggcgcaggagucuagaaagaagaaaaaggaauauauugacggccucgagaccaggauguccgcauguacggcccagaaucaagaacuucagcggaaaguccugcacuuggagaagcagaaccuaucacugcucgagcaacugaaaaagcugcaggcuaucgugguacagaguacuagcaaauccgcccagaccggcacaugcguugcagugcuuuugcucucuuuugcucugauuaucuuacccagcauaucaccauucgggcccaauaagacugaaaguccuggagauuuugccccaguccgcguguucucccgaacccugcauaacgacgcggccagcagaguggcagcugaugccgucccggguucugaggcucccggcccuaggccagaagccgacacaacccgggaggaaucacccgggaguccuggagcagauuggggcuuucaagacacggccaaucuaacuaacagcacagaggagcucgacaaugcuacccugguucuucguaacgcgacugaagguuugggccagguggcacugcucgauuggguagccccagggcccuccacaggaucuggccgcgcugggcuggaggccgcaggagacgaacuuuga

SEQ ID NO: 8162 - RNA, 1386 nt, Artificial Sequence
  derived and/or modified sequence opt4 from CREB3L3__Homo_sapiens__CCDS12121.1
augaacaccgaccuggccgccggcaagauggccagcgccgccugcagcauggaccccaucgacagcuucgagcugcuggaccugcuguucgacagacaggacggcauccugagacacguggagcugggcgagggcuggggccacgugaaggaccagcaggugcugcccaaccccgacagcgacgacuuccugagcagcauccugggcagcggcgacagccugcccagcagcccccuguggagccccgagggcagcgacagcggcaucagcgaggaccugcccagcgacccccaggacaccccccccagaagcggccccgccaccagccccgccggcugccaccccgcccagcccggcaagggccccugccugagcuaccaccccggcaacagcugcagcaccaccacccccggccccgugauccaggugcccgaggccagcgugaccaucgaccuggagauguggagccccggcggcagaaucugcgccgagaagcccgccgaccccguggaccugagccccagaugcaaccugaccgugaaggaccugcugcugagcggcagcagcggcgaccugcagcagcaccaccugggcgccagcuaccugcugagacccggcgccggccacugccaggagcuggugcugaccgaggacgagaagaagcugcuggccaaggagggcaucacccugcccacccagcugccccugaccaaguacgaggagagagugcugaagaagaucagaagaaagaucagaaacaagcagagcgcccaggagagcagaaagaagaagaaggaguacaucgacggccuggagaccagaaugagcgccugcaccgcccagaaccaggagcugcagagaaaggugcugcaccuggagaagcagaaccugagccugcuggagcagcugaagaagcugcaggccaucguggugcagagcaccagcaagagcgcccagaccggcaccugcguggccgugcugcugcugagcuucgcccugaucauccugcccagcaucagccccuucggccccaacaagaccgagagccccggcgacuucgcccccgugagaguguucagcagaacccugcacaacgacgccgccagcagaguggccgccgacgccgugcccggcagcgaggcccccggccccagacccgaggccgacaccaccagagaggagagccccggcagccccggcgccgacuggggcuuccaggacaccgccaaccugaccaacagcaccgaggagcuggacaacgccacccuggugcugagaaacgccaccgagggccugggccagguggcccugcuggacuggguggcccccggccccagcaccggcagcggcagagccggccuggaggccgccggcgacgagcuguga

SEQ ID NO: 8163 - RNA, 1386 nt, Artificial Sequence
  derived and/or modified sequence opt5 from CREB3L3__Homo_sapiens__CCDS12121.1
augaacaccgaccuggccgcuggcaagauggccagcgcggcuugcuccauggaucccaucgacucuuucgagcuccuggaucuucuguuugacagacaggaugggauucuccggcacguggaacugggagagggcugggggcaugucaaagaccaacagguucuuccuaauccggauagcgacgauuuccuguccucuauccucggaagcggcgacucccugcccucuagcccucuguggucccccgaagggagcgauucuggaauuuccgaggaccucccuagcgauccccaggacacaccuccgcgcucuggccccgccacguccccugccggcugucaccccgcucagccugggaagggacccugccugagcuaccauccgggcaacucuuguuccaccacaaccccugggcccgugauccaagugccugaagccagcgucacaauugaccuugagauguggucccccggaggcagaaucugcgcugagaaacccgccgauccuguggaccugucuccgcgguguaaucucaccguuaaggaucugcuucugagcggguccagcggagaccuccagcagcaccaucugggcgcgucuuaucugcuccgccccggcgccgggcacugccaggaacuggugcuuacagaggaugagaaaaagcugcucgcuaaggaaggaaucacccugccuacgcaacuuccccugaccaaauacgaggaaagaguccucaagaaaauucggcgcaagaucagaaacaaacaguccgcccaggagagccggaagaagaaaaaggaauauauugacggccuggagacacgcaugucugcuuguaccgcccagaaucaagaacugcagagaaaagugcuccaccuggagaagcagaaccuuagccugcucgagcaacugaaaaagcugcaggcgaucguugugcaguccacaucuaaaagcgcccagaccgggacgugcgucgcugugcuucuccuguccuuugcccugauuauccucccuagcauuucucccuucggaccgaauaagacagaauccccuggcgauuuugcucccgugcgggucuucagccgcacccugcauaacgacgccgccucuagaguugcugcggaugccgugccuggguccgaggcucccggaccucggcccgaagccgacacaacccgcgaggaaagcccgggcuccccuggcgccgauuggggguuucaagacaccgcuaaucuuacaaacucuacggaggagcuggacaaugccacccucgugcugagaaacgcgacagaaggacugggccaggucgcccuucucgauuggguggcucccgggcccagcaccggauccggccgggccgggcuggaggcugccggcgacgaacuguga

SEQ ID NO: 8164 - protein, 395 aa, Artificial Sequence
  CREB3L4__Homo_sapiens__Q8TEY5
MDLGIPDLLDAWLEPPEDIFSTGSVLELGLHCPPPEVPVTRLQEQGLQGWKSGGDRGCGLQESEPEDFLKLFIDPNEVYCSEASPGSDSGISEDPCHPDSPPAPRATSSPMLYEVVYEAGALERMQGETGPNVGLISIQLDQWSPAFMVPDSCMVSELPFDAHAHILPRAGTVAPVPCTTLLPCQTLFLTDEEKRLLGQEGVSLPSHLPLTKAEERVLKKVRRKIRNKQSAQDSRRRKKEYIDGLESRVAACSAQNQELQKKVQELERHNISLVAQLRQLQTLIAQTSNKAAQTSTCVLILLFSLALIILPSFSPFQSRPEAGSEDYQPHGVTSRNILTHKDVTENLETQVVESRLREPPGAKDANGSTRTLLEKMGGKPRPSGRIRSVLHADEM

SEQ ID NO: 8165 - RNA, 1188 nt, Artificial Sequence
  CREB3L4__Homo_sapiens__CCDS1056.1
auggaucucggaaucccugaccugcuggacgcguggcuggagcccccagaggauaucuucucgacaggauccguccuggagcugggacuccacugccccccuccagagguuccgguaacuaggcuacaggaacagggacugcaaggcuggaaguccgguggggaccguggcuguggccuucaagagagugagccugaagauuucuugaagcuuuucauugaucccaaugagguguacugcucagaagcaucuccuggcagugacaguggcaucucugaggaccccugccauccagacagucccccugcccccagggcaaccaguucuccuaugcucuaugagguugucuaugaggcaggggcccuggagaggaugcagggggaaacugggccaaauguaggccuuaucuccauccagcuagaucaguggagcccagcauuuauggugccugauuccugcauggucagugagcugcccuuugaugcucaugcccacauccugcccagagcaggcaccguagccccagugcccuguacaacccugcugcccugucaaacccuguuccugaccgaugaggagaagcgucugcuggggcaggaagggguuucccugcccucucaccugccccucaccaaggcagaggagaggguccucaagaaggucaggaggaaaauccguaacaagcagucagcucaggacagucggcggcggaagaaggaguacauugaugggcuggagagcaggguggcagccuguucugcacagaaccaagaauuacagaaaaaaguccaggagcuggagaggcacaacaucuccuugguagcucagcuccgccagcugcagacgcuaauugcucaaacuuccaacaaagcugcccagaccagcacuuguguuuugauucuucuuuuuucccuggcucucaucauccugcccagcuucaguccauuccagagucgaccagaagcugggucugaggauuaccagccucacggagugacuuccagaaauauccugacccacaaggacguaacagaaaaucuggagacccaagugguagaguccagacugagggagccaccuggagccaaggaugcaaauggcucaacaaggacacugcuugagaagaugggagggaagccaagacccagugggcgcauccgguccgugcugcaugcagaugagauguga

SEQ ID NO: 8166 - RNA, 1188 nt, Artificial Sequence
  derived and/or modified sequence opt1 from CREB3L4__Homo_sapiens__CCDS1056.1
auggaccugggcauccccgaccuccuggacgccuggcuggagccgcccgaggacaucuucagcaccggguccgugcucgagcugggccugcacugcccgcccccggagguccccgugacccgccuccaggagcaggggcugcagggcuggaaguccgggggcgaccggggcugcgggcugcaggagagcgagcccgaggacuuccucaagcuguucaucgaccccaacgagguguacugcagcgaggccuccccgggcagcgacuccgggaucagcgaggaccccugccaccccgacuccccgcccgcgccccgcgccacgagcucccccaugcuguacgaggucguguacgaggccggcgcccucgagcggaugcagggggagaccggccccaacgugggccugaucagcauccagcuggaccaguggucccccgccuucaugguccccgacagcugcaugguguccgagcuccccuucgacgcgcacgcccacauccugccccgcgccgggaccguggccccgguccccugcaccacgcugcuccccugccagacccuguuccugaccgacgaggagaagcggcuccugggccaggagggggugagccugcccucccaccucccgcugaccaaggcggaggagcgcgugcugaagaagguccggcgcaagauccggaacaagcagagcgcccaggacucccgccggcgcaagaaggaguacaucgacggccucgagagccggguggccgccugcagcgcccagaaccaggagcugcagaagaaggugcaggagcuggagcgccacaacaucucccucgucgcgcagcugcggcagcugcagacgcucaucgcccagaccagcaacaaggccgcccagaccuccacgugcgugcugauccuccuguucagccuggcccugaucauccuccccuccuucagccccuuccagucccgccccgaggcgggcagcgaggacuaccagccgcacggggugaccucccggaacauccugacccacaaggacgucaccgagaaccuggagacccaggugguggagagccgccuccgggagccgcccggcgccaaggacgccaacggguccacgcgcacccugcuggagaagaugggcgggaagccccggcccagcggccgcauccgcuccguccuccacgccgacgagauguga

SEQ ID NO: 8167 - RNA, 1188 nt, Artificial Sequence
  derived and/or modified sequence opt2 from CREB3L4__Homo_sapiens__CCDS1056.1
auggaccucggcauccccgaccuccucgacgccuggcucgagccccccgaggacaucuucuccaccggcuccguccucgagcucggccuccacugccccccccccgagguccccgucacccgccuccaggagcagggccuccagggcuggaaguccggcggcgaccgcggcugcggccuccaggaguccgagcccgaggacuuccucaagcucuucaucgaccccaacgaggucuacugcuccgaggccucccccggcuccgacuccggcaucuccgaggaccccugccaccccgacuccccccccgccccccgcgccaccuccucccccaugcucuacgaggucgucuacgaggccggcgcccucgagcgcaugcagggcgagaccggccccaacgucggccucaucuccauccagcucgaccaguggucccccgccuucaugguccccgacuccugcauggucuccgagcuccccuucgacgcccacgcccacauccucccccgcgccggcaccgucgcccccguccccugcaccacccuccuccccugccagacccucuuccucaccgacgaggagaagcgccuccucggccaggagggcgucucccuccccucccaccucccccucaccaaggccgaggagcgcguccucaagaagguccgccgcaagauccgcaacaagcaguccgcccaggacucccgccgccgcaagaaggaguacaucgacggccucgagucccgcgucgccgccugcuccgcccagaaccaggagcuccagaagaagguccaggagcucgagcgccacaacaucucccucgucgcccagcuccgccagcuccagacccucaucgcccagaccuccaacaaggccgcccagaccuccaccugcguccucauccuccucuucucccucgcccucaucauccuccccuccuucucccccuuccagucccgccccgaggccggcuccgaggacuaccagccccacggcgucaccucccgcaacauccucacccacaaggacgucaccgagaaccucgagacccaggucgucgagucccgccuccgcgagccccccggcgccaaggacgccaacggcuccacccgcacccuccucgagaagaugggcggcaagccccgccccuccggccgcauccgcuccguccuccacgccgacgagauguga

SEQ ID NO: 8168 - RNA, 1188 nt, Artificial Sequence
  derived and/or modified sequence opt3 from CREB3L4__Homo_sapiens__CCDS1056.1
auggaccugggcauccccgaucuccuugacgccuggcuggagccuccagaagauauuuucagcaccggguccguguuggaguuaggacugcacugcccgcccccugaagucccaguuacaagacuacaggagcaaggucuccagggcuggaagucugggggagacaggggcuguggucugcaggaaucagagcccgaggauuuucuuaaacuguucauagacccuaacgaaguguacugcagugaggcuagcccaggguccgauucuggaaucucggaagaccccugucauccugauucaccaccggcaccccgggccacuagcaguccuauguuguaugagguaguguacgaggcgggcgcucucgaacgcaugcagggcgagacggggccaaaugucggacugauuuccauccaacuggaccaguggucucccgccuuuauggugccugauagcugcaugguuuccgaacucccauucgacgcacacgcccauauuuuaccccgagcugguaccguggcaccggucccuuguacaacucugcuucccugccagaccuuguuucugacagaugaggaaaagcgucuacucggccaggagggggugucacugccaagucaccuuccucugaccaaagccgaggaaagaguauugaagaaaguuaggcggaagauccgcaacaagcaaagcgcucaggacucuagaaggcggaaaaaggaguauauagacggacucgaaucccgcguggccgcguguucagcacagaaucaggagcugcagaaaaagguccaagaauuagagcgacauaacaucagccugguggcccagcucagacaacuucagacucugauugcucagacaaguaauaaagccgcacagaccucuacgugcguguugauccuacuguucucccucgcucugauuauccuucccagcuuuucgccauuccaaucuaggcccgaggccggcuccgaagauuaccagccucacggugucacuucacggaacauacugacccacaaggacguuacagagaauuuggaaacucaggugguagagagucgucuccgcgaaccaccgggggcgaaggaugccaacggaagcaccagaacacuguuagagaaaaugggcggcaagcccaggccuuccgggcggauucgaucugugcugcaugcagacgagauguga

SEQ ID NO: 8169 - RNA, 1188 nt, Artificial Sequence
  derived and/or modified sequence opt4 from CREB3L4__Homo_sapiens__CCDS1056.1
auggaccugggcauccccgaccugcuggacgccuggcuggagccccccgaggacaucuucagcaccggcagcgugcuggagcugggccugcacugccccccccccgaggugcccgugaccagacugcaggagcagggccugcagggcuggaagagcggcggcgacagaggcugcggccugcaggagagcgagcccgaggacuuccugaagcuguucaucgaccccaacgagguguacugcagcgaggccagccccggcagcgacagcggcaucagcgaggaccccugccaccccgacagcccccccgcccccagagccaccagcagccccaugcuguacgaggugguguacgaggccggcgcccuggagagaaugcagggcgagaccggccccaacgugggccugaucagcauccagcuggaccaguggagccccgccuucauggugcccgacagcugcauggugagcgagcugcccuucgacgcccacgcccacauccugcccagagccggcaccguggcccccgugcccugcaccacccugcugcccugccagacccuguuccugaccgacgaggagaagagacugcugggccaggagggcgugagccugcccagccaccugccccugaccaaggccgaggagagagugcugaagaaggugagaagaaagaucagaaacaagcagagcgcccaggacagcagaagaagaaagaaggaguacaucgacggccuggagagcagaguggccgccugcagcgcccagaaccaggagcugcagaagaaggugcaggagcuggagagacacaacaucagccugguggcccagcugagacagcugcagacccugaucgcccagaccagcaacaaggccgcccagaccagcaccugcgugcugauccugcuguucagccuggcccugaucauccugcccagcuucagccccuuccagagcagacccgaggccggcagcgaggacuaccagccccacggcgugaccagcagaaacauccugacccacaaggacgugaccgagaaccuggagacccaggugguggagagcagacugagagagccccccggcgccaaggacgccaacggcagcaccagaacccugcuggagaagaugggcggcaagcccagacccagcggcagaaucagaagcgugcugcacgccgacgagauguga

SEQ ID NO: 8170 - RNA, 1188 nt, Artificial Sequence
  derived and/or modified sequence opt5 from CREB3L4__Homo_sapiens__CCDS1056.1
auggaccugggcauccccgaucuccuggacgccuggcuugagccuccggaagauauuuucagcaccggguccgugcuggagcucggacugcacugucccccucccgaagucccuguuacaagacuucaggagcaaggccugcagggguggaagucuggaggcgaccgggggugcggacuccaggaaagcgagcccgaggauuuucugaaacuguucaucgacccuaacgaaguguacugcuccgaggcuucuccgggcagcgauuccggcauuucugaagaccccugucauccugauagcccucccgcccccagagcgacguccagcccgaugcucuaugagguggucuacgaggcuggggcccuggaaagaaugcagggagagaccggcccuaauguggggcuuaucucuauucaacuggaccaguggucccccgccuuuaugguuccugauagcugcauggugucugaacuccccuucgacgcucacgcccauauccugccccgggcuggaacagucgccccugugccguguaccacacuucugcccugccagacccucuuucugacagaugaggaaaagcgccugcucggccaggaggggguuucccugccuagccaccuuccccugaccaaagcggaggaaagagugcucaagaaaguccggcgcaagaucagaaacaagcaaucugcccaggacucccggcgccgcaaaaaggaguauauugacggacuggaaagccggguggcugccuguuccgcucagaaucaggagcuucagaaaaaggugcaagaacuggagcgccauaacaucucucucgucgcccagcugagacaacugcagacgcucauugcgcagaccagcaauaaagccgcucagacauccacaugcguucugauccuucuguucagccucgcccugauuauccuuccuucuuuuucccccuuccaaagccggccggaggcuggcucugaagauuaccagccucacggcgugaccagccgcaacauucugacccacaaggacgugacggagaaucucgaaacacaggucguggaguccagacugcgggaacccccuggggccaaggaugccaacggaucuaccagaacacugcucgagaaaaugggcgggaagccccgcccuagcggacggaucagauccguucugcaugcugacgagauguga

SEQ ID NO: 8171 - protein, 508 aa, Artificial Sequence
  CREB5__Homo_sapiens__Q02930
MIYEESKMNLEQERPFVCSAPGCSQRFPTEDHLMIHRHKHEMTLKFPSIKTDNMLSDQTPTPTRFLKNCEEVGLFSELDCSLEHEFRKAQEEESSKRNISMHNAVGGAMTGPGTHQLSSARLPNHDTNVVIQQAMPSPQSSSVITQAPSTNRQIGPVPGSLSSLLHLHNRQRQPMPASMPGTLPNPTMPGSSAVLMPMERQMSVNSSIMGMQGPNLSNPCASPQVQPMHSEAKMRLKAALTHHPAAMSNGNMNTMGHMMEMMGSRQDQTPHHHMHSHPHQHQTLPPHHPYPHQHQHPAHHPHPQPHHQQNHPHHHSHSHLHAHPAHHQTSPHPPLHTGNQAQVSPATQQMQPTQTIQPPQPTGGRRRRVVDEDPDERRRKFLERNRAAATRCRQKRKVWVMSLEKKAEELTQTNMQLQNEVSMLKNEVAQLKQLLLTHKDCPITAMQKESQGYLSPESSPPASPVPACSQQQVIQHNTITTSSSVSEVVGSSTLSQLTTHRTDLNPIL

SEQ ID NO: 8172 - RNA, 1527 nt, Artificial Sequence
  CREB5__Homo_sapiens__CCDS5417.1
augauuuaugaggaauccaagaugaauuuggagcaggagaggccguuugucugcagugccccaggcugcucccagcgcuucccaacagaggaccaucugaugauucauaggcacaaacaugaaaugacuuugaaguuuccuucaauaaaaacagacaauauguuaucagaucaaacuccgaccccaacgagauuccugaagaacugcgaggaggugggccucuucagcgagcuggacugcucccuggagcacgaguucaggaaggcucaggaagaggagagcagcaagcggaauaucucgaugcauaaugcaguugguggggccaugacggggcccggaacucaccagcuuagcagcgcucggcugcccaaccaugacaccaacguugugauucagcaagccaugccgucgccucaguccagcucugucaucacucaggcaccuuccaccaaccgccagaucgggccugucccaggcucucuaucuucucugcuacaucuccacaacagacagagacagcccaugccagccuccaugccugggacccugcccaacccuacaaugccaggaucuuccgccgucuugaugccaauggagcgacaaaugucagugaacuccagcaucauggggaugcaagguccaaaucucagcaaccccugugcuucuccccagguccagccaaugcauucagaagccaaaaugagguugaaggcugcauugacucaccacccugcugccaugucaaaugggaacaugaacaccaugggacacaugauggagaugaugggcucccggcaggaccagacgccacaccaucacaugcacucgcacccgcaucagcaccagacacugccaccccaucacccuuacccacaccagcaccagcacccagcacaccauccucacccucaaccccaucaccagcagaaccauccacaucaccacucccauucccaccuucaugcacacccagcacaucaccagaccucgccacauccgccccugcacaccggcaaccaagcacagguuucaccagcaacacaacagaugcagccaacccagacaauacagccaccccagcccacaggggggcgccggcgaagggugguagacgaggauccggacgagaggcggcggaaauuucuggaacggaaccgggcagcugccacccgcugcagacagaagaggaaggucugggugaugucauuggaaaagaaagcagaagaacucacccagacaaacaugcagcuucagaaugaagugucuauguugaaaaaugagguggcccagcugaaacaguuguuguuaacacauaaagacugcccaauaacagccaugcagaaagaaucacaaggauaucuaaguccagagaguagcccuccugcuaguccugucccagcuugcucccagcaacaagucauccagcauaauaccaucacuacuuccucaucggucagcgaggugguaggaagcuccacccucagccagcucaccacucacagaacagaccugaauccgauucuuuaa

SEQ ID NO: 8173 - RNA, 1527 nt, Artificial Sequence
  derived and/or modified sequence opt1 from CREB5__Homo_sapiens__CCDS5417.1
augaucuacgaggagagcaagaugaaccuggagcaggagcgccccuucgugugcuccgccccgggcugcagccagcgguuccccaccgaggaccaccucaugauccaccgccacaagcacgagaugacccugaaguuccccuccaucaagacggacaacaugcugagcgaccagacccccaccccgacccgguuccucaagaacugcgaggaggucgggcuguucuccgagcuggacugcagccucgagcacgaguuccgcaaggcccaggaggaggaguccagcaagcggaacaucuccaugcacaacgcggugggcggggccaugacgggccccgggacccaccagcugagcuccgcccgccugcccaaccacgacaccaacguggucauccagcaggccaugcccagcccgcaguccagcuccgugaucacccaggcccccagcacgaaccggcagaucggccccgugcccggcucccucagcucccugcugcaccuccacaaccgccagcggcagccgaugcccgcgagcaugcccgggacccugcccaacccgaccaugcccggcagcuccgccguccugaugcccauggagcgccagaugagcgugaacuccagcaucauggggaugcagggccccaaccucuccaacccgugcgccagcccccaggugcagcccaugcacuccgaggccaagaugcggcugaaggcggcccugacccaccaccccgccgccaugagcaacgggaacaugaacacgaugggccacaugauggagaugaugggcucccgccaggaccagaccccgcaccaccacaugcacagccacccccaccagcaccagacccucccgccccaccaccccuacccccaccagcaccagcaccccgcccaccacccgcacccccagccccaccaccagcagaaccacccccaccaccacucccacagccaccuccacgcgcacccggcccaccaccagaccagcccccacccgccccugcacacggggaaccaggcccaggucucccccgccacccagcagaugcagcccacccagaccauccagccgccccagcccacgggcgggcggcgccggcgcgugguggacgaggaccccgacgagcggcgccggaaguuccuggagcgcaaccgggccgcggccacccgcugccgccagaagcggaaggucugggugaugucccuggagaagaaggccgaggagcugacccagaccaacaugcagcuccagaacgaggugagcaugcugaagaacgaggucgcccagcugaagcagcuccugcugacgcacaaggacugccccaucaccgccaugcagaaggagucccagggcuaccucagccccgaguccagcccgcccgcgagccccgugcccgccugcucccagcagcaggucauccagcacaacaccaucaccacgagcuccagcguguccgagguggugggcagcuccacccugagccagcugaccacccaccgcacggaccucaacccgauccuguga

SEQ ID NO: 8174 - RNA, 1527 nt, Artificial Sequence
  derived and/or modified sequence opt2 from CREB5__Homo_sapiens__CCDS5417.1
augaucuacgaggaguccaagaugaaccucgagcaggagcgccccuucgucugcuccgcccccggcugcucccagcgcuuccccaccgaggaccaccucaugauccaccgccacaagcacgagaugacccucaaguuccccuccaucaagaccgacaacaugcucuccgaccagacccccacccccacccgcuuccucaagaacugcgaggaggucggccucuucuccgagcucgacugcucccucgagcacgaguuccgcaaggcccaggaggaggaguccuccaagcgcaacaucuccaugcacaacgccgucggcggcgccaugaccggccccggcacccaccagcucuccuccgcccgccuccccaaccacgacaccaacgucgucauccagcaggccaugcccuccccccaguccuccuccgucaucacccaggcccccuccaccaaccgccagaucggccccguccccggcucccucuccucccuccuccaccuccacaaccgccagcgccagcccaugcccgccuccaugcccggcacccuccccaaccccaccaugcccggcuccuccgccguccucaugcccauggagcgccagauguccgucaacuccuccaucaugggcaugcagggccccaaccucuccaaccccugcgccuccccccagguccagcccaugcacuccgaggccaagaugcgccucaaggccgcccucacccaccaccccgccgccauguccaacggcaacaugaacaccaugggccacaugauggagaugaugggcucccgccaggaccagaccccccaccaccacaugcacucccacccccaccagcaccagacccuccccccccaccaccccuacccccaccagcaccagcaccccgcccaccacccccacccccagccccaccaccagcagaaccacccccaccaccacucccacucccaccuccacgcccaccccgcccaccaccagaccuccccccaccccccccuccacaccggcaaccaggcccaggucucccccgccacccagcagaugcagcccacccagaccauccagcccccccagcccaccggcggccgccgccgccgcgucgucgacgaggaccccgacgagcgccgccgcaaguuccucgagcgcaaccgcgccgccgccacccgcugccgccagaagcgcaaggucugggucaugucccucgagaagaaggccgaggagcucacccagaccaacaugcagcuccagaacgaggucuccaugcucaagaacgaggucgcccagcucaagcagcuccuccucacccacaaggacugccccaucaccgccaugcagaaggagucccagggcuaccucucccccgaguccuccccccccgccucccccguccccgccugcucccagcagcaggucauccagcacaacaccaucaccaccuccuccuccgucuccgaggucgucggcuccuccacccucucccagcucaccacccaccgcaccgaccucaaccccauccucuga

SEQ ID NO: 8175 - RNA, 1527 nt, Artificial Sequence
  derived and/or modified sequence opt3 from CREB5__Homo_sapiens__CCDS5417.1
augaucuacgaggaaagcaagaugaaccuggagcaggaaagacccuucgugugcuccgccccuggcuguucucaaagguuuccaaccgaggaccaccucaugauucaucggcacaaacaugaaaugacacuuaaguucccgucaauaaaaacugauaauaugcugagugaccagacgcccaccccuacacgcuuuuugaagaacugcgaggaggucggguuauucagcgaacuggauuguucccuagagcacgaauuucgaaaagcucaggaggaggaaucuucgaagcguaauaucucaaugcauaacgcaguuggaggugccaugacuggcccagggacccaccagcucagcagugcgagacugcccaaucacgacacaaacgugguaauucaacaggcuaugccuuccccacagucuagcuccgugaucacccaggcccccucaacuaauaggcaaauuggaccugucccaggcagucuuagcucucuguugcaucuccacaaccggcagcgccagccgaugcccgcauccaugccugguacacugccaaaucccaccaugccugggucaagcgccgugcugaugccaauggagagacagaugaguguuaacucuuccaucaugggaaugcaaggccccaaucucagcaacccgugcgcuucgccucaggugcagcccaugcauucugaagcaaagaugagguuaaaagccgcucugacgcaccacccagccgcgauguccaauggcaacaugaauacuauggggcauaugauggagaugaugggaucacggcaagaucagaccccucaccaucacaugcauagucacccccaccagcaucagacacuuccaccccaccauccuuauccacaccaacaccagcauccggcacaccauccccacccucagccacaucaccagcaaaaccacccccaucaccauagccacucccauuugcacgcccacccugcucaucaccagacuucuccacaucccccgcugcacaccgguaaccaggcccaggucagcccugcaacacaacagaugcagccaacccagacgauacaacccccucagcccacuggcgggcgccgaagaagggugguagacgaagauccagacgagcggcgucgcaaguuccuagagagaaauagggcugccgcgacacggugucgacagaaacgcaagguuugggugaugucacucgagaaaaaggccgaagaacugacccaaacuaacaugcagcuucagaaugaggucaguaugcugaagaacgaaguggcacaguugaaacaacuccuguuaacacacaaggauugcccuaucaccgcuaugcagaaagagucccagggauaccugagccccgagucuucaccaccggccaguccugugcccgcuuguagccagcaacaggucauucagcauaauacgaucaccacauccucuucgguuagcgaagugguaggcuccucaacucucagucagcuuaccacacacagaacugaccugaacccaauuuuguga

SEQ ID NO: 8176 - RNA, 1527 nt, Artificial Sequence
  derived and/or modified sequence opt4 from CREB5__Homo_sapiens__CCDS5417.1
augaucuacgaggagagcaagaugaaccuggagcaggagagacccuucgugugcagcgcccccggcugcagccagagauuccccaccgaggaccaccugaugauccacagacacaagcacgagaugacccugaaguuccccagcaucaagaccgacaacaugcugagcgaccagacccccacccccaccagauuccugaagaacugcgaggaggugggccuguucagcgagcuggacugcagccuggagcacgaguucagaaaggcccaggaggaggagagcagcaagagaaacaucagcaugcacaacgccgugggcggcgccaugaccggccccggcacccaccagcugagcagcgccagacugcccaaccacgacaccaacguggugauccagcaggccaugcccagcccccagagcagcagcgugaucacccaggcccccagcaccaacagacagaucggccccgugcccggcagccugagcagccugcugcaccugcacaacagacagagacagcccaugcccgccagcaugcccggcacccugcccaaccccaccaugcccggcagcagcgccgugcugaugcccauggagagacagaugagcgugaacagcagcaucaugggcaugcagggccccaaccugagcaaccccugcgccagcccccaggugcagcccaugcacagcgaggccaagaugagacugaaggccgcccugacccaccaccccgccgccaugagcaacggcaacaugaacaccaugggccacaugauggagaugaugggcagcagacaggaccagaccccccaccaccacaugcacagccacccccaccagcaccagacccugcccccccaccaccccuacccccaccagcaccagcaccccgcccaccacccccacccccagccccaccaccagcagaaccacccccaccaccacagccacagccaccugcacgcccaccccgcccaccaccagaccagcccccaccccccccugcacaccggcaaccaggcccaggugagccccgccacccagcagaugcagcccacccagaccauccagcccccccagcccaccggcggcagaagaagaagagugguggacgaggaccccgacgagagaagaagaaaguuccuggagagaaacagagccgccgccaccagaugcagacagaagagaaaggugugggugaugagccuggagaagaaggccgaggagcugacccagaccaacaugcagcugcagaacgaggugagcaugcugaagaacgagguggcccagcugaagcagcugcugcugacccacaaggacugccccaucaccgccaugcagaaggagagccagggcuaccugagccccgagagcagcccccccgccagccccgugcccgccugcagccagcagcaggugauccagcacaacaccaucaccaccagcagcagcgugagcgagguggugggcagcagcacccugagccagcugaccacccacagaaccgaccugaaccccauccuguga

SEQ ID NO: 8177 - RNA, 1527 nt, Artificial Sequence
  derived and/or modified sequence opt5 from CREB5__Homo_sapiens__CCDS5417.1
augaucuacgaggaaagcaagaugaaccuggagcaggaaagacccuucgugugcuccgccccuggcuguucucaacgguuuccgaccgaggaccaccucaugauucaucgccacaaacaugaaaugacacugaaguuccccagcaucaaaacggauaauaugcuuuccgaccagaccccuacacccaccagauuucugaagaacugcgaggaggucggacucuucucugaacuggauuguagccuugagcacgaauuucggaaagcucaggaggaggaauccucuaagcgcaauauuagcaugcauaacgccguugggggcgcgaugacagggccuggaacccaccagcuguccagcgcuagacuccccaaucacgacacaaacguggugauccaacaggccaugccuucuccgcaguccagcucugucauuacccaggcccccuccacgaaucggcaaaucggcccugugcccgggagccugucuucccugcuccaucugcacaaccgccagagacagccuaugcccgcuagcaugccgggaacccuuccuaaucccacaaugccuggcuccucugccguucugaugcccauggagcggcagaugagcgugaacuccagcaucaugggcaugcaagggcccaaucucucuaacccuugcgcuuccccgcagguccagcccaugcauagcgaagccaagaugcgccugaaagcggcccuuacccaccacccugcugccaugucuaauggaaacaugaauacaaugggccauaugauggagaugauggggagcagacaagaucagacgccccaccaucacaugcauucccacccucaccagcaucagacccugcccccgcaccauccuuauccccaccaacaccagcauccugcucaccauccccacccucagccccaucaccagcaaaaccacccgcaucaccauucucacagccaucuccacgcccacccugcgcaucaccagacaagcccccaucccccucugcacaccggaaaccaggcccagguguccccggcuacacaacagaugcagcccacccagaccauucaaccuccccagccuacaggcgggcggcgcagacggguuguggacgaagaucccgacgagcgcagacggaaguuccuggagagaaaucgcgccgcugccacgcgguguagacagaaacgcaaggucugggugaugucucucgagaaaaaggccgaagaacugacccaaacaaacaugcagcuucagaaugagguguccaugcugaagaacgaagucgcucagcucaaacaacugcuucugacccacaaggauugcccuaucacagcgaugcagaaagagagccagggauaccucucucccgaguccagcccgccugccucccccguuccugcuuguucucagcaacaggugauucagcauaauaccaucacgacaagcuccucugugagcgaagucgugggcuccagcacccugucucagcugaccacacaccggaccgaccucaaccccauucuguga

SEQ ID NO: 8178 - protein, 693 aa, Artificial Sequence
  CRTC2__Homo_sapiens__Q53ET0
MATSGANGPGSATASASNPRKFSEKIALQKQRQAEETAAFEEVMMDIGSTRLQAQKLRLAYTRSSHYGGSLPNVNQIGSGLAEFQSPLHSPLDSSRSTRHHGLVERVQRDPRRMVSPLRRYTRHIDSSPYSPAYLSPPPESSWRRTMAWGNFPAEKGQLFRLPSALNRTSSDSALHTSVMNPSPQDTYPGPTPPSILPSRRGGILDGEMDPKVPAIEENLLDDKHLLKPWDAKKLSSSSSRPRSCEVPGINIFPSPDQPANVPVLPPAMNTGGSLPDLTNLHFPPPLPTPLDPEETAYPSLSGGNSTSNLTHTMTHLGISRGMGLGPGYDAPGLHSPLSHPSLQSSLSNPNLQASLSSPQPQLQGSHSHPSLPASSLARHVLPTTSLGHPSLSAPALSSSSSSSSTSSPVLGAPSYPASTPGASPHHRRVPLSPLSLLAGPADARRSQQQLPKQFSPTMSPTLSSITQGVPLDTSKLSTDQRLPPYPYSSPSLVLPTQPHTPKSLQQPGLPSQSCSVQSSGGQPPGRQSHYGTPYPPGPSGHGQQSYHRPMSDFNLGNLEQFSMESPSASLVLDPPGFSEGPGFLGGEGPMGGPQDPHTFNHQNLTHCSRHGSGPNIILTGDSSPGFSKEIAAALAGVPGFEVSAAGLELGLGLEDELRMEPLGLEGLNMLSDPCALLPDPAVEESFRSDRLQ

SEQ ID NO: 8179 - RNA, 2082 nt, Artificial Sequence
  CRTC2__Homo_sapiens__CCDS30875.1
auggcgacgucgggggcgaacgggccugguucggccacggccucggcuuccaauccgcgcaaauuuagugagaagauugcgcugcagaagcagcgucaggccgaggagacggcggccuucgaggaggugaugauggacaucggcuccacccgguuacaggcccaaaaacugcgacuggcauacacaaggagcucucauuauggugggucucugcccaauguuaaccagauuggcucuggccuggccgaguuccagagcccccuccacucaccuuuggauucaucucggagcacucggcaccaugggcugguggaacgggugcagcgagauccucgaagaaugguguccccacuucgccgauacacccgccacauugacagcucucccuauaguccugccuacuuaucuccucccccagagucuagcuggcgaaggacgauggccuggggcaauuucccugcagagaaggggcaguuguuucgacuaccaucugcacuuaacaggacaagcucugacucugcccuucauacaagugugaugaaccccaguccccaggauaccuacccaggccccacaccucccagcauccugcccagccgacguggggguauucuggauggugaaauggaccccaaaguaccugcuauugaggagaacuugcuagaugacaagcauuugcugaagccaugggaugcuaagaagcuauccucauccucuucccgaccucgguccugugaagucccuggaauuaacaucuuuccaucuccugaccagccugccaaugugccuguccucccaccugccaugaacacggggggcucccuaccugaccucaccaaccugcacuuucccccaccacugcccaccccccuggacccugaagagacagccuacccuagccugagugggggcaacaguaccuccaauuugacccacaccaugacucaccugggcaucagcaggggcaugggccugggcccaggcuaugaugcaccaggacuucauucaccucucagccacccaucccugcaguccucccuaagcaaucccaaccuccaggcuucccugagcaguccucagccccagcuucagggcucccacagccaccccucucugccugccuccuccuuggcccgccauguacugcccaccaccucccugggccaccccucacucagugcuccggcucucuccuccuccucuuccuccuccuccacuucaucuccuguuuugggcgcccccucuuacccugcuucuaccccuggggccuccccccaccaccgccgugugccccucagcccccugaguuugcucgcgggcccagccgacgccagaaggucccaacagcagcugcccaaacaguuuucgccaacaaugucacccaccuugucuuccaucacucagggcgucccccuggauaccaguaaacuguccacugaccagcgguuacccccauacccauacagcuccccaagucugguucugccuacccagccccacaccccaaagucucuacagcagccagggcugcccucucagucuuguucagugcaguccucaggugggcagcccccaggcaggcagucucauuaugggacaccguacccaccugggcccagugggcaugggcaacagucuuaccaccggccaaugagugacuucaaccuggggaaucuggagcaguucagcauggagagcccaucagccagccuggugcuggaucccccuggcuuuucugaagggccuggauuuuuagggggugaggggccaauggguggcccccaggauccccacaccuucaaccaccagaacuugacccacuguucccgccauggcucagggccuaacaucauccucacaggggacuccucuccagguuucucuaaggagauugcagcagcccuggccggagugccuggcuuugaggugucagcagcuggauuggagcuagggcuugggcuagaagaugagcugcgcauggagccacugggccuggaagggcuaaacaugcugagugaccccugugcccugcugccugauccugcuguggaggagucauuccgcagugaccggcuccaauga

SEQ ID NO: 8180 - RNA, 2082 nt, Artificial Sequence
  derived and/or modified sequence opt1 from CRTC2__Homo_sapiens__CCDS30875.1
auggccaccagcggcgccaacgggcccggcuccgcgaccgccagcgccuccaacccgcgcaaguucagcgagaagaucgcccugcagaagcagcggcaggccgaggagacggcggccuucgaggaggugaugauggacaucggguccacccgccuccaggcccagaagcugcggcuggccuacacccgcagcucccacuacggcgggagccuccccaacgucaaccagaucggcuccggccuggcggaguuccagagcccccugcacagcccccucgacuccucccggagcacccgccaccacgggcugguggagcgggugcagcgcgacccgcggcgcauggucagcccccugcggcgcuacacgcggcacaucgacuccucccccuacagccccgccuaccucuccccgccgcccgagagcagcuggcgccggaccauggccuggggcaacuuccccgccgagaaggggcagcuguuccgccugcccuccgcccucaaccggaccagcuccgacagcgcgcugcacaccuccgugaugaaccccagcccccaggacacguaccccggcccgaccccgcccuccauccugcccagccgccgcgggggcauccucgacggcgagauggaccccaaggugcccgccaucgaggagaaccugcuggacgacaagcaccuccugaagcccugggacgccaagaagcuguccagcuccagcucccggccccggagcugcgaggucccggggaucaacaucuuccccucccccgaccagcccgccaacgugccggugcucccgcccgccaugaacaccggcgggagccugcccgaccugaccaaccuccacuucccgccgccccugcccacgccccuggaccccgaggagaccgcguaccccucccucagcggcggcaacuccaccagcaaccugacccacacgaugacccaccuggggaucagccgcggcauggggcucggccccggguacgacgcccccggccugcacagcccccugucccaccccucccuccagagcucccugagcaacccgaaccugcaggccucccucagcagcccccagccccagcugcagggcucccacucccaccccagccugccggccuccagccucgcccgccacguccugcccaccaccucccuggggcaccccagccucuccgcgcccgcccugagcagcuccagcuccagcuccagcacguccagcccggugcugggcgcccccuccuaccccgccagcacccccggggccuccccgcaccaccggcgcgugccccucagcccccugucccugcucgcgggcccggccgacgcccggcgcagccagcagcagcugcccaagcaguucucccccaccaugagccccacccuguccagcaucacgcagggggucccgcuggacaccuccaagcucagcaccgaccagcggcugccgcccuaccccuacagcucccccagccuggugcuccccacccagccccacacgcccaagucccugcagcagccgggccugcccagccaguccugcagcgugcaguccagcggcgggcagccgcccggccgccagucccacuacgggacccccuacccgcccggccccagcgggcacggccagcaguccuaccaccggcccaugagcgacuucaaccucggcaaccuggagcaguucuccauggagagccccuccgccagccugguccucgacccgcccggguucuccgagggccccggguuccugggcggcgaggggcccaugggcgggccccaggacccccacaccuucaaccaccagaaccugacccacugcagccgccacggcuccgggccgaacaucauccucacgggcgacagcagccccggcuucuccaaggagaucgcggccgcccuggccggggugcccggcuucgaggugagcgccgcggggcuggagcucggccuggggcuggaggacgagcuccggauggagccgcugggccuggagggccucaacaugcuguccgaccccugcgcccugcuccccgaccccgccgucgaggagagcuuccgcuccgaccggcugcaguga

SEQ ID NO: 8181 - RNA, 2082 nt, Artificial Sequence
  derived and/or modified sequence opt2 from CRTC2__Homo_sapiens__CCDS30875.1
auggccaccuccggcgccaacggccccggcuccgccaccgccuccgccuccaacccccgcaaguucuccgagaagaucgcccuccagaagcagcgccaggccgaggagaccgccgccuucgaggaggucaugauggacaucggcuccacccgccuccaggcccagaagcuccgccucgccuacacccgcuccucccacuacggcggcucccuccccaacgucaaccagaucggcuccggccucgccgaguuccaguccccccuccacuccccccucgacuccucccgcuccacccgccaccacggccucgucgagcgcguccagcgcgacccccgccgcauggucuccccccuccgccgcuacacccgccacaucgacuccucccccuacucccccgccuaccucucccccccccccgaguccuccuggcgccgcaccauggccuggggcaacuuccccgccgagaagggccagcucuuccgccuccccuccgcccucaaccgcaccuccuccgacuccgcccuccacaccuccgucaugaaccccuccccccaggacaccuaccccggccccaccccccccuccauccuccccucccgccgcggcggcauccucgacggcgagauggaccccaagguccccgccaucgaggagaaccuccucgacgacaagcaccuccucaagcccugggacgccaagaagcucuccuccuccuccucccgcccccgcuccugcgagguccccggcaucaacaucuuccccucccccgaccagcccgccaacguccccguccucccccccgccaugaacaccggcggcucccuccccgaccucaccaaccuccacuucccccccccccuccccaccccccucgaccccgaggagaccgccuaccccucccucuccggcggcaacuccaccuccaaccucacccacaccaugacccaccucggcaucucccgcggcaugggccucggccccggcuacgacgcccccggccuccacuccccccucucccaccccucccuccaguccucccucuccaaccccaaccuccaggccucccucuccuccccccagccccagcuccagggcucccacucccaccccucccuccccgccuccucccucgcccgccacguccuccccaccaccucccucggccaccccucccucuccgcccccgcccucuccuccuccuccuccuccuccuccaccuccucccccguccucggcgcccccuccuaccccgccuccacccccggcgccuccccccaccaccgccgcgucccccucuccccccucucccuccucgccggccccgccgacgcccgccgcucccagcagcagcuccccaagcaguucucccccaccaugucccccacccucuccuccaucacccagggcgucccccucgacaccuccaagcucuccaccgaccagcgccucccccccuaccccuacuccucccccucccucguccuccccacccagccccacacccccaagucccuccagcagcccggccuccccucccaguccugcuccguccaguccuccggcggccagccccccggccgccagucccacuacggcacccccuacccccccggccccuccggccacggccagcaguccuaccaccgccccauguccgacuucaaccucggcaaccucgagcaguucuccauggagucccccuccgccucccucguccucgacccccccggcuucuccgagggccccggcuuccucggcggcgagggccccaugggcggcccccaggacccccacaccuucaaccaccagaaccucacccacugcucccgccacggcuccggccccaacaucauccucaccggcgacuccucccccggcuucuccaaggagaucgccgccgcccucgccggcguccccggcuucgaggucuccgccgccggccucgagcucggccucggccucgaggacgagcuccgcauggagccccucggccucgagggccucaacaugcucuccgaccccugcgcccuccuccccgaccccgccgucgaggaguccuuccgcuccgaccgccuccaguga

SEQ ID NO: 8182 - RNA, 2082 nt, Artificial Sequence
  derived and/or modified sequence opt3 from CRTC2__Homo_sapiens__CCDS30875.1
auggccaccagcggcgcuaacgggcccggauccgcaacagccucugcgucaaauccuagaaaguucagugagaaaaucgcucugcagaagcaaaggcaggccgaagagacugcagccuuugaagaggugaugauggacauugguagcacgcggcuccaggcucagaaacuucgccuggcauacacccgauccucucacuauggcgggucguugccaaacgucaaucaaauaggaucaggcuuagccgaguuccagagcccgcugcauaguccccuagauuccucucguagcacaagacaccauggucucguugaaagggugcagcgggacccucgcagaaugguauccccacugaggcgguacacucgccacaucgauucaagucccuauagcccugcuuaccuuucuccacccccugaguccucauggcgaagaaccauggccugggggaacuuuccagcggaaaagggacagcuguucagguugccgagcgcacucaaucggacaaguucugacuccgcccugcauaccagcgugaugaaccccucgccucaagauacuuauccaggccccacaccuccaucuauucugcccucccgucgcggcgggauccucgacggagagauggauccgaaagucccugcuauugaagagaauuuacuggacgauaagcaccuuuugaagcccugggacgccaaaaagcugucaaguagcuccucuagaccaaggagcugcgaggugccugguaucaacauauuucccucaccagaucagcccgcaaauguuccugugcuaccaccggcuaugaacaccggcgggagucuccccgaccugacgaaucuucacuucccuccaccccugccuacuccauuggaucccgaagagaccgccuacccgucccucagcggaggcaacucuacaucaaaucugacucauaccaugacacacuuagguaucagucgggggaugggacugggcccuggcuaugacgcgccagggcuccauagcccccuuucccacccuucucugcagucgagcuuguccaaccccaaucuacaggccucacugaguucuccacaaccucagcuccagggaagccacucccaucccucacugccagcaagcucucuugcucgacacguccugccgaccacguccuugggucauccuagucucagcgcccccgcucugucuuccucaaguagcucguccucuacuagcucaccaguguuaggcgcccccaguuacccugcauccacaccaggggccucuccccaccaucgcagaguaccucugagcccgcuaucccuccuggcuggaccagcggacgcaaggcggucacaacagcagcuucccaaacaguuuagcccuaccaugaguccaacuuugucuuccauuacacaaggcguuccccuggauaccagcaagcucucgacggaccagcgccugccuccguaccccuauucaucuccaagucuugugcugccuacccagccccacacaccaaaauccuugcagcaaccuggucuccccagccagucuuguagcguccaguccucagggggccagccaccgggaagacaaagucacuacggcacuccuuaucccccagggcccagcggacauggucagcagucuuaccacaggccuauguccgauuucaaccugggcaacuuagaacaguuuucaauggagaguccaagcgccucccuggugcuagaucccccuggguucucugaaggaccgggcuuucucgguggggagggcccaaugggaggcccccaagacccucauaccuucaaucaccagaaccugacacacugcucgcgucaugggagcggacccaauaucauucuuacuggugacucauccccaggcuuuaguaaggagaucgcugccgcauuggccggggugccuggauucgaagucucugcugccggccuggagcucggucugggguuagaagaugagcugcggauggaaccccuuggcuuggagggacucaacaugcugagcgacccaugugcacuacugccugauccggcgguugaggaauccuuccgaucagacagacuccaguga

SEQ ID NO: 8183 - RNA, 2082 nt, Artificial Sequence
  derived and/or modified sequence opt4 from CRTC2__Homo_sapiens__CCDS30875.1
auggccaccagcggcgccaacggccccggcagcgccaccgccagcgccagcaaccccagaaaguucagcgagaagaucgcccugcagaagcagagacaggccgaggagaccgccgccuucgaggaggugaugauggacaucggcagcaccagacugcaggcccagaagcugagacuggccuacaccagaagcagccacuacggcggcagccugcccaacgugaaccagaucggcagcggccuggccgaguuccagagcccccugcacagcccccuggacagcagcagaagcaccagacaccacggccugguggagagagugcagagagaccccagaagaauggugagcccccugagaagauacaccagacacaucgacagcagccccuacagccccgccuaccugagccccccccccgagagcagcuggagaagaaccauggccuggggcaacuuccccgccgagaagggccagcuguucagacugcccagcgcccugaacagaaccagcagcgacagcgcccugcacaccagcgugaugaaccccagcccccaggacaccuaccccggccccaccccccccagcauccugcccagcagaagaggcggcauccuggacggcgagauggaccccaaggugcccgccaucgaggagaaccugcuggacgacaagcaccugcugaagcccugggacgccaagaagcugagcagcagcagcagcagacccagaagcugcgaggugcccggcaucaacaucuuccccagccccgaccagcccgccaacgugcccgugcugccccccgccaugaacaccggcggcagccugcccgaccugaccaaccugcacuucccccccccccugcccaccccccuggaccccgaggagaccgccuaccccagccugagcggcggcaacagcaccagcaaccugacccacaccaugacccaccugggcaucagcagaggcaugggccugggccccggcuacgacgcccccggccugcacagcccccugagccaccccagccugcagagcagccugagcaaccccaaccugcaggccagccugagcagcccccagccccagcugcagggcagccacagccaccccagccugcccgccagcagccuggccagacacgugcugcccaccaccagccugggccaccccagccugagcgcccccgcccugagcagcagcagcagcagcagcagcaccagcagccccgugcugggcgcccccagcuaccccgccagcacccccggcgccagcccccaccacagaagagugccccugagcccccugagccugcuggccggccccgccgacgccagaagaagccagcagcagcugcccaagcaguucagccccaccaugagccccacccugagcagcaucacccagggcgugccccuggacaccagcaagcugagcaccgaccagagacugccccccuaccccuacagcagccccagccuggugcugcccacccagccccacacccccaagagccugcagcagcccggccugcccagccagagcugcagcgugcagagcagcggcggccagccccccggcagacagagccacuacggcacccccuacccccccggccccagcggccacggccagcagagcuaccacagacccaugagcgacuucaaccugggcaaccuggagcaguucagcauggagagccccagcgccagccuggugcuggacccccccggcuucagcgagggccccggcuuccugggcggcgagggccccaugggcggcccccaggacccccacaccuucaaccaccagaaccugacccacugcagcagacacggcagcggccccaacaucauccugaccggcgacagcagccccggcuucagcaaggagaucgccgccgcccuggccggcgugcccggcuucgaggugagcgccgccggccuggagcugggccugggccuggaggacgagcugagaauggagccccugggccuggagggccugaacaugcugagcgaccccugcgcccugcugcccgaccccgccguggaggagagcuucagaagcgacagacugcaguga

SEQ ID NO: 8184 - RNA, 2082 nt, Artificial Sequence
  derived and/or modified sequence opt5 from CRTC2__Homo_sapiens__CCDS30875.1
auggccaccagcggcgcuaacgggcccggauccgccacagcgucugcuagcaauccuagaaaguucuccgagaaaaucgcccugcagaagcaacggcaggccgaagagacggcugccuuugaagaggugaugauggacauuggcucuacccgccuccaggcucagaaacugagacuugccuacacacggagcucccacuaugggggaucucugccgaacgucaaucaaaucggcagcgggcucgcggaguuccagagcccccugcauuccccucuugauucuucccgcagcaccagacaccauggacugguugaacgggugcagcgcgaccccagacggauggugucuccucuccgcagauacacacggcacauugauuccagccccuauucuccugccuaccuguccccgcccccugagagcuccuggcgcagaaccauggcuuggggcaacuuucccgccgaaaagggccagcuguuccggcucccuucugcucugaaucgcacaagcuccgacagcgcccuucauaccucugucaugaaccccuccccgcaagauacguauccugggcccaccccucccagcauccugcccucuagacggggaggcauucucgacggggagauggauccuaaagugccggcgaucgaagagaaucugcuugacgauaagcaucugcucaagcccugggacgccaaaaagcugagcuccucuagcuccagaccucgcagcugcgagguucccggaaucaacauuuuuccuucucccgaucagccggcuaaugugccuguccugcccccugccaugaacacaggcgggucccuccccgaccugaccaaucuucacuucccucccccgcugccuacaccccucgaucccgaagagaccgcuuacccuagccugucuggaggcaacuccacgagcaaucuuacacacaccaugacacaccugggcaucucccgggggaugggacucggcccgggguaugacgcccccggacugcauucuccucugagccaccccucccuccagucuagccuguccaacccuaaucuucaggccagccugucuagcccccaaccucagcuccagggcucccacucucaucccucccugccggcuagcucucuugcgagacacgugcugccuaccaccagccucgggcaucccucccugagcgccccugcucugucuuccagcuccucuagcuccucuacaagcucccccguucucggagccccgucuuacccugccagcacgcccggcgcuuccccucaccaucgccgggugccccugagcccccuuucucugcucgccggcccugcggacgcuagacgcucccaacagcagcugccgaaacaguuuagccccaccaugucuccuacacuguccagcauuacccaaggggucccccuugauacaucuaagcucuccaccgaccagcggcugccucccuacccuuauagcuccccgagccuggugcuccccacgcagccucacacacccaaaucucugcagcaaccuggacuucccagccaguccuguucugugcagagcuccggcgggcagccgccuggaagacaaucucacuacggcacccccuaucccccugggcccagcggccauggacagcaguccuaccaccgcccuaugucugauuucaaccugggcaaccucgaacaguuuagcauggaguccccgagcgccucucugguccuggaucccccuggguucuccgaaggacccggcuuucuugggggagagggcccuaugggcgggccccaagacccgcauaccuucaaucaccagaaccucacacacugcagccggcauggaucuggcccuaauaucauucugaccggggacuccagccccggauuuuccaaggagaucgccgcugcccuggcuggcguuccuggguucgaagugucugccgcgggacucgagcugggccuugggcuggaagaugagcucagaauggaaccccugggccuggagggacuuaacaugcucagcgacccuugugcccugcugcccgauccggcuguggaggaauccuuccgcagcgaccggcuccaguga

SEQ ID NO: 8185 - protein, 358 aa, Artificial Sequence
  DJB11__Homo_sapiens__Q9UBS4
MAPQNLSTFCLLLLYLIGAVIAGRDFYKILGVPRSASIKDIKKAYRKLALQLHPDRNPDDPQAQEKFQDLGAAYEVLSDSEKRKQYDTYGEEGLKDGHQSSHGDIFSHFFGDFGFMFGGTPRQQDRNIPRGSDIIVDLEVTLEEVYAGNFVEVVRNKPVARQAPGKRKCNCRQEMRTTQLGPGRFQMTQEVVCDECPNVKLVNEERTLEVEIEPGVRDGMEYPFIGEGEPHVDGEPGDLRFRIKVVKHPIFERRGDDLYTNVTISLVESLVGFEMDITHLDGHKVHISRDKITRPGAKLWKKGEGLPNFDNNNIKGSLIITFDVDFPKEQLTEEAREGIKQLLKQGSVQKVYNGLQGY

SEQ ID NO: 8186 - RNA, 1077 nt, Artificial Sequence
  DJB11__Homo_sapiens__AAF61711
auggcuccgcagaaccugagcaccuuuugccuguugcugcuauaccucaucggggcggugauugccggacgagauuucuauaagaucuugggggugccucgaagugccucuauaaaggauauuaaaaaggccuauaggaaacuagcccugcagcuucaucccgaccggaacccugaugauccacaagcccaggagaaauuccaggaucugggugcugcuuaugagguucugucagauagugagaaacggaaacaguacgauacuuauggugaagaaggauuaaaagauggucaucagagcucccauggagacauuuuuucacacuucuuuggggauuuugguuucauguuuggaggaaccccucgucagcaagacagaaauauuccaagaggaagugauauuauuguagaucuagaagucacuuuggaagaaguauaugcaggaaauuuuguggaaguaguuagaaacaaaccuguggcaaggcaggcuccuggcaaacggaagugcaauugucggcaagagaugcggaccacccagcugggcccugggcgcuuccaaaugacccaggagguggucugcgacgaaugcccuaaugucaaacuagugaaugaagaacgaacgcuggaaguagaaauagagccuggggugagagacggcauggaguaccccuuuauuggagaaggugagccucacguggauggggagccuggagauuuacgguuccgaaucaaaguugucaagcacccaauauuugaaaggagaggagaugauuuguacacaaaugugacaaucucauuaguugagucacugguuggcuuugagauggauauuacucacuuggauggucacaagguacauauuucccgggauaagaucaccaggccaggagcgaagcuauggaagaaaggggaagggcuccccaacuuugacaacaacaauaucaagggcucuuugauaaucacuuuugauguggauuuuccaaaagaacaguuaacagaggaagcgagagaagguaucaaacagcuacugaaacaagggucagugcagaagguauacaauggacugcaaggauauuga

SEQ ID NO: 8187 - RNA, 1077 nt, Artificial Sequence
  derived and/or modified sequence opt1 from DJB11__Homo_sapiens__AAF61711
auggcgccccagaaccugagcaccuucugccuccugcugcucuaccugaucggcgccgugaucgccgggcgcgacuucuacaagauccugggcgucccgcgguccgccagcaucaaggacaucaagaaggccuaccgcaagcucgcccugcagcugcaccccgaccggaaccccgacgacccccaggcccaggagaaguuccaggaccucggggcggccuacgaggugcuguccgacagcgagaagcgcaagcaguacgacaccuacggcgaggaggggcugaaggacggccaccaguccagccacggcgacaucuucucccacuucuucggggacuucggcuucauguucgggggcacgccgcggcagcaggaccgcaacaucccccgggggagcgacaucaucguggaccucgaggucacccuggaggagguguacgccggcaacuucguggaggucgugcgcaacaagcccguggcccggcaggcgcccggcaagcgcaagugcaacugccggcaggagaugcgcaccacccagcuggggccgggccgguuccagaugacgcaggaggucgugugcgacgagugccccaacgugaagcucgucaacgaggagcgcacccuggagguggagaucgagcccggggugcgggacggcauggaguaccccuucaucggcgagggggagccgcacgucgacggcgagcccggggaccugcgcuuccggaucaagguggugaagcaccccaucuucgagcgccggggcgacgaccucuacaccaacgucaccaucucccugguggagagccuggugggguucgagauggacaucacgcaccucgacggccacaagguccacaucucccgcgacaagaucacccggcccggcgccaagcuguggaagaagggggagggccugccgaacuucgacaacaacaacaucaaggggagccucaucaucaccuucgacguggacuuccccaaggagcagcugaccgaggaggcccgcgagggcaucaagcagcugcucaagcagggguccgugcagaaggucuacaacggccugcagggcuacuga

SEQ ID NO: 8188 - RNA, 1077 nt, Artificial Sequence
  derived and/or modified sequence opt2 from DJB11__Homo_sapiens__AAF61711
auggccccccagaaccucuccaccuucugccuccuccuccucuaccucaucggcgccgucaucgccggccgcgacuucuacaagauccucggcgucccccgcuccgccuccaucaaggacaucaagaaggccuaccgcaagcucgcccuccagcuccaccccgaccgcaaccccgacgacccccaggcccaggagaaguuccaggaccucggcgccgccuacgagguccucuccgacuccgagaagcgcaagcaguacgacaccuacggcgaggagggccucaaggacggccaccaguccucccacggcgacaucuucucccacuucuucggcgacuucggcuucauguucggcggcaccccccgccagcaggaccgcaacaucccccgcggcuccgacaucaucgucgaccucgaggucacccucgaggaggucuacgccggcaacuucgucgaggucguccgcaacaagcccgucgcccgccaggcccccggcaagcgcaagugcaacugccgccaggagaugcgcaccacccagcucggccccggccgcuuccagaugacccaggaggucgucugcgacgagugccccaacgucaagcucgucaacgaggagcgcacccucgaggucgagaucgagcccggcguccgcgacggcauggaguaccccuucaucggcgagggcgagccccacgucgacggcgagcccggcgaccuccgcuuccgcaucaaggucgucaagcaccccaucuucgagcgccgcggcgacgaccucuacaccaacgucaccaucucccucgucgagucccucgucggcuucgagauggacaucacccaccucgacggccacaagguccacaucucccgcgacaagaucacccgccccggcgccaagcucuggaagaagggcgagggccuccccaacuucgacaacaacaacaucaagggcucccucaucaucaccuucgacgucgacuuccccaaggagcagcucaccgaggaggcccgcgagggcaucaagcagcuccucaagcagggcuccguccagaaggucuacaacggccuccagggcuacuga

SEQ ID NO: 8189 - RNA, 1077 nt, Artificial Sequence
  derived and/or modified sequence opt3 from DJB11__Homo_sapiens__AAF61711
auggcuccccagaaccugagcaccuucugccuccuucuguuguacuuaaucggcgccgugauugcagggagagacuuuuauaagauacugggagucccuagguccgccucuaucaaagauauuaagaaagcguaccggaagcuagcucuccaacugcacccagaccgcaauccggaugacccccaggcccaggagaaauuccaggaucuuggugcagccuaugaaguucugucagacagugagaagcgaaagcaauacgauacauauggcgaagagggguugaaagacggacaucagagcucccacggcgauaucuuuucucauuucuuuggugacuucggguuuauguucggaggcacuccucgucagcaggauagaaacauuccaaggggcucggacaucauaguggaucucgaaguaacgcuggaggagguguacgcugggaauuuugucgaagugguucggaacaagcccguggcacgccaagccccuggaaaaagaaaguguaauugcaggcaggagaugcggaccacacagcuggguccaggccgcuuccagaugacucaagaagucgugugugacgagugccccaacguaaaacucguuaaugaggaacgaaccuuagagguggaaaucgagccuggggucagagacggaauggaauauccauuuauuggcgagggugagccgcacguggauggggaacccggagaccugagguuccggaucaagguggucaagcauccuauuuuugagcgucgcggcgaugaccuuuacacaaacguuaccaucucauugguggaaagccugguaggcuucgagauggauauaacucaccuagacgggcacaaagugcauauuaguagagauaagaucacaaggccaggagcuaaacucuggaagaaaggugaaggccugcccaauuucgacaacaauaacauuaaggggucccuuaucaucaccuuugaugucgacuucccuaaagagcagcugacggaggaagcccgggagggaauuaagcaguugcucaagcaaggcucugugcagaaaguuuacaauggucugcagggguauuga

SEQ ID NO: 8190 - RNA, 1077 nt, Artificial Sequence
  derived and/or modified sequence opt4 from DJB11__Homo_sapiens__AAF61711
auggccccccagaaccugagcaccuucugccugcugcugcuguaccugaucggcgccgugaucgccggcagagacuucuacaagauccugggcgugcccagaagcgccagcaucaaggacaucaagaaggccuacagaaagcuggcccugcagcugcaccccgacagaaaccccgacgacccccaggcccaggagaaguuccaggaccugggcgccgccuacgaggugcugagcgacagcgagaagagaaagcaguacgacaccuacggcgaggagggccugaaggacggccaccagagcagccacggcgacaucuucagccacuucuucggcgacuucggcuucauguucggcggcacccccagacagcaggacagaaacauccccagaggcagcgacaucaucguggaccuggaggugacccuggaggagguguacgccggcaacuucguggagguggugagaaacaagcccguggccagacaggcccccggcaagagaaagugcaacugcagacaggagaugagaaccacccagcugggccccggcagauuccagaugacccaggagguggugugcgacgagugccccaacgugaagcuggugaacgaggagagaacccuggagguggagaucgagcccggcgugagagacggcauggaguaccccuucaucggcgagggcgagccccacguggacggcgagcccggcgaccugagauucagaaucaagguggugaagcaccccaucuucgagagaagaggcgacgaccuguacaccaacgugaccaucagccugguggagagccuggugggcuucgagauggacaucacccaccuggacggccacaaggugcacaucagcagagacaagaucaccagacccggcgccaagcuguggaagaagggcgagggccugcccaacuucgacaacaacaacaucaagggcagccugaucaucaccuucgacguggacuuccccaaggagcagcugaccgaggaggccagagagggcaucaagcagcugcugaagcagggcagcgugcagaagguguacaacggccugcagggcuacuga

SEQ ID NO: 8191 - RNA, 1077 nt, Artificial Sequence
  derived and/or modified sequence opt5 from DJB11__Homo_sapiens__AAF61711
auggcuccccagaaccugagcaccuucugccuccugcuucuguaccucaucggcgccgugauugccgggagagacuuuuauaagauccugggagucccucgguccgcgucuauuaaagauaucaagaaggcuuaccgcaaacuugcccugcaacuccacccggacagaaaucccgaugacccucaggcccaggagaaauuccaggaucugggcgcugccuaugaaguucugagcgacuccgagaagcggaagcaauacgauacauauggggaagagggacucaaagacggccaucagucuagccacggggauaucuuuucccauuucuuuggagacuucggcuuuauguucggcgggacgccccgccagcaggauagaaacauuccucggggaucugacaucauuguggaucuggaagugacccuugaggaggucuacgcuggcaauuuuguggaaguugugcgcaacaagcccgucgccagacaagcgccugggaaacggaaguguaauugccgccaggagaugagaacaacccagcugggaccgggccgguuccagaugacacaagaagugguuugugacgagugccccaacgugaaacucgucaaugaggaacgcacccuggagguggaaaucgagccuggggugagagacggaauggaauaucccuuuauuggcgagggcgagccucacgucgauggggaacccggagaccuucgguuccgcaucaagguugugaagcauccgauuuuugagagacggggcgaugaccuguacacaaacgugaccaucagccucgucgaaucccuggugggguucgagauggauauuacgcaccuggacggacacaaaguucauaucagcagagauaagaucacccgcccuggcgccaaacucuggaagaaaggggaaggacugcccaauuucgacaacaauaacauuaagggcucucuuaucauuacauuugauguggacuucccuaaagagcagcugaccgaggaagcucgggagggcaucaagcagcuccugaagcaaggguccguccagaaaguguacaauggacuucagggcuauuga

SEQ ID NO: 8192 - protein, 316 aa, Artificial Sequence
  DJB13__Homo_sapiens__P59910
MGQDYYSVLGITRNSEDAQIKQAYRRLALKHHPLKSNEPSSAEIFRQIAEAYDVLSDPMKRGIYDKFGEEGLKGGIPLEFGSQTPWTTGYVFHGKPEKVFHEFFGGNNPFSEFFDAEGSEVDLNFGGLQGRGVKKQDPQVERDLYLSLEDLFFGCTKKIKISRRVLNEDGYSSTIKDKILTIDVKPGWRQGTRITFEKEGDQGPNIIPADIIFIVKEKLHPRFRRENDNLFFVNPIPLGKALTCCTVEVRTLDDRLLNIPINDIIHPKYFKKVPGEGMPLPEDPTKKGDLFIFFDIQFPTRLTPQKKQMLRQALLT

SEQ ID NO: 8193 - RNA, 951 nt, Artificial Sequence
  DJB13__Homo_sapiens__AAN15929
augggccaggauuauuacucugugcucgggaucacucgcaauucagaggaugcccagaucaagcaggcguaccgcagacucgcccuuaagcaccacccguugaagucaaaugagccgucuucagcagagauuuucaggcaaauagcagaggccuacgacgugcugagugaccccaugaagagaggcaucuacgacaaguuuggagaagagggccugaagggugggauuccuuuggaguuuggaucccagaccccauggacaacugguuacgucuuccacggcaaaccugaaaagguguuccacgaguucuuugguggaaacaaccccuucagugaguuuuuugaugcagaaggaagugagguagauuugaacuuuggggggcuccagggccgaggggucaagaagcaggacccccaagucgaacgggaucucuaccugucccuggaggacuuauucuuuggcugcaccaaaaaaauuaagaucuccagaagggugcugaacgaggauggguacuccuccaccaucaaggacaagauccugaccauugaugugaagcccgguuggaggcagggcacacgcaucaccuuugagaaggaaggggaccagggccccaacaucaucccagcagacaucauuuucaucguaaaggagaagcuacacccucgcuuccgcagggagaaugacaaccucuucuucgugaaccccaucccucuuggcaaggcucucaccugcugcacuguggaggugaggacccuagaugaccgucugcucaacauccccaucaaugacaucauccaccccaaauacuucaagaaggugccaggggaggggaugccauugccggaggaccccacuaagaaaggggaucucuucaucuucuucgacauccaguuccccacccgccucacaccccagaagaagcagaugcugcgccaggcauugcugacauga

SEQ ID NO: 8194 - RNA, 951 nt, Artificial Sequence
  derived and/or modified sequence opt1 from DJB13__Homo_sapiens__AAN15929
augggccaggacuacuacagcgugcuggggaucacccgcaacuccgaggacgcccagaucaagcaggccuaccggcgccucgcgcugaagcaccacccccucaagagcaacgagccguccagcgccgagaucuuccggcagaucgccgaggccuacgacguccuguccgaccccaugaagcgcggcaucuacgacaaguucggggaggagggccugaagggcgggaucccccuggaguucggcagccagacccccuggacgaccggguacguguuccacggcaagccggagaagguguuccacgaguucuucgggggcaacaaccccuucuccgaguucuucgacgccgaggggagcgaggucgaccucaacuucggcggccugcaggggcggggcgugaagaagcaggacccccagguggagcgcgaccuguaccucucccuggaggaccuguucuucgggugcaccaagaagaucaagaucagccggcgcguccucaacgaggacggcuacuccagcaccaucaaggacaagauccugacgaucgacgugaagcccggcuggcggcaggggacccgcaucaccuucgagaaggagggcgaccaggggccgaacaucauccccgcggacaucaucuucaucgugaaggagaagcugcacccccgguuccgccgggagaacgacaaccucuucuucgucaaccccaucccgcugggcaaggcccugaccugcugcacgguggaggugcgcacccucgacgaccggcugcugaacauccccaucaacgacaucauccaccccaaguacuucaagaagguccccggggagggcaugccgcuccccgaggaccccaccaagaagggcgaccuguucaucuucuucgacauccaguuccccacccgccugacgccgcagaagaagcagaugcuccggcaggcccugcugaccuga

SEQ ID NO: 8195 - RNA, 951 nt, Artificial Sequence
  derived and/or modified sequence opt2 from DJB13__Homo_sapiens__AAN15929
augggccaggacuacuacuccguccucggcaucacccgcaacuccgaggacgcccagaucaagcaggccuaccgccgccucgcccucaagcaccacccccucaaguccaacgagcccuccuccgccgagaucuuccgccagaucgccgaggccuacgacguccucuccgaccccaugaagcgcggcaucuacgacaaguucggcgaggagggccucaagggcggcaucccccucgaguucggcucccagacccccuggaccaccggcuacgucuuccacggcaagcccgagaaggucuuccacgaguucuucggcggcaacaaccccuucuccgaguucuucgacgccgagggcuccgaggucgaccucaacuucggcggccuccagggccgcggcgucaagaagcaggacccccaggucgagcgcgaccucuaccucucccucgaggaccucuucuucggcugcaccaagaagaucaagaucucccgccgcguccucaacgaggacggcuacuccuccaccaucaaggacaagauccucaccaucgacgucaagcccggcuggcgccagggcacccgcaucaccuucgagaaggagggcgaccagggccccaacaucauccccgccgacaucaucuucaucgucaaggagaagcuccacccccgcuuccgccgcgagaacgacaaccucuucuucgucaaccccaucccccucggcaaggcccucaccugcugcaccgucgagguccgcacccucgacgaccgccuccucaacauccccaucaacgacaucauccaccccaaguacuucaagaagguccccggcgagggcaugccccuccccgaggaccccaccaagaagggcgaccucuucaucuucuucgacauccaguuccccacccgccucaccccccagaagaagcagaugcuccgccaggcccuccucaccuga

SEQ ID NO: 8196 - RNA, 951 nt, Artificial Sequence
  derived and/or modified sequence opt3 from DJB13__Homo_sapiens__AAN15929
augggccaggacuacuauagcgugcuggggaucaccagaaacuccgaggaugcccaaauuaagcaggcuuacaggcggcucgcacuuaaacaccauccccugaagucuaaugaaccuucaagugccgagauauuccgccagaucgcggaggcuuaugacgucuugagcgauccaaugaaacgaggaauuuacgacaaguuuggugaagaaggcuuaaaagggggaaucccgcuggaguucggcucccagacacccuggacuacggguuauguuuuucacgggaagccugagaagguguuccaugaauuuuucggaggcaacaauccauuuucugaguucuuugaugccgaaggcucggagguagaccuaaacuucgggggacuccaaggucguggcgugaaaaagcaggauccccaggucgagagagaccuguaccuuucacuggaagauuuguuuuucgggugcaccaaaaagauuaaaaucagcaggcgggugcucaaugaggacggauauaguuccacaauaaaggauaagauccugacuauugacguuaaaccuggcuggcgccaggguaccagaaucacauuugaaaaggagggggaucaaggaccaaacauuauccccgcagacauaauuuucaucgugaaagaaaagcugcacccuagguuccggcgcgagaaugacaaccucuuuuucgucaauccaauuccguuaggcaaagcccugaccuguugcacuguggagguacgaacacuugaugacagauugcugaacauccccaucaaugauauuauacauccuaaguacuuuaaaaagguuccaggcgaagggaugccccuaccugaggacccaaccaagaaaggagaucucuucaucuuuuucgacauucaguuucccacgaggcugacuccgcagaagaaacagaugcuucggcaagcucuguugaccuga

SEQ ID NO: 8197 - RNA, 951 nt, Artificial Sequence
  derived and/or modified sequence opt4 from DJB13__Homo_sapiens__AAN15929
augggccaggacuacuacagcgugcugggcaucaccagaaacagcgaggacgcccagaucaagcaggccuacagaagacuggcccugaagcaccacccccugaagagcaacgagcccagcagcgccgagaucuucagacagaucgccgaggccuacgacgugcugagcgaccccaugaagagaggcaucuacgacaaguucggcgaggagggccugaagggcggcaucccccuggaguucggcagccagacccccuggaccaccggcuacguguuccacggcaagcccgagaagguguuccacgaguucuucggcggcaacaaccccuucagcgaguucuucgacgccgagggcagcgagguggaccugaacuucggcggccugcagggcagaggcgugaagaagcaggacccccagguggagagagaccuguaccugagccuggaggaccuguucuucggcugcaccaagaagaucaagaucagcagaagagugcugaacgaggacggcuacagcagcaccaucaaggacaagauccugaccaucgacgugaagcccggcuggagacagggcaccagaaucaccuucgagaaggagggcgaccagggccccaacaucauccccgccgacaucaucuucaucgugaaggagaagcugcaccccagauucagaagagagaacgacaaccuguucuucgugaaccccaucccccugggcaaggcccugaccugcugcaccguggaggugagaacccuggacgacagacugcugaacauccccaucaacgacaucauccaccccaaguacuucaagaaggugcccggcgagggcaugccccugcccgaggaccccaccaagaagggcgaccuguucaucuucuucgacauccaguuccccaccagacugaccccccagaagaagcagaugcugagacaggcccugcugaccuga

SEQ ID NO: 8198 - RNA, 951 nt, Artificial Sequence
  derived and/or modified sequence opt5 from DJB13__Homo_sapiens__AAN15929
augggccaggacuacuauagcgugcuggggaucaccagaaacuccgaggaugcccaaauuaagcaggcuuaccggcgccucgcccugaaacaccauccccuuaagucuaaugaaccuagcuccgcggagaucuucagacagauugcugaagccuaugacguccugucugauccgaugaaacggggaaucuacgacaaguuuggcgaggaagggcucaaaggaggcauuccccuggaguucgggagccagacaccuuggacgaccggauauguuuuucacggcaagcccgagaagguguuccaugaauuuuucggcgggaacaauccuuuuuccgaguucuuugaugccgaaggaucugagguggaccuuaacuucggcgggcugcaaggacgcggcgucaaaaagcaggauccccagguggagagagaccucuaccugagccuggaagaucucuuuuucgggugcaccaaaaagaucaaaaucucccggcgcguucugaaugaggacggauauagcucuacaauuaaggauaagauccuuacaauugacgugaaaccuggcuggagacagggcacccggaucacauuugaaaaggagggggaucaaggaccgaacauuauccccgcugacauuaucuucaucgucaaagaaaagcugcacccucgcuucagacgggagaaugacaaccucuuuuucgugaaucccauuccucugggcaaagcccuuaccuguugcacgguugaggugcgcacccuggaugacagacuccugaacauccccauuaaugauaucauucauccgaaguacuuuaaaaaggucccuggggaaggaaugccccugccugaggaccccacaaagaaaggcgaucucuucaucuuuuucgacauccaguuucccacccggcugacaccucagaagaaacagaugcuucgccaagcucugcucaccuga

SEQ ID NO: 8199 - protein, 379 aa, Artificial Sequence
  DJB14__Homo_sapiens__Q8TBM8
MEGNRDEAEKCVEIAREALNAGNREKAQRFLQKAEKLYPLPSARALLEIIMKNGSTAGNSPHCRKPSGSGDQSKPNCTKDSTSGSGEGGKGYTKDQVDGVLSINKCKNYYEVLGVTKDAGDEDLKKAYRKLALKFHPDKNHAPGATDAFKKIGNAYAVLSNPEKRKQYDLTGNEEQACNHQNNGRFNFHRGCEADITPEDLFNIFFGGGFPSGSVHSFSNGRAGYSQQHQHRHSGHEREEERGDGGFSVFIQLMPIIVLILVSLLSQLMVSNPPYSLYPRSGTGQTIKMQTENLGVVYYVNKDFKNEYKGMLLQKVEKSVEEDYVTNIRNNCWKERQQKTDMQYAAKVYRDDRLRRKADALSMDNCKELERLTSLYKGG

SEQ ID NO: 8200 - RNA, 1140 nt, Artificial Sequence
  DJB14__Homo_sapiens__AAH22248
auggaggggaacagggaugaggcugagaaaugugucgagaucgcccgggaggcccugaacgccggcaaccgcgagaaggcccagcgcuuccugcagaaggccgagaagcucuacccacugcccucggcccgcgcacuauuggaaauaauuaugaaaaauggaagcacggcuggaaauagcccucauugccgaaaaccaucagguaguggcgaucaaagcaagccuaauugcacaaaggacagcacaucugguaguggugaagguggaaaaggcuauaccaaagaccaaguagauggaguucucagcauaaacaaauguaaaaauuacuaugaaguacuuggaguuacgaaagaugcuggugaugaagauuugaaaaaagcuuauagaaagcuugcuuugaaguuucauccagacaaaaaccaugcaccuggagcaacagaugcuuuuaaaaagauuggaaaugcuuaugcuguuuuaaguaauccagaaaagcgaaaacaguaugaccucacgggcaaugaagaacaagcauguaaccaccaaaacaauggcagauuuaauuuccauagagguugugaagcugauauaacuccagaagacuuguuuaauauauuuuuuggggguggauuuccuucagguaguguacauucuuuuucaaauggaagagcugguuauagccaacaacaucagcaucgacauaguggacaugaaagagaagaggaaagaggagauggagguuuuucuguguuuauccagcugaugcccauaauuguauugauccucgugucauuauuaagccaguugauggucucuaauccuccuuauuccuuauaucccagaucuggaacugggcaaacuauuaaaaugcaaacagaaaacuuggguguuguuuauuaugucaacaaggacuucaaaaaugaauauaaaggaauguuauuacaaaagguagaaaagaguguggaggaagauuaugugacuaauauucgaaauaacugcuggaaagaaagacaacaaaaaacagauaugcaguaugcagcaaaaguauaccgugaugaucgacuccgaaggaaggcagaugccuugagcauggacaacuguaaagaauuagagcggcuuaccagucuuuauaaaggaggauga

SEQ ID NO: 8201 - RNA, 1140 nt, Artificial Sequence
  derived and/or modified sequence opt1 from DJB14__Homo_sapiens__AAH22248
auggagggcaaccgcgacgaggccgagaagugcguggagaucgcccgggaggcgcugaacgccgggaaccgcgagaaggcccagcgguuccuccagaaggccgagaagcuguacccccugccgagcgcccgcgcgcuccuggagaucaucaugaagaacggcuccaccgccgggaacagcccccacugccggaagcccuccggcagcggggaccaguccaagcccaacugcaccaaggacagcacguccggcagcggcgagggcgggaagggguacaccaaggaccaggucgacggcgugcuguccaucaacaagugcaagaacuacuacgaggugcucggggucaccaaggacgccggcgacgaggaccugaagaaggccuaccgcaagcuggcgcucaaguuccacccggacaagaaccacgcccccggcgccaccgacgccuucaagaagaucgggaacgccuacgcggugcugagcaaccccgagaagcggaagcaguacgaccugacgggcaacgaggagcaggccugcaaccaccagaacaacgggcgcuucaacuuccaccggggcugcgaggccgacaucacccccgaggaccucuucaacaucuucuucggcgggggcuucccguccgggagcgugcacuccuucagcaacggccgcgccggguacucccagcagcaccagcaccggcacagcggccacgagcgcgaggaggagcggggcgacgggggcuucuccgucuucauccagcugaugcccaucaucgugcugauccucgugagccugcugucccagcucauggucagcaacccgcccuacagccuguacccccgcuccgggaccggccagaccaucaagaugcagacggagaaccugggggugguguacuacgucaacaaggacuucaagaacgaguacaagggcaugcuccugcagaagguggagaaguccguggaggaggacuacgucaccaacauccggaacaacugcuggaaggagcgccagcagaagaccgacaugcaguacgccgcgaagguguaccgggacgaccgccugcggcgcaaggccgacgcccucagcauggacaacugcaaggagcuggagcggcugaccagccucuacaagggcggguga

SEQ ID NO: 8202 - RNA, 1140 nt, Artificial Sequence
  derived and/or modified sequence opt2 from DJB14__Homo_sapiens__AAH22248
auggagggcaaccgcgacgaggccgagaagugcgucgagaucgcccgcgaggcccucaacgccggcaaccgcgagaaggcccagcgcuuccuccagaaggccgagaagcucuacccccuccccuccgcccgcgcccuccucgagaucaucaugaagaacggcuccaccgccggcaacuccccccacugccgcaagcccuccggcuccggcgaccaguccaagcccaacugcaccaaggacuccaccuccggcuccggcgagggcggcaagggcuacaccaaggaccaggucgacggcguccucuccaucaacaagugcaagaacuacuacgagguccucggcgucaccaaggacgccggcgacgaggaccucaagaaggccuaccgcaagcucgcccucaaguuccaccccgacaagaaccacgcccccggcgccaccgacgccuucaagaagaucggcaacgccuacgccguccucuccaaccccgagaagcgcaagcaguacgaccucaccggcaacgaggagcaggccugcaaccaccagaacaacggccgcuucaacuuccaccgcggcugcgaggccgacaucacccccgaggaccucuucaacaucuucuucggcggcggcuuccccuccggcuccguccacuccuucuccaacggccgcgccggcuacucccagcagcaccagcaccgccacuccggccacgagcgcgaggaggagcgcggcgacggcggcuucuccgucuucauccagcucaugcccaucaucguccucauccucgucucccuccucucccagcucauggucuccaacccccccuacucccucuacccccgcuccggcaccggccagaccaucaagaugcagaccgagaaccucggcgucgucuacuacgucaacaaggacuucaagaacgaguacaagggcaugcuccuccagaaggucgagaaguccgucgaggaggacuacgucaccaacauccgcaacaacugcuggaaggagcgccagcagaagaccgacaugcaguacgccgccaaggucuaccgcgacgaccgccuccgccgcaaggccgacgcccucuccauggacaacugcaaggagcucgagcgccucaccucccucuacaagggcggcuga

SEQ ID NO: 8203 - RNA, 1140 nt, Artificial Sequence
  derived and/or modified sequence opt3 from DJB14__Homo_sapiens__AAH22248
auggagggcaacagagacgaagccgagaagugcguggaaaucgcuagggaggcacugaaugccgggaaccgggaaaaagcgcagcgcuuccuccaaaaggcugagaaacuuuacccccugccuagcgcccgagcauuguuagagauuauaaugaagaauggauccaccgccgguaacucuccacacugucguaaaccgucaggcaguggggaucagagcaagcccaauugcacaaaggacuccacuucuggaucgggcgaaggugggaaaggauauacgaaggaucaggucgacggcguucugucaaucaacaaauguaagaauuacuaugaggugcuaggcguaaccaaagaugcuggggacgaagaucucaagaaggcauacagaaaacuggcccuuaaguuucauccugacaaaaaccacgcuccaggagccacagaugcguucaagaaaauugguaaugcauaugccgugcugagcaaccccgagaagaggaaacaguacgacuugacuggcaaugaggaacaggcuugcaaccaucaaaauaacgggcgguuuaauuuccaccgcggaugugaggccgauaucaccccugaagaccucuuuaacauuuucuuuggcgguggguucccaaguggauccguccauucuuuuagcaacggcagagcaggcuauucccagcagcaccaacacaggcauucagggcacgagcgggaagaggagcgcggagaugguggcuucaguguguuuauccagcugaugcccauaaucguucugauucucgugagcuuacugucucagcuuauggucuccaauccuccauacucauuguacccgcgaagcgggacaggacagaccaucaagaugcaaacugaaaaccugggcgugguauauuacguuaauaaggacuucaaaaacgaguauaaggguaugcuacuccagaaaguggaaaagagugucgaggaagacuacgugacaaauauuagaaacaauugcuggaaagagaggcagcaaaagaccgauaugcaguaugcugccaagguguaccgggacgaucgucugcgcagaaaagcggacgcccuuucuauggauaacuguaaggagcuggaaagguugacgucccucuauaaagggggcuga

SEQ ID NO: 8204 - RNA, 1140 nt, Artificial Sequence
  derived and/or modified sequence opt4 from DJB14__Homo_sapiens__AAH22248
auggagggcaacagagacgaggccgagaagugcguggagaucgccagagaggcccugaacgccggcaacagagagaaggcccagagauuccugcagaaggccgagaagcuguacccccugcccagcgccagagcccugcuggagaucaucaugaagaacggcagcaccgccggcaacagcccccacugcagaaagcccagcggcagcggcgaccagagcaagcccaacugcaccaaggacagcaccagcggcagcggcgagggcggcaagggcuacaccaaggaccagguggacggcgugcugagcaucaacaagugcaagaacuacuacgaggugcugggcgugaccaaggacgccggcgacgaggaccugaagaaggccuacagaaagcuggcccugaaguuccaccccgacaagaaccacgcccccggcgccaccgacgccuucaagaagaucggcaacgccuacgccgugcugagcaaccccgagaagagaaagcaguacgaccugaccggcaacgaggagcaggccugcaaccaccagaacaacggcagauucaacuuccacagaggcugcgaggccgacaucacccccgaggaccuguucaacaucuucuucggcggcggcuuccccagcggcagcgugcacagcuucagcaacggcagagccggcuacagccagcagcaccagcacagacacagcggccacgagagagaggaggagagaggcgacggcggcuucagcguguucauccagcugaugcccaucaucgugcugauccuggugagccugcugagccagcugauggugagcaacccccccuacagccuguaccccagaagcggcaccggccagaccaucaagaugcagaccgagaaccugggcgugguguacuacgugaacaaggacuucaagaacgaguacaagggcaugcugcugcagaagguggagaagagcguggaggaggacuacgugaccaacaucagaaacaacugcuggaaggagagacagcagaagaccgacaugcaguacgccgccaagguguacagagacgacagacugagaagaaaggccgacgcccugagcauggacaacugcaaggagcuggagagacugaccagccuguacaagggcggcuga

SEQ ID NO: 8205 - RNA, 1140 nt, Artificial Sequence
  derived and/or modified sequence opt5 from DJB14__Homo_sapiens__AAH22248
auggagggcaacagagacgaagccgagaagugcguggaaaucgcucgggaggcccugaaugcggggaaccgcgaaaaagcucagagauuccuccaaaaggccgagaaacuguacccccuuccuagcgcccgggcucugcucgagauuaucaugaagaauggauccaccgccggcaacucuccgcacugucgcaaacccagcggguccggagaucagucuaagccuaauugcacaaaggacagcacguccggcucuggggaaggaggcaaaggcuauaccaaggaucaggucgacgggguucugagcauuaacaaauguaagaauuacuaugaggugcuuggagugacaaaagaugcuggcgacgaagaucugaagaaggccuacagaaaacucgcgcugaaguuucaucccgacaaaaaccacgccccuggggcuaccgaugccuucaagaaaaucggaaaugcuuaugccguccuguccaaccccgagaagcggaaacaguacgaccucacaggcaaugaggaacaagcgugcaaccaucagaauaacgggcgcuuuaauuuccacagaggaugugaggccgauauuaccccugaagaccuguuuaacaucuucuuuggcggcggguucccgagcggaucugugcauuccuuuagcaacggccgggcuggguauucucagcagcaccaacaccgccauuccggacacgagagagaagaggagcggggcgaugggggauucagcguuuuuauccagcuuaugcccauuaucgugcugauucucgucucucugcuuucccagcugauggugagcaauccucccuacucccucuacccucgcucuggcacaggccagaccaucaagaugcaaacggaaaaccuggggguuguguauuacgucaauaaggacuucaaaaacgaguauaagggaaugcugcuccagaaaguggaaaagagcguggaggaagacuacgucaccaauauuagaaacaauugcuggaaagagcggcagcaaaagacagauaugcaguaugccgcuaagguuuaccgcgacgauagacugcggagaaaagccgacgcccuuuccauggauaacuguaaggagcuggaacgccucaccagccuguauaaaggcggguga

SEQ ID NO: 8206 - protein, 793 aa, Artificial Sequence
  DJC10__Homo_sapiens__Q8IXB1
MGVWLNKDDYIRDLKRIILCFLIVYMAILVGTDQDFYSLLGVSKTASSREIRQAFKKLALKLHPDKNPNNPNAHGDFLKINRAYEVLKDEDLRKKYDKYGEKGLEDNQGGQYESWNYYRYDFGIYDDDPEIITLERREFDAAVNSGELWFVNFYSPGCSHCHDLAPTWRDFAKEVDGLLRIGAVNCGDDRMLCRMKGVNSYPSLFIFRSGMAPVKYHGDRSKESLVSFAMQHVRSTVTELWTGNFVNSIQTAFAAGIGWLITFCSKGGDCLTSQTRLRLSGMLDGLVNVGWMDCATQDNLCKSLDITTSTTAYFPPGATLNNKEKNSILFLNSLDAKEIYLEVIHNLPDFELLSANTLEDRLAHHRWLLFFHFGKNENSNDPELKKLKTLLKNDHIQVGRFDCSSAPDICSNLYVFQPSLAVFKGQGTKEYEIHHGKKILYDILAFAKESVNSHVTTLGPQNFPANDKEPWLVDFFAPWCPPCRALLPELRRASNLLYGQLKFGTLDCTVHEGLCNMYNIQAYPTTVVFNQSNIHEYEGHHSAEQILEFIEDLMNPSVVSLTPTTFNELVTQRKHNEVWMVDFYSPWCHPCQVLMPEWKRMARTLTGLINVGSIDCQQYHSFCAQENVQRYPEIRFFPPKSNKAYHYHSYNGWNRDAYSLRIWGLGFLPQVSTDLTPQTFSEKVLQGKNHWVIDFYAPWCGPCQNFAPEFELLARMIKGKVKAGKVDCQAYAQTCQKAGIRAYPTVKFYFYERAKRNFQEEQINTRDAKAIAALISEKLETLRNQGKRNKDEL

SEQ ID NO: 8207 - RNA, 2382 nt, Artificial Sequence
  DJC10__Homo_sapiens__BAB55263
augggagucugguuaaauaaagaugacuauaucagagacuugaaaaggaucauucucuguuuucugauaguguauauggccauuuuagugggcacagaucaggauuuuuacaguuuacuuggaguguccaaaacugcaagcaguagagaaauaagacaagcuuucaagaaauuggcauugaaguuacauccugauaaaaacccgaauaacccaaaugcacauggcgauuuuuuaaaaauaaauagagcauaugaaguacucaaagaugaagaucuacggaaaaaguaugacaaauauggagaaaagggacuugaggauaaucaagguggccaguaugaaagcuggaacuauuaucguuaugauuuugguauuuaugaugaugauccugaaaucauaacauuggaaagaagagaauuugaugcugcuguuaauucuggagaacugugguuuguaaauuuuuacuccccaggcuguucacacugccaugauuuagcucccacauggagagacuuugcuaaagaaguggauggguuacuucgaauuggagcuguuaacuguggugaugauagaaugcuuugccgaaugaaaggagucaacagcuaucccagccucuucauuuuucggucuggaauggccccagugaaauaucauggagacagaucaaaggagaguuuagugaguuuugcaaugcagcauguuagaaguacagugacagaacuuuggacaggaaauuuugucaacuccauacaaacugccuuugcugcugguauuggcuggcugaucacuuuuuguucaaaaggaggagauuguuugacuucacagacacgacucaggcuuaguggcauguuggauggucuuguuaauguaggauggauggacugugccacccaggauaaccuuuguaaaagcuuagauauuacaacaaguacuacugcuuauuuuccuccuggagccacuuuaaauaacaaagagaaaaacaguauuuuguuucucaacucauuggaugcuaaagaaauauauuuggaaguaauacauaaucuuccagauuuugaacuacuuucggcaaacacacuagaggaucguuuggcucaucaucgguggcuguuauuuuuucauuuuggaaaaaaugaaaauucaaaugauccugagcugaaaaaacuaaaaacucuacuuaaaaaugaucauauucaaguuggcagguuugacuguuccucugcaccagacaucuguaguaaucuguauguuuuucagccgucucuagcaguauuuaaaggacaaggaaccaaagaauaugaaauucaucauggaaagaagauucuauaugauauacuugccuuugccaaagaaagugugaauucucauguuaccacgcuuggaccucaaaauuuuccugccaaugacaaagaaccauggcuuguugauuucuuugcccccugguguccaccaugucgagcuuuacuaccagaguuacgaagagcaucaaaucuucuuuauggucagcuuaaguuugguacacuagauuguacaguucaugagggacucuguaacauguauaacauucaggcuuauccaacgacagugguauucaaccaguccaacauucaugaguaugaaggacaucacucugcugaacaaaucuuggaguucauagaggaucuuaugaauccuucaguggucucccuuacacccaccaccuucaacgaacuaguuacacaaagaaaacacaacgaagucuggaugguugauuucuauucuccguggugucauccuugccaagucuuaaugccagaauggaaaagaauggcccggacauuaacuggacugaucaacgugggcaguauagauugccaacaguaucauucuuuuugugcccaggaaaacguucaaagauacccugagauaagauuuuuucccccaaaaucaaauaaagcuuaucauuaucacaguuacaaugguuggaauagggaugcuuauucccugagaaucuggggucuaggauuuuuaccucaaguauccacagaucuaacaccucagacuuucagugaaaaaguucuacaagggaaaaaucauugggugauugauuucuaugcuccuugguguggaccuugccagaauuuugcuccagaauuugagcucuuggcuaggaugauuaaaggaaaagugaaagcuggaaaaguagacugucaggcuuaugcucagacaugccagaaagcugggaucagggccuauccaacuguuaaauuuuauuucuacgaaagagcaaagagaaauuuucaagaagagcagauaaauaccagagaugcaaaagcaaucgcugccuuaauaagugaaaaauuggaaacucuccgaaaucaaggcaagaggaauaaggaugaacuuuga

SEQ ID NO: 8208 - RNA, 2382 nt, Artificial Sequence
  derived and/or modified sequence opt1 from DJC10__Homo_sapiens__BAB55263
augggcguguggcugaacaaggacgacuacauccgcgaccucaagcggaucauccugugcuuccugaucgucuacauggccauccucguggggaccgaccaggacuucuacagccugcugggcguguccaagaccgccagcucccgcgagauccggcaggcguucaagaagcucgcccugaagcugcaccccgacaagaacccgaacaaccccaacgcccacggggacuuccucaagaucaaccgcgccuacgagguccugaaggacgaggaccugcggaagaaguacgacaaguacggcgagaaggggcucgaggacaaccagggcggccaguacgagagcuggaacuacuaccgcuacgacuucgggaucuacgacgacgaccccgagaucaucacgcuggagcggcgcgaguucgacgccgcggugaacuccggcgagcugugguucgugaacuucuacagccccgggugcucccacugccacgaccucgccccgaccuggcgggacuucgccaaggaggucgacggccugcugcgcaucggggccgugaacugcggcgacgaccggaugcucugccgcaugaagggcgugaacagcuaccccucccuguucaucuuccggagcgggauggcgcccgucaaguaccacggcgaccgcuccaaggagagccugguguccuucgccaugcagcacgugcggagcaccgucaccgagcucuggacggggaacuucgugaacuccauccagaccgccuucgccgccggcaucggcuggcugaucaccuucugcagcaagggcggggacugccugaccucccagacgcgccuccggcugagcgggaugcuggacggccucgugaacgucggguggauggacugcgcgacccaggacaaccugugcaagucccuggacaucaccaccagcacgaccgccuacuucccgccgggcgccacccucaacaacaaggagaagaacagcauccuguuccugaacucccucgacgccaaggagaucuaccuggaggugauccacaaccugcccgacuucgagcuccugagcgccaacacccuggaggaccgccucgcgcaccaccgguggcugcuguucuuccacuucggcaagaacgagaacuccaacgaccccgagcucaagaagcugaagacgcugcucaagaacgaccacauccagguggggcgcuucgacugcagcuccgcccccgacaucugcagcaaccuguacgucuuccagccgucccuggccguguucaagggccaggggaccaaggaguacgagauccaccacggcaagaagauccucuacgacauccuggccuucgccaaggagagcgugaacucccacgucaccacccuggggccccagaacuuccccgcgaacgacaaggagcccuggcugguggacuucuucgccccguggugcccgcccugccgggcccuccugcccgagcugcgccgcgccagcaaccuccuguacggccagcugaaguucggcacgcucgacugcaccgugcacgaggggcugugcaacauguacaacauccaggccuaccccaccaccgucguguucaaccaguccaacauccacgaguacgagggccaccacagcgcggagcagauccuggaguucaucgaggaccucaugaaccccuccgucgugagccugacgcccaccaccuucaacgagcuggugacccagcggaagcacaacgaggucuggaugguggacuucuacucccccuggugccacccgugccaggugcucaugcccgaguggaagcgcauggcccggacgcugaccgggcugaucaacgucggcagcaucgacugccagcaguaccacuccuucugcgcccaggagaacgugcagcgcuaccccgagauccgguucuucccgcccaagagcaacaaggccuaccacuaccacuccuacaacggguggaaccgcgacgcguacagccuccggaucuggggccugggcuuccugccccaggugagcaccgaccucacgccccagaccuucuccgagaagguccugcaggggaagaaccacugggugaucgacuucuacgcccccuggugcggccccugccagaacuucgcccccgaguucgagcugcucgcccgcaugaucaaggggaaggugaaggccggcaaggucgacugccaggcguacgcccagaccugccagaaggccggcauccgggccuaccccaccgugaaguucuacuucuacgagcgcgccaagcggaacuuccaggaggagcagaucaacacccgcgacgcgaaggccaucgccgcccugaucagcgagaagcuggagacgcuccggaaccaggggaagcgcaacaaggacgagcuguga

SEQ ID NO: 8209 - RNA, 2382 nt, Artificial Sequence
  derived and/or modified sequence opt2 from DJC10__Homo_sapiens__BAB55263
augggcgucuggcucaacaaggacgacuacauccgcgaccucaagcgcaucauccucugcuuccucaucgucuacauggccauccucgucggcaccgaccaggacuucuacucccuccucggcgucuccaagaccgccuccucccgcgagauccgccaggccuucaagaagcucgcccucaagcuccaccccgacaagaaccccaacaaccccaacgcccacggcgacuuccucaagaucaaccgcgccuacgagguccucaaggacgaggaccuccgcaagaaguacgacaaguacggcgagaagggccucgaggacaaccagggcggccaguacgaguccuggaacuacuaccgcuacgacuucggcaucuacgacgacgaccccgagaucaucacccucgagcgccgcgaguucgacgccgccgucaacuccggcgagcucugguucgucaacuucuacucccccggcugcucccacugccacgaccucgcccccaccuggcgcgacuucgccaaggaggucgacggccuccuccgcaucggcgccgucaacugcggcgacgaccgcaugcucugccgcaugaagggcgucaacuccuaccccucccucuucaucuuccgcuccggcauggcccccgucaaguaccacggcgaccgcuccaaggagucccucgucuccuucgccaugcagcacguccgcuccaccgucaccgagcucuggaccggcaacuucgucaacuccauccagaccgccuucgccgccggcaucggcuggcucaucaccuucugcuccaagggcggcgacugccucaccucccagacccgccuccgccucuccggcaugcucgacggccucgucaacgucggcuggauggacugcgccacccaggacaaccucugcaagucccucgacaucaccaccuccaccaccgccuacuucccccccggcgccacccucaacaacaaggagaagaacuccauccucuuccucaacucccucgacgccaaggagaucuaccucgaggucauccacaaccuccccgacuucgagcuccucuccgccaacacccucgaggaccgccucgcccaccaccgcuggcuccucuucuuccacuucggcaagaacgagaacuccaacgaccccgagcucaagaagcucaagacccuccucaagaacgaccacauccaggucggccgcuucgacugcuccuccgcccccgacaucugcuccaaccucuacgucuuccagcccucccucgccgucuucaagggccagggcaccaaggaguacgagauccaccacggcaagaagauccucuacgacauccucgccuucgccaaggaguccgucaacucccacgucaccacccucggcccccagaacuuccccgccaacgacaaggagcccuggcucgucgacuucuucgcccccuggugcccccccugccgcgcccuccuccccgagcuccgccgcgccuccaaccuccucuacggccagcucaaguucggcacccucgacugcaccguccacgagggccucugcaacauguacaacauccaggccuaccccaccaccgucgucuucaaccaguccaacauccacgaguacgagggccaccacuccgccgagcagauccucgaguucaucgaggaccucaugaaccccuccgucgucucccucacccccaccaccuucaacgagcucgucacccagcgcaagcacaacgaggucuggauggucgacuucuacucccccuggugccaccccugccagguccucaugcccgaguggaagcgcauggcccgcacccucaccggccucaucaacgucggcuccaucgacugccagcaguaccacuccuucugcgcccaggagaacguccagcgcuaccccgagauccgcuucuucccccccaaguccaacaaggccuaccacuaccacuccuacaacggcuggaaccgcgacgccuacucccuccgcaucuggggccucggcuuccucccccaggucuccaccgaccucaccccccagaccuucuccgagaagguccuccagggcaagaaccacugggucaucgacuucuacgcccccuggugcggccccugccagaacuucgcccccgaguucgagcuccucgcccgcaugaucaagggcaaggucaaggccggcaaggucgacugccaggccuacgcccagaccugccagaaggccggcauccgcgccuaccccaccgucaaguucuacuucuacgagcgcgccaagcgcaacuuccaggaggagcagaucaacacccgcgacgccaaggccaucgccgcccucaucuccgagaagcucgagacccuccgcaaccagggcaagcgcaacaaggacgagcucuga

SEQ ID NO: 8210 - RNA, 2382 nt, Artificial Sequence
  derived and/or modified sequence opt3 from DJC10__Homo_sapiens__BAB55263
augggcguguggcugaacaaggacgauuacaucagagaccucaaaaggauuauacuuugcuuccugaucgucuauauggccauuuugguugggaccgaucaggacuuuuacagcuuacugggaguguccaagacagcuucuucacgggagauccgccaagcauucaaaaagcuagcccucaaacugcaccccgauaagaauccuaacaauccaaacgcgcauggugacuuucuuaagauuaaucgagcuuaugaaguacugaaagaugaggacuugcguaagaaauacgauaaguauggcgaaaaagggcucgaggacaaccagggaggccaguacgaaaguuggaauuauuacagauacgauuucgguaucuaugacgaugacccggagauaaucacucuggagaggcgggaauuugacgccgcagugaacagcggggagcugugguucgucaauuuuuacucccccggauguucucacugccaugaucucgccccuacguggcgcgacuucgcuaaggaaguggauggcuuacugagaauuggcgcaguuaacuguggggacgauaggaugcuuugccggaugaagggagucaauucguauccaucauuguuuaucuuccgcagcgguauggcccccgugaaauaccacggcgaccgaaguaaggagucccuggugucuuuugcuaugcagcauguaagaagcaccguuacagagcuauggacugggaacuucgucaauuccauucaaaccgccuuugcggcaggaaucggcuggcucauaacauucuguucaaaagguggggauugccugaccagucagacuaggcuucggcugagcggaauguuggacggccucgugaacgugggcuggauggauugugccacacaggacaaucugugcaagucuuuagauauuaccacguccacuaccgcuuauuucccuccaggggccacacugaacaacaaagaaaagaacucaauccucuuucuuaauagccuggacgcaaaagagauuuacuuggaagugauccacaaucuacccgacuucgagcugcucagugcuaacacucuggaagaucgucuugcccaccaucgcuggcuguuguuuuuccacuuuggaaagaaugagaacucuaaugacccugagcucaagaaacugaagaccuuacugaaaaacgaucauauccaggucgguagauucgacuguuccagcgcgccagauauuugcucgaaucuauauguuuuucaaccgucucucgccguguucaagggccaggggacaaaagaauacgagauacaccacggaaagaagauccuguacgacauucuugcauuugcuaaagaauccguaaacucacaugugaccacguugggcccccagaauuucccugccaacgauaaggagccauggcuggucgacuuuuucgcucccugguguccuccaugcagggcccuccugcccgaacuucggcgagcaaguaaucuguuguauggucagcucaaauuugggacucuggauugcacagugcacgagggcuuauguaacauguacaauauccaagccuauccgaccacuguuguguucaaccagagcaacauacaugaguacgaaggacaccauuccgcugagcagauucuggaguucaucgaagaccuaaugaauccuucugucgugagccucacacccaccacguuuaacgaacugguaacccaacgcaagcacaaugagguuuggaugguggauuucuauucaccauggugccacccuugucagguccuuaugcccgaguggaaaagaauggcgaggacauugacuggccugaucaacguggggaguauugacugccagcaguaccauuccuuuugugcacaagaaaauguccagcgguauccagagauccgcuucuuucccccuaagagcaacaaggccuaccacuaccauucuuauaauggauggaacagagaugcuuacucacucaggauuuggggucugggcuucuuaccacaggugaguaccgaccugacaccgcagacuuuuagcgaaaaaguucuucaagggaagaaucacugggugauagacuucuaugcccccuggugcggaccuugucagaacuuugcaccagaguucgaguugcucgcccguaugaucaaaggcaagguaaaagcugguaaggucgauugccaggccuacgcacagaccugucaaaaggcggggauucgggcuuaucccacagugaaauuuuacuucuaugaacgagccaagagaaauuuucaggaggaacagaucaacaccagggacgcaaaagccaucgcugcccugauuuccgagaagcuagaaacucugcgcaaucagggcaaacggaacaaggaugagcucuga

SEQ ID NO: 8211 - RNA, 2382 nt, Artificial Sequence
  derived and/or modified sequence opt4 from DJC10__Homo_sapiens__BAB55263
augggcguguggcugaacaaggacgacuacaucagagaccugaagagaaucauccugugcuuccugaucguguacauggccauccuggugggcaccgaccaggacuucuacagccugcugggcgugagcaagaccgccagcagcagagagaucagacaggccuucaagaagcuggcccugaagcugcaccccgacaagaaccccaacaaccccaacgcccacggcgacuuccugaagaucaacagagccuacgaggugcugaaggacgaggaccugagaaagaaguacgacaaguacggcgagaagggccuggaggacaaccagggcggccaguacgagagcuggaacuacuacagauacgacuucggcaucuacgacgacgaccccgagaucaucacccuggagagaagagaguucgacgccgccgugaacagcggcgagcugugguucgugaacuucuacagccccggcugcagccacugccacgaccuggcccccaccuggagagacuucgccaaggagguggacggccugcugagaaucggcgccgugaacugcggcgacgacagaaugcugugcagaaugaagggcgugaacagcuaccccagccuguucaucuucagaagcggcauggcccccgugaaguaccacggcgacagaagcaaggagagccuggugagcuucgccaugcagcacgugagaagcaccgugaccgagcuguggaccggcaacuucgugaacagcauccagaccgccuucgccgccggcaucggcuggcugaucaccuucugcagcaagggcggcgacugccugaccagccagaccagacugagacugagcggcaugcuggacggccuggugaacgugggcuggauggacugcgccacccaggacaaccugugcaagagccuggacaucaccaccagcaccaccgccuacuucccccccggcgccacccugaacaacaaggagaagaacagcauccuguuccugaacagccuggacgccaaggagaucuaccuggaggugauccacaaccugcccgacuucgagcugcugagcgccaacacccuggaggacagacuggcccaccacagauggcugcuguucuuccacuucggcaagaacgagaacagcaacgaccccgagcugaagaagcugaagacccugcugaagaacgaccacauccaggugggcagauucgacugcagcagcgcccccgacaucugcagcaaccuguacguguuccagcccagccuggccguguucaagggccagggcaccaaggaguacgagauccaccacggcaagaagauccuguacgacauccuggccuucgccaaggagagcgugaacagccacgugaccacccugggcccccagaacuuccccgccaacgacaaggagcccuggcugguggacuucuucgcccccuggugcccccccugcagagcccugcugcccgagcugagaagagccagcaaccugcuguacggccagcugaaguucggcacccuggacugcaccgugcacgagggccugugcaacauguacaacauccaggccuaccccaccaccgugguguucaaccagagcaacauccacgaguacgagggccaccacagcgccgagcagauccuggaguucaucgaggaccugaugaaccccagcguggugagccugacccccaccaccuucaacgagcuggugacccagagaaagcacaacgagguguggaugguggacuucuacagccccuggugccaccccugccaggugcugaugcccgaguggaagagaauggccagaacccugaccggccugaucaacgugggcagcaucgacugccagcaguaccacagcuucugcgcccaggagaacgugcagagauaccccgagaucagauucuucccccccaagagcaacaaggccuaccacuaccacagcuacaacggcuggaacagagacgccuacagccugagaaucuggggccugggcuuccugccccaggugagcaccgaccugaccccccagaccuucagcgagaaggugcugcagggcaagaaccacugggugaucgacuucuacgcccccuggugcggccccugccagaacuucgcccccgaguucgagcugcuggccagaaugaucaagggcaaggugaaggccggcaagguggacugccaggccuacgcccagaccugccagaaggccggcaucagagccuaccccaccgugaaguucuacuucuacgagagagccaagagaaacuuccaggaggagcagaucaacaccagagacgccaaggccaucgccgcccugaucagcgagaagcuggagacccugagaaaccagggcaagagaaacaaggacgagcuguga

SEQ ID NO: 8212 - RNA, 2382 nt, Artificial Sequence
  derived and/or modified sequence opt5 from DJC10__Homo_sapiens__BAB55263
augggcguguggcugaacaaggacgauuacaucagagaccucaaacggauuauccugugcuuccuuauugucuauauggccauccugguugggaccgaucaggacuuuuacagccuccugggaguguccaagacagcuucuagccgcgagauuagacaagccuucaaaaagcuggcgcuuaaacuccaccccgauaagaauccuaacaauccgaacgcucauggcgacuuucugaagaucaaucgggccuaugaagugcugaaagaugaggaccuccgcaagaaauacgauaaguauggggaaaaaggacuggaggacaaccagggcgggcaguacgaauccuggaauuauuacagauacgauuucggaaucuaugacgaugaccccgagauuaucacgcuugagcggcgcgaauuugacgccgcugucaacucuggcgagcugugguucgugaauuuuuacagcccuggcuguucccacugccaugaucucgcccccaccuggagagacuucgcuaaggaaguugaugggcugcuucggauuggagccgugaacuguggcgacgaucgcaugcugugcagaaugaagggggucaauucuuauccuagccucuuuaucuuccgguccggaauggcgcccgugaaauaccacggcgaccgcagcaaggagucucugguuuccuuugccaugcagcaugugagaagcacagucaccgagcuguggacagggaacuucgucaauucuauucaaaccgcuuuugccgcuggaaucggcuggcucauuacauucuguuccaaaggcggggauugccugaccagccagacgcggcuucgccugucuggaaugcucgacggccuggugaacgugggguggauggauugugccacccaggacaaucuuugcaagucccuggauaucacaaccagcacaaccgcguauuucccuccgggagccacgcucaacaacaaagaaaagaacuccauccuguuucucaauucucuggacgcuaaagagauuuaccuggaaguuauccacaaucuucccgacuucgagcugcucagcgccaacacacuggaagauagacuugcucaccaucgguggcugcucuuuuuccacuuuggcaagaaugagaacuccaaugacccugagcugaagaaacugaagacccuccugaaaaacgaucauauucagguggggagauucgacuguagcucugcccccgauaucugcuccaaucuuuauguguuucaaccuagccuggccgucuucaagggacagggcacaaaagaauacgagauucaccacggcaagaagauccucuacgacauccuggcuuuugcgaaagaaucugugaacagccauguuaccacccuggggccccagaauuucccggccaacgauaaggagccuuggcuuguggacuuuuucgcucccugguguccucccugccgcgcccuccugcccgaacugcggagagccuccaaucuccuguauggacagcuuaaauuuggcacacuggauugcacgguccacgaggggcucuguaacauguacaauauucaggcuuauccuaccacagugguuuucaaccaaucuaacauccaugaguacgaaggacaccauagcgccgagcagauucuggaguucaucgaagaccugaugaauccguccguggucagccuuacccccacaaccuuuaacgaacucgugacgcaacgcaagcacaaugaggucuggaugguggauuucuauucuccuuggugccaccccugucagguucugaugccugaguggaaacggauggcgagaacacugaccggccucauuaacgugggguccaucgacugccagcaguaccauagcuuuugugcucaagaaaauguccagcgcuaucccgagauccgguucuuuccgccuaagucuaacaaggccuaccacuaccauuccuauaauggcuggaacagagaugccuacagccugcgcauuuggggacuuggcuuccugccccagguguccaccgaccucacaccucagaccuuuucugaaaaaguucugcaagggaagaaucacugggugaucgacuucuaugcucccuggugcggaccuugucagaacuuugcccccgaguucgagcugcuugcucggaugauuaaaggcaaggucaaagccgggaagguggauugccaggcguacgcccagacaugucaaaaggcuggaaucagagccuauccgacggugaaauuuuacuucuaugaacgcgcuaagcggaauuuucaggaggaacagauuaacaccagagacgccaaagcgaucgccgcucucauuagcgagaagcuggaaacacugcggaaucagggcaaacgcaacaaggaugagcucuga

SEQ ID NO: 8213 - protein, 198 aa, Artificial Sequence
  DJC12__Homo_sapiens__Q9UKB3
MDAILNYRSEDTEDYYTLLGCDELSSVEQILAEFKVRALECHPDKHPENPKAVETFQKLQKAKEILTNEESRARYDHWRRSQMSMPFQQWEALNDSVKTSMHWVVRGKKDLMLEESDKTHTTKMENEECNEQRERKKEELASTAEKTEQKEPKPLEKSVSPQNSDSSGFADVNGWHLRFRWSKDAPSELLRKFRNYEI

SEQ ID NO: 8214 - RNA, 597 nt, Artificial Sequence
  DJC12__Homo_sapiens__AAD52650
auggaugcaauacugaauuacaggucagaagauacugaagauuacuacacauuacugggaugugaugaacuaucuucgguugaacaaauccuggcagaauuuaaagucagagcucuggaaugucacccagacaagcauccugaaaaccccaaagcuguggagacuuuucagaaacugcagaaggcaaaggagauucugaccaaugaagagagucgagcccgcuaugaccacuggcgaaggagccagaugucgaugccauuccagcagugggaagcuuugaaugacucagugaagacgucaaugcacuggguugucagagguaaaaaagaccugaugcuggaagaaucugacaagacucauaccaccaagauggaaaaugaggaauguaaugagcaaagagaaagaaagaaagaggagcuggcuucaaccgcagagaaaacggagcagaaagaacccaagccccuagagaagucagucuccccgcaaaauucagauucuucagguuuugcagaugugaaugguuggcaccuucguuuccgcugguccaaggaugcucccucagaacuccugaggaaguucagaaacuaugaaauauga

SEQ ID NO: 8215 - RNA, 597 nt, Artificial Sequence
  derived and/or modified sequence opt1 from DJC12__Homo_sapiens__AAD52650
auggacgccauccugaacuaccgcagcgaggacaccgaggacuacuacacccuccugggcugcgacgagcuguccagcguggagcagauccucgccgaguucaagguccgggcgcuggagugccaccccgacaagcacccggagaaccccaaggccguggagacguuccagaagcugcagaaggccaaggagauccucaccaacgaggagucccgcgcccgguacgaccacuggcgccggagccagauguccaugcccuuccagcagugggaggcccugaacgacagcgugaagaccuccaugcacugggucgugcgcgggaagaaggaccugaugcucgaggagagcgacaagacccacacgaccaagauggagaacgaggagugcaacgagcagcgggagcgcaagaaggaggagcuggcguccaccgccgagaagaccgagcagaaggagcccaagccgcuggagaaguccgugagcccccagaacagcgacuccagcggcuucgccgacgucaacggguggcaccuccgguuccgcugguccaaggacgcccccagcgagcugcugcggaaguuccgcaacuacgagaucuga

SEQ ID NO: 8216 - RNA, 597 nt, Artificial Sequence
  derived and/or modified sequence opt2 from DJC12__Homo_sapiens__AAD52650
auggacgccauccucaacuaccgcuccgaggacaccgaggacuacuacacccuccucggcugcgacgagcucuccuccgucgagcagauccucgccgaguucaagguccgcgcccucgagugccaccccgacaagcaccccgagaaccccaaggccgucgagaccuuccagaagcuccagaaggccaaggagauccucaccaacgaggagucccgcgcccgcuacgaccacuggcgccgcucccagauguccaugcccuuccagcagugggaggcccucaacgacuccgucaagaccuccaugcacugggucguccgcggcaagaaggaccucaugcucgaggaguccgacaagacccacaccaccaagauggagaacgaggagugcaacgagcagcgcgagcgcaagaaggaggagcucgccuccaccgccgagaagaccgagcagaaggagcccaagccccucgagaaguccgucuccccccagaacuccgacuccuccggcuucgccgacgucaacggcuggcaccuccgcuuccgcugguccaaggacgcccccuccgagcuccuccgcaaguuccgcaacuacgagaucuga

SEQ ID NO: 8217 - RNA, 597 nt, Artificial Sequence
  derived and/or modified sequence opt3 from DJC12__Homo_sapiens__AAD52650
auggacgccauccugaacuacagaagcgaggauaccgaagacuauuacacacuccuuggcugcgaugagcuguccucuguggaacagauuuuggcugaguucaaggucagggcauuagaaugucaccccgacaaacauccugagaauccaaaggccguugagacuuuucaaaaacugcagaaggcgaaagaaauacuaacgaacgaggaaucacgggcucgcuaugaucacuggcgacguagucagaugagcaugccguuccagcaaugggaggcccucaaugacuccgugaagaccucuaugcauuggguagugagagggaagaaagaucugaugcuugaggaaucggacaagacacacacuaccaaaauggagaacgaagagugcaaugaacagagggagcggaagaaagaggaacuggcaucaacagccgagaagaccgaacagaaggagcccaaaccuuuggaaaagagcgucaguccacagaacuccgauucuagcggauuugcugacgugaaugguuggcaucuccgcuucagaugguccaaagaugcacccucagagcugcugaggaaguuucggaacuacgagaucuga

SEQ ID NO: 8218 - RNA, 597 nt, Artificial Sequence
  derived and/or modified sequence opt4 from DJC12__Homo_sapiens__AAD52650
auggacgccauccugaacuacagaagcgaggacaccgaggacuacuacacccugcugggcugcgacgagcugagcagcguggagcagauccuggccgaguucaaggugagagcccuggagugccaccccgacaagcaccccgagaaccccaaggccguggagaccuuccagaagcugcagaaggccaaggagauccugaccaacgaggagagcagagccagauacgaccacuggagaagaagccagaugagcaugcccuuccagcagugggaggcccugaacgacagcgugaagaccagcaugcacuggguggugagaggcaagaaggaccugaugcuggaggagagcgacaagacccacaccaccaagauggagaacgaggagugcaacgagcagagagagagaaagaaggaggagcuggccagcaccgccgagaagaccgagcagaaggagcccaagccccuggagaagagcgugagcccccagaacagcgacagcagcggcuucgccgacgugaacggcuggcaccugagauucagauggagcaaggacgcccccagcgagcugcugagaaaguucagaaacuacgagaucuga

SEQ ID NO: 8219 - RNA, 597 nt, Artificial Sequence
  derived and/or modified sequence opt5 from DJC12__Homo_sapiens__AAD52650
auggacgccauccugaacuacagaagcgaggauaccgaagacuauuacacacuccugggcugcgaugagcuuuccucuguggaacagauucuggcugaguucaagguccgggcccucgaaugucaccccgacaaacauccugagaauccgaaggcgguugagacguuucaaaaacugcagaaggcuaaagaaauccuuaccaacgaggaaagccgcgccagauaugaucacuggcggcgcucccagaugucuaugcccuuccagcaaugggaggcccugaaugacagcgugaagacauccaugcauuggguggucagagggaagaaagaucucaugcuggaggaaucugacaagacccacacaaccaaaauggagaacgaagagugcaaugaacagcgggagcgcaagaaagaggaacuggcuagcacagccgagaagaccgaacagaaggagccuaaaccccucgaaaaguccgugagcccucagaacucugauuccagcggauuugcugacguuaauggcuggcaucugagauuccgguggucuaaagaugcccccuccgagcuucugcgcaaguuuagaaacuacgagauuuga

SEQ ID NO: 8220 - protein, 702 aa, Artificial Sequence
  DJC14__Homo_sapiens__Q6Y2X3
MAQKHPGERGLYGAHHSGGASLRTLGPSVDPEIPSFSGLRDSAGTAPNGTRCLTEHSGPKHTQHPNPAHWLDPSHGPPGGPGPPRDAEDPDQSETSSEEESGVDQELSKENETGNQKDGNSFLSIPSACNCQGTPGIPEGPYSEGGNGSSSNFCHHCTSPALGEDELEEEYDDEESLKFPSDFSRVSSGKKPPSRRQRHRFPTKEDTREGGRRDPRSPGRHRLGRKRSQADKRKGLGLWGAEELCQLGQAGFWWLIELLVLVGEYVETCGHLIYACRQLKSSDLDLFRVWMGVWTGRLGGWAQVMFQFLSQGFYCGVGLFTRFLKLLGALLLLALALFLGFLQLGWRFLVGLGDRLGWRDKATWLFSWLDSPALQRCLTLLRDSRPWQRLVRIVQWGWLELPWVKQNINRQGNAPVASGRYCQPEEEVARLLTMAGVPEDELNPFHVLGVEATASDVELKKAYRQLAVMVHPDKNHHPRAEEAFKVLRAAWDIVSNAEKRKEYEMKRMAENELSRSVNEFLSKLQDDLKEAMNTMMCSRCQGKHRRFEMDREPKSARYCAECNRLHPAEEGDFWAESSMLGLKITYFALMDGKVYDITEWAGCQRVGISPDTHRVPYHISFGSRIPGTRGRQRATPDAPPADLQDFLSRIFQVPPGQMPNGNFFAAPQPAPGAAAASKPNSTVPKGEAKPKRRKKVRRPFQR

SEQ ID NO: 8221 - RNA, 2109 nt, Artificial Sequence
  DJC14__Homo_sapiens__AAI17147
auggcccagaagcaccccggagaaagaggguuguauggagcccaccacagugguggugccucccucaggacuuuaggacccuccguggacccugaaauaccuucauucucaggacucagggacucagcagggacugcuccuaaugguacccgcugccucacagagcacucugguccuaagcacacacagcacccaaacccagcccauugguuggacccaagccauggccccccaggggguccaggaccaccuagagaugcagaggacccugaucagagugagacgucuucagaagaagaaucaggaguggaccaggaacucucaaaagaaaacgagacugggaaccagaaggaugggaacucuuuucuuuccauuccaucugcuugcaacugccagggaacaccuggaauuccagaagggccuuacucugagggaggaaaugguucuucuagcaacuuuugccaccacuguaccucuccagcuuugggggaagaugaguuggaagaggaauaugaugaugaagaaucucucaaguuccccagugauuuuucgcguguguccagcggaaagaaacccccaucccggagacagcggcaccgcuuuccaacgaaggaggauacucgggaggguggacguagggaucccagguccccuggucgacaucggcugggucggaaacgaagucaggcagauaagcgcaaaggccugggauuguggggagccgaggaacuaugucaacuuggacaggcaggcuuuugguggcugauugaacugcugguauuggugggagaguacguagaaacuuguggccaucucaucuaugccugcaggcaacugaaaagcagugauuuggaccuuuuucgaguuuggaugggaguguggacagggcgguuagggggcugggcccaggucauguuucaguuucuaagccagggguuuuacuguggaguaggacuguuuacucguuuucuuaagcugcugggugcuuugcugcuccuggcucuggcccucuuuuugggcuuucuacaguugggauggcgguuucuggugggacuaggugaccgguuaggcuggagggauaaggcuaccuggcucuucucuuggcuggauucuccagccuugcagcguugcuugacucugcugagagauagcaggccauggcagcggcugguaagaauaguucaguggggcuggcuggaguugccuugggucaagcagaauauuaauaggcaggggaaugcaccuguagcuagugggcgcuacugccagccugaagaggaaguggcucgacucuugaccauggcugggguuccugaggaugagcuaaacccuuuccauguacuggggguugaggccacagcaucagauguugaacugaagaaggccuauagacagcuggcagugaugguucauccugacaaaaaucaucauccccgggcugaggaggccuucaagguuuugcgagcagcuugggacauugucagcaaugcugaaaagcgaaaggaguaugagaugaaacgaauggcagagaaugagcugagccggucaguaaaugaguuucuguccaagcugcaagaugaccucaaggaggcaaugaauacuaugauguguagccgaugccaaggaaagcauaggagguuugaaauggaccgggaaccuaagagugccagauacugugcugaguguaauaggcugcauccugcugaggaaggagacuuuugggcagagucaagcauguugggccucaagaucaccuacuuugcacugauggauggaaagguguaugacaucacagagugggcuggaugccagcguguagguaucuccccagauacccacagaguccccuaucacaucucauuugguucucggauuccaggcaccagagggcggcagagagccaccccagaugccccuccugcugaucuucaggauuucuugagucggaucuuucaaguacccccagggcagaugcccaaugggaacuucuuugcagcuccucagccugccccuggagccgcugcagccucuaagcccaacagcacaguacccaagggagaagccaaaccuaagcggcggaagaaagugaggaggcccuuccaacguuga

SEQ ID NO: 8222 - RNA, 2109 nt, Artificial Sequence
  derived and/or modified sequence opt1 from DJC14__Homo_sapiens__AAI17147
auggcccagaagcaccccggcgagcgcgggcuguacggcgcccaccacagcgggggcgcgucccuccggacccuggggccgagcguggaccccgagauccccuccuucagcggccugcgcgacuccgccggcaccgcccccaacgggacgcggugccucaccgagcacagcggcccgaagcacacccagcaccccaaccccgcccacuggcuggaccccucccacgggccgcccggcgggcccgggcccccgcgcgacgccgaggaccccgaccagagcgagaccuccagcgaggaggaguccggcgucgaccaggagcugagcaaggagaacgagacggggaaccagaaggacggcaacuccuuccucagcauccccuccgcgugcaacugccaggggacccccggcaucccggagggccccuacagcgagggcggcaacggguccagcuccaacuucugccaccacugcaccagccccgcccugggcgaggacgagcuggaggaggaguacgacgacgaggagagccucaaguuccccuccgacuucagccggguguccagcgggaagaagccgcccucccgccggcagcgccaccgguuccccaccaaggaggacacgcgcgagggcggccggcgcgacccccggagcccggggcgccaccggcugggccgcaagcggucccaggccgacaagcgcaaggggcugggccucuggggcgccgaggagcugugccagcuggggcaggcgggcuucugguggcucaucgagcugcuggugcucgucggggaguacguggagaccugcggccaccugaucuacgccugccggcagcucaagagcuccgaccuggaccuguuccgcguguggaugggggucuggaccggccggcucgggggcugggcccaggugauguuccaguuccugagccagggcuucuacugcggggugggccuguucacccgcuuccugaagcuccugggggcccugcuccugcuggcccucgcgcuguuccugggcuuccuccagcugggcuggcgcuuccuggucgggcucggcgaccggcugggguggcgcgacaaggccacguggcuguucuccuggcucgacagccccgcccugcagcggugccugacccuccugcgcgacucccggcccuggcagcgccuggugcggaucgugcaguggggcuggcucgagcugcccugggucaagcagaacaucaaccgccaggggaacgccccgguggccagcggccgguacugccagcccgaggaggagguggcgcgccugcugaccauggccggcguccccgaggacgagcucaacccguuccacgugcuggggguggaggccaccgccuccgacgucgagcugaagaaggccuaccggcagcucgcggugauggugcaccccgacaagaaccaccacccccgcgccgaggaggccuucaagguccugcgggccgccugggacaucgugagcaacgcggagaagcgcaaggaguacgagaugaagcggauggccgagaacgagcugucccgcagcgugaacgaguuccucuccaagcugcaggacgaccugaaggaggccaugaacacgaugaugugcagccggugccagggcaagcaccgccgguucgagauggaccgcgagcccaagagcgcccgcuacugcgcggagugcaaccggcuccacccggccgaggagggggacuucugggccgaguccagcaugcugggccugaagaucaccuacuucgcccucauggacgggaaggucuacgacaucaccgagugggccggcugccagcgcgugggcaucucccccgacacccaccggguccccuaccacaucagcuucgggucccgcauccccggcacgcgggggcgccagcgggcgaccccggacgccccgcccgccgaccugcaggacuuccugagccgcaucuuccaggugccgcccggccagaugcccaacgggaacuucuucgccgcgccccagcccgcccccggcgccgccgccgccuccaagcccaacagcaccgugcccaagggcgaggcgaagcccaagcggcgcaagaagguccggcgcccguuccagcgguga

SEQ ID NO: 8223 - RNA, 2109 nt, Artificial Sequence
  derived and/or modified sequence opt2 from DJC14__Homo_sapiens__AAI17147
auggcccagaagcaccccggcgagcgcggccucuacggcgcccaccacuccggcggcgccucccuccgcacccucggccccuccgucgaccccgagauccccuccuucuccggccuccgcgacuccgccggcaccgcccccaacggcacccgcugccucaccgagcacuccggccccaagcacacccagcaccccaaccccgcccacuggcucgaccccucccacggcccccccggcggccccggccccccccgcgacgccgaggaccccgaccaguccgagaccuccuccgaggaggaguccggcgucgaccaggagcucuccaaggagaacgagaccggcaaccagaaggacggcaacuccuuccucuccauccccuccgccugcaacugccagggcacccccggcauccccgagggccccuacuccgagggcggcaacggcuccuccuccaacuucugccaccacugcaccucccccgcccucggcgaggacgagcucgaggaggaguacgacgacgaggagucccucaaguuccccuccgacuucucccgcgucuccuccggcaagaagccccccucccgccgccagcgccaccgcuuccccaccaaggaggacacccgcgagggcggccgccgcgacccccgcucccccggccgccaccgccucggccgcaagcgcucccaggccgacaagcgcaagggccucggccucuggggcgccgaggagcucugccagcucggccaggccggcuucugguggcucaucgagcuccucguccucgucggcgaguacgucgagaccugcggccaccucaucuacgccugccgccagcucaaguccuccgaccucgaccucuuccgcgucuggaugggcgucuggaccggccgccucggcggcugggcccaggucauguuccaguuccucucccagggcuucuacugcggcgucggccucuucacccgcuuccucaagcuccucggcgcccuccuccuccucgcccucgcccucuuccucggcuuccuccagcucggcuggcgcuuccucgucggccucggcgaccgccucggcuggcgcgacaaggccaccuggcucuucuccuggcucgacucccccgcccuccagcgcugccucacccuccuccgcgacucccgccccuggcagcgccucguccgcaucguccaguggggcuggcucgagcuccccugggucaagcagaacaucaaccgccagggcaacgcccccgucgccuccggccgcuacugccagcccgaggaggaggucgcccgccuccucaccauggccggcguccccgaggacgagcucaaccccuuccacguccucggcgucgaggccaccgccuccgacgucgagcucaagaaggccuaccgccagcucgccgucaugguccaccccgacaagaaccaccacccccgcgccgaggaggccuucaagguccuccgcgccgccugggacaucgucuccaacgccgagaagcgcaaggaguacgagaugaagcgcauggccgagaacgagcucucccgcuccgucaacgaguuccucuccaagcuccaggacgaccucaaggaggccaugaacaccaugaugugcucccgcugccagggcaagcaccgccgcuucgagauggaccgcgagcccaaguccgcccgcuacugcgccgagugcaaccgccuccaccccgccgaggagggcgacuucugggccgaguccuccaugcucggccucaagaucaccuacuucgcccucauggacggcaaggucuacgacaucaccgagugggccggcugccagcgcgucggcaucucccccgacacccaccgcguccccuaccacaucuccuucggcucccgcauccccggcacccgcggccgccagcgcgccacccccgacgccccccccgccgaccuccaggacuuccucucccgcaucuuccaggucccccccggccagaugcccaacggcaacuucuucgccgccccccagcccgcccccggcgccgccgccgccuccaagcccaacuccaccguccccaagggcgaggccaagcccaagcgccgcaagaagguccgccgccccuuccagcgcuga

SEQ ID NO: 8224 - RNA, 2109 nt, Artificial Sequence
  derived and/or modified sequence opt3 from DJC14__Homo_sapiens__AAI17147
auggcccagaagcaccccggcgagagagggcuguacggagcucaucacagcgguggcgcaucccucaggacccuugggccuucuguggacccagaaaucccgucauucaguggacugcgggauagcgccggcacagcgcccaacgguacucgcugcuugacggagcauuccgggccuaaacacacccaacauccaaaucccgcucacugguuagacccuucucacggaccacccggcggcccugggccaccgcgagaugccgaagaccccgaucagucggagacaucaagcgaagaggagaguggagucgaccaggaacuguccaaggagaacgaaacugguaaucagaaagauggcaacucuuuucuaagcauuccuuccgcauguaauugccaagggaccccaggaauacccgagggcccuuauucagagggugggaacggaaguagcucuaauuucugucaucacugcacauccccagcccucggcgaagacgagcuggaagaggaauacgaugacgaggagucacuuaaguuucccagcgauuucagucguguuucuuccggcaaaaagccgccuagcagaaggcagcggcaucgcuuucccaccaaggaagacacuagagaagggggaaggcgggauccacgcucgccuggucgacacagacugggcaggaaacggucucaggcugacaagcguaaaggguugggacucuggggcgcagaggagcugugucagcugggucaagccggguucugguggcucaucgaauuacuggugcuuguaggcgaguauguggagacaugcggacacuugauuuacgcuugucgccagcugaaguccucagaccuagaucucuuuagagucuggaugggcguguggaccgggaggcugggagguugggcccagguuauguuccaguuucuuagucaaggcuucuauugcggggugggacuguuuacgcgguucuugaaacuccugggcgcguuacugcuccuugcacuggccuuguuucuagguuuccugcagcucggguggcgauuccuggucggccuuggagaccgccugggcuggagagauaaggcuacuugguuguuuagcuggcucgacucccccgcccugcagagguguuuaacccugcuacgggauucucgcccauggcaaagacucgugaggaucguacaguggggguggcuggaacuucccuggguuaagcagaacauuaaucgucagggaaacgcaccuguggcuagcggucgguacugccaaccagaggaagaggucgcccgauugcugacaauggcgggcgugccggaagacgagcucaaucccuuccaugugcugggggucgaggccacugcaucagauguugaacuuaaaaaggcuuauagacagcuggccgugaugguacacccugacaaaaaccaucacccaagggcugaggaagccuuuaagguguugcgcgcagccugggauaucgucaguaaugcugagaaacggaaggaguacgaaaugaaaagaauggcggagaacgaacucuccaggagcgugaaugaguuccugucuaaguuacaggacgaucugaaggaagcaaugaacaccaugauguguucacgcugccagggaaaacaucgacgguuugagauggaccgugagcccaagagugccagauacugcgcugaauguaacaggcuacacccugccgaggaaggcgacuucugggcagagagcuccaugcucggucugaaaauaacauauuuugcccuuauggaugggaagguuuacgacaucaccgaaugggcuggcugccaacgcgugggaauuucuccagauacgcaccggguccccuaucauaucucguucggcagcaggauuccggggacuagaggacgacagcgcgccacaccugacgcaccacccgcggauuugcaggacuuucugucccggaucuuccaggugccucccggccaaaugccaaaugguaacuuuuucgcugccccucagcccgcaccaggggccgcugccgcaucaaaaccgaauaguaccguaccuaagggagaggcuaagcccaaaagaaggaagaaaguucgucgcccauuucagcgguga

SEQ ID NO: 8225 - RNA, 2109 nt, Artificial Sequence
  derived and/or modified sequence opt4 from DJC14__Homo_sapiens__AAI17147
auggcccagaagcaccccggcgagagaggccuguacggcgcccaccacagcggcggcgccagccugagaacccugggccccagcguggaccccgagauccccagcuucagcggccugagagacagcgccggcaccgcccccaacggcaccagaugccugaccgagcacagcggccccaagcacacccagcaccccaaccccgcccacuggcuggaccccagccacggcccccccggcggccccggcccccccagagacgccgaggaccccgaccagagcgagaccagcagcgaggaggagagcggcguggaccaggagcugagcaaggagaacgagaccggcaaccagaaggacggcaacagcuuccugagcauccccagcgccugcaacugccagggcacccccggcauccccgagggccccuacagcgagggcggcaacggcagcagcagcaacuucugccaccacugcaccagccccgcccugggcgaggacgagcuggaggaggaguacgacgacgaggagagccugaaguuccccagcgacuucagcagagugagcagcggcaagaagccccccagcagaagacagagacacagauuccccaccaaggaggacaccagagagggcggcagaagagaccccagaagccccggcagacacagacugggcagaaagagaagccaggccgacaagagaaagggccugggccuguggggcgccgaggagcugugccagcugggccaggccggcuucugguggcugaucgagcugcuggugcuggugggcgaguacguggagaccugcggccaccugaucuacgccugcagacagcugaagagcagcgaccuggaccuguucagaguguggaugggcguguggaccggcagacugggcggcugggcccaggugauguuccaguuccugagccagggcuucuacugcggcgugggccuguucaccagauuccugaagcugcugggcgcccugcugcugcuggcccuggcccuguuccugggcuuccugcagcugggcuggagauuccuggugggccugggcgacagacugggcuggagagacaaggccaccuggcuguucagcuggcuggacagccccgcccugcagagaugccugacccugcugagagacagcagacccuggcagagacuggugagaaucgugcaguggggcuggcuggagcugcccugggugaagcagaacaucaacagacagggcaacgcccccguggccagcggcagauacugccagcccgaggaggagguggccagacugcugaccauggccggcgugcccgaggacgagcugaaccccuuccacgugcugggcguggaggccaccgccagcgacguggagcugaagaaggccuacagacagcuggccgugauggugcaccccgacaagaaccaccaccccagagccgaggaggccuucaaggugcugagagccgccugggacaucgugagcaacgccgagaagagaaaggaguacgagaugaagagaauggccgagaacgagcugagcagaagcgugaacgaguuccugagcaagcugcaggacgaccugaaggaggccaugaacaccaugaugugcagcagaugccagggcaagcacagaagauucgagauggacagagagcccaagagcgccagauacugcgccgagugcaacagacugcaccccgccgaggagggcgacuucugggccgagagcagcaugcugggccugaagaucaccuacuucgcccugauggacggcaagguguacgacaucaccgagugggccggcugccagagagugggcaucagccccgacacccacagagugcccuaccacaucagcuucggcagcagaauccccggcaccagaggcagacagagagccacccccgacgccccccccgccgaccugcaggacuuccugagcagaaucuuccaggugccccccggccagaugcccaacggcaacuucuucgccgccccccagcccgcccccggcgccgccgccgccagcaagcccaacagcaccgugcccaagggcgaggccaagcccaagagaagaaagaaggugagaagacccuuccagagauga

SEQ ID NO: 8226 - RNA, 2109 nt, Artificial Sequence
  derived and/or modified sequence opt5 from DJC14__Homo_sapiens__AAI17147
auggcccagaagcaccccggcgagagagggcuguacggagcucaucacagcggcggggccucccuccggacccugggaccuucuguggacccggaaauccccagcuucuccggccuucgcgauucugcggggacagcuccuaacggaacgagaugccugaccgagcauagcggccccaaacacacacaacauccuaaucccgcccacuggcucgacccuucccacggcccgcccgggggaccugggcccccucgggaugccgaagaccccgaucagucugagaccagcuccgaagaggagagcggggucgaccaggaacugucuaaggagaacgaaacaggaaaucagaaagauggcaacuccuuucuuagcauuccgucugcuuguaauugccaagggaccccuggaauccccgagggcccuuauuccgagggcgggaacggaucuagcuccaauuucugucaucacugcacaagccccgcccugggcgaagacgagcucgaagaggaauacgaugacgaggagucccugaaguuucccucugauuucagccgcguuuccagcgggaaaaagccuccgucuagacggcagcgccauagauuucccaccaaggaagacacgcgggagggaggccgcagagauccucggucccccgggcgccacagacugggacggaaacgcagccaggcugacaagagaaaaggccucggccuguggggcgccgaggaacuuugucagcugggacaagcgggcuucugguggcucauugaacugcuugugcuggugggggaguaugucgagaccugcggacaccucaucuacgccugucggcagcugaagucuagcgaccuggaucucuuuagaguguggaugggcguuuggacagggcgccugggcggaugggcucaggugauguuccaguuucuuucccaaggcuucuauugcggggucggacuguuuacccgguuccucaaacugcuuggcgcccugcuccugcuggcucucgcccuguuucuuggguuccugcagcucggauggagauuccuggugggccuuggggaccgccugggcuggcgggauaaggcgacauggcucuuuucuuggcuggacagcccugcccugcagagaugucucacccugcuucgcgauucccggcccuggcaaagacugguucgcauugugcaguggggauggcucgaacugccgugggucaagcagaacaucaaucggcagggcaacgcuccuguggccagcgggagauacugccaacccgaggaagagguggcucgccugcuuacgauggccggagucccugaagacgagcucaaucccuuccauguucugggcguggaggccacagcuucugauguggaacugaaaaaggcguaucggcagcucgccgucauggugcacccugacaaaaaccaucaccccagagcugaggaagccuuuaagguucugcgggccgcuugggauaucguguccaaugccgagaaacgcaaggaguacgaaaugaaaagaauggcggagaacgaacuuagccggucugucaaugaguuccuguccaagcuccaggacgaucugaaggaagcuaugaacaccaugauguguagcagaugccaggggaaacaucgccgguuugagauggacagagagccgaaguccgcccgcuacugcgccgaauguaacagacugcacccugcugaggaaggagacuucugggccgagucuagcaugcuuggccucaaaauuacauauuuugcucugauggaugggaagguguacgacaucaccgaaugggccggcugccaacggguuggaauuucccccgauacccaccgcgugcccuaucauaucucuuucggcagccggauuccugggacaagaggacgccagagagcgacgccggacgcucccccugccgaucugcaggacuuucucucccggaucuuccaggugcccccuggccaaaugcccaaugggaacuuuuucgccgcuccucagcccgccccgggagcggccgcugccagcaaaccuaauucuaccguccccaagggcgaggcuaagccuaaacgcagaaagaaaguccggcgccccuuucagagauga

SEQ ID NO: 8227 - protein, 150 aa, Artificial Sequence
  DJC15__Homo_sapiens__Q9Y5T4
MAARGVIAPVGESLRYAEYLQPSAKRPDADVDQQRLVRSLIAVGLGVAALAFAGRYAFRIWKPLEQVITETAKKISTPSFSSYYKGGFEQKMSRREAGLILGVSPSAGKAKIRTAHRRVMILNHPDKGGSPYVAAKINEAKDLLETTTKH

SEQ ID NO: 8228 - RNA, 453 nt, Artificial Sequence
  DJC15__Homo_sapiens__AAH95400
auggcugcccguggugucaucgcuccaguuggcgagaguuugcgcuacgcugaguacuugcagcccucggccaaacggccagacgccgacgucgaccagcagagacugguaagaaguuugauagcuguaggccuggguguugcagcucuugcauuugcaggucgcuacgcauuucggaucuggaaaccucuagaacaaguuaucacagaaacugcaaagaagauuucaacuccuagcuuuucauccuacuauaaaggaggauuugaacagaaaaugaguaggcgagaagcuggucuuauuuuagguguaagcccaucugcuggcaaggcuaagauuagaacagcucauaggagagucaugauuuugaaucacccagauaaagguggaucuccuuacguagcagccaaaauaaaugaagcaaaagacuugcuagaaacaaccaccaaacauuga

SEQ ID NO: 8229 - RNA, 453 nt, Artificial Sequence
  derived and/or modified sequence opt1 from DJC15__Homo_sapiens__AAH95400
auggccgcccgcggcgugaucgcgcccgucggggagagccugcgguacgccgaguaccuccagccguccgccaagcgccccgacgccgacguggaccagcagcggcuggugcgcagccugaucgccgucggccucgggguggcggcccuggccuucgccggccgguacgcguuccgcaucuggaagccccuggagcaggucaucaccgagaccgccaagaagaucuccacgcccagcuucuccagcuacuacaagggcggguucgagcagaagaugucccggcgcgaggccggccucauccugggggugagcccguccgccggcaaggccaagauccggaccgcgcaccgccgggugaugauccugaaccaccccgacaagggcgggagccccuacguggccgccaagaucaacgaggccaaggaccuccuggagaccaccacgaagcacuga

SEQ ID NO: 8230 - RNA, 453 nt, Artificial Sequence
  derived and/or modified sequence opt2 from DJC15__Homo_sapiens__AAH95400
auggccgcccgcggcgucaucgcccccgucggcgagucccuccgcuacgccgaguaccuccagcccuccgccaagcgccccgacgccgacgucgaccagcagcgccucguccgcucccucaucgccgucggccucggcgucgccgcccucgccuucgccggccgcuacgccuuccgcaucuggaagccccucgagcaggucaucaccgagaccgccaagaagaucuccacccccuccuucuccuccuacuacaagggcggcuucgagcagaagaugucccgccgcgaggccggccucauccucggcgucucccccuccgccggcaaggccaagauccgcaccgcccaccgccgcgucaugauccucaaccaccccgacaagggcggcucccccuacgucgccgccaagaucaacgaggccaaggaccuccucgagaccaccaccaagcacuga

SEQ ID NO: 8231 - RNA, 453 nt, Artificial Sequence
  derived and/or modified sequence opt3 from DJC15__Homo_sapiens__AAH95400
auggccgcuagaggcgugaucgcacccgucggggagagccugagguacgccgaauaucuccagccuuccgcgaagcggccagacgcugauguugaccaacagcgccuugugcgaucucugauugccguaggauuggguguggcagccuuagcuuucgcaggccguuacgccuuuagaauauggaaaccgcuggagcaggucaucaccgaaacagcuaagaaaauuucaacucccaguuucagcuccuauuacaaagggggauuugagcagaagaugucuaggcgggaagccggccuaauccucggugugucgccuucagcggggaaggcaaagauucgcacggcccacagaaggguuaugauccugaaccauccagauaaaggaggcagccccuauguggcugccaagauaaaugaggcaaaagaccuucuggagaccacaacuaagcacuga

SEQ ID NO: 8232 - RNA, 453 nt, Artificial Sequence
  derived and/or modified sequence opt4 from DJC15__Homo_sapiens__AAH95400
auggccgccagaggcgugaucgcccccgugggcgagagccugagauacgccgaguaccugcagcccagcgccaagagacccgacgccgacguggaccagcagagacuggugagaagccugaucgccgugggccugggcguggccgcccuggccuucgccggcagauacgccuucagaaucuggaagccccuggagcaggugaucaccgagaccgccaagaagaucagcacccccagcuucagcagcuacuacaagggcggcuucgagcagaagaugagcagaagagaggccggccugauccugggcgugagccccagcgccggcaaggccaagaucagaaccgcccacagaagagugaugauccugaaccaccccgacaagggcggcagccccuacguggccgccaagaucaacgaggccaaggaccugcuggagaccaccaccaagcacuga

SEQ ID NO: 8233 - RNA, 453 nt, Artificial Sequence
  derived and/or modified sequence opt5 from DJC15__Homo_sapiens__AAH95400
auggccgcuagaggcgugaucgcccccgucggggagagccugcgguacgcggaauaucuccagccuuccgcuaagcgcccggacgccgauguugaccaacagagacuggugcggucucuuauugccgugggacugggcgucgcugcccucgcuuucgccgggcgcuacgcguuuagaaucuggaaaccccuggaacaggugauuaccgagacagccaagaaaaucagcacgccuuccuucucuagcuauuacaagggaggcuuugagcagaaaaugucccggcgcgaagcugggcuuauucugggaguuucucccagcgccggcaaggcuaagaucagaaccgcccaccggcgcgugaugauccucaaccauccugauaaaggcgggucccccuaugucgcggccaagauuaaugaggcuaaagaccugcuggagacaaccacaaagcacuga

SEQ ID NO: 8234 - protein, 782 aa, Artificial Sequence
  DJC16__Homo_sapiens__Q9Y2G8
MEVRKLSISWQFLIVLVLILQILSALDFDPYRVLGVSRTASQADIKKAYKKLAREWHPDKNKDPGAEDKFIQISKAYEILSNEEKRSNYDQYGDAGENQGYQKQQQQREYRFRHFHENFYFDESFFHFPFNSERRDSIDEKYLLHFSHYVNEVVPDSFKKPYLIKITSDWCFSCIHIEPVWKEVIQELEELGVGIGVVHAGYERRLAHHLGAHSTPSILGIINGKISFFHNAVVRENLRQFVESLLPGNLVEKVTNKNYVRFLSGWQQENKPHVLLFDQTPIVPLLYKLTAFAYKDYLSFGYVYVGLRGTEEMTRRYNINIYAPTLLVFKEHINRPADVIQARGMKKQIIDDFITRNKYLLAARLTSQKLFHELCPVKRSHRQRKYCVVLLTAETTKLSKPFEAFLSFALANTQDTVRFVHVYSNRQQEFADTLLPDSEAFQGKSAVSILERRNTAGRVVYKTLEDPWIGSESDKFILLGYLDQLRKDPALLSSEAVLPDLTDELAPVFLLRWFYSASDYISDCWDSIFHNNWREMMPLLSLIFSALFILFGTVIVQAFSDSNDERESSPPEKEEAQEKTGKTEPSFTKENSSKIPKKGFVEVTELTDVTYTSNLVRLRPGHMNVVLILSNSTKTSLLQKFALEVYTFTGSSCLHFSFLSLDKHREWLEYLLEFAQDAAPIPNQYDKHFMERDYTGYVLALNGHKKYFCLFKPQKTVEEEEAIGSCSDVDSSLYLGESRGKPSCGLGSRPIKGKLSKLSLWMERLLEGSLQRFYIPSWPELD

SEQ ID NO: 8235 - RNA, 2349 nt, Artificial Sequence
  DJC16__Homo_sapiens__AAH47363
auggaagugagaaaguugagcauuuccuggcaguucuugauaguucugguucugauccugcaaauucugucugcguuggauuuugacccauacagaguccuaggggucagccgaacagccagucaggcugauauuaaaaaggcuuauaagaagcucgcccgggaauggcauccugacaaaaacaaagauccuggagcagaagacaaguucauucaaaucaguaaggcuuacgagauucuuucaaaugaagaaaagagaucaaauuaugaucaauauggagacgcuggagagaaccagggcuaccagaagcagcaacagcagcgagaguaucgcuuccgccauuuccaugaaaauuuuuauuuugaugaauccuuuuuucacuucccuuuuaauucugaacggcgggacucaauugacgaaaaguauuuauugcacuuuucacauuaugugaaugaagugguuccagauagcuucaagaaacccuaccucaucaagaucaccuccgauuggugcuuuagcugcauucauaucgagccuguguggaaagaagucauucaagaacuggaagaauuggguguaggaauuggcgugguccaugcuggguaugagagacgccuggcccaucaccuaggggcacacagcacgcccucuauccuaggaaucauuaacgggaaaaucuccuucuuccacaaugcaguuguccgugaaaaucugcgacaauuuguagaaagucuucuuccagggaacuugguggagaaaguuacaaauaaaaauuacgucagauuccucucuggcuggcagcaagagaauaagccucauguccuucuguuugaccaaacgcccauugugccacuguuauacaaguugacugccuuugcauacaaagauuauuuaucauuuggauauguauauguggguuugagagggacggaagagaugacaaggcgguacaacaucaauaucuacgccccuacccucuuggucuuuaaagaacauauaaacaggccugccgauguuauccaggcccgagguaugaagaagcaaaucauugacgacuucaucacccgaaacaaauaucuauuggcagccaggcucaccagccagaaguuguuccaugaacucugcccugugaaacggucgcaucgacagaggaaguacugugugguuuuauugacugcugagacuaccaaguugagcaaacccuuugaggcuuuccuguccuuugcccuggcaaacacucaagacacagugagauuugugcaugucuacagcaaucggcagcaggaguuugccgacaccuuacuaccagacagugaggcguuucaagggaaaucagcggugucuauuuuagaaaggcgcaacacagcaggaagggugguguauaaaacccuggaagacccuuggauugggagugagagugacaaauuuauccucuugggcuaucucgaccagcugcguaaagauccagcucuucuguccucugaagcagugcuuccugaccugaccgaugaacuugccccuguuuuucuccuucgaugguucuacucugcuucugacuacaucucagacugcugggauagcauuuuucacaacaacuggagggaaaugaugccccugcugucccugaucuucucugcccucuucauccucuucggcacugucaucguucaggcuuucagcgacucuaaugaugagcgagagucaagcccuccagaaaaagaggaagcccaagagaagacugggaaaacugagccaagcuucaccaaagaaaacagcagcaagauuccuaaaaaaggcuuuguggagguaacugaacucacagauguaacauacaccaguaacuugguacgucugaggccaggccacaugaaugugguccucauccugucgaauucuaccaagaccagccuacuacagaaauuugcuuuggaggucuacacauuuacugggagcagcugccuacacuucuccuuccugagucuagauaaacacagagaauggcuagaauacuuacuagaauuugcucaagaugcagcuccaaucccaaaccaauaugauaagcauuucauggagcgugacuacacugguuauguacuggcucugaauggccacaagaaauacuucugccucuucaagccccaaaagacagucgaagaggaggaagccauagggucgugcagugauguugacucuucccucuaccugggugaaucucgagggaaaccuuccuguggccuuggauccaggcccaucaaaggaaaguugagcaagcucucuuuauggauggaacgccugcuggagggcuccuuacagagguuuuauaucccaucauggccugaacuagacuga

SEQ ID NO: 8236 - RNA, 2349 nt, Artificial Sequence
  derived and/or modified sequence opt1 from DJC16__Homo_sapiens__AAH47363
auggaggugcgcaagcugagcaucuccuggcaguuccucaucguccuggugcugauccuccagauccugagcgcccuggacuucgaccccuaccgggugcucggcgucucccgcaccgccagccaggcggacaucaagaaggccuacaagaagcuggcccgggaguggcacccggacaagaacaaggaccccggggccgaggacaaguucauccagaucuccaaggccuacgagauccugagcaacgaggagaagcgcuccaacuacgaccaguacggcgacgcgggggagaaccagggcuaccagaagcagcagcagcagcgggaguaccgcuuccggcacuuccacgagaacuucuacuucgacgagagcuucuuccacuuccccuucaacuccgagcgccgggacagcaucgacgagaaguaccuccugcacuucucccacuacgugaacgaggugguccccgacagcuucaagaagccguaccugaucaagaucaccuccgacuggugcuucagcugcauccacaucgagcccguguggaaggaggugauccaggagcucgaggagcugggggucggcaucggcguggugcacgccggguacgagcgccggcuggcccaccaccucggcgcccacuccacgcccagcauccuggggaucaucaacggcaagaucuccuucuuccacaacgcggucgugcgcgagaaccugcggcaguucguggagagccuccugcccgggaaccuggucgagaaggugaccaacaagaacuacgugcgcuuccucuccggcuggcagcaggagaacaagccgcacguccugcuguucgaccagacccccaucgugccccuccuguacaagcugaccgccuucgccuacaaggacuaccucagcuucggcuacguguacgucgggcugcggggcacggaggagaugacccgccgguacaacaucaacaucuacgcccccacccugcucguguucaaggagcacaucaaccgcccggccgacgugauccaggcgcgggggaugaagaagcagaucaucgacgacuucaucacccgcaacaaguaccugcuggccgcccggcucacgagccagaagcuguuccacgagcugugccccgucaagcgcucccaccgccagcggaaguacugcgugguccuccugaccgccgagaccaccaagcugagcaagcccuucgaggccuuccucuccuucgcgcuggccaacacgcaggacaccgugcgcuucgugcacgucuacagcaaccggcagcaggaguucgccgacacccugcuccccgacuccgaggccuuccagggcaagagcgccguguccauccuggagcgccggaacaccgcgggccgcguggucuacaagacgcuggaggacccguggaucgggagcgaguccgacaaguucauccuccugggcuaccuggaccagcuccggaaggaccccgcccugcugagcuccgaggccgugcugcccgaccucaccgacgagcuggcccccguguuccugcuccgcugguucuacagcgccuccgacuacaucagcgacugcugggacuccaucuuccacaacaacuggcgggagaugaugccgcugcugagccucaucuucuccgcgcuguucauccuguucgggaccgucaucgugcaggccuucagcgacuccaacgacgagcgcgagagcagcccgcccgagaaggaggaggcccaggagaagaccggcaagacggagcccuccuucaccaaggagaacagcuccaagauccccaagaagggguucguggaggucaccgagcucaccgacgugacguacaccagcaaccuggugcggcugcgccccggccacaugaacgucgugcucauccuguccaacagcaccaagaccucccugcuccagaaguucgcccuggagguguacacguucaccggcagcuccugccugcacuucagcuuccucucccuggacaagcaccgggaguggcuggaguaccuccuggaguucgcgcaggacgccgcccccauccccaaccaguacgacaagcacuucauggagcgcgacuacaccggguacguccuggcccucaacggccacaagaaguacuucugccuguucaagccgcagaagaccguggaggaggaggaggccaucgggagcugcuccgacguggacagcucccuguaccucggcgagagccgggggaagcccuccugcggccugggcagccgccccaucaaggggaagcugagcaagcucucccuguggauggagcggcugcucgagggcagccugcagcgcuucuacaucccguccuggcccgagcuggacuga

SEQ ID NO: 8237 - RNA, 2349 nt, Artificial Sequence
  derived and/or modified sequence opt2 from DJC16__Homo_sapiens__AAH47363
auggagguccgcaagcucuccaucuccuggcaguuccucaucguccucguccucauccuccagauccucuccgcccucgacuucgaccccuaccgcguccucggcgucucccgcaccgccucccaggccgacaucaagaaggccuacaagaagcucgcccgcgaguggcaccccgacaagaacaaggaccccggcgccgaggacaaguucauccagaucuccaaggccuacgagauccucuccaacgaggagaagcgcuccaacuacgaccaguacggcgacgccggcgagaaccagggcuaccagaagcagcagcagcagcgcgaguaccgcuuccgccacuuccacgagaacuucuacuucgacgaguccuucuuccacuuccccuucaacuccgagcgccgcgacuccaucgacgagaaguaccuccuccacuucucccacuacgucaacgaggucguccccgacuccuucaagaagcccuaccucaucaagaucaccuccgacuggugcuucuccugcauccacaucgagcccgucuggaaggaggucauccaggagcucgaggagcucggcgucggcaucggcgucguccacgccggcuacgagcgccgccucgcccaccaccucggcgcccacuccacccccuccauccucggcaucaucaacggcaagaucuccuucuuccacaacgccgucguccgcgagaaccuccgccaguucgucgagucccuccuccccggcaaccucgucgagaaggucaccaacaagaacuacguccgcuuccucuccggcuggcagcaggagaacaagccccacguccuccucuucgaccagacccccaucgucccccuccucuacaagcucaccgccuucgccuacaaggacuaccucuccuucggcuacgucuacgucggccuccgcggcaccgaggagaugacccgccgcuacaacaucaacaucuacgcccccacccuccucgucuucaaggagcacaucaaccgccccgccgacgucauccaggcccgcggcaugaagaagcagaucaucgacgacuucaucacccgcaacaaguaccuccucgccgcccgccucaccucccagaagcucuuccacgagcucugccccgucaagcgcucccaccgccagcgcaaguacugcgucguccuccucaccgccgagaccaccaagcucuccaagcccuucgaggccuuccucuccuucgcccucgccaacacccaggacaccguccgcuucguccacgucuacuccaaccgccagcaggaguucgccgacacccuccuccccgacuccgaggccuuccagggcaaguccgccgucuccauccucgagcgccgcaacaccgccggccgcgucgucuacaagacccucgaggaccccuggaucggcuccgaguccgacaaguucauccuccucggcuaccucgaccagcuccgcaaggaccccgcccuccucuccuccgaggccguccuccccgaccucaccgacgagcucgcccccgucuuccuccuccgcugguucuacuccgccuccgacuacaucuccgacugcugggacuccaucuuccacaacaacuggcgcgagaugaugccccuccucucccucaucuucuccgcccucuucauccucuucggcaccgucaucguccaggccuucuccgacuccaacgacgagcgcgaguccuccccccccgagaaggaggaggcccaggagaagaccggcaagaccgagcccuccuucaccaaggagaacuccuccaagauccccaagaagggcuucgucgaggucaccgagcucaccgacgucaccuacaccuccaaccucguccgccuccgccccggccacaugaacgucguccucauccucuccaacuccaccaagaccucccuccuccagaaguucgcccucgaggucuacaccuucaccggcuccuccugccuccacuucuccuuccucucccucgacaagcaccgcgaguggcucgaguaccuccucgaguucgcccaggacgccgcccccauccccaaccaguacgacaagcacuucauggagcgcgacuacaccggcuacguccucgcccucaacggccacaagaaguacuucugccucuucaagccccagaagaccgucgaggaggaggaggccaucggcuccugcuccgacgucgacuccucccucuaccucggcgagucccgcggcaagcccuccugcggccucggcucccgccccaucaagggcaagcucuccaagcucucccucuggauggagcgccuccucgagggcucccuccagcgcuucuacauccccuccuggcccgagcucgacuga

SEQ ID NO: 8238 - RNA, 2349 nt, Artificial Sequence
  derived and/or modified sequence opt3 from DJC16__Homo_sapiens__AAH47363
auggaggugagaaagcugagcaucuccuggcaguuccucauuguccuuguucugauauugcaaaucuuaucugcccuggacuuugaucccuacagggugcuaggcguaucacggaccgcuagucaggcagacauuaaaaaggccuauaaaaagcucgcgcgcgaauggcacccugauaaaaacaaggacccaggggcugaggauaaguucauccagauuagcaaagccuacgaaauccuguccaaugaggaaaagcgaucuaacuaugaccaguacggagaugccggugagaaucaaggcuaucagaaacagcagcaacagcgugaguacagauuuaggcauuuccacgaaaacuuuuauuucgacgagucguuuuuccauuuuccguucaauucagaacggcgcgauagcauagacgagaaguaccuucugcacuuuagucauuacgugaacgaggucgugcccgauuccuucaaaaagccuuauuugaucaagauuacaucugacuggugcuuuagcuguauccacauugaaccaguuuggaaagaggugauccaggaacucgaggaacugggggucggaauaggcgugguacacgcagguuacgagagaaggcuggcucaucaccucggggcacauuccacucccucaauuuuaggaaucauuaauggcaagaucaguuucuuccacaacgccguugugcgggagaaucugcgccaguuugucgaaagccuuuugccuggcaaccugguggagaaagugacgaauaagaacuauguccgauuccuaucuggguggcaacaggaaaauaaaccacacguucuccuguuugaucagacccccaucgugccucuucuguacaaguugacagcuuucgccuauaaagacuaccucuccuuuggauauguauacgugggucugagaggcacugaggaaaugaccaggcgguacaacauuaauauauaugcgccaacauuacuggucuucaaggagcauaucaaccguccggcagacgugauucaagcccgcgggaugaagaaacagaucauagaugacuuuauuaccagaaacaaguaccuccuugcugccaggcugacuucacagaaauuguuccacgagcuaugccccguuaagcggagccaucgacagcgcaaauauugugugguccugcucacagcagaaaccacgaagcugaguaagccuuuugaggcuuuccuuucuuuugcccuggcgaauacucaagauaccgugagauucguacacguuuacuccaacaggcagcaggaauuugccgacacauugcucccagauagcgaggcauuccagggaaaaucggcugugucuauccuggaacggcgcaauacugccggcagagucguguauaagaccuuagaggaccccuggaucgguuccgagucagauaaauucauucugcuaggguaccucgaccaacugaggaaggauccugcucuuuugaguagcgaagccguccugccagaccucacagaugagcuggcacccguguuucuucugcguugguucuauuccgccucugacuacaucagcgacugcugggauucaauuuuucauaacaauuggcgggaaaugaugccguugcucagucugauauucuccgcuuuauuuauccuguucggaaccguuauugugcaggcguuuagcgacucuaacgaugagcgagagucaaguccucccgaaaaagaggaagcacaggagaagacgggcaagacugaaccauccuucacaaaagaaaauagcucuaagaucccuaaaaagggcuuuguagaggucaccgaacuaacugacgugacauacaccucgaaccucguuagacugaggcccgggcacaugaaugugguccuuaucuugagcaacuccacgaaaaccucacugcuccagaaguucgcccuggagguguauacauuuacuggaaguucuuguuuacacuucagcuuucugucccuugauaagcaucgcgaaugguuggaguaccuccuggaguucgcucaagacgccgcaccaauucccaaucaguaugauaaacacuucauggagcgggacuacaccgguuauguacuagcccugaacggccauaagaaauacuuuugccucuucaagccucagaaaacaguggaggaagaggaagcuauagggucauguagcgauguugacucuucccuguaucuuggagagaguagaggcaagccaagcugcgguuuggggucuaggccgaucaaaggcaagcuguccaaguuaucacucuggauggaacgccugcuugagggaagucugcagcgauuuuacauucccagcuggccugaguuggauuga

SEQ ID NO: 8239 - RNA, 2349 nt, Artificial Sequence
  derived and/or modified sequence opt4 from DJC16__Homo_sapiens__AAH47363
auggaggugagaaagcugagcaucagcuggcaguuccugaucgugcuggugcugauccugcagauccugagcgcccuggacuucgaccccuacagagugcugggcgugagcagaaccgccagccaggccgacaucaagaaggccuacaagaagcuggccagagaguggcaccccgacaagaacaaggaccccggcgccgaggacaaguucauccagaucagcaaggccuacgagauccugagcaacgaggagaagagaagcaacuacgaccaguacggcgacgccggcgagaaccagggcuaccagaagcagcagcagcagagagaguacagauucagacacuuccacgagaacuucuacuucgacgagagcuucuuccacuuccccuucaacagcgagagaagagacagcaucgacgagaaguaccugcugcacuucagccacuacgugaacgagguggugcccgacagcuucaagaagcccuaccugaucaagaucaccagcgacuggugcuucagcugcauccacaucgagcccguguggaaggaggugauccaggagcuggaggagcugggcgugggcaucggcguggugcacgccggcuacgagagaagacuggcccaccaccugggcgcccacagcacccccagcauccugggcaucaucaacggcaagaucagcuucuuccacaacgccguggugagagagaaccugagacaguucguggagagccugcugcccggcaaccugguggagaaggugaccaacaagaacuacgugagauuccugagcggcuggcagcaggagaacaagccccacgugcugcuguucgaccagacccccaucgugccccugcuguacaagcugaccgccuucgccuacaaggacuaccugagcuucggcuacguguacgugggccugagaggcaccgaggagaugaccagaagauacaacaucaacaucuacgcccccacccugcugguguucaaggagcacaucaacagacccgccgacgugauccaggccagaggcaugaagaagcagaucaucgacgacuucaucaccagaaacaaguaccugcuggccgccagacugaccagccagaagcuguuccacgagcugugccccgugaagagaagccacagacagagaaaguacugcguggugcugcugaccgccgagaccaccaagcugagcaagcccuucgaggccuuccugagcuucgcccuggccaacacccaggacaccgugagauucgugcacguguacagcaacagacagcaggaguucgccgacacccugcugcccgacagcgaggccuuccagggcaagagcgccgugagcauccuggagagaagaaacaccgccggcagagugguguacaagacccuggaggaccccuggaucggcagcgagagcgacaaguucauccugcugggcuaccuggaccagcugagaaaggaccccgcccugcugagcagcgaggccgugcugcccgaccugaccgacgagcuggcccccguguuccugcugagaugguucuacagcgccagcgacuacaucagcgacugcugggacagcaucuuccacaacaacuggagagagaugaugccccugcugagccugaucuucagcgcccuguucauccuguucggcaccgugaucgugcaggccuucagcgacagcaacgacgagagagagagcagcccccccgagaaggaggaggcccaggagaagaccggcaagaccgagcccagcuucaccaaggagaacagcagcaagauccccaagaagggcuucguggaggugaccgagcugaccgacgugaccuacaccagcaaccuggugagacugagacccggccacaugaacguggugcugauccugagcaacagcaccaagaccagccugcugcagaaguucgcccuggagguguacaccuucaccggcagcagcugccugcacuucagcuuccugagccuggacaagcacagagaguggcuggaguaccugcuggaguucgcccaggacgccgcccccauccccaaccaguacgacaagcacuucauggagagagacuacaccggcuacgugcuggcccugaacggccacaagaaguacuucugccuguucaagccccagaagaccguggaggaggaggaggccaucggcagcugcagcgacguggacagcagccuguaccugggcgagagcagaggcaagcccagcugcggccugggcagcagacccaucaagggcaagcugagcaagcugagccuguggauggagagacugcuggagggcagccugcagagauucuacauccccagcuggcccgagcuggacuga

SEQ ID NO: 8240 - RNA, 2349 nt, Artificial Sequence
  derived and/or modified sequence opt5 from DJC16__Homo_sapiens__AAH47363
auggaggugagaaagcugagcaucuccuggcaguuccucauuguccugguucuuauccugcaaauucucucugcccuggacuuugaucccuaccgggugcuuggcgugagccgcaccgcuucccaggccgacaucaaaaaggcguauaaaaagcuggcuagagaauggcacccugauaaaaacaaggacccgggggccgaggauaaguucauucagaucucuaaagccuacgaaauccucagcaaugaggaaaagcgguccaacuaugaccaguacggagaugcuggcgagaaucaaggguaucagaaacagcagcaacagcgcgaguacagauuucggcauuuccacgaaaacuuuuauuucgacgagucuuucuuccauuuucccuucaauagcgaacgcagagauuccauugacgagaaguaccugcugcacuuuagccauuacgucaacgaggugguuccugauucuuucaaaaagcccuaucucaucaagauuacauccgacuggugcuuuagcuguauccacauugaaccuguguggaaagaggucauccaggaacuggaggaacuuggagugggcauugggguugugcacgccggauacgagcggcgccuggcucaucaccucggcgcccauucuacgcccuccauccugggcaucauuaaugggaagaucagcuucuuccacaacgcggucgugagagagaaucuucggcaguuuguggaaucucugcucccuggaaaccuggucgagaaaguuaccaauaagaacuaugugcgcuuccuguccggcuggcaacaggaaaauaaaccgcacgugcuccuguuugaucagacacccauugucccucuucuguacaagcucaccgccuucgcuuauaaagacuaccugagcuuuggguauguguacguuggacuuagaggcacagaggaaaugacccggcgcuacaacaucaauauuuaugcccccacacugcucguguucaaggagcauaucaacagaccugcugacgucauccaagcccgggggaugaagaaacagauuaucgaugacuuuauuaccagaaacaaguaccugcuggcggcccgccucacgucccagaaacuguuccacgagcuuugccccgugaagcggucucauagacagcgcaaauauuguguugugcugcucaccgcugaaacaaccaagcugagcaagccguuugaggccuuccuuuccuuugcucuggccaauacacaagauaccguccgguucgugcacgucuacagcaacagacagcaggaauuugccgacacgcuccugccugauucugaggcuuuccagggaaaauccgcggugagcauccuggaacgccggaauacagccggcagaguuguguauaagacccucgaggaccccuggauuggcucugagagcgauaaauucauccugcuuggguaccuggaccaacuccgcaaggauccugcucugcuguccucugaagccguccuucccgaccucacagaugagcuggcccccguguuucugcuccggugguucuauagcgcuuccgacuacaucagcgacugcugggauucuauuuuucauaacaauuggagagaaaugaugccucugcuuucccugaucuucagcgcccucuuuauucuguucggaaccguuaucgugcaggcguuuucugacuccaacgaugagcgcgagagcuccccgcccgaaaaagaggaagcucaggagaagaccggcaagacagaaccuucuuucacgaaagagaauagcuccaagauucccaaaaagggguuugucgaggugaccgaacugacagacgugaccuacacaucuaaccuuguucggcucagaccuggacacaugaaugucgugcugauccugagcaacuccaccaaaacgagccuccugcagaaguucgcccuugagguguauacauuuaccgggucuuccugucugcacuucagcuuucucucucuggauaagcaucgggaauggcuggaguaccuucucgaauuugcccaagacgcugcccccauuccgaaucaguaugauaaacacuucauggagcgcgacuacaccggcuauguccuggcucugaacggacauaagaaauacuuuugccucuucaagccucagaaaacaguggaggaagaggaagccaucggcuccuguagcgauguugacucuagccuguaucuuggcgaguccagagggaagcccagcugcggacugggcucucggccuaucaaagggaagcucuccaagcugagccuguggauggaaagacuucucgagggaucccugcagcgcuuuuacauucccucuuggccugagcuggauuga

SEQ ID NO: 8241 - protein, 304 aa, Artificial Sequence
  DJC17__Homo_sapiens__Q9NVM6
MAVTKELLQMDLYALLGIEEKAADKEVKKAYRQKALSCHPDKNPDNPRAAELFHQLSQALEVLTDAAARAAYDKVRKAKKQAAERTQKLDEKRKKVKLDLEARERQAQAQESEEEEESRSTRTLEQEIERLREEGSRQLEEQQRLIREQIRQERDQRLRGKAENTEGQGTPKLKLKWKCKKEDESKGGYSKDVLLRLLQKYGEVLNLVLSSKKPGTAVVEFATVKAAELAVQNEVGLVDNPLKISWLEGQPQDAVGRSHSGLSKGSVLSERDYESLVMMRMRQAAERQQLIARMQQEDQEGPPT

SEQ ID NO: 8242 - RNA, 915 nt, Artificial Sequence
  DJC17__Homo_sapiens__AAH00048
auggcagugaccaaggagcucuuacagauggaccuguacgcgcugcuaggcauugaggagaaggcagcggacaaagagguaaagaaggcguauaggcagaaggcccucuccugccacccagacaaaaauccagauaaucccagagcagcugaacucuuccaccagcuuucucaggccuuggaggugcugaccgaugcugcagccagggcugcauaugacaaggucaggaaagccaagaagcaagcagcagagaggacccagaaacuugaugagaaaaggaagaaagugaagcuugaccuggaggcccgggagcggcaggcccaggcccaggagagugaggaggaagaggagagccggagcaccaggacacuagagcaagagaucgaacgccugagagaagaggguucccggcagcuggaggaacagcagaggcucauccgggagcagauacgccaggagcgugaccagagguugagaggaaaggcagaaaauacugaaggccaaggaacccccaaacuaaagcuaaaauggaagugcaagaaggaggaugagucaaaagguggcuacuccaaagacguccuccuacggcuuuugcagaaguauggugagguucucaaccuggugcuuuccaguaagaagccaggcacugcugugguggaguuugcaaccgucaaggcagcggagcuggcuguccagaaugaaguuggccugguggauaacccucugaagauuuccugguuggagggacagccccaggaugccgugggccgcagccacucaggacugucaaagggcucagugcugucagagagggacuacgagagccucgucaugaugcgcaugcgccaggcggccgagcggcaacagcugaucgcacggaugcagcaggaagaccaggaggggccgccuacguag

SEQ ID NO: 8243 - RNA, 915 nt, Artificial Sequence
  derived and/or modified sequence opt1 from DJC17__Homo_sapiens__AAH00048
auggccgugaccaaggagcugcuccagauggaccuguacgcccugcucggcaucgaggagaaggcggccgacaaggaggucaagaaggccuaccgccagaaggcccugagcugccaccccgacaagaaccccgacaacccccgggccgcggagcuguuccaccagcucucccaggcccuggaggugcugaccgacgccgccgcgcgcgccgccuacgacaaggugcggaaggccaagaagcaggccgcggagcgcacgcagaagcucgacgagaagcggaagaaggucaagcuggaccuggaggcccgcgagcggcaggcccaggcccaggagagcgaggaggaggaggagucccgcagcacccggacccucgagcaggagaucgagcgccugcgggaggaggggucccgccagcuggaggagcagcagcggcucauccgcgagcagauccggcaggagcgcgaccagcggcugcgcggcaaggccgagaacaccgaggggcagggcacgcccaagcugaagcucaaguggaagugcaagaaggaggacgagagcaagggcggguacuccaaggacgugcugcugcggcuccugcagaaguacggcgaggugcugaaccucguccugagcuccaagaagcccgggaccgcggugguggaguucgccaccgucaaggccgccgagcuggccgugcagaacgaggugggccucgucgacaacccgcugaagaucagcuggcuggaggggcagccccaggacgcggugggccgcucccacagcgggcucuccaagggcagcgugcuguccgagcgggacuacgagagccuggucaugaugcgcaugcgccaggccgccgagcggcagcagcucaucgcccgcaugcagcaggaggaccaggagggcccgcccaccuga

SEQ ID NO: 8244 - RNA, 915 nt, Artificial Sequence
  derived and/or modified sequence opt2 from DJC17__Homo_sapiens__AAH00048
auggccgucaccaaggagcuccuccagauggaccucuacgcccuccucggcaucgaggagaaggccgccgacaaggaggucaagaaggccuaccgccagaaggcccucuccugccaccccgacaagaaccccgacaacccccgcgccgccgagcucuuccaccagcucucccaggcccucgagguccucaccgacgccgccgcccgcgccgccuacgacaagguccgcaaggccaagaagcaggccgccgagcgcacccagaagcucgacgagaagcgcaagaaggucaagcucgaccucgaggcccgcgagcgccaggcccaggcccaggaguccgaggaggaggaggagucccgcuccacccgcacccucgagcaggagaucgagcgccuccgcgaggagggcucccgccagcucgaggagcagcagcgccucauccgcgagcagauccgccaggagcgcgaccagcgccuccgcggcaaggccgagaacaccgagggccagggcacccccaagcucaagcucaaguggaagugcaagaaggaggacgaguccaagggcggcuacuccaaggacguccuccuccgccuccuccagaaguacggcgagguccucaaccucguccucuccuccaagaagcccggcaccgccgucgucgaguucgccaccgucaaggccgccgagcucgccguccagaacgaggucggccucgucgacaacccccucaagaucuccuggcucgagggccagccccaggacgccgucggccgcucccacuccggccucuccaagggcuccguccucuccgagcgcgacuacgagucccucgucaugaugcgcaugcgccaggccgccgagcgccagcagcucaucgcccgcaugcagcaggaggaccaggagggcccccccaccuga

SEQ ID NO: 8245 - RNA, 915 nt, Artificial Sequence
  derived and/or modified sequence opt3 from DJC17__Homo_sapiens__AAH00048
auggccgugaccaaggagcugcuccagauggaccuuuacgcucuguugggcaucgaagagaaagcagccgauaaggaagucaaaaaggcguauagacaaaaggcuuuaagcugccaccccgacaagaacccugauaauccaagggccgcagagcuguuccaucagcuaucccaggcccucgaaguucugacagacgcugcagcccgggcugccuacgauaaggugcgcaaagcgaagaaacaggcagccgagcgaacucaaaaacuugacgagaaacguaagaagguaaaacuggauuuggaagcuagagagaggcaggcccaggcacaggaaucugaggaggaagaggaaucacggaguacgcgcacccucgagcaagaaauugagagacugagggaggaagggagccggcagcuggaggaacagcagcgccucauacgagagcaaaucagacaggaaagggaccagcgguuacguggaaaggcugagaacacagagggucaaggcacuccgaaacugaaacuuaaauggaaguguaaaaaggaagaugaguccaaagggggauauucuaaggacguguugcugcgccuacuccagaaguacggcgaaguccugaaucuugugcugucgucaaagaagcccgguaccgccguuguggaguuugcgacagucaaagccgcagaauuggcugugcagaacgagguagggcucguugauaauccucugaagauuagcugguuagagggacagccacaagacgccgugggcagaagucacuccggccugucuaaggggagcguccucuccgaaagggauuaugagucacuugugaugaugcggaugcgacaggcugccgaacgccagcagcugaucgcaagaaugcaacaggaggaccaggagggacccccuaccuga

SEQ ID NO: 8246 - RNA, 915 nt, Artificial Sequence
  derived and/or modified sequence opt4 from DJC17__Homo_sapiens__AAH00048
auggccgugaccaaggagcugcugcagauggaccuguacgcccugcugggcaucgaggagaaggccgccgacaaggaggugaagaaggccuacagacagaaggcccugagcugccaccccgacaagaaccccgacaaccccagagccgccgagcuguuccaccagcugagccaggcccuggaggugcugaccgacgccgccgccagagccgccuacgacaaggugagaaaggccaagaagcaggccgccgagagaacccagaagcuggacgagaagagaaagaaggugaagcuggaccuggaggccagagagagacaggcccaggcccaggagagcgaggaggaggaggagagcagaagcaccagaacccuggagcaggagaucgagagacugagagaggagggcagcagacagcuggaggagcagcagagacugaucagagagcagaucagacaggagagagaccagagacugagaggcaaggccgagaacaccgagggccagggcacccccaagcugaagcugaaguggaagugcaagaaggaggacgagagcaagggcggcuacagcaaggacgugcugcugagacugcugcagaaguacggcgaggugcugaaccuggugcugagcagcaagaagcccggcaccgccgugguggaguucgccaccgugaaggccgccgagcuggccgugcagaacgaggugggccugguggacaacccccugaagaucagcuggcuggagggccagccccaggacgccgugggcagaagccacagcggccugagcaagggcagcgugcugagcgagagagacuacgagagccuggugaugaugagaaugagacaggccgccgagagacagcagcugaucgccagaaugcagcaggaggaccaggagggcccccccaccuga

SEQ ID NO: 8247 - RNA, 915 nt, Artificial Sequence
  derived and/or modified sequence opt5 from DJC17__Homo_sapiens__AAH00048
auggccgugaccaaggagcugcuccagauggaccuguacgcccuucugggcaucgaagagaaagcugcggauaaggaagucaaaaaggcuuauagacaaaaagcccucagcugccaccccgacaagaacccugauaauccgcgggccgcugagcuguuccaucagcuuucccaggcccuggaaguucucacagacgcugccgcgcgcgccgcuuacgauaaggugagaaaagccaagaaacaggcugccgagcggacgcaaaagcuggacgagaaacgcaagaaggugaaacuggaucucgaagcgagagagcggcaggcccaggcucaggaaucugaggaggaagaggaaagccgcuccaccagaacacuggagcaagaaauugagcggcuucgcgaggaagggucuagacagcuggaggaacagcagcggcucauccgcgagcaaauuagacaggaacgggaccagcgccugagaggaaaggccgagaacaccgagggccaagggacacccaaacuuaagcugaaauggaaguguaaaaaggaagaugagagcaagggaggcuauuccaaagacguccuccugcggcugcuccagaaguacggggaagugcugaaucuuguucugucuagcaaaaagccuggaaccgcuguggucgaguuugccacagugaaagccgcugaacucgcgguucagaacgaggugggccuggucgauaauccccuuaagaucuccuggcuggagggccagccucaagacgccguggggagaagccacucuggacucuccaagggcagcgugcugucugaacgcgauuaugagucccuggucaugaugcggaugagacaggcugccgaacgccagcagcucauugcccggaugcaacaggaggaccaggaggggcccccuaccuga

SEQ ID NO: 8248 - protein, 358 aa, Artificial Sequence
  DJC18__Homo_sapiens__Q9H819
MAATLGSGERWTEAYIDAVRRNKYPEDTPPESHDPCGCCNCMKAQKEKKSENEWTQTRQGEGNSTYSEEQLLGVQRIKKCRNYYEILGVSRDASDEELKKAYRKLALKFHPDKNCAPGATDAFKAIGNAFAVLSNPDKRLRYDEYGDEQVTFTAPRARPYNYYRDFEADITPEELFNVFFGGHFPTGNIHMFSNVTDDTYYYRRRHRHERTQTQKEEEEEKPQTTYSAFIQLLPVLVIVIISVITQLLATNPPYSLFYKSTLGYTISRETQNLQVPYFVDKNFDKAYRGASLHDLEKTIEKDYIDYIQTSCWKEKQQKSELTNLAGLYRDERLKQKAESLKLENCEKLSKLIGLRRGG

SEQ ID NO: 8249 - RNA, 1077 nt, Artificial Sequence
  DJC18__Homo_sapiens__AAH30162
auggcggcgacucugggcagcggggagcgcuggacggaagcuuacauugacgcaguuagaagaaacaaauacccagaagacacaccuccugagagucaugaccccuguggcugcuguaacugcaugaaggcacaaaaggaaaagaagucugagaaugaguggacucagacccggcagggugaggggaacuccacguacagugaggaacagcugcuugggguacaaaggaucaagaaaugcagaaauuacuaugaaauucugggaguuucucgagaugcuagugacgaagagcuuaagaaagcuuacagaaaacucgcccugaaauuucacccugacaagaacugugcuccuggagcaacagaugcuuucaaagcaauaggaaaugcauuugcaguccugagcaauccugauaagagacuucgcuaugaugaauacggagaugaacaggugacuuucacugccccucgagccagaccuuauaauuauuacagggauuuugaagcugacaucacuccagaagagcuguucaacgucuucuuuggaggacauuuuccuacaggaaauauucauauguuuucaaaugugacagaugacacuuacuauuaccgucgacggcaccgacaugagaggacacagacucagaaggaggaggaagaagagaaaccucagacuacauauucugcauuuauucagcuacuuccaguucuugugauugugauuauaucugucauuacucagcugcuggcuacuaaucccccauauagucuguucuauaaaucgaccuugggcuacaccauuucuagagaaacucagaaccugcaggugccuuacuuuguggauaaaaacuuugacaaggccuacagaggagcuucucugcaugacuuggagaaaacaauagagaaggauuacauugauuauauccagacuaguuguuggaaggagaaacaacaaaagucagagcugacaaauuuggcaggauuauacagagaugaacgauugaaacagaaagcagagucgcugaaacuugaaaacugugagaaacuuuccaaacucauuggccuacgcagagguggcuga

SEQ ID NO: 8250 - RNA, 1077 nt, Artificial Sequence
  derived and/or modified sequence opt1 from DJC18__Homo_sapiens__AAH30162
auggccgccacccugggcagcggggagcgcuggaccgaggcguacaucgacgccgugcggcgcaacaaguaccccgaggacacgccgcccgagucccacgaccccugcggcugcugcaacugcaugaaggcccagaaggagaagaaguccgagaacgaguggacccagacccggcagggggagggcaacagcaccuacagcgaggagcagcuccuggggguccagcgcaucaagaagugccggaacuacuacgagauccugggcgugucccgcgacgccagcgacgaggagcucaagaaggccuaccggaagcuggcgcugaaguuccaccccgacaagaacugcgccccgggcgccacggacgccuucaaggcgaucgggaacgccuucgccgugcucuccaaccccgacaagcgccugcgguacgacgaguacggcgacgagcaggucaccuucaccgcgccccgcgcccggcccuacaacuacuaccgcgacuucgaggccgacaucaccccggaggagcuguucaacguguucuucgggggccacuuccccacggggaacauccacauguucagcaacgugaccgacgacaccuacuacuaccggcgccggcaccgccacgagcggacccagacgcagaaggaggaggaggaggagaagccccagaccaccuacuccgccuucauccagcuccugcccguccuggugaucgugaucaucagcgucaucacccagcuccuggccacgaacccgcccuacucccuguucuacaagagcacccucggcuacaccaucucccgcgagacccagaaccuccaggugcccuacuucguggacaagaacuucgacaaggccuaccggggcgccagccugcacgaccuggagaagacgaucgagaaggacuacaucgacuacauccagaccuccugcuggaaggagaagcagcagaaguccgagcugaccaaccuggcggggcucuaccgcgacgagcggcugaagcagaaggccgagagccugaagcucgagaacugcgagaagcugagcaagcugaucggccuccgccgcgggggcuga

SEQ ID NO: 8251 - RNA, 1077 nt, Artificial Sequence
  derived and/or modified sequence opt2 from DJC18__Homo_sapiens__AAH30162
auggccgccacccucggcuccggcgagcgcuggaccgaggccuacaucgacgccguccgccgcaacaaguaccccgaggacaccccccccgagucccacgaccccugcggcugcugcaacugcaugaaggcccagaaggagaagaaguccgagaacgaguggacccagacccgccagggcgagggcaacuccaccuacuccgaggagcagcuccucggcguccagcgcaucaagaagugccgcaacuacuacgagauccucggcgucucccgcgacgccuccgacgaggagcucaagaaggccuaccgcaagcucgcccucaaguuccaccccgacaagaacugcgcccccggcgccaccgacgccuucaaggccaucggcaacgccuucgccguccucuccaaccccgacaagcgccuccgcuacgacgaguacggcgacgagcaggucaccuucaccgccccccgcgcccgccccuacaacuacuaccgcgacuucgaggccgacaucacccccgaggagcucuucaacgucuucuucggcggccacuuccccaccggcaacauccacauguucuccaacgucaccgacgacaccuacuacuaccgccgccgccaccgccacgagcgcacccagacccagaaggaggaggaggaggagaagccccagaccaccuacuccgccuucauccagcuccuccccguccucgucaucgucaucaucuccgucaucacccagcuccucgccaccaacccccccuacucccucuucuacaaguccacccucggcuacaccaucucccgcgagacccagaaccuccagguccccuacuucgucgacaagaacuucgacaaggccuaccgcggcgccucccuccacgaccucgagaagaccaucgagaaggacuacaucgacuacauccagaccuccugcuggaaggagaagcagcagaaguccgagcucaccaaccucgccggccucuaccgcgacgagcgccucaagcagaaggccgagucccucaagcucgagaacugcgagaagcucuccaagcucaucggccuccgccgcggcggcuga

SEQ ID NO: 8252 - RNA, 1077 nt, Artificial Sequence
  derived and/or modified sequence opt3 from DJC18__Homo_sapiens__AAH30162
auggccgcuacccugggcagcggggagagauggacagaagcauacaucgacgccgugaggcggaacaaguaucccgaggauacuccuccagaaucccacgacccgugcggauguugcaauuguaugaaagcgcagaaggagaaaaagucugaaaacgaguggacgcaaacccgccagggugagggcaauucaacauacagugaggaacagcuccuugggguccagcgaauuaaaaagugccguaacuauuacgaaauacugggaguuagcagagaugcuuccgacgaggaguugaagaaagccuauaggaaguuagcacugaaauuccaucccgauaagaauugugccccuggcgcuacugacgcauuuaaagccaucgguaacgcuuucgccgugcuaucuaauccagauaagcggcuccgcuacgacgaauauggggaugagcaaguaaccuuuacagcgcccagagcaaggccuuacaacuacuaucgggacuucgaagccgauauuaccccagaggaacuguuuaauguguucuuuggaggccacuuccccacuggcaacauccauauguuuucgaaugucacagacgauaccuacuauuaccgccgaagacacaggcaugagcggacgcagacucagaaggaggaagaggaagagaaaccucagaccacauauucagcuuucauucaacuucugccaguguugguuaucgugauaaucagcgucauuacucagcuccuggccaccaacccgcccuacagucuguuuuauaaguccacacucggguacaccaucucucgugaaacgcagaauuuacaggugccuuacuucguagacaaaaacuuugacaaggcauaucgcggagcuagccugcacgaucuugagaaaacuauugagaaggacuacaucgauuauauacaaacauccugcuggaaagaaaagcagcagaagucagaguugaccaaucuggccggucuauacagagacgaaaggcucaaacaaaaggcggagagucugaaacuugaaaacugugagaagcugagcaaauugauuggccuccggcgagggggauga

SEQ ID NO: 8253 - RNA, 1077 nt, Artificial Sequence
  derived and/or modified sequence opt4 from DJC18__Homo_sapiens__AAH30162
auggccgccacccugggcagcggcgagagauggaccgaggccuacaucgacgccgugagaagaaacaaguaccccgaggacaccccccccgagagccacgaccccugcggcugcugcaacugcaugaaggcccagaaggagaagaagagcgagaacgaguggacccagaccagacagggcgagggcaacagcaccuacagcgaggagcagcugcugggcgugcagagaaucaagaagugcagaaacuacuacgagauccugggcgugagcagagacgccagcgacgaggagcugaagaaggccuacagaaagcuggcccugaaguuccaccccgacaagaacugcgcccccggcgccaccgacgccuucaaggccaucggcaacgccuucgccgugcugagcaaccccgacaagagacugagauacgacgaguacggcgacgagcaggugaccuucaccgcccccagagccagacccuacaacuacuacagagacuucgaggccgacaucacccccgaggagcuguucaacguguucuucggcggccacuuccccaccggcaacauccacauguucagcaacgugaccgacgacaccuacuacuacagaagaagacacagacacgagagaacccagacccagaaggaggaggaggaggagaagccccagaccaccuacagcgccuucauccagcugcugcccgugcuggugaucgugaucaucagcgugaucacccagcugcuggccaccaacccccccuacagccuguucuacaagagcacccugggcuacaccaucagcagagagacccagaaccugcaggugcccuacuucguggacaagaacuucgacaaggccuacagaggcgccagccugcacgaccuggagaagaccaucgagaaggacuacaucgacuacauccagaccagcugcuggaaggagaagcagcagaagagcgagcugaccaaccuggccggccuguacagagacgagagacugaagcagaaggccgagagccugaagcuggagaacugcgagaagcugagcaagcugaucggccugagaagaggcggcuga

SEQ ID NO: 8254 - RNA, 1077 nt, Artificial Sequence
  derived and/or modified sequence opt5 from DJC18__Homo_sapiens__AAH30162
auggccgcuacccugggcagcggggagagauggacagaagccuacaucgacgcggugcggcgcaacaaguaucccgaggauacgccuccggaaucccacgaccccugcggauguugcaauuguaugaaagcucagaaggagaaaaagucugaaaacgaguggacccaaacaagacagggcgaggggaauagcaccuacuccgaggaacagcuccugggaguccagcggauuaaaaagugccgcaacuauuacgaaauccuuggcguuucuagagaugccagcgacgaggagcugaagaaagccuaucggaagcucgcucugaaauuccauccugauaagaauugugcccccggggcuacagacgccuuuaaagcgauuggaaacgccuucgcugugcuuuccaauccugauaagcgccugagauacgacgaauauggcgaugagcaagugaccuuuacagcuccccgggcccgcccuuacaacuacuauagagacuucgaagccgauaucaccccggaggaacucuuuaaugucuucuuuggcgggcacuuccccacgggaaacauucauauguuuucuaaugugaccgacgauacauacuauuaccggcgcagacaccggcaugagcgcacccagacacagaaggaggaagaggaagagaaaccucagaccacguauagcgcguucauccaacugcugcccguucucgugaucgucauuaucuccgugauuacacagcugcuugccaccaacccucccuacagccuguuuuauaagucuacacucggcuacaccaucuccagagaaacccagaaucugcagguuccguacuucguggacaaaaacuuugacaaggcuuauagaggggccagccuucacgaucuggagaaaacaauugagaaggacuacaucgauuauauucaaacgucuugcuggaaagaaaagcagcagaaguccgagcucaccaaucuggcuggacuguaccgggacgaacgccucaaacaaaaggccgagagccugaaacuugaaaacugugagaagcugucuaaacucaucggccugcggagagggggauga

SEQ ID NO: 8255 - protein, 341 aa, Artificial Sequence
  DJC22__Homo_sapiens__Q8N4W6
MAKGLLVTYALWAVGGPAGLHHLYLGRDSHALLWMLTLGGGGLGWLWEFWKLPSFVAQANRAQGQRQSPRGVTPPLSPIRFAAQVIVGIYFGLVALISLSSMVNFYIVALPLAVGLGVLLVAAVGNQTSDFKNTLGSAFLTSPIFYGRPIAILPISVAASITAQRHRRYKALVASEPLSVRLYRLGLAYLAFTGPLAYSALCNTAATLSYVAETFGSFLNWFSFFPLLGRLMEFVLLLPYRIWRLLMGETGFNSSCFQEWAKLYEFVHSFQDEKRQLAYQVLGLSEGATNEEIHRSYQELVKVWHPDHNLDQTEEAQRHFLEIQAAYEVLSQPRKPWGSRR

SEQ ID NO: 8256 - RNA, 1026 nt, Artificial Sequence
  DJC22__Homo_sapiens__AAH33236
auggccaaggggcuccuggugaccuaugcccucugggcuguggggggcccugcugggcuccaccaccuguaccugggaagggacagccacgcccugcucuggaugcugacccuggggggaggugggcugggcuggcucugggaguucuggaagcucccaagcuuuguagcucaggccaacagagcccagggacagaggcagagccccagaggggugacacccccucugagucccauucgcuuugcugcccaggugauaguuggcaucuauuuuggccuuguggcacugauuagccuuucuuccauggucaacuucuauauuguggcccucccacuggcaguuggcuuaggggucuugcugguggcugcuguuggcaaccagaccucagacuuuaagaacacucuggggucagcauuucucacuucaccuaucuucuauggccgccccauagccauacugcccauuagcguggccgccagcauuacagcucagaggcaucgccgcuacaaagcuuugguggcaucagagccgcucagugugcggcucuaucgucugggcuuggcuuaccuugcuuucacaggcccacuggcauacagugcccucugcaacacagcugccacccucagcuauguggcagaaaccuuuggcuccuucuugaauugguucagcuucuucccccuucuuggccgccucauggaguuuguccuccuucugccuuaccggaucuggaggcuacugaugggggagacuggcuucaacagcagcugcuuucaggagugggcgaagcucuaugaguuuguucacaguuuucaggaugagaagcgucagcuggcuuaccagguuuugggccucucagaaggggcaacaaaugaagaaauacaucggaguuaccaggagcuagugaaggucuggcacccagaccacaaccuggaccagacagaggaggcacagaggcacuuccuggagauccaggcugcguaugaaguccugagucaacccaggaagcccuggggaucccggagguga

SEQ ID NO: 8257 - RNA, 1026 nt, Artificial Sequence
  derived and/or modified sequence opt1 from DJC22__Homo_sapiens__AAH33236
auggccaagggccugcucgugaccuacgcccugugggcggucgggggccccgccgggcugcaccaccucuaccugggccgcgacagccacgcccugcucuggaugcugacccucgggggcggcgggcugggcuggcugugggaguucuggaagcugccguccuucguggcccaggccaaccgggcgcaggggcagcgccagagcccccggggcgugacgccgccccucucccccauccgcuucgccgcccaggucaucguggggaucuacuucggccugguggcccugaucagccucuccagcauggucaacuucuacaucguggcgcugccccuggccgugggccucgggguccugcugguggccgccgugggcaaccagaccuccgacuucaagaacacccucgggagcgccuuccugaccucccccaucuucuacggccggcccaucgcgauccugccgaucagcgucgccgccuccaucacggcccagcgccaccggcgcuacaaggcccucguggcgagcgagccccuguccgugcggcuguaccgccucggccuggccuaccuggccuucaccgggccccucgccuacagcgcccugugcaacaccgcggccacccuguccuacgucgccgagacguucggcagcuuccucaacugguucuccuucuucccccugcuggggcggcucauggaguucgugcugcugcucccguaccgcaucuggcggcugcugaugggcgagaccggguucaacagcuccugcuuccaggagugggccaagcucuacgaguucgugcacagcuuccaggacgagaagcgccagcuggccuaccagguccugggccucagcgagggcgcgaccaacgaggagauccaccgguccuaccaggagcuggugaagguguggcaccccgaccacaaccuggaccagaccgaggaggcccagcgccacuuccucgagauccaggccgccuacgagguccugagccagccccggaagcccugggggucccgccgguga

SEQ ID NO: 8258 - RNA, 1026 nt, Artificial Sequence
  derived and/or modified sequence opt2 from DJC22__Homo_sapiens__AAH33236
auggccaagggccuccucgucaccuacgcccucugggccgucggcggccccgccggccuccaccaccucuaccucggccgcgacucccacgcccuccucuggaugcucacccucggcggcggcggccucggcuggcucugggaguucuggaagcuccccuccuucgucgcccaggccaaccgcgcccagggccagcgccaguccccccgcggcgucacccccccccucucccccauccgcuucgccgcccaggucaucgucggcaucuacuucggccucgucgcccucaucucccucuccuccauggucaacuucuacaucgucgcccucccccucgccgucggccucggcguccuccucgucgccgccgucggcaaccagaccuccgacuucaagaacacccucggcuccgccuuccucaccucccccaucuucuacggccgccccaucgccauccuccccaucuccgucgccgccuccaucaccgcccagcgccaccgccgcuacaaggcccucgucgccuccgagccccucuccguccgccucuaccgccucggccucgccuaccucgccuucaccggcccccucgccuacuccgcccucugcaacaccgccgccacccucuccuacgucgccgagaccuucggcuccuuccucaacugguucuccuucuucccccuccucggccgccucauggaguucguccuccuccuccccuaccgcaucuggcgccuccucaugggcgagaccggcuucaacuccuccugcuuccaggagugggccaagcucuacgaguucguccacuccuuccaggacgagaagcgccagcucgccuaccagguccucggccucuccgagggcgccaccaacgaggagauccaccgcuccuaccaggagcucgucaaggucuggcaccccgaccacaaccucgaccagaccgaggaggcccagcgccacuuccucgagauccaggccgccuacgagguccucucccagccccgcaagcccuggggcucccgccgcuga

SEQ ID NO: 8259 - RNA, 1026 nt, Artificial Sequence
  derived and/or modified sequence opt3 from DJC22__Homo_sapiens__AAH33236
auggccaagggccugcucgugaccuacgcucuuugggcagucgggggacccgccggucugcaccauuuguauuuaggcagagacagccacgcgcugcuauggaugcucacacuugggggaggcggucugggguggcugugggaguucuggaaauugccuuccuuuguugcucaggccaacagggcacaaggacagcggcagucuccacgcggcgugacuccgccccucucaccuauccgauucgccgcucagguaauugugggcauauacuuugggcuggucgcacugaucagucucagcuccauggugaauuucuauauuguugccuuaccacuggcugugggacuuggugucuugcugguggccgcgguaggcaaccaaacgucugauuuuaagaauacccuagggucggcauuccucacaucacccaucuuuuacggacguccuauugccauccugccaauaagcguugcugccaguaucacugcacagagacauaggcgguauaaagcucuuguggccuccgaaccccugucuguccgcuuguacagacucggccuggcguauuuagccuucaccgguccucuggcauacagcgcucucugcaacacagccgcuacccuuuccuacguggccgagacuuuugggucauuccugaauugguuuaguuucuuuccauugcuaggaaggcugauggaguucgugcuccugcuuccguaucggauuuggcgccuguugaugggcgaaacaggcuucaacagcucuuguuuucaggaaugggcaaagcucuacgaguucguccacuccuuucaggacgagaaacgacaacuggccuaucagguuuuagggcugucagaaggagcuaccaaugaggaaauccauagaagcuaccaggagcuagugaagguauggcaccccgaucacaaccucgaccagacggaggaagcgcaaaggcauuuccuggagauucaggcagccuaugaagugcuuagucagccucggaagccaugggguucucgucgcuga

SEQ ID NO: 8260 - RNA, 1026 nt, Artificial Sequence
  derived and/or modified sequence opt4 from DJC22__Homo_sapiens__AAH33236
auggccaagggccugcuggugaccuacgcccugugggccgugggcggccccgccggccugcaccaccuguaccugggcagagacagccacgcccugcuguggaugcugacccugggcggcggcggccugggcuggcugugggaguucuggaagcugcccagcuucguggcccaggccaacagagcccagggccagagacagagccccagaggcgugacccccccccugagccccaucagauucgccgcccaggugaucgugggcaucuacuucggccugguggcccugaucagccugagcagcauggugaacuucuacaucguggcccugccccuggccgugggccugggcgugcugcugguggccgccgugggcaaccagaccagcgacuucaagaacacccugggcagcgccuuccugaccagccccaucuucuacggcagacccaucgccauccugcccaucagcguggccgccagcaucaccgcccagagacacagaagauacaaggcccugguggccagcgagccccugagcgugagacuguacagacugggccuggccuaccuggccuucaccggcccccuggccuacagcgcccugugcaacaccgccgccacccugagcuacguggccgagaccuucggcagcuuccugaacugguucagcuucuucccccugcugggcagacugauggaguucgugcugcugcugcccuacagaaucuggagacugcugaugggcgagaccggcuucaacagcagcugcuuccaggagugggccaagcuguacgaguucgugcacagcuuccaggacgagaagagacagcuggccuaccaggugcugggccugagcgagggcgccaccaacgaggagauccacagaagcuaccaggagcuggugaagguguggcaccccgaccacaaccuggaccagaccgaggaggcccagagacacuuccuggagauccaggccgccuacgaggugcugagccagcccagaaagcccuggggcagcagaagauga

SEQ ID NO: 8261 - RNA, 1026 nt, Artificial Sequence
  derived and/or modified sequence opt5 from DJC22__Homo_sapiens__AAH33236
auggccaagggccugcucgugaccuacgcucugugggccgucgggggacccgcgggccuucaccaucuguaucucgggagagacagccacgcucugcuuuggaugcugacacucggaggcgggggacugggcuggcugugggaguucuggaaacucccuuccuuuguugcccaggccaaccgggcucaaggccagcgccagucuccgagaggggugacgcccccucugagccccauccgguucgccgcucaggugauugucggaaucuacuuuggccuuguggcccugauuucccucucuagcaugguuaauuucuauaucguggcgcugccucuugccgucgggcugggagugcuccugguugcugccgugggcaaccaaaccuccgauuuuaagaauacacuggggucugcuuuccucaccagccccauuuucuacggacgcccuaucgccauccugccgauuuccgucgcggccagcaucacagcucagagacaucggcgcuauaaagcccuuguggcuucugaaccccuguccgugagacucuaccggcugggccuugccuaucuggccuucaccggcccucucgcuuacagcgcgcugugcaacacagccgcuacccugucuuacgucgccgagacguuuggguccuuccucaauugguuuagcuucuuuccccugcuuggacgccugauggaauuuguucuccugcuuccuuauagaauuuggcggcugcucaugggcgagaccggguucaacucuuccuguuuucaggaaugggccaagcuguacgaguucgugcacagcuuucaggacgagaaacgccaacuggcuuaucaggugcucggacuguccgaaggcgccacaaaugaggaaauccauagaucuuaccaggagcuugucaagguguggcaccccgaucacaaccuggaccagaccgaggaagcgcaacggcauuuccucgagauucaggcugccuaugaaguucugagccagccgcgcaagccuuggggguccagacgguga

SEQ ID NO: 8262 - protein, 148 aa, Artificial Sequence
  DJC24__Homo_sapiens__Q6P3W2
MAVEQMPKKDWYSILGADPSANISDLKQKYQKLILMYHPDKQSTDVPAGTVEECVQKFIEIDQAWKILGNEETKREYDLQRCEDDLRNVGPVDAQVYLEEMSWNEGDHSFYLSCRCGGKYSVSKDEAEEVSLISCDTCSLIIELLHYN

SEQ ID NO: 8263 - RNA, 447 nt, Artificial Sequence
  DJC24__Homo_sapiens__AAH63804
auggcgguugagcagaugccaaaaaaggauugguacagcauccugggagcagacccaucugcaaauauaucagaccuaaaacaaaaauaucaaaaacucauauuaauguaucauccagauaaacaaaguacagauguaccagcaggaacaguggaggaauguguacagaaguucaucgaaauugaucaagcauggaaaauucuaggaaaugaagagacaaaaagagaguaugaccugcagcggugugaagaugaucuaagaaauguaggaccaguagaugcucaaguauaucuugaagaaaugucuuggaaugaaggugaucacucuuuuuaucugaguugcagaugugguggaaaauacaguguuuccaaggaugaagcggaagaaguuagccugauuucuugugauacauguucacuaauuauagaacuccuucauuauaacuaa

SEQ ID NO: 8264 - RNA, 447 nt, Artificial Sequence
  derived and/or modified sequence opt1 from DJC24__Homo_sapiens__AAH63804
auggccguggagcagaugcccaagaaggacugguacagcauccugggcgccgacccguccgcgaacaucagcgaccucaagcagaaguaccagaagcugauccugauguaccaccccgacaagcaguccaccgacguccccgccgggaccguggaggagugcgugcagaaguucaucgagaucgaccaggccuggaagauccucggcaacgaggagaccaagcgcgaguacgaccugcagcggugcgaggacgaccugcgcaacgucgggcccguggacgcccagguguaccucgaggagaugagcuggaacgagggcgaccacuccuucuaccugagcugccggugcgggggcaaguacuccgucagcaaggacgaggccgaggaggugucccugaucagcugcgacacgugcucccucaucaucgagcugcugcacuacaacuga

SEQ ID NO: 8265 - RNA, 447 nt, Artificial Sequence
  derived and/or modified sequence opt2 from DJC24__Homo_sapiens__AAH63804
auggccgucgagcagaugcccaagaaggacugguacuccauccucggcgccgaccccuccgccaacaucuccgaccucaagcagaaguaccagaagcucauccucauguaccaccccgacaagcaguccaccgacguccccgccggcaccgucgaggagugcguccagaaguucaucgagaucgaccaggccuggaagauccucggcaacgaggagaccaagcgcgaguacgaccuccagcgcugcgaggacgaccuccgcaacgucggccccgucgacgcccaggucuaccucgaggagauguccuggaacgagggcgaccacuccuucuaccucuccugccgcugcggcggcaaguacuccgucuccaaggacgaggccgaggaggucucccucaucuccugcgacaccugcucccucaucaucgagcuccuccacuacaacuga

SEQ ID NO: 8266 - RNA, 447 nt, Artificial Sequence
  derived and/or modified sequence opt3 from DJC24__Homo_sapiens__AAH63804
auggccguggagcagaugcccaagaaagacugguacagcauccugggcgcugauccuuccgcaaacauuucugaccucaagcaaaaauaucagaaacuuauacugauguaccacccagauaagcagucaaccgacgucccggccgggacaguugaagagugcgugcagaaguucaucgaaauugaucaagcguggaagaucuugggaaaugaggaaacuaaaagagaguaugacuuacagaggugugaggaugaccugcggaacguaggucccguggaugcucaggucuaccuagaagagaugaguuggaaugaaggcgaccauagcuuuuaucucuccugccgcugugggggaaaguacucugugucgaaagaugaggccgaggaaguuucacugauuagcugcgacacguguagucuuaucauagagcuguugcacuauaacuga

SEQ ID NO: 8267 - RNA, 447 nt, Artificial Sequence
  derived and/or modified sequence opt4 from DJC24__Homo_sapiens__AAH63804
auggccguggagcagaugcccaagaaggacugguacagcauccugggcgccgaccccagcgccaacaucagcgaccugaagcagaaguaccagaagcugauccugauguaccaccccgacaagcagagcaccgacgugcccgccggcaccguggaggagugcgugcagaaguucaucgagaucgaccaggccuggaagauccugggcaacgaggagaccaagagagaguacgaccugcagagaugcgaggacgaccugagaaacgugggccccguggacgcccagguguaccuggaggagaugagcuggaacgagggcgaccacagcuucuaccugagcugcagaugcggcggcaaguacagcgugagcaaggacgaggccgaggaggugagccugaucagcugcgacaccugcagccugaucaucgagcugcugcacuacaacuga

SEQ ID NO: 8268 - RNA, 447 nt, Artificial Sequence
  derived and/or modified sequence opt5 from DJC24__Homo_sapiens__AAH63804
auggccguggagcagaugcccaagaaagacugguacagcauccugggcgcugauccuuccgccaacauuucugaccucaagcaaaaauaucagaagcugauccuuauguaccacccggauaaacagagcaccgacguccccgcggggacaguugaagagugcgugcagaaguucauugaaaucgaucaggcuuggaagauucugggaaaugaggaaacgaaaagagaguaugaccuccaacggugugaggaugaccugcgcaacgugggcccugucgaugcccagguguaccuugaagagauguccuggaaugaaggggaccauucuuuuuaucugagcugcagauguggaggcaaguacuccguuucuaaagaugaggccgaggaagugagccucaucuccugcgacaccuguagccugaucauugagcugcuccacuauaacuga

SEQ ID NO: 8269 - protein, 360 aa, Artificial Sequence
  DJC25__Homo_sapiens__Q9H1X3
MGAPLLSPGWGAGAAGRRWWMLLAPLLPALLLVRPAGALVEGLYCGTRDCYEVLGVSRSAGKAEIARAYRQLARRYHPDRYRPQPGDEGPGRTPQSAEEAFLLVATAYETLKDEETRKDYDYMLDHPEEYYSHYYHYYSRRLAPKVDVRVVILVSVCAISVFQFFSWWNSYNKAISYLATVPKYRIQATEIAKQQGLLKKAKEKGKNKKSKEEIRDEEENIIKNIIKSKIDIKGGYQKPQICDLLLFQIILAPFHLCSYIVWYCRWIYNFNIKGKEYGEEERLYIIRKSMKMSKSQFDSLEDHQKETFLKRELWIKENYEVYKQEQEEELKKKLANDPRWKRYRRWMKNEGPGRLTFVDD

SEQ ID NO: 8270 - RNA, 1083 nt, Artificial Sequence
  DJC25__Homo_sapiens__AAH48318
augggggcgccgcugcucucucccggcuggggagccggggcugccggccggcgcugguggaugcugcuggcgccccugcugccggcgcugcugcuggugcggcccgcgggggcccugguggaggggcucuacugcggcacgcgggacugcuacgaggugcugggcgugagccgcucggcgggcaaggcggagaucgcgcgggccuaccgccagcuggcccggcgcuaccacccugaccgcuaccggccccagcccggagacgagggccccgggcggacgccgcagagcgccgaggaggcuuuccugcugguggcaaccgccuacgagacacucaaggaugaagaaacacgaaaagauuaugauuacaugcuggaucauccagaagaguacuacagccauuacuaccacuacuauagcaggcgcuuggccccuaagguggauguuagaguagugauuuuggucagcgugugugcuauuucgguguuucaguuuuucagcugguggaauagcuacaauaaggcaaucagcuaccuagccacagugcccaaguaccguauccaagcuacagagauugccaagcagcagggacugcucaaaaaagccaaagaaaaaggcaaaaacaaaaaguccaaagaagaaauucgugacgaggaggagaacaucauaaagaacauuauaaaaaguaaaauagauauaaaggggggcuaucagaaaccccaaaucugugaucuucuccuguuucaaauuaucuuagcuccuuuucaccuaugcucauauauaguuugguauugucgguggaucuauaauuuuaacaucaaaggcaaagaauauggagaggaagagagauuauacauuauacguaaaucuaugaagaugucaaagucucaauuugauagucuagaagaucaucagaaagaaacuuuucuuaaacgagagcucuggaucaaggagaauuaugaggucuacaagcaagaacaagaggaagaauuaaagaaaaaguuggcaaaugaccccagauggaagagauacaggagauggaugaagaaugaagggccugggcgguuaacauuugucgaugacuga

SEQ ID NO: 8271 - RNA, 1083 nt, Artificial Sequence
  derived and/or modified sequence opt1 from DJC25__Homo_sapiens__AAH48318
augggcgcgccccugcucagcccgggguggggcgccggggccgccggccgccggugguggaugcugcuggcgccccuccugcccgcccugcuccuggugcgccccgccggggcccuggucgagggccucuacugcggcacccgggacugcuacgaggugcugggggugucccgcagcgccggcaaggccgagaucgcccgggcguaccgccagcuggcccggcgcuaccacccggaccgguaccgcccccagcccggggacgagggccccgggcggaccccgcaguccgccgaggaggccuuccuccuggucgccacggcguacgagacccugaaggacgaggagacccgcaaggacuacgacuacaugcucgaccaccccgaggaguacuacagccacuacuaccacuacuacucccggcgccuggcccccaagguggacgugcgggucgugauccuggugagcgucugcgccaucuccguguuccaguucuucagcugguggaacuccuacaacaaggccaucagcuaccucgccaccgugcccaaguaccgcauccaggcgacggagaucgccaagcagcagggccugcugaagaaggccaaggagaagggcaagaacaagaaguccaaggaggagauccgggacgaggaggagaacaucaucaagaacaucaucaagagcaagaucgacaucaagggcggguaccagaagccgcagaucugcgaccuccugcuguuccagaucauccucgcccccuuccaccugugcuccuacaucgucugguacugccgcuggaucuacaacuucaacaucaaggggaaggaguacggcgaggaggagcggcuguacaucauccgcaagagcaugaagauguccaagagccaguucgacucccucgaggaccaccagaaggagaccuuccugaagcgggagcuguggaucaaggagaacuacgagguguacaagcaggagcaggaggaggagcucaagaagaagcuggccaacgacccccgcuggaagcgcuaccggcgcuggaugaagaacgagggccccgggcggcugaccuucguggacgacuga

SEQ ID NO: 8272 - RNA, 1083 nt, Artificial Sequence
  derived and/or modified sequence opt2 from DJC25__Homo_sapiens__AAH48318
augggcgccccccuccucucccccggcuggggcgccggcgccgccggccgccgcugguggaugcuccucgccccccuccuccccgcccuccuccucguccgccccgccggcgcccucgucgagggccucuacugcggcacccgcgacugcuacgagguccucggcgucucccgcuccgccggcaaggccgagaucgcccgcgccuaccgccagcucgcccgccgcuaccaccccgaccgcuaccgcccccagcccggcgacgagggccccggccgcaccccccaguccgccgaggaggccuuccuccucgucgccaccgccuacgagacccucaaggacgaggagacccgcaaggacuacgacuacaugcucgaccaccccgaggaguacuacucccacuacuaccacuacuacucccgccgccucgcccccaaggucgacguccgcgucgucauccucgucuccgucugcgccaucuccgucuuccaguucuucuccugguggaacuccuacaacaaggccaucuccuaccucgccaccguccccaaguaccgcauccaggccaccgagaucgccaagcagcagggccuccucaagaaggccaaggagaagggcaagaacaagaaguccaaggaggagauccgcgacgaggaggagaacaucaucaagaacaucaucaaguccaagaucgacaucaagggcggcuaccagaagccccagaucugcgaccuccuccucuuccagaucauccucgcccccuuccaccucugcuccuacaucgucugguacugccgcuggaucuacaacuucaacaucaagggcaaggaguacggcgaggaggagcgccucuacaucauccgcaaguccaugaagauguccaagucccaguucgacucccucgaggaccaccagaaggagaccuuccucaagcgcgagcucuggaucaaggagaacuacgaggucuacaagcaggagcaggaggaggagcucaagaagaagcucgccaacgacccccgcuggaagcgcuaccgccgcuggaugaagaacgagggccccggccgccucaccuucgucgacgacuga

SEQ ID NO: 8273 - RNA, 1083 nt, Artificial Sequence
  derived and/or modified sequence opt3 from DJC25__Homo_sapiens__AAH48318
augggcgcuccccugcucagcccuggguggggagccggugcagccggcagaaggugguggaugcuucuggcgccauuguuaccggcucugcuacucgugcggcccgccggggcacuggucgagggacuuuacugcggcacccgcgacuguuaugaaguucugggugugucccgaucugccgggaaggcugagaucgcacgugccuacagacaguuggcuaggcgguaucacccugaucgcuacagaccacaacccggagacgaaggcccuggcaggacaccacagucagccgaggaagcguuccuccugguagcaacugccuaugagacgcugaaagaugaggaaacccggaaggacuacgauuauaugcucgaccaucccgaggaauacuacagucacuauuaccauuauuacagccgccgauuagcuccuaaaguggaugucagagugguuauucugguguccgucugcgccauaucuguguuucaguucuuuucgugguggaacucauauaauaaggcaaucagcuaccuugcuacaguaccaaaauauaggauucaggccacugagaucgcgaagcaacagggguugcugaagaaagccaaggagaaaggaaagaacaaaaagaguaaggaagagauucgggacgaagaggaaaauaucaucaaaaacauaauuaaguccaaaaucgauauuaaggguggcuaccagaaaccgcagaucugugaccuacuccuguuccaaauaauucuugcacccuuucaccugugcucuuacaucguuugguauugucguuggauuuacaauuucaacaucaaggggaaagaguauggagaggaagaacgcuuguacaucauuagaaagagcaugaagauguccaaaucacaguuugauagucucgaagaccaucagaaggagaccuuccugaaaagggaauuauggauaaaggagaauuaugagguguacaaacaggaacaagaggaggagcugaagaagaaacucgcuaacgauccucgguggaagcgauaucgcagauggaugaaaaaugaaggcccagguaggcuuacauuugucgacgacuga

SEQ ID NO: 8274 - RNA, 1083 nt, Artificial Sequence
  derived and/or modified sequence opt4 from DJC25__Homo_sapiens__AAH48318
augggcgccccccugcugagccccggcuggggcgccggcgccgccggcagaagaugguggaugcugcuggccccccugcugcccgcccugcugcuggugagacccgccggcgcccugguggagggccuguacugcggcaccagagacugcuacgaggugcugggcgugagcagaagcgccggcaaggccgagaucgccagagccuacagacagcuggccagaagauaccaccccgacagauacagaccccagcccggcgacgagggccccggcagaaccccccagagcgccgaggaggccuuccugcugguggccaccgccuacgagacccugaaggacgaggagaccagaaaggacuacgacuacaugcuggaccaccccgaggaguacuacagccacuacuaccacuacuacagcagaagacuggcccccaagguggacgugagaguggugauccuggugagcgugugcgccaucagcguguuccaguucuucagcugguggaacagcuacaacaaggccaucagcuaccuggccaccgugcccaaguacagaauccaggccaccgagaucgccaagcagcagggccugcugaagaaggccaaggagaagggcaagaacaagaagagcaaggaggagaucagagacgaggaggagaacaucaucaagaacaucaucaagagcaagaucgacaucaagggcggcuaccagaagccccagaucugcgaccugcugcuguuccagaucauccuggcccccuuccaccugugcagcuacaucgugugguacugcagauggaucuacaacuucaacaucaagggcaaggaguacggcgaggaggagagacuguacaucaucagaaagagcaugaagaugagcaagagccaguucgacagccuggaggaccaccagaaggagaccuuccugaagagagagcuguggaucaaggagaacuacgagguguacaagcaggagcaggaggaggagcugaagaagaagcuggccaacgaccccagauggaagagauacagaagauggaugaagaacgagggccccggcagacugaccuucguggacgacuga

SEQ ID NO: 8275 - RNA, 1083 nt, Artificial Sequence
  derived and/or modified sequence opt5 from DJC25__Homo_sapiens__AAH48318
augggcgcuccccugcucagcccuggguggggagccggcgccgcggggagacggugguggaugcugcuugcuccgcugcuccccgcccugcuucuggugcgcccugccggagcucucgucgagggccuguacugcgggaccagagacuguuaugaaguucugggagugucccggucugccggcaaggcugagaucgcccgcgcguacagacagcucgcccggcgcuaucaccccgauagauaccggccucaacccggcgacgaagggccuggacgcacaccgcagagcgcugaggaagccuuccugcuuguggcuacggccuaugagacccugaaagaugaggaaacaagaaaggacuacgauuauaugcucgaccaucccgaggaauacuacucccacuauuaccauuauuacucucggcgccuggcgccuaaagucgaugugagaguugugauucuugucagcgugugcgccaucuccguuuuucaguucuuuucuugguggaacagcuauaauaaggcuauuuccuaccuggccaccgugcccaaauaucggauccaggcuacagagauugccaagcaacagggccuccugaagaaagccaaggagaaagggaagaacaaaaagagcaaggaagagauccgcgacgaagaggaaaauaucauuaaaaacaucauuaagucuaaaaucgauauuaagggaggcuaccagaaaccucagaucugugaccugcuccuguuccaaauuauccuugcucccuuucaccugugcuccuacaucgucugguauuguagauggauuuacaauuucaacaucaaggggaaagaguauggagaggaagaacggcucuacauuaucagaaagagcaugaagaugucuaaaucccaguuugauagccuggaagaccaucagaaggagaccuuccuuaaacgcgaacuguggauuaaggagaauuaugagguguacaaacaggaacaagaggaggagcucaagaagaaacuggcgaacgauccgcgguggaagagauaucgccgguggaugaaaaaugaaggcccuggcagacugacauuuguggacgacuga

SEQ ID NO: 8276 - protein, 273 aa, Artificial Sequence
  DJC27__Homo_sapiens__Q9NZQ0
MEANMPKRKEPGRSLRIKVISMGNAEVGKSCIIKRYCEKRFVSKYLATIGIDYGVTKVHVRDREIKVNIFDMAGHPFFYEVRNEFYKDTQGVILVYDVGQKDSFDALDAWLAEMKQELGPHGNMENIIFVVCANKIDCTKHRCVDESEGRLWAESKGFLYFETSAQTGEGINEMFQTFYISIVDLCENGGKRPTTNSSASFTKEQADAIRRIRNSKDSWDMLGVKPGASRDEVNKAYRKLAVLLHPDKCVAPGSEDAFKAVVNARTALLKNIK

SEQ ID NO: 8277 - RNA, 822 nt, Artificial Sequence
  DJC27__Homo_sapiens__AAF44347
auggaggccaacaugccgaagcggaaggagcccggcaggucucuccgcaucaaagucaucuccaugggcaacgccgaaguggggaaaagcuguauuauaaagcgauacugugagaaaagauucgugucuaaauaccuggcaacaauuggaauugacuauggagucacaaagguacacgucagagacagagaaaucaaaguuaacaucuuugauauggcuggacaucccuucuucuaugagguucgaaaugaguuuuacaaggacacacagggugugauacuggucuaugauguugggcagaaagacuccuuugacgcccuugaugcguggcuggcagaaaugaagcaagagcuuggaccucauggaaacauggaaaauauuauauuuguaguuugugccaacaagauugauuguaccaaacaucgcuguguagaugaaagugaaggacgucuuugggcugaaagcaaaggguuccuguacuuugaaacuucagcacaaacuggagaaggcauuaaugagauguuccagaccuuuuauauauccauaguugauuuaugugaaaauggcgggaaacgcccuaccaccaauagcagugcuaguuucaccaaagaacaagcagaugccauucgcagaauucgaaauaguaaagacaguugggacaugcugggagucaaaccuggggccucaagggaugaagucaauaaagcguaucggaaacuugcugugcuucuucacccugacaaauguguagcaccuggcagugaagaugccuucaaagcaguugugaaugcucggacagcccuccugaaaaacaucaaguag

SEQ ID NO: 8278 - RNA, 822 nt, Artificial Sequence
  derived and/or modified sequence opt1 from DJC27__Homo_sapiens__AAF44347
auggaggccaacaugcccaagcgcaaggagccgggccggagccugcgcaucaaggugaucuccauggggaacgccgaggucggcaagagcugcaucaucaagcgguacugcgagaagcgcuucguguccaaguaccucgcgaccaucgggaucgacuacggcgugaccaagguccacgugcgggaccgcgagaucaaggugaacaucuucgacauggccgggcaccccuucuucuacgagguccggaacgaguucuacaaggacacgcagggcgugauccugguguacgacgucggccagaaggacagcuucgacgcccuggacgccuggcucgccgagaugaagcaggagcuggggccccacggcaacauggagaacaucaucuucguggugugcgcgaacaagaucgacugcaccaagcaccgcugcgucgacgaguccgaggggcggcugugggccgagagcaagggcuuccucuacuucgagaccuccgcccagaccggggagggcaucaacgagauguuccagacguucuacaucagcaucguggaccugugcgagaacggcgggaagcgccccaccaccaacuccagcgccuccuucaccaaggagcaggcggacgccauccggcgcauccggaacagcaaggacuccugggacaugcugggcgugaagccgggggccagccgcgacgaggucaacaaggccuaccggaagcucgccgugcugcugcaccccgacaagugcguggcgcccggcuccgaggacgccuucaaggccgucgugaacgcccgcacggcccuccugaagaacaucaaguga

SEQ ID NO: 8279 - RNA, 822 nt, Artificial Sequence
  derived and/or modified sequence opt2 from DJC27__Homo_sapiens__AAF44347
auggaggccaacaugcccaagcgcaaggagcccggccgcucccuccgcaucaaggucaucuccaugggcaacgccgaggucggcaaguccugcaucaucaagcgcuacugcgagaagcgcuucgucuccaaguaccucgccaccaucggcaucgacuacggcgucaccaagguccacguccgcgaccgcgagaucaaggucaacaucuucgacauggccggccaccccuucuucuacgagguccgcaacgaguucuacaaggacacccagggcgucauccucgucuacgacgucggccagaaggacuccuucgacgcccucgacgccuggcucgccgagaugaagcaggagcucggcccccacggcaacauggagaacaucaucuucgucgucugcgccaacaagaucgacugcaccaagcaccgcugcgucgacgaguccgagggccgccucugggccgaguccaagggcuuccucuacuucgagaccuccgcccagaccggcgagggcaucaacgagauguuccagaccuucuacaucuccaucgucgaccucugcgagaacggcggcaagcgccccaccaccaacuccuccgccuccuucaccaaggagcaggccgacgccauccgccgcauccgcaacuccaaggacuccugggacaugcucggcgucaagcccggcgccucccgcgacgaggucaacaaggccuaccgcaagcucgccguccuccuccaccccgacaagugcgucgcccccggcuccgaggacgccuucaaggccgucgucaacgcccgcaccgcccuccucaagaacaucaaguga

SEQ ID NO: 8280 - RNA, 822 nt, Artificial Sequence
  derived and/or modified sequence opt3 from DJC27__Homo_sapiens__AAF44347
auggaggccaacaugcccaagagaaaagaaccuggcaggagccugcggaucaaggugauuuccauggggaaugcugaggucggaaaaucuugcauaaucaagcgcuacugugaaaaacgauucguuucaaaguaucucgcaaccauugguaucgacuacggcgugacaaagguacacgugcgugauagagagauuaaagucaacaucuuugacauggccgggcauccauucuuuuaugaagugaggaaugaguucuacaaggauacucagggaguuauacuuguguaugacgucggccaaaaagauaguuuugacgcgcuggaugcuugguuggccgagaugaagcaggaauuagguccgcacgggaacauggagaauaucauuuucgugguaugcgcaaacaaaaucgacuguacgaagcaucggugcguugaugaaagcgagggacgccugugggccgaguccaagggcuuucuauacuucgaaaccucugcucagacaggcgaggggauuaaugaaauguuucagacuuucuauaucucgauaguggaccucugugagaacggagguaaaagacccaccacaaauucaagcgcaaguuuuaccaaggaacaagccgaugcuauuaggcggauccgcaacuccaaagacucuugggauaugcugggcgucaagccuggggccagccgagacgaggugaauaaagcguacagaaaacuugcagugcuguugcacccagacaagugcgucgcccccggauccgaggaugcuuucaaggccguugugaacgcaaggacugcucuccugaagaauauuaaauga

SEQ ID NO: 8281 - RNA, 822 nt, Artificial Sequence
  derived and/or modified sequence opt4 from DJC27__Homo_sapiens__AAF44347
auggaggccaacaugcccaagagaaaggagcccggcagaagccugagaaucaaggugaucagcaugggcaacgccgaggugggcaagagcugcaucaucaagagauacugcgagaagagauucgugagcaaguaccuggccaccaucggcaucgacuacggcgugaccaaggugcacgugagagacagagagaucaaggugaacaucuucgacauggccggccaccccuucuucuacgaggugagaaacgaguucuacaaggacacccagggcgugauccugguguacgacgugggccagaaggacagcuucgacgcccuggacgccuggcuggccgagaugaagcaggagcugggcccccacggcaacauggagaacaucaucuucguggugugcgccaacaagaucgacugcaccaagcacagaugcguggacgagagcgagggcagacugugggccgagagcaagggcuuccuguacuucgagaccagcgcccagaccggcgagggcaucaacgagauguuccagaccuucuacaucagcaucguggaccugugcgagaacggcggcaagagacccaccaccaacagcagcgccagcuucaccaaggagcaggccgacgccaucagaagaaucagaaacagcaaggacagcugggacaugcugggcgugaagcccggcgccagcagagacgaggugaacaaggccuacagaaagcuggccgugcugcugcaccccgacaagugcguggcccccggcagcgaggacgccuucaaggccguggugaacgccagaaccgcccugcugaagaacaucaaguga

SEQ ID NO: 8282 - RNA, 822 nt, Artificial Sequence
  derived and/or modified sequence opt5 from DJC27__Homo_sapiens__AAF44347
auggaggccaacaugcccaagagaaaagaaccuggccggagccugcgcaucaaggugauuuccauggggaaugcugaggucggaaaaucuugcaucauuaagagauacugugaaaaacgguucguuagcaaguaucucgccaccaucggcauugacuacggggugacaaaggugcacguccgcgauagagagaucaaagugaacaucuuugacauggcgggacauccguucuuuuaugaaguucggaaugaguucuacaaggauacgcagggcgugauucuggucuaugacguggggcaaaaagauuccuuugacgcucuugaugccuggcuggccgagaugaagcaggaacucggaccccacggcaacauggagaauaucauuuucguugugugcgcuaacaaaaucgacuguaccaagcaucgcugcgucgaugaaucugagggcagacugugggccgagagcaagggguuucuuuacuucgaaacauccgcucagaccggagagggcauuaaugaaauguuucagacauucuauaucucuauuguggaccugugugagaacgggggaaaacggccuaccacaaauagcuccgccagcuuuaccaaggaacaagcggaugccauccgcagaauccggaacucuaaagacuccugggauaugcucggcgugaagcccggggcuagccgcgacgaggucaauaaagccuacagaaagcuggcuguucugcuccacccugacaaaugcguggcccccggaucugaggaugcguucaaggccguggucaacgcucggacggcccugcuuaagaauauuaaauga

SEQ ID NO: 8283 - protein, 388 aa, Artificial Sequence
  DJC28__Homo_sapiens__Q9NX36
MNTMYVMMAQILRSHLIKATVIPNRVKMLPYFGIIRNRMMSTHKSKKKIREYYRLLNVEEGCSADEVRESFHKLAKQYHPDSGSNTADSATFIRIEKAYRKVLSHVIEQTNASQSKGEEEEDVEKFKYKTPQHRHYLSFEGIGFGTPTQREKHYRQFRADRAAEQVMEYQKQKLQSQYFPDSVIVKNIRQSKQQKITQAIERLVEDLIQESMAKGDFDNLSGKGKPLKKFSDCSYIDPMTHNLNRILIDNGYQPEWILKQKEISDTIEQLREAILVSRKKLGNPMTPTEKKQWNHVCEQFQENIRKLNKRINDFNLIVPILTRQKVHFDAQKEIVRAQKIYETLIKTKEVTDRNPNNLDQGEGEKTPEIKKGFLNWMNLWKFIKIRSF

SEQ ID NO: 8284 - RNA, 1167 nt, Artificial Sequence
  DJC28__Homo_sapiens__AAL59618
augaauacaauguaugugaugauggcucagaucuuaagaucucaccugauaaaggcuacagugauuccuaaucgagugaaaaugcuuccauauuuugguaucauuagaaauagaaugaugucaacccauaaauccaaaaagaagaucagagaauauuauagacugcugaacguggaggaaggaugcucugcagaugaagucagggaaucuuuucauaagcuugccaagcaauaucauccugacaguggcucuaauacugcugauucugcaacauuuauaaggauugaaaaagcuuauagaaaggugcucucccaugugauagaacaaacaaaugccagucagaguaaaggugaagaagaagaagauguagaaaaauucaaauauaaaacaccccaacaccgacauuauuuaaguuuugaagguauugguuuugggacuccaacucaacgagagaagcauuauaggcaauuuagggcagaccgugcugcugaacaagugauggaauaucaaaagcagaaacuacaaagccaguauuuuccugauaguguaauuguuaaaaauauaagacagagcaaacagcaaaagauaacgcaagcuauagaacguuuaguggaggaccucauucaagaauccauggcaaaaggagacuuugacaaucucagugggaaaggaaaaccucugaaaaaguuuucugacuguucuuacauugaucccaugacucacaaccugaaccgaauacugaucgauaauggauaccaaccagaauggauccuuaagcaaaaggaaauaagcgauacuauugagcaacucagagaggcaauuuuagugucuaggaaaaaacuugggaauccaaugacaccaacugaaaagaaacaguggaaccauguuugugagcaguuucaagaaaacaucagaaaauuaaacaagcgaauuaaugauuuuaauuuaauuguucccauccugaccaggcaaaaaguccauuuugaugcucagaaagaaauugucagagcccagaaaauauacgagacccuuauaaaaacaaaagaagucacagauagaaacccaaauaaccuugaucaaggagaaggagagaaaacaccugaaaucaagaaagguuuuuuaaacuggaugaaucuguggaaauuuauuaaaauacgaucauuuuga

SEQ ID NO: 8285 - RNA, 1167 nt, Artificial Sequence
  derived and/or modified sequence opt1 from DJC28__Homo_sapiens__AAL59618
augaacaccauguacgugaugauggcccagauccugcgcagccaccucaucaaggccaccgucauccccaaccgggugaagaugcugccguacuucggcaucauccgcaaccggaugauguccacgcacaagagcaagaagaagauccgcgaguacuaccggcugcucaacguggaggaggggugcuccgcggacgagguccgcgagagcuuccacaagcuggccaagcaguaccaccccgacuccggcagcaacaccgccgacuccgccaccuucauccggaucgagaaggccuaccgcaaggugcugagccacgugaucgagcagaccaacgcgucccagagcaagggggaggaggaggaggacgucgagaaguucaaguacaagacgccccagcaccggcacuaccucuccuucgagggcaucggguucggcacccccacccagcgcgagaagcacuaccggcaguuccgcgccgaccgggccgccgagcaggucauggaguaccagaagcagaagcugcagagccaguacuucccggacuccgugaucgugaagaacauccgccagagcaagcagcagaagaucacccaggcgaucgagcggcugguggaggaccucauccaggaguccauggccaagggcgacuucgacaaccugagcgggaagggcaagccccugaagaaguucuccgacugcagcuacaucgaccccaugacgcacaaccucaaccgcauccugaucgacaacggguaccagcccgaguggauccugaagcagaaggagaucuccgacaccaucgagcagcuccgggaggccauccuggugagccgcaagaagcugggcaacccgaugacccccaccgagaagaagcaguggaaccacgucugcgagcaguuccaggagaacauccggaagcucaacaagcgcaucaacgacuucaaccugaucgugcccauccugacgcggcagaaggugcacuucgacgcccagaaggagaucguccgcgcccagaagaucuacgagacccucaucaagaccaaggaggugaccgaccgcaaccccaacaaccuggaccagggggagggcgagaagacgccggagaucaagaagggcuuccugaacuggaugaaccucuggaaguucaucaagauccggagcuucuga

SEQ ID NO: 8286 - RNA, 1167 nt, Artificial Sequence
  derived and/or modified sequence opt2 from DJC28__Homo_sapiens__AAL59618
augaacaccauguacgucaugauggcccagauccuccgcucccaccucaucaaggccaccgucauccccaaccgcgucaagaugcuccccuacuucggcaucauccgcaaccgcaugauguccacccacaaguccaagaagaagauccgcgaguacuaccgccuccucaacgucgaggagggcugcuccgccgacgagguccgcgaguccuuccacaagcucgccaagcaguaccaccccgacuccggcuccaacaccgccgacuccgccaccuucauccgcaucgagaaggccuaccgcaagguccucucccacgucaucgagcagaccaacgccucccaguccaagggcgaggaggaggaggacgucgagaaguucaaguacaagaccccccagcaccgccacuaccucuccuucgagggcaucggcuucggcacccccacccagcgcgagaagcacuaccgccaguuccgcgccgaccgcgccgccgagcaggucauggaguaccagaagcagaagcuccagucccaguacuuccccgacuccgucaucgucaagaacauccgccaguccaagcagcagaagaucacccaggccaucgagcgccucgucgaggaccucauccaggaguccauggccaagggcgacuucgacaaccucuccggcaagggcaagccccucaagaaguucuccgacugcuccuacaucgaccccaugacccacaaccucaaccgcauccucaucgacaacggcuaccagcccgaguggauccucaagcagaaggagaucuccgacaccaucgagcagcuccgcgaggccauccucgucucccgcaagaagcucggcaaccccaugacccccaccgagaagaagcaguggaaccacgucugcgagcaguuccaggagaacauccgcaagcucaacaagcgcaucaacgacuucaaccucaucguccccauccucacccgccagaagguccacuucgacgcccagaaggagaucguccgcgcccagaagaucuacgagacccucaucaagaccaaggaggucaccgaccgcaaccccaacaaccucgaccagggcgagggcgagaagacccccgagaucaagaagggcuuccucaacuggaugaaccucuggaaguucaucaagauccgcuccuucuga

SEQ ID NO: 8287 - RNA, 1167 nt, Artificial Sequence
  derived and/or modified sequence opt3 from DJC28__Homo_sapiens__AAL59618
augaacaccauguacgugaugauggcccagauccugagaagccaccucauuaaggcuacagucauacccaauaggguuaaaaugcuuccuuauuucggcaucauucggaaccgcaugauguccacucauaagucuaaaaagaaaauccgagaguacuaucgucuguugaauguggaagaggggugcucagcagacgaaguaagagagaguuuucacaaguuagccaagcaauaccauccagauagcggauccaacacggcggacucugcuaccuucauuaggaucgaaaaagccuaucggaaggugcugucgcacgucauagagcagacaaaugcaucacagagcaaaggugaggaagaggaagauguggagaaguuuaaauacaagacuccgcagcaucgccacuaucuaaguuucgagggcaucggguuuggaacccccacacaaagagaaaagcacuacaggcaguuccgggccgaccgcgcugcagagcagguuauggaauaccagaaacaaaagcuccagucccaguauuuuccugauucugugauugucaaaaacauccgacagagcaagcaacagaaaauuacccaggccaucgagagacugguggaagaccuuauacaagaguccauggcuaagggcgauuucgacaaucugucagguaaagggaagccauugaagaaauuuagugauuguagcuacauugaccccaugacucauaaccucaauaggauccugauugauaacggauaucagccugaguggauccugaagcagaaagaaaucucugacacaauugagcagcuccgggaagccauauuaguaucccguaagaaacugggcaauccaaugacccccacggagaagaagcaauggaaccacguuugcgaacaguuccaggagaauauccgcaaacuuaacaagagaauuaaugauuuuaacuugaucgugccuauacugacuaggcagaaaguccauuucgacgcgcaaaaggagauugugcgggcacagaaaaucuacgaaacccuaaucaagacaaaggaggugacugaccgaaacccaaauaaccucgaucagggcgaaggggagaaaaccccggaaauuaagaaaggauuucugaauuggaugaaccuuuggaaguucaucaaaauucgcucauucuga

SEQ ID NO: 8288 - RNA, 1167 nt, Artificial Sequence
  derived and/or modified sequence opt4 from DJC28__Homo_sapiens__AAL59618
augaacaccauguacgugaugauggcccagauccugagaagccaccugaucaaggccaccgugauccccaacagagugaagaugcugcccuacuucggcaucaucagaaacagaaugaugagcacccacaagagcaagaagaagaucagagaguacuacagacugcugaacguggaggagggcugcagcgccgacgaggugagagagagcuuccacaagcuggccaagcaguaccaccccgacagcggcagcaacaccgccgacagcgccaccuucaucagaaucgagaaggccuacagaaaggugcugagccacgugaucgagcagaccaacgccagccagagcaagggcgaggaggaggaggacguggagaaguucaaguacaagaccccccagcacagacacuaccugagcuucgagggcaucggcuucggcacccccacccagagagagaagcacuacagacaguucagagccgacagagccgccgagcaggugauggaguaccagaagcagaagcugcagagccaguacuuccccgacagcgugaucgugaagaacaucagacagagcaagcagcagaagaucacccaggccaucgagagacugguggaggaccugauccaggagagcauggccaagggcgacuucgacaaccugagcggcaagggcaagccccugaagaaguucagcgacugcagcuacaucgaccccaugacccacaaccugaacagaauccugaucgacaacggcuaccagcccgaguggauccugaagcagaaggagaucagcgacaccaucgagcagcugagagaggccauccuggugagcagaaagaagcugggcaaccccaugacccccaccgagaagaagcaguggaaccacgugugcgagcaguuccaggagaacaucagaaagcugaacaagagaaucaacgacuucaaccugaucgugcccauccugaccagacagaaggugcacuucgacgcccagaaggagaucgugagagcccagaagaucuacgagacccugaucaagaccaaggaggugaccgacagaaaccccaacaaccuggaccagggcgagggcgagaagacccccgagaucaagaagggcuuccugaacuggaugaaccuguggaaguucaucaagaucagaagcuucuga

SEQ ID NO: 8289 - RNA, 1167 nt, Artificial Sequence
  derived and/or modified sequence opt5 from DJC28__Homo_sapiens__AAL59618
augaacaccauguacgugaugauggcccagauccugagaagccaccucauuaaggcuacagucauccccaaucggguuaaaaugcugccuuauuucggcauuauccgcaacagaaugauguccacgcauaagucuaaaaagaaaauucgggaguacuaucgccuucugaauguggaagaggggugcagcgccgacgaagugagagaguccuuucacaagcucgcgaagcaauaccauccggauucuggaagcaacaccgcugacuccgccacauucauccggaucgaaaaagccuaucgcaagguccugucucacgugauugagcagaccaaugcuagccaguccaaaggcgaggaagaggaagauguugagaaguuuaaauacaagacaccccagcauagacacuaucuuagcuucgaggggaucggauuuggcaccccuacacaacgggaaaagcacuaccgccaguucagagccgaccgggcugccgaacaggugauggaguaccagaaacaaaagcugcagucucaguauuuucccgauuccgucauugugaaaaacauccgccagagcaagcaacagaaaauuacccaggcgaucgagagacucguugaagaccugauucaagagucuauggccaagggggauuucgacaaucuguccggaaaaggcaagccucucaagaaauuuagcgauuguucuuacaucgaccccaugacgcauaaccugaaucggauccuuauugauaacggcuaucagccugaguggauccugaagcagaaagaaauuuccgacaccaucgagcagcuccgcgaagcuauucuggugagcagaaagaaacuugggaauccgaugacacccaccgagaagaagcaauggaaccacgucugcgaacaguuccaggagaauauccggaaacugaacaagagaaucaaugauuuuaaccucauugugccuauccugacacgccagaaagugcauuucgacgcccaaaaggagauuguccgggcucagaaaaucuacgaaacccugauuaagacgaaggagguuacagacagaaaccccaauaaccucgaucagggagaaggcgagaaaaccccugaaaucaagaaaggguuucugaauuggaugaaccuuuggaaguucaucaaaauucgcuccuucuga

SEQ ID NO: 8290 - protein, 226 aa, Artificial Sequence
  DJC30__Homo_sapiens__Q96LL9
MAAMRWRWWQRLLPWRLLQARGFPQNSAPSLGLGARTYSQGDCSYSRTALYDLLGVPSTATQAQIKAAYYRQCFLYHPDRNSGSAEAAERFTRISQAYVVLGSATLRRKYDRGLLSDEDLRGPGVRPSRTPAPDPGSPRTPPPTSRTHDGSRASPGANRTMFNFDAFYQAHYGEQLERERRLRARREALRKRQEYRSMKGLRWEDTRDTAAIFLIFSIFIIIGFYI

SEQ ID NO: 8291 - RNA, 681 nt, Artificial Sequence
  DJC30__Homo_sapiens__AAM62307
auggcagccaugcgcuggcgaugguggcagcggcuguuaccuuggagguugcugcaggcccguggcuuuccacaaaauucugcacccagccugggccuaggagcgaggacuuauucccagggcgacugcucguauucgcgcacggcgcuguaugaucugcucggcguccccuccacagccacgcaggcccaaaucaaggcggcuuacuaccgucagugcuuucucuaccacccggaccgcaacuccgggagcgcggaggccgccgagcgcuucacgcgcaucucccaggccuacguggugcugggcagugccacccuccgucgcaaguaugaucgcggccuacucagcgacgaggaccugcgcggaccuggcguccggcccuccaggacgcccgcacccgaccccggcucgccgcguaccccgccgcccaccucucggacccacgacgguucucgggccucccccggcgccaaccgcacgauguucaacuuugacgccuucuaccaggcccacuacggggaacaacuggagcgggaacggcgccugagggcccggcgggaggcccuucgcaaacggcaggaguaucgguccaugaaaggccuccgcugggaggauacccgagacacggcugccauuuuccucaucuuuucaaucuucaucaucaucggcuuuuauauuuaa

SEQ ID NO: 8292 - RNA, 681 nt, Artificial Sequence
  derived and/or modified sequence opt1 from DJC30__Homo_sapiens__AAM62307
auggccgccaugcgcuggcggugguggcagcgccugcuccccuggcggcugcugcaggcgcgcggcuucccccagaacagcgcccccucccucgggcugggcgcccggaccuacagccagggggacugcuccuacagccgcaccgcccuguacgaccuccugggcgugcccuccacggccacccaggcgcagaucaaggccgccuacuaccggcagugcuuccuguaccaccccgaccgcaacagcggguccgccgaggcggccgagcgguucacccgcaucagccaggccuacgucgugcucggcuccgccacccugcggcgcaaguacgaccggggccugcucagcgacgaggaccugcgcgggccgggcgugcggcccucccgcacgcccgcccccgacccggggagcccccggaccccgccgcccaccucccgcacccacgacggcagccgggcgucccccggggccaaccgcacgauguucaacuucgacgccuucuaccaggcccacuacggcgagcagcuggagcgggagcgccgccuccgggcccgccgggaggcgcugcgcaagcggcaggaguaccgcagcaugaagggccugcggugggaggacacccgcgacaccgccgccaucuuccucaucuucuccaucuucaucaucaucggguucuacaucuga

SEQ ID NO: 8293 - RNA, 681 nt, Artificial Sequence
  derived and/or modified sequence opt2 from DJC30__Homo_sapiens__AAM62307
auggccgccaugcgcuggcgcugguggcagcgccuccuccccuggcgccuccuccaggcccgcggcuucccccagaacuccgcccccucccucggccucggcgcccgcaccuacucccagggcgacugcuccuacucccgcaccgcccucuacgaccuccucggcguccccuccaccgccacccaggcccagaucaaggccgccuacuaccgccagugcuuccucuaccaccccgaccgcaacuccggcuccgccgaggccgccgagcgcuucacccgcaucucccaggccuacgucguccucggcuccgccacccuccgccgcaaguacgaccgcggccuccucuccgacgaggaccuccgcggccccggcguccgccccucccgcacccccgcccccgaccccggcuccccccgcacccccccccccaccucccgcacccacgacggcucccgcgccucccccggcgccaaccgcaccauguucaacuucgacgccuucuaccaggcccacuacggcgagcagcucgagcgcgagcgccgccuccgcgcccgccgcgaggcccuccgcaagcgccaggaguaccgcuccaugaagggccuccgcugggaggacacccgcgacaccgccgccaucuuccucaucuucuccaucuucaucaucaucggcuucuacaucuga

SEQ ID NO: 8294 - RNA, 681 nt, Artificial Sequence
  derived and/or modified sequence opt3 from DJC30__Homo_sapiens__AAM62307
auggccgcuaugagauggaggugguggcagcggcugcuccccuggcgccuucugcaagcacgaggcuucccucagaacagcgccccauccuugggguuaggagcgcguaccuacucucagggugacugcucauauaguagaacagcucuguacgaucuacucggcgugccgagcacugccacgcaggcacaaaucaaggccgcuuauuacaggcaguguuuucuguaucaccccgaccgcaauuccgggucugcagaggccgcugaacgguucaccagaauuucgcaggccuacgucguucuuggaucagcgacacugaggcggaaauaugaucgcggcuugcucagcgacgaggaucugcgagguccuggggugagaccaaguaggacucccgcaccugacccaggaucuccccggaccccuccaccgacaucccguacccaugauggcagccgcgccucccccggcgcuaacagaacuauguuuaauuucgacgccuuuuaccaggcacacuacggggaacaacuggagagggaacggcgacuccgcgcuagaagggaggccuuacggaagcgccaggaguauagaucaaugaaaggacugaggugggaagauacacgugacaccgcggccauauuccuuaucuuuaguauuuucaucauuaucgguuuuuacauauga

SEQ ID NO: 8295 - RNA, 681 nt, Artificial Sequence
  derived and/or modified sequence opt4 from DJC30__Homo_sapiens__AAM62307
auggccgccaugagauggagaugguggcagagacugcugcccuggagacugcugcaggccagaggcuucccccagaacagcgcccccagccugggccugggcgccagaaccuacagccagggcgacugcagcuacagcagaaccgcccuguacgaccugcugggcgugcccagcaccgccacccaggcccagaucaaggccgccuacuacagacagugcuuccuguaccaccccgacagaaacagcggcagcgccgaggccgccgagagauucaccagaaucagccaggccuacguggugcugggcagcgccacccugagaagaaaguacgacagaggccugcugagcgacgaggaccugagaggccccggcgugagacccagcagaacccccgcccccgaccccggcagccccagaacccccccccccaccagcagaacccacgacggcagcagagccagccccggcgccaacagaaccauguucaacuucgacgccuucuaccaggcccacuacggcgagcagcuggagagagagagaagacugagagccagaagagaggcccugagaaagagacaggaguacagaagcaugaagggccugagaugggaggacaccagagacaccgccgccaucuuccugaucuucagcaucuucaucaucaucggcuucuacaucuga

SEQ ID NO: 8296 - RNA, 681 nt, Artificial Sequence
  derived and/or modified sequence opt5 from DJC30__Homo_sapiens__AAM62307
auggccgcuaugagauggcggugguggcagcgccugcuccccuggagacugcuucaagcccggggcuucccucagaacagcgcgccgucccuggggcucggagcucgcaccuacucucagggcgacugcagcuauuccagaacagcccuguacgaucuucugggggugcccucuacggccacccaggcucaaaucaaggccgcuuauuaccggcaguguuuucucuaucacccugaccgcaauagcggauccgccgaggcggccgaaagauucacacggauuucucaggcuuacgucguucugggcagcgccacccugcgcagaaaauaugaucgggggcuccuguccgacgaggaucuucgcggacccggcgugagaccuagccggacacccgcuccugacccgggcucuccccgcaccccucccccuacauccagaacccaugaugggagccgggccucucccggagcgaacagaacgauguuuaauuucgacgccuuuuaccaggcucacuacggcgaacaacuggagcgcgaacggagacuccgcgcccggagagaggcucugcgcaagcggcaggaguauagauccaugaaagggcuucgcugggaagauacccgggacacagccgccaucuuccugauuuuuagcaucuucauuaucaucggauuuuacauuuga

SEQ ID NO: 8297 - protein, 409 aa, Artificial Sequence
  DNAJB12__Homo_sapiens__NP_001002762.2
MSSLRARLPATRRRVAQPFARPASPSLVPRSGSAMESNKDEAERCISIALKAIQSNQPDRALRFLEKAQRLYPTPRVRALIESLNQKPQTAGDQPPPTDTTHATHRKAGGTDAPSANGEAGGESTKGYTAEQVAAVKRVKQCKDYYEILGVSRGASDEDLKKAYRRLALKFHPDKNHAPGATEAFKAIGTAYAVLSNPEKRKQYDQFGDDKSQAARHGHGHGDFHRGFEADISPEDLFNMFFGGGFPSSNVHVYSNGRMRYTYQQRQDRRDNQGDGGLGVFVQLMPILILILVSALSQLMVSSPPYSLSPRPSVGHIHRRVTDHLGVVYYVGDTFSEEYTGSSLKTVERNVEDDYIANLRNNCWKEKQQKEGLLYRARYFGDTDMYHRAQKMGTPSCSRLSEVQASLHG

SEQ ID NO: 8298 - RNA, 1230 nt, Artificial Sequence
  DNAJB12__Homo_sapiens__NM_001002762.2
augucaucacuccgcgcccggcugcccgcgacgcgccggcggguggcgcagcccuucgcucgcccggccucccccucccugguuccgcguucugguuccgccauggaauccaacaaggaugaagcugagcgcuguaucagcaucgcccucaaggccauccagagcaaccagcccgaccgggcgcuccgcuuccuggagaaggcacagcggcuguauccgacgccgcgaguucgcgcccugauugagucccucaaccagaaaccacagacugccggugaccaacccccacccacagacacaacccaugccacccacaggaaagcaggugggaccgaugcccccucggccaacggugaagcuggaggagagagcaccaaaggcuacacugcagaacagguugcagcugugaaaagggucaagcaauguaaagauuacuaugagauccugggggugagcagaggggccucggaugaggaccugaagaaggccuaccgcagacuggcccucaaauuccacccagacaagaaccacgcaccuggugccacugaagccuucaaagccauuggcacagcauaugcgguacucagcaacccggagaagaggaagcaguaugaccaguucggcgaugacaagagccaggcggcccggcacggccaugggcauggggauuuccaccguggcuuugaggccgacaucuccccugaagaccucuucaacauguucuuuggcggcggcuucccuucuaguaacguccacgucuacagcaacggccgcaugcgcuauaccuaccagcaaaggcaggaccgcagggacaaccagggugauggcgggcuagggguguuugugcagcugaugccuauccucauccugauucucgugucagcucucagccagcucauggucuccaguccacccuacagucugaguccaagaccguccgugggccacauccacaggcgagucacugaccaccugggugucgucuacuaugugggagacacuuucuccgaagaguacacaggcuccagccucaaaacagucgagcggaauguggaagaugauuauaucgccaaccuccggaacaacugcuggaaggagaagcagcagaaggaaggcuugcuguaccgggcacgcuacuuuggcgacacagauauguaccacagagcacagaagaugggcacccccagcugcagccgacugucagaggugcaggccucccugcauggauag

SEQ ID NO: 8299 - RNA, 1230 nt, Artificial Sequence
  derived and/or modified sequence opt1 from DNAJB12__Homo_sapiens__NM_001002762.2
augagcucccugcgcgcccggcuccccgccacccgccggcgcguggcgcagccguucgcccggcccgccagccccucccuggucccccgcagcggcuccgccauggagagcaacaaggacgaggccgagcggugcaucuccaucgcgcugaaggccauccagagcaaccagccggaccgcgcccuccgguuccuggagaaggcccagcgccuguaccccacgccccgggugcgcgcgcucaucgagucccugaaccagaagccccagaccgccggggaccagccgccgcccaccgacaccacccacgccacgcaccggaaggccggcgggaccgacgcccccagcgcgaacggcgaggccgggggcgaguccaccaagggcuacaccgccgagcaggucgccgccgugaagcgcgugaagcagugcaaggacuacuacgagauccugggggugagccggggcgcguccgacgaggaccucaagaaggccuaccgccggcuggcccugaaguuccaccccgacaagaaccacgcccccggggccacggaggcguucaaggccaucggcaccgccuacgccguccucagcaaccccgagaagcgcaagcaguacgaccaguucggggacgacaagucccaggccgcgcggcacggccacggccacggggacuuccaccgcggcuucgaggccgacaucagccccgaggaccuguucaacauguucuucgggggcggcuucccguccagcaacgugcacguguacuccaacgggcggaugcgcuacaccuaccagcagcgccaggaccggcgcgacaaccagggcgacgggggccugggggucuucgugcagcucaugcccauccugauccugauccucgugagcgcccugagccagcugauggucuccagcccgcccuacucccucagcccccggcccuccgugggccacauccaccgccgggugaccgaccaccugggcgucguguacuacgugggggacacguucagcgaggaguacaccggcuccagccugaagaccgucgagcgcaacguggaggacgacuacaucgccaaccuccggaacaacugcuggaaggagaagcagcagaaggaggggcugcuguaccgcgcgcgguacuucggcgacaccgacauguaccaccgcgcccagaagauggggacgcccuccugcagccggcucuccgaggugcaggccagccugcacggcuga

SEQ ID NO: 8300 - RNA, 1230 nt, Artificial Sequence
  derived and/or modified sequence opt2 from DNAJB12__Homo_sapiens__NM_001002762.2
auguccucccuccgcgcccgccuccccgccacccgccgccgcgucgcccagcccuucgcccgccccgccucccccucccucgucccccgcuccggcuccgccauggaguccaacaaggacgaggccgagcgcugcaucuccaucgcccucaaggccauccaguccaaccagcccgaccgcgcccuccgcuuccucgagaaggcccagcgccucuaccccaccccccgcguccgcgcccucaucgagucccucaaccagaagccccagaccgccggcgaccagcccccccccaccgacaccacccacgccacccaccgcaaggccggcggcaccgacgcccccuccgccaacggcgaggccggcggcgaguccaccaagggcuacaccgccgagcaggucgccgccgucaagcgcgucaagcagugcaaggacuacuacgagauccucggcgucucccgcggcgccuccgacgaggaccucaagaaggccuaccgccgccucgcccucaaguuccaccccgacaagaaccacgcccccggcgccaccgaggccuucaaggccaucggcaccgccuacgccguccucuccaaccccgagaagcgcaagcaguacgaccaguucggcgacgacaagucccaggccgcccgccacggccacggccacggcgacuuccaccgcggcuucgaggccgacaucucccccgaggaccucuucaacauguucuucggcggcggcuuccccuccuccaacguccacgucuacuccaacggccgcaugcgcuacaccuaccagcagcgccaggaccgccgcgacaaccagggcgacggcggccucggcgucuucguccagcucaugcccauccucauccucauccucgucuccgcccucucccagcucauggucuccuccccccccuacucccucuccccccgccccuccgucggccacauccaccgccgcgucaccgaccaccucggcgucgucuacuacgucggcgacaccuucuccgaggaguacaccggcuccucccucaagaccgucgagcgcaacgucgaggacgacuacaucgccaaccuccgcaacaacugcuggaaggagaagcagcagaaggagggccuccucuaccgcgcccgcuacuucggcgacaccgacauguaccaccgcgcccagaagaugggcacccccuccugcucccgccucuccgagguccaggccucccuccacggcuga

SEQ ID NO: 8301 - RNA, 1230 nt, Artificial Sequence
  derived and/or modified sequence opt3 from DNAJB12__Homo_sapiens__NM_001002762.2
augagcucccugagagccaggcuccccgcuacccggcgccgaguggcacagccuuucgcccguccagcgucuccgucacuuguccccagaaguggcagcgcuauggaguccaacaaggacgaagccgagaggugcaucucuauugcacugaaagccauacaaucgaaucagccugaucgggcuuugcgcuuuuuagaaaaggcacagagacuguacccaacacccaggguucgggcccuaaucgagucacucaaccagaaaccucaaacugcuggggaccagccacccccuacggauaccacacacgccacucaucgcaaggcgggagguaccgacgcaccaagcgccaauggcgaagcugggggagagaguacaaaaggcuauaccgccgagcaaguggcagcuguaaagcgagugaagcaguguaaagauuacuaugaaauucugggugucuccagaggggccucugacgaggaucuuaagaaagcguacaggcggcuggccuugaaguuccacccggacaaaaaccaugcacccggagcuacugaagccuuuaaggcuaucggcacagccuaugcagugcucagcaauccugagaagcguaaacaauacgaucaguucggcgacgauaagucccaggccgcucgccacgggcauggacacggugacuuucacagaggcuucgaggcggauauuucaccagaagaccuguuuaacauguucuuugggggaggcuuccccaguagcaauguucauguguauucuaacgguaggaugcgguacaccuaccagcaacgacaggaccgcagagauaaucagggggacggaggccugggcgucuuugugcaacucaugccuaucuuaauacugauccuuguauccgcauugucacagcugaugguuagcaguccacccuauucucuauccccgaggccuagcguggggcacauucaucggcgcgucacggaucaccucggagugguguacuaugucggugacacuuucucggaggaauacaccgggucuucccugaaaacaguugagagaaacguggaagaugacuauaucgccaaucuuaggaacaauugcuggaaggagaaacagcagaaggagggccuguuguaccgugcucgguauuuuggagauacugacauguaccaccgagcccagaaaaugggcacccccucauguaguagacucagcgaaguacaggcaucccugcaugguuga

SEQ ID NO: 8302 - RNA, 1230 nt, Artificial Sequence
  derived and/or modified sequence opt4 from DNAJB12__Homo_sapiens__NM_001002762.2
augagcagccugagagccagacugcccgccaccagaagaagaguggcccagcccuucgccagacccgccagccccagccuggugcccagaagcggcagcgccauggagagcaacaaggacgaggccgagagaugcaucagcaucgcccugaaggccauccagagcaaccagcccgacagagcccugagauuccuggagaaggcccagagacuguaccccacccccagagugagagcccugaucgagagccugaaccagaagccccagaccgccggcgaccagcccccccccaccgacaccacccacgccacccacagaaaggccggcggcaccgacgcccccagcgccaacggcgaggccggcggcgagagcaccaagggcuacaccgccgagcagguggccgccgugaagagagugaagcagugcaaggacuacuacgagauccugggcgugagcagaggcgccagcgacgaggaccugaagaaggccuacagaagacuggcccugaaguuccaccccgacaagaaccacgcccccggcgccaccgaggccuucaaggccaucggcaccgccuacgccgugcugagcaaccccgagaagagaaagcaguacgaccaguucggcgacgacaagagccaggccgccagacacggccacggccacggcgacuuccacagaggcuucgaggccgacaucagccccgaggaccuguucaacauguucuucggcggcggcuuccccagcagcaacgugcacguguacagcaacggcagaaugagauacaccuaccagcagagacaggacagaagagacaaccagggcgacggcggccugggcguguucgugcagcugaugcccauccugauccugauccuggugagcgcccugagccagcugauggugagcagcccccccuacagccugagccccagacccagcgugggccacauccacagaagagugaccgaccaccugggcgugguguacuacgugggcgacaccuucagcgaggaguacaccggcagcagccugaagaccguggagagaaacguggaggacgacuacaucgccaaccugagaaacaacugcuggaaggagaagcagcagaaggagggccugcuguacagagccagauacuucggcgacaccgacauguaccacagagcccagaagaugggcacccccagcugcagcagacugagcgaggugcaggccagccugcacggcuga

SEQ ID NO: 8303 - RNA, 1230 nt, Artificial Sequence
  derived and/or modified sequence opt5 from DNAJB12__Homo_sapiens__NM_001002762.2
augagcucccugagagcccggcuccccgcuacccgcagacggguggcccagccuuucgcgcgcccggcuucucccagccuggucccuagauccggcucugccauggagagcaacaaggacgaagccgagcggugcaucuccauugcucuuaaagccauccaaucuaaucagcccgaucgcgcucugagauuucucgaaaaggcccagcggcuguacccuacaccccgcguuagagcgcuuauugagagccugaaccagaaaccucaaacggccggggaccagccgcccccuaccgauacaacccacgcuacacaucggaaggccggaggcaccgacgcucccuccgccaauggggaagcgggaggcgagagcacaaaaggguauaccgccgagcaaguggcugccgugaagcgcgucaagcaguguaaagauuacuaugaaauccucggagugucuagaggcgcuuccgacgaggaucugaagaaagccuaccggcgccuggcccucaaguuccacccugacaaaaaccaugcucccggcgcgacggaagccuuuaaggcuauugggaccgccuaugccguucugagcaauccggagaagagaaaacaauacgaucaguucggagacgauaagucucaggcugcccggcacggccaugggcacggagacuuucacagaggcuucgaggcggauaucuccccugaagaccuuuuuaacauguucuuugggggaggcuuccccagcucuaaugugcaugucuauuccaacggccgcaugcgguacacauaccagcaaagacaggaccgccgggauaaucagggggacggaggccuggggguguuuguucaacucaugccuauccugauucuuauccuggugagcgcucucucccagcugauggucucuagcccucccuauucccugagccccagaccgucugugggacacauucaucgccgggugaccgaucaccucggcgucguuuacuaugugggggacacauucuccgaggaauacaccggaagcucucugaaaacgguggagagaaacgucgaagaugacuauaucgccaaucuucgcaacaauugcuggaaggagaaacagcagaaggagggccugcucuaccgggccagauauuuuggcgauacagacauguaccaccgcgcucagaaaauggggacccccagcuguucccggcugucugaagugcaggccagccuucauggauga

SEQ ID NO: 8304 - protein, 559 aa, Artificial Sequence
  DNAJC11__Homo_sapiens__Q9NVH1
MATALSEEELDNEDYYSLLNVRREASSEELKAAYRRLCMLYHPDKHRDPELKSQAERLFNLVHQAYEVLSDPQTRAIYDIYGKRGLEMEGWEVVERRRTPAEIREEFERLQREREERRLQQRTNPKGTISVGVDATDLFDRYDEEYEDVSGSSFPQIEINKMHISQSIEAPLTATDTAILSGSLSTQNGNGGGSINFALRRVTSAKGWGELEFGAGDLQGPLFGLKLFRNLTPRCFVTTNCALQFSSRGIRPGLTTVLARNLDKNTVGYLQWRWGIQSAMNTSIVRDTKTSHFTVALQLGIPHSFALISYQHKFQDDDQTRVKGSLKAGFFGTVVEYGAERKISRHSVLGAAVSVGVPQGVSLKVKLNRASQTYFFPIHLTDQLLPSAMFYATVGPLVVYFAMHRLIIKPYLRAQKEKELEKQRESAATDVLQKKQEAESAVRLMQESVRRIIEAEESRMGLIIVNAWYGKFVNDKSRKSEKVKVIDVTVPLQCLVKDSKLILTEASKAGLPGFYDPCVGEEKNLKVLYQFRGVLHQVMVLDSEALRIPKQSHRIDTDG

SEQ ID NO: 8305 - RNA, 1680 nt, Artificial Sequence
  DNAJC11__Homo_sapiens__CCDS87.1
auggcgacggccuugagcgaggaggagcuggacaaugaagacuauuacucguugcugaacgugcgcagggaggccucuucugaagagcugaaagcugccuaccggaggcucuguaugcucuaccauccagacaagcacagagacccagagcucaagucacaggcggaacgacuguuuaaccuuguucaccaggcuuaugaagugcuuagugacccccaaaccagggccaucuaugauauauaugggaagagaggacuggaaauggaaggaugggagguuguggaaaggaggagaaccccugcugaaauucgagaggaguuugagcggcugcagagagagagagaagagaggagauugcagcagcgaaccaaucccaagggaacgaucagcguuggaguagaugccaccgaccuuuuugaucgcuaugaugaggaguaugaagauguguccggcaguagcuuuccgcagauugaaauuaauaaaaugcacauaucccaguccauugaggcacccuugacagcgacagacacagccauccucucuggaagccucucaacccagaauggaaauggaggagguuccauuaacuuugcgcucagacgaguaacuucggcaaagggauggggagaguuggaauuuggagcuggagaccuacaggggccuuuguucggucucaagcuguuccguaaucucacaccaagaugcuuugugacaacaaacugugcucugcaguuuucaucccguggaauccgacccggccugaccacuguccuagcucggaaccuagacaagaacaccgugggcuaccugcaguggcgaugggguauccagucagccaugaacacuagcaucguccgagacacuaaaaccagccacuucacuguggcccugcagcugggaaucccucacuccuuugcacugaucagcuaucagcacaaauuccaagaugacgaucagacucgugugaaaggaucccucaaagcaggcuucuuugggacggugguggaguacggagcugagaggaagaucuccaggcacagcguuuugggugcagcugucagcguuggaguuccacaggguguuucucucaaagucaagcucaacagggccagucagacauacuucuucccuauucacuugacggaccagcuucugcccagcgccauguucuaugccaccguggggccucuaguggucuacuuugccaugcaccgucugaucaucaaaccauaccucagggcucagaaagagaaggaauuggagaagcagagggaaagcgccgccaccgaugugcugcagaagaagcaagaggcggaguccgcuguccggcugaugcaggaaucuguccgaaggauaauugaggcagaagaguccagaaugggccucaucaucgucaaugccugguacgggaaguuugucaaugacaagagcaggaagagcgagaaggugaaggugauugacgugacugugccccugcagugccuggugaaggacucgaagcucauccucacggaggccuccaaggcugggcugccuggcuuuuaugacccgugugugggggaagagaagaaccugaaagugcucuaucaguuccggggcguccugcaucaggugauggugcuggacagugaggcccuccggauaccaaagcagucccacaggaucgauacagauggauaa

SEQ ID NO: 8306 - RNA, 1680 nt, Artificial Sequence
  derived and/or modified sequence opt1 from DNAJC11__Homo_sapiens__CCDS87.1
auggccaccgcccugagcgaggaggagcucgacaacgaggacuacuacucccugcugaacgugcgccgggaggcgagcuccgaggagcucaaggccgccuaccgccggcugugcaugcuguaccaccccgacaagcaccgcgacccggagcucaagagccaggccgagcggcuguucaaccugguccaccaggccuacgaggugcucuccgacccccagacccgcgcgaucuacgacaucuacggcaagcgggggcuggagauggagggcugggagguggucgagcgccggcgcacgcccgccgagauccgggaggaguucgagcgccugcagcgggagcgcgaggagcggcgccuccagcagcggaccaaccccaaggggaccaucagcgugggcguggacgccaccgaccuguucgaccgcuacgacgaggaguacgaggacgucuccgggagcuccuucccgcagaucgagaucaacaagaugcacaucagccaguccaucgaggcgccccugacggccaccgacaccgccauccucagcggcucccugagcacccagaacggcaacgggggcggguccaucaacuucgcccugcggcgcgugacgagcgccaagggcuggggcgagcucgaguucggggccggcgaccugcaggggccccuguucggccucaagcuguuccggaaccugacgccccgcugcuucgugaccaccaacugcgcgcuccaguucuccagccgcgggauccggccgggccugaccaccguccuggcccgcaaccucgacaagaacaccgugggcuaccugcaguggcggugggggauccaguccgccaugaacaccagcaucgugcgcgacacgaagaccagccacuucaccgucgcccugcagcucggcaucccccacuccuucgcccugaucagcuaccagcacaaguuccaggacgacgaccagacccgggugaaggggucccugaaggcgggcuucuucgggacgguggucgaguacggcgccgagcgcaagaucagccggcacuccgugcucggcgccgccgugagcgucggggugccccagggcgugucccugaaggucaagcugaaccgcgccagccagaccuacuucuuccccauccaccucaccgaccagcugcugccguccgcgauguucuacgccaccguggggccccucguggucuacuucgccaugcaccggcugaucaucaagcccuaccugcgcgcccagaaggagaaggagcucgagaagcagcgggagagcgccgcgacggacgugcugcagaagaagcaggaggccgaguccgccguccgccugaugcaggagagcgugcggcgcaucaucgaggccgaggagucccggaugggccucaucaucgugaacgcgugguacgggaaguucgucaacgacaagagccgcaaguccgagaaggugaaggugaucgacgucaccgugccccugcagugccuggugaaggacagcaagcucauccugaccgaggccuccaaggccggccugccgggcuucuacgaccccugcgucggggaggagaagaaccugaaggugcucuaccaguuccggggcgugcugcaccaggucauggugcuggacagcgaggcccuccgcauccccaagcagucccaccggaucgacaccgacggguga

SEQ ID NO: 8307 - RNA, 1680 nt, Artificial Sequence
  derived and/or modified sequence opt2 from DNAJC11__Homo_sapiens__CCDS87.1
auggccaccgcccucuccgaggaggagcucgacaacgaggacuacuacucccuccucaacguccgccgcgaggccuccuccgaggagcucaaggccgccuaccgccgccucugcaugcucuaccaccccgacaagcaccgcgaccccgagcucaagucccaggccgagcgccucuucaaccucguccaccaggccuacgagguccucuccgacccccagacccgcgccaucuacgacaucuacggcaagcgcggccucgagauggagggcugggaggucgucgagcgccgccgcacccccgccgagauccgcgaggaguucgagcgccuccagcgcgagcgcgaggagcgccgccuccagcagcgcaccaaccccaagggcaccaucuccgucggcgucgacgccaccgaccucuucgaccgcuacgacgaggaguacgaggacgucuccggcuccuccuucccccagaucgagaucaacaagaugcacaucucccaguccaucgaggccccccucaccgccaccgacaccgccauccucuccggcucccucuccacccagaacggcaacggcggcggcuccaucaacuucgcccuccgccgcgucaccuccgccaagggcuggggcgagcucgaguucggcgccggcgaccuccagggcccccucuucggccucaagcucuuccgcaaccucaccccccgcugcuucgucaccaccaacugcgcccuccaguucuccucccgcggcauccgccccggccucaccaccguccucgcccgcaaccucgacaagaacaccgucggcuaccuccaguggcgcuggggcauccaguccgccaugaacaccuccaucguccgcgacaccaagaccucccacuucaccgucgcccuccagcucggcaucccccacuccuucgcccucaucuccuaccagcacaaguuccaggacgacgaccagacccgcgucaagggcucccucaaggccggcuucuucggcaccgucgucgaguacggcgccgagcgcaagaucucccgccacuccguccucggcgccgccgucuccgucggcgucccccagggcgucucccucaaggucaagcucaaccgcgccucccagaccuacuucuuccccauccaccucaccgaccagcuccuccccuccgccauguucuacgccaccgucggcccccucgucgucuacuucgccaugcaccgccucaucaucaagcccuaccuccgcgcccagaaggagaaggagcucgagaagcagcgcgaguccgccgccaccgacguccuccagaagaagcaggaggccgaguccgccguccgccucaugcaggaguccguccgccgcaucaucgaggccgaggagucccgcaugggccucaucaucgucaacgccugguacggcaaguucgucaacgacaagucccgcaaguccgagaaggucaaggucaucgacgucaccgucccccuccagugccucgucaaggacuccaagcucauccucaccgaggccuccaaggccggccuccccggcuucuacgaccccugcgucggcgaggagaagaaccucaagguccucuaccaguuccgcggcguccuccaccaggucaugguccucgacuccgaggcccuccgcauccccaagcagucccaccgcaucgacaccgacggcuga

SEQ ID NO: 8308 - RNA, 1680 nt, Artificial Sequence
  derived and/or modified sequence opt3 from DNAJC11__Homo_sapiens__CCDS87.1
auggccaccgcucugagcgaggaggaacucgacaacgaagauuacuauucccuucugaaugugagaagggaggcaucuucagaagaguugaaggccgcguaccggcgcuuaugcaugcuguaucaccccgacaaacaucgagauccugagcuaaagagucaggcugaacgucucuucaaccugguccaccaagccuacgagguucuuagcgacccacagacaagagcaaucuaugauauuuacggcaaaagggggcuggaaauggagggaugggaggugguagaacggcgcagaacuccggccgagauaagggaagaguuugaacgguugcagcgcgagcgagaggaaagaaggcuccagcaacggacgaaucccaaggguaccaucuccgugggcgucgacgcuacagaucuguucgaccguuaugaugaggaauacgaggacgugucugggucgucauuuccucagauugaaaucaacaaaaugcauauuagccagaguaucgaggcaccacugacugccaccgauacagcuauacucuccggaucuuuaagcacccagaauggcaacggugggggauccaucaauuucgcccugcgcagaguuacuucagcgaagggcuggggcgagcuugaauuuggggcaggagacuugcaagguccccuguucggccuaaagcucuuuaggaaccugacaccucgguguuucgugaccacgaauugcgcccuucaguuuaguagccgagggauucgcccaggacugacuaccgucuuggcuagaaaccucgauaaaaauacagugggcuaccugcaguggaggugggguauccagucugccaugaacacuuccauuguacgggacaccaagacaucacacuucaccguugcauuacaacuggggaucccccauagcuuugcucucauaaguuaucagcacaaauuccaggacgaugaccaaacgcgcgugaagggaucucuuaaagccggcuuuuucggcacugucguggaguacggggcggaaagaaagauuuccaggcacagcgugcugggagccgcagucucgguuggugugccucagggcguaucuuugaaggugaaacuaaaucgugcuucccagacauauuucuuuccaauccaucugaccgaucagcuccugccgucagccauguucuacgcuacugucgggccccuugugguuuauuuugccaugcaccggcugauuaucaagccuuacuugcgagcacaaaaagagaaggaacucgagaaacagagagagagugccgcuacagacgugcugcagaagaaacaggaagcggagagcgcagucagguuaaugcaagaauccgugcgccggaucauugaggccgaggaaucuagaaugggacugauaaucguaaacgcuugguauggcaaguucguuaaugauaagagcaggaaaucagagaaggugaaagucauugacgugaccgucccacuacagugucucgugaaggauaguaaacugauccuuacggaagccuccaaggcagguuugcccggguuuuacgacccuugcguuggcgaggaaaagaaccugaaagugcucuaccaguuccgcggaguacugcaucaggucauggugcuugauagcgaggcccugcgaauaccaaagcaaucucaccggauugacaccgauggcuga

SEQ ID NO: 8309 - RNA, 1680 nt, Artificial Sequence
  derived and/or modified sequence opt4 from DNAJC11__Homo_sapiens__CCDS87.1
auggccaccgcccugagcgaggaggagcuggacaacgaggacuacuacagccugcugaacgugagaagagaggccagcagcgaggagcugaaggccgccuacagaagacugugcaugcuguaccaccccgacaagcacagagaccccgagcugaagagccaggccgagagacuguucaaccuggugcaccaggccuacgaggugcugagcgacccccagaccagagccaucuacgacaucuacggcaagagaggccuggagauggagggcugggaggugguggagagaagaagaacccccgccgagaucagagaggaguucgagagacugcagagagagagagaggagagaagacugcagcagagaaccaaccccaagggcaccaucagcgugggcguggacgccaccgaccuguucgacagauacgacgaggaguacgaggacgugagcggcagcagcuucccccagaucgagaucaacaagaugcacaucagccagagcaucgaggccccccugaccgccaccgacaccgccauccugagcggcagccugagcacccagaacggcaacggcggcggcagcaucaacuucgcccugagaagagugaccagcgccaagggcuggggcgagcuggaguucggcgccggcgaccugcagggcccccuguucggccugaagcuguucagaaaccugacccccagaugcuucgugaccaccaacugcgcccugcaguucagcagcagaggcaucagacccggccugaccaccgugcuggccagaaaccuggacaagaacaccgugggcuaccugcaguggagauggggcauccagagcgccaugaacaccagcaucgugagagacaccaagaccagccacuucaccguggcccugcagcugggcaucccccacagcuucgcccugaucagcuaccagcacaaguuccaggacgacgaccagaccagagugaagggcagccugaaggccggcuucuucggcaccgugguggaguacggcgccgagagaaagaucagcagacacagcgugcugggcgccgccgugagcgugggcgugccccagggcgugagccugaaggugaagcugaacagagccagccagaccuacuucuuccccauccaccugaccgaccagcugcugcccagcgccauguucuacgccaccgugggcccccuggugguguacuucgccaugcacagacugaucaucaagcccuaccugagagcccagaaggagaaggagcuggagaagcagagagagagcgccgccaccgacgugcugcagaagaagcaggaggccgagagcgccgugagacugaugcaggagagcgugagaagaaucaucgaggccgaggagagcagaaugggccugaucaucgugaacgccugguacggcaaguucgugaacgacaagagcagaaagagcgagaaggugaaggugaucgacgugaccgugccccugcagugccuggugaaggacagcaagcugauccugaccgaggccagcaaggccggccugcccggcuucuacgaccccugcgugggcgaggagaagaaccugaaggugcuguaccaguucagaggcgugcugcaccaggugauggugcuggacagcgaggcccugagaauccccaagcagagccacagaaucgacaccgacggcuga

SEQ ID NO: 8310 - RNA, 1680 nt, Artificial Sequence
  derived and/or modified sequence opt5 from DNAJC11__Homo_sapiens__CCDS87.1
auggccaccgcucugagcgaggaagaacucgacaacgaagauuacuauucccugcuuaaugugagacgggaggccucuagcgaggagcugaaggcggcuuaccgcagacucugcaugcuguaucaccccgacaaacaucgggauccugagcuuaagucccaggccgaacgccuguucaaccucguccaccaagccuacgagguucugucugacccgcagacaagagcuaucuaugauauuuacggcaaacgggggcuggaaauggagggaugggaggugguggaacgcagacggacgcccgccgagauccgcgaagaguuugaaagacuccagcgggagcgcgaggaaagacggcugcagcaacgcaccaauccuaagggcacaauuagcgucgggguggacgcuaccgaucuuuucgacagauaugaugaggaauacgaggacguuuccggaucuagcuuuccccagaucgaaauuaacaaaaugcauaucucccagagcaucgaggccccucugacagcgaccgauacagccauucucucuggcucccugagcacccagaaugggaacggaggcggcucuaucaauuucgcccuucggagagugacguccgcuaagggguggggagagcuggaauuuggcgcuggggaccuccaaggaccccuguucggccugaagcucuuucgcaaccugaccccucgguguuucgucacaaccaauugcgcccuucaguuuagcucuagagggauucgcccgggacugacaaccgugcucgcgcggaaccuggauaaaaauacgguuggcuaccuucaguggagauggggcauccaguccgccaugaacacaagcauugugcgcgacaccaagacaucccacuucaccgucgcucugcaacucgggaucccccauucuuuugcccugauuagcuaucagcacaaauuccaggacgaugaccaaacccgggugaagggaucccugaaagcuggcuuuuucgggacaguggucgaguacggagccgaaagaaagaucagccgccacucuguucucggcgccgcuguguccgugggggucccucagggagugagccugaagguuaaacuuaaucgggcgucucagacguauuucuuucccauccaucugaccgaucagcuccugccuagcgccauguucuacgcuacagugggcccccuugucguguauuuugccaugcacagacugauuaucaagccguaccuccgcgcccaaaaagagaaggaacuggagaaacagcgggaguccgcugccaccgacguucugcagaagaaacaggaagcggagucugcugugagacucaugcaagaaagcguccggcgcauuaucgaggccgaggaauccagaaugggccugauuaucgugaacgccugguaugggaaguucgucaaugauaagagccggaaaucugagaaggugaaaguuaucgacgugacagucccucuucagugucuggugaaggauuccaaacucauucugaccgaagcuagcaaggccggacugcccggcuuuuacgacccuugcguuggggaggaaaagaaccuuaaagugcucuaccaguucagaggaguccugcaucaggugauggugcuggauucugaggcucuccgcauccccaagcaaucccaccggauugacacggauggcuga

SEQ ID NO: 8311 - protein, 531 aa, Artificial Sequence
  DNAJC21__Homo_sapiens__Q5F1R6
MKCHYEALGVRRDASEEELKKAYRKLALKWHPDKNLDNAAEAAEQFKLIQAAYDVLSDPQERAWYDNHREALLKGGFDGEYQDDSLDLLRYFTVTCYSGYGDDEKGFYTVYRNVFEMIAKEELESVLEEEVDDFPTFGDSQSDYDTVVHPFYAYWQSFCTQKNFAWKEEYDTRQASNRWEKRAMEKENKKIRDKARKEKNELVRQLVAFIRKRDKRVQAHRKLVEEQNAEKARKAEEMRRQQKLKQAKLVEQYREQSWMTMANLEKELQEMEARYEKEFGDGSDENEMEEHELKDEEDGKDSDEAEDAELYDDLYCPACDKSFKTEKAMKNHEKSKKHREMVALLKQQLEEEEENFSRPQIDENPLDDNSEEEMEDAPKQKLSKKQKKKKQKPAQNYDDNFNVNGPGEGVKVDPEDTNLNQDSAKELEDSPQENVSVTEIIKPCDDPKSEAKSVPKPKGKKTKDMKKPVRVPAEPQTMSVLISCTTCHSEFPSRNKLFDHLKATGHARAPSSSSLNSATSSQSKKEKRKNR

SEQ ID NO: 8312 - RNA, 1596 nt, Artificial Sequence
  DNAJC21__Homo_sapiens__CCDS34144.1
augaagugucacuaugaggcgcugggggugcggcgcgacgccagcgaggaggagcucaagaaggccuaucggaagcuggcccugaaauggcacccggauaaaaaucuggauaaugccgcagaagcagcugaacaauuuaaauuaauccaagcagcauaugauguguugagugacccucaggaaagagcaugguaugauaaucauagagaggcccuacuuaaagguggguuugauggcgaauaucaagaugacagcuuagauuugcuacgcuauuucaccguuaccuguuauucugguuauggagaugaugaaaagggauuuuacacgguguaucguaauguuuuugaaaugauugccaaggaagaacuagaaucuguguuagaggaagagguugaugauuucccaacuuuuggagacucccagagugacuaugauacgguaguccauccuuucuacgcuuauuggcagaguuucugcacucaaaagaauuuugcauggaaggaagaauaugauacacgacaggcuucaaaccgcugggaaaaacgagccauggaaaaagaaaacaaaaagauucgggacaaagcaaggaaagagaagaaugagcuuguccgucagcugguagcuuucauucguaaaagagauaaaagagugcaggcgcaucgaaaacuuguggaagaacagaaugcagagaaggcgaggaaagccgaagagaugaggcggcagcagaagcuaaagcaggccaaacugguggagcaguacagagaacagagcuggaugacuauggccaauuuggagaaagagcuccaggagauggaggcacgguacgagaaggaguuuggagauggaucggaugaaaaugaaauggaagaacaugaacucaaagaugaggaggaugguaaagacagugaugaggccgaggacgcugagcucuaugaugaccuuuacugcccagcaugugacaaaucguucaagacagaaaaggccaugaagaaucacgagaagucaaagaagcaucgggaaaugguggccuugcuaaaacaacagcuggaggaggaagaagaaaauuuuucaagaccucaaauugaugaaaauccauuagaugacaauucugaggaagaaauggaagaugcaccaaaacaaaagcuuucuaaaaaacagaagaaaaagaaacagaaaccagcacagaauuaugaugacaauuucaauguaaauggaccuggagaaggaguaaagguugauccagaagauacuaacuuaaaucaagacagugccaaagaauuggaagauaguccccaggaaaaugucagugucacagagaucauuaaaccaugugaugauccaaaaagugaagcuaaaaguguuccuaaacccaaaggaaagaaaaccaaagauaugaaaaaaccugucagaguaccugcugaaccacaaacaaugaguguucuuaucagcuguacaaccugccauagugaauuuccaucucggaauaaacuuuuugaccaucuaaaggccacaggucaugcaagagcaccuucaucaucgucuuuaaacagcgcaacaaguagucaaagcaagaaagagaaacguaaaaacagauag

SEQ ID NO: 8313 - RNA, 1596 nt, Artificial Sequence
  derived and/or modified sequence opt1 from DNAJC21__Homo_sapiens__CCDS34144.1
augaagugccacuacgaggcccugggcgugcgccgggacgccagcgaggaggagcucaagaaggcguaccgcaagcuggcccugaaguggcaccccgacaagaaccucgacaacgccgccgaggccgcggagcaguucaagcugauccaggccgccuacgacguccuguccgacccgcaggagcgggccugguacgacaaccaccgcgaggcgcuccugaagggcggguucgacggggaguaccaggacgacagccuggaccuccugcgguacuucaccgugaccugcuacuccggcuacggggacgacgagaagggcuucuacacgguguaccgcaacgucuucgagaugaucgccaaggaggagcuggagagcgugcucgaggaggagguggacgacuuccccaccuucggcgacucccagagcgacuacgacaccgucgugcaccccuucuacgccuacuggcaguccuucugcacccagaagaacuucgccuggaaggaggaguacgacacgcggcaggccagcaaccgcugggagaagcgggcgauggagaaggagaacaagaagauccgcgacaaggcccggaaggagaagaacgagcuggugcgccagcuggucgccuucauccggaagcgcgacaagcgggugcaggcccaccgcaagcucguggaggagcagaacgccgagaaggcgcggaaggccgaggagaugcgccggcagcagaagcugaagcaggccaagcuggucgagcaguaccgcgagcaguccuggaugaccauggccaaccucgagaaggagcugcaggagauggaggcccgguacgagaaggaguucggggacggcagcgacgagaacgagauggaggagcacgagcugaaggacgaggaggacgggaaggacuccgacgaggcggaggacgccgagcucuacgacgaccuguacugccccgccugcgacaagagcuucaagaccgagaaggccaugaagaaccacgagaaguccaagaagcaccgcgagaugguggcccugcucaagcagcagcuggaggaggaggaggagaacuucagccgcccgcagaucgacgagaacccccuggacgacaacuccgaggaggagauggaggacgcgcccaagcagaagcucagcaagaagcagaagaagaagaagcagaagcccgcccagaacuacgacgacaacuucaacgugaacggcccgggggagggcgucaagguggaccccgaggacaccaaccugaaccaggacuccgccaaggagcuggaggacagcccccaggagaacguguccgucacggagaucaucaagcccugcgacgaccccaagagcgaggccaagagcgugccgaagcccaagggcaagaagaccaaggacaugaagaagcccgugcgggucccggcggagccccagaccauguccgugcucaucagcugcaccacgugccacuccgaguuccccagccgcaacaagcuguucgaccaccugaaggccaccgggcacgcccgggcccccuccagcuccagccucaacuccgccaccagcucccagagcaagaaggagaagcgcaagaaccgguga

SEQ ID NO: 8314 - RNA, 1596 nt, Artificial Sequence
  derived and/or modified sequence opt2 from DNAJC21__Homo_sapiens__CCDS34144.1
augaagugccacuacgaggcccucggcguccgccgcgacgccuccgaggaggagcucaagaaggccuaccgcaagcucgcccucaaguggcaccccgacaagaaccucgacaacgccgccgaggccgccgagcaguucaagcucauccaggccgccuacgacguccucuccgacccccaggagcgcgccugguacgacaaccaccgcgaggcccuccucaagggcggcuucgacggcgaguaccaggacgacucccucgaccuccuccgcuacuucaccgucaccugcuacuccggcuacggcgacgacgagaagggcuucuacaccgucuaccgcaacgucuucgagaugaucgccaaggaggagcucgaguccguccucgaggaggaggucgacgacuuccccaccuucggcgacucccaguccgacuacgacaccgucguccaccccuucuacgccuacuggcaguccuucugcacccagaagaacuucgccuggaaggaggaguacgacacccgccaggccuccaaccgcugggagaagcgcgccauggagaaggagaacaagaagauccgcgacaaggcccgcaaggagaagaacgagcucguccgccagcucgucgccuucauccgcaagcgcgacaagcgcguccaggcccaccgcaagcucgucgaggagcagaacgccgagaaggcccgcaaggccgaggagaugcgccgccagcagaagcucaagcaggccaagcucgucgagcaguaccgcgagcaguccuggaugaccauggccaaccucgagaaggagcuccaggagauggaggcccgcuacgagaaggaguucggcgacggcuccgacgagaacgagauggaggagcacgagcucaaggacgaggaggacggcaaggacuccgacgaggccgaggacgccgagcucuacgacgaccucuacugccccgccugcgacaaguccuucaagaccgagaaggccaugaagaaccacgagaaguccaagaagcaccgcgagauggucgcccuccucaagcagcagcucgaggaggaggaggagaacuucucccgcccccagaucgacgagaacccccucgacgacaacuccgaggaggagauggaggacgcccccaagcagaagcucuccaagaagcagaagaagaagaagcagaagcccgcccagaacuacgacgacaacuucaacgucaacggccccggcgagggcgucaaggucgaccccgaggacaccaaccucaaccaggacuccgccaaggagcucgaggacuccccccaggagaacgucuccgucaccgagaucaucaagcccugcgacgaccccaaguccgaggccaaguccguccccaagcccaagggcaagaagaccaaggacaugaagaagcccguccgcguccccgccgagccccagaccauguccguccucaucuccugcaccaccugccacuccgaguuccccucccgcaacaagcucuucgaccaccucaaggccaccggccacgcccgcgcccccuccuccuccucccucaacuccgccaccuccucccaguccaagaaggagaagcgcaagaaccgcuga

SEQ ID NO: 8315 - RNA, 1596 nt, Artificial Sequence
  derived and/or modified sequence opt3 from DNAJC21__Homo_sapiens__CCDS34144.1
augaagugccacuacgaggcccugggcgugagaagggacgcuagcgaagaggaacucaaaaaggcauaucggaaacuugcccugaaguggcaucccgauaaaaacuuggacaaugcggcugaggccgcagaacaguucaaguuaauccaagccgcuuacgauguccuguccgacccucaggagcgcgcaugguaugauaaccaccgagaggcccuacucaaagggggauuugacggugaauaccaggaugacucucuggaucuucugcguuauuucaccguuacauguuacucaggcuauggggacgaugagaagggauuuuacacuguguacagaaauguauucgaaaugauugcuaaggaggaguuggaaagugugcucgaggaagaggucgacgauuuuccaacguucggcgacagccaguccgacuaugauaccgugguucauccguuuuacgccuauuggcaaucuuucugcacacagaaaaacuuugcguggaaggaagaguacgacacuaggcaggcaucgaaucggugggagaaacgcgccauggaaaaggagaacaagaaaauaagagauaaggcuaggaaagaaaagaaugagcuggugcggcagcuggucgccuucauccgcaaacgagacaagagagugcaagcacacaggaaacucguagaagaacagaacgcugagaaggcccggaaggcggaagagaugcgucgccagcagaaauuaaagcaagccaaacugguugaacaguauagagagcagucauggaugaccauggcaaaucuugaaaaggaguugcaagagauggaagcuagguacgagaaagaauuuggugaugggagcgacgagaacgagauggaggagcaugaacugaaggaugaggaagacggaaaggauagugacgaggccgaggaugcugaacuauaugacgaccucuacugucccgccugcgauaaauccuucaagacagagaaagcaaugaagaaucacgaaaaaucuaagaagcaccgggagaugguggcccugcuuaaacagcagcuggaagaggaggaagagaacuuuagccgaccucagauugacgaaaauccauuggaugacaacuccgaggaagagauggaggaugcucccaagcaaaaacucucaaagaaacagaagaagaaaaagcagaaaccugcgcagaauuacgacgauaacuucaacgucaauggcccaggcgaaggggugaagguggaccccgaggauaccaaccugaaucaagacagugcaaaagaauuagaggauagcccucaggagaacgucucuguuacugaaaucauuaagccaugugacgauccgaaauccgaggccaagucagugcccaagccuaaaggaaagaaaacaaaggacaugaaaaagccaguacgcgugcccgcugaaccucagaccaugagcguccugaucaguugcacgacuugucauucugaguucccauccagaaauaagcucuuugaccaccuuaaagccaccggucaugcaagggcccccagcucgucuucccugaacucagcuacaaguagccaguccaagaaagaaaagcggaaaaaucgcuga

SEQ ID NO: 8316 - RNA, 1596 nt, Artificial Sequence
  derived and/or modified sequence opt4 from DNAJC21__Homo_sapiens__CCDS34144.1
augaagugccacuacgaggcccugggcgugagaagagacgccagcgaggaggagcugaagaaggccuacagaaagcuggcccugaaguggcaccccgacaagaaccuggacaacgccgccgaggccgccgagcaguucaagcugauccaggccgccuacgacgugcugagcgacccccaggagagagccugguacgacaaccacagagaggcccugcugaagggcggcuucgacggcgaguaccaggacgacagccuggaccugcugagauacuucaccgugaccugcuacagcggcuacggcgacgacgagaagggcuucuacaccguguacagaaacguguucgagaugaucgccaaggaggagcuggagagcgugcuggaggaggagguggacgacuuccccaccuucggcgacagccagagcgacuacgacaccguggugcaccccuucuacgccuacuggcagagcuucugcacccagaagaacuucgccuggaaggaggaguacgacaccagacaggccagcaacagaugggagaagagagccauggagaaggagaacaagaagaucagagacaaggccagaaaggagaagaacgagcuggugagacagcugguggccuucaucagaaagagagacaagagagugcaggcccacagaaagcugguggaggagcagaacgccgagaaggccagaaaggccgaggagaugagaagacagcagaagcugaagcaggccaagcugguggagcaguacagagagcagagcuggaugaccauggccaaccuggagaaggagcugcaggagauggaggccagauacgagaaggaguucggcgacggcagcgacgagaacgagauggaggagcacgagcugaaggacgaggaggacggcaaggacagcgacgaggccgaggacgccgagcuguacgacgaccuguacugccccgccugcgacaagagcuucaagaccgagaaggccaugaagaaccacgagaagagcaagaagcacagagagaugguggcccugcugaagcagcagcuggaggaggaggaggagaacuucagcagaccccagaucgacgagaacccccuggacgacaacagcgaggaggagauggaggacgcccccaagcagaagcugagcaagaagcagaagaagaagaagcagaagcccgcccagaacuacgacgacaacuucaacgugaacggccccggcgagggcgugaagguggaccccgaggacaccaaccugaaccaggacagcgccaaggagcuggaggacagcccccaggagaacgugagcgugaccgagaucaucaagcccugcgacgaccccaagagcgaggccaagagcgugcccaagcccaagggcaagaagaccaaggacaugaagaagcccgugagagugcccgccgagccccagaccaugagcgugcugaucagcugcaccaccugccacagcgaguuccccagcagaaacaagcuguucgaccaccugaaggccaccggccacgccagagcccccagcagcagcagccugaacagcgccaccagcagccagagcaagaaggagaagagaaagaacagauga

SEQ ID NO: 8317 - RNA, 1596 nt, Artificial Sequence
  derived and/or modified sequence opt5 from DNAJC21__Homo_sapiens__CCDS34144.1
augaagugccacuacgaggcccugggcgugagacgggacgcuagcgaagaggaacucaaaaaggccuaucgcaaacuggcgcuuaaguggcaucccgauaaaaaccuggacaaugcugccgaggccgcugaacaguucaagcucauccaagccgcuuacgauguccuguccgacccucaggagagagccugguaugauaaccaccgggaggcgcuucugaaagggggauuugacggcgaauaccaggaugacucucucgaucugcugcgcuauuucaccguuacauguuacagcggguauggagacgaugagaagggcuuuuacacgguguacagaaauguguucgaaaugauugccaaggaggagcucgaauccguccuggaggaagagguggacgauuuuccgaccuucggggacucucagagcgacuaugauacaguugugcaucccuuuuacgcuuauuggcaauccuucugcacccagaaaaacuuugccuggaaggaagaguacgacacacggcaggcuucuaaucgcugggagaaaagagccauggaaaaggagaacaagaaaauccgggauaaggcgcgcaaagaaaagaaugagcuugucagacagcugguggccuucauucggaaacgcgacaagagaguucaagcucaccggaaacucguggaagaacagaacgccgagaaggcucgcaaggccgaagagaugagacggcagcagaaacugaagcaagccaaacuugucgaacaguauagagagcagagcuggaugaccauggcuaaucuggaaaaggagcuccaagagauggaagcgcgcuacgagaaagaauuuggagauggcuccgacgagaacgagauggaggagcaugaacugaaggaugaggaagacggcaaggauagcgacgaggccgaggaugcugaacuguaugacgaccucuacuguccugccugcgauaaaucuuucaagacagagaaagccaugaagaaucacgaaaaauccaagaagcaccgggagaugguggcucugcuuaaacagcagcuggaagaggaggaagagaacuuuagcagaccccagaucgacgaaaauccucucgaugacaacucugaggaagagauggaggaugcccccaagcaaaaacuguccaagaaacagaagaagaaaaagcagaaaccugcgcagaauuacgacgauaacuucaacgugaaugggccgggagaaggcgucaagguugaccccgaggauaccaaccuuaaucaagacagcgcuaaagaacuggaggauucuccucaggagaacguguccgugacggaaauuaucaagcccugugacgauccuaaaagcgaggccaaguccguccccaagccgaaagggaagaaaaccaaggacaugaaaaagccugugcgcguucccgccgaaccucagacaaugucugugcucaucagcugcaccacaugucauuccgaguuccccagccggaauaagcuguuugaccaccugaaagcuaccggacaugccagagcucccucuuccagcucucucaacagcgccacguccucucagagcaagaaagaaaagcgcaaaaaucgguga

SEQ ID NO: 8318 - protein, 397 aa, Artificial Sequence
  DNJA1__Homo_sapiens__P31689
MVKETTYYDVLGVKPNATQEELKKAYRKLALKYHPDKNPNEGEKFKQISQAYEVLSDAKKRELYDKGGEQAIKEGGAGGGFGSPMDIFDMFFGGGGRMQRERRGKNVVHQLSVTLEDLYNGATRKLALQKNVICDKCEGRGGKKGAVECCPNCRGTGMQIRIHQIGPGMVQQIQSVCMECQGHGERISPKDRCKSCNGRKIVREKKILEVHIDKGMKDGQKITFHGEGDQEPGLEPGDIIIVLDQKDHAVFTRRGEDLFMCMDIQLVEALCGFQKPISTLDNRTIVITSHPGQIVKHGDIKCVLNEGMPIYRRPYEKGRLIIEFKVNFPENGFLSPDKLSLLEKLLPERKEVEETDEMDQVELVDFDPNQERRRHYNGEAYEDDEHHPRGGVQCQTS

SEQ ID NO: 8319 - RNA, 1194 nt, Artificial Sequence
  DNJA1__Homo_sapiens__AAC37517
auggugaaagaaacaacuuacuacgauguuuugggggucaaacccaaugcuacucaggaagaauugaaaaaggcuuauaggaaacuggccuugaaguaccauccugauaagaacccaaaugaaggagagaaguuuaaacagauuucucaagcuuacgaaguucucucugaugcaaagaaaagggaauuauaugacaaaggaggagaacaggcaauuaaagaggguggagcagguggcgguuuuggcucccccauggacaucuuugauauguuuuuuggaggaggaggaaggaugcagagagaaaggagagguaaaaauguuguacaucagcucucaguaacccuagaagacuuauauaauggugcaacaagaaaacuggcucugcaaaagaaugugauuugugacaaaugugaagguagaggagguaagaaaggagcaguagagugcugucccaauugccgagguacuggaaugcaaauaagaauucaucagauaggaccuggaaugguucagcaaauucagucugugugcauggagugccagggccauggggagcggaucaguccuaaagauagauguaaaagcugcaacggaaggaagauaguucgagagaagaaaauuuuagaaguucauauugacaaaggcaugaaagauggccagaagauaacauuccauggugaaggagaccaagaaccaggacuggagccaggcgauauuaucauuguguuagaucagaaggaccaugcuguuuuuacucgacgaggagaagaccuuuucauguguauggacauacagcucguugaagcacuguguggcuuccagaagccaauaucuacucuugacaaccgaaccaucgucaucaccucucauccaggucagauugucaagcauggagauaucaaguguguacuaaaugaaggcaugccaauuuaucguagaccauaugaaaagggucgccuaaucaucgaauuuaagguaaacuuuccugagaauggcuuucucucuccugauaaacugucuuugcuggaaaaacuccuacccgagaggaaggaaguggaagagacugaugagauggaccaaguagaacugguggacuuugauccaaaucaggaaagacggcgccacuacaauggagaagcauaugaggaugaugaacaucaucccagaggugguguucagugucagaccucuuaa

SEQ ID NO: 8320 - RNA, 1194 nt, Artificial Sequence
  derived and/or modified sequence opt1 from DNJA1__Homo_sapiens__AAC37517
auggugaaggagaccaccuacuacgacguccugggcgugaagcccaacgccacgcaggaggagcucaagaaggccuaccggaagcuggcgcugaaguaccacccggacaagaaccccaacgagggggagaaguucaagcagaucagccaggccuacgaggugcucuccgacgccaagaagcgggagcuguacgacaagggcggggagcaggccaucaaggagggcggggccggcggcggguucggcagccccauggacaucuucgacauguucuucgggggcgggggccgcaugcagcgggagcgccggggcaagaacgucgugcaccagcuguccgugacccucgaggaccuguacaacggggcgacccgcaagcuggcccuccagaagaacgucaucugcgacaagugcgagggccgcgggggcaagaagggcgccguggagugcugccccaacugccgggggaccggcaugcagauccggauccaccagaucgggccgggcauggugcagcagauccagagcgucugcauggagugccaggggcacggcgagcgcaucucccccaaggaccggugcaagagcugcaacggccgcaagaucgugcgggagaagaagauccuggaggugcacaucgacaaggggaugaaggacggccagaagaucacguuccacggggagggcgaccaggagcccgggcuggagcccggcgacaucaucaucguccucgaccagaaggaccacgccguguucacccgccggggcgaggaccuguucaugugcauggacauccagcugguggaggcgcucugcggguuccagaagccgaucuccacccuggacaaccgcaccaucgucaucacgagccaccccggccagaucgugaagcacggggacaucaagugcgugcugaacgagggcaugcccaucuaccggcgccccuacgagaaggggcggcucaucaucgaguucaaggucaacuucccggagaacggcuuccugucccccgacaagcugagccuccuggagaagcugcuccccgagcgcaaggagguggaggagaccgacgagauggaccagguggagcuggucgacuucgaccccaaccaggagcggcgccgccacuacaacggcgaggccuacgaggacgacgagcaccacccgcgcgggggcgugcagugccagaccuccuga

SEQ ID NO: 8321 - RNA, 1194 nt, Artificial Sequence
  derived and/or modified sequence opt2 from DNJA1__Homo_sapiens__AAC37517
auggucaaggagaccaccuacuacgacguccucggcgucaagcccaacgccacccaggaggagcucaagaaggccuaccgcaagcucgcccucaaguaccaccccgacaagaaccccaacgagggcgagaaguucaagcagaucucccaggccuacgagguccucuccgacgccaagaagcgcgagcucuacgacaagggcggcgagcaggccaucaaggagggcggcgccggcggcggcuucggcucccccauggacaucuucgacauguucuucggcggcggcggccgcaugcagcgcgagcgccgcggcaagaacgucguccaccagcucuccgucacccucgaggaccucuacaacggcgccacccgcaagcucgcccuccagaagaacgucaucugcgacaagugcgagggccgcggcggcaagaagggcgccgucgagugcugccccaacugccgcggcaccggcaugcagauccgcauccaccagaucggccccggcaugguccagcagauccaguccgucugcauggagugccagggccacggcgagcgcaucucccccaaggaccgcugcaaguccugcaacggccgcaagaucguccgcgagaagaagauccucgagguccacaucgacaagggcaugaaggacggccagaagaucaccuuccacggcgagggcgaccaggagcccggccucgagcccggcgacaucaucaucguccucgaccagaaggaccacgccgucuucacccgccgcggcgaggaccucuucaugugcauggacauccagcucgucgaggcccucugcggcuuccagaagcccaucuccacccucgacaaccgcaccaucgucaucaccucccaccccggccagaucgucaagcacggcgacaucaagugcguccucaacgagggcaugcccaucuaccgccgccccuacgagaagggccgccucaucaucgaguucaaggucaacuuccccgagaacggcuuccucucccccgacaagcucucccuccucgagaagcuccuccccgagcgcaaggaggucgaggagaccgacgagauggaccaggucgagcucgucgacuucgaccccaaccaggagcgccgccgccacuacaacggcgaggccuacgaggacgacgagcaccacccccgcggcggcguccagugccagaccuccuga

SEQ ID NO: 8322 - RNA, 1194 nt, Artificial Sequence
  derived and/or modified sequence opt3 from DNJA1__Homo_sapiens__AAC37517
auggugaaggagaccacauacuaugacguccugggcguuaaacccaacgccacucaggaggaacucaagaaggcuuacagaaaacuugcacugaaauaucacccugauaagaauccaaacgaaggggagaaguucaaacaaaucagccaggccuacgaaguguuguccgacgcgaagaaaagggaguuauaugauaagggaggugagcaggcuauuaaagaaggcggggccggaggcgguuuugggucuccgauggacauauucgauauguuuuucggaggcggcgggcggaugcagcgcgagcgacguggaaagaauguagugcaucaacugucagucacgcuagaagaccucuacaacggugcaaccagaaagcuggcccuucagaaaaaugugaucugcgauaagugugagggcaggggagggaaaaagggcgcuguugagugcugucccaacugccgggguacagggaugcagauucgcauccaccagauuggaccuggcauggugcaacagauccagagugucuguauggaaugccagggccauggggagagaauaagcccaaaagacagguguaaguccugcaauggacggaaaaucgugcgcgaaaagaagauucuggagguacacaucgauaaagguaugaaggacggccagaaaauuacuuuucauggggaaggagaucaagagcccggcuuggagccuggugacaucauaauuguucucgaucagaaggaccacgcaguguucacccgaagaggggaagaccuguuuauguguauggauauccaacuggucgaggcccucugcggcuuccagaaaccaauuucuacauuagacaacaggaccaucgugaucacuucgcaccccggacagauugugaagcauggcgauauaaaguguguccugaaugaagggaugccuaucuaucggcguccauacgagaaaggacgccuuauuaucgaauuuaagguuaacuucccggagaauggcuuuuugucacccgacaaacugagccuacucgagaagcugcuuccugaaagaaaagagguggaagagacagaugaaauggaccagguagagcugguggauuucgacccaaaccaagagaggcggcgacacuacaauggugaggcuuaugaagaugacgaacaucacccccgcgggggaguccagugccagaccaguuga

SEQ ID NO: 8323 - RNA, 1194 nt, Artificial Sequence
  derived and/or modified sequence opt4 from DNJA1__Homo_sapiens__AAC37517
auggugaaggagaccaccuacuacgacgugcugggcgugaagcccaacgccacccaggaggagcugaagaaggccuacagaaagcuggcccugaaguaccaccccgacaagaaccccaacgagggcgagaaguucaagcagaucagccaggccuacgaggugcugagcgacgccaagaagagagagcuguacgacaagggcggcgagcaggccaucaaggagggcggcgccggcggcggcuucggcagccccauggacaucuucgacauguucuucggcggcggcggcagaaugcagagagagagaagaggcaagaacguggugcaccagcugagcgugacccuggaggaccuguacaacggcgccaccagaaagcuggcccugcagaagaacgugaucugcgacaagugcgagggcagaggcggcaagaagggcgccguggagugcugccccaacugcagaggcaccggcaugcagaucagaauccaccagaucggccccggcauggugcagcagauccagagcgugugcauggagugccagggccacggcgagagaaucagccccaaggacagaugcaagagcugcaacggcagaaagaucgugagagagaagaagauccuggaggugcacaucgacaagggcaugaaggacggccagaagaucaccuuccacggcgagggcgaccaggagcccggccuggagcccggcgacaucaucaucgugcuggaccagaaggaccacgccguguucaccagaagaggcgaggaccuguucaugugcauggacauccagcugguggaggcccugugcggcuuccagaagcccaucagcacccuggacaacagaaccaucgugaucaccagccaccccggccagaucgugaagcacggcgacaucaagugcgugcugaacgagggcaugcccaucuacagaagacccuacgagaagggcagacugaucaucgaguucaaggugaacuuccccgagaacggcuuccugagccccgacaagcugagccugcuggagaagcugcugcccgagagaaaggagguggaggagaccgacgagauggaccagguggagcugguggacuucgaccccaaccaggagagaagaagacacuacaacggcgaggccuacgaggacgacgagcaccaccccagaggcggcgugcagugccagaccagcuga

SEQ ID NO: 8324 - RNA, 1194 nt, Artificial Sequence
  derived and/or modified sequence opt5 from DNJA1__Homo_sapiens__AAC37517
auggugaaggagaccacauacuaugacguccugggcguuaaacccaacgccacgcaggaggaacucaagaaggcuuacagaaaacuggcccuuaaauaucacccugauaagaauccgaacgaaggggagaaguucaaacaaaucagccaggcguacgaagugcuguccgacgcuaagaaacgggagcucuaugauaagggaggcgagcaggccauuaaagaagggggagccggcgggggauuuggcucucccauggacaucuucgauauguuuuucggcgggggaggccgcaugcagagagagcggcgcgggaagaaugugguccaucaacugagcgugacccuugaagaccuguacaacggagcuacaagaaagcucgcccugcagaaaaauguuauuugcgauaagugugagggcagagggggcaaaaagggagcuguggagugcuguccuaacugccgcggcaccgggaugcagauccggauucaccagaucggacccggcaugguccaacagauccaguccguguguauggaaugccaggggcauggagagcggauuucuccuaaagaccgcuguaagagcugcaauggcagaaaaaucguucgggaaaagaagauucuggaggugcacaucgauaaagggaugaaggacggacagaaaauuacauuucauggcgaaggcgaucaagagcccgggcucgagccuggagacaucauuaucguccuggaucagaaggaccacgccguguucacccgcagaggcgaagaccuuuuuauguguauggauauccaacugguggaggcgcucugcggguuccagaaaccgauuuccacacuggacaaccggaccaucgucauuacgucucaccccggacagaucguuaagcauggcgauauuaagugugugcuuaaugaagggaugccuaucuaucgcagacccuacgagaaaggccggcugaucauugaauuuaaggugaacuucccugagaauggauuucucagccccgacaaacugucccugcucgagaagcugcuuccggaaagaaaagaggucgaagagaccgaugaaauggaccagguggagcugguugauuucgacccuaaccaagagcgccggagacacuacaauggcgaagccuaugaggaugacgaacaucacccccgcgggggagugcagugccagacaagcuga

SEQ ID NO: 8325 - protein, 412 aa, Artificial Sequence
  DNJA2__Homo_sapiens__O60884
MANVADTKLYDILGVPPGASENELKKAYRKLAKEYHPDKNPNAGDKFKEISFAYEVLSNPEKRELYDRYGEQGLREGSGGGGGMDDIFSHIFGGGLFGFMGNQSRSRNGRRRGEDMMHPLKVSLEDLYNGKTTKLQLSKNVLCSACSGQGGKSGAVQKCSACRGRGVRIMIRQLAPGMVQQMQSVCSDCNGEGEVINEKDRCKKCEGKKVIKEVKILEVHVDKGMKHGQRITFTGEADQAPGVEPGDIVLLLQEKEHEVFQRDGNDLHMTYKIGLVEALCGFQFTFKHLDGRQIVVKYPPGKVIEPGCVRVVRGEGMPQYRNPFEKGDLYIKFDVQFPENNWINPDKLSELEDLLPSRPEVPNIIGETEEVELQEFDSTRGSGGGQRREAYNDSSDEESSSHHGPGVQCAHQ

SEQ ID NO: 8326 - RNA, 1239 nt, Artificial Sequence
  DNJA2__Homo_sapiens__AAH13044
auggcuaacguggcugacacgaagcuguacgacauccugggcgucccgcccggcgccagcgagaacgagcugaagaaggcauacagaaaguuagccaaggaauaucauccugauaagaauccaaaugcaggagacaaauuuaaagaaauaaguuuugcauaugaaguacuaucaaauccugagaagcgugaguuauaugacagauacggagagcaaggucuucgggaaggcagcggcggaggugguggcauggaugauauuuucucucacauuuuuggugggggauuguucggcuucaugggcaaucagaguagaagucgaaauggcagaagaagaggagaggacaugaugcauccacucaaaguaucuuuagaagaucuguauaauggcaagacaaccaaacuacaacuuagcaagaaugugcucuguagugcaugcaguggccaaggcggaaagucuggagcuguccaaaaguguagugcuugucgaggucgaggugugcgcaucaugaucagacagcuggcuccagggaugguacaacagaugcagucugugugcucugauuguaauggagaaggagagguaauuaaugaaaaagaccgcuguaaaaaaugugaagggaagaaggugauuaaagaagucaagauucuugaaguccacguagacaaaggcaugaaacauggacagagaauuacauucacuggggaagcagaccaggccccaggaguggaacccggagacauuguucuuuugcuacaggagaaagaacaugagguauuucagagagaugggaaugauuugcacaugacauauaaaauaggacuuguugaagcucuauguggauuucaguucacauuuaagcaccuugauggacgucagauuguggugaaauaccccccuggcaaaguaauugaaccaggguguguucguguaguucgaggugaagggaugccgcaguaucguaaucccuuugaaaaaggugaucuuuacauaaaguuugaugugcaguuuccugaaaacaacuggaucaacccagacaagcuuucugaacuagaagaucuucugccaucuagaccggaaguuccuaacauaauuggagaaacagaggagguagagcuucaggaauuugauagcacucgaggcucaggagguggucagaggcgugaagccuauaaugauagcucugaugaagaaagcagcagccaucauggaccuggagugcagugugcccaucaguaa

SEQ ID NO: 8327 - RNA, 1239 nt, Artificial Sequence
  derived and/or modified sequence opt1 from DNJA2__Homo_sapiens__AAH13044
auggccaacguggccgacaccaagcuguacgacauccucggcgugcccccgggggcgagcgagaacgagcugaagaaggccuaccgcaagcuggccaaggaguaccaccccgacaagaaccccaacgccggcgacaaguucaaggagaucuccuucgccuacgagguccucagcaaccccgagaagcgggagcuguacgaccgcuacggggagcagggccugcgggagggguccggcggcgggggcgggauggacgacaucuucagccacaucuucggcgggggccucuucggcuucauggggaaccagucccgcagccggaacggccgccggcgcggggaggacaugaugcacccgcugaaggugucccuggaggaccucuacaacggcaagaccacgaagcugcagcugagcaagaacguccucugcuccgcgugcagcggccagggcgggaaguccggggccgugcagaagugcagcgccugccggggccgcggggugcggaucaugauccgccagcuggcccccggcaugguccagcagaugcaguccgugugcagcgacugcaacggcgagggggaggugaucaacgagaaggaccggugcaagaagugcgagggcaagaaggucaucaaggaggugaagauccuggaggugcacgucgacaaggggaugaagcacggccagcgcaucaccuucaccggggaggcggaccaggcccccggcguggagcccggcgacaucgugcuccugcugcaggagaaggagcacgaggucuuccagcgggacgggaacgaccuccacaugaccuacaagaucggccugguggaggcccugugcggguuccaguucacguucaagcaccucgacggccgccagaucguggucaaguacccgcccgggaaggugaucgagcccggcugcgugcgggucgugcgcggcgaggggaugccccaguaccggaacccguucgagaagggcgaccuguacaucaaguucgacgugcaguuccccgagaacaacuggaucaaccccgacaagcuguccgagcucgaggaccugcugcccagccgcccggagguccccaacaucaucggggagaccgaggagguggagcuccaggaguucgacuccacccggggcagcggcgggggccagcgccgcgaggccuacaacgacuccagcgacgaggagagcuccagccaccacgggcccggcguccagugcgcccaccaguga

SEQ ID NO: 8328 - RNA, 1239 nt, Artificial Sequence
  derived and/or modified sequence opt2 from DNJA2__Homo_sapiens__AAH13044
auggccaacgucgccgacaccaagcucuacgacauccucggcgucccccccggcgccuccgagaacgagcucaagaaggccuaccgcaagcucgccaaggaguaccaccccgacaagaaccccaacgccggcgacaaguucaaggagaucuccuucgccuacgagguccucuccaaccccgagaagcgcgagcucuacgaccgcuacggcgagcagggccuccgcgagggcuccggcggcggcggcggcauggacgacaucuucucccacaucuucggcggcggccucuucggcuucaugggcaaccagucccgcucccgcaacggccgccgccgcggcgaggacaugaugcacccccucaaggucucccucgaggaccucuacaacggcaagaccaccaagcuccagcucuccaagaacguccucugcuccgccugcuccggccagggcggcaaguccggcgccguccagaagugcuccgccugccgcggccgcggcguccgcaucaugauccgccagcucgcccccggcaugguccagcagaugcaguccgucugcuccgacugcaacggcgagggcgaggucaucaacgagaaggaccgcugcaagaagugcgagggcaagaaggucaucaaggaggucaagauccucgagguccacgucgacaagggcaugaagcacggccagcgcaucaccuucaccggcgaggccgaccaggcccccggcgucgagcccggcgacaucguccuccuccuccaggagaaggagcacgaggucuuccagcgcgacggcaacgaccuccacaugaccuacaagaucggccucgucgaggcccucugcggcuuccaguucaccuucaagcaccucgacggccgccagaucgucgucaaguacccccccggcaaggucaucgagcccggcugcguccgcgucguccgcggcgagggcaugccccaguaccgcaaccccuucgagaagggcgaccucuacaucaaguucgacguccaguuccccgagaacaacuggaucaaccccgacaagcucuccgagcucgaggaccuccuccccucccgccccgagguccccaacaucaucggcgagaccgaggaggucgagcuccaggaguucgacuccacccgcggcuccggcggcggccagcgccgcgaggccuacaacgacuccuccgacgaggaguccuccucccaccacggccccggcguccagugcgcccaccaguga

SEQ ID NO: 8329 - RNA, 1239 nt, Artificial Sequence
  derived and/or modified sequence opt3 from DNJA2__Homo_sapiens__AAH13044
auggccaacguggcugacaccaagcuguacgauauccucggcguucccccuggggcaagcgagaaugaacuuaaaaaggccuauagaaaacuggcgaaggaguaccacccagacaaaaacccgaaugcuggagauaaguucaaggaaauuuccuuugccuaugaggucuugucuaaccccgagaaaagggaauuauacgaccgguauggugagcagggccugcgcgaagggucaggaggcggugggggaauggaugacauauucagucauaucuuuggcggcgggcuauucggauuuauggguaaucaaagccgaucccguaacggcagaaggcgcggggaggauaugaugcacccucucaaggugucucuggaagaccuuuacaauggaaaaacaacuaagcugcaguugucgaaaaacguacucugcucagcauguagcggccagggugggaagaguggagccgugcagaagugcuccgcuugucggggcagaggcgucaggauuaugauccggcaacuggcaccagggauggugcagcagaugcagucuguuugcagcgauuguaauggagagggugaggugauuaacgaaaaagaccgcugcaagaaaugugagggcaagaaagucaucaaggaagugaaaauacuggagguacauguugauaaggggaugaagcacggacaacgaaucacguucaccggcgaagccgaccaggcucccgguguggagccuggggauauuguccucuuacugcaggagaaagaacaugagguguuucagagagacggcaaugaccuucacaugacauauaagaucggauugguggaagcccugugcggcuuccaauuuacuuucaaacaccuagaugggaggcagauugucguuaaguacccacccggaaaagugaucgagccugguuguguacgggugguccguggcgaagggaugccacaguaccgcaacccguuugagaagggagaccucuauauaaaguucgaugugcaauuucccgagaauaacuggauuaauccugacaaacuguccgaacuugaggaucuguugccaucaagacccgaaguuccuaacaucauuggcgagaccgaagagguggagcuccaggaguucgacaguacaagggguagcgggggcggacagcggcgagaagcguacaacgauucuuccgacgaagagucaagcagucaucacggcccagggguccagugcgcacaucaauga

SEQ ID NO: 8330 - RNA, 1239 nt, Artificial Sequence
  derived and/or modified sequence opt4 from DNJA2__Homo_sapiens__AAH13044
auggccaacguggccgacaccaagcuguacgacauccugggcgugccccccggcgccagcgagaacgagcugaagaaggccuacagaaagcuggccaaggaguaccaccccgacaagaaccccaacgccggcgacaaguucaaggagaucagcuucgccuacgaggugcugagcaaccccgagaagagagagcuguacgacagauacggcgagcagggccugagagagggcagcggcggcggcggcggcauggacgacaucuucagccacaucuucggcggcggccuguucggcuucaugggcaaccagagcagaagcagaaacggcagaagaagaggcgaggacaugaugcacccccugaaggugagccuggaggaccuguacaacggcaagaccaccaagcugcagcugagcaagaacgugcugugcagcgccugcagcggccagggcggcaagagcggcgccgugcagaagugcagcgccugcagaggcagaggcgugagaaucaugaucagacagcuggcccccggcauggugcagcagaugcagagcgugugcagcgacugcaacggcgagggcgaggugaucaacgagaaggacagaugcaagaagugcgagggcaagaaggugaucaaggaggugaagauccuggaggugcacguggacaagggcaugaagcacggccagagaaucaccuucaccggcgaggccgaccaggcccccggcguggagcccggcgacaucgugcugcugcugcaggagaaggagcacgagguguuccagagagacggcaacgaccugcacaugaccuacaagaucggccugguggaggcccugugcggcuuccaguucaccuucaagcaccuggacggcagacagaucguggugaaguacccccccggcaaggugaucgagcccggcugcgugagaguggugagaggcgagggcaugccccaguacagaaaccccuucgagaagggcgaccuguacaucaaguucgacgugcaguuccccgagaacaacuggaucaaccccgacaagcugagcgagcuggaggaccugcugcccagcagacccgaggugcccaacaucaucggcgagaccgaggagguggagcugcaggaguucgacagcaccagaggcagcggcggcggccagagaagagaggccuacaacgacagcagcgacgaggagagcagcagccaccacggccccggcgugcagugcgcccaccaguga

SEQ ID NO: 8331 - RNA, 1239 nt, Artificial Sequence
  derived and/or modified sequence opt5 from DNJA2__Homo_sapiens__AAH13044
auggccaacguggcugacaccaagcuguacgauauccucggcguucccccuggggccagcgagaaugaacugaaaaaggcguauagaaaacuugcuaaggaguaccacccggacaaaaaccccaaugccggagauaaguucaaggaaauuuccuuugccuaugagguccugucuaacccugaaaaacgggagcucuacgaccgcuauggcgagcaggggcugagagaaggaagcggcgggggaggcggcauggaugacaucuucucccauauuuuugggggaggccuuuucggguuuaugggaaaucaaucucggagccgcaacggcagacggcgcggggaggauaugaugcacccccugaaggugucccucgaagaccuguacaauggaaaaacaacgaagcugcagcucucuaaaaacgugcugugcagcgcuuguuccggccagggcggaaagagcggggccguccagaagugcucugcuuguagaggccgcggggugcggaucaugauuagacaacuugccccuggaaugguucagcagaugcaguccgugugcagcgauuguaauggcgagggggaggucaucaacgaaaaagaccggugcaagaaaugugagggaaagaaagugaucaaggaaguuaaaauucuggaggugcaugucgauaagggcaugaagcacggccaacgcaucaccuucacaggggaagcggaccaggcccccggaguggagccuggcgauauugugcuccugcuucaggagaaagaacaugaggucuuucagagagacgggaaugaccugcacaugaccuauaagaucggacucguugaagcucugugcggcuuccaauuuacauucaaacaccuggaugggcggcagauuguggugaaguacccgcccggcaaagucaucgagccuggaugugugcgcguugugagaggcgaagggaugccccaguaccggaacccuuuugagaagggagaccucuauauuaaguucgauguccaauuucccgagaauaacuggaucaauccggacaaacugucugaacuugaggaucugcucccuuccagacccgaagugccuaacaucauuggcgagaccgaagagguugagcugcaggaguucgacagcacacgcgggucuggaggcgggcagcggagagaagccuacaacgauuccagcgacgaagaguccucuagccaucacggccccggagugcagugcgcucaucaauga

SEQ ID NO: 8332 - protein, 480 aa, Artificial Sequence
  DNJA3__Homo_sapiens__Q96EY1
MAARCSTRWLLVVVGTPRLPAISGRGARPPREGVVGAWLSRKLSVPAFASSLTSCGPRALLTLRPGVSLTGTKHNPFICTASFHTSAPLAKEDYYQILGVPRNASQKEIKKAYYQLAKKYHPDTNKDDPKAKEKFSQLAEAYEVLSDEVKRKQYDAYGSAGFDPGASGSQHSYWKGGPTVDPEELFRKIFGEFSSSSFGDFQTVFDQPQEYFMELTFNQAAKGVNKEFTVNIMDTCERCNGKGNEPGTKVQHCHYCGGSGMETINTGPFVMRSTCRRCGGRGSIIISPCVVCRGAGQAKQKKRVMIPVPAGVEDGQTVRMPVGKREIFITFRVQKSPVFRRDGADIHSDLFISIAQALLGGTARAQGLYETINVTIPPGTQTDQKIRMGGKGIPRINSYGYGDHYIHIKIRVPKRLTSRQQSLILSYAEDETDVEGTVNGVTLTSSGGSTMDSSAGSKARREAGEDEEGFLSKLKKMFTS

SEQ ID NO: 8333 - RNA, 1443 nt, Artificial Sequence
  DNJA3__Homo_sapiens__AAC29066
auggcugcgcggugcuccacacgcugguugcuggugguuguggggaccccgcggcugccggcuauaucggguagaggggcccggccgcccagggagggcguggugggggcauggcugagccgcaagcugagcguccccgccuuugcgucuucccugaccucuugcggcccccgagcgcugcugacauugagaccuggugucagccuuacaggaacaaaacauaacccuuucauuuguacugccuccuuccacacgagugccccuuuggccaaagaagauuauuaucagauauuaggagugccucgaaaugccagccagaaagagaucaagaaagccuauuaucagcuugccaagaaguaucacccugacacaaauaaggaugaucccaaagccaaggagaaguucucccagcuggcagaagccuaugagguuuugagugaugaggugaagaggaagcaguacgaugccuacggcucugcaggcuucgauccuggggccagcggcucccagcauagcuacuggaagggaggccccacuguggaccccgaggagcuguucaggaagaucuuuggcgaguucucauccucuucauuuggagauuuccagaccguguuugaucagccucaggaauacuucauggaguugacauucaaucaagcugcaaagggggucaacaaggaguucaccgugaacaucauggacacgugugagcgcugcaacggcaaggggaacgagcccggcaccaaggugcagcauugccacuacuguggcggcuccggcauggaaaccaucaacacaggcccuuuugugaugcguuccacguguaggagaugugguggccgcggcuccaucaucauaucgcccuguguggucugcaggggagcaggacaagccaagcagaaaaagcgagugaugaucccugugccugcaggagucgaggauggccagaccgugaggaugccugugggaaaaagggaaauuuucauuacguucagggugcagaaaagcccuguguuccggagggacggcgcagacauccacuccgaccucuuuauuucuauagcucaggcucuucuugggggaacagccagagcccagggccuguacgagacgaucaacgugacgauccccccugggacucagacagaccagaagauucggaugggugggaaaggcaucccccggauuaacagcuacggcuacggagaccacuacauccacaucaagauacgaguuccaaagaggcuaacgagccggcagcagagccugauccugagcuacgccgaggacgagacagauguggaggggacggugaacggcgucacccucaccagcucugguggcagcaccauggauagcuccgcaggaagcaaggcuaggcgugaggcuggggaggacgaggagggauuccuuuccaaacuuaagaaaauguuuaccucauga

SEQ ID NO: 8334 - RNA, 1443 nt, Artificial Sequence
  derived and/or modified sequence opt1 from DNJA3__Homo_sapiens__AAC29066
auggccgcccgcugcagcacccgguggcugcucguggucgugggcacgccccgccugccggcgaucuccgggcggggcgcccgcccgccccgggaggggguggucggcgccuggcugagccgcaagcucuccgugcccgccuucgccagcucccugaccagcugcgggccccgggcgcugcucacccugcgccccggcgugucccugaccggcaccaagcacaaccccuucaucugcacggccagcuuccacaccuccgcgccccucgccaaggaggacuacuaccagauccugggggucccgcggaacgccagccagaaggagaucaagaaggccuacuaccagcuggccaagaaguaccaccccgacaccaacaaggacgaccccaaggccaaggagaaguucucccagcucgccgaggcguacgaggugcugagcgacgaggugaagcgcaagcaguacgacgccuacggcuccgccggguucgaccccggcgccagcgggucccagcacagcuacuggaagggcggcccgaccgucgaccccgaggagcuguuccggaagaucuucggggaguucuccagcuccagcuucggcgacuuccagacgguguucgaccagccccaggaguacuucauggagcucaccuucaaccaggccgcgaagggggugaacaaggaguucaccgucaacaucauggacacgugcgagcgcugcaacggcaagggcaacgagcccgggaccaaggugcagcacugccacuacugcggcgggagcggcauggagaccaucaacaccgggccguucgugaugcgguccacgugccgccggugcggcggccgcgggagcaucaucaucucccccugcgucgugugccggggcgccgggcaggccaagcagaagaagcgcgugaugauccccguccccgccggcguggaggacgggcagaccgugcggaugccggucggcaagcgcgagaucuucaucaccuuccgggugcagaagucccccguguuccgccgcgacggcgccgacauccacagcgaccuguucaucagcaucgcgcaggcccugcucgggggcaccgcccgggcccaggggcuguacgagaccaucaacgucacgaucccgcccggcacccagaccgaccagaagauccgcaugggcgggaagggcaucccccggaucaacuccuacggguacggcgaccacuacauccacaucaagauccgcgugcccaagcggcugaccagccgccagcagucccucauccugagcuacgccgaggacgagacggacgucgaggggaccgugaacggcgugacccugaccuccagcggcggguccacgauggacagcuccgcgggcagcaaggcccggcgcgaggccggggaggacgaggagggcuuccucuccaagcugaagaagauguucaccagcuga

SEQ ID NO: 8335 - RNA, 1443 nt, Artificial Sequence
  derived and/or modified sequence opt2 from DNJA3__Homo_sapiens__AAC29066
auggccgcccgcugcuccacccgcuggcuccucgucgucgucggcaccccccgccuccccgccaucuccggccgcggcgcccgccccccccgcgagggcgucgucggcgccuggcucucccgcaagcucuccguccccgccuucgccuccucccucaccuccugcggcccccgcgcccuccucacccuccgccccggcgucucccucaccggcaccaagcacaaccccuucaucugcaccgccuccuuccacaccuccgccccccucgccaaggaggacuacuaccagauccucggcgucccccgcaacgccucccagaaggagaucaagaaggccuacuaccagcucgccaagaaguaccaccccgacaccaacaaggacgaccccaaggccaaggagaaguucucccagcucgccgaggccuacgagguccucuccgacgaggucaagcgcaagcaguacgacgccuacggcuccgccggcuucgaccccggcgccuccggcucccagcacuccuacuggaagggcggccccaccgucgaccccgaggagcucuuccgcaagaucuucggcgaguucuccuccuccuccuucggcgacuuccagaccgucuucgaccagccccaggaguacuucauggagcucaccuucaaccaggccgccaagggcgucaacaaggaguucaccgucaacaucauggacaccugcgagcgcugcaacggcaagggcaacgagcccggcaccaagguccagcacugccacuacugcggcggcuccggcauggagaccaucaacaccggccccuucgucaugcgcuccaccugccgccgcugcggcggccgcggcuccaucaucaucucccccugcgucgucugccgcggcgccggccaggccaagcagaagaagcgcgucaugauccccguccccgccggcgucgaggacggccagaccguccgcaugcccgucggcaagcgcgagaucuucaucaccuuccgcguccagaagucccccgucuuccgccgcgacggcgccgacauccacuccgaccucuucaucuccaucgcccaggcccuccucggcggcaccgcccgcgcccagggccucuacgagaccaucaacgucaccaucccccccggcacccagaccgaccagaagauccgcaugggcggcaagggcaucccccgcaucaacuccuacggcuacggcgaccacuacauccacaucaagauccgcguccccaagcgccucaccucccgccagcagucccucauccucuccuacgccgaggacgagaccgacgucgagggcaccgucaacggcgucacccucaccuccuccggcggcuccaccauggacuccuccgccggcuccaaggcccgccgcgaggccggcgaggacgaggagggcuuccucuccaagcucaagaagauguucaccuccuga

SEQ ID NO: 8336 - RNA, 1443 nt, Artificial Sequence
  derived and/or modified sequence opt3 from DNJA3__Homo_sapiens__AAC29066
auggccgcuagaugcagcaccagguggcugcucguggucguuggcacaccccggcuuccugcaaucuccgggcgcggagcccgaccaccgcgugagggugugguaggcgcguggcugucuagaaaguugucagugcccgcuuucgccaguagcuuaacuuccugugggccuagggcacugcuaacgcuccggccaggagucucucugaccggcacaaaacacaaccccuuuauuugcacugccucguuccauaccucagcuccucuugcaaaggaagacuacuaucagauacugggugugccacgcaaugccagccaaaaagagaucaagaaggcuuacuaucaguuggccaagaaguaccaccccgauacaaacaaagacgauccuaaggcgaaagaaaaguuuagucagcucgcagaggccuaugaaguucuguccgacgaggugaaaagaaagcaguacgaugcuuaugggucugccggauucgacccaggcgcaagcggcucccaacauucauacuggaaagggggaccgaccgucgaucccgaggaacuguuuaggaaaauuuucggugaguuuaguucuagcuccuucggcgacuuucagacuguguucgaucagccucaggaauacuuuauggagcucacauucaaucaagcugccaaggggguaaacaaagaguuuaccguuaauaucauggacacgugugaacggugcaacggaaagggcaaugagccagguacuaaagugcagcacugucauuauugcgggggaucaggcauggaaaccauuaacacaggccccuucgucaugcgcagcacuugucgaagaugcgggggaagggguaguaucauaaucucuccuuguguggugugccggggcgcggggcaggccaagcagaaaaagcgugucaugauuccaguucccgcaggaguggaggauggccaaaccguacgcaugccgguggguaagagagaaaucuucauuacauuuaggguccagaaauccccuguguuccggcgagacggggcugauauccacagcgacuuauuuauaucgauugcccaggcucugcuuggcggaaccgcccgcgcacaaggcuuguacgagacgaucaauguuacuauucccccagggacacagaccgaccagaagaucagaaugggagguaaaggcaucccuaggauuaacucuuauggguacggagaucacuauauacauaucaagauucgggugcccaaacgccugacuuccagacagcaaucacuaauccucaguuacgccgaggacgaaacagaugucgagggcaccgugaaugguguaacgcugaccagcuccgggggcucuacaauggacagcucagcuggaaguaaggcgaggcgugaagcaggcgaggaugaagagggguuccuuuccaagcugaaaaagauguuuacuagcuga

SEQ ID NO: 8337 - RNA, 1443 nt, Artificial Sequence
  derived and/or modified sequence opt4 from DNJA3__Homo_sapiens__AAC29066
auggccgccagaugcagcaccagauggcugcuggugguggugggcacccccagacugcccgccaucagcggcagaggcgccagaccccccagagagggcguggugggcgccuggcugagcagaaagcugagcgugcccgccuucgccagcagccugaccagcugcggccccagagcccugcugacccugagacccggcgugagccugaccggcaccaagcacaaccccuucaucugcaccgccagcuuccacaccagcgccccccuggccaaggaggacuacuaccagauccugggcgugcccagaaacgccagccagaaggagaucaagaaggccuacuaccagcuggccaagaaguaccaccccgacaccaacaaggacgaccccaaggccaaggagaaguucagccagcuggccgaggccuacgaggugcugagcgacgaggugaagagaaagcaguacgacgccuacggcagcgccggcuucgaccccggcgccagcggcagccagcacagcuacuggaagggcggccccaccguggaccccgaggagcuguucagaaagaucuucggcgaguucagcagcagcagcuucggcgacuuccagaccguguucgaccagccccaggaguacuucauggagcugaccuucaaccaggccgccaagggcgugaacaaggaguucaccgugaacaucauggacaccugcgagagaugcaacggcaagggcaacgagcccggcaccaaggugcagcacugccacuacugcggcggcagcggcauggagaccaucaacaccggccccuucgugaugagaagcaccugcagaagaugcggcggcagaggcagcaucaucaucagccccugcguggugugcagaggcgccggccaggccaagcagaagaagagagugaugauccccgugcccgccggcguggaggacggccagaccgugagaaugcccgugggcaagagagagaucuucaucaccuucagagugcagaagagccccguguucagaagagacggcgccgacauccacagcgaccuguucaucagcaucgcccaggcccugcugggcggcaccgccagagcccagggccuguacgagaccaucaacgugaccaucccccccggcacccagaccgaccagaagaucagaaugggcggcaagggcauccccagaaucaacagcuacggcuacggcgaccacuacauccacaucaagaucagagugcccaagagacugaccagcagacagcagagccugauccugagcuacgccgaggacgagaccgacguggagggcaccgugaacggcgugacccugaccagcagcggcggcagcaccauggacagcagcgccggcagcaaggccagaagagaggccggcgaggacgaggagggcuuccugagcaagcugaagaagauguucaccagcuga

SEQ ID NO: 8338 - RNA, 1443 nt, Artificial Sequence
  derived and/or modified sequence opt5 from DNJA3__Homo_sapiens__AAC29066
auggccgcuagaugcagcacccgguggcugcucguggucguuggcacaccccgccugccugccaucuccgggagaggagcgcggccgccccgcgagggcguggugggggcuuggcuuucuagaaagcugagcgucccugccuucgccuccucucucacgagcuguggaccccgggcucugcuuacccugcgcccuggcgugucccucacagggaccaaacacaaccccuuuauuugcacagccucuuuccauaccagcgcuccucuggccaaggaagacuacuaucagauccugggaguuccgagaaaugcgucccaaaaagagauuaagaaagccuacuaucagcucgcuaagaaguaccaccccgauacaaacaaagacgauccuaaggccaaagaaaaguuuagccagcuggcugaggccuaugaagugcuuucugacgaggucaaacggaagcaguacgaugcguauggcuccgccggcuucgaccccggggcuagcggaucucaacauuccuacuggaagggcgggccuaccguggaucccgaggaacuguuucgcaaaaucuucggagaguuuucuagcuccagcuucggcgacuuucagacgguuuucgaucagccgcaggaauacuuuauggagcucaccuucaaucaagccgcuaagggggugaacaaagaguuuacagucaauauuauggacaccugugaaagaugcaacggaaagggcaaugagccuggcacaaaagugcagcacugucauuauugcgggggauccggcauggaaaccaucaacacggggcccuucgugaugcggucuacaugucgcagaugcggaggccgggggagcaucauuaucuccccuugugucguuugccgcggagccggccaggccaagcagaaaaagagagugaugauucccgugcccgcuggcgucgaggaugggcaaaccgugcggaugccuguuggaaagagagaaaucuucauuacauuucgcgugcagaaaagcccggucuuccggagagacggcgcggauauccacucugaccuguuuauuuccaucgcccaggcucugcuugggggaaccgcccgcgcccaaggccucuacgagaccaucaaugugacaauucccccugggacgcagaccgaccagaagauccggaugggcggaaaaggcauucccagaaucaacagcuauggguacggagaucacuauauucauaucaagauccgcguuccuaaacggcugacaucuagacagcaaagccugauucucuccuacgcugaggacgaaaccgauguggagggcacagucaauggggugacccugacgucuagcggaggcuccacaauggacagcucugccggguccaaggcgcgccgggaagcuggcgaggaugaagagggauuccuuagcaagcugaaaaagauguuuaccucuuga

SEQ ID NO: 8339 - protein, 397 aa, Artificial Sequence
  DNJA4__Homo_sapiens__Q8WW22
MVKETQYYDILGVKPSASPEEIKKAYRKLALKYHPDKNPDEGEKFKLISQAYEVLSDPKKRDVYDQGGEQAIKEGGSGSPSFSSPMDIFDMFFGGGGRMARERRGKNVVHQLSVTLEDLYNGVTKKLALQKNVICEKCEGVGGKKGSVEKCPLCKGRGMQIHIQQIGPGMVQQIQTVCIECKGQGERINPKDRCESCSGAKVIREKKIIEVHVEKGMKDGQKILFHGEGDQEPELEPGDVIIVLDQKDHSVFQRRGHDLIMKMKIQLSEALCGFKKTIKTLDNRILVITSKAGEVIKHGDLRCVRDEGMPIYKAPLEKGILIIQFLVIFPEKHWLSLEKLPQLEALLPPRQKVRITDDMDQVELKEFCPNEQNWRQHREAYEEDEDGPQAGVQCQTA

SEQ ID NO: 8340 - RNA, 1194 nt, Artificial Sequence
  DNJA4__Homo_sapiens__AAH21720
auggugaaggagacccaguacuaugacauccugggcgugaagcccagcgcguccccggaggagaucaagaaggccuaucggaagcuggcgcucaaguaccacccggacaagaacccggaugagggcgagaaguuuaaacucauaucccaggcauaugaagugcuuucagauccaaagaaaagggauguuuaugaccaaggcggagagcaggcaauuaaagaaggaggcucaggcagccccagcuucucuucacccauggacaucuuugacauguucuuugguggugguggacggauggcuagagagagaagaggcaagaauguuguacaccaguuaucuguaacucuugaagauuuauauaauggagucacgaagaaauuggcccuccagaaaaauguaauuugugagaaaugugaagguguuggugggaagaagggaucgguggagaagugcccgcugugcaaggggcgggggaugcagauccacauccagcagaucgggccgggcaugguacagcagauccagaccgugugcaucgagugcaagggccagggugagcgcaucaaccccaaggaccgcugcgagagcugcagcggggccaaggugauccgugagaagaagauuaucgagguacauguugaaaaagguaugaaagaugggcaaaagauacuauuucauggagaaggagaucaggagccugagcuggagccuggugaugucauaauugugcuugaucagaaggaucauagugucuuucagagacgaggccaugacuugaucaugaaaaugaaaauucagcuuucugaagcucuuuguggcuucaagaagacgauaaaaacauuggacaaucgaauucuuguuauuacauccaaagcaggugaggugauaaagcacggggaccugagaugcgugcgcgaugaaggaaugcccaucuacaaagcaccccuggaaaaagggauucugaucauacaguuuuuaguaaucuuuccugaaaaacacuggcuuucucuggaaaagcuuccucagcuggaagcuuuacucccuccucgacagaaagugaggauuacagaugacauggaucagguggagcugaaggaguuuugucccaaugagcagaacuggcgucagcacagggaggccuacgaggaggacgaagacgggccccaggcuggagugcagugccagacggcauga

SEQ ID NO: 8341 - RNA, 1194 nt, Artificial Sequence
  derived and/or modified sequence opt1 from DNJA4__Homo_sapiens__AAH21720
auggugaaggagacccaguacuacgacauccugggcgucaagcccagcgccuccccggaggagaucaagaaggccuaccgcaagcucgcgcugaaguaccaccccgacaagaaccccgacgagggggagaaguucaagcugaucagccaggccuacgaggugcucuccgaccccaagaagcgggacguguacgaccagggcggggagcaggccaucaaggagggcgggagcggcuccccgagcuucuccagccccauggacaucuucgacauguucuucggcgggggcgggcgcauggcccgggagcgccggggcaagaacgucgugcaccagcuguccgugacccuggaggaccucuacaacggggucacgaagaagcuggcccugcagaagaacgugaucugcgagaagugcgagggcgugggcgggaagaagggcagcgucgagaagugcccccucugcaaggggcgcggcaugcagauccacauccagcagaucggccccgggauggugcagcagauccagaccgugugcaucgagugcaagggccagggggagcggaucaacccgaaggaccgcugcgaguccugcagcggcgcgaaggucauccgggagaagaagaucaucgaggugcacguggagaaggggaugaaggacggccagaagauccuguuccacggcgagggggaccaggagcccgagcuggagcccggcgacgucaucaucgugcucgaccagaaggaccacuccguguuccagcgccgggggcacgaccugaucaugaagaugaagauccagcugagcgaggcccucugcggcuucaagaagaccaucaagacccuggacaaccgcauccuggucaucacguccaaggccggggaggugaucaagcacggcgaccuccggugcgugcgcgacgagggcaugcccaucuacaaggccccgcuggagaaggggauccugaucauccaguuccucgucaucuuccccgagaagcacuggcugagccuggagaagcucccccagcuggaggcgcugcugcccccgcggcagaaggugcgcaucaccgacgacauggaccagguggagcucaaggaguucugccccaacgagcagaacuggcggcagcaccgcgaggccuacgaggaggacgaggacggcccccaggccgggguccagugccagaccgccuga

SEQ ID NO: 8342 - RNA, 1194 nt, Artificial Sequence
  derived and/or modified sequence opt2 from DNJA4__Homo_sapiens__AAH21720
auggucaaggagacccaguacuacgacauccucggcgucaagcccuccgccucccccgaggagaucaagaaggccuaccgcaagcucgcccucaaguaccaccccgacaagaaccccgacgagggcgagaaguucaagcucaucucccaggccuacgagguccucuccgaccccaagaagcgcgacgucuacgaccagggcggcgagcaggccaucaaggagggcggcuccggcucccccuccuucuccucccccauggacaucuucgacauguucuucggcggcggcggccgcauggcccgcgagcgccgcggcaagaacgucguccaccagcucuccgucacccucgaggaccucuacaacggcgucaccaagaagcucgcccuccagaagaacgucaucugcgagaagugcgagggcgucggcggcaagaagggcuccgucgagaagugcccccucugcaagggccgcggcaugcagauccacauccagcagaucggccccggcaugguccagcagauccagaccgucugcaucgagugcaagggccagggcgagcgcaucaaccccaaggaccgcugcgaguccugcuccggcgccaaggucauccgcgagaagaagaucaucgagguccacgucgagaagggcaugaaggacggccagaagauccucuuccacggcgagggcgaccaggagcccgagcucgagcccggcgacgucaucaucguccucgaccagaaggaccacuccgucuuccagcgccgcggccacgaccucaucaugaagaugaagauccagcucuccgaggcccucugcggcuucaagaagaccaucaagacccucgacaaccgcauccucgucaucaccuccaaggccggcgaggucaucaagcacggcgaccuccgcugcguccgcgacgagggcaugcccaucuacaaggccccccucgagaagggcauccucaucauccaguuccucgucaucuuccccgagaagcacuggcucucccucgagaagcucccccagcucgaggcccuccuccccccccgccagaagguccgcaucaccgacgacauggaccaggucgagcucaaggaguucugccccaacgagcagaacuggcgccagcaccgcgaggccuacgaggaggacgaggacggcccccaggccggcguccagugccagaccgccuga

SEQ ID NO: 8343 - RNA, 1194 nt, Artificial Sequence
  derived and/or modified sequence opt3 from DNJA4__Homo_sapiens__AAH21720
auggugaaggagacccaguacuaugacauccugggcgucaaacccagcgccuccccugaagagauuaagaaggcuuacagaaaacucgcacuuaaauaucacccagauaagaacccggacgaaggggagaaguucaaacugauaucucaagccuacgaaguuuugucagaucccaagaaaagggacguguaugaucagggaggugagcaggcgaucaaggagggcgggaguggaagcccuuccuuuucuucgccaauggacauuuucgauauguuuuucggcggugggggacggauggcucgcgaacgacguggcaaaaauguagugcaucaguuaucagucacacuggaggaccuauacaacggcgugacuaagaagcucgcccugcagaaaaauguuaucugcgaaaagugugagggggugggagguaaaaagggcagcgucgagaaaugcccccuuuguaaggggagaggaaugcaaauucacauccagcagauaggcccugguauggugcaacagauccagacgguaugcauugaauguaaagggcagggagagaggaucaacccaaaggaucggugcgaaaguuguuccggcgcaaagguuauucgcgagaaaaagaucauagaagugcaugucgagaaaggcaugaaggacgggcagaaaauucuguuucacggagagggugaucaagaacccgaguuggaaccuggcgacgugaucauugugcucgaucagaaggaccauucugucuuccaaagaagggggcacgaccugaucaugaagaugaaaauccagcugagcgaggcccucugcggauuuaagaaaaccauuaagacauuagauaaucggauacugguuaucacuuccaaagcuggcgaagugauuaagcacggugaccuucgcuguguacgagaugaggggaugccaaucuauaaggcaccguuggagaaaggcauacugauuauccaguuccuagugaucuuucccgaaaagcauuggcucucacuggagaaacuuccucagcuggaagccuugcucccacccagacaaaaggucaggauuaccgacgauauggaccagguggagcugaaagaguucugcccuaacgaacagaauuggcggcagcaccgugaggcuuacgaagaggaugaagacggaccacaagccggcguucagugucagacagcguga

SEQ ID NO: 8344 - RNA, 1194 nt, Artificial Sequence
  derived and/or modified sequence opt4 from DNJA4__Homo_sapiens__AAH21720
auggugaaggagacccaguacuacgacauccugggcgugaagcccagcgccagccccgaggagaucaagaaggccuacagaaagcuggcccugaaguaccaccccgacaagaaccccgacgagggcgagaaguucaagcugaucagccaggccuacgaggugcugagcgaccccaagaagagagacguguacgaccagggcggcgagcaggccaucaaggagggcggcagcggcagccccagcuucagcagccccauggacaucuucgacauguucuucggcggcggcggcagaauggccagagagagaagaggcaagaacguggugcaccagcugagcgugacccuggaggaccuguacaacggcgugaccaagaagcuggcccugcagaagaacgugaucugcgagaagugcgagggcgugggcggcaagaagggcagcguggagaagugcccccugugcaagggcagaggcaugcagauccacauccagcagaucggccccggcauggugcagcagauccagaccgugugcaucgagugcaagggccagggcgagagaaucaaccccaaggacagaugcgagagcugcagcggcgccaaggugaucagagagaagaagaucaucgaggugcacguggagaagggcaugaaggacggccagaagauccuguuccacggcgagggcgaccaggagcccgagcuggagcccggcgacgugaucaucgugcuggaccagaaggaccacagcguguuccagagaagaggccacgaccugaucaugaagaugaagauccagcugagcgaggcccugugcggcuucaagaagaccaucaagacccuggacaacagaauccuggugaucaccagcaaggccggcgaggugaucaagcacggcgaccugagaugcgugagagacgagggcaugcccaucuacaaggccccccuggagaagggcauccugaucauccaguuccuggugaucuuccccgagaagcacuggcugagccuggagaagcugccccagcuggaggcccugcugccccccagacagaaggugagaaucaccgacgacauggaccagguggagcugaaggaguucugccccaacgagcagaacuggagacagcacagagaggccuacgaggaggacgaggacggcccccaggccggcgugcagugccagaccgccuga

SEQ ID NO: 8345 - RNA, 1194 nt, Artificial Sequence
  derived and/or modified sequence opt5 from DNJA4__Homo_sapiens__AAH21720
auggugaaggagacccaguacuaugacauccugggcgucaaacccagcgccuccccugaagagauuaagaaggcuuacagaaaacucgcccugaaauaucacccggauaagaaccccgacgaaggggagaaguucaaacuuaucucucaagcguacgaaguucugagcgauccuaagaaacgggacguguaugaucagggaggcgagcaggcuauuaaggaagggggauccggcucucccagcuuuuccucuccuauggacaucuucgauauguuuuucgggggaggcggccgcauggccagagaacggcgcgggaaaaaugugguccaucagcucagcgugacacuggaggaccuuuacaacggaguuacgaagaagcuggcccuccagaaaaaugugauuugcgaaaagugugagggcgucgggggcaaaaagggauccguggagaaaugcccccuguguaaggggagaggaaugcaaauccacauccagcagauuggcccuggcaugguucaacagauccagaccgugugcauugaauguaaagggcagggagagcggaucaacccgaaggaucgcugcgaaagcuguucuggcgcuaaggucauuagagagaaaaagaucauugaagugcauguggagaaagggaugaaggacggacagaaaauccuguuucacggcgagggggaucaagaacccgagcucgaaccuggagacgucaucauuguucuggaucagaaggaccauuccguguuccaacggcgcggccacgaccuuaucaugaagaugaaaauucagcugagcgaggcccucugcggcuuuaagaaaacaaucaagacccuggauaaucggauucuugugaucacaucuaaagcuggggaagucaucaagcacggagaccugagaugugugcgcgaugagggcaugcccauuuauaaggccccucucgagaaagggauccugauuauccaguuccugguuauuuuucccgaaaagcauuggcucucccuggagaaacuuccgcagcuggaagcgcuccugccucccagacaaaaggugcggaucaccgacgauauggaccaggucgagcuuaaagaguucugcccuaacgagcagaauuggcgccagcacagagaggccuacgaagaggaugaagacggaccccaagcuggcgugcagugucagacagccuga

SEQ ID NO: 8346 - protein, 340 aa, Artificial Sequence
  DNJB1__Homo_sapiens__P25685
MGKDYYQTLGLARGASDEEIKRAYRRQALRYHPDKNKEPGAEEKFKEIAEAYDVLSDPRKREIFDRYGEEGLKGSGPSGGSGGGANGTSFSYTFHGDPHAMFAEFFGGRNPFDTFFGQRNGEEGMDIDDPFSGFPMGMGGFTNVNFGRSRSAQEPARKKQDPPVTHDLRVSLEEIYSGCTKKMKISHKRLNPDGKSIRNEDKILTIEVKKGWKEGTKITFPKEGDQTSNNIPADIVFVLKDKPHNIFKRDGSDVIYPARISLREALCGCTVNVPTLDGRTIPVVFKDVIRPGMRRKVPGEGLPLPKTPEKRGDLIIEFEVIFPERIPQTSRTVLEQVLPI

SEQ ID NO: 8347 - RNA, 1023 nt, Artificial Sequence
  DNJB1__Homo_sapiens__AAH02352
auggguaaagacuacuaccagacguugggccuggcccgcggcgcgucggacgaggagaucaagcgggccuaccgccgccaggcgcugcgcuaccacccggacaagaacaaggagcccggcgccgaggagaaguucaaggagaucgcugaggccuacgacgugcucagcgacccgcgcaagcgcgagaucuucgaccgcuacggggaggaaggccuaaaggggaguggccccaguggcgguagcggcgguggugccaaugguaccucuuucagcuacacauuccauggagacccucaugccauguuugcugaguucuucgguggcagaaaucccuuugacaccuuuuuugggcagcggaacggggaggaaggcauggacauugaugacccauucucuggcuucccuaugggcauggguggcuucaccaacgugaacuuuggccgcucccgcucugcccaagagcccgcccgaaagaagcaagaucccccagucacccacgaccuucgagucucccuugaagagaucuacagcggcuguaccaagaagaugaaaaucucccacaagcggcuaaaccccgacggaaagagcauucgaaacgaagacaaaauauugaccaucgaagugaagaagggguggaaagaaggaaccaaaaucacuuuccccaaggaaggagaccagaccuccaacaacauuccagcugauaucgucuuuguuuuaaaggacaagccccacaauaucuuuaagagagauggcucugaugucauuuauccugccaggaucagccuccgggaggcucuguguggcugcacagugaacguccccacucuggacggcaggacgauacccgucguauucaaagauguuaucaggccuggcaugcggcgaaaaguuccuggagaaggccucccccuccccaaaacacccgagaaacguggggaccucauuauugaguuugaagugaucuuccccgaaaggauuccccagacaucaagaaccguacuugagcagguucuuccaauauag

SEQ ID NO: 8348 - RNA, 1023 nt, Artificial Sequence
  derived and/or modified sequence opt1 from DNJB1__Homo_sapiens__AAH02352
augggcaaggacuacuaccagacccuggggcucgcccgcggcgccagcgacgaggagaucaagcgggcguaccgccggcaggcccugcgcuaccaccccgacaagaacaaggagccgggggccgaggagaaguucaaggagaucgccgaggccuacgacgugcuguccgacccccggaagcgcgagaucuucgaccgguacggcgaggaggggcucaagggcagcggccccuccgggggcagcgggggcggggcgaacggcaccuccuucagcuacacguuccacggcgacccccacgccauguucgccgaguucuucgggggccgcaacccguucgacaccuucuucgggcagcggaacggcgaggagggcauggacaucgacgaccccuucuccggguuccccaugggcaugggcggguucaccaacgucaacuucgggcgcagccgguccgcccaggagcccgcgcgcaagaagcaggacccgcccgugacccacgaccugcgggugagccuggaggagaucuacuccggcugcacgaagaagaugaagaucagccacaagcgccucaaccccgacggcaaguccauccggaacgaggacaagauccugaccaucgaggucaagaagggguggaaggagggcaccaagaucaccuuccccaaggagggggaccagacgagcaacaacaucccggccgacaucguguucgugcugaaggacaagccccacaacaucuucaagcgcgacggcuccgacgucaucuaccccgcccggaucagccuccgcgaggcccugugcgggugcaccgugaacgugcccacccuggacggccggaccaucccggucguguucaaggacgugauccgccccggcaugcggcgcaagguccccggggagggccucccccugccgaagacgcccgagaagcgcggggaccugaucaucgaguucgaggugaucuuccccgagcggaucccccagaccucccgcaccgugcucgagcagguccugccgaucuga

SEQ ID NO: 8349 - RNA, 1023 nt, Artificial Sequence
  derived and/or modified sequence opt2 from DNJB1__Homo_sapiens__AAH02352
augggcaaggacuacuaccagacccucggccucgcccgcggcgccuccgacgaggagaucaagcgcgccuaccgccgccaggcccuccgcuaccaccccgacaagaacaaggagcccggcgccgaggagaaguucaaggagaucgccgaggccuacgacguccucuccgacccccgcaagcgcgagaucuucgaccgcuacggcgaggagggccucaagggcuccggccccuccggcggcuccggcggcggcgccaacggcaccuccuucuccuacaccuuccacggcgacccccacgccauguucgccgaguucuucggcggccgcaaccccuucgacaccuucuucggccagcgcaacggcgaggagggcauggacaucgacgaccccuucuccggcuuccccaugggcaugggcggcuucaccaacgucaacuucggccgcucccgcuccgcccaggagcccgcccgcaagaagcaggacccccccgucacccacgaccuccgcgucucccucgaggagaucuacuccggcugcaccaagaagaugaagaucucccacaagcgccucaaccccgacggcaaguccauccgcaacgaggacaagauccucaccaucgaggucaagaagggcuggaaggagggcaccaagaucaccuuccccaaggagggcgaccagaccuccaacaacauccccgccgacaucgucuucguccucaaggacaagccccacaacaucuucaagcgcgacggcuccgacgucaucuaccccgcccgcaucucccuccgcgaggcccucugcggcugcaccgucaacguccccacccucgacggccgcaccauccccgucgucuucaaggacgucauccgccccggcaugcgccgcaagguccccggcgagggccucccccuccccaagacccccgagaagcgcggcgaccucaucaucgaguucgaggucaucuuccccgagcgcaucccccagaccucccgcaccguccucgagcagguccuccccaucuga

SEQ ID NO: 8350 - RNA, 1023 nt, Artificial Sequence
  derived and/or modified sequence opt3 from DNJB1__Homo_sapiens__AAH02352
augggcaaggacuacuaucagacccuggggcucgccagaggagcuagcgaugaggagaucaaaagggcauaccggcgccaagcccuucgauaucaccccgacaagaacaaagagccuggugcggaagagaaguucaaagaaauugcugaggccuacgaugugcuguccgacccacguaagagagagauauuugauagguauggcgaagagggguugaagggaucuggcccgucaggugggaguggaggcggcgcaaaugggacuagcuucuccuacacauuucauggagacccccacgccauguucgcugaauuuuucgguggccggaacccuuuugauacguucuuugggcagcgcaauggagaggagggcauggacaucgaugacccauucucugguuuucccauggggaugggaggcuucaccaacgucaauuuuggcagaucgaggucagcacaggaaccugcccggaaaaagcaggauccacccguuacacaugacuuacgcgugagccuggaggaaauuuauagugggugcacuaaaaagaugaaaaucucccacaagcgacuaaacccugauggaaagucuauuagaaaugaggacaaaauccucaccauagaaguaaagaaagguuggaaggagggcacaaaaaucaccuucccaaaggagggggaccaaacuagcaacaauauuccggcugauaucguguucguccugaaagacaagccccauaacauuuuuaagagggauggauccgacgugaucuacccugcccggauaucacuucgugaagcgcuguguggcugcacaguuaaugugccaaccuuggauggucgcacgauucccgucguguucaaagacguaaucagaccugggaugaggcggaagguuccaggcgagggacucccccugccgaaaacuccugaaaagcgaggcgaucugauuaucgaguuugaagugaucuuccccgagcgcauuccacagaccaguagaacaguccucgaacagguguuaccuauauga

SEQ ID NO: 8351 - RNA, 1023 nt, Artificial Sequence
  derived and/or modified sequence opt4 from DNJB1__Homo_sapiens__AAH02352
augggcaaggacuacuaccagacccugggccuggccagaggcgccagcgacgaggagaucaagagagccuacagaagacaggcccugagauaccaccccgacaagaacaaggagcccggcgccgaggagaaguucaaggagaucgccgaggccuacgacgugcugagcgaccccagaaagagagagaucuucgacagauacggcgaggagggccugaagggcagcggccccagcggcggcagcggcggcggcgccaacggcaccagcuucagcuacaccuuccacggcgacccccacgccauguucgccgaguucuucggcggcagaaaccccuucgacaccuucuucggccagagaaacggcgaggagggcauggacaucgacgaccccuucagcggcuuccccaugggcaugggcggcuucaccaacgugaacuucggcagaagcagaagcgcccaggagcccgccagaaagaagcaggacccccccgugacccacgaccugagagugagccuggaggagaucuacagcggcugcaccaagaagaugaagaucagccacaagagacugaaccccgacggcaagagcaucagaaacgaggacaagauccugaccaucgaggugaagaagggcuggaaggagggcaccaagaucaccuuccccaaggagggcgaccagaccagcaacaacauccccgccgacaucguguucgugcugaaggacaagccccacaacaucuucaagagagacggcagcgacgugaucuaccccgccagaaucagccugagagaggcccugugcggcugcaccgugaacgugcccacccuggacggcagaaccauccccgugguguucaaggacgugaucagacccggcaugagaagaaaggugcccggcgagggccugccccugcccaagacccccgagaagagaggcgaccugaucaucgaguucgaggugaucuuccccgagagaaucccccagaccagcagaaccgugcuggagcaggugcugcccaucuga

SEQ ID NO: 8352 - RNA, 1023 nt, Artificial Sequence
  derived and/or modified sequence opt5 from DNJB1__Homo_sapiens__AAH02352
augggcaaggacuacuaucagacccuggggcucgccagaggagcuagcgaugaggaaaucaaacgggccuaccgcagacaagcgcugcgguaucaccccgacaagaacaaagagccuggcgcugaagagaaguucaaagaaauugccgaggccuacgaugugcuuuccgacccgcgcaagagagagaucuuugaucgguauggggaagagggacugaagggcucugggcccagcggaggcuccggcgggggagcuaauggcacaucuuucagcuacacguuucauggggacccucacgccauguucgcugaauuuuucggaggccgcaaccccuuugauaccuucuuugggcagagaaauggagaggagggcauggacauugaugacccuuucuccggcuuucccauggggaugggaggcuucacaaacgucaauuuugggcggucucgcagcgcccaggaaccugcgcggaaaaagcaggauccgcccguuacccaugaccucagagugucccuggaggaaaucuauagcggaugcaccaaaaagaugaaaauuucucacaagcgccuuaacccugauggcaaguccaucagaaaugaggacaaaauccugacaauugaagugaagaaaggguggaaggagggaacaaaaaucaccuuccccaaggagggcgaccaaacgagcaacaauauuccugccgauaucgucuucgugcucaaagacaagccccauaacauuuuuaagcgggauggcucugacguuaucuacccggcucgcauuucccugagagaagcccugugugggugcaccgugaaugucccuacacucgauggacggaccauccccgugguuuucaaagacgugaucagaccuggcaugcgccggaagguccccggggagggacugccccuuccuaaaacaccggaaaagagaggcgaucugauuaucgaguuugaagugauuuuccccgagcgcaucccucagaccagccggacggugcucgagcagguccugcccauuuga

SEQ ID NO: 8353 - protein, 324 aa, Artificial Sequence
  DNJB2__Homo_sapiens__P25686
MASYYEILDVPRSASADDIKKAYRRKALQWHPDKNPDNKEFAEKKFKEVAEAYEVLSDKHKREIYDRYGREGLTGTGTGPSRAEAGSGGPGFTFTFRSPEEVFREFFGSGDPFAELFDDLGPFSELQNRGSRHSGPFFTFSSSFPGHSDFSSSSFSFSPGAGAFRSVSTSTTFVQGRRITTRRIMENGQERVEVEEDGQLKSVTINGVPDDLALGLELSRREQQPSVTSRSGGTQVQQTPASCPLDSDLSEDEDLQLAMAYSLSEMEAAGKKPAGGREAQHRRQGRPKAQHQDPGLGGTQEGARGEATKRSPSPEEKASRCLIL

SEQ ID NO: 8354 - RNA, 975 nt, Artificial Sequence
  DNJB2__Homo_sapiens__AAH11609
auggcauccuacuacgagauccuagacgugccgcgaagugcguccgcugaugacaucaagaaggcguaucggcgcaaggcucuccaguggcacccagacaaaaacccagauaauaaagaguuugcugagaagaaauuuaaggagguggccgaggcauaugaagugcugucugacaagcacaagcgggagauuuacgaccgcuauggccgggaagggcugacagggacaggaacuggcccaucucgggcagaagcuggcaguggugggccuggcuucaccuucaccuuccgcagccccgaggaggucuuccgggaauucuuugggaguggagacccuuuugcagagcucuuugaugaccugggccccuucucagagcuucagaaccgggguucccgacacucaggccccuucuuuaccuucucuuccuccuucccugggcacuccgauuucuccuccucaucuuucuccuucaguccuggggcuggugcuuuucgcucuguuucuacaucuaccaccuuuguccaaggacgccgcaucaccacacgcagaaucauggagaacgggcaggagcggguggaaguggaggaggaugggcagcugaagucagucacaaucaauggugucccagaugaccuggcacugggcuuggagcugagccgucgcgagcagcagccgucagucacuuccaggucugggggcacucagguccagcagaccccugccucaugccccuuggacagcgaccucucugaggaugaggaccugcagcuggccauggccuacagccugucagagauggaggcagcugggaagaaacccgcaggugggcgggaggcacagcaccgacggcaggggcggcccaaggcccagcaccaagauccaggcuugggggggacccaggagggugcgaggggugaagcaaccaaacgcaguccauccccagaggagaaggccucucgcugccucauccucuga

SEQ ID NO: 8355 - RNA, 975 nt, Artificial Sequence
  derived and/or modified sequence opt1 from DNJB2__Homo_sapiens__AAH11609
auggccagcuacuacgagauccuggacgugccccgcuccgccagcgcggacgacaucaagaaggccuaccggcgcaaggcccuccaguggcacccggacaagaaccccgacaacaaggaguucgccgagaagaaguucaaggaggucgccgaggcguacgaggugcuguccgacaagcacaagcgggagaucuacgaccgcuacggccgggaggggcugaccggcaccgggacgggccccagccgcgccgaggccggguccggcggccccggguucaccuucaccuuccggagcccggaggagguguuccgcgaguucuucggcuccggggaccccuucgccgagcuguucgacgaccugggccccuucagcgagcugcagaaccgggggucccgccacagcggccccuucuucaccuucuccagcuccuucccgggccacagcgacuucuccagcuccagcuucuccuucagccccggggcgggcgccuuccggagcgucuccacgagcaccaccuucgugcaggggcgccggaucaccacgcgccggaucauggagaacggccaggagcgcguggaggucgaggaggacggccagcucaaguccgugaccaucaacggggugcccgacgaccuggcccugggccucgagcugagccggcgcgagcagcagcccuccgucaccagccgguccgggggcacccaggugcagcagacgccggccagcugcccccuggacuccgaccucagcgaggacgaggaccugcagcuggccauggcguacucccucagcgagauggaggccgccgggaagaagcccgccggcggccgcgaggcccagcaccggcgccaggggcgccccaaggcgcagcaccaggacccgggccucgggggcacccaggagggggcccggggcgaggccaccaagcgcucccccagccccgaggagaaggccucccggugccugauccucuga

SEQ ID NO: 8356 - RNA, 975 nt, Artificial Sequence
  derived and/or modified sequence opt2 from DNJB2__Homo_sapiens__AAH11609
auggccuccuacuacgagauccucgacgucccccgcuccgccuccgccgacgacaucaagaaggccuaccgccgcaaggcccuccaguggcaccccgacaagaaccccgacaacaaggaguucgccgagaagaaguucaaggaggucgccgaggccuacgagguccucuccgacaagcacaagcgcgagaucuacgaccgcuacggccgcgagggccucaccggcaccggcaccggccccucccgcgccgaggccggcuccggcggccccggcuucaccuucaccuuccgcucccccgaggaggucuuccgcgaguucuucggcuccggcgaccccuucgccgagcucuucgacgaccucggccccuucuccgagcuccagaaccgcggcucccgccacuccggccccuucuucaccuucuccuccuccuuccccggccacuccgacuucuccuccuccuccuucuccuucucccccggcgccggcgccuuccgcuccgucuccaccuccaccaccuucguccagggccgccgcaucaccacccgccgcaucauggagaacggccaggagcgcgucgaggucgaggaggacggccagcucaaguccgucaccaucaacggcguccccgacgaccucgcccucggccucgagcucucccgccgcgagcagcagcccuccgucaccucccgcuccggcggcacccagguccagcagacccccgccuccugcccccucgacuccgaccucuccgaggacgaggaccuccagcucgccauggccuacucccucuccgagauggaggccgccggcaagaagcccgccggcggccgcgaggcccagcaccgccgccagggccgccccaaggcccagcaccaggaccccggccucggcggcacccaggagggcgcccgcggcgaggccaccaagcgcucccccucccccgaggagaaggccucccgcugccucauccucuga

SEQ ID NO: 8357 - RNA, 975 nt, Artificial Sequence
  derived and/or modified sequence opt3 from DNJB2__Homo_sapiens__AAH11609
auggccagcuacuaugagauccuggacgugcccagauccgcuucugcagaugacauuaagaaagccuacaggcggaaggcgcuccaguggcacccugauaaaaacccagacaauaaggaauuugcugagaaaaaguuuaaggaagucgccgaggcauaugaaguucuuucagauaaacauaagcgcgagauauacgaccgauauggccgugaggggcugaccggaacagguacuggcccgaguagagccgaagcugggagcggaggccccgguuucacguuuaccuucagguccccugaggaaguguuucgggaguucuuugggucuggagauccauucgcagaguuguuugacgauuuaggccccuucucggaacugcaaaaccgcggcucaagacacagcgggccuuucuucacauuuaguuccucuuucccaggacauagcgacuucuccucaaguagcuuuucuuucucccccggugccggcgcuuuuaggucaguaagcacgaguaccacauucgugcaggggcggcgcaucaccacucgaagaauuauggagaauggacaggaaagggucgagguggaagaggauggccagcuaaaaucuguuacaaucaacggugugccugacgaucucgcccuggggcuugagcugucccggcgugaacaacagccaagcgucaccucgcgcucuggaggcacucaggugcagcaaacuccggcguccugccccuuggacucagaccucagugaggaugaagaccugcagcuggcaauggccuacagccucuccgagauggaagcugccggcaagaaaccugcagggggaagagaggcucagcacaggcggcagggucgaccaaaggcccaacaucaggaucccggcuuagggggaacccaggagggcgcgcgcggugaagccacaaagagaucuccuagcccagaggaaaaagcaucaaggugucugauucuuuga

SEQ ID NO: 8358 - RNA, 975 nt, Artificial Sequence
  derived and/or modified sequence opt4 from DNJB2__Homo_sapiens__AAH11609
auggccagcuacuacgagauccuggacgugcccagaagcgccagcgccgacgacaucaagaaggccuacagaagaaaggcccugcaguggcaccccgacaagaaccccgacaacaaggaguucgccgagaagaaguucaaggagguggccgaggccuacgaggugcugagcgacaagcacaagagagagaucuacgacagauacggcagagagggccugaccggcaccggcaccggccccagcagagccgaggccggcagcggcggccccggcuucaccuucaccuucagaagccccgaggagguguucagagaguucuucggcagcggcgaccccuucgccgagcuguucgacgaccugggccccuucagcgagcugcagaacagaggcagcagacacagcggccccuucuucaccuucagcagcagcuuccccggccacagcgacuucagcagcagcagcuucagcuucagccccggcgccggcgccuucagaagcgugagcaccagcaccaccuucgugcagggcagaagaaucaccaccagaagaaucauggagaacggccaggagagaguggagguggaggaggacggccagcugaagagcgugaccaucaacggcgugcccgacgaccuggcccugggccuggagcugagcagaagagagcagcagcccagcgugaccagcagaagcggcggcacccaggugcagcagacccccgccagcugcccccuggacagcgaccugagcgaggacgaggaccugcagcuggccauggccuacagccugagcgagauggaggccgccggcaagaagcccgccggcggcagagaggcccagcacagaagacagggcagacccaaggcccagcaccaggaccccggccugggcggcacccaggagggcgccagaggcgaggccaccaagagaagccccagccccgaggagaaggccagcagaugccugauccuguga

SEQ ID NO: 8359 - RNA, 975 nt, Artificial Sequence
  derived and/or modified sequence opt5 from DNJB2__Homo_sapiens__AAH11609
auggccagcuacuaugagauccuggacgugcccagauccgcuucugccgaugacauuaagaaagcguaccggcgcaaggcucuccaguggcacccugauaaaaacccggacaauaaggaauuugccgagaaaaaguuuaaggaagucgccgaggcuuaugaaguucugagcgauaaacauaagagagagaucuacgaccgguauggccgcgaggggcuuaccggaacaggcacggggcccuccagagccgaagcuggaucuggcgggccuggauucaccuuuacauuccggagccccgaggaaguguuucgcgaguucuuuggcuccggcgauccuuucgccgagcuguuugacgaucucgggcccuucucugaacugcaaaacagaggaagccggcacuccggcccuuucuucaccuuuucuucuuccuucccggggcauagcgacuucucuuccagcucuuuuuccuucagccccggagcgggcgccuuucgcuccgugucuacaagcaccacauucguccaggggagacggauuaccacgcgcagaaucauggagaauggacaggaacggguggagguugaagaggauggccagcuuaaauccgugaccauuaacggcgucccugacgaucuggcucucgggcuggagcugagccgcagagaacaacagcccucugugacaucccggagcggaggcacccagguucagcaaaccccugccucuugcccccucgacagcgaccuguccgaggaugaagaccuucagcuggcuauggccuacucucucagcgagauggaagcggccgggaagaaaccggcuggaggcagagaggcccagcaccgccggcaggggagaccuaaggcucaacaucaggaucccggacugggcggcacacaggagggggcccgcggagaagccacgaagcgguccccuagccccgaggaaaaagcuagcagaugucuuauccuguga

SEQ ID NO: 8360 - protein, 145 aa, Artificial Sequence
  DNJB3__Homo_sapiens__Q8WWF6
MVDYYEVLDVPRQASSEAIKKAYRKLALKWHPDKNPENKEEAERRFKQVAEAYEVLSDAKKRDIYDRYGEAGAEGGCTGGRPFEDPFEYVFSFRDPADVFREFFGGQDPFSFDLLGNPLENILGGSEELLGKQKQSVCTPFLCLQ

SEQ ID NO: 8361 - RNA, 438 nt, Artificial Sequence
  DNJB3__Homo_sapiens__AAH17590
augguggacuacuacgaggugcuggacgugccccggcaggccucauccgaggccaucaagaaggcguaccgcaagcuggcgcucaaguggcaccccgacaaaaacccugagaacaaggaggaagcggagaggagauucaagcagguggccgaggccuacgagguguugucggacgccaagaaacgcgauaucuaugaccgcuauggcgaggcgggcgcggagggcggcugcacaggcggcaggcccuucgaggaccccuucgaguacgucuucagcuuccgcgacccagccgacgucuucagggaguucuucggcggccaggacccauucuccuuugaccucuugggaaacccgcuggagaauauuuugggggggucagaggaacugcuggggaagcagaagcagagcgucugcaccccuuuucucugccuucaguga

SEQ ID NO: 8362 - RNA, 438 nt, Artificial Sequence
  derived and/or modified sequence opt1 from DNJB3__Homo_sapiens__AAH17590
augguggacuacuacgagguccuggacgugccccgccaggccagcuccgaggccaucaagaaggcguaccggaagcucgcccugaaguggcacccggacaagaaccccgagaacaaggaggaggccgagcgccgguucaagcaggucgccgaggccuacgaggugcugagcgacgcgaagaagcgcgacaucuacgaccgguacggcgaggccggggccgagggcgggugcaccggcgggcgccccuucgaggaccccuucgaguacguguucuccuuccgggacccggccgacguguuccgcgaguucuucggcggccaggaccccuucagcuucgaccuccuggggaacccccuggagaacauccucggcggguccgaggagcugcugggcaagcagaagcagagcgucugcacccccuuccucugccugcaguga

SEQ ID NO: 8363 - RNA, 438 nt, Artificial Sequence
  derived and/or modified sequence opt2 from DNJB3__Homo_sapiens__AAH17590
auggucgacuacuacgagguccucgacgucccccgccaggccuccuccgaggccaucaagaaggccuaccgcaagcucgcccucaaguggcaccccgacaagaaccccgagaacaaggaggaggccgagcgccgcuucaagcaggucgccgaggccuacgagguccucuccgacgccaagaagcgcgacaucuacgaccgcuacggcgaggccggcgccgagggcggcugcaccggcggccgccccuucgaggaccccuucgaguacgucuucuccuuccgcgaccccgccgacgucuuccgcgaguucuucggcggccaggaccccuucuccuucgaccuccucggcaacccccucgagaacauccucggcggcuccgaggagcuccucggcaagcagaagcaguccgucugcacccccuuccucugccuccaguga

SEQ ID NO: 8364 - RNA, 438 nt, Artificial Sequence
  derived and/or modified sequence opt3 from DNJB3__Homo_sapiens__AAH17590
augguggacuacuaugagguccuggauguucccagacaggccagcuccgaagcuaucaagaaagcauacaggaagcucgcccuuaaauggcacccugacaagaacccagagaauaaagaagaggcggaacggcgcuucaagcaaguggcugaggccuaugagguacugucugaugcaaagaaacgagacauuuacgaucguuauggcgaagccggggcugagggagguugcaccggcgggagaccguuugaagaccccuucgaguacguguuuucauucagggauccugcagacgucuuucgggaguucuuuggaggccaggauccauucaguuuugacuuguuagguaacccccuggaaaauauacuagggggaagcgaggaacuccugggcaagcagaaacaguccguguguacaccuuuccuuugccugcaauga

SEQ ID NO: 8365 - RNA, 438 nt, Artificial Sequence
  derived and/or modified sequence opt4 from DNJB3__Homo_sapiens__AAH17590
augguggacuacuacgaggugcuggacgugcccagacaggccagcagcgaggccaucaagaaggccuacagaaagcuggcccugaaguggcaccccgacaagaaccccgagaacaaggaggaggccgagagaagauucaagcagguggccgaggccuacgaggugcugagcgacgccaagaagagagacaucuacgacagauacggcgaggccggcgccgagggcggcugcaccggcggcagacccuucgaggaccccuucgaguacguguucagcuucagagaccccgccgacguguucagagaguucuucggcggccaggaccccuucagcuucgaccugcugggcaacccccuggagaacauccugggcggcagcgaggagcugcugggcaagcagaagcagagcgugugcacccccuuccugugccugcaguga

SEQ ID NO: 8366 - RNA, 438 nt, Artificial Sequence
  derived and/or modified sequence opt5 from DNJB3__Homo_sapiens__AAH17590
augguggacuacuaugagguccuggauguucccagacaggccagcuccgaagcuaucaagaaagccuaccggaagcucgcgcugaaauggcacccugacaagaacccggagaauaaagaagaggcugaacgcagauucaagcaaguggccgaggccuaugaggugcuuucugaugcuaagaaacgggacauuuacgaucgcuauggcgaagccggggcugagggaggcugcaccgggggaagacccuuugaagacccuuucgaguacgucuuuagcuuccgggaucccgccgacguguuucgcgaguucuuuggcgggcaggauccuuucuccuuugaccugcucggaaacccccuggaaaauauccuuggcggcucugaggaacugcucgggaagcagaaacagagcguuuguacaccuuuccugugccugcaauga

SEQ ID NO: 8367 - protein, 337 aa, Artificial Sequence
  DNJB4__Homo_sapiens__Q9UDY4
MGKDYYCILGIEKGASDEDIKKAYRKQALKFHPDKNKSPQAEEKFKEVAEAYEVLSDPKKREIYDQFGEEGLKGGAGGTDGQGGTFRYTFHGDPHATFAAFFGGSNPFEIFFGRRMGGGRDSEEMEIDGDPFSAFGFSMNGYPRDRNSVGPSRLKQDPPVIHELRVSLEEIYSGCTKRMKISRKRLNADGRSYRSEDKILTIEIKKGWKEGTKITFPREGDETPNSIPADIVFIIKDKDHPKFKRDGSNIIYTAKISLREALCGCSINVPTLDGRNIPMSVNDIVKPGMRRRIIGYGLPFPKNPDQRGDLLIEFEVSFPDTISSSSKEVLRKHLPAS

SEQ ID NO: 8368 - RNA, 1014 nt, Artificial Sequence
  DNJB4__Homo_sapiens__AAC14483
auggggaaagacuauuauugcauuuugggaauugagaaaggagcuucagaugaagauauuaaaaaggcuuaccgaaaacaagcccucaaauuucauccggacaagaacaaaucuccucaggcagaggaaaaauuuaaagaggucgcagaagcuuaugaaguauugagugauccuaaaaagagagaaauauaugaucaguuuggggaggaaggguugaaaggaggagcaggagguacugauggacaaggagguaccuuccgguacaccuuucauggcgauccucaugcuacauuugcugcauuuuucggaggguccaaccccuuugaaauuuucuuuggaagacgaauggguggugguagagauucugaagaaauggaaauagauggugauccuuuuagugccuuugguuucagcaugaauggauauccaagagacaggaauucuguggggccaucccgccucaaacaagauccuccaguuauucaugaacuuagaguaucacuugaagagauauauagugguuguaccaaacggaugaagauuucucgaaaaaggcuaaacgcugauggaaggaguuacagaucugaggacaaaauucuuaccauugagauuaaaaaaggguggaaagaaggcaccaaaauuacuuuuccaagagaaggagaugaaacaccaaauaguauuccagcagacauuguuuuuaucauuaaagacaaagaucauccaaaauuuaaaagggauggaucaaauauaauuuauacugcuaaaauuaguuuacgagaggcauuguguggcugcucaauuaauguaccaacacuggauggaagaaacauaccuaugucaguaaaugauauugugaaacccggaaugaggagaagaauuauuggauaugggcugccauuuccaaaaaauccugaccaacguggugaccuucuaauagaauuugagguguccuucccagauacuauaucuucuucauccaaagaaguacuuaggaaacaucuuccugccucauag

SEQ ID NO: 8369 - RNA, 1014 nt, Artificial Sequence
  derived and/or modified sequence opt1 from DNJB4__Homo_sapiens__AAC14483
augggcaaggacuacuacugcauccuggggaucgagaagggcgccagcgacgaggacaucaagaaggccuaccgcaagcaggcgcucaaguuccaccccgacaagaacaaguccccgcaggccgaggagaaguucaaggagguggccgaggccuacgagguccugagcgaccccaagaagcgggagaucuacgaccaguucggggaggagggccugaagggcggggccggcgggaccgacggccagggcgggaccuuccgcuacacguuccacggggacccccacgcgaccuucgccgccuucuucggcggcuccaaccccuucgagaucuucuucgggcggcgcaugggcgggggccgggacagcgaggagauggagaucgacggcgacccguucuccgccuucggguucagcaugaacggcuacccccgcgaccggaacuccguggggcccagccgccucaagcaggacccgcccgugauccacgagcugcgggucucccuggaggagaucuacagcggcugcaccaagcgcaugaagaucucccggaagcgccucaacgcggacgggcggagcuaccgcuccgaggacaagauccugaccaucgagaucaagaagggcuggaaggagggcacgaagaucaccuucccccgggagggggacgagacccccaacagcauccccgccgacaucguguucaucaucaaggacaaggaccacccgaaguucaagcgcgacggcuccaacaucaucuacaccgccaagaucagccugcgggaggcccucugcgggugcuccaucaacgugcccacgcuggacggccgcaacauccccaugagcgucaacgacaucgugaagcccgggaugcggcgccggaucaucggcuacggccugccguuccccaagaaccccgaccagcgcggggaccuccugaucgaguucgagguguccuuccccgacaccaucagcagcuccagcaaggagguccugcgcaagcaccucccggccuccuga

SEQ ID NO: 8370 - RNA, 1014 nt, Artificial Sequence
  derived and/or modified sequence opt2 from DNJB4__Homo_sapiens__AAC14483
augggcaaggacuacuacugcauccucggcaucgagaagggcgccuccgacgaggacaucaagaaggccuaccgcaagcaggcccucaaguuccaccccgacaagaacaaguccccccaggccgaggagaaguucaaggaggucgccgaggccuacgagguccucuccgaccccaagaagcgcgagaucuacgaccaguucggcgaggagggccucaagggcggcgccggcggcaccgacggccagggcggcaccuuccgcuacaccuuccacggcgacccccacgccaccuucgccgccuucuucggcggcuccaaccccuucgagaucuucuucggccgccgcaugggcggcggccgcgacuccgaggagauggagaucgacggcgaccccuucuccgccuucggcuucuccaugaacggcuacccccgcgaccgcaacuccgucggccccucccgccucaagcaggacccccccgucauccacgagcuccgcgucucccucgaggagaucuacuccggcugcaccaagcgcaugaagaucucccgcaagcgccucaacgccgacggccgcuccuaccgcuccgaggacaagauccucaccaucgagaucaagaagggcuggaaggagggcaccaagaucaccuucccccgcgagggcgacgagacccccaacuccauccccgccgacaucgucuucaucaucaaggacaaggaccaccccaaguucaagcgcgacggcuccaacaucaucuacaccgccaagaucucccuccgcgaggcccucugcggcugcuccaucaacguccccacccucgacggccgcaacauccccauguccgucaacgacaucgucaagcccggcaugcgccgccgcaucaucggcuacggccuccccuuccccaagaaccccgaccagcgcggcgaccuccucaucgaguucgaggucuccuuccccgacaccaucuccuccuccuccaaggagguccuccgcaagcaccuccccgccuccuga

SEQ ID NO: 8371 - RNA, 1014 nt, Artificial Sequence
  derived and/or modified sequence opt3 from DNJB4__Homo_sapiens__AAC14483
augggcaaggacuacuauugcauccuggggauugagaaaggagccagcgaugaagacauaaagaaggcuuacagaaaacaggcacucaaauuccaccccgauaagaacaaguccccucaagccgaggaaaaauuuaaggagguggcggaggcuuaugaaguccuuucugacccgaaaaagagggagaucuacgaucaguucggugaagagggccugaaagggggagccggcgguaccgacgggcagggaggcacauuucgguauacuuuccauggcgauccacacgcaacguuugccgcuuucuuugggggaucaaaucccuucgaaaucuuuuucggucgccgaaugggcgggggacgugacagugaggagauggaaauugauggcgacccuuuuagcgcauucgguuuuuccaugaacggguacccaagagauaggaacucuguuggacccucgcgguugaagcaggacccuccagugauucaugaguuacgcguaucacuggaagagaucuauagcggcuguaccaagagaaugaaaauaaguaggaagcggcuaaaugccgauggccgcuccuaccgaucugaagacaaaauccucacaauugagaucaagaaaggguggaaggagggaacuaaaauuaccuuccccagagaaggugacgagacaccuaauagcaucccagcugauauaguguucauuaucaaggacaaggaucacccgaaauuuaagagggacggcuccaacauuaucuacaccgccaaaaucucacugcgggaagcgcuuugcggguguaguauuaauguccccacucuggauggacguaacauaccuaugagcgugaaugacaucguuaagccaggcaugcgcagaaggauuaucgguuauggguugcccuucccuaaaaacccagaucaacggggcgaccuccugauagaguuugaagugucuuuccccgauacaauuuccucaagcaguaaggagguccugcgaaagcaucucccggcaucuuga

SEQ ID NO: 8372 - RNA, 1014 nt, Artificial Sequence
  derived and/or modified sequence opt4 from DNJB4__Homo_sapiens__AAC14483
augggcaaggacuacuacugcauccugggcaucgagaagggcgccagcgacgaggacaucaagaaggccuacagaaagcaggcccugaaguuccaccccgacaagaacaagagcccccaggccgaggagaaguucaaggagguggccgaggccuacgaggugcugagcgaccccaagaagagagagaucuacgaccaguucggcgaggagggccugaagggcggcgccggcggcaccgacggccagggcggcaccuucagauacaccuuccacggcgacccccacgccaccuucgccgccuucuucggcggcagcaaccccuucgagaucuucuucggcagaagaaugggcggcggcagagacagcgaggagauggagaucgacggcgaccccuucagcgccuucggcuucagcaugaacggcuaccccagagacagaaacagcgugggccccagcagacugaagcaggacccccccgugauccacgagcugagagugagccuggaggagaucuacagcggcugcaccaagagaaugaagaucagcagaaagagacugaacgccgacggcagaagcuacagaagcgaggacaagauccugaccaucgagaucaagaagggcuggaaggagggcaccaagaucaccuuccccagagagggcgacgagacccccaacagcauccccgccgacaucguguucaucaucaaggacaaggaccaccccaaguucaagagagacggcagcaacaucaucuacaccgccaagaucagccugagagaggcccugugcggcugcagcaucaacgugcccacccuggacggcagaaacauccccaugagcgugaacgacaucgugaagcccggcaugagaagaagaaucaucggcuacggccugcccuuccccaagaaccccgaccagagaggcgaccugcugaucgaguucgaggugagcuuccccgacaccaucagcagcagcagcaaggaggugcugagaaagcaccugcccgccagcuga

SEQ ID NO: 8373 - RNA, 1014 nt, Artificial Sequence
  derived and/or modified sequence opt5 from DNJB4__Homo_sapiens__AAC14483
augggcaaggacuacuauugcauccuggggauugagaaaggagccagcgaugaagacaucaagaaggcuuacagaaaacaggcccucaaauuccaccccgauaagaacaaguccccucaagcggaggaaaaauuuaaggagguggcugaagccuaugagguccugucugacccgaaaaagcgggagauuuacgaucaguucggcgaagaggggcuuaaaggaggcgccgggggaaccgacggccagggcgggacauuucgcuauacguuccauggagauccccacgcuaccuuugccgcuuucuuuggcgggagcaauccuuucgaaaucuuuuucggaagacggaugggcgggggacgcgacuccgaggagauggaaauugauggcgaccccuuuucugccuucggcuuuagcaugaacggguacccuagagaucgcaauuccguuggacccucucggcugaagcaggacccuccggugauccaugagcucagagugagccuggaagagaucuauuccggcuguacaaagcggaugaaaauuagccgcaagagacuuaacgcggaugggcggucuuaccgcuccgaagacaaaauccugaccauugagaucaagaaaggauggaaggagggcacaaaaauuaccuuccccagagaaggggacgagacaccuaauagcauccccgccgauauugucuucaucaucaaggacaaggaucacccuaaauuuaagcgggacggaucuaacauuaucuacaccgcuaaaauuucccuccgcgaagcccugugcggcuguagcaucaaugugcccacgcuggauggcagaaacauuccgaugucuguuaaugacaucgugaagccugggaugcggagacgcaucauuggauauggccuccccuucccuaaaaaccccgaucaaagaggggaccugcuuaucgaguuugaagucuccuuccccgauaccauuagcuccucuagcaaggaggugcugcggaagcaucucccugcuuccuga

SEQ ID NO: 8374 - protein, 348 aa, Artificial Sequence
  DNJB5__Homo_sapiens__O75953
MGKDYYKILGIPSGANEDEIKKAYRKMALKYHPDKNKEPNAEEKFKEIAEAYDVLSDPKKRGLYDQYGEEGLKTGGGTSGGSSGSFHYTFHGDPHATFASFFGGSNPFDIFFASSRSTRPFSGFDPDDMDVDEDEDPFGAFGRFGFNGLSRGPRRAPEPLYPRRKVQDPPVVHELRVSLEEIYHGSTKRMKITRRRLNPDGRTVRTEDKILHIVIKRGWKEGTKITFPKEGDATPDNIPADIVFVLKDKPHAHFRRDGTNVLYSALISLKEALCGCTVNIPTIDGRVIPLPCNDVIKPGTVKRLRGEGLPFPKVPTQRGDLIVEFKVRFPDRLTPQTRQILKQHLPCS

SEQ ID NO: 8375 - RNA, 1047 nt, Artificial Sequence
  DNJB5__Homo_sapiens__AAC35860
augggaaaagauuauuacaagauucuugggaucccaucgggggccaacgaggaugagaucaagaaagccuaccggaagauggccuugaaguaccacccagacaagaauaaagaacccaacgcugaggagaaguuuaaggagauugcagaggccuaugaugugcuaagugaccccaagaaacggggccuguaugaccaguauggggaggaaggccugaagaccggcgguggcacaucagguggcuccaguggcuccuuucacuacaccuuucauggggacccccaugccaccuuugccuccuucuuugguggcuccaaccccuucgauaucuucuuugccagcagccgcuccacucggcccuucaguggcuuugacccagaugacauggauguggaugaagaugaggacccauuuggcgcuuucggccguuuuggcuucaaugggcugaguagggguccaaggcgagccccagaaccacuguacccucggcgcaaggugcaggaccccccaguggugcacgagcugcgggugucccuggaggagaucuaccauggcuccaccaagcgcaugaagaucacaaggcgucgccucaacccugaugggcgaacugugcgcaccgaggacaagauccugcacauagucaucaagcguggcuggaaggaaggcaccaagaucaccuuccccaaagaaggcgacgccacaccugacaacaucccugcugacaucgucuuugugcucaaagacaagccccaugcacacuuccgccgagauggcaccaacgugcucuacagugcccugaucagccucaaggaggcgcuguguggcugcacugugaacauucccacuaucgacggccgagugaucccuuugcccugcaaugaugucaucaagccaggcaccgugaagagacuccguggggagggccuucccuuccccaaagugccaacucagcgaggagaccucauuguugaguucaaaguucgcuucccagacagauuaacaccacagacaagacagauccuuaagcagcaccuacccuguuccuag

SEQ ID NO: 8376 - RNA, 1047 nt, Artificial Sequence
  derived and/or modified sequence opt1 from DNJB5__Homo_sapiens__AAC35860
augggcaaggacuacuacaagauccuggggauccccagcggcgccaacgaggacgagaucaagaaggccuaccgcaagauggcgcucaaguaccacccggacaagaacaaggagcccaacgccgaggagaaguucaaggagaucgccgaggccuacgacgugcuguccgaccccaagaagcgggggcuguacgaccaguacggcgaggaggggcucaagaccggcggcgggaccagcggcggguccagcggcuccuuccacuacacguuccacggggacccccacgccaccuucgcgagcuucuucggcggcuccaacccguucgacaucuucuucgccagcucccgcagcacccggcccuucuccggguucgaccccgacgacauggacgucgacgaggacgaggaccccuucggcgccuucgggcgcuucggcuucaacggccugagccgggggccgcgccgggcccccgagccccuguacccccgccggaaggugcaggacccgcccgugguccacgagcuccgcgugucccuggaggagaucuaccacggcagcaccaagcggaugaagaucacgcgccggcgccugaaccccgacgggcggaccgugcgcaccgaggacaagauccuccacaucgucaucaagcggggcuggaaggaggggaccaagaucacguuccccaaggagggcgacgcgaccccggacaacauccccgccgacaucguguucgugcugaaggacaagccccacgcccacuuccgccgggacggcaccaacguccuguacuccgcccucaucagccugaaggaggcccugugcgggugcaccgugaacauccccacgaucgacggccgcgugaucccgcuccccugcaacgacgucaucaagcccgggaccgugaagcggcugcgcggcgaggggcugcccuucccgaaggugcccacccagcgcggcgaccucaucgucgaguucaaggugcgguuccccgaccgccugacgccccagacccggcagauccugaagcagcaccucccgugcuccuga

SEQ ID NO: 8377 - RNA, 1047 nt, Artificial Sequence
  derived and/or modified sequence opt2 from DNJB5__Homo_sapiens__AAC35860
augggcaaggacuacuacaagauccucggcauccccuccggcgccaacgaggacgagaucaagaaggccuaccgcaagauggcccucaaguaccaccccgacaagaacaaggagcccaacgccgaggagaaguucaaggagaucgccgaggccuacgacguccucuccgaccccaagaagcgcggccucuacgaccaguacggcgaggagggccucaagaccggcggcggcaccuccggcggcuccuccggcuccuuccacuacaccuuccacggcgacccccacgccaccuucgccuccuucuucggcggcuccaaccccuucgacaucuucuucgccuccucccgcuccacccgccccuucuccggcuucgaccccgacgacauggacgucgacgaggacgaggaccccuucggcgccuucggccgcuucggcuucaacggccucucccgcggcccccgccgcgcccccgagccccucuacccccgccgcaagguccaggacccccccgucguccacgagcuccgcgucucccucgaggagaucuaccacggcuccaccaagcgcaugaagaucacccgccgccgccucaaccccgacggccgcaccguccgcaccgaggacaagauccuccacaucgucaucaagcgcggcuggaaggagggcaccaagaucaccuuccccaaggagggcgacgccacccccgacaacauccccgccgacaucgucuucguccucaaggacaagccccacgcccacuuccgccgcgacggcaccaacguccucuacuccgcccucaucucccucaaggaggcccucugcggcugcaccgucaacauccccaccaucgacggccgcgucaucccccuccccugcaacgacgucaucaagcccggcaccgucaagcgccuccgcggcgagggccuccccuuccccaagguccccacccagcgcggcgaccucaucgucgaguucaagguccgcuuccccgaccgccucaccccccagacccgccagauccucaagcagcaccuccccugcuccuga

SEQ ID NO: 8378 - RNA, 1047 nt, Artificial Sequence
  derived and/or modified sequence opt3 from DNJB5__Homo_sapiens__AAC35860
augggcaaggacuacuauaaaauccuggggauucccagcggagccaacgaggaugaaauaaagaaggcuuacagaaaaauggcacucaaauaucacccugacaagaauaaggagccaaacgccgaagagaaauucaaggaaaucgcggaggcuuacgaugugcuuuccgacccgaaaaagaggggucuguaugaucaguacggcgaggaaggguugaaaaccggaggcgguacaucugggggaucaaguggcagcuuucauuauacuuuccacggcgacccccaugccacguuugcauccuucuuugggggaucuaauccuuucgauauuuucuucgccucgucacggagcacccgcccauuuagugguuucgaccccgaugacauggaugucgacgaggaugaagacccuuuuggcgcuuucgggcgauuuggauucaacggcuuaucccgugguccaagaagggcacccgagccucuguacccacggcgcaagguucaagacccgcccgugguacacgagcuaagagugucucucgaagagaucuaccaugggagcacaaagaggaugaaaauuacucggcgccgacugaauccugauggaagaaccgucaggacagaagacaagauccuucacauagugaucaaacggggcuggaaggagggcaccaaaauuacuuucccaaaggaaggggaugccacacccgacaacaucccugcugauauuguuuuugugcugaaagacaagccacacgcccauuuccgucgcgauggaaccaaugucuuguauuccgcgcucaucucacugaaggaggcacugugcgguuguacggugaacauacccacuauugacggcagaguaaucccgcucccuugcaaugauguuauuaaacccgggaccgugaagagguuacggggagagggccugccauuuccuaaaguccccacacagcgaggugaccuuaucguggaauuuaaggugcgcuuuccagauagauugacuccccagaccaggcagauccugaaacaacaccuaccuuguaguuga

SEQ ID NO: 8379 - RNA, 1047 nt, Artificial Sequence
  derived and/or modified sequence opt4 from DNJB5__Homo_sapiens__AAC35860
augggcaaggacuacuacaagauccugggcauccccagcggcgccaacgaggacgagaucaagaaggccuacagaaagauggcccugaaguaccaccccgacaagaacaaggagcccaacgccgaggagaaguucaaggagaucgccgaggccuacgacgugcugagcgaccccaagaagagaggccuguacgaccaguacggcgaggagggccugaagaccggcggcggcaccagcggcggcagcagcggcagcuuccacuacaccuuccacggcgacccccacgccaccuucgccagcuucuucggcggcagcaaccccuucgacaucuucuucgccagcagcagaagcaccagacccuucagcggcuucgaccccgacgacauggacguggacgaggacgaggaccccuucggcgccuucggcagauucggcuucaacggccugagcagaggccccagaagagcccccgagccccuguaccccagaagaaaggugcaggacccccccguggugcacgagcugagagugagccuggaggagaucuaccacggcagcaccaagagaaugaagaucaccagaagaagacugaaccccgacggcagaaccgugagaaccgaggacaagauccugcacaucgugaucaagagaggcuggaaggagggcaccaagaucaccuuccccaaggagggcgacgccacccccgacaacauccccgccgacaucguguucgugcugaaggacaagccccacgcccacuucagaagagacggcaccaacgugcuguacagcgcccugaucagccugaaggaggcccugugcggcugcaccgugaacauccccaccaucgacggcagagugaucccccugcccugcaacgacgugaucaagcccggcaccgugaagagacugagaggcgagggccugcccuuccccaaggugcccacccagagaggcgaccugaucguggaguucaaggugagauuccccgacagacugaccccccagaccagacagauccugaagcagcaccugcccugcagcuga

SEQ ID NO: 8380 - RNA, 1047 nt, Artificial Sequence
  derived and/or modified sequence opt5 from DNJB5__Homo_sapiens__AAC35860
augggcaaggacuacuauaaaauccuggggauucccagcggagccaacgaagaugaaaucaagaaggcuuacagaaaaauggcccucaaauaucacccugacaagaauaaggagccgaacgcggaagagaaauucaaggaaauugcugaggccuacgaugugcuguccgaccccaaaaagcggggccuuuaugaucaguacggggaggaaggacugaaaaccggcgggggaacaucuggcggcagcuccgggucuuuucacuauacguuccacggagacccucaugccaccuuugcuagcuucuuuggcggguccaaucccuucgauaucuuuuucgccucuagccgcuccacaagaccuuuuagcggauucgaccccgaugacauggaugucgacgaggaugaagacccuuuuggcgcuuucgggcgguuuggauucaacggccucucucgcggcccgagacgggcccccgagccucuguacccccgcagaaagguucaagacccucccguggugcacgagcuucgggucucccuggaagagauuuaccaugggagcaccaagcgcaugaaaaucacaagacggcgccucaauccggauggaagaaccgugcggacagaagacaagauccugcacauuguuaucaaacgcggcuggaaggaggggaccaaaauuacguucccuaaggaaggagaugcgacccccgacaacaucccugccgauauuguguuuguccugaaagacaagccccacgcucauuucagacgggauggcacaaaugugcucuauucugcccugaucucccuuaaggaggcucugugcggguguaccguuaacauucccacaaucgacggaagagugaucccucucccgugcaaugaugucauuaaacccggcaccgugaagcgccugcggggcgaggggcuuccuuuucccaaagugccuacgcagagaggagaccugaucgucgaguucaagguucgcuuucccgaucggcucacaccgcagaccagacagauucugaaacaacaucugccuuguagcuga

SEQ ID NO: 8381 - protein, 326 aa, Artificial Sequence
  DNJB6__Homo_sapiens__O75190
MVDYYEVLGVQRHASPEDIKKAYRKLALKWHPDKNPENKEEAERKFKQVAEAYEVLSDAKKRDIYDKYGKEGLNGGGGGGSHFDSPFEFGFTFRNPDDVFREFFGGRDPFSFDFFEDPFEDFFGNRRGPRGSRSRGTGSFFSAFSGFPSFGSGFSSFDTGFTSFGSLGHGGLTSFSSTSFGGSGMGNFKSISTSTKMVNGRKITTKRIVENGQERVEVEEDGQLKSLTINGVADDDALAEERMRRGQNALPAQPAGLRPPKPPRPASLLRHAPHCLSEEEGEQDRPRAPGPWDPLASAAGLKEGGKRKKQKQREESKKKKSTKGNH

SEQ ID NO: 8382 - RNA, 981 nt, Artificial Sequence
  DNJB6__Homo_sapiens__AAH02446
augguggauuacuaugaaguucuaggcgugcagagacaugccucacccgaggauauuaaaaaggcauaucggaaacuggcacugaaguggcauccagauaaaaauccugagaauaaagaagaagcagagagaaaauucaagcaaguagcggaggcauaugaagugcugucggaugcuaagaaacgggacaucuaugacaaauauggcaaagaaggauuaaaugguggaggaggagguggaagucauuuugacaguccauuugaauuuggcuucacauuccguaacccagaugaugucuucagggaauuuuuugguggaagggacccauuuucauuugacuucuuugaagacccuuuugaggacuucuuugggaaucgaagggguccccgaggaagcagaagccgagggacggggucguuuuucucugcguucaguggauuuccgucuuuuggaaguggauuuucuucuuuugauacaggauuuacuucauuugggucacuaggucacgggggccucacuucauucucuuccacgucauuuggugguaguggcaugggcaacuucaaaucgauaucaacuucaacuaaaaugguuaauggcagaaaaaucacuacaaagagaauugucgagaacggucaagaaagaguagaaguugaagaagauggccaguuaaaguccuuaacaauaaaugguguggccgacgacgaugcccucgcugaggagcgcaugcggagaggccagaacgcccugccagcccagccugccggccuccgcccgccgaagccgccccggccugccucgcugcugagacacgcgccucacugucucucugaggaggagggcgagcaggaccgaccucgggcacccgggcccugggacccccucgcguccgcagcaggauugaaagaagguggcaagaggaagaagcagaagcagagagaggagucgaagaagaagaagucgaccaaaggcaaucacuag

SEQ ID NO: 8383 - RNA, 981 nt, Artificial Sequence
  derived and/or modified sequence opt1 from DNJB6__Homo_sapiens__AAH02446
augguggacuacuacgagguccugggcgugcagcgccacgccagccccgaggacaucaagaaggccuaccggaagcucgcgcugaaguggcacccggacaagaaccccgagaacaaggaggaggccgagcgcaaguucaagcaggucgccgaggccuacgaggugcugagcgacgccaagaagcgggacaucuacgacaaguacgggaaggagggccucaacgggggcgggggcggcgggagccacuucgacucccccuucgaguucggcuucaccuuccgcaaccccgacgacguguuccgggaguucuucgggggccgcgacccguucagcuucgacuucuucgaggaccccuucgaggacuucuucgggaaccggcgcggcccccggggcucccgcagccgggggaccggcuccuucuucagcgcguucuccggguuccccagcuucggcuccggcuucagcuccuucgacacgggguucaccagcuucggcucccuggggcacggcgggcugaccagcuucuccagcaccuccuucggcggcagcgggaugggcaacuucaagagcaucuccacgagcaccaagauggugaacgggcgcaagaucaccaccaagcggaucgucgagaacggccaggagcgcguggagguggaggaggacgggcagcucaagucccugacgaucaacggcgucgccgacgacgacgcccuggccgaggagcggaugcgccggggccagaacgcgcucccggcccagcccgccgggcugcgcccgcccaagccgccccggcccgccagccugcuccgccacgcgccccacugccuguccgaggaggagggcgagcaggaccggccccgcgcccccgggcccugggacccccuggccagcgccgccggccucaaggagggcgggaagcgcaagaagcagaagcagcgggaggaguccaagaagaagaaguccaccaagggcaaccacuga

SEQ ID NO: 8384 - RNA, 981 nt, Artificial Sequence
  derived and/or modified sequence opt2 from DNJB6__Homo_sapiens__AAH02446
auggucgacuacuacgagguccucggcguccagcgccacgccucccccgaggacaucaagaaggccuaccgcaagcucgcccucaaguggcaccccgacaagaaccccgagaacaaggaggaggccgagcgcaaguucaagcaggucgccgaggccuacgagguccucuccgacgccaagaagcgcgacaucuacgacaaguacggcaaggagggccucaacggcggcggcggcggcggcucccacuucgacucccccuucgaguucggcuucaccuuccgcaaccccgacgacgucuuccgcgaguucuucggcggccgcgaccccuucuccuucgacuucuucgaggaccccuucgaggacuucuucggcaaccgccgcggcccccgcggcucccgcucccgcggcaccggcuccuucuucuccgccuucuccggcuuccccuccuucggcuccggcuucuccuccuucgacaccggcuucaccuccuucggcucccucggccacggcggccucaccuccuucuccuccaccuccuucggcggcuccggcaugggcaacuucaaguccaucuccaccuccaccaagauggucaacggccgcaagaucaccaccaagcgcaucgucgagaacggccaggagcgcgucgaggucgaggaggacggccagcucaagucccucaccaucaacggcgucgccgacgacgacgcccucgccgaggagcgcaugcgccgcggccagaacgcccuccccgcccagcccgccggccuccgcccccccaagcccccccgccccgccucccuccuccgccacgccccccacugccucuccgaggaggagggcgagcaggaccgcccccgcgcccccggccccugggacccccucgccuccgccgccggccucaaggagggcggcaagcgcaagaagcagaagcagcgcgaggaguccaagaagaagaaguccaccaagggcaaccacuga

SEQ ID NO: 8385 - RNA, 981 nt, Artificial Sequence
  derived and/or modified sequence opt3 from DNJB6__Homo_sapiens__AAH02446
augguggacuacuaugagguccugggcguucagagacacgccagccccgaagauaucaagaaggcuuacaggaaacucgcacuuaaauggcauccugacaagaacccagagaauaaagaagaggccgaacggaaguucaagcaaguggcggaggcuuaugagguacuguccgaugccaaaaagcgcgacauuuacgauaaauaugggaaggaaggauugaacgguggcgggggaggcgguucucacuuugacucaccguucgaguuuggguucaccuuucgaaaucccgaugacguguuccgugaauuuuucggaggcagagauccuuuuaguuucgacuuuuucgaggauccauuugaggacuucuucggcaacaggcgggggccccgcggaagcagauccagggguacaggcucguuuuucucugcauuuucaggguucccuagcuuuggaaguggcuucuccucuuuugauacugguuucacgagcuuuggguccuuaggacauggcggccugaccucauucaguagcacaucuuuugggggauccgguaugggcaauuucaaaucaauaagcaccaguacuaagauggucaacgggcggaagaucacaaccaaacgcauuguggaaaauggacaggagcgaguugaaguggaggaagacggccagcuaaagucucucacuaucaacggugucgccgacgaugacgcucuggcagaggagagaaugaggcgggggcagaaugcccuuccagcucaacccgccggccugcguccuccaaaaccgccccgcccugcguccuugcucagacacgcaccacauugccugagcgaagaggaaggagagcaggauaggccccgggccccuggcccaugggacccccuggcuucggccgcagggcucaaggaaggagguaaacgaaagaaacagaagcagcgcgaggagucuaagaaaaagaaauccacaaagggcaaccacuga

SEQ ID NO: 8386 - RNA, 981 nt, Artificial Sequence
  derived and/or modified sequence opt4 from DNJB6__Homo_sapiens__AAH02446
augguggacuacuacgaggugcugggcgugcagagacacgccagccccgaggacaucaagaaggccuacagaaagcuggcccugaaguggcaccccgacaagaaccccgagaacaaggaggaggccgagagaaaguucaagcagguggccgaggccuacgaggugcugagcgacgccaagaagagagacaucuacgacaaguacggcaaggagggccugaacggcggcggcggcggcggcagccacuucgacagccccuucgaguucggcuucaccuucagaaaccccgacgacguguucagagaguucuucggcggcagagaccccuucagcuucgacuucuucgaggaccccuucgaggacuucuucggcaacagaagaggccccagaggcagcagaagcagaggcaccggcagcuucuucagcgccuucagcggcuuccccagcuucggcagcggcuucagcagcuucgacaccggcuucaccagcuucggcagccugggccacggcggccugaccagcuucagcagcaccagcuucggcggcagcggcaugggcaacuucaagagcaucagcaccagcaccaagauggugaacggcagaaagaucaccaccaagagaaucguggagaacggccaggagagaguggagguggaggaggacggccagcugaagagccugaccaucaacggcguggccgacgacgacgcccuggccgaggagagaaugagaagaggccagaacgcccugcccgcccagcccgccggccugagaccccccaagccccccagacccgccagccugcugagacacgccccccacugccugagcgaggaggagggcgagcaggacagacccagagcccccggccccugggacccccuggccagcgccgccggccugaaggagggcggcaagagaaagaagcagaagcagagagaggagagcaagaagaagaagagcaccaagggcaaccacuga

SEQ ID NO: 8387 - RNA, 981 nt, Artificial Sequence
  derived and/or modified sequence opt5 from DNJB6__Homo_sapiens__AAH02446
augguggacuacuaugagguccugggcguucagagacacgccagccccgaagauaucaagaaggcuuaccggaaacucgcccugaaauggcauccugacaagaacccggagaauaaagaagaggcggaacgcaaguucaagcaaguggcugaggccuaugaggugcuuuccgaugccaaaaagagagacauuuacgauaaauaugggaaggaaggacugaacggcgggggaggcgggggaucucacuuugacagccccuucgaguuuggcuucaccuuucggaauccugaugacgucuuccgcgaauuuuucggcgggagagaucccuuuuccuucgacuuuuucgaggauccuuuugaggacuucuucggaaaccggcgcggccccagagggucucggagccgcggaacaggcuccuuuuucucugcuuuuagcggguucccuuccuuuggaagcggcuucucuuccuuugauacgggcuucaccagcuuugggucucucggacauggcgggcugacauccuucagcucuaccuccuuuggaggcagcgggaugggaaauuucaaauccaucucuacaagcaccaagauggugaacggcagaaagauuacaaccaaacggaucguugaaaauggccaggagcgcguggaagucgaggaagacgggcagcuuaagucccugacgauuaacggaguggccgacgaugacgcucucgccgaggagagaaugcggcgcggccagaaugcgcugccggcccaacccgcugggcugagaccucccaaaccuccccggccggccagccuccugagacacgcuccucauugccuuucugaagaggaaggagagcaggaucgcccccgggccccuggccccugggacccccuggcguccgccgcugggcucaaggaaggcggaaaaagaaagaaacagaagcagcgcgaggagagcaagaaaaagaaaucuaccaagggcaaccacuga

SEQ ID NO: 8388 - protein, 309 aa, Artificial Sequence
  DNJB7__Homo_sapiens__Q7Z6W7
MVDYYEVLGLQRYASPEDIKKAYHKVALKWHPDKNPENKEEAERKFKEVAEAYEVLSNDEKRDIYDKYGTEGLNGGGSHFDDECEYGFTFHKPDDVFKEIFHERDPFSFHFFEDSLEDLLNRPGSSYGNRNRDAGYFFSTASEYPIFEKFSSYDTGYTSQGSLGHEGLTSFSSLAFDNSGMDNYISVTTSDKIVNGRNINTKKIIESDQEREAEDNGELTFFLVNSVANEEGFAKECSWRTQSFNNYSPNSHSSKHVSQYTFVDNDEGGISWVTSNRDPPIFSAGVKEGGKRKKKKRKEVQKKSTKRNC

SEQ ID NO: 8389 - RNA, 930 nt, Artificial Sequence
  DNJB7__Homo_sapiens__AAI12136
augguggauuacuaugaaguucuaggacugcaaagauaugcuucaccugaggacauuaaaaaagcuuaucauaaaguggcacuuaaauggcacccugauaaaaauccagaaaauaaagaagaagcagagagaaaauucaaagaaguagcugaggcauacgagguauuaucaaaugaugagaaacgggacauuuaugauaaauauggcacagaaggauuaaacggagguggaagucauuuugaugaugaaugugaguacggcuucacauuccauaagccagaugauguuuuuaaagaaauuuuucaugaaagggauccauuuucuuuucacuucuuugaagacucgcuugaggaccuguuaaaucguccaggaagcuccuauggaaacagaaacagagaugcaggauacuuuuucuccacugccagugaauauccaauuuuugagaaauuuucuucauaugauacaggauauacaucacaggguucauuggggcaugaaggccuuacuucuuucucuucccuggcuuuugauaauagugggauggacaacuacauaucuguuacaacuucagacaaaaucguuaauggcagaaauauuaauacaaagaaaauuauugaaagugaucaagaaagagaagcugaagauaauggagaguugacauuuuuucuuguaaauaguguggccaaugaagagggcuuugcaaaagaaugcagcuggagaacacagucauucaacaacuauucaccaaauucucacagcuccaaacauguaucucaauauacuuucguggacaaugaugagggagguauaucuuggguuaccagcaacagagaucccccuauuuucucagcaggagucaaagagggugguaagaggaaaaaaaagaagcguaaagaggugcaaaagaagucuaccaaaaggaauuguuaa

SEQ ID NO: 8390 - RNA, 930 nt, Artificial Sequence
  derived and/or modified sequence opt1 from DNJB7__Homo_sapiens__AAI12136
augguggacuacuacgagguccugggccuccagcgcuacgccagccccgaggacaucaagaaggccuaccacaagguggcgcugaaguggcacccggacaagaaccccgagaacaaggaggaggccgagcggaaguucaaggagguggccgaggccuacgagguccugagcaacgacgagaagcgcgacaucuacgacaaguacgggaccgagggccucaacgggggcgggagccacuucgacgacgagugcgaguacggcuucaccuuccacaagcccgacgacguguucaaggagaucuuccacgagcgggaccccuucuccuuccacuucuucgaggacagccuggaggaccugcucaaccgcccgggcuccagcuacgggaaccggaaccgcgacgccggcuacuucuucuccacggcgagcgaguaccccaucuucgagaaguucuccagcuacgacaccggguacaccucccagggcagccuggggcacgagggccugaccuccuucagcucccucgccuucgacaacagcggcauggacaacuacaucuccgugacgaccagcgacaagaucgucaacgggcggaacaucaacaccaagaagaucaucgaguccgaccaggagcgcgaggccgaggacaacggcgagcugaccuucuuccuggugaacagcguggccaacgaggagggguucgcgaaggagugcagcuggcggacgcaguccuucaacaacuacagccccaacucccacagcuccaagcacgucagccaguacaccuucguggacaacgacgagggcggcaucuccugggugaccagcaaccgcgacccgcccaucuucuccgccggggucaaggagggcgggaagcggaagaagaagaagcgcaaggaggugcagaagaaguccaccaagcggaacugcuga

SEQ ID NO: 8391 - RNA, 930 nt, Artificial Sequence
  derived and/or modified sequence opt2 from DNJB7__Homo_sapiens__AAI12136
auggucgacuacuacgagguccucggccuccagcgcuacgccucccccgaggacaucaagaaggccuaccacaaggucgcccucaaguggcaccccgacaagaaccccgagaacaaggaggaggccgagcgcaaguucaaggaggucgccgaggccuacgagguccucuccaacgacgagaagcgcgacaucuacgacaaguacggcaccgagggccucaacggcggcggcucccacuucgacgacgagugcgaguacggcuucaccuuccacaagcccgacgacgucuucaaggagaucuuccacgagcgcgaccccuucuccuuccacuucuucgaggacucccucgaggaccuccucaaccgccccggcuccuccuacggcaaccgcaaccgcgacgccggcuacuucuucuccaccgccuccgaguaccccaucuucgagaaguucuccuccuacgacaccggcuacaccucccagggcucccucggccacgagggccucaccuccuucuccucccucgccuucgacaacuccggcauggacaacuacaucuccgucaccaccuccgacaagaucgucaacggccgcaacaucaacaccaagaagaucaucgaguccgaccaggagcgcgaggccgaggacaacggcgagcucaccuucuuccucgucaacuccgucgccaacgaggagggcuucgccaaggagugcuccuggcgcacccaguccuucaacaacuacucccccaacucccacuccuccaagcacgucucccaguacaccuucgucgacaacgacgagggcggcaucuccugggucaccuccaaccgcgacccccccaucuucuccgccggcgucaaggagggcggcaagcgcaagaagaagaagcgcaaggagguccagaagaaguccaccaagcgcaacugcuga

SEQ ID NO: 8392 - RNA, 930 nt, Artificial Sequence
  derived and/or modified sequence opt3 from DNJB7__Homo_sapiens__AAI12136
augguggacuacuaugagguccugggccuccagagauacgccagccccgaagauaucaagaaggcuuaucacaaaguugcacuuaaauggcauccugacaagaacccagagaauaaagaagaggccgaaaggaaguucaaggagguggcggaggcuuacgaaguacuguccaacgaugagaaacgggacauuuaugauaaguacgggaccgaaggauugaaugguggcgggucucacuuugacgaugagugcgaguauggauucacauuucauaaaccggacgauguguucaaggaaauauuucacgagcgcgaccccuucucauuucauuucuuugaagauaguuuagaggaccugcuaaaccgaccuggcagcuccuacgguaaucguaacagagaugccggguacuucuuuucuacugcaucggaauauccaaucuucgagaaauuuucaagcuacgacacgggauauaccagucaaggcucccucggccacgaggggcugacaucuuucagcucccuugccuucgacaauucaggaauggauaacuacauuagugucacuaccagcgacaagaucgugaaugguaggaacauuaauacaaagaaaaucauagaaucugaucaggagcgggaagcugaggacaacggcgaacugaccuuuuucuugguuaauuccguggcaaacgaggagggguuugccaaggaauguucauggcgcacucagagcuucaauaacuauagucccaacucucacuccagcaaacaugucucgcaguacacauuuguggauaaugacgagggaggcaucucuuggguaaccuccaacagagauccuccaauuuucucagcugguguuaaggaagggggaaaaaggaagaaaaagaagcggaaagaggugcaaaagaaaaguacgaagcgcaauugcuga

SEQ ID NO: 8393 - RNA, 930 nt, Artificial Sequence
  derived and/or modified sequence opt4 from DNJB7__Homo_sapiens__AAI12136
augguggacuacuacgaggugcugggccugcagagauacgccagccccgaggacaucaagaaggccuaccacaagguggcccugaaguggcaccccgacaagaaccccgagaacaaggaggaggccgagagaaaguucaaggagguggccgaggccuacgaggugcugagcaacgacgagaagagagacaucuacgacaaguacggcaccgagggccugaacggcggcggcagccacuucgacgacgagugcgaguacggcuucaccuuccacaagcccgacgacguguucaaggagaucuuccacgagagagaccccuucagcuuccacuucuucgaggacagccuggaggaccugcugaacagacccggcagcagcuacggcaacagaaacagagacgccggcuacuucuucagcaccgccagcgaguaccccaucuucgagaaguucagcagcuacgacaccggcuacaccagccagggcagccugggccacgagggccugaccagcuucagcagccuggccuucgacaacagcggcauggacaacuacaucagcgugaccaccagcgacaagaucgugaacggcagaaacaucaacaccaagaagaucaucgagagcgaccaggagagagaggccgaggacaacggcgagcugaccuucuuccuggugaacagcguggccaacgaggagggcuucgccaaggagugcagcuggagaacccagagcuucaacaacuacagccccaacagccacagcagcaagcacgugagccaguacaccuucguggacaacgacgagggcggcaucagcugggugaccagcaacagagacccccccaucuucagcgccggcgugaaggagggcggcaagagaaagaagaagaagagaaaggaggugcagaagaagagcaccaagagaaacugcuga

SEQ ID NO: 8394 - RNA, 930 nt, Artificial Sequence
  derived and/or modified sequence opt5 from DNJB7__Homo_sapiens__AAI12136
augguggacuacuaugagguccugggccuccagagauacgccagccccgaagauaucaagaaggcuuaucacaaaguugcccugaaauggcauccugacaagaacccggagaauaaagaagaggcggaacggaaguucaaggagguggcugaggccuacgaagugcuuuccaacgaugagaaacgcgacauuuaugauaaguacgggaccgaaggacugaauggcgggggaucucacuuugacgaugagugcgaguauggcuucacauuucauaaacccgacgaugucuucaaggaaaucuuucacgagagagacccuuucagcuuucauuucuuugaagauucccucgaggaccugcuuaaccggcccgggucuagcuacggaaaucgcaacagagaugccggcuacuucuuuuccacggcuucugaauauccuauuuucgagaaauuuagcuccuacgacaccggcuauacaagccaagggucucugggacacgagggccucaccuccuucagcucucuggccuucgacaauuccgggauggauaacuacaucagcgugacaaccucugacaagauuguuaauggacggaacaucaauacaaagaaaaucauugaauccgaucaggagcgcgaagcugaggacaacggcgaacugaccuuuuuccucgugaauagcgucgccaacgaggagggguuugcgaaggaauguuccuggagaacgcagucuuucaauaacuauagccccaacucccacagcucuaaacaugugucccaguacaccuuuguugauaaugacgagggaggcaucagcugggugacaucuaaccgggauccuccgauuuucagcgccggcgucaaggaagggggaaaacgcaagaaaaagaagagaaaagaggugcaaaagaaauccaccaagcggaauugcuga

SEQ ID NO: 8395 - protein, 232 aa, Artificial Sequence
  DNJB8__Homo_sapiens__Q8NHS0
MANYYEVLGVQASASPEDIKKAYRKLALRWHPDKNPDNKEEAEKKFKLVSEAYEVLSDSKKRSLYDRAGCDSWRAGGGASTPYHSPFDTGYTFRNPEDIFREFFGGLDPFSFEFWDSPFNSDRGGRGHGLRGAFSAGFGEFPAFMEAFSSFNMLGCSGGSHTTFSSTSFGGSSSGSSGFKSVMSSTEMINGHKVTTKRIVENGQERVEVEEDGQLKSVTVNGKEQLKWMDSK

SEQ ID NO: 8396 - RNA, 699 nt, Artificial Sequence
  DNJB8__Homo_sapiens__AAH29521
auggcuaacuacuacgaagugcugggcgugcaggccagcgcuuccccggaggacaucaagaaagccuaccgcaagcuggcccuucguuggcaccccgacaagaacccugacaauaaggaggaggcggagaagaaguucaagcuggugucugaggccuaugagguucugucugacuccaagaaacgcucccuguaugaccgugcuggcugugacagcuggcgggcugguggcggggccagcacgcccuaccacagccccuucgacaccggcuacaccuuccguaacccugaggacaucuuccgggaguuuuucgguggccuggacccuuucuccuuugaguucugggacagcccauucaauagugaccgugguggccggggccauggccugaggggggccuucucggcaggcuuuggagaauuuccggccuucauggaggccuucucauccuucaacaugcugggcugcagcgggggcagccacaccaccuucucauccaccuccuucgggggcuccaguucuggcagcucgggguucaagucggugaugucguccaccgagaugaucaauggccacaaggucaccaccaagcgcaucguggagaacgggcaggagcgcguggagguggaggaagacgggcagcucaagucggugacugugaacggcaaggagcagcucaaauggauggacagcaaguag

SEQ ID NO: 8397 - RNA, 699 nt, Artificial Sequence
  derived and/or modified sequence opt1 from DNJB8__Homo_sapiens__AAH29521
auggccaacuacuacgaggugcugggcguccaggccagcgcgucccccgaggacaucaagaaggccuaccgcaagcucgcccugcgguggcacccggacaagaaccccgacaacaaggaggaggccgagaagaaguucaagcuggugagcgaggccuacgaggugcucuccgacagcaagaagcgcucccuguacgaccgggcggggugcgacagcuggcgcgccggcgggggcgccuccacccccuaccacagccccuucgacaccggguacacguuccggaacccggaggacaucuuccgcgaguucuucggcggccuggaccccuucuccuucgaguucugggacagccccuucaacuccgaccgcgggggccgggggcacggccuccgcggggccuucagcgcgggcuucggcgaguuccccgccuucauggaggccuucuccagcuucaacaugcuggggugcuccggcgggagccacaccaccuucuccagcaccuccuucggcggcagcagcuccgggagcuccggcuucaagagcgucauguccagcacggagaugaucaacgggcacaaggugaccaccaagcggaucguggagaacggccaggagcgggucgagguggaggaggacgggcagcugaaguccgugaccgucaacggcaaggagcagcucaaguggauggacagcaaguga

SEQ ID NO: 8398 - RNA, 699 nt, Artificial Sequence
  derived and/or modified sequence opt2 from DNJB8__Homo_sapiens__AAH29521
auggccaacuacuacgagguccucggcguccaggccuccgccucccccgaggacaucaagaaggccuaccgcaagcucgcccuccgcuggcaccccgacaagaaccccgacaacaaggaggaggccgagaagaaguucaagcucgucuccgaggccuacgagguccucuccgacuccaagaagcgcucccucuacgaccgcgccggcugcgacuccuggcgcgccggcggcggcgccuccacccccuaccacucccccuucgacaccggcuacaccuuccgcaaccccgaggacaucuuccgcgaguucuucggcggccucgaccccuucuccuucgaguucugggacucccccuucaacuccgaccgcggcggccgcggccacggccuccgcggcgccuucuccgccggcuucggcgaguuccccgccuucauggaggccuucuccuccuucaacaugcucggcugcuccggcggcucccacaccaccuucuccuccaccuccuucggcggcuccuccuccggcuccuccggcuucaaguccgucauguccuccaccgagaugaucaacggccacaaggucaccaccaagcgcaucgucgagaacggccaggagcgcgucgaggucgaggaggacggccagcucaaguccgucaccgucaacggcaaggagcagcucaaguggauggacuccaaguga

SEQ ID NO: 8399 - RNA, 699 nt, Artificial Sequence
  derived and/or modified sequence opt3 from DNJB8__Homo_sapiens__AAH29521
auggccaacuacuaugaggugcugggcguccaggcuagcgcaucccccgaagacaucaagaaagccuacagaaagcucgcgcuuagguggcacccugauaaaaauccagacaacaaggaggaagcugagaaaaaguucaagcugguuucugaagccuaugagguguugucagauaguaaaaagcggagcuuauacgaccgcgcagggugcgauuccuggcgagccggagguggcgcuucuaccccguaucauucgcccuuugacacaggguacacuuuccguaauccugaggauauuuuuagagaauuuuucggaggccuggacccauucucauuugaguucugggauagccccuuuaacagugacaggggugggcggggacacggccuacgcggcgcauucuccgccggguuuggagaguucccugcuuuuauggaagccuucucuagcuucaauaugcucgguuguuccggcgggucacauacgaccuuuaguagcacaucuuucggaggcuccucaagcgguaguucuggguuuaaauccguaaugagcucgacugagaugauaaacggacacaaggugaccacaaaaagaaucgucgaaaauggccaagagaggguggaaguugaggaagauggccagcugaagucugugaccgucaacgggaaggagcagcuuaaauggauggacuccaaguga

SEQ ID NO: 8400 - RNA, 699 nt, Artificial Sequence
  derived and/or modified sequence opt4 from DNJB8__Homo_sapiens__AAH29521
auggccaacuacuacgaggugcugggcgugcaggccagcgccagccccgaggacaucaagaaggccuacagaaagcuggcccugagauggcaccccgacaagaaccccgacaacaaggaggaggccgagaagaaguucaagcuggugagcgaggccuacgaggugcugagcgacagcaagaagagaagccuguacgacagagccggcugcgacagcuggagagccggcggcggcgccagcacccccuaccacagccccuucgacaccggcuacaccuucagaaaccccgaggacaucuucagagaguucuucggcggccuggaccccuucagcuucgaguucugggacagccccuucaacagcgacagaggcggcagaggccacggccugagaggcgccuucagcgccggcuucggcgaguuccccgccuucauggaggccuucagcagcuucaacaugcugggcugcagcggcggcagccacaccaccuucagcagcaccagcuucggcggcagcagcagcggcagcagcggcuucaagagcgugaugagcagcaccgagaugaucaacggccacaaggugaccaccaagagaaucguggagaacggccaggagagaguggagguggaggaggacggccagcugaagagcgugaccgugaacggcaaggagcagcugaaguggauggacagcaaguga

SEQ ID NO: 8401 - RNA, 699 nt, Artificial Sequence
  derived and/or modified sequence opt5 from DNJB8__Homo_sapiens__AAH29521
auggccaacuacuaugaggugcugggcguccaggcuagcgccucccccgaagacaucaagaaagcguacagaaagcucgcucugcgguggcacccugauaaaaauccggacaacaaggaggaagccgagaaaaaguucaaacuuguuucugaagccuaugaggugcugagcgauuccaagaagcgcucucucuacgacagagcugggugcgauagcuggcgggccggaggcggggcuuccacccccuaucauucuccuuuugacacaggauacacguuccgcaaucccgaggauauuuuuagagaauuuuucggcgggcuggacccuuucagcuuugaguucugggauucccccuuuaacagcgaccggggaggccgcggccacgggcuuagaggagccuucucugcgggcuuuggggaauuuccugccuucauggaggcuuucuccagcuucaauaugcugggauguucuggcgggucccauaccacauuuagcucuaccuccuucggaggcagcuccucuggcagcuccggguuuaaaagcgugaugucuuccacagagaugaucaacggacacaaggucaccacaaaacggauuguggaaaauggccaagagcgcguugaaguggaggaagaugggcagcucaagagcgucaccgugaacggaaaggagcagcugaaauggauggacucuaaguga

SEQ ID NO: 8402 - protein, 223 aa, Artificial Sequence
  DNJB9__Homo_sapiens__Q9UBS3
MATPQSIFIFAICILMITELILASKSYYDILGVPKSASERQIKKAFHKLAMKYHPDKNKSPDAEAKFREIAEAYETLSDANRRKEYDTLGHSAFTSGKGQRGSGSSFEQSFNFNFDDLFKDFGFFGQNQNTGSKKRFENHFQTRQDGGSSRQRHHFQEFSFGGGLFDDMFEDMEKMFSFSGFDSTNQHTVQTENRFHGSSKHCRTVTQRRGNMVTTYTDCSGQ

SEQ ID NO: 8403 - RNA, 672 nt, Artificial Sequence
  DNJB9__Homo_sapiens__AAD39845
auggcuacuccccagucaauuuucaucuuugcaaucugcauuuuaaugauaacagaauuaauucuggccucaaaaagcuacuaugauaucuuaggugugccaaaaucggcaucagagcgccaaaucaagaaggccuuucacaaguuggccaugaaguaccacccugacaaaaauaagagcccggaugcugaagcaaaauucagagagauugcagaagcauaugaaacacucucagaugcuaauagacgaaaagaguaugauacacuuggacacagugcuuuuacuagugguaaaggacaaagagguaguggaaguucuuuugagcagucauuuaacuucaauuuugaugacuuauuuaaagacuuuggcuuuuuuggucaaaaccaaaacacuggauccaagaagcguuuugaaaaucauuuccagacacgccaggauggugguuccaguagacaaaggcaucauuuccaagaauuuucuuuuggagguggauuauuugaugacauguuugaagauauggagaaaauguuuucuuuuagugguuuugacucuaccaaucagcauacaguacagacugaaaauagauuucauggaucuagcaagcacugcaggacugucacucaacgaagaggaaauaugguuacuacauacacugacuguucaggacaguag

SEQ ID NO: 8404 - RNA, 672 nt, Artificial Sequence
  derived and/or modified sequence opt1 from DNJB9__Homo_sapiens__AAD39845
auggccacgccccagagcaucuucaucuucgccaucugcauccugaugaucaccgagcucauccuggcguccaagagcuacuacgacauccugggcgugccgaaguccgccagcgagcgccagaucaagaaggccuuccacaagcucgccaugaaguaccaccccgacaagaacaagucccccgacgccgaggcgaaguuccgggagaucgccgaggccuacgagacccugagcgacgccaaccgccggaaggaguacgacacccuggggcacuccgcguucaccagcggcaaggggcagcgcggcuccgggagcuccuucgagcagagcuucaacuucaacuucgacgaccucuucaaggacuucggcuucuucggccagaaccagaacaccggguccaagaagcgguucgagaaccacuuccagacgcgccaggacggcgggagcucccggcagcgccaccacuuccaggaguucagcuucggcgggggccuguucgacgacauguucgaggacauggagaagauguucuccuucagcggcuucgacuccaccaaccagcacaccguccagaccgagaaccgguuccacgggagcagcaagcacugccgcacggugacccagcggcgcggcaacauggugaccaccuacacggacugcuccgggcaguga

SEQ ID NO: 8405 - RNA, 672 nt, Artificial Sequence
  derived and/or modified sequence opt2 from DNJB9__Homo_sapiens__AAD39845
auggccaccccccaguccaucuucaucuucgccaucugcauccucaugaucaccgagcucauccucgccuccaaguccuacuacgacauccucggcguccccaaguccgccuccgagcgccagaucaagaaggccuuccacaagcucgccaugaaguaccaccccgacaagaacaagucccccgacgccgaggccaaguuccgcgagaucgccgaggccuacgagacccucuccgacgccaaccgccgcaaggaguacgacacccucggccacuccgccuucaccuccggcaagggccagcgcggcuccggcuccuccuucgagcaguccuucaacuucaacuucgacgaccucuucaaggacuucggcuucuucggccagaaccagaacaccggcuccaagaagcgcuucgagaaccacuuccagacccgccaggacggcggcuccucccgccagcgccaccacuuccaggaguucuccuucggcggcggccucuucgacgacauguucgaggacauggagaagauguucuccuucuccggcuucgacuccaccaaccagcacaccguccagaccgagaaccgcuuccacggcuccuccaagcacugccgcaccgucacccagcgccgcggcaacauggucaccaccuacaccgacugcuccggccaguga

SEQ ID NO: 8406 - RNA, 672 nt, Artificial Sequence
  derived and/or modified sequence opt3 from DNJB9__Homo_sapiens__AAD39845
auggccacaccccagagcaucuucauuuuugcuauaugcauccugaugauuaccgagcucauccuugcauccaagucuuacuaugacauucugggcgugccuaaaucagccagugaaagacaaaucaagaaagcguuccacaaguuggcuaugaaauaccauccagauaagaacaagagcccggacgccgaggcaaaauuuagggaaauagccgaggcuuaugaaacuuuauccgaugcaaaucggcgcaaggaguacgacacgcuggggcacucugccuucaccucgggaaaaggucagcgaggcucagggagcaguuuugagcaguccuucaacuuuaauuucgaugaccuauuuaaggauuucggauuuuucggccagaaccaaaauacagguucuaaaaagcguuuugaaaaccauuuccagacuagacaggacgggggaagcuccaggcagcggcaccauuuccaagaguuuucauucggcggcgggcucuuugaugacauguucgaagauauggagaagauguuuaguuucagcggauuugacucuaccaaucagcacacaguccagaccgagaaccgcuuccacgguuccucaaaacauuguagaacuguuacacagaggcggggcaauauggugaccacguauacugauugcagcgggcaauga

SEQ ID NO: 8407 - RNA, 672 nt, Artificial Sequence
  derived and/or modified sequence opt4 from DNJB9__Homo_sapiens__AAD39845
auggccaccccccagagcaucuucaucuucgccaucugcauccugaugaucaccgagcugauccuggccagcaagagcuacuacgacauccugggcgugcccaagagcgccagcgagagacagaucaagaaggccuuccacaagcuggccaugaaguaccaccccgacaagaacaagagccccgacgccgaggccaaguucagagagaucgccgaggccuacgagacccugagcgacgccaacagaagaaaggaguacgacacccugggccacagcgccuucaccagcggcaagggccagagaggcagcggcagcagcuucgagcagagcuucaacuucaacuucgacgaccuguucaaggacuucggcuucuucggccagaaccagaacaccggcagcaagaagagauucgagaaccacuuccagaccagacaggacggcggcagcagcagacagagacaccacuuccaggaguucagcuucggcggcggccuguucgacgacauguucgaggacauggagaagauguucagcuucagcggcuucgacagcaccaaccagcacaccgugcagaccgagaacagauuccacggcagcagcaagcacugcagaaccgugacccagagaagaggcaacauggugaccaccuacaccgacugcagcggccaguga

SEQ ID NO: 8408 - RNA, 672 nt, Artificial Sequence
  derived and/or modified sequence opt5 from DNJB9__Homo_sapiens__AAD39845
auggccacaccccagagcaucuucauuuuugcuaucugcauucugaugaucaccgagcucauucuggccuccaagucuuacuaugacauccuuggcgugccuaaaagcgcguccgaaagacaaaucaagaaggcuuuccacaaacuggccaugaaauaccauccggauaagaacaagucucccgacgccgaggcuaaauuucgggaaauugccgaggcuuaugaaacgcucagcgaugccaaucgcagaaaggaguacgacacccuggggcacuccgcguucacaucuggaaaaggccagcgggggagcggauccagcuuugagcagucuuucaacuuuaauuucgaugaccuuuuuaaggauuucggcuuuuucgggcagaaccaaaauaccggauccaaaaagcgcuuugaaaaccauuuccagacaagacaggacggcggcagcucucggcagcgccaccauuuccaagaguuuuccuucgggggaggccuguuugaugacauguucgaagauauggagaagauguuuagcuucucuggguuugacuccaccaaucagcacacaguccagaccgagaacagauuccacggaagcuccaaacauugucggacgguuacccagcgcagaggcaauauggugacaaccuauacagauugcucugggcaauga

SEQ ID NO: 8409 - protein, 554 aa, Artificial Sequence
  DNJC1__Homo_sapiens__Q96KC8
MTAPCSQPAQLPGRRQLGLVPFPPPPPRTPLLWLLLLLLAAVAPARGWESGDLELFDLVEEVQLNFYQFLGVQQDASSADIRKAYRKLSLTLHPDKNKDENAETQFRQLVAIYEVLKDDERRQRYDDILINGLPDWRQPVFYYRRVRKMSNAELALLLFIILTVGHYAVVWSIYLEKQLDELLSRKKREKKKKTGSKSVDVSKLGASEKNERLLMKPQWHDLLPCKLGIWFCLTLKALPHLIQDAGQFYAKYKETRLKEKEDALTRTELETLQKQKKVKKPKPEFPVYTPLETTYIQSYDHGTSIEEIEEQMDDWLENRNRTQKKQAPEWTEEDLSQLTRSMVKFPGGTPGRWEKIAHELGRSVTDVTTKAKQLKDSVTCSPGMVRLSELKSTVQNSRPIKTATTLPDDMITQREDAEGVAAEEEQEGDSGEQETGATDARPRRRKPARLLEATAKPEPEEKSRAKRQKDFDIAEQNESSDEESLRKERARSAEEPWTQNQQKLLELALQQYPRGSSDRWDKIARCVPSKSKEDCIARYKLLVELVQKKKQAKS

SEQ ID NO: 8410 - RNA, 1665 nt, Artificial Sequence
  DNJC1__Homo_sapiens__AAI10895
augacggcuccuugcucccagccggcgcagcuuccuggacgccgccagcucgggcuggugccguucccgccgccgccgccgcggacgccgcugcuguggcugcugcugcugcugcuggccgccguggcgccggcgcgcggcugggagagcggagaccuggaguuguuugacuuaguggaggaggugcagcucaacuucuaccaguuccucggggugcagcaggaugcaucaucugcagacaucagaaaagcauaucguaagcuuucacuaacuuuacauccagacaagaauaaagaugaaaaugcagaaacucaguuuagacaauugguggccauuuaugaaguuuuaaaggaugaugaacgaaggcagagguaugaugauauucugaucaauggacuuccagauuggcgacagccuguauucuacuacaggcgggugagaaaaaugagcaaugcugagcuggcauuacucuuguucauuauucucacagugggucauuaugcugugguuuggucaaucuaccuggaaaaacaacuggaugaacuacuaaguagaaaaaagagagaaaagaaaaaaaagacuggcagcaagaguguggauguaucaaaacucggugcuucagaaaaaaaugaaagauugcugaugaaaccacaguggcaugauuugcuuccaugcaaacuggggauuugguuuugccuuacacuaaaagcauuaccucaccucauccaggaugcugggcaguuuuaugcuaaauauaaagaaacaagauugaaggaaaaggaagaugcacugacuagaacugaacuugaaacacuucaaaaacagaagaaaguuaaaaaaccaaaaccugaauuuccuguauacacaccuuuagaaacuacauauauucagucuuaugaucauggaacuuccauagaagaaauugaggaacaaauggaugauugguuggaaaacaggaaccgaacacagaaaaaacaggcaccugaauggacagaagaggaccucagccaacugacaagaaguaugguuaaguucccaggagggacuccaggucgaugggaaaagauugcccacgaauugggucgaucugugacagaugugacaaccaaagccaagcaacugaaggauucagugaccugcuccccaggaaugguuagacucuccgaacucaaaucgacaguucagaauuccaggcccaucaaaacggccaccaccuugcccgaugacaugaucacccagcgagaggacgcagaggggguggcagcggaggaggagcaggagggagacuccggugagcaggagaccggggccacugaugcccggccucggaggcggaagccagccaggcugcuggaggcuacagcgaagccggagccagaggagaaguccagagccaagcggcagaaggacuuugacauagcagaacaaaacgaguccagcgacgaggagagccugagaaaagagagagcucggucugcagaggagccguggacucaaaaucaacagaaacuucuggaacuggcguugcagcaguacccaaggggauccucugaccgcugggacaaaauagccagaugugucccguccaagagcaaggaagacuguaucgcuagguacaaguugcugguugaacugguccaaaagaaaaaacaagcuaaaagcuga

SEQ ID NO: 8411 - RNA, 1665 nt, Artificial Sequence
  derived and/or modified sequence opt1 from DNJC1__Homo_sapiens__AAI10895
augaccgcccccugcagccagccggcccagcugcccggccgccggcagcucgggcuggugcccuucccgcccccgccgccccgcacgccccugcucuggcugcugcuccugcugcucgcggccgucgcccccgcccggggcugggaguccggggaccuggagcuguucgaccucguggaggaggugcagcugaacuucuaccaguuccugggcguccagcaggacgccagcuccgcggacauccgcaaggccuaccggaagcucagccugacccugcaccccgacaagaacaaggacgagaacgccgagacccaguuccgccagcucguggccaucuacgaggugcugaaggacgacgagcggcgccagcgguacgacgacauccugaucaacgggcuccccgacuggcgccagcccgucuucuacuaccggcgcgugcggaagauguccaacgcggagcuggcccugcuccuguucaucauccugaccgugggccacuacgccgucguguggagcaucuaccucgagaagcagcuggacgagcugcucucccgcaagaagcgggagaagaagaagaagaccggcagcaaguccguggacgucagcaagcugggggccuccgagaagaacgagcgccugcucaugaagccccaguggcacgaccugcugcccugcaagcucggcaucugguucugccugacgcugaaggcccucccccaccugauccaggacgcggggcaguucuacgccaaguacaaggagacccggcugaaggagaaggaggacgcccucacccgcaccgagcuggagacgcugcagaagcagaagaaggugaagaagccgaagcccgaguuccccguguacacgccccucgagaccaccuacauccagagcuacgaccacggcaccuccaucgaggagaucgaggagcagauggacgacuggcuggagaaccggaaccgcacccagaagaagcaggccccggaguggaccgaggaggaccugagccagcucacccgguccauggucaaguuccccgggggcacgcccggccgcugggagaagaucgcccacgagcuggggcgcagcgugaccgacgugaccaccaaggcgaagcagcugaaggacuccgucacgugcagccccggcauggugcggcuguccgagcucaagagcaccgugcagaacagccgcccgaucaagaccgccaccacgcugcccgacgacaugaucacccagcgggaggacgccgagggggucgccgccgaggaggagcaggagggcgacuccggcgagcaggagaccggggcgaccgacgcccgcccccggcgccggaagcccgcccgccugcucgaggccacggccaagccggagcccgaggagaagucccgggcgaagcgccagaaggacuucgacaucgccgagcagaacgagagcagcgacgaggagucccugcggaaggagcgcgcccggagcgccgaggagcccuggacccagaaccagcagaagcugcucgagcuggcgcugcagcaguacccgcgcggcuccagcgaccggugggacaagaucgcccgcugcgugcccuccaagagcaaggaggacugcaucgcccgguacaagcuccugguggagcugguccagaagaagaagcaggccaaguccuga

SEQ ID NO: 8412 - RNA, 1665 nt, Artificial Sequence
  derived and/or modified sequence opt2 from DNJC1__Homo_sapiens__AAI10895
augaccgcccccugcucccagcccgcccagcuccccggccgccgccagcucggccucguccccuucccccccccccccccccgcaccccccuccucuggcuccuccuccuccuccucgccgccgucgcccccgcccgcggcugggaguccggcgaccucgagcucuucgaccucgucgaggagguccagcucaacuucuaccaguuccucggcguccagcaggacgccuccuccgccgacauccgcaaggccuaccgcaagcucucccucacccuccaccccgacaagaacaaggacgagaacgccgagacccaguuccgccagcucgucgccaucuacgagguccucaaggacgacgagcgccgccagcgcuacgacgacauccucaucaacggccuccccgacuggcgccagcccgucuucuacuaccgccgcguccgcaagauguccaacgccgagcucgcccuccuccucuucaucauccucaccgucggccacuacgccgucgucugguccaucuaccucgagaagcagcucgacgagcuccucucccgcaagaagcgcgagaagaagaagaagaccggcuccaaguccgucgacgucuccaagcucggcgccuccgagaagaacgagcgccuccucaugaagccccaguggcacgaccuccuccccugcaagcucggcaucugguucugccucacccucaaggcccucccccaccucauccaggacgccggccaguucuacgccaaguacaaggagacccgccucaaggagaaggaggacgcccucacccgcaccgagcucgagacccuccagaagcagaagaaggucaagaagcccaagcccgaguuccccgucuacaccccccucgagaccaccuacauccaguccuacgaccacggcaccuccaucgaggagaucgaggagcagauggacgacuggcucgagaaccgcaaccgcacccagaagaagcaggcccccgaguggaccgaggaggaccucucccagcucacccgcuccauggucaaguuccccggcggcacccccggccgcugggagaagaucgcccacgagcucggccgcuccgucaccgacgucaccaccaaggccaagcagcucaaggacuccgucaccugcucccccggcaugguccgccucuccgagcucaaguccaccguccagaacucccgccccaucaagaccgccaccacccuccccgacgacaugaucacccagcgcgaggacgccgagggcgucgccgccgaggaggagcaggagggcgacuccggcgagcaggagaccggcgccaccgacgcccgcccccgccgccgcaagcccgcccgccuccucgaggccaccgccaagcccgagcccgaggagaagucccgcgccaagcgccagaaggacuucgacaucgccgagcagaacgaguccuccgacgaggagucccuccgcaaggagcgcgcccgcuccgccgaggagcccuggacccagaaccagcagaagcuccucgagcucgcccuccagcaguacccccgcggcuccuccgaccgcugggacaagaucgcccgcugcguccccuccaaguccaaggaggacugcaucgcccgcuacaagcuccucgucgagcucguccagaagaagaagcaggccaaguccuga

SEQ ID NO: 8413 - RNA, 1665 nt, Artificial Sequence
  derived and/or modified sequence opt3 from DNJC1__Homo_sapiens__AAI10895
augaccgcccccugcagccagccugcucaacugccaggcagaaggcagcucgggcuugugccguuucccccuccacccccucggacaccacuguugugguuacugcuacuccugcuugcagccgucgcgcccgcucgcggaugggaguccggugaccuggaauuguucgaucucguugaggaagugcagcugaacuucuaccaguuucugggcguacaacaggacgccucuucagcagauauccgaaaggccuaucguaaacucaguuuaacucugcacccugacaagaauaaagaugagaacgcugaaacgcaguucagacagcuuguggcaauuuacgaggucuugaaggacgaugagaggcggcaacgcuaugacgauauacugaucaaugggcuaccagacuggagacagccgguguuuuacuauaggcggguucgcaaaaugagcaacgccgaacucgcucugcuucuguucauuaucuugaccgugggacauuacgccgucgugugguccauuuaucucgagaagcagcuggaugaauuacugucucgaaagaaaagagagaagaaaaagaaaacaggcucgaagucaguagacguuagcaagcucggugcgagugagaaaaaugaaaggcuucugaugaagccccaguggcacgauuugcuaccuuguaaacuggggaucugguuuugccucacucugaaggcacuuccacaucugauacaagacgccggacaguucuacgcuaaauacaaggagacccgguugaaagaaaaggaggacgcccucacacguaccgaacuggagacuuuacagaagcagaaaaaggugaaaaagcccaaaccugaguuuccagucuauacaccccuggaaaccacguacauccaauccuaugaucacggcacuucuauugaggaaaucgaggaacagauggacgauuggcuagagaaccgcaauagaacccagaagaagcaagcaccggaguggacagaagaggaccucagccagcugacuagguccauggugaaauucccuggcgggacccccggacggugggaaaagauugcucaugagcuuggucgaucagugacagaugucaccacgaaagccaagcaguugaaagacaguguuacuuguagcccaggcauggugcgccugucugaacucaaguccacaguacagaacucaagaccuaucaagaccgcgacuacacugcccgaugacaugauaacccaaagggaggaugccgaggggguggcagcugaagaggaacaggagggagacagcggcgagcaggaaacgggugccaccgaugcucggccacgcagaaggaaacccgcccgucuucuggaggcaacagccaagccugaaccagaggagaaaagucgggcuaagcgacagaaagacuuugacauugcggaacaaaaugagucuuccgaugaagagagcuugagaaaggaaagggcacgcucggccgaggaaccguggacucagaaccagcagaagcuccuggaguuagcucugcaacaguacccccgggggucuuccgacagaugggauaaaaucgccaggugcgucccuucaaagaguaaagaggacuguauugcacgcuauaagcuacucguggaacugguucagaaaaagaaacaagccaagagcuga

SEQ ID NO: 8414 - RNA, 1665 nt, Artificial Sequence
  derived and/or modified sequence opt4 from DNJC1__Homo_sapiens__AAI10895
augaccgcccccugcagccagcccgcccagcugcccggcagaagacagcugggccuggugcccuuccccccccccccccccagaaccccccugcuguggcugcugcugcugcugcuggccgccguggcccccgccagaggcugggagagcggcgaccuggagcuguucgaccugguggaggaggugcagcugaacuucuaccaguuccugggcgugcagcaggacgccagcagcgccgacaucagaaaggccuacagaaagcugagccugacccugcaccccgacaagaacaaggacgagaacgccgagacccaguucagacagcugguggccaucuacgaggugcugaaggacgacgagagaagacagagauacgacgacauccugaucaacggccugcccgacuggagacagcccguguucuacuacagaagagugagaaagaugagcaacgccgagcuggcccugcugcuguucaucauccugaccgugggccacuacgccgugguguggagcaucuaccuggagaagcagcuggacgagcugcugagcagaaagaagagagagaagaagaagaagaccggcagcaagagcguggacgugagcaagcugggcgccagcgagaagaacgagagacugcugaugaagccccaguggcacgaccugcugcccugcaagcugggcaucugguucugccugacccugaaggcccugccccaccugauccaggacgccggccaguucuacgccaaguacaaggagaccagacugaaggagaaggaggacgcccugaccagaaccgagcuggagacccugcagaagcagaagaaggugaagaagcccaagcccgaguuccccguguacaccccccuggagaccaccuacauccagagcuacgaccacggcaccagcaucgaggagaucgaggagcagauggacgacuggcuggagaacagaaacagaacccagaagaagcaggcccccgaguggaccgaggaggaccugagccagcugaccagaagcauggugaaguuccccggcggcacccccggcagaugggagaagaucgcccacgagcugggcagaagcgugaccgacgugaccaccaaggccaagcagcugaaggacagcgugaccugcagccccggcauggugagacugagcgagcugaagagcaccgugcagaacagcagacccaucaagaccgccaccacccugcccgacgacaugaucacccagagagaggacgccgagggcguggccgccgaggaggagcaggagggcgacagcggcgagcaggagaccggcgccaccgacgccagacccagaagaagaaagcccgccagacugcuggaggccaccgccaagcccgagcccgaggagaagagcagagccaagagacagaaggacuucgacaucgccgagcagaacgagagcagcgacgaggagagccugagaaaggagagagccagaagcgccgaggagcccuggacccagaaccagcagaagcugcuggagcuggcccugcagcaguaccccagaggcagcagcgacagaugggacaagaucgccagaugcgugcccagcaagagcaaggaggacugcaucgccagauacaagcugcugguggagcuggugcagaagaagaagcaggccaagagcuga

SEQ ID NO: 8415 - RNA, 1665 nt, Artificial Sequence
  derived and/or modified sequence opt5 from DNJC1__Homo_sapiens__AAI10895
augaccgcccccugcagccagccugcucaacugccgggcagacggcagcucgggcuggugcccuucccucccccucccccucgcacaccgcuucuguggcuccugcuucugcuccuggccgcggucgcucccgccagaggaugggaguccggcgaccuggaacucuuugaucugguugaggaagugcagcuuaacuucuaccaguuucugggggugcaacaggacgccucuagcgcugauauccggaaggccuaucgcaaacucucccugacgcuucacccugacaagaauaaagaugagaacgcugaaacccaguucagacagcuggucgccauuuacgaggugcucaaggacgaugagcggcgccaaagauaugacgauauccugauuaauggacugcccgacuggcggcagccuguguuuuacuaucgcagaguucggaaaaugucuaacgcggaacucgcccugcuucuguucaucauucucacagucggccauuacgcugugguuuggagcaucuaucuggagaagcagcuugaugaacugcucucccgcaagaaaagagagaagaaaaagaaaaccgggucuaagagcguggacgucuccaagcugggagccagcgagaaaaaugaacggcugcucaugaagccccaguggcacgaucugcuuccguguaaacugggcaucugguuuugccucacacugaaggcccuuccucaucugauucaagacgcuggccaguucuacgcgaaauacaaggagacccgccucaaagaaaaggaggacgcccugacaagaaccgaacuggagacgcuccagaagcaaaagaaggugaaaaagcccaaaccugaguuucccguguauacaccccuggaaaccaccuacauccagucuuaugaucacgggacauccauugaggaaaucgaggaacagauggacgauuggcuugagaaccggaauagaacccagaagaagcaagcuccugaguggacggaagaggaccugagccagcucacacgcucuauggucaaauucccgggaggcacccccgggcggugggaaaagauugcccaugagcugggaagauccguuacagaugugaccaccaaagcuaagcagcugaaagacagcgugacauguucuccuggcaugguccgccuuuccgaacucaagagcacggugcagaacucccggcccaucaagaccgccacaacccugccugaugacaugauuacacaaagagaggaugccgaggggguugcugcggaagaggaacaggagggagacucuggcgagcaggaaaccggcgccacggaugcucgcccccggagacgcaaaccggcccggcugcucgaggccacagcuaagccugaacccgaggagaaaagcagagccaagcgccagaaagacuuugacaucgcggaacaaaaugaguccagcgaugaagagucucugcggaaggaaagagcucgguccgccgaggaaccuuggacccagaaccagcagaaacuucuggagcucgcccugcaacaguacccccgcgggagcucugacagaugggauaaaaucgcucggugcgugccuagcaaguccaaagaggacuguauugccagauauaagcugcuugucgaacucgugcagaaaaagaaacaagcuaagucuuga

SEQ ID NO: 8416 - protein, 621 aa, Artificial Sequence
  DNJC2__Homo_sapiens__Q99543
MLLLPSAADGRGTAITHALTSASTLCQVEPVGRWFEAFVKRRNRNASASFQELEDKKELSEESEDEELQLEEFPMLKTLDPKDWKNQDHYAVLGLGHVRYKATQRQIKAAHKAMVLKHHPDKRKAAGEPIKEGDNDYFTCITKAYEMLSDPVKRRAFNSVDPTFDNSVPSKSEAKDNFFEVFTPVFERNSRWSNKKNVPKLGDMNSSFEDVDIFYSFWYNFDSWREFSYLDEEEKEKAECRDERRWIEKQNRATRAQRKKEEMNRIRTLVDNAYSCDPRIKKFKEEEKAKKEAEKKAKAEAKRKEQEAKEKQRQAELEAARLAKEKEEEEVRQQALLAKKEKDIQKKAIKKERQKLRNSCKTWNHFSDNEAERVKMMEEVEKLCDRLELASLQCLNETLTSCTKEVGKAALEKQIEEINEQIRKEKEEAEARMRQASKNTEKSTGGGGNGSKNWSEDDLQLLIKAVNLFPAGTNSRWEVIANYMNIHSSSGVKRTAKDVIGKAKSLQKLDPHQKDDINKKAFDKFKKEHGVVPQADNATPSERFEGPYTDFTPWTTEEQKLLEQALKTYPVNTPERWEKIAEAVPGRTKKDCMKRYKELVEMVKAKKAAQEQVLNASRAKK

SEQ ID NO: 8417 - RNA, 1866 nt, Artificial Sequence
  DNJC2__Homo_sapiens__CCDS43628.1
augcugcuucugccaagcgccgcggacggccggggcaccgccaucacccacgcucugaccucugccucuacacucugucaaguugaaccugugggaagaugguuugaagcuuuuguuaagaggagaaacagaaaugcuucugccucuuuucaggaacuggaggauaagaaagaguuauccgaggaaucagaagaugaagaauugcaguuggaagaguuucccaugcugaaaacacuugaucccaaagacuggaagaaccaagaucauuaugcaguucuuggacuuggccaugugagauacaaggcuacacagagacagaucaaagcagcucauaaagcaaugguuuuaaaacaucacccagacaaacggaaagcagcuggugaaccaauaaaagaaggagauaaugacuacuucacuugcauaacuaaagcuuaugaaauguuaucugauccagugaaaagacgagcauuuaacaguguagauccuacuuuugauaacucaguuccuucuaaaagugaagcaaaggauaauuucuucgaaguguuuaccccaguguuugaaaggaauuccagauggucaaauaaaaaaaauguuccuaaacuuggugauaugaauucaucauuugaagauguagauauauuuuauucuuucugguauaauuuugauucuuggagagaauuuucuuauuuagaugaagaagaaaaagaaaaagcagaaugucgugaugagaggagauggauugaaaagcagaacagagcaacaagagcacaaagaaaaaaagaagaaaugaacagaauaagaacauuaguugacaaugcauacagcugugauccaaggauaaaaaaguucaaggaagaagaaaaagccaagaaagaagcagaaaagaaagcaaaagcagaagcuaaacggaaggagcaagaagcuaaagaaaaacaaagacaagcugaauuagaagcugcucgguuagcuaaggagaaagaagaggaggaagucagacagcaagcauugcuggcaaagaaggaaaaagauauccagaaaaaagccauuaagaaggaaaggcaaaaacuucgaaacucaugcaagaccuggaaucauuuuucugauaaugaggcagagcggguuaaaaugauggaagaaguggaaaaacuuugugaucggcuugaacuggcaagcuuacagugcuugaaugaaacacucacaucaugcacaaaagaaguaggaaaggcugcuuuggaaaaacagauagaagaaauaaaugagcaaaucagaaaagagaaagaggaagcugaggcucguaugcgacaagcaucuaagaacacagagaaaucaacugguggagguggaaauggaaguaaaaauuggucagaagaugaucuacaauuacuaauuaaagcugugaaucuguucccugcuggaacaaauucaagaugggaaguuauugcuaauuacaugaacauacauucuuccucuggagucaaaagaacugccaaagauguuauuggcaaagcaaagagucuccaaaaacuugacccucaucaaaaagaugacauaaauaaaaaggcauuugauaaguucaaaaaagaacauggagugguaccucaagcagacaacgcaacgccuucagaacgauuugaagguccauauacagacuucaccccuuggacaacagaagaacagaagcuuuuggaacaagcuuugaaaacauacccaguaaauacaccugaaagaugggaaaaaauagcagaagcggugccuggcaggacaaagaaggacugcaugaaacgauacaaggaacuugucgagaugguaaaagcaaagaaagcugcucaagaacaagugcugaaugcaaguagagccaagaaauga

SEQ ID NO: 8418 - RNA, 1866 nt, Artificial Sequence
  derived and/or modified sequence opt1 from DNJC2__Homo_sapiens__CCDS43628.1
augcugcuccugcccagcgccgccgacggccgcgggaccgcgaucacccacgcccugacguccgccagcacccucugccagguggagccggugggccggugguucgaggccuucgugaagcgccggaaccgcaacgccuccgcgagcuuccaggagcuggaggacaagaaggagcuguccgaggagagcgaggacgaggagcuccagcuggaggaguuccccaugcugaagacccucgaccccaaggacuggaagaaccaggaccacuacgccgugcuggggcugggccacguccgguacaaggccacccagcgccagaucaaggccgcgcacaaggccauggugcucaagcaccaccccgacaagcggaaggccgccggggagccgaucaaggagggcgacaacgacuacuucacgugcaucaccaaggccuacgagaugcuguccgaccccgugaagcgccgggcguucaacagcgucgaccccaccuucgacaacuccgugcccagcaaguccgaggccaaggacaacuucuucgagguguucaccccggucuucgagcgcaacagccggugguccaacaagaagaacgugcccaagcugggcgacaugaacagcuccuucgaggacguggacaucuucuacagcuucugguacaacuucgacuccuggcgcgaguucagcuaccucgacgaggaggagaaggagaaggccgagugccgggacgagcgccgguggaucgagaagcagaaccgcgccacgcgggcccagcgcaagaaggaggagaugaaccggauccgcacccuggucgacaacgcguacuccugcgacccccggaucaagaaguucaaggaggaggagaaggccaagaaggaggccgagaagaaggccaaggccgaggcgaagcgcaaggagcaggaggccaaggagaagcagcgccaggccgagcuggaggccgcccggcucgcgaaggagaaggaggaggaggaggugcgccagcaggcccugcuggccaagaaggagaaggacauccagaagaaggccaucaagaaggagcggcagaagcuccgcaacagcugcaagaccuggaaccacuucagcgacaacgaggcggagcgggugaagaugauggaggaggucgagaagcugugcgaccgccuggagcucgccucccugcagugccugaacgagacccucacgagcugcaccaaggagguggggaaggccgcccuggagaagcagaucgaggagaucaacgagcagauccggaaggagaaggaggaggccgaggcgcgcaugcggcaggccuccaagaacaccgagaaguccaccggcgggggcgggaacggcagcaagaacuggagcgaggacgaccugcagcuccugaucaaggccgugaaccuguuccccgccggcacgaacucccgcugggaggucaucgccaacuacaugaacauccacagcuccagcggggugaagcggaccgcgaaggacgugaucggcaaggccaagucccuccagaagcuggacccgcaccagaaggacgacaucaacaagaaggccuucgacaaguucaagaaggagcacggggucgugccccaggccgacaacgccacccccagcgagcgcuucgagggccccuacaccgacuucacgccguggaccaccgaggagcagaagcugcucgagcaggcgcugaagaccuaccccgugaacacgcccgagcggugggagaagaucgccgaggccguccccggccgcaccaagaaggacugcaugaagcgguacaaggagcugguggagauggucaaggccaagaaggcggcccaggagcagguccucaacgccucccgcgccaagaaguga

SEQ ID NO: 8419 - RNA, 1866 nt, Artificial Sequence
  derived and/or modified sequence opt2 from DNJC2__Homo_sapiens__CCDS43628.1
augcuccuccuccccuccgccgccgacggccgcggcaccgccaucacccacgcccucaccuccgccuccacccucugccaggucgagcccgucggccgcugguucgaggccuucgucaagcgccgcaaccgcaacgccuccgccuccuuccaggagcucgaggacaagaaggagcucuccgaggaguccgaggacgaggagcuccagcucgaggaguuccccaugcucaagacccucgaccccaaggacuggaagaaccaggaccacuacgccguccucggccucggccacguccgcuacaaggccacccagcgccagaucaaggccgcccacaaggccaugguccucaagcaccaccccgacaagcgcaaggccgccggcgagcccaucaaggagggcgacaacgacuacuucaccugcaucaccaaggccuacgagaugcucuccgaccccgucaagcgccgcgccuucaacuccgucgaccccaccuucgacaacuccguccccuccaaguccgaggccaaggacaacuucuucgaggucuucacccccgucuucgagcgcaacucccgcugguccaacaagaagaacguccccaagcucggcgacaugaacuccuccuucgaggacgucgacaucuucuacuccuucugguacaacuucgacuccuggcgcgaguucuccuaccucgacgaggaggagaaggagaaggccgagugccgcgacgagcgccgcuggaucgagaagcagaaccgcgccacccgcgcccagcgcaagaaggaggagaugaaccgcauccgcacccucgucgacaacgccuacuccugcgacccccgcaucaagaaguucaaggaggaggagaaggccaagaaggaggccgagaagaaggccaaggccgaggccaagcgcaaggagcaggaggccaaggagaagcagcgccaggccgagcucgaggccgcccgccucgccaaggagaaggaggaggaggagguccgccagcaggcccuccucgccaagaaggagaaggacauccagaagaaggccaucaagaaggagcgccagaagcuccgcaacuccugcaagaccuggaaccacuucuccgacaacgaggccgagcgcgucaagaugauggaggaggucgagaagcucugcgaccgccucgagcucgccucccuccagugccucaacgagacccucaccuccugcaccaaggaggucggcaaggccgcccucgagaagcagaucgaggagaucaacgagcagauccgcaaggagaaggaggaggccgaggcccgcaugcgccaggccuccaagaacaccgagaaguccaccggcggcggcggcaacggcuccaagaacugguccgaggacgaccuccagcuccucaucaaggccgucaaccucuuccccgccggcaccaacucccgcugggaggucaucgccaacuacaugaacauccacuccuccuccggcgucaagcgcaccgccaaggacgucaucggcaaggccaagucccuccagaagcucgacccccaccagaaggacgacaucaacaagaaggccuucgacaaguucaagaaggagcacggcgucgucccccaggccgacaacgccacccccuccgagcgcuucgagggccccuacaccgacuucacccccuggaccaccgaggagcagaagcuccucgagcaggcccucaagaccuaccccgucaacacccccgagcgcugggagaagaucgccgaggccguccccggccgcaccaagaaggacugcaugaagcgcuacaaggagcucgucgagauggucaaggccaagaaggccgcccaggagcagguccucaacgccucccgcgccaagaaguga

SEQ ID NO: 8420 - RNA, 1866 nt, Artificial Sequence
  derived and/or modified sequence opt3 from DNJC2__Homo_sapiens__CCDS43628.1
augcugcuccuucccagcgccgcugacggcagagggaccgcaaucacacacgcccugacuuccgcgucuacguugugccagguggagccugucggaaggugguucgaagcauuuguuaagcggcgcaaccgaaaugccucagcaaguuuccaagaguuagaagauaaaaaggagcugagcgaagaguccgaggacgaggagcuacagcucgaagaguuuccaaugcugaaaacccuugauccgaaggacuggaaaaaccaggaucauuacgccgugcuggguuugggccacguacguuauaaggcuacacagagacaaauuaaggcagcccauaaagcuauggugcucaagcaccaucccgacaaaaggaaggccgcgggggagccuauaaaagaaggagauaaugacuacuucacuuguaucaccaaggcauaugagaugcugucugauccagucaagcggcgcgccuuuaacucgguggaccccacauucgauaauucaguuccuagcaaaagugaagcuaaggacaacuuuuucgagguguuuaccccagucuucgaaagaaauuccagguggucuaacaaaaagaaugugcccaaacugggcgauaugaacagcuccuuugaggacguagacauuuucuacucauuuugguauaauuucgauaguuggcgggaguucagcuaccucgacgaagaggaaaaggagaaagccgaaugccgcgaugagcgaagauggaucgagaagcagaacagggcaacucgggcucagcguaagaaagaagagaugaaucgcauuagaacauuaguugacaacgccuauucuugugauccuaggaucaagaaauuuaaggaagaggaaaaagcgaagaaggaggccgagaaaaaggcaaaagcugaagccaagcggaaagagcaggaagcuaaggagaagcaacgacaggccgagcuggaagcagcccgccuugcuaaagagaaggaagaggaagaggugagacagcaggcguugcuggcuaaaaaggagaaagacauacaaaagaaggccaucaaaaaggaaaggcagaaacuacggaauaguugcaagaccuggaaccacuucucagauaacgaggcugaacgcgucaaaaugauggaggaaguggagaagcucugugacagacuggagcuugccagccugcagugcuugaaugaaacgcucacuuccuguaccaaagagguggguaaggcagcccuggaaaagcaaauugaggaaaucaacgagcagauuaggaaagagaaggaagaggcugaagcccguaugcggcaggcaucuaaaaauacagagaaguccacugggggaggcggcaacgggagcaaaaauuggucggaggaugacuuacagcugcucaucaaggcggucaaccuuuuuccagcuggaaccaauucucgaugggaaguuauagccaacuacaugaauauucacuccucaaguggugugaagagaacagcaaaagauguaaucggcaaggccaaaagccugcaaaaguuggacccgcaucagaaagacgauauuaacaagaaggcuuucgacaaauuuaagaaagagcacgggguggucccccaggccgauaaugcaaccccuuccgaaagguucgagggaccauacacggacuuuacucccuggacaaccgaggaacagaagcuacuggagcaagcucucaaaacuuauccugugaacacaccagaacgcugggagaagaucgccgaagcgguucccggccggaccaagaaagauugcaugaagagauacaaagagcugguggaaauggucaaggccaaaaaggcugcacaggaacaggugcuuaaugccucuagggcuaaaaaguga

SEQ ID NO: 8421 - RNA, 1866 nt, Artificial Sequence
  derived and/or modified sequence opt4 from DNJC2__Homo_sapiens__CCDS43628.1
augcugcugcugcccagcgccgccgacggcagaggcaccgccaucacccacgcccugaccagcgccagcacccugugccagguggagcccgugggcagaugguucgaggccuucgugaagagaagaaacagaaacgccagcgccagcuuccaggagcuggaggacaagaaggagcugagcgaggagagcgaggacgaggagcugcagcuggaggaguuccccaugcugaagacccuggaccccaaggacuggaagaaccaggaccacuacgccgugcugggccugggccacgugagauacaaggccacccagagacagaucaaggccgcccacaaggccauggugcugaagcaccaccccgacaagagaaaggccgccggcgagcccaucaaggagggcgacaacgacuacuucaccugcaucaccaaggccuacgagaugcugagcgaccccgugaagagaagagccuucaacagcguggaccccaccuucgacaacagcgugcccagcaagagcgaggccaaggacaacuucuucgagguguucacccccguguucgagagaaacagcagauggagcaacaagaagaacgugcccaagcugggcgacaugaacagcagcuucgaggacguggacaucuucuacagcuucugguacaacuucgacagcuggagagaguucagcuaccuggacgaggaggagaaggagaaggccgagugcagagacgagagaagauggaucgagaagcagaacagagccaccagagcccagagaaagaaggaggagaugaacagaaucagaacccugguggacaacgccuacagcugcgaccccagaaucaagaaguucaaggaggaggagaaggccaagaaggaggccgagaagaaggccaaggccgaggccaagagaaaggagcaggaggccaaggagaagcagagacaggccgagcuggaggccgccagacuggccaaggagaaggaggaggaggaggugagacagcaggcccugcuggccaagaaggagaaggacauccagaagaaggccaucaagaaggagagacagaagcugagaaacagcugcaagaccuggaaccacuucagcgacaacgaggccgagagagugaagaugauggaggagguggagaagcugugcgacagacuggagcuggccagccugcagugccugaacgagacccugaccagcugcaccaaggaggugggcaaggccgcccuggagaagcagaucgaggagaucaacgagcagaucagaaaggagaaggaggaggccgaggccagaaugagacaggccagcaagaacaccgagaagagcaccggcggcggcggcaacggcagcaagaacuggagcgaggacgaccugcagcugcugaucaaggccgugaaccuguuccccgccggcaccaacagcagaugggaggugaucgccaacuacaugaacauccacagcagcagcggcgugaagagaaccgccaaggacgugaucggcaaggccaagagccugcagaagcuggacccccaccagaaggacgacaucaacaagaaggccuucgacaaguucaagaaggagcacggcguggugccccaggccgacaacgccacccccagcgagagauucgagggccccuacaccgacuucacccccuggaccaccgaggagcagaagcugcuggagcaggcccugaagaccuaccccgugaacacccccgagagaugggagaagaucgccgaggccgugcccggcagaaccaagaaggacugcaugaagagauacaaggagcugguggagauggugaaggccaagaaggccgcccaggagcaggugcugaacgccagcagagccaagaaguga

SEQ ID NO: 8422 - RNA, 1866 nt, Artificial Sequence
  derived and/or modified sequence opt5 from DNJC2__Homo_sapiens__CCDS43628.1
augcugcuccugcccagcgccgcugacggcagagggaccgccaucacacacgcgcuuacguccgcuucuacccugugccagguggagccugucggacggugguucgaagccuuuguuaagcgcagaaaccggaaugccagcgcuuccuuccaagagcucgaagauaaaaaggagcugucugaagagagcgaggacgaagaacuucagcuggaagaguuuccgaugcucaaaacacuggaucccaaggacuggaaaaaccaggaucauuacgccgugcugggccucgggcacgugcgcuauaaggcuacccagagacaaauuaaggccgcgcauaaagccaugguccugaagcaccauccugacaaacggaaggcugccggagagcccaucaaagaaggcgauaaugacuacuucacauguauuaccaaggcuuaugagaugcuuuccgauccugugaagcgcagagccuuuaacucuguugaccccacauucgauaauagcgugccuuccaaaagcgaagcgaaggacaacuuuuucgaggucuuuaccccgguguucgaacggaauagccgcugguccaacaaaaagaauguucccaaacugggggauaugaacagcucuuuugaggacguggacaucuucuacuccuuuugguauaauuucgauagcuggagagaguucucuuaccucgacgaagaggaaaaggagaaagccgaaugccgggaugagcgcagauggauugagaagcagaaccgggcuacgcgcgcccagagaaagaaagaagagaugaaucggaucagaacccuggucgacaacgcuuauuccugugauccucgcaucaagaaauuuaaggaagaggaaaaagccaagaaggaggccgagaaaaaggcuaaagcggaagccaagcggaaagagcaggaagcuaaggagaagcaaagacaggccgagcuugaagccgcucgccuggccaaagagaaggaagaggaagaggugcggcagcaggcgcuccuggcuaaaaaggagaaagacauucaaaagaaggccaucaaaaaggaaagacagaaacugcgcaauagcugcaagacauggaaccacuucuccgauaacgaggccgaacgggugaaaaugauggaggaagucgagaagcucugugacagacuggagcuugcuucucugcagugccucaaugaaacccugacaagcuguaccaaagagguuggaaaggccgcucuugaaaagcaaauugaggaaaucaacgagcagauucgcaaagagaaggaagaggccgaagcgcggaugagacaggccuccaaaaauacggagaagucuacaggcggcgggggaaacggcucuaaaaauugguccgaggaugaccugcagcuccugaucaaggcugugaaccuguuucccgccgggaccaauagccgcugggaagugauugcuaacuacaugaauauccacucuagcuccggagucaagcggacagccaaagaugugaucggcaaggcgaaaucucuccaaaagcuggacccucaucagaaagacgauauuaacaagaaggccuucgacaaauuuaagaaagagcacgggguugugccccaggcugauaaugccaccccgagcgaaagauucgagggaccuuacaccgacuuuacacccuggacgaccgaggagcagaaacuucuggagcaagcucucaagacauauccugucaacacccccgaacggugggagaagaucgccgaagccgugcccggccgcacaaagaaagauugcaugaagagauacaaagagcugguugaaauggugaaggcuaaaaaggcggcccaggagcagguccuuaaugcuucccgggccaaaaaguga

SEQ ID NO: 8423 - protein, 504 aa, Artificial Sequence
  DNJC3__Homo_sapiens__Q13217
MVAPGSVTSRLGSVFPFLLVLVDLQYEGAECGVNADVEKHLELGKKLLAAGQLADALSQFHAAVDGDPDNYIAYYRRATVFLAMGKSKAALPDLTKVIQLKMDFTAARLQRGHLLLKQGKLDEAEDDFKKVLKSNPSENEEKEAQSQLIKSDEMQRLRSQALNAFGSGDYTAAIAFLDKILEVCVWDAELRELRAECFIKEGEPRKAISDLKAASKLKNDNTEAFYKISTLYYQLGDHELSLSEVRECLKLDQDHKRCFAHYKQVKKLNKLIESAEELIRDGRYTDATSKYESVMKTEPSIAEYTVRSKERICHCFSKDEKPVEAIRVCSEVLQMEPDNVNALKDRAEAYLIEEMYDEAIQDYETAQEHNENDQQIREGLEKAQRLLKQSQKRDYYKILGVKRNAKKQEIIKAYRKLALQWHPDNFQNEEEKKKAEKKFIDIAAAKEVLSDPEMRKKFDDGEDPLDAESQQGGGGNPFHRSWNSWQGFNPFSSGGPFRFKFHFN

SEQ ID NO: 8424 - RNA, 1515 nt, Artificial Sequence
  DNJC3__Homo_sapiens__AAC50502
augguggcccccggcuccgugaccagccggcugggcucgguauuccccuuccugcuaguccugguggaucugcaguacgaaggugcugaauguggaguaaaugcagauguugagaaacaucuugaauugggcaagaaauuacuugcagcuggacagcuagcugaugcuuuaucucaguuucaugcugccguagauggugacccugauaacuauauugcuuauuaucggagggcuacugucuuuuuagcuaugggcaaaucaaaagcugcacuuccugauuuaacuaaagugauucaauugaagauggacuucacugcagcaagauuacagagaggucacuuauuacucaaacaaggaaaacuugaugaagcagaagaugauuuuaaaaaagugcucaaaucuaauccaagugaaaaugaagaaaaggaagcacagucucaacuuauaaaaucugaugaaaugcagcguuugcguucacaagcacuuaacgcuuuuggaaguggagauuauacugcugcuauagccuuccuugauaagauuuuagagguuuguguuugggaugcagaacuacgggaacuucgagcugaauguuuuauaaaagaaggagaaccuaggaaagcuauaagugacuuaaaagcugcgucaaaguugaagaaugauaauacugaagcguuuuauaaaauaagcacacuguacuaccaacuaggagaccacgaacugucccucagugaaguucgggaaugucuuaaacuugaccaggaucauaaaagguguuuugcacacuauaaacaaguaaagaaacuuaauaagcugauugagucagcugaagagcucaucagagauggcagauacacagaugcuaccagcaaauaugaaucugucaugaaaacagagccaagcauugcugaauauacaguucguucaaaggagaggauuugccacugcuuuucuaaggacgagaagccuguugaagcuauuaggguuuguucugaaguuuuacagauggaaccugacaaugugaaugcccugaaagaucgagcugaggccuauuugauagaggaaauguaugaugaagcuauucaggauuaugaaacugcucaggaacacaaugaaaaugaucagcagauucgagaaggucuagagaaagcacaaagauuauugaaacagucgcagaaacgagauuauuauaaaaucuugggaguaaaaagaaaugccaaaaagcaagaaauuauuaaagcauaccgaaaauuagcacugcaguggcacccagauaacuuccagaaugaagaagaaaagaaaaaagcugagaaaaaguucauugauauagcagcugcuaaagaaguccucucugauccagaaaugagaaagaaguuugacgacggagaagauccuuuggaugcagagagccagcaaggaggcggcggcaacccuuuccacagaagcuggaacucauggcaaggguucaaucccuucagcucaggcggaccauuuagauuuaaauuccacuucaauuaa

SEQ ID NO: 8425 - RNA, 1515 nt, Artificial Sequence
  derived and/or modified sequence opt1 from DNJC3__Homo_sapiens__AAC50502
augguggcccccggcagcgucaccucccgccuggggagcguguucccguuccuccuggugcuggucgaccuccaguacgagggcgccgagugcggggugaacgcggacguggagaagcaccuggagcugggcaagaagcuccuggccgccgggcagcuggccgacgcccucucccaguuccacgcggccgucgacggcgaccccgacaacuacaucgccuacuaccggcgcgccaccguguuccuggcgaugggcaagagcaaggccgcccugcccgaccucacgaaggugauccagcugaagauggacuucaccgccgcccggcugcagcgcgggcaccuccugcugaagcagggcaagcucgacgaggcggaggacgacuucaagaagguccugaaguccaaccccagcgagaacgaggagaaggaggcccagucccagcugaucaagagcgacgagaugcagcggcuccgcucccaggcccugaacgccuucgggagcggcgacuacaccgccgcgaucgccuuccuggacaagauccucgaggugugcgugugggacgccgagcugcgggagcugcgcgccgagugcuucaucaaggagggggagccgcggaaggccaucuccgaccucaaggcggccagcaagcugaagaacgacaacaccgaggccuucuacaagaucuccacgcuguacuaccagcucggcgaccacgagcugagccuguccgagguccgcgagugccucaagcuggaccaggaccacaagcggugcuucgcccacuacaagcaggucaagaagcugaacaagcucaucgagagcgccgaggagcugauccgcgacggccgguacaccgacgcgaccuccaaguacgagagcgugaugaagaccgagcccuccaucgccgaguacacggugcgcagcaaggagcggaucugccacugcuucagcaaggacgagaagcccguggaggccauccgcgugugcuccgagguccugcagauggagcccgacaacgugaacgcccucaaggaccgggcggaggccuaccugaucgaggagauguacgacgaggccauccaggacuacgagaccgcccaggagcacaacgagaacgaccagcagauccgcgaggggcuggagaaggcccagcggcuccugaagcagagccagaagcgcgacuacuacaagauccugggcgugaagcggaacgcgaagaagcaggagaucaucaaggccuaccgcaagcucgcccugcaguggcacccggacaacuuccagaacgaggaggagaagaagaaggccgagaagaaguucaucgacaucgccgcggccaaggagguccuguccgaccccgagaugcgcaagaaguucgacgacggggaggacccccucgacgccgagagccagcagggcggcgggggcaaccccuuccaccgguccuggaacagcuggcagggguucaacccguucuccagcggcgggcccuuccgcuucaaguuccacuucaacuga

SEQ ID NO: 8426 - RNA, 1515 nt, Artificial Sequence
  derived and/or modified sequence opt2 from DNJC3__Homo_sapiens__AAC50502
auggucgcccccggcuccgucaccucccgccucggcuccgucuuccccuuccuccucguccucgucgaccuccaguacgagggcgccgagugcggcgucaacgccgacgucgagaagcaccucgagcucggcaagaagcuccucgccgccggccagcucgccgacgcccucucccaguuccacgccgccgucgacggcgaccccgacaacuacaucgccuacuaccgccgcgccaccgucuuccucgccaugggcaaguccaaggccgcccuccccgaccucaccaaggucauccagcucaagauggacuucaccgccgcccgccuccagcgcggccaccuccuccucaagcagggcaagcucgacgaggccgaggacgacuucaagaagguccucaaguccaaccccuccgagaacgaggagaaggaggcccagucccagcucaucaaguccgacgagaugcagcgccuccgcucccaggcccucaacgccuucggcuccggcgacuacaccgccgccaucgccuuccucgacaagauccucgaggucugcgucugggacgccgagcuccgcgagcuccgcgccgagugcuucaucaaggagggcgagccccgcaaggccaucuccgaccucaaggccgccuccaagcucaagaacgacaacaccgaggccuucuacaagaucuccacccucuacuaccagcucggcgaccacgagcucucccucuccgagguccgcgagugccucaagcucgaccaggaccacaagcgcugcuucgcccacuacaagcaggucaagaagcucaacaagcucaucgaguccgccgaggagcucauccgcgacggccgcuacaccgacgccaccuccaaguacgaguccgucaugaagaccgagcccuccaucgccgaguacaccguccgcuccaaggagcgcaucugccacugcuucuccaaggacgagaagcccgucgaggccauccgcgucugcuccgagguccuccagauggagcccgacaacgucaacgcccucaaggaccgcgccgaggccuaccucaucgaggagauguacgacgaggccauccaggacuacgagaccgcccaggagcacaacgagaacgaccagcagauccgcgagggccucgagaaggcccagcgccuccucaagcagucccagaagcgcgacuacuacaagauccucggcgucaagcgcaacgccaagaagcaggagaucaucaaggccuaccgcaagcucgcccuccaguggcaccccgacaacuuccagaacgaggaggagaagaagaaggccgagaagaaguucaucgacaucgccgccgccaaggagguccucuccgaccccgagaugcgcaagaaguucgacgacggcgaggacccccucgacgccgagucccagcagggcggcggcggcaaccccuuccaccgcuccuggaacuccuggcagggcuucaaccccuucuccuccggcggccccuuccgcuucaaguuccacuucaacuga

SEQ ID NO: 8427 - RNA, 1515 nt, Artificial Sequence
  derived and/or modified sequence opt3 from DNJC3__Homo_sapiens__AAC50502
augguggcccccggcagcgucaccuccagacuggggucuguuuucccuuuucuccuugugcugguagacuugcaguacgagggagcugaaugcggugugaacgcagaugucgagaagcacuuagaacugggcaaaaagcuacucgccgcggggcaacuggcugacgcccuuucacaguuccaugcagccguggauggagacccagauaauuauaucgcuuacuauaggcgggcaacaguuuuucuggccaugggcaaaaguaaggcugccuugccggaccucacuaaagugauucagcugaagauggauuucacggcggcacgccugcagcgaggucaccucuuacugaagcaagggaaacuugacgaggccgaagaugacuuuaagaaaguccucaagagcaaccccuccgagaaugaggaaaaagaggcucagucucagcugauaaagucggaugaaaugcagcgucuaagaucacaagcccucaacgcauucggaagcggcgacuacaccgcugccaucgcguuucuggauaagauucuugagguguguguaugggacgccgagcugagggaauugcgggcagagugcuucaucaaagaaggcgagccucgcaaggcuauuagugaccucaaagccgcuuccaagcugaaaaaugauaacacagaagccuuuuauaagaucucuacuuuauacuaucagcugggggaccaugagcucagccuuuccgagguuagagaaugucugaaauuggaucaggaccacaagaggugcuucgcacauuacaaacaggugaaaaagcuaaauaaacugauagagucagccgaagaguugauccgggauggacgcuacaccgacgcuacaaguaaguaugaaagcgucaugaaaaccgagccaucuauugcggaguacacugugcgauccaaggaaagaaucugucacugcuuuucaaaggaugagaaacccguggaagcaauuagggucuguagcgagguucugcaaauggaaccugacaacgugaaugcccuuaaggaucgggcugaggccuaucugaucgaggaaauguacgacgaggcaauacaggauuaugaaacagcccaggagcacaacgagaaugaccaacagauucgugaagguuuggagaaagcucagcgccuccugaagcagagucaaaagagagacuacuauaagaucuuaggcguaaagaggaacgccaaaaagcaggaaauuaucaaagcauaccggaagcuggcgcuacaguggcauccagauaauuuccagaacgaggaagagaaaaagaaggcugagaaaaaguuuaucgacauugccgcagccaaagaagugcucucugaucccgagaugcgaaagaaauucgacgauggggaagacccucuggaugcugagucccaacagggaggcggugggaauccauuccaccgcagcuggaacucguggcagggauuuaacccguucucuuccggcggccccuuuagauucaaguuucauuucaauuga

SEQ ID NO: 8428 - RNA, 1515 nt, Artificial Sequence
  derived and/or modified sequence opt4 from DNJC3__Homo_sapiens__AAC50502
augguggcccccggcagcgugaccagcagacugggcagcguguuccccuuccugcuggugcugguggaccugcaguacgagggcgccgagugcggcgugaacgccgacguggagaagcaccuggagcugggcaagaagcugcuggccgccggccagcuggccgacgcccugagccaguuccacgccgccguggacggcgaccccgacaacuacaucgccuacuacagaagagccaccguguuccuggccaugggcaagagcaaggccgcccugcccgaccugaccaaggugauccagcugaagauggacuucaccgccgccagacugcagagaggccaccugcugcugaagcagggcaagcuggacgaggccgaggacgacuucaagaaggugcugaagagcaaccccagcgagaacgaggagaaggaggcccagagccagcugaucaagagcgacgagaugcagagacugagaagccaggcccugaacgccuucggcagcggcgacuacaccgccgccaucgccuuccuggacaagauccuggaggugugcgugugggacgccgagcugagagagcugagagccgagugcuucaucaaggagggcgagcccagaaaggccaucagcgaccugaaggccgccagcaagcugaagaacgacaacaccgaggccuucuacaagaucagcacccuguacuaccagcugggcgaccacgagcugagccugagcgaggugagagagugccugaagcuggaccaggaccacaagagaugcuucgcccacuacaagcaggugaagaagcugaacaagcugaucgagagcgccgaggagcugaucagagacggcagauacaccgacgccaccagcaaguacgagagcgugaugaagaccgagcccagcaucgccgaguacaccgugagaagcaaggagagaaucugccacugcuucagcaaggacgagaagcccguggaggccaucagagugugcagcgaggugcugcagauggagcccgacaacgugaacgcccugaaggacagagccgaggccuaccugaucgaggagauguacgacgaggccauccaggacuacgagaccgcccaggagcacaacgagaacgaccagcagaucagagagggccuggagaaggcccagagacugcugaagcagagccagaagagagacuacuacaagauccugggcgugaagagaaacgccaagaagcaggagaucaucaaggccuacagaaagcuggcccugcaguggcaccccgacaacuuccagaacgaggaggagaagaagaaggccgagaagaaguucaucgacaucgccgccgccaaggaggugcugagcgaccccgagaugagaaagaaguucgacgacggcgaggacccccuggacgccgagagccagcagggcggcggcggcaaccccuuccacagaagcuggaacagcuggcagggcuucaaccccuucagcagcggcggccccuucagauucaaguuccacuucaacuga

SEQ ID NO: 8429 - RNA, 1515 nt, Artificial Sequence
  derived and/or modified sequence opt5 from DNJC3__Homo_sapiens__AAC50502
augguggcccccggcagcgucaccuccagacuggggucuguuuucccuuuucuccuggugcuuguggaccugcaguacgagggagcugaaugcggcgucaacgccgauguggagaagcaccucgaacuggggaaaaagcugcuugcggcuggacaacucgccgacgcccugagccaguuccaugcugccguugauggcgacccggauaauuauaucgcuuacuaucggcgcgccacaguguuucuggcgauggggaaauccaaggccgcucuccccgaccugacgaaagucauucagcuuaagauggauuucaccgccgcuagacugcagcggggacaccuccugcuuaagcaaggcaaacuggacgaggccgaagaugacuuuaagaaagugcucaagucuaacccuagcgagaaugaggaaaaagaggcgcagucccagcugaucaagucugaugaaaugcagcgccugagaagccaagcccucaacgcuuucggcuccggggacuacacagccgcuauugccuuucuggauaagauccuugagguuugugugugggacgccgagcugcgggaacuccgcgcugagugcuucauuaaagaaggagagcccagaaaggcgaucagcgaccugaaagccgcuucuaaacuuaaaaaugauaacaccgaagccuuuuauaagaucuccacacuguacuaucagcucggcgaccaugagcugagccugucugagguccgggaaugucucaaacuggaucaggaccacaagcgcugcuucgcccauuacaaacaggugaagaaacuuaauaagcugauugaguccgcugaggaacucaucagagaugggcgguacaccgacgccacaagcaaguaugaaucugugaugaaaaccgagccuuccauugcggaguacacgguccgcagcaaggaaagaaucugucacugcuuuuccaaggaugagaaacccguugaagcuauucggguguguucugaggugcugcaaauggaaccugacaacgucaaugcccuuaaggaucgcgccgaggcuuaucugaucgaggaaauguacgacgaggccauucaggauuaugaaaccgcucaggagcacaacgagaaugaccaacagaucagagaaggacucgagaaagcccagcggcugcugaagcagagccaaaagagagacuacuauaagauccucggcgugaagcgcaacgcgaaaaagcaggaaauuaucaaagccuaccggaagcuggcccuucaguggcauccggauaauuuccagaacgaggaagagaaaaagaaggcugagaaaaaguuuauugacaucgcugccgcgaaagaaguucuguccgaucccgagaugagaaagaaauucgacgauggggaagacccucucgaugccgagagccaacagggaggcggcgggaaucccuuccaccgcucuuggaacuccuggcagggauuuaacccuuucagcucuggcgggcccuuucgguucaaguuucauuucaauuga

SEQ ID NO: 8430 - protein, 241 aa, Artificial Sequence
  DNJC4__Homo_sapiens__Q9NNZ3
MPPLLPLRLCRLWPRNPPSRLLGAAAGQRSRPSTYYELLGVHPGASTEEVKRAFFSKSKELHPDRDPGNPSLHSRFVELSEAYRVLSREQSRRSYDDQLRSGSPPKSPRTTVHDKSAHQTHSSWTPPNAQYWSQFHSVRPQGPQLRQQQHKQNKQVLGYCLLLMLAGMGLHYIAFRKVKQMHLNFMDEKDRIITAFYNEARARARANRGILQQERQRLGQRQPPPSEPTQGPEIVPRGAGP

SEQ ID NO: 8431 - RNA, 726 nt, Artificial Sequence
  DNJC4__Homo_sapiens__AAF97845
augccgcccuuacugccccugcgccugugccggcuguggccccgcaacccucccucccggcuccucggagcggccgccgggcagcgguccagacccaguacuuauuaugaacuguugggggugcauccuggugccagcacugaggaaguuaaacgagcuuucuucuccaaguccaaagagcugcacccagaccgggacccugggaacccaagccugcacagccgcuuuguggagcugagcgaggcauaccgugugcucagccgugagcagagccgccgcagcuaugaugaccagcuccgcucagguagucccccaaagucuccacgaaccacaguccaugacaagucugcccaccaaacacacagcuccuggacaccccccaacgcacaguacuggucccaguuucacagcgugaggccacaggggccccaguugaggcagcagcaacacaaacaaaacaaacaagugcugggguacugccuccuccucaugcuggcgggcaugggccugcacuacauugccuucaggaaggugaagcagaugcaccuuaacuucauggaugaaaaggaucggaucaucacagccuucuacaacgaagcccgggcacgggccagggccaacagaggcauccuucagcaggagcgacaacggcuagggcagcggcagccgccaccauccgagccaacccaaggccccgagaucgugccccggggcgccggccccuga

SEQ ID NO: 8432 - RNA, 726 nt, Artificial Sequence
  derived and/or modified sequence opt1 from DNJC4__Homo_sapiens__AAF97845
augcccccgcugcucccccugcgccugugccggcucuggccccgcaacccgcccagccggcugcugggcgccgccgcggggcagcgcucccggcccagcaccuacuacgagcuccugggcgugcaccccggggccuccaccgaggaggucaagcgcgccuucuucagcaaguccaaggagcugcaccccgaccgggacccgggcaaccccagccuccacucccgcuucguggagcugagcgaggccuaccgggugcugucccgcgagcagagccggcgcuccuacgacgaccagcuccggagcggguccccgcccaagagcccccgcacgaccguccacgacaaguccgcccaccagacccacagcuccuggaccccgcccaacgcgcaguacuggagccaguuccacuccgugcggccccagggcccccagcugcgccagcagcagcacaagcagaacaagcagguccugggcuacugccuccugcugaugcucgccgggaugggccugcacuacaucgccuuccggaaggugaagcagaugcaccugaacuucauggacgagaaggaccgcaucaucacggccuucuacaacgaggcgcgggcccgcgcccgggccaaccgcgggauccuccagcaggagcgccagcggcugggccagcgccagcccccgcccagcgagcccacccaggggcccgagaucgugccccggggcgccggccccuga

SEQ ID NO: 8433 - RNA, 726 nt, Artificial Sequence
  derived and/or modified sequence opt2 from DNJC4__Homo_sapiens__AAF97845
augcccccccuccucccccuccgccucugccgccucuggccccgcaacccccccucccgccuccucggcgccgccgccggccagcgcucccgccccuccaccuacuacgagcuccucggcguccaccccggcgccuccaccgaggaggucaagcgcgccuucuucuccaaguccaaggagcuccaccccgaccgcgaccccggcaaccccucccuccacucccgcuucgucgagcucuccgaggccuaccgcguccucucccgcgagcagucccgccgcuccuacgacgaccagcuccgcuccggcuccccccccaaguccccccgcaccaccguccacgacaaguccgcccaccagacccacuccuccuggaccccccccaacgcccaguacuggucccaguuccacuccguccgcccccagggcccccagcuccgccagcagcagcacaagcagaacaagcagguccucggcuacugccuccuccucaugcucgccggcaugggccuccacuacaucgccuuccgcaaggucaagcagaugcaccucaacuucauggacgagaaggaccgcaucaucaccgccuucuacaacgaggcccgcgcccgcgcccgcgccaaccgcggcauccuccagcaggagcgccagcgccucggccagcgccagcccccccccuccgagcccacccagggccccgagaucgucccccgcggcgccggccccuga

SEQ ID NO: 8434 - RNA, 726 nt, Artificial Sequence
  derived and/or modified sequence opt3 from DNJC4__Homo_sapiens__AAF97845
augcccccucugcucccacuuaggcugugcagguuguggccgcggaaucccccuagccgcuuacugggcgccgcugcagggcagcgaucccguccaucuaccuacuaugagcuacucggagugcaccccggugccucaacagaagaggucaagagagcguucuuuaguaaaagcaaggaacugcauccugacagggauccaggcaaccccucccuucacucucgguucguugagcugucggaggcuuaccgcguguugucaagagaacaaagcaggcggaguuaugacgaucagcuccgcuccgggucuccuccaaaaagcccgcgaacuacgguacaugacaaguccgcccaccagacccauucaaguuggacacccccuaacgcacaguacuggagccaauuucacucugugagaccacagggaccccagcugaggcagcaacagcacaaacagaauaagcagguccugggcuauugucucuuacugaugcuugccgguaugggguugcauuacaucgcuuuccggaaggugaaacaaaugcaccugaacuuuauggaugagaaggaccguauuauaacugcauucuauaaugaagcccgcgcuagagccagggcgaaccggggaauccuacagcaggagcgacaacgccucggccagagacagccuccacccuccgaaccgacccagggcccugagauuguucccagaggggcaggaccauga

SEQ ID NO: 8435 - RNA, 726 nt, Artificial Sequence
  derived and/or modified sequence opt4 from DNJC4__Homo_sapiens__AAF97845
augcccccccugcugccccugagacugugcagacuguggcccagaaacccccccagcagacugcugggcgccgccgccggccagagaagcagacccagcaccuacuacgagcugcugggcgugcaccccggcgccagcaccgaggaggugaagagagccuucuucagcaagagcaaggagcugcaccccgacagagaccccggcaaccccagccugcacagcagauucguggagcugagcgaggccuacagagugcugagcagagagcagagcagaagaagcuacgacgaccagcugagaagcggcagcccccccaagagccccagaaccaccgugcacgacaagagcgcccaccagacccacagcagcuggaccccccccaacgcccaguacuggagccaguuccacagcgugagaccccagggcccccagcugagacagcagcagcacaagcagaacaagcaggugcugggcuacugccugcugcugaugcuggccggcaugggccugcacuacaucgccuucagaaaggugaagcagaugcaccugaacuucauggacgagaaggacagaaucaucaccgccuucuacaacgaggccagagccagagccagagccaacagaggcauccugcagcaggagagacagagacugggccagagacagcccccccccagcgagcccacccagggccccgagaucgugcccagaggcgccggccccuga

SEQ ID NO: 8436 - RNA, 726 nt, Artificial Sequence
  derived and/or modified sequence opt5 from DNJC4__Homo_sapiens__AAF97845
augcccccucugcucccgcugagacuuugccggcuguggccccgcaacccucccagcagacuccugggcgccgcugccgggcagcggucccgcccuucuaccuacuaugagcuucugggagugcaccccggcgcgagcacagaagaggucaagagagcuuucuuuuccaaaucuaaggaacuccauccugaccgggauccggggaaucccagccugcacucccgcuucguugagcugucugaagccuacagagugcucagccgggagcaaucccgcagaagcuaugacgaucagcugcggucuggauccccucccaaaagcccucgcacgaccgugcaugacaagucugcccaccagacacauuccagcuggacacccccgaacgcucaguacuggucucaauuucacuccgucagaccucagggcccccagcuucggcagcaacagcacaaacagaauaaacaggugcugggguauugucuccugcuuaugcuggccggaaugggccuccauuacaucgcuuuccgcaagguuaagcaaaugcaccugaacuuuauggaugagaaggacagaauuaucaccgccuucuauaaugaagcgcgggccagagcucgcgccaaccggggcauucugcagcaggagagacaacgccucgggcagcggcagccuccucccagcgaacccacccagggaccggagaucgugcccagaggcgcugggccuuga

SEQ ID NO: 8437 - protein, 198 aa, Artificial Sequence
  DNJC5__Homo_sapiens__Q9H3Z4
MADQRQRSLSTSGESLYHVLGLDKNATSDDIKKSYRKLALKYHPDKNPDNPEAADKFKEINNAHAILTDATKRNIYDKYGSLGLYVAEQFGEENVNTYFVLSSWWAKALFVFCGLLTCCYCCCCLCCCFNCCCGKCKPKAPEGEETEFYVSPEDLEAQLQSDEREATDTPIVIQPASATETTQLTADSHPSYHTDGFN

SEQ ID NO: 8438 - RNA, 597 nt, Artificial Sequence
  DNJC5__Homo_sapiens__AAH53642
auggcagaccagagacagcgcucacugucuaccucuggggagucauuguaccacguccuuggguuggacaagaacgcaaccucagaugacauuaaaaaguccuaucggaagcuugccuugaaauaucaccccgacaagaaccccgacaacccggaggccgcggacaaguuuaaggagaucaacaacgcgcacgccauccucacggacgccacaaaaaggaacaucuacgacaaguacggcucgcugggucucuacguggccgagcaguuuggggaagagaacgugaacaccuacuucgugcuguccagcuggugggccaaggcccuguuugucuucugcggccuccucacgugcugcuacugcugcugcugucugugcugcugcuucaacugcugcugcgggaaguguaagcccaaggcgccugaaggcgaggagacggaguucuacgugucccccgaggaucuggaggcacagcugcagucugacgagagggaggccacagacacgccgaucgucauacagccggcauccgccaccgagaccacccagcucacagccgacucccaccccagcuaccacacugacggguucaacuaa

SEQ ID NO: 8439 - RNA, 597 nt, Artificial Sequence
  derived and/or modified sequence opt1 from DNJC5__Homo_sapiens__AAH53642
auggccgaccagcgccagcggagccuguccaccagcggcgagucccucuaccacgugcuggggcuggacaagaacgccaccagcgacgacaucaagaaguccuaccgcaagcucgcgcugaaguaccaccccgacaagaacccggacaaccccgaggccgccgacaaguucaaggagaucaacaacgcccacgccauccugacggacgcgaccaagcggaacaucuacgacaaguacggcagccucgggcuguacgucgccgagcaguucggcgaggagaacgugaacaccuacuucgugcuguccagcuggugggccaaggcccucuucgucuucugcgggcugcugaccugcugcuacugcugcugcugccucugcugcugcuucaacugcugcugcggcaagugcaagcccaaggcgcccgagggcgaggagacggaguucuacguguccccggaggaccuggaggcccagcugcagagcgacgagcgcgaggccaccgacacccccaucgugauccagcccgccuccgccaccgagacgacccagcucaccgcggacagccaccccuccuaccacaccgacggguucaacuga

SEQ ID NO: 8440 - RNA, 597 nt, Artificial Sequence
  derived and/or modified sequence opt2 from DNJC5__Homo_sapiens__AAH53642
auggccgaccagcgccagcgcucccucuccaccuccggcgagucccucuaccacguccucggccucgacaagaacgccaccuccgacgacaucaagaaguccuaccgcaagcucgcccucaaguaccaccccgacaagaaccccgacaaccccgaggccgccgacaaguucaaggagaucaacaacgcccacgccauccucaccgacgccaccaagcgcaacaucuacgacaaguacggcucccucggccucuacgucgccgagcaguucggcgaggagaacgucaacaccuacuucguccucuccuccuggugggccaaggcccucuucgucuucugcggccuccucaccugcugcuacugcugcugcugccucugcugcugcuucaacugcugcugcggcaagugcaagcccaaggcccccgagggcgaggagaccgaguucuacgucucccccgaggaccucgaggcccagcuccaguccgacgagcgcgaggccaccgacacccccaucgucauccagcccgccuccgccaccgagaccacccagcucaccgccgacucccaccccuccuaccacaccgacggcuucaacuga

SEQ ID NO: 8441 - RNA, 597 nt, Artificial Sequence
  derived and/or modified sequence opt3 from DNJC5__Homo_sapiens__AAH53642
auggccgaccagagacaaaggagccuguccaccucuggcgagucacucuaccacgugcuugggcuggauaagaacgcuacaagugacgauaucaaaaagagcuaucggaaauuggcauuaaaguaccaucccgacaaaaauccugauaacccagaagccgcggacaaguucaaggagauuaauaacgcucacgccauacugacugaugcaacgaaacgcaauaucuaugacaaguacggaucccuaggucucuaugucgccgaacaguuuggcgaggaaaacguuaauaccuacuucgugcugucuucguggugggcuaaagcacuuuuuguauucugcgggcuguugacauguugcuauuguugcuguugccucuguugcuguuuuaacugcuguugcggaaagugcaaaccgaaggcccccgagggcgaggaaacugaguucuacgugucaccugaagaucuggaggcucagcugcagagcgacgagcgagaagccaccgauacaccaauugucauccaacccgcgagugcaaccgagacuacacagcucaccgccgacucccauccuucuuaccacacggaugguuuuaauuga

SEQ ID NO: 8442 - RNA, 597 nt, Artificial Sequence
  derived and/or modified sequence opt4 from DNJC5__Homo_sapiens__AAH53642
auggccgaccagagacagagaagccugagcaccagcggcgagagccuguaccacgugcugggccuggacaagaacgccaccagcgacgacaucaagaagagcuacagaaagcuggcccugaaguaccaccccgacaagaaccccgacaaccccgaggccgccgacaaguucaaggagaucaacaacgcccacgccauccugaccgacgccaccaagagaaacaucuacgacaaguacggcagccugggccuguacguggccgagcaguucggcgaggagaacgugaacaccuacuucgugcugagcagcuggugggccaaggcccuguucguguucugcggccugcugaccugcugcuacugcugcugcugccugugcugcugcuucaacugcugcugcggcaagugcaagcccaaggcccccgagggcgaggagaccgaguucuacgugagccccgaggaccuggaggcccagcugcagagcgacgagagagaggccaccgacacccccaucgugauccagcccgccagcgccaccgagaccacccagcugaccgccgacagccaccccagcuaccacaccgacggcuucaacuga

SEQ ID NO: 8443 - RNA, 597 nt, Artificial Sequence
  derived and/or modified sequence opt5 from DNJC5__Homo_sapiens__AAH53642
auggccgaccagagacaacggagccuguccaccucuggcgagagccucuaccacgugcuggggcuugauaagaacgcuacauccgacgauaucaaaaagucuuaucgcaaacuggcccucaaguaccaucccgacaaaaauccugauaacccggaagcggcugacaaguucaaggagauuaauaacgcccacgccauccugacggaugcuaccaaaagaaauauuuaugacaaguacggaagccuuggccuguaugucgccgaacaguuuggggaggaaaacguuaauacauacuucgugcucuccucuuggugggcuaaagcccuguuuguguucugcggacugcucaccuguugcuauuguugcuguugccuguguugcuguuuuaacugcuguugcggcaagugcaaacccaaggcgccugagggggaggaaacagaguucuacgucagccccgaagaucuugaggcccagcugcaguccgacgagcgggaagcuaccgauacaccuaucgugauucaacccgccagcgcuaccgagacgacccagcucacagccgacucucauccuuccuaccacaccgauggauuuaauuga

SEQ ID NO: 8444 - protein, 494 aa, Artificial Sequence
  DNJC7__Homo_sapiens__Q99615
MAAAAECDVVMAATEPELLDDQEAKREAETFKEQGNAYYAKKDYNEAYNYYTKAIDMCPKNASYYGNRAATLMMLGRFREALGDAQQSVRLDDSFVRGHLREGKCHLSLGNAMAACRSFQRALELDHKNAQAQQEFKNANAVMEYEKIAETDFEKRDFRKVVFCMDRALEFAPACHRFKILKAECLAMLGRYPEAQSVASDILRMDSTNADALYVRGLCLYYEDCIEKAVQFFVQALRMAPDHEKACIACRNAKALKAKKEDGNKAFKEGNYKLAYELYTEALGIDPNNIKTNAKLYCNRGTVNSKLRKLDDAIEDCTNAVKLDDTYIKAYLRRAQCYMDTEQYEEAVRDYEKVYQTEKTKEHKQLLKNAQLELKKSKRKDYYKILGVDKNASEDEIKKAYRKRALMHHPDRHSGASAEVQKEEEKKFKEVGEAFTILSDPKKKTRYDSGQDLDEEGMNMGDFDPNNIFKAFFGGPGGFSFEASGPGNFFFQFG

SEQ ID NO: 8445 - RNA, 1485 nt, Artificial Sequence
  DNJC7__Homo_sapiens__AAH11837
auggcggcugccgcggagugcgaugugguaauggcggcgaccgagccggagcugcucgacgaccaagaggcgaagagggaagcagagacuuucaaggaacaaggaaaugcauacuaugccaagaaagauuacaaugaagcuuauaauuauuauacaaaagccauagauauguguccuaaaaaugcuagcuauuaugguaaucgagcagccaccuugaugaugcuuggaagguuccgggaagcucuuggagaugcacaacagucagugagguuggaugacaguuuuguccggggacaucuacgagagggcaagugccaccucucucuggggaaugccauggcagcaugucgcagcuuccagagagcccuagaacuggaucauaaaaaugcucaggcacaacaagaguucaagaaugcuaaugcagucauggaauaugagaaaauagcagaaacagauuuugagaagcgagauuuucggaagguuguuuucugcauggaccgugcccuagaauuugccccugccugccaucgcuucaaaauccucaaggcagaauguuuagcaaugcugggucguuauccagaagcacagucuguggcuagugacauucuacgaauggauuccaccaaugcagaugcucuguauguacgaggucuuugccuuuauuacgaagauuguauugagaaggcaguucaguuuuucguacaggcucucaggauggcuccugaccacgagaaggccugcauugccugcagaaaugccaaagcacucaaagcaaagaaagaagaugggaauaaagcauuuaaggaaggaaauuacaaacuagcauaugaacuguacacagaagcccuggggauagaccccaacaauauaaaaacaaaugcuaaacucuacuguaaucgggguacgguuaauuccaagcuuaggaaacuagaugaugcaauagaagacugcacaaaugcagugaagcuugaugacacuuacauaaaagccuacuugagaagagcucaguguuacauggacacagaacaguaugaagaagcaguacgagacuaugaaaaaguauaccagacagagaaaacaaaagaacacaaacagcuccuaaaaaaugcgcagcuggaacugaagaagaguaagaggaaagauuacuacaagauucuaggaguggacaagaaugccucugaggacgagaucaagaaagcuuaucggaaacgggccuugaugcaccauccagaucggcauaguggagccagugcugagguucagaaggaggaggagaagaaguucaaggaaguuggagaggccuuuacuauccucucugaucccaagaaaaagacucgcuaugacaguggacaggaccuagaugaggagggcaugaauaugggugauuuugauccaaacaauaucuucaaggcauucuuuggcgguccuggcggcuucagcuuugaagcaucugguccagggaauuucuuuuuucaauuuggcuaa

SEQ ID NO: 8446 - RNA, 1485 nt, Artificial Sequence
  derived and/or modified sequence opt1 from DNJC7__Homo_sapiens__AAH11837
auggccgccgcggccgagugcgacguggucauggccgccaccgagcccgagcugcucgacgaccaggaggccaagcgcgaggcggagaccuucaaggagcagggcaacgccuacuacgccaagaaggacuacaacgaggccuacaacuacuacacgaaggcgaucgacaugugcccgaagaacgccagcuacuacgggaaccgggccgccacccugaugaugcugggccgcuuccgggaggcccucggggacgcgcagcaguccgugcgccuggacgacagcuucgugcggggccaccuccgcgaggggaagugccaccugucccugggcaacgccauggccgccugccggagcuuccagcgcgcccuggagcucgaccacaagaacgcgcaggcccagcaggaguucaagaacgccaacgccgucauggaguacgagaagaucgccgagaccgacuucgagaagcgggacuuccgcaaggugguguucugcauggaccgggcgcuggaguucgcccccgccugccaccgcuucaagauccugaaggccgagugccucgccaugcugggccgguaccccgaggcgcaguccgucgccagcgacauccugcgcauggacuccaccaacgccgacgcccucuacgugcgggggcugugccuguacuacgaggacugcaucgagaaggcggugcaguucuucguccaggcccuccgcauggcccccgaccacgagaaggccugcaucgccugccggaacgcgaaggcccugaaggccaagaaggaggacggcaacaaggccuucaaggaggggaacuacaagcuggccuacgagcucuacacggaggcgcugggcaucgacccgaacaacaucaagaccaacgccaagcuguacugcaaccgcgggaccgugaacagcaagcuccggaagcuggacgacgccaucgaggacugcaccaacgccgugaagcuggacgacacguacaucaaggccuaccuccgccgggcgcagugcuacauggacaccgagcaguacgaggaggccguccgcgacuacgagaagguguaccagaccgagaagaccaaggagcacaagcagcugcugaagaacgcccagcucgagcugaagaaguccaagcgcaaggacuacuacaagauccugggcguggacaagaacgccagcgaggacgagaucaagaaggcguaccggaagcgcgcccucaugcaccaccccgaccggcacuccggcgccagcgccgagguccagaaggaggaggagaagaaguucaaggaggugggggaggccuucacgauccuguccgaccccaagaagaagacccgcuacgacagcggccaggaccuggacgaggaggggaugaacaugggcgacuucgaccccaacaacaucuucaaggcguucuucggcgggccgggcggguucuccuucgaggccagcggccccgggaacuucuucuuccaguucggcuga

SEQ ID NO: 8447 - RNA, 1485 nt, Artificial Sequence
  derived and/or modified sequence opt2 from DNJC7__Homo_sapiens__AAH11837
auggccgccgccgccgagugcgacgucgucauggccgccaccgagcccgagcuccucgacgaccaggaggccaagcgcgaggccgagaccuucaaggagcagggcaacgccuacuacgccaagaaggacuacaacgaggccuacaacuacuacaccaaggccaucgacaugugccccaagaacgccuccuacuacggcaaccgcgccgccacccucaugaugcucggccgcuuccgcgaggcccucggcgacgcccagcaguccguccgccucgacgacuccuucguccgcggccaccuccgcgagggcaagugccaccucucccucggcaacgccauggccgccugccgcuccuuccagcgcgcccucgagcucgaccacaagaacgcccaggcccagcaggaguucaagaacgccaacgccgucauggaguacgagaagaucgccgagaccgacuucgagaagcgcgacuuccgcaaggucgucuucugcauggaccgcgcccucgaguucgcccccgccugccaccgcuucaagauccucaaggccgagugccucgccaugcucggccgcuaccccgaggcccaguccgucgccuccgacauccuccgcauggacuccaccaacgccgacgcccucuacguccgcggccucugccucuacuacgaggacugcaucgagaaggccguccaguucuucguccaggcccuccgcauggcccccgaccacgagaaggccugcaucgccugccgcaacgccaaggcccucaaggccaagaaggaggacggcaacaaggccuucaaggagggcaacuacaagcucgccuacgagcucuacaccgaggcccucggcaucgaccccaacaacaucaagaccaacgccaagcucuacugcaaccgcggcaccgucaacuccaagcuccgcaagcucgacgacgccaucgaggacugcaccaacgccgucaagcucgacgacaccuacaucaaggccuaccuccgccgcgcccagugcuacauggacaccgagcaguacgaggaggccguccgcgacuacgagaaggucuaccagaccgagaagaccaaggagcacaagcagcuccucaagaacgcccagcucgagcucaagaaguccaagcgcaaggacuacuacaagauccucggcgucgacaagaacgccuccgaggacgagaucaagaaggccuaccgcaagcgcgcccucaugcaccaccccgaccgccacuccggcgccuccgccgagguccagaaggaggaggagaagaaguucaaggaggucggcgaggccuucaccauccucuccgaccccaagaagaagacccgcuacgacuccggccaggaccucgacgaggagggcaugaacaugggcgacuucgaccccaacaacaucuucaaggccuucuucggcggccccggcggcuucuccuucgaggccuccggccccggcaacuucuucuuccaguucggcuga

SEQ ID NO: 8448 - RNA, 1485 nt, Artificial Sequence
  derived and/or modified sequence opt3 from DNJC7__Homo_sapiens__AAH11837
auggccgcugcagccgagugcgacguggucauggcggcuaccgaacccgagcugcucgaugaccaggaagccaagagagaggcagaaacauucaaagagcaaggcaacgccuacuaugcuaagaaagauuacaaugaggcauauaacuacuauacuaaggccaucgacauguguccuaaaaaugcuagcuacuaugggaacagggccgcgacgcuuaugaugcugggacgguuucgcgaagcauugggugaugcccagcaguccguucgauuagacgauucuuucgugcguggccaccugagagaggggaagugccaucuaucacucggaaaugcuauggccgcauguaggaguuuucagcgggcucuggaacuugaccacaagaacgcccaagcgcagcaggaguucaaaaaugccaacgcaguaauggaguacgaaaagauugcugagaccgauuuugaaaaacgcgacuucagaaagguggucuuuugcauggauagggcccuggaguucgcuccagccugucaucgguuuaaaauauugaaggcagaaugccucgccaugcugggccgcuacccggaggcucagagcguggcguccgacauccugcgaauggauucuacaaaugcagacgcccucuauguuagagguuuaugucuguacuaugaggacugcauugaaaaggcugugcaauucuuuguccaggcccuuaggauggcacccgaucacgagaaagccuguaucgcuugccggaacgccaaggcauugaaagcgaagaaagaagacgggaauaaggcuuucaaagagggaaacuacaagcuggccuaugaacuauacacugaggcacucggcauugauccuaauaacaucaagaccaaugccaaacuguauuguaaccguggcacagugaacucgaaacuucgcaaacuggacgaugcuauagaggacugcaccaaugccguaaaguuggaugacacuuacaucaaagcauaccucagaagggcucagugcuauauggauacagaacaguacgaggaagccguucgggacuaugagaagguguaccaaaccgaaaagacgaaagagcauaagcagcuguuaaagaacgcgcagcuggagcucaagaaaucaaagcgaaaggauuauuacaaaauucuuggggucgacaagaaugccagcgaagacgagaucaaaaaggcuuaucgcaaaagagcacugaugcaccacccagauaggcauaguggagccuccgcugaagugcaaaaggaggaggaaaagaaauuuaaggaggugggugaagccuucacuauuuugucugaccccaaaaagaaaacccgguacgauagcggccaggaccuagaugaggaagggaugaacaugggagacuucgauccuaauaacaucuuuaaggcauucuuuggcgguccagggggauucuccuuugaggcgucaggccccggcaauuucuuuuuccaguuuggguga

SEQ ID NO: 8449 - RNA, 1485 nt, Artificial Sequence
  derived and/or modified sequence opt4 from DNJC7__Homo_sapiens__AAH11837
auggccgccgccgccgagugcgacguggugauggccgccaccgagcccgagcugcuggacgaccaggaggccaagagagaggccgagaccuucaaggagcagggcaacgccuacuacgccaagaaggacuacaacgaggccuacaacuacuacaccaaggccaucgacaugugccccaagaacgccagcuacuacggcaacagagccgccacccugaugaugcugggcagauucagagaggcccugggcgacgcccagcagagcgugagacuggacgacagcuucgugagaggccaccugagagagggcaagugccaccugagccugggcaacgccauggccgccugcagaagcuuccagagagcccuggagcuggaccacaagaacgcccaggcccagcaggaguucaagaacgccaacgccgugauggaguacgagaagaucgccgagaccgacuucgagaagagagacuucagaaaggugguguucugcauggacagagcccuggaguucgcccccgccugccacagauucaagauccugaaggccgagugccuggccaugcugggcagauaccccgaggcccagagcguggccagcgacauccugagaauggacagcaccaacgccgacgcccuguacgugagaggccugugccuguacuacgaggacugcaucgagaaggccgugcaguucuucgugcaggcccugagaauggcccccgaccacgagaaggccugcaucgccugcagaaacgccaaggcccugaaggccaagaaggaggacggcaacaaggccuucaaggagggcaacuacaagcuggccuacgagcuguacaccgaggcccugggcaucgaccccaacaacaucaagaccaacgccaagcuguacugcaacagaggcaccgugaacagcaagcugagaaagcuggacgacgccaucgaggacugcaccaacgccgugaagcuggacgacaccuacaucaaggccuaccugagaagagcccagugcuacauggacaccgagcaguacgaggaggccgugagagacuacgagaagguguaccagaccgagaagaccaaggagcacaagcagcugcugaagaacgcccagcuggagcugaagaagagcaagagaaaggacuacuacaagauccugggcguggacaagaacgccagcgaggacgagaucaagaaggccuacagaaagagagcccugaugcaccaccccgacagacacagcggcgccagcgccgaggugcagaaggaggaggagaagaaguucaaggaggugggcgaggccuucaccauccugagcgaccccaagaagaagaccagauacgacagcggccaggaccuggacgaggagggcaugaacaugggcgacuucgaccccaacaacaucuucaaggccuucuucggcggccccggcggcuucagcuucgaggccagcggccccggcaacuucuucuuccaguucggcuga

SEQ ID NO: 8450 - RNA, 1485 nt, Artificial Sequence
  derived and/or modified sequence opt5 from DNJC7__Homo_sapiens__AAH11837
auggccgcugccgcggagugcgacguggucauggcugccaccgaacccgagcugcucgaugaccaggaagccaagagagaggcugaaacauucaaagagcaaggcaacgccuacuaugcuaagaaagauuacaaugaggccuauaacuacuauacgaaggcgaucgacauguguccuaaaaaugccagcuacuaugggaaccgggcugccacccugaugaugcuuggacgcuuuagagaagcucugggcgaugcccagcaguccguucggcucgacgauucuuucgugcgcgggcaccugagagagggaaagugccaucuuagccugggcaaugcgauggccgcuugucgguccuuucagcgcgcccucgaacuggaccacaagaacgcucaagcccagcaggaguucaaaaaugccaacgcugugauggaguacgaaaagauugcggagacagauuuugaaaagagagacuuccggaaggucguguuuugcauggaucgcgcccuggaguucgcuccggccugucauagauuuaaaauccucaaggccgaaugccuggcuaugcuugggcgguaccccgaggcccagucuguugcgagcgacauucugcgcauggauuccaccaaugcugacgcccucuaugugagaggacugugucuuuacuaugaggacugcaucgaaaaggccguccaauucuuugugcaggcucugcggauggccccugaucacgagaaggcuuguauugccugccgcaacgcgaaagcccucaaagcuaagaaagaagacggcaauaaggccuucaaagagggcaacuacaagcuggcuuaugaacuguacacagaggcccucgggaucgaucccaauaacaucaagaccaaugcgaaacuguauuguaacagaggaacaguuaacucuaaacuucggaaacuggacgaugccauugaggacugcaccaaugcugugaagcucgaugacacguacaucaaagccuaccugagacgcgcucagugcuauauggauaccgaacaguacgaggaagccguccgggacuaugagaagguguaccaaacagaaaagaccaaagagcauaagcagcuucugaaaaacgcccagcucgagcugaagaaaagcaagagaaaggauuauuacaaaauucugggcguggacaagaaugcuuccgaagacgagaucaaaaaggcguaucgcaaacgggcccucaugcaccacccugauagacauagcggggcuucugccgaaguccaaaaggaggaggaaaagaaauuuaaggagguuggagaagccuucacaauucuguccgaccccaaaaagaaaacccgcuacgauagcggccaggaccuugaugaggaagggaugaacaugggagacuucgauccuaauaacaucuuuaaggcuuucuuuggcggccccgggggauucucuuuugaggccuccggcccggggaauuucuuuuuccaguuuggauga

SEQ ID NO: 8451 - protein, 253 aa, Artificial Sequence
  DNJC8__Homo_sapiens__O75937
MAASGESGTSGGGGSTEEAFMTFYSEVKQIEKRDSVLTSKNQIERLTRPGSSYFNLNPFEVLQIDPEVTDEEIKKRFRQLSILVHPDKNQDDADRAQKAFEAVDKAYKLLLDQEQKKRALDVIQAGKEYVEHTVKERKKQLKKEGKPTIVEEDDPELFKQAVYKQTMKLFAELEIKRKEREAKEMHERKRQREEEIEAQEKAKREREWQKNFEESRDGRVDSWRNFQANTKGKKEKKNRTFLRPPKVKMEQRE

SEQ ID NO: 8452 - RNA, 762 nt, Artificial Sequence
  DNJC8__Homo_sapiens__AAH33159
auggcggcuucaggagagagcgggacuucaggcggcggaggcagcaccgaggaagcauuuaugaccuucuacagugaggugaaacaaauagagaagagagacucgguucuaacuucgaaaaaucagauugaaagacugacccguccugguuccucuuacuucaauuugaacccauuugagguucuucagauagauccugaaguuacagaugaagaaauaaaaaagagguuucggcaguuauccaucuuggugcauccugacaaaaaucaagaugaugcugacagagcacaaaaggcuuuugaagcuguggacaaagcuuacaaguugcuacuggaucaggagcaaaagaagagggcccuggauguaauucaggcaggaaaagaauacguggaacacacugugaaagagcgaaaaaaacaauuaaagaaggaaggaaaaccuacaauuguagaggaggaugauccugagcuguucaaacaagcuguauauaaacagacaaugaaacucuuugcagagcuggaaauuaaaaggaaagagagagaagccaaagaaaugcaugaaaggaaacgacaaagggaagaagagauugaagcucaagaaaaagccaaacgggaaagagaguggcagaaaaacuuugaggaaagucgagauggucguguggacagcuggcgaaacuuccaagccaauacgaaggggaagaaagagaagaaaaaucggaccuuccugagaccaccgaaaguaaaaauggagcaacgugaguga

SEQ ID NO: 8453 - RNA, 762 nt, Artificial Sequence
  derived and/or modified sequence opt1 from DNJC8__Homo_sapiens__AAH33159
auggccgccagcggcgaguccgggaccagcggcgggggcggguccaccgaggaggcguucaugacguucuacagcgaggugaagcagaucgagaagcgcgacuccguccugaccagcaagaaccagaucgagcggcucacccgccccggcuccagcuacuucaaccugaaccccuucgaggugcugcagaucgaccccgaggugaccgacgaggagaucaagaagcgguuccgccagcucuccauccugguccaccccgacaagaaccaggacgacgccgaccgggcccagaaggccuucgaggccguggacaaggcguacaagcugcuccuggaccaggagcagaagaagcgcgcccuggacgugauccaggccggcaaggaguacgucgagcacacggugaaggagcggaagaagcagcucaagaaggaggggaagcccaccaucguggaggaggacgacccggagcuguucaagcaggccgucuacaagcagaccaugaagcuguucgcggagcucgagaucaagcgcaaggagcgggaggccaaggagaugcacgagcgcaagcggcagcgcgaggaggagaucgaggcccaggagaaggccaagcgggagcgcgaguggcagaagaacuucgaggagagccgggacggccgcguggacuccuggcggaacuuccaggccaacaccaaggggaagaaggagaagaagaaccgcacguuccugcggccgcccaaggugaagauggagcagcgcgaguga

SEQ ID NO: 8454 - RNA, 762 nt, Artificial Sequence
  derived and/or modified sequence opt2 from DNJC8__Homo_sapiens__AAH33159
auggccgccuccggcgaguccggcaccuccggcggcggcggcuccaccgaggaggccuucaugaccuucuacuccgaggucaagcagaucgagaagcgcgacuccguccucaccuccaagaaccagaucgagcgccucacccgccccggcuccuccuacuucaaccucaaccccuucgagguccuccagaucgaccccgaggucaccgacgaggagaucaagaagcgcuuccgccagcucuccauccucguccaccccgacaagaaccaggacgacgccgaccgcgcccagaaggccuucgaggccgucgacaaggccuacaagcuccuccucgaccaggagcagaagaagcgcgcccucgacgucauccaggccggcaaggaguacgucgagcacaccgucaaggagcgcaagaagcagcucaagaaggagggcaagcccaccaucgucgaggaggacgaccccgagcucuucaagcaggccgucuacaagcagaccaugaagcucuucgccgagcucgagaucaagcgcaaggagcgcgaggccaaggagaugcacgagcgcaagcgccagcgcgaggaggagaucgaggcccaggagaaggccaagcgcgagcgcgaguggcagaagaacuucgaggagucccgcgacggccgcgucgacuccuggcgcaacuuccaggccaacaccaagggcaagaaggagaagaagaaccgcaccuuccuccgcccccccaaggucaagauggagcagcgcgaguga

SEQ ID NO: 8455 - RNA, 762 nt, Artificial Sequence
  derived and/or modified sequence opt3 from DNJC8__Homo_sapiens__AAH33159
auggccgcuagcggcgaguccgggaccucuggagguggcgggucaacagaagaggcauucaugacuuuuuacagugaagugaagcagaucgagaaaagagacagcguccugacguccaagaaccaaauugaaaggcucacccggcccggaucuucguauuucaaucuuaacccuuuugagguucugcagauagauccagaggugacagacgaagagaucaaaaagcgcuuccgacaguugucaauuuuaguacacccggauaaaaaucaggacgaugccgaccgugcgcaaaaggcuuuugaagccguggauaaggcauacaaacugcuacucgaccaggagcagaagaaaagagcccuggaugucauccaggcuggcaaggaguauguggaacauacuguuaaagagaggaagaagcaacuuaaaaaggaagguaaacccaccauuguggaggaagacgauccugagcuguucaagcaggcagucuacaaacagacaaugaaguuguuugccgagcucgaaaucaaacggaaggagcgcgaagcuaaggagaugcacgaaagaaaaaggcagcgggaggaggaaauagaggcccaagaaaaggcgaaacgcgagcgagaauggcagaagaacuucgaggagagcagagacgggaggguggauaguuggcggaauuuucaggcaaacaccaaaggaaagaaggagaaaaagaaucguacuuuccugcgcccacccaaaguaaagauggaacaaagagaauga

SEQ ID NO: 8456 - RNA, 762 nt, Artificial Sequence
  derived and/or modified sequence opt4 from DNJC8__Homo_sapiens__AAH33159
auggccgccagcggcgagagcggcaccagcggcggcggcggcagcaccgaggaggccuucaugaccuucuacagcgaggugaagcagaucgagaagagagacagcgugcugaccagcaagaaccagaucgagagacugaccagacccggcagcagcuacuucaaccugaaccccuucgaggugcugcagaucgaccccgaggugaccgacgaggagaucaagaagagauucagacagcugagcauccuggugcaccccgacaagaaccaggacgacgccgacagagcccagaaggccuucgaggccguggacaaggccuacaagcugcugcuggaccaggagcagaagaagagagcccuggacgugauccaggccggcaaggaguacguggagcacaccgugaaggagagaaagaagcagcugaagaaggagggcaagcccaccaucguggaggaggacgaccccgagcuguucaagcaggccguguacaagcagaccaugaagcuguucgccgagcuggagaucaagagaaaggagagagaggccaaggagaugcacgagagaaagagacagagagaggaggagaucgaggcccaggagaaggccaagagagagagagaguggcagaagaacuucgaggagagcagagacggcagaguggacagcuggagaaacuuccaggccaacaccaagggcaagaaggagaagaagaacagaaccuuccugagaccccccaaggugaagauggagcagagagaguga

SEQ ID NO: 8457 - RNA, 762 nt, Artificial Sequence
  derived and/or modified sequence opt5 from DNJC8__Homo_sapiens__AAH33159
auggccgcuagcggcgaguccgggaccucuggaggcgggggaagcacagaagaggccuucaugacguuuuacuccgaagugaagcagaucgagaaaagagacucuguccugaccagcaagaaccaaauugaacggcucacacgccccggcuccucuuauuucaaucugaacccuuuugagguucuucagaucgauccggaggugaccgacgaagagauuaaaaagagauuccggcagcugagcauccucgugcaccccgauaaaaaucaggacgaugcggaccgcgcucaaaaggccuuugaagccgucgauaaggcuuacaaacugcuucuggaccaggagcagaagaaaagagcccucgaugugauucaggcugggaaggaguauguugaacauacagugaaagagcggaagaagcaacugaaaaaggaaggaaaaccuaccaucgucgaggaagacgaucccgagcuguucaagcaggccguguacaaacagacaaugaagcucuuugcggagcuggaaaucaaacgcaaggagagagaagccaaggagaugcacgaacggaaacgccagagagaggaggaaauugaggcucaagaaaaggccaaacgggagcgcgaauggcagaagaacuucgaggaguccagagacggccggguugauagcuggcgcaauuuucaggcuaacaccaaaggcaagaaggagaaaaagaauagaacguuccuucggccucccaaagugaagauggaacaaagagaauga

SEQ ID NO: 8458 - protein, 260 aa, Artificial Sequence
  DNJC9__Homo_sapiens__Q8WXX5
MGLLDLCEEVFGTADLYRVLGVRREASDGEVRRGYHKVSLQVHPDRVGEGDKEDATRRFQILGKVYSVLSDREQRAVYDEQGTVDEDSPVLTQDRDWEAYWRLLFKKISLEDIQAFEKTYKGSEEELADIKQAYLDFKGDMDQIMESVLCVQYTEEPRIRNIIQQAIDAGEVPSYNAFVKESKQKMNARKRRAQEEAKEAEMSRKELGLDEGVDSLKAAIQSRQKDRQKEMDNFLAQMEAKYCKSSKGGGKKSALKKEKK

SEQ ID NO: 8459 - RNA, 783 nt, Artificial Sequence
  DNJC9__Homo_sapiens__AAI36508
auggggcugcuggaccuuugcgaggaaguguucggcaccgccgaccuuuaccgggugcugggcgugcgacgcgaggccuccgacggcgagguccgacgaggcuaccacaaggugucccugcagguacacccggaccgggugggugagggcgacaaggaggacgccacccgccgcuuccagauccugggaaaagucuauuccguucucagugacagagaacagagagcaguguacgaugagcagggaacaguggacgaggacucuccugugcucacccaagaccgagacugggaggcguauuggcggcuacucuuuaaaaagauaucuuuagaggacauucaagcuuuugaaaagacauacaaagguucggaagaagagcuggcugauauuaagcaggccuaucuggacuucaagggugacauggaucagaucauggagucugugcuuugcgugcaguacacagaggaacccaggauaaggaauaucauucagcaagcuauugacgccggagaggucccauccuauaaugccuuugucaaagaaucgaaacaaaagaugaaugcaaggaaaaggagggcucaggaagaggccaaagaagcagaaaugagcagaaaggaguuggggcuugaugaaggcguggauagccugaaggcagccauucagagcagacaaaaggaucggcaaaaggaaauggacaauuuucuggcucagauggaagcaaaguacugcaaaucuuccaaaggaggagggaaaaaaucugcucucaagaaagaaaagaaauaa

SEQ ID NO: 8460 - RNA, 783 nt, Artificial Sequence
  derived and/or modified sequence opt1 from DNJC9__Homo_sapiens__AAI36508
augggccugcucgaccugugcgaggagguguucgggaccgccgaccuguaccgcguccucggcgugcggcgcgaggccagcgacggggaggugcggcgcggcuaccacaaggucucccuccaggugcaccccgaccgggugggggagggcgacaaggaggacgcgacccgccgguuccagauccugggcaaggucuacagcgugcucuccgaccgcgagcagcgggccguguacgacgagcaggggacggucgacgaggacagcccggugcugacccaggaccgcgacugggaggccuacuggcggcugcuguucaagaagaucucccuggaggacauccaggccuucgagaagaccuacaagggcagcgaggaggagcuggccgacaucaagcaggcguaccucgacuucaagggggacauggaccagaucauggaguccgugcugugcguccaguacaccgaggagccccgcauccggaacaucauccagcaggccaucgacgccggcgaggugcccagcuacaacgccuucgugaaggaguccaagcagaagaugaacgcgcgcaagcggcgcgcccaggaggaggccaaggaggccgagaugagccggaaggagcuggggcucgacgagggcgucgacucccugaaggccgcgauccagagccgccagaaggaccggcagaaggagauggacaacuuccuggcccagauggaggccaaguacugcaaguccagcaagggcgggggcaagaaguccgcccucaagaaggagaagaaguga

SEQ ID NO: 8461 - RNA, 783 nt, Artificial Sequence
  derived and/or modified sequence opt2 from DNJC9__Homo_sapiens__AAI36508
augggccuccucgaccucugcgaggaggucuucggcaccgccgaccucuaccgcguccucggcguccgccgcgaggccuccgacggcgagguccgccgcggcuaccacaaggucucccuccagguccaccccgaccgcgucggcgagggcgacaaggaggacgccacccgccgcuuccagauccucggcaaggucuacuccguccucuccgaccgcgagcagcgcgccgucuacgacgagcagggcaccgucgacgaggacucccccguccucacccaggaccgcgacugggaggccuacuggcgccuccucuucaagaagaucucccucgaggacauccaggccuucgagaagaccuacaagggcuccgaggaggagcucgccgacaucaagcaggccuaccucgacuucaagggcgacauggaccagaucauggaguccguccucugcguccaguacaccgaggagccccgcauccgcaacaucauccagcaggccaucgacgccggcgagguccccuccuacaacgccuucgucaaggaguccaagcagaagaugaacgcccgcaagcgccgcgcccaggaggaggccaaggaggccgagaugucccgcaaggagcucggccucgacgagggcgucgacucccucaaggccgccauccagucccgccagaaggaccgccagaaggagauggacaacuuccucgcccagauggaggccaaguacugcaaguccuccaagggcggcggcaagaaguccgcccucaagaaggagaagaaguga

SEQ ID NO: 8462 - RNA, 783 nt, Artificial Sequence
  derived and/or modified sequence opt3 from DNJC9__Homo_sapiens__AAI36508
augggccugcucgaccuuugcgaggaaguguucgggaccgccgaucuguacagagucuugggaguuaggcgggaggcuagcgacggugaagugcgccgaggcuaucacaagguauccuuacaggugcaucccgaucgugucggggagggagacaaagaagaugcaacaagaagguuucaaauccugggcaagguguacucuguucuaucagaccgggagcagcgcgccguguaugaugagcaggguacugucgacgaagauaguccugugcucacgcaggacagagauugggaggcguacuggaggcugcuuuucaaaaagauuagccuggaagacauacaggcuuuugagaaaaccuauaagggguccgaggaagaguuggccgauaucaagcaagcauaccucgacuucaaaggagacauggaucagauuauggaaucuguacuguguguucaguauacagaggaaccacggauccgcaacauuauccaacaggccauagacgcuggcgaggugccgucguacaaugcauuugucaaggagucaaaacagaagaugaacgcccgaaaaagaagggcucaggaagaggccaaggaagcggagaugagccggaaggaacugggccucgaugaggggguggacaguuuaaaagcagccauccaaucccgucagaaggaucgccagaaagagauggacaauuuccuggcucaaauggaagccaaguacugcaaaucuagcaagggagguggcaaaaaguccgcacuuaagaaagagaagaaauga

SEQ ID NO: 8463 - RNA, 783 nt, Artificial Sequence
  derived and/or modified sequence opt4 from DNJC9__Homo_sapiens__AAI36508
augggccugcuggaccugugcgaggagguguucggcaccgccgaccuguacagagugcugggcgugagaagagaggccagcgacggcgaggugagaagaggcuaccacaaggugagccugcaggugcaccccgacagagugggcgagggcgacaaggaggacgccaccagaagauuccagauccugggcaagguguacagcgugcugagcgacagagagcagagagccguguacgacgagcagggcaccguggacgaggacagccccgugcugacccaggacagagacugggaggccuacuggagacugcuguucaagaagaucagccuggaggacauccaggccuucgagaagaccuacaagggcagcgaggaggagcuggccgacaucaagcaggccuaccuggacuucaagggcgacauggaccagaucauggagagcgugcugugcgugcaguacaccgaggagcccagaaucagaaacaucauccagcaggccaucgacgccggcgaggugcccagcuacaacgccuucgugaaggagagcaagcagaagaugaacgccagaaagagaagagcccaggaggaggccaaggaggccgagaugagcagaaaggagcugggccuggacgagggcguggacagccugaaggccgccauccagagcagacagaaggacagacagaaggagauggacaacuuccuggcccagauggaggccaaguacugcaagagcagcaagggcggcggcaagaagagcgcccugaagaaggagaagaaguga

SEQ ID NO: 8464 - RNA, 783 nt, Artificial Sequence
  derived and/or modified sequence opt5 from DNJC9__Homo_sapiens__AAI36508
augggccugcucgaccugugcgaggaaguguucgggaccgccgaucuuuacagaguccugggaguucggcgcgaggcuagcgacggcgaagugagacggggguaucacaaggugucccuccagguccaucccgaucgcgugggagagggcgacaaagaagaugccacaagacgguuucaaauccuggggaagguuuacucugugcuuagcgaccgcgagcagagagcggucuaugaugagcagggaacgguggacgaagauuccccuguucugacccaggaccgggauugggaggcuuacuggcgccuccuguucaaaaagauuucucuggaagacauccaagccuuugagaaaacauauaagggcagcgaggaggaacucgccgauauuaagcaggcuuaccuggacuucaaaggcgacauggaucagaucauggaauccgugcuuuguguccaguauaccgaggaaccgcggauuagaaacaucauccaacaggccauugacgcuggggaggugcccucuuacaaugccuuugugaaggagagcaaacagaagaugaacgcgcgcaaaagacgggcccaggaagaggcuaaggaagccgagaugucccgcaaggaacugggacucgaugagggcgucgacagccugaaagcugccauccaaucuagacagaaggaucggcagaaagagauggacaauuuccuugcgcaaauggaagccaaguacugcaaauccagcaaagggggaggcaagaagucugcucugaagaaagagaagaaauga

SEQ ID NO: 8465 - protein, 428 aa, Artificial Sequence
  Elk-1__Homo_sapiens__P19419
MDPSVTLWQFLLQLLREQGNGHIISWTSRDGGEFKLVDAEEVARLWGLRKNKTNMNYDKLSRALRYYYDKNIIRKVSGQKFVYKFVSYPEVAGCSTEDCPPQPEVSVTSTMPNVAPAAIHAAPGDTVSGKPGTPKGAGMAGPGGLARSSRNEYMRSGLYSTFTIQSLQPQPPPHPRPAVVLPSAAPAGAAAPPSGSRSTSPSPLEACLEAEEAGLPLQVILTPPEAPNLKSEELNVEPGLGRALPPEVKVEGPKEELEVAGERGFVPETTKAEPEVPPQEGVPARLPAVVMDTAGQAGGHAASSPEISQPQKGRKPRDLELPLSPSLLGGPGPERTPGSGSGSGLQAPGPALTPSLLPTHTLTPVLLTPSSLPPSIHFWSTLSPIAPRSPAKLSFQFPSSGSAQVHIPSISVDGLSTPVVLSPGPQKP

SEQ ID NO: 8466 - RNA, 1287 nt, Artificial Sequence
  Elk-1__Homo_sapiens__AAH56150
auggacccaucugugacgcuguggcaguuucugcugcagcugcugagagagcaaggcaauggccacaucaucuccuggacuucacgggaugguggugaauucaagcugguggaugcagaggagguggcccggcugugggggcuacgcaagaacaagaccaacaugaauuacgacaagcucagccgggccuugcgguacuacuaugacaagaacaucauccgcaaggugagcggccagaaguucgucuacaaguuuguguccuacccugaggucgcagggugcuccacugaggacugcccgccccagccagaggugucuguuaccuccaccaugccaaauguggccccugcugcuauacaugccgccccaggggacacugucucuggaaagccaggcacacccaagggugcaggaauggcaggcccaggcgguuuggcacgcagcagccggaacgaguacaugcgcucgggccucuauuccaccuucaccauccagucucugcagccgcagccacccccucauccucggccugcuguggugcuccccagugcagcuccugcaggggcagcagcgccccccucggggagcaggagcaccaguccaagccccuuggaggccugucuggaggcugaagaggccggcuugccucugcaggucauccugaccccgcccgaggccccaaaccugaaaucggaagagcuuaauguggagccggguuugggccgggcuuugcccccagaagugaaaguagaagggcccaaggaagaguuggaaguugcgggggagagaggguuugugccagaaaccaccaaggccgagccagaagucccuccacaggagggcgugccagcccggcugcccgcgguuguuauggacaccgcagggcaggcgggcggccaugcggcuuccagcccugagaucucccagccgcagaagggccggaagccccgggaccuagagcuuccacucagcccgagccugcuaggugggccgggacccgaacggaccccaggaucgggaaguggcuccggccuccaggcuccggggccggcgcugaccccaucccugcuuccuacgcauacauugaccccggugcugcugacacccagcucgcugccuccuagcauucacuucuggagcacccugagucccauugcgccccguagcccggccaagcucuccuuccaguuuccauccaguggcagcgcccaggugcacaucccuucuaucagcguggauggccucucgacccccguggugcucuccccagggccccagaagccauga

SEQ ID NO: 8467 - RNA, 1287 nt, Artificial Sequence
  derived and/or modified sequence opt1 from Elk-1__Homo_sapiens__AAH56150
auggaccccagcgugacccuguggcaguuccuccugcagcugcuccgcgagcagggcaacgggcacaucaucuccuggaccagccgggacggcggggaguucaagcuggucgacgccgaggagguggcccgccuguggggccuccggaagaacaagacgaacaugaacuacgacaagcugucccgcgcgcugcgguacuacuacgacaagaacaucauccgcaaggugagcgggcagaaguucgucuacaaguucguguccuacccggagguggccggcugcagcaccgaggacugcccgccccagcccgaggucuccgugaccagcaccaugcccaacguggcccccgccgccauccacgcggcccccggcgacacggucuccgggaagcccggcaccccgaagggggccggcauggccgggcccggcggccucgcgcggagcucccgcaacgaguacaugcggagcgggcuguacuccaccuucaccauccagagccugcagccccagcccccgccccacccccgccccgccguggugcucccguccgccgcccccgccggcgcggccgccccgcccagcgggucccggagcacgucccccagcccccuggaggccugccuggaggccgaggaggcgggccucccccugcaggucauccugacgcccccggaggcccccaaccucaagagcgaggagcugaacguggagcccggccuggggcgcgcccugcccccggaggugaaggucgagggccccaaggaggagcuggagguggccggggagcggggcuucgugcccgagaccaccaaggccgagccggaggucccgccccaggagggggugcccgcgcgccugcccgccguggucauggacaccgccggccaggccggcgggcacgccgcguccagccccgagaucucccagccccagaagggccggaagccccgcgaccucgagcugccgcugagccccucccuccucgggggccccgggcccgagcggaccccgggcagcggcuccgggagcggccugcaggcccccgggcccgcccucacccccucccugcugccgacccacacgcucacccccgugcugcugacccccagcucccugcccccgagcauccacuucugguccacccucagccccaucgcgccccgcucccccgccaagcugagcuuccaguucccguccagcggcuccgcccaggugcacauccccagcaucagcgucgacgggcucuccacgcccgugguccugagcccgggcccccagaagcccuga

SEQ ID NO: 8468 - RNA, 1287 nt, Artificial Sequence
  derived and/or modified sequence opt2 from Elk-1__Homo_sapiens__AAH56150
auggaccccuccgucacccucuggcaguuccuccuccagcuccuccgcgagcagggcaacggccacaucaucuccuggaccucccgcgacggcggcgaguucaagcucgucgacgccgaggaggucgcccgccucuggggccuccgcaagaacaagaccaacaugaacuacgacaagcucucccgcgcccuccgcuacuacuacgacaagaacaucauccgcaaggucuccggccagaaguucgucuacaaguucgucuccuaccccgaggucgccggcugcuccaccgaggacugccccccccagcccgaggucuccgucaccuccaccaugcccaacgucgcccccgccgccauccacgccgcccccggcgacaccgucuccggcaagcccggcacccccaagggcgccggcauggccggccccggcggccucgcccgcuccucccgcaacgaguacaugcgcuccggccucuacuccaccuucaccauccagucccuccagccccagccccccccccacccccgccccgccgucguccuccccuccgccgcccccgccggcgccgccgccccccccuccggcucccgcuccaccucccccuccccccucgaggccugccucgaggccgaggaggccggccucccccuccaggucauccucaccccccccgaggcccccaaccucaaguccgaggagcucaacgucgagcccggccucggccgcgcccucccccccgaggucaaggucgagggccccaaggaggagcucgaggucgccggcgagcgcggcuucguccccgagaccaccaaggccgagcccgagguccccccccaggagggcguccccgcccgccuccccgccgucgucauggacaccgccggccaggccggcggccacgccgccuccucccccgagaucucccagccccagaagggccgcaagccccgcgaccucgagcucccccucucccccucccuccucggcggccccggccccgagcgcacccccggcuccggcuccggcuccggccuccaggcccccggccccgcccucacccccucccuccuccccacccacacccucacccccguccuccucacccccuccucccucccccccuccauccacuucugguccacccucucccccaucgccccccgcucccccgccaagcucuccuuccaguuccccuccuccggcuccgcccagguccacauccccuccaucuccgucgacggccucuccacccccgucguccucucccccggcccccagaagcccuga

SEQ ID NO: 8469 - RNA, 1287 nt, Artificial Sequence
  derived and/or modified sequence opt3 from Elk-1__Homo_sapiens__AAH56150
auggaccccagcgugacccuguggcaguuccuccuucaacuguugagagagcagggcaacgggcacaucauuuccuggacaucuagggauggaggugaauuuaaguuagucgacgccgaggaaguugcucggcuguggggccuacgcaaaaauaagacuaacaugaauuacgauaaacucucacgagcacugcguuauuacuaugacaagaacauaaucagaaaagugagugggcagaaguucguauacaaguuugugagcuauccugaggucgccggaugcuccacggaagauuguccaccgcagcccgaggugucuguuaccucgacaaugccuaauguggcgccagcugccauucaugcagcccccggcgacacugucucagguaaaccugggaccccaaagggagcuggcauggcaggccccgggggacuugccaggagcagucggaacgaguacaugcgcuccggucuguauucuacauucaccauccagagcuugcaaccucagccaccgccccacccuagaccagcugugguacuccccuccgccgcgccugcaggcgccgcugccccacccucagggaguaggagcacuucuccguccccucuggaagcaugccuggaggcugaagaggccggacuccccuuacagguuauucugacaccaccugaggcgcccaaucuuaaaucagaagaguugaacguggaaccaggccugggucgggcccuacccccugaggucaagguggaagggccaaaagaggagcucgaaguggcaggagagcgcggcuuugucccggaaaccacgaaggcugagcccgaaguuccuccacaagagggcgugcccgcccgacugccugcuguagugauggauacugccgggcaggcaggaggucaugccgcuagcaguccagagaucucucagccccagaagggcagaaaaccgagggaccuugaacugccuuuguccccaagccucuuagggggacccggcccugagcggacccccgguucggggucuggcuccggacugcaagcgccaggcccugcacugacacccucacuccuuccaacucacacccugacaccggucuugcuaaccccuaguagccugcccccauccauacauuucuggucuacgcucagccccaucgccccucguucaccagcuaagcugaguuuucaguuccccuccagcgggucugcccaggugcacauuccuucaaucaguguugauggacuuagcacuccggugguccuguccccagguccccaaaaaccuuga

SEQ ID NO: 8470 - RNA, 1287 nt, Artificial Sequence
  derived and/or modified sequence opt4 from Elk-1__Homo_sapiens__AAH56150
auggaccccagcgugacccuguggcaguuccugcugcagcugcugagagagcagggcaacggccacaucaucagcuggaccagcagagacggcggcgaguucaagcugguggacgccgaggagguggccagacuguggggccugagaaagaacaagaccaacaugaacuacgacaagcugagcagagcccugagauacuacuacgacaagaacaucaucagaaaggugagcggccagaaguucguguacaaguucgugagcuaccccgagguggccggcugcagcaccgaggacugccccccccagcccgaggugagcgugaccagcaccaugcccaacguggcccccgccgccauccacgccgcccccggcgacaccgugagcggcaagcccggcacccccaagggcgccggcauggccggccccggcggccuggccagaagcagcagaaacgaguacaugagaagcggccuguacagcaccuucaccauccagagccugcagccccagccccccccccaccccagacccgccguggugcugcccagcgccgcccccgccggcgccgccgccccccccagcggcagcagaagcaccagccccagcccccuggaggccugccuggaggccgaggaggccggccugccccugcaggugauccugaccccccccgaggcccccaaccugaagagcgaggagcugaacguggagcccggccugggcagagcccugccccccgaggugaagguggagggccccaaggaggagcuggagguggccggcgagagaggcuucgugcccgagaccaccaaggccgagcccgaggugcccccccaggagggcgugcccgccagacugcccgccguggugauggacaccgccggccaggccggcggccacgccgccagcagccccgagaucagccagccccagaagggcagaaagcccagagaccuggagcugccccugagccccagccugcugggcggccccggccccgagagaacccccggcagcggcagcggcagcggccugcaggcccccggccccgcccugacccccagccugcugcccacccacacccugacccccgugcugcugacccccagcagccugccccccagcauccacuucuggagcacccugagccccaucgcccccagaagccccgccaagcugagcuuccaguuccccagcagcggcagcgcccaggugcacauccccagcaucagcguggacggccugagcacccccguggugcugagccccggcccccagaagcccuga

SEQ ID NO: 8471 - RNA, 1287 nt, Artificial Sequence
  derived and/or modified sequence opt5 from Elk-1__Homo_sapiens__AAH56150
auggaccccagcgugacccuguggcaguuccuccugcaacuucugagagagcagggcaacgggcacaucauuuccuggacaucucgggauggaggcgaauuuaagcucgucgacgccgaggaaguugcucgccugugggggcuucggaaaaauaagacgaacaugaauuacgauaaacugagcagagcccuccgcuauuacuaugacaagaacaucauuagaaaaguguccggacagaaguucguguacaaguuugucucuuauccugagguggcgggcugcagcaccgaagauuguccgccccagccugagguuuccgugacaucuaccaugcccaaugucgcuccugccgccauccaugcugcccccggggacacagugagcggaaaaccuggcaccccgaagggcgcugggauggccggacccggcgggcuggcgcgguccagccgcaacgaguacaugagaucuggacuguauuccacauucaccauucaaagccuccagccucagcccccuccccacccgcggccugccguugugcugcccucugcugccccugcuggcgccgcggccccucccuccgggagccgcucuacgucccccagcccgcuugaggcuugccuggaggccgaagaggcuggacucccccugcaggucauccuuaccccucccgaggccccuaaucugaaauccgaagaacucaacguggaacccggccugggcagagcccugccgccugaggugaaggucgaagggcccaaagaggagcucgaaguugcuggagagcggggcuuugugccugaaacaaccaaggcggagcccgaagugccuccccaagagggggucccggcccgccugccugcugugguuauggauacagccggacaggccggcgggcaugcugccucuagccccgagaucucccagccccagaagggaagaaaaccucgggaccuugaacugccgcucagccccucucugcuuggcggcccugggcccgagcgcaccccuggauccggcagcgggucuggacugcaagcgcccggcccugcucucacgcccagccugcugccgacacacacccucacaccugugcugcuuacccccuccucucugccucccagcauucauuucugguccacccucagcccgaucgccccuagaucucccgccaagcuguccuuucaguucccuagcucuggguccgcucagguccacauucccagcaucuccguggauggccuuucuacacccguugugcugagcccuggaccgcaaaaacccuga

SEQ ID NO: 8472 - protein, 121 aa, Artificial Sequence
  Elk-1__Homo_sapiens__Q8N9S0
MDTAGQAGGHAASSPEISQPQKGRKPRDLELPLSPSLLGGPGPERTPSLLPTHTLTPVLLTPSSLPPSIHFWSTLSPIAPRSPAKLSFQFPSSGSAQVHIPSISVDGLSTPVVLSPGPQKP

SEQ ID NO: 8473 - RNA, 366 nt, Artificial Sequence
  Elk-1__Homo_sapiens__BAC04259
auggacaccgcagggcaggcgggcggccaugcggcuuccagcccugagaucucccagccgcagaagggccggaagccccgggaccuagagcuuccacucagcccgagccugcuaggugggccgggacccgaacggaccccaucccugcuuccuacgcauacauugaccccggugcugcugacacccagcucgcugccuccuagcauucacuucuggagcacccugagucccauugcgccccguagcccggccaagcucuccuuccaguuuccauccaguggcagcgcccaggugcacaucccuucuaucagcguggauggccucucgacccccguggugcucuccccagggccccagaagccauga

SEQ ID NO: 8474 - RNA, 366 nt, Artificial Sequence
  derived and/or modified sequence opt1 from Elk-1__Homo_sapiens__BAC04259
auggacaccgccggccaggccgggggccacgccgccagcucccccgagaucagccagccgcagaaggggcgcaagccccgggaccuggagcucccccugucccccagccugcucggcgggccgggccccgagcgcacccccucccugcugcccacgcacacccucaccccggugcugcugacccccagcucccucccgcccagcauccacuucugguccacgcugagccccaucgcgccccggucccccgccaagcugagcuuccaguuccccuccagcggcuccgcccagguccacaucccgagcaucuccguggacgggcucagcacccccgugguccugucccccggcccccagaagccguga

SEQ ID NO: 8475 - RNA, 366 nt, Artificial Sequence
  derived and/or modified sequence opt2 from Elk-1__Homo_sapiens__BAC04259
auggacaccgccggccaggccggcggccacgccgccuccucccccgagaucucccagccccagaagggccgcaagccccgcgaccucgagcucccccucucccccucccuccucggcggccccggccccgagcgcacccccucccuccuccccacccacacccucacccccguccuccucacccccuccucccucccccccuccauccacuucugguccacccucucccccaucgccccccgcucccccgccaagcucuccuuccaguuccccuccuccggcuccgcccagguccacauccccuccaucuccgucgacggccucuccacccccgucguccucucccccggcccccagaagcccuga

SEQ ID NO: 8476 - RNA, 366 nt, Artificial Sequence
  derived and/or modified sequence opt3 from Elk-1__Homo_sapiens__BAC04259
auggacaccgccggccaggcugggggacacgcagccagcucccccgagaucucucaaccucagaaggguagaaaaccaagggaucuggaacucccgcuuucacccagucuguugggcgggccuggaccagagcggacacccagcuuacugccuacucauacgcuaaccccagugcuccugacacccuccucucuuccuccaucgauucacuucuggucaacucugagcccgauagcgccccgcaguccugcuaaguuguccuuucaguucccaucuagcggcuccgcccagguccauauccccucaauuaguguugacggucucagcaccccugugguacugucuccagggccccaaaaaccguga

SEQ ID NO: 8477 - RNA, 366 nt, Artificial Sequence
  derived and/or modified sequence opt4 from Elk-1__Homo_sapiens__BAC04259
auggacaccgccggccaggccggcggccacgccgccagcagccccgagaucagccagccccagaagggcagaaagcccagagaccuggagcugccccugagccccagccugcugggcggccccggccccgagagaacccccagccugcugcccacccacacccugacccccgugcugcugacccccagcagccugccccccagcauccacuucuggagcacccugagccccaucgcccccagaagccccgccaagcugagcuuccaguuccccagcagcggcagcgcccaggugcacauccccagcaucagcguggacggccugagcacccccguggugcugagccccggcccccagaagcccuga

SEQ ID NO: 8478 - RNA, 366 nt, Artificial Sequence
  derived and/or modified sequence opt5 from Elk-1__Homo_sapiens__BAC04259
auggacaccgccggccaggcugggggacacgccgcgagcucccccgagaucucucaaccucagaagggcagaaaaccgcgggaucuggaacucccccugagcccuucccuucucgggggacccggcccugagcgcacacccucucugcugccuacgcauacccuuacaccggugcugcucacccccagcucccugccucccucuauucacuucuggagcacacuguccccuaucgcucccagaagcccggccaagcucucuuuucaguucccuuccagcgggucugcccagguccauauucccuccaucagcguugacggacugucuaccccuguggugcuuucccccggcccccaaaaaccuuga

SEQ ID NO: 8479 - protein, 379 aa, Artificial Sequence
  ERK1__Homo_sapiens__P27361
MAAAAAQGGGGGEPRRTEGVGPGVPGEVEMVKGQPFDVGPRYTQLQYIGEGAYGMVSSAYDHVRKTRVAIKKISPFEHQTYCQRTLREIQILLRFRHENVIGIRDILRASTLEAMRDVYIVQDLMETDLYKLLKSQQLSNDHICYFLYQILRGLKYIHSANVLHRDLKPSNLLINTTCDLKICDFGLARIADPEHDHTGFLTEYVATRWYRAPEIMLNSKGYTKSIDIWSVGCILAEMLSNRPIFPGKHYLDQLNHILGILGSPSQEDLNCIINMKARNYLQSLPSKTKVAWAKLFPKSDSKALDLLDRMLTFNPNKRITVEEALAHPYLEQYYDPTDEPVAEEPFTFAMELDDLPKERLKELIFQETARFQPGVLEAP

SEQ ID NO: 8480 - RNA, 1140 nt, Artificial Sequence
  ERK1__Homo_sapiens__AAH13992
auggcggcggcggcggcucaggggggcgggggcggggagccccguagaaccgagggggucggcccgggggucccgggggagguggagauggugaaggggcagccguucgacgugggcccgcgcuacacgcaguugcaguacaucggcgagggcgcguacggcauggucagcucggccuaugaccacgugcgcaagacucgcguggccaucaagaagaucagccccuucgaacaucagaccuacugccagcgcacgcuccgggagauccagauccugcugcgcuuccgccaugagaaugucaucggcauccgagacauucugcgggcguccacccuggaagccaugagagaugucuacauugugcaggaccugauggagacugaccuguacaaguugcugaaaagccagcagcugagcaaugaccauaucugcuacuuccucuaccagauccugcggggccucaaguacauccacuccgccaacgugcuccaccgagaucuaaagcccuccaaccugcucaucaacaccaccugcgaccuuaagauuugugauuucggccuggcccggauugccgauccugagcaugaccacaccggcuuccugacggaguauguggcuacgcgcugguaccgggccccagagaucaugcugaacuccaagggcuauaccaaguccaucgacaucuggucugugggcugcauucuggcugagaugcucucuaaccggcccaucuucccuggcaagcacuaccuggaucagcucaaccacauucugggcauccugggcuccccaucccaggaggaccugaauuguaucaucaacaugaaggcccgaaacuaccuacagucucugcccuccaagaccaagguggcuugggccaagcuuuuccccaagucagacuccaaagcccuugaccugcuggaccggauguuaaccuuuaaccccaauaaacggaucacaguggaggaagcgcuggcucaccccuaccuggagcaguacuaugacccgacggaugagccaguggccgaggagcccuucaccuucgccauggagcuggaugaccuaccuaaggagcggcugaaggagcucaucuuccaggagacagcacgcuuccagcccggagugcuggaggcccccuag

SEQ ID NO: 8481 - RNA, 1140 nt, Artificial Sequence
  derived and/or modified sequence opt1 from ERK1__Homo_sapiens__AAH13992
auggccgccgcggccgcccagggcgggggcgggggcgagccccgccggaccgagggggugggcccgggcguccccggggagguggagauggugaagggccagcccuucgacgucgggccccgcuacacccagcugcaguacaucggcgagggggccuacggcauggugagcuccgccuacgaccacgugcggaagacgcgcgucgcgaucaagaagaucagcccguucgagcaccagaccuacugccagcggacccuccgcgagauccagauccugcugcgguuccgccacgagaacgugaucggcauccgggacauccuccgcgccuccacccuggaggccaugcgggacguguacaucguccaggaccugauggagacggaccucuacaagcugcucaagagccagcagcucuccaacgaccacaucugcuacuuccuguaccagauccugcgcgggcucaaguacauccacagcgccaacgugcugcaccgggaccugaagcccuccaaccuccugaucaacacgaccugcgaccugaagaucugcgacuucggccucgcgcgcaucgccgaccccgagcacgaccacaccggguuccugaccgaguacguggccacccggugguaccgcgcccccgagaucaugcugaacagcaagggcuacaccaaguccaucgacaucuggagcgucggcugcauccucgccgagaugcuguccaaccggccgaucuuccccgggaagcacuaccuggaccagcucaaccacauccugggcauccuggggagccccucccaggaggaccucaacugcaucaucaacaugaaggcgcgcaacuaccugcagagccugcccuccaagaccaagguggccugggccaagcuguuccccaagagcgacuccaaggcccuggaccugcucgaccggaugcugacguucaacccgaacaagcgcaucaccguggaggaggcccuggcgcaccccuaccucgagcaguacuacgaccccaccgacgagccggucgccgaggagcccuucaccuucgccauggagcuggacgaccugcccaaggagcggcucaaggagcugaucuuccaggagacggcccgcuuccagcccggcgugcuggaggccccguga

SEQ ID NO: 8482 - RNA, 1140 nt, Artificial Sequence
  derived and/or modified sequence opt2 from ERK1__Homo_sapiens__AAH13992
auggccgccgccgccgcccagggcggcggcggcggcgagccccgccgcaccgagggcgucggccccggcguccccggcgaggucgagauggucaagggccagcccuucgacgucggcccccgcuacacccagcuccaguacaucggcgagggcgccuacggcauggucuccuccgccuacgaccacguccgcaagacccgcgucgccaucaagaagaucucccccuucgagcaccagaccuacugccagcgcacccuccgcgagauccagauccuccuccgcuuccgccacgagaacgucaucggcauccgcgacauccuccgcgccuccacccucgaggccaugcgcgacgucuacaucguccaggaccucauggagaccgaccucuacaagcuccucaagucccagcagcucuccaacgaccacaucugcuacuuccucuaccagauccuccgcggccucaaguacauccacuccgccaacguccuccaccgcgaccucaagcccuccaaccuccucaucaacaccaccugcgaccucaagaucugcgacuucggccucgcccgcaucgccgaccccgagcacgaccacaccggcuuccucaccgaguacgucgccacccgcugguaccgcgcccccgagaucaugcucaacuccaagggcuacaccaaguccaucgacaucugguccgucggcugcauccucgccgagaugcucuccaaccgccccaucuuccccggcaagcacuaccucgaccagcucaaccacauccucggcauccucggcucccccucccaggaggaccucaacugcaucaucaacaugaaggcccgcaacuaccuccagucccuccccuccaagaccaaggucgccugggccaagcucuuccccaaguccgacuccaaggcccucgaccuccucgaccgcaugcucaccuucaaccccaacaagcgcaucaccgucgaggaggcccucgcccaccccuaccucgagcaguacuacgaccccaccgacgagcccgucgccgaggagcccuucaccuucgccauggagcucgacgaccuccccaaggagcgccucaaggagcucaucuuccaggagaccgcccgcuuccagcccggcguccucgaggcccccuga

SEQ ID NO: 8483 - RNA, 1140 nt, Artificial Sequence
  derived and/or modified sequence opt3 from ERK1__Homo_sapiens__AAH13992
auggccgcugcagccgcgcagggcgggggagguggcgagcccagaaggaccgaaggggugggaccuggcgucccaggugagguugaaauggugaaggggcaaccguucgacguaggaccccgguacacacagcugcaguauaucggcgagggcgcuuacgggauggugagcuccgccuaugaucacguccgcaaaacucgaguggcaauuaagaaaauaucuccuuuugaacaucagacguacugccaacguacccucagagagauccagauucuucugagguuccggcacgagaacguuaucgguauucgcgacaucuugagagccucaacauuagaagcuaugagggauguguauauaguccaggaccugauggagacugaucuauacaagcuccugaaaagucagcaacuuagcaaugaccauaucuguuauuuucuguaccagauuuugcggggacucaaguacauccacuccgcaaacgugcugcaucgcgaucugaagccaucuaaucucuuaauuaacaccacaugcgaccugaaaaucugugauuucggccuugcccgaauagcugaccccgaacacgaucacaccggguuuuugacugaguauguagccacaagaugguacagggcgccugagauuauguuaaauucgaagggauauaccaaaucaaucgacauuuggagcguuggcugcauccuagcagaaaugcucaguaaccggccaaucuuccccgguaagcauuaccuggaucagcuuaaucacauucuggggauauugggauccccuucucaggaggaccucaacuguaucauuaauaugaaagcccguaacuaucugcaaagccugccauccaagacgaagguggcuugggccaaacuguuuccgaagucagacaguaaagcacucgaucuucuggaccgcauguugacuuucaaucccaacaagagaaucaccgucgaagaggcucuagcccauccuuaccuggaacaguauuacgauccaacagacgagcccguggcggaggaaccuuuuacuuucgccauggagcucgaugaccugccaaaagaaaggcuuaaggagcugauauuucaggaaaccgcacgguuccaacccggcguguuggaggcuccguga

SEQ ID NO: 8484 - RNA, 1140 nt, Artificial Sequence
  derived and/or modified sequence opt4 from ERK1__Homo_sapiens__AAH13992
auggccgccgccgccgcccagggcggcggcggcggcgagcccagaagaaccgagggcgugggccccggcgugcccggcgagguggagauggugaagggccagcccuucgacgugggccccagauacacccagcugcaguacaucggcgagggcgccuacggcauggugagcagcgccuacgaccacgugagaaagaccagaguggccaucaagaagaucagccccuucgagcaccagaccuacugccagagaacccugagagagauccagauccugcugagauucagacacgagaacgugaucggcaucagagacauccugagagccagcacccuggaggccaugagagacguguacaucgugcaggaccugauggagaccgaccuguacaagcugcugaagagccagcagcugagcaacgaccacaucugcuacuuccuguaccagauccugagaggccugaaguacauccacagcgccaacgugcugcacagagaccugaagcccagcaaccugcugaucaacaccaccugcgaccugaagaucugcgacuucggccuggccagaaucgccgaccccgagcacgaccacaccggcuuccugaccgaguacguggccaccagaugguacagagcccccgagaucaugcugaacagcaagggcuacaccaagagcaucgacaucuggagcgugggcugcauccuggccgagaugcugagcaacagacccaucuuccccggcaagcacuaccuggaccagcugaaccacauccugggcauccugggcagccccagccaggaggaccugaacugcaucaucaacaugaaggccagaaacuaccugcagagccugcccagcaagaccaagguggccugggccaagcuguuccccaagagcgacagcaaggcccuggaccugcuggacagaaugcugaccuucaaccccaacaagagaaucaccguggaggaggcccuggcccaccccuaccuggagcaguacuacgaccccaccgacgagcccguggccgaggagcccuucaccuucgccauggagcuggacgaccugcccaaggagagacugaaggagcugaucuuccaggagaccgccagauuccagcccggcgugcuggaggcccccuga

SEQ ID NO: 8485 - RNA, 1140 nt, Artificial Sequence
  derived and/or modified sequence opt5 from ERK1__Homo_sapiens__AAH13992
auggccgcugccgcggcucagggcgggggaggcggggagcccagacggaccgaaggagugggcccuggggucccgggagagguugaaauggugaagggccaacccuucgacgugggcccucgcuacacacagcugcaguauaucggggagggagccuacggcauggucagcuccgccuaugaucacgugagaaaaacgcggguugcuauuaagaaaaucucucccuuugaacaucagaccuacugccaacgcacacucagagagauucagauccugcuucgguuccgccacgagaacgugauugggaucagagacauccugcgggccagcacccucgaagcuaugcgcgaugucuauauugugcaggaccugauggagacagaucuuuacaagcugcucaaaucccagcaacugucuaaugaccauaucuguuauuuucuguaccagauucucagaggacugaaguacauccacagcgccaacguucuucaucgggaucugaagccuuccaaucuccugauuaacaccacaugcgaccuuaaaaucugugauuucggccuggcgcgcauugccgaccccgaacacgaucacaccggguuucucacggaguauguggcuaccagaugguaccgggccccugagaucaugcucaauucuaagggauauacaaaaagcaucgacauuugguccgucggcugcauccuggcugaaaugcugagcaaccgcccgauuuuccccggcaagcauuaccuggaucagcuuaaucacauccuggggauucucggaucuccuucccaggaggaccugaacuguaucaucaauaugaaagccagaaacuaucuucaaagccugcccucuaagaccaagguggcgugggccaaacucuuuccuaaguccgacagcaaagcucuggaucugcucgaccggaugcugacauucaaucccaacaagagaauuaccguggaagaggcccuugcucauccguaccuggaacaguauuacgauccuacggacgagcccgucgccgaggaaccuuuuacauucgccauggagcucgaugaccugcccaaagaacgccuuaaggagcugaucuuucaggaaaccgcucgguuccaacccggcguucucgaggcgccuuga

SEQ ID NO: 8486 - protein, 360 aa, Artificial Sequence [sequence omitted]

SEQ ID NO: 8487 - RNA, 1083 nt, Artificial Sequence
  ERK2__Homo_sapiens__AAA58459
auggcggcggcggcggcggcgggcgcgggcccggagaugguccgcgggcagguguucgacguggggccgcgcuacaccaaccucucguacaucggcgagggcgccuacggcauggugugcucugcuuaugauaaugucaacaaaguucgaguagcuaucaagaaaaucagccccuuugagcaccagaccuacugccagagaacccugagggagauaaaaaucuuacugcgcuucagacaugagaacaucauuggaaucaaugacauuauucgagcaccaaccaucgagcaaaugaaagauguauauauaguacaggaccucauggaaacagaucuuuacaagcucuugaagacacaacaccucagcaaugaccauaucugcuauuuucucuaccagauccucagaggguuaaaauauauccauucagcuaacguucugcaccgugaccucaagccuuccaaccugcugcucaacaccaccugugaucucaagaucugugacuuuggccuggcccguguugcagauccagaccaugaucacacaggguuccugacagaauauguggccacacguugguacagggcuccagaaauuauguugaauuccaagggcuacaccaaguccauugauauuuggucuguaggcugcauucuggcagaaaugcuuuccaacaggcccaucuuuccagggaagcauuaucuugaccagcugaaucacauuuuggguauucuuggauccccaucacaagaagaccugaauuguauaauaaauuuaaaagcuaggaacuauuugcuuucucuuccacacaaaaauaaggugccauggaacaggcuguucccaaaugcugacuccaaagcucuggacuuauuggacaaaauguugacauucaacccacacaagaggauugaaguagaacaggcucuggcccacccauaucuggagcaguauuacgacccgagugacgagcccaucgccgaagcaccauucaaguucgacauggaauuggaugacuugccuaaggaaaagcuaaaagaacuaauuuuugaagagacugcuagauuccagccaggauacagaucuuaa

SEQ ID NO: 8488 - RNA, 1083 nt, Artificial Sequence
  derived and/or modified sequence opt1 from ERK2__Homo_sapiens__AAA58459
auggccgccgcggccgccgccggcgccgggcccgagauggugcgcggccaggucuucgacguggggccgcgguacaccaaccugagcuacaucggcgagggggcguacggcauggugugcuccgccuacgacaacgucaacaaggugcgcguggccaucaagaagaucagccccuucgagcaccagaccuacugccagcggacgcuccgcgagaucaagauccugcugcgguuccgccacgagaacaucaucggcaucaacgacaucauccgggcccccaccaucgagcagaugaaggacgucuacaucgugcaggaccucauggagaccgaccuguacaagcugcucaagacccagcaccuguccaacgaccacaucugcuacuuccuguaccagauccuccgcgggcugaaguacauccacagcgcgaacgugcugcaccgggaccucaagcccuccaaccugcugcucaacacgaccugcgaccugaagaucugcgacuucggccuggcccgcgucgccgacccggaccacgaccacaccggguuccucaccgaguacguggccacgcggugguaccgcgcccccgagaucaugcugaacagcaagggcuacaccaaguccaucgacaucuggagcguggggugcauccuggcggagaugcucuccaaccggcccaucuuccccggcaagcacuaccuggaccagcugaaccacauccucggcauccuggggagcccgucccaggaggaccugaacugcaucaucaaccucaaggcccgcaacuaccugcugagccucccccacaagaacaagguccccuggaaccggcuguuccccaacgccgacuccaaggcccuggaccuccuggacaagaugcugaccuucaacccgcacaagcgcaucgagguggagcaggcccucgcgcaccccuaccuggagcaguacuacgaccccagcgacgagcccaucgccgaggccccguucaaguucgacauggagcuggacgaccuccccaaggagaagcugaaggagcugaucuucgaggagaccgcccgguuccagcccggcuaccgcuccuga

SEQ ID NO: 8489 - RNA, 1083 nt, Artificial Sequence
  derived and/or modified sequence opt2 from ERK2__Homo_sapiens__AAA58459
auggccgccgccgccgccgccggcgccggccccgagaugguccgcggccaggucuucgacgucggcccccgcuacaccaaccucuccuacaucggcgagggcgccuacggcauggucugcuccgccuacgacaacgucaacaagguccgcgucgccaucaagaagaucucccccuucgagcaccagaccuacugccagcgcacccuccgcgagaucaagauccuccuccgcuuccgccacgagaacaucaucggcaucaacgacaucauccgcgcccccaccaucgagcagaugaaggacgucuacaucguccaggaccucauggagaccgaccucuacaagcuccucaagacccagcaccucuccaacgaccacaucugcuacuuccucuaccagauccuccgcggccucaaguacauccacuccgccaacguccuccaccgcgaccucaagcccuccaaccuccuccucaacaccaccugcgaccucaagaucugcgacuucggccucgcccgcgucgccgaccccgaccacgaccacaccggcuuccucaccgaguacgucgccacccgcugguaccgcgcccccgagaucaugcucaacuccaagggcuacaccaaguccaucgacaucugguccgucggcugcauccucgccgagaugcucuccaaccgccccaucuuccccggcaagcacuaccucgaccagcucaaccacauccucggcauccucggcucccccucccaggaggaccucaacugcaucaucaaccucaaggcccgcaacuaccuccucucccucccccacaagaacaagguccccuggaaccgccucuuccccaacgccgacuccaaggcccucgaccuccucgacaagaugcucaccuucaacccccacaagcgcaucgaggucgagcaggcccucgcccaccccuaccucgagcaguacuacgaccccuccgacgagcccaucgccgaggcccccuucaaguucgacauggagcucgacgaccuccccaaggagaagcucaaggagcucaucuucgaggagaccgcccgcuuccagcccggcuaccgcuccuga

SEQ ID NO: 8490 - RNA, 1083 nt, Artificial Sequence
  derived and/or modified sequence opt3 from ERK2__Homo_sapiens__AAA58459
auggccgcugcagccgcggcuggcgccgggcccgagauggugagaggacaggucuucgacguugguccuagguacaccaaccugagcuauaucggcgaaggggcauacggaauggugugcuccgccuaugauaauguaaacaaggugcgggucgcuauuaaaaagauaucuccauuugagcaccaaacauacugucagcgcacucuccgagaaaucaaaauucuucugcguuucagacaugagaauaucauuggcaucaacgacauaaucagggcaccgacgauugaacagaugaaggauguguauaucguucaggacuugauggagaccgauuuauacaaacugcuaaagacacaacaccucucaaaugaccauauuugcuauuuucuguaccagauccuucggggucugaaguacauacacagugccaacguguugcaucgcgaucucaaacccagcaaucugcugcucaacacuaccugugacuuaaagauuugcgauuucgggcuggcuagagucgccgacccugaucacgaccacacaggauuucuuaccgaguauguggcgacuaggugguaccgggcaccagaaaucauguugaacuccaaaggcuauacaaagucuauugauaucuggucgguaggcuguauccuggccgagaugcuaucaaaucgccccauuuucccugggaaacauuaccucgaccagcugaaucacauacuuggaauccuggguagcccaagucaggaagacuugaacugcauuaucaaucucaaggcucgaaacuaucuguuaucccugccccauaagaauaaaguuccuuggaacagacucuuuccaaacgccgauucuaaggcacuugaccuguuggauaaaaugcuaaccuucaauccgcacaagaggauagagguggagcaagcucuggcccaccccuaccucgaacaguauuacgacccuagcgaugagccaauugcggaagcccccuuuaaauucgacauggagcuggaugaccuuccuaaggaaaaacugaaggaguugaucuuugaggaaacggcacgguuccagccaggcuaccguuccuga

SEQ ID NO: 8491 - RNA, 1083 nt, Artificial Sequence
  derived and/or modified sequence opt4 from ERK2__Homo_sapiens__AAA58459
auggccgccgccgccgccgccggcgccggccccgagauggugagaggccagguguucgacgugggccccagauacaccaaccugagcuacaucggcgagggcgccuacggcauggugugcagcgccuacgacaacgugaacaaggugagaguggccaucaagaagaucagccccuucgagcaccagaccuacugccagagaacccugagagagaucaagauccugcugagauucagacacgagaacaucaucggcaucaacgacaucaucagagcccccaccaucgagcagaugaaggacguguacaucgugcaggaccugauggagaccgaccuguacaagcugcugaagacccagcaccugagcaacgaccacaucugcuacuuccuguaccagauccugagaggccugaaguacauccacagcgccaacgugcugcacagagaccugaagcccagcaaccugcugcugaacaccaccugcgaccugaagaucugcgacuucggccuggccagaguggccgaccccgaccacgaccacaccggcuuccugaccgaguacguggccaccagaugguacagagcccccgagaucaugcugaacagcaagggcuacaccaagagcaucgacaucuggagcgugggcugcauccuggccgagaugcugagcaacagacccaucuuccccggcaagcacuaccuggaccagcugaaccacauccugggcauccugggcagccccagccaggaggaccugaacugcaucaucaaccugaaggccagaaacuaccugcugagccugccccacaagaacaaggugcccuggaacagacuguuccccaacgccgacagcaaggcccuggaccugcuggacaagaugcugaccuucaacccccacaagagaaucgagguggagcaggcccuggcccaccccuaccuggagcaguacuacgaccccagcgacgagcccaucgccgaggcccccuucaaguucgacauggagcuggacgaccugcccaaggagaagcugaaggagcugaucuucgaggagaccgccagauuccagcccggcuacagaagcuga

SEQ ID NO: 8492 - RNA, 1083 nt, Artificial Sequence
  derived and/or modified sequence opt5 from ERK2__Homo_sapiens__AAA58459
auggccgcugccgcggcugccggcgccgggcccgagauggugagaggacaggucuucgacguuggcccucgguacaccaaccugagcuauaucggggaaggagcuuacggcauggugugcuccgccuaugauaaugugaacaagguccgcguggcuauuaaaaagaucucuccguuugagcaccaaacauacugucagagaacgcuccgggaaauuaaaauccugcuucgcuucagacaugagaauauuaucgggaucaacgacauuauccgggcccccaccauugaacagaugaaggauguuuauaucgugcaggaccugauggagacagaucucuacaaacugcuuaagacccaacaccugagcaaugaccauauuugcuauuuucucuaccagauccugcgcggacugaaguacauucacuccgcgaacguccuccauagagaucugaaaccuucuaaucuucugcucaacacaaccugugaccugaagaucugcgauuucggccuugcccggguggcugaccccgaucacgaccacacaggcuuucugaccgaguauguugccacgcgcugguacagagcuccugaaaucaugcucaauagcaaaggguauaccaaguccauugauaucuggucugugggauguauucuggccgagaugcugagcaaccggcccaucuucccuggcaaacauuaccucgaccagcugaaucacauucuugggauccugggauccccgagccaggaagaccucaacugcaucauuaaucugaaggcgcgcaacuaucuucugucucucccccauaagaauaaagucccuuggaacagacuguuucccaacgccgauuccaaggcucuggaccuccuggauaaaaugcuuacauucaauccucacaagcggaucgagguggagcaagcccuggcucaccccuaccucgaacaguauuacgacccgagcgaugagccuauugccgaagcccccuuuaaauucgacauggagcuggaugaccuuccuaaggaaaaacugaaggagcucaucuuugaggaaaccgcucgcuuccagcccggcuacagaucuuga

SEQ ID NO: 8493 - protein, 22 aa, Artificial Sequence
  Fibrinogen__Homo_sapiens__A0A024R8B4
MGGAAQLEDRPRDKPQTNQPRC

SEQ ID NO: 8494 - RNA, 69 nt, Artificial Sequence
  Fibrinogen__Homo_sapiens__EAW87951
augggcggcgcugcccaacuugaggaccggccgcgcgacaagccgcagacaaaucagccccguugcuga

SEQ ID NO: 8495 - RNA, 69 nt, Artificial Sequence
  derived and/or modified sequence opt1 from Fibrinogen__Homo_sapiens__EAW87951
augggcggggccgcccagcuggaggaccgcccccgggacaagccgcagaccaaccagccccgcugcuga

SEQ ID NO: 8496 - RNA, 69 nt, Artificial Sequence
  derived and/or modified sequence opt2 from Fibrinogen__Homo_sapiens__EAW87951
augggcggcgccgcccagcucgaggaccgcccccgcgacaagccccagaccaaccagccccgcugcuga

SEQ ID NO: 8497 - RNA, 69 nt, Artificial Sequence
  derived and/or modified sequence opt3 from Fibrinogen__Homo_sapiens__EAW87951
augggcggggccgcucagcuggaggacagacccagggauaagccucaaaccaaccagccacggugcuga

SEQ ID NO: 8498 - RNA, 69 nt, Artificial Sequence
  derived and/or modified sequence opt4 from Fibrinogen__Homo_sapiens__EAW87951
augggcggcgccgcccagcuggaggacagacccagagacaagccccagaccaaccagcccagaugcuga

SEQ ID NO: 8499 - RNA, 69 nt, Artificial Sequence
  derived and/or modified sequence opt5 from Fibrinogen__Homo_sapiens__EAW87951
augggcggggccgcucagcuggaggacagaccccgggauaagccucaaaccaaccagccgcgcugcuga

SEQ ID NO: 8500 - protein, 439 aa, Artificial Sequence
  Fibrinogen__Homo_sapiens__A4D1B8
MKLANWYWLSSAVLATYGFLVVANNETEEIKDERAKDVCPVRLESRGKCEEAGECPYQVSLPPLTIQLPKQFSRIEEVFKEVQNLKEIVNSLKKSCQDCKLQADDNGDPGRNGLLLPSTGAPGEVGDNRVRELESEVNKLSSELKNAKEEINVLHGRLEKLNLVNMNNIENYVDSKVANLTFVVNSLDGKCSKCPSQEQIQSRPVQHLIYKDCSDYYAIGKRSSETYRVTPDPKNSSFEVYCDMETMGGGWTVLQARLDGSTNFTRTWQDYKAGFGNLRREFWLGNDKIHLLTKSKEMILRIDLEDFNGVELYALYDQFYVANEFLKYRLHVGNYNGTAGDALRFNKHYNHDLKFFTTPDKDNDRYPSGNCGLYYSSGWWFDACLSANLNGKYYHQKYRGVRNGIFWGTWPGVSEAHPGGYKSSFKEAKMMIRPKHFKP

SEQ ID NO: 8501 - RNA, 1320 nt, Artificial Sequence
  Fibrinogen__Homo_sapiens__BAG35554
augaagcuggcuaacugguacuggcugagcucagcuguucuugccacuuacgguuuuuugguuguggcaaacaaugaaacagaggaaauuaaagaugaaagagcaaaggaugucugcccagugagacuagaaagcagagggaaaugcgaagaggcaggggagugccccuaccagguaagccugccccccuugacuauucagcucccgaagcaauucagcaggaucgaggagguguucaaagaaguccaaaaccucaaggaaaucguaaauagucuaaagaaaucuugccaagacugcaagcugcaggcugaugacaacggagacccaggcagaaacggacuguuguuacccaguacaggagccccgggagagguuggugauaacagaguuagagaauuagagagugagguuaacaagcuguccucugagcuaaagaaugccaaagaggagaucaauguacuucauggucgccuggagaagcugaaucuuguaaauaugaacaacauagaaaauuauguugacagcaaaguggcaaaucuaacauuuguugucaauaguuuggauggcaaauguucaaagugucccagccaagaacaaauacagucacguccaguucaacaucuaauauauaaagauugcucugacuacuacgcaauaggcaaaagaagcagugagaccuacagaguuacaccugaucccaaaaauaguagcuuugaaguuuacugugacauggagaccauggggggaggcuggacagugcugcaggcacgccucgaugggagcaccaacuucaccagaacauggcaagacuacaaagcaggcuuuggaaaccucagaagggaauuuuggcuggggaacgauaaaauucaucuucugaccaagaguaaggaaaugauucugagaauagaucuugaagacuuuaauggugucgaacuauaugccuuguaugaucaguuuuauguggcuaaugaguuucucaaauaucguuuacacguugguaacuauaauggcacagcuggagaugcauuacguuucaacaaacauuacaaccacgaucugaaguuuuucaccacuccagauaaagacaaugaucgauauccuucugggaacugugggcuguacuacaguucaggcuggugguuugaugcaugucuuucugcaaacuuaaauggcaaauauuaucaccaaaaauacagagguguccguaaugggauuuucugggguaccuggccugguguaagugaggcacacccugguggcuacaaguccuccuucaaagaggcuaagaugaugaucagacccaagcacuuuaagccauaa

SEQ ID NO: 8502 - RNA, 1320 nt, Artificial Sequence
  derived and/or modified sequence opt1 from Fibrinogen__Homo_sapiens__BAG35554
augaagcuggccaacugguacuggcucagcuccgccgugcuggcgaccuacggcuuccuggucguggccaacaacgagaccgaggagaucaaggacgagcgcgccaaggacgugugccccguccggcucgagagccgcgggaagugcgaggaggccggcgagugcccguaccaggugucccugccgccccugacgauccagcuccccaagcaguucagccggaucgaggagguguucaaggagguccagaaccugaaggagaucgugaacucccugaagaaguccugccaggacugcaagcuccaggccgacgacaacggggaccccggccgcaacgggcugcugcuccccagcaccggcgcgcccggcgaggugggggacaaccggguccgcgagcuggagagcgaggugaacaagcuguccagcgagcucaagaacgccaaggaggagaucaacgugcugcacggccggcuggagaagcucaaccuggucaacaugaacaacaucgagaacuacguggacuccaagguggccaaccugaccuucgucgugaacagccucgacgggaagugcuccaagugccccagccaggagcagauccagucccgcccggugcagcaccugaucuacaaggacugcagcgacuacuacgccaucggcaagcgguccagcgagaccuaccgcgucacgcccgaccccaagaacuccagcuucgagguguacugcgacauggagaccaugggcgggggcuggaccgugcugcaggcgcggcucgacgggagcaccaacuucacgcgcaccuggcaggacuacaaggccggcuucgggaaccugcggcgcgaguucuggcugggcaacgacaagauccaccuccugaccaaguccaaggagaugauccugcggaucgaccucgaggacuucaacggcgucgagcuguacgcccuguacgaccaguucuacguggccaacgaguuccucaaguaccgccugcacguggggaacuacaacggcaccgccggggacgcgcugcgguucaacaagcacuacaaccacgaccucaaguucuucacgacccccgacaaggacaacgaccgcuacccgagcggcaacugcgggcuguacuacuccagcggcuggugguucgacgccugccuguccgccaaccucaacggcaaguacuaccaccagaaguaccgcgggguccggaacggcaucuucugggggaccuggcccggcgugagcgaggcccaccccgggggcuacaaguccagcuucaaggaggccaagaugaugauccggcccaagcacuucaagccguga

SEQ ID NO: 8503 - RNA, 1320 nt, Artificial Sequence
  derived and/or modified sequence opt2 from Fibrinogen__Homo_sapiens__BAG35554
augaagcucgccaacugguacuggcucuccuccgccguccucgccaccuacggcuuccucgucgucgccaacaacgagaccgaggagaucaaggacgagcgcgccaaggacgucugccccguccgccucgagucccgcggcaagugcgaggaggccggcgagugccccuaccaggucucccuccccccccucaccauccagcuccccaagcaguucucccgcaucgaggaggucuucaaggagguccagaaccucaaggagaucgucaacucccucaagaaguccugccaggacugcaagcuccaggccgacgacaacggcgaccccggccgcaacggccuccuccuccccuccaccggcgcccccggcgaggucggcgacaaccgcguccgcgagcucgaguccgaggucaacaagcucuccuccgagcucaagaacgccaaggaggagaucaacguccuccacggccgccucgagaagcucaaccucgucaacaugaacaacaucgagaacuacgucgacuccaaggucgccaaccucaccuucgucgucaacucccucgacggcaagugcuccaagugccccucccaggagcagauccagucccgccccguccagcaccucaucuacaaggacugcuccgacuacuacgccaucggcaagcgcuccuccgagaccuaccgcgucacccccgaccccaagaacuccuccuucgaggucuacugcgacauggagaccaugggcggcggcuggaccguccuccaggcccgccucgacggcuccaccaacuucacccgcaccuggcaggacuacaaggccggcuucggcaaccuccgccgcgaguucuggcucggcaacgacaagauccaccuccucaccaaguccaaggagaugauccuccgcaucgaccucgaggacuucaacggcgucgagcucuacgcccucuacgaccaguucuacgucgccaacgaguuccucaaguaccgccuccacgucggcaacuacaacggcaccgccggcgacgcccuccgcuucaacaagcacuacaaccacgaccucaaguucuucaccacccccgacaaggacaacgaccgcuaccccuccggcaacugcggccucuacuacuccuccggcuggugguucgacgccugccucuccgccaaccucaacggcaaguacuaccaccagaaguaccgcggcguccgcaacggcaucuucuggggcaccuggcccggcgucuccgaggcccaccccggcggcuacaaguccuccuucaaggaggccaagaugaugauccgccccaagcacuucaagcccuga

SEQ ID NO: 8504 - RNA, 1320 nt, Artificial Sequence
  derived and/or modified sequence opt3 from Fibrinogen__Homo_sapiens__BAG35554
augaagcuggccaacugguacuggcucagcuccgcugugcuugcaaccuauggcuuccuggucguugccaauaacgagacagaagagaucaaagacgaaagagcgaaggaugugugccccguaagguuggagucucgggggaaaugugaagaggcuggagagugcccuuaccaggugucauuaccaccgcugacuauucaacuacccaagcaguuuagucgcauagaagaggucuucaaagaagugcagaaucucaaggagaucguuaacagccugaagaaauccugucaggacugcaaacuucaagccgaugacaauggugauccuggccgaaacgggcuguugcucccaucuacgggagcacccggcgaggugggugacaaucgugucagagaacuggagucggaagugaacaagcugucaagcgagcucaagaaugccaaagaagagauuaacguauuacacgggaggcuggagaaacuuaauuugguuaacaugaauaacaucgaaaauuauguggauaguaaggucgcuaaccugaccuuuguggugaacucccuagacggaaaguguucuaagugcccuagccaggagcagauucagucccggccaguccaacaucucaucuacaaagauuguucagacuauuacgcaauaggcaagcgcaguagcgaaacauauagaguuacucccgauccuaaaaauucuuccuucgagguguacugcgacauggaaaccaugggcgggggauggacaguacugcaggccaggcuugaugguucaaccaacuuuacucggacauggcaggacuacaaggcuggcuucgggaaucugcgccgagaguuuugguugggaaacgacaaaauccaccuccugaccaagagcaaggagaugauuuuaagaaucgaucuggaagacuucaauggcguggagcucuaugcccuuuacgaucaguuuuaugucgcgaacgaguuccugaaauacagguugcauguggguaauuauaacgggacggcaggagacgcccuacgguuuaauaagcacuacaaccaugaucugaaauucuuuacuaccccagacaaggauaaugaccguuauccgaguggcaacuguggccucuacuacucuuccggguggugguucgaugcuugccugagcgccaaucuuaacggaaaauauuaccaccaaaaguaucgcgguguuagaaauggcauuuucugggggacauggcccggagugucggaagcacacccuggcgguuacaagucuuccuuuaaagaagcuaagaugaugaucaggccaaaacauuucaagcccuga

SEQ ID NO: 8505 - RNA, 1320 nt, Artificial Sequence
  derived and/or modified sequence opt4 from Fibrinogen__Homo_sapiens__BAG35554
augaagcuggccaacugguacuggcugagcagcgccgugcuggccaccuacggcuuccuggugguggccaacaacgagaccgaggagaucaaggacgagagagccaaggacgugugccccgugagacuggagagcagaggcaagugcgaggaggccggcgagugccccuaccaggugagccugcccccccugaccauccagcugcccaagcaguucagcagaaucgaggagguguucaaggaggugcagaaccugaaggagaucgugaacagccugaagaagagcugccaggacugcaagcugcaggccgacgacaacggcgaccccggcagaaacggccugcugcugcccagcaccggcgcccccggcgaggugggcgacaacagagugagagagcuggagagcgaggugaacaagcugagcagcgagcugaagaacgccaaggaggagaucaacgugcugcacggcagacuggagaagcugaaccuggugaacaugaacaacaucgagaacuacguggacagcaagguggccaaccugaccuucguggugaacagccuggacggcaagugcagcaagugccccagccaggagcagauccagagcagacccgugcagcaccugaucuacaaggacugcagcgacuacuacgccaucggcaagagaagcagcgagaccuacagagugacccccgaccccaagaacagcagcuucgagguguacugcgacauggagaccaugggcggcggcuggaccgugcugcaggccagacuggacggcagcaccaacuucaccagaaccuggcaggacuacaaggccggcuucggcaaccugagaagagaguucuggcugggcaacgacaagauccaccugcugaccaagagcaaggagaugauccugagaaucgaccuggaggacuucaacggcguggagcuguacgcccuguacgaccaguucuacguggccaacgaguuccugaaguacagacugcacgugggcaacuacaacggcaccgccggcgacgcccugagauucaacaagcacuacaaccacgaccugaaguucuucaccacccccgacaaggacaacgacagauaccccagcggcaacugcggccuguacuacagcagcggcuggugguucgacgccugccugagcgccaaccugaacggcaaguacuaccaccagaaguacagaggcgugagaaacggcaucuucuggggcaccuggcccggcgugagcgaggcccaccccggcggcuacaagagcagcuucaaggaggccaagaugaugaucagacccaagcacuucaagcccuga

SEQ ID NO: 8506 - RNA, 1320 nt, Artificial Sequence
  derived and/or modified sequence opt5 from Fibrinogen__Homo_sapiens__BAG35554
augaagcuggccaacugguacuggcucagcuccgcugugcuggccaccuauggcuuccuugucguugcgaauaacgagacagaagagaucaaagacgaaagagcuaaggaugugugccccgugcggcuggagucucgcgggaaaugugaagaggccggagagugcccuuaccaggucagccucccgccccugacgauucaacuuccuaagcaguuuuccagaaucgaagagguguucaaagaaguucagaaucugaaggagauugugaacucucucaagaaaagcugucaggacugcaagcugcaagccgaugacaauggcgaucccgggcggaacggacugcuccugccuuccaccggcgcucccggggaggucggagacaaucgcgugagagaacuugagucugaaguuaacaaacugagcuccgagcucaagaaugccaaagaagagaucaacgugcugcacggccggcuugagaagcugaaucucgucaacaugaauaacauugaaaauuauguggauagcaagguggcuaaccugacauuugucguuaacucucuggacggcaaauguuccaagugcccuagccaggagcagauccagucucgcccggugcaacaucucaucuacaaagauuguuccgacuauuacgccauugggaagagaagcucugaaaccuaucgggugacacccgauccuaaaaauuccagcuucgaggucuacugcgacauggaaaccaugggaggcggguggacagugcugcaggcgcgccuugauggauccaccaacuuuacgagaaccuggcaggacuacaaggccggcuucgggaaucugcggcgcgaguuuuggcucggaaacgacaaaauccaucugcuuacaaagucuaaggagaugauucugagaaucgaucucgaagacuucaauggcguugagcuguaugcucuguacgaucaguuuuauguggccaacgaguuccucaaauaccggcugcacgucggcaauuauaacgggaccgcuggagacgcccuucgcuuuaauaagcacuacaaccaugaucugaaauucuuuacaacccccgacaaggauaaugacagauauccuagcggcaacugugggcucuacuacuccagcggauggugguucgaugcgugccugucugccaaucuuaacggcaaauauuaccaccaaaaguauagaggggugcggaauggaauuuucuggggcacguggcccggcguuuccgaagcucacccugggggauacaagagcucuuuuaaagaagccaagaugaugauccgcccgaaacauuucaagcccuga

SEQ ID NO: 8507 - protein, 461 aa, Artificial Sequence [sequence omitted]

SEQ ID NO: 8508 - RNA, 1386 nt, Artificial Sequence
  Fibrinogen__Homo_sapiens__BAF85178
auggucaacgaccgguggaagaccaugggcggcgcugcccaacuugaggaccggccgcgcgacaagccgcagcggccgagcugcggcuacgugcugugcaccgugcugcuggcccuggcugugcugcuggcuguagcugucaccggugccgugcucuuccugaaccacgcccacgcgccgggcacggcgcccccaccugucgucagcacuggggcugccggcgccaacagcgcccuggucacuguggaaagggcggacagcucgcaccucagcauccucauugacccgcgcugccccgaccucaccgacagcuucgcacgccuggagagcgcccaggccucggugcugcaggcgcugacagagcaccaggcccagccacggcuggugggcgaccaggagcaggagcugcuggacacgcuggccgaccagcugccccggcugcuggcccgagccucagagcugcagacggagugcauggggcugcggaaggggcauggcacgcugggccagggccucagcgcccugcagagugagcagggccgccucauccagcuucucucugagagccagggccacauggcucaccuggugaacuccgucagcgacauccuggaugcccugcagagggaccgggggcugggccggccccgcaacaaggccgaccuucagagagcgccugcccggggaacccggccccggggcugugccacuggcucccggccccgagacugucuggacguccuccuaagcggacagcaggacgauggcgucuacucugucuuucccacccacuacccggccggcuuccagguguacugugacaugcgcacggacggcggcggcuggacgguguuucagcgccgggaggacggcuccgugaacuucuuccggggcugggacgcguaccgagacggcuuuggcaggcucaccggggagcacuggcuagggcucaagaggauccacgcccugaccacacaggcugccuacgagcugcacguggaccuggaggacuuugagaauggcacggccuaugcccgcuacgggagcuucggcgugggcuuguucuccguggacccugaggaagacggguacccgcucaccguggcugacuauuccggcacugcaggcgacucccuccugaagcacagcggcaugagguucaccaccaaggaccgugacagcgaccauucagagaacaacugugccgccuucuaccgcggugccuggugguaccgcaacugccacacguccaaccucaaugggcaguaccugcgcggugcgcacgccuccuaugccgacggcguggagugguccuccuggaccggcuggcaguacucacucaaguucucugagaugaagauccggccgguccgggaggaccgcuag

SEQ ID NO: 8509 - RNA, 1386 nt, Artificial Sequence
  derived and/or modified sequence opt1 from Fibrinogen__Homo_sapiens__BAF85178
auggugaacgaccgcuggaagaccaugggcggggccgcccagcuggaggaccggccccgcgacaagccgcagcggcccagcugcggcuacguccucugcaccgugcugcuggcgcucgccgugcugcuggccgucgccgugacgggggccguccucuuccugaaccacgcgcacgcccccggcaccgcgcccccgcccgugguguccaccggggccgccggcgccaacagcgcccuggugaccgucgagcgcgccgacuccagccaccucuccauccugaucgacccccggugccccgaccugacggacagcuucgcccgccucgaguccgcgcaggccagcgugcugcaggcccugaccgagcaccaggcccagccgcggcucgugggcgaccaggagcaggagcugcuggacacccucgccgaccagcugccccgccugcucgcgcgggccuccgagcugcagaccgagugcauggggcugcgcaagggccacgggacgcucggccaggggcugagcgcccugcaguccgagcagggccggcucauccagcugcugagcgagucccagggccacauggcccaccucgucaacagcguguccgacauccuggacgcccugcagcgcgaccgggggcucggccgcccccggaacaaggcggaccugcagcgcgcccccgcccgggggacccgcccgcggggcugcgccaccggcagccgcccccgggacugccuggacgugcuccuguccgggcagcaggacgacggcgucuacagcguguuccccacccacuaccccgccggguuccagguguacugcgacaugcgcacggacggcgggggcuggaccgucuuccagcgccgggaggacggcuccgugaacuucuuccgcgggugggacgcguaccgggacggcuucgggcgccugaccggcgagcacuggcucgggcugaagcggauccacgcccugaccacgcaggccgccuacgagcuccacguggaccuggaggacuucgagaacggcaccgcguacgcccgcuacggcagcuucggggucggccuguucagcguggacccggaggaggacggguacccccucaccguggccgacuacuccggcaccgccggggacagccugcugaagcacuccggcaugcgguucacgaccaaggaccgcgacagcgaccacuccgagaacaacugcgccgcguucuaccggggcgccuggugguaccgcaacugccacaccagcaaccucaacgggcaguaccugcggggcgcccacgccuccuacgccgacggggucgaguggagcuccuggaccggcuggcaguacagccugaaguucuccgagaugaagauccgccccgugcgggaggaccgcuga

SEQ ID NO: 8510 - RNA, 1386 nt, Artificial Sequence
  derived and/or modified sequence opt2 from Fibrinogen__Homo_sapiens__BAF85178
auggucaacgaccgcuggaagaccaugggcggcgccgcccagcucgaggaccgcccccgcgacaagccccagcgccccuccugcggcuacguccucugcaccguccuccucgcccucgccguccuccucgccgucgccgucaccggcgccguccucuuccucaaccacgcccacgcccccggcaccgcccccccccccgucgucuccaccggcgccgccggcgccaacuccgcccucgucaccgucgagcgcgccgacuccucccaccucuccauccucaucgacccccgcugccccgaccucaccgacuccuucgcccgccucgaguccgcccaggccuccguccuccaggcccucaccgagcaccaggcccagccccgccucgucggcgaccaggagcaggagcuccucgacacccucgccgaccagcucccccgccuccucgcccgcgccuccgagcuccagaccgagugcaugggccuccgcaagggccacggcacccucggccagggccucuccgcccuccaguccgagcagggccgccucauccagcuccucuccgagucccagggccacauggcccaccucgucaacuccgucuccgacauccucgacgcccuccagcgcgaccgcggccucggccgcccccgcaacaaggccgaccuccagcgcgcccccgcccgcggcacccgcccccgcggcugcgccaccggcucccgcccccgcgacugccucgacguccuccucuccggccagcaggacgacggcgucuacuccgucuuccccacccacuaccccgccggcuuccaggucuacugcgacaugcgcaccgacggcggcggcuggaccgucuuccagcgccgcgaggacggcuccgucaacuucuuccgcggcugggacgccuaccgcgacggcuucggccgccucaccggcgagcacuggcucggccucaagcgcauccacgcccucaccacccaggccgccuacgagcuccacgucgaccucgaggacuucgagaacggcaccgccuacgcccgcuacggcuccuucggcgucggccucuucuccgucgaccccgaggaggacggcuacccccucaccgucgccgacuacuccggcaccgccggcgacucccuccucaagcacuccggcaugcgcuucaccaccaaggaccgcgacuccgaccacuccgagaacaacugcgccgccuucuaccgcggcgccuggugguaccgcaacugccacaccuccaaccucaacggccaguaccuccgcggcgcccacgccuccuacgccgacggcgucgagugguccuccuggaccggcuggcaguacucccucaaguucuccgagaugaagauccgccccguccgcgaggaccgcuga

SEQ ID NO: 8511 - RNA, 1386 nt, Artificial Sequence
  derived and/or modified sequence opt3 from Fibrinogen__Homo_sapiens__BAF85178
auggugaacgacagauggaagaccaugggcggggccgcucagcuggaggauaggccccgggacaaaccucaacgcccaagcugcggauacguccucuguacaguucuucuggcauuggccguguuacuggcgguagcugugacuggugccguccuauuccucaaucacgcacaugccccgggcacggcucccccuccagugguuuccaccggggcagccggagcuaacucugcccuggugacagucgaacgagcggauucaagucaccuuagcauccugauugacccccguugcccugauuugacugacuccuuugcaagacucgagucugcccaggcuucggugcugcaggcccugaccgaacaucaggcacaaccaaggcucguaggcgaucaggagcaggaauuacuggacacacuugcugaucaguugccccggcugcuagcccgcgcgucagagcuccaaaccgaguguaugggucugagaaaggggcacggaacucuuggccagggccugagcgccuugcagagugaacaggggaggcucauacaacuguuauccgagucucagggacauauggcacaccugguuaauagcguguccgacauccucgaugcccuucagcgggaccgcggucugggccgaccuagaaacaaagcugauuugcaaagggcuccagcccgggggacacguccgcgcggaugcgcaaccggcucaagacccagggacugucuagacguccugcucaguggucagcaggaugacgggguguauagcguguucccuacgcacuacccagccggauuucaggucuauugcgauaugcggacugacggcggcggguggaccguuuuccaacgacgcgaagauggaucugugaacuuuuucagagguugggacgcuuacagggauggcuuugggcggcugacaggagagcauuggcuuggccugaagcgcauucacgcguugacuacccaggcagccuaugagcuccauguagaccuggaagauuucgagaaugguacagcuuacgccagauauggguccuuuggcgugggauuauucucagucgaccccgaagaggauggcuacccucugaccguggcagacuacagcgggacggccggagacagucuacucaaacacucugguaugagguuuacuacaaaggaucgugacuccgaucacagcgaaaauaacugugcugccuucuaucggggcgcauggugguaccgaaauugccauaccucgaaccugaaugggcaguaucuuagaggagcgcacgcuucuuacgccgacggcguugagugguccucauggacugguuggcaguauaguuugaaguuuagcgagaugaaaaucaggccagugcgcgaagaucgguga

SEQ ID NO: 8512 - RNA, 1386 nt, Artificial Sequence
  derived and/or modified sequence opt4 from Fibrinogen__Homo_sapiens__BAF85178
auggugaacgacagauggaagaccaugggcggcgccgcccagcuggaggacagacccagagacaagccccagagacccagcugcggcuacgugcugugcaccgugcugcuggcccuggccgugcugcuggccguggccgugaccggcgccgugcuguuccugaaccacgcccacgcccccggcaccgcccccccccccguggugagcaccggcgccgccggcgccaacagcgcccuggugaccguggagagagccgacagcagccaccugagcauccugaucgaccccagaugccccgaccugaccgacagcuucgccagacuggagagcgcccaggccagcgugcugcaggcccugaccgagcaccaggcccagcccagacuggugggcgaccaggagcaggagcugcuggacacccuggccgaccagcugcccagacugcuggccagagccagcgagcugcagaccgagugcaugggccugagaaagggccacggcacccugggccagggccugagcgcccugcagagcgagcagggcagacugauccagcugcugagcgagagccagggccacauggcccaccuggugaacagcgugagcgacauccuggacgcccugcagagagacagaggccugggcagacccagaaacaaggccgaccugcagagagcccccgccagaggcaccagacccagaggcugcgccaccggcagcagacccagagacugccuggacgugcugcugagcggccagcaggacgacggcguguacagcguguuccccacccacuaccccgccggcuuccagguguacugcgacaugagaaccgacggcggcggcuggaccguguuccagagaagagaggacggcagcgugaacuucuucagaggcugggacgccuacagagacggcuucggcagacugaccggcgagcacuggcugggccugaagagaauccacgcccugaccacccaggccgccuacgagcugcacguggaccuggaggacuucgagaacggcaccgccuacgccagauacggcagcuucggcgugggccuguucagcguggaccccgaggaggacggcuacccccugaccguggccgacuacagcggcaccgccggcgacagccugcugaagcacagcggcaugagauucaccaccaaggacagagacagcgaccacagcgagaacaacugcgccgccuucuacagaggcgccuggugguacagaaacugccacaccagcaaccugaacggccaguaccugagaggcgcccacgccagcuacgccgacggcguggaguggagcagcuggaccggcuggcaguacagccugaaguucagcgagaugaagaucagacccgugagagaggacagauga

SEQ ID NO: 8513 - RNA, 1386 nt, Artificial Sequence
  derived and/or modified sequence opt5 from Fibrinogen__Homo_sapiens__BAF85178
auggugaacgacagauggaagaccaugggcggggccgcucagcuggaggaucggccccgcgacaaaccucaaagaccgagcugcggauacguccucuguacaguucugcuugcccuggcggugcuccuggcuguggccgucacgggcgccgugcuuuuccugaaucacgcucaugcccccgggaccgcuccucccccuguuguguccacaggagccgcgggcgccaacucugcucucgucaccguggaacgggccgauagcucccaccugucuauccugauugacccccgcugcccugaucucacagacagcuuugcuagacuggaguccgcccaggcgucuguucuucaggcccugaccgaacaucaggcucaaccgcggcucgugggggaucaggagcaggaacugcuugacacacuggccgaucagcucccccgccugcuggcuagagccagcgagcuccaaaccgaguguaugggacugcggaagggccacggcacgcuugggcagggacuguccgcccuccagagcgaacagggccgccugauccaacuucugucugagucccaggggcauauggcucaccucgucaauagcgugucugacauucuggaugcgcugcagagagaccggggacucggccgcccuagaaacaaagccgaucugcaacgggcucccgcccgcgggaccagaccucggggaugcgccacaggcuccagaccccgcgacugucuugacgugcugcucagcggccagcaggaugacggggucuauucuguuuucccgacccacuacccugcuggauuucagguguauugcgauaugcggacagacggcgggggauggaccguguuccaaagacgcgaagauggcuccgucaacuuuuuccgggggugggacgccuacagagauggauuuggccgccugacgggcgagcauuggcuugggcugaagcggauccacgcgcucacaacccaggcugccuaugagcugcauguggaccuggaagauuucgagaauggaacagccuacgcuagauauggcagcuuugggguuggacucuucuccguggaccccgaagaggauggcuacccucugaccgucgccgacuacucugggaccgcuggcgacagccuucugaaacacuccggaaugcgcuuuacaacgaaggaucgggacagcgaucacucugaaaauaacugugccgcguucuauagaggcgccuggugguaccgcaauugccauaccuccaaccucaaugggcaguaucugcggggagcucacgccagcuacgcugacggcguggaguggucuagcuggacaggguggcaguauucccugaaguuuucugagaugaaaauuagacccguucgggaagaucgcuga

SEQ ID NO: 8514 - protein, 179 aa, Artificial Sequence [sequence omitted]

SEQ ID NO: 8515 - RNA, 540 nt, Artificial Sequence
  Fibrinogen__Homo_sapiens__BAG62044
auggucaacgaccgguggaagaccaugggcggcgcugcccaacuugaggaccggccgcgcgacaagccgcaggcgaggaaacugaggcucagagagcggccgagcugcggcuacgugcugugcaccgugcugcuggcccuggcugugcugcuggcuguagcugucaccggugccgugcucuuccugaaccacgcccacgcgccgggcacggcgcccccaccugucgucagcacuggggcugccagcgccaacagcgcccuggucacuguggaaagggcggacagcucgcaccucagcauccucauugacccgcgcugccccgaccucaccgacagcuucgcacgccuggagagcgcccaggccucggugcugcaggcgcugacagagcaccaggcccagccacggcuggugggcgaccaggagcaggagcugcuggacacgcuggccgaccagcugccccggcugcuggcccgagccucagagcugcagacggagugcauggggcugcggaaggggcauggcacgcuggaaaggcgguaa

SEQ ID NO: 8516 - RNA, 540 nt, Artificial Sequence
  derived and/or modified sequence opt1 from Fibrinogen__Homo_sapiens__BAG62044
auggugaacgaccgcuggaagaccaugggcggggccgcccagcuggaggaccggccccgcgacaagccgcaggcgcggaagcuccgccugcgggagcgccccagcugcggcuacguccugugcaccgugcuccuggcccuggccgugcuccuggccgucgccgugacgggggcggugcuguuccucaaccacgcccacgcccccggcaccgcgcccccgcccgucguguccaccggggccgccagcgccaacuccgcccuggugaccgucgagcgggccgacagcucccaccugagcauccucaucgacccccgcugccccgaccugacggacuccuucgcgcggcuggagagcgcccaggccuccgugcuccaggcccugaccgagcaccaggcccagccgcgccuggugggcgaccaggagcaggagcuccuggacacccuggcggaccagcucccccggcugcuggcccgcgccagcgagcuccagaccgagugcaugggccugcggaaggggcacggcacgcuggagcgccgguga

SEQ ID NO: 8517 - RNA, 540 nt, Artificial Sequence
  derived and/or modified sequence opt2 from Fibrinogen__Homo_sapiens__BAG62044
auggucaacgaccgcuggaagaccaugggcggcgccgcccagcucgaggaccgcccccgcgacaagccccaggcccgcaagcuccgccuccgcgagcgccccuccugcggcuacguccucugcaccguccuccucgcccucgccguccuccucgccgucgccgucaccggcgccguccucuuccucaaccacgcccacgcccccggcaccgcccccccccccgucgucuccaccggcgccgccuccgccaacuccgcccucgucaccgucgagcgcgccgacuccucccaccucuccauccucaucgacccccgcugccccgaccucaccgacuccuucgcccgccucgaguccgcccaggccuccguccuccaggcccucaccgagcaccaggcccagccccgccucgucggcgaccaggagcaggagcuccucgacacccucgccgaccagcucccccgccuccucgcccgcgccuccgagcuccagaccgagugcaugggccuccgcaagggccacggcacccucgagcgccgcuga

SEQ ID NO: 8518 - RNA, 540 nt, Artificial Sequence
  derived and/or modified sequence opt3 from Fibrinogen__Homo_sapiens__BAG62044
auggugaacgacagauggaagaccaugggcggggccgcucagcuggaggauaggccccgggacaaaccucaagcacgcaagcuccgacuucgugaaagaccaagcugcggauacguccuguguacaguuuuguuagcccuggcggugcuacucgcuguagccgugacuggugcaguccuguuccuuaaucacgcccaugcuccgggcacggcacccccuccagugguuuccaccggggccgcuucugccaacucagcgcuggugacagucgagagggcagauaguagccacuuguccauccucauugacccccggugcccugaucugacugacucuuuugcccgccuggaaucggcucaggccucagugcuccaggcauuaaccgagcaucaggcucaaccaagacugguaggagaucaggaacaggagcuuuuggacacacuggccgaucagcuacccaggcuccuggcgcgggccagcgagcuucaaaccgaauguaugggccugcgcaaaggucacgggacuuuggagcgaagauga

SEQ ID NO: 8519 - RNA, 540 nt, Artificial Sequence
  derived and/or modified sequence opt4 from Fibrinogen__Homo_sapiens__BAG62044
auggugaacgacagauggaagaccaugggcggcgccgcccagcuggaggacagacccagagacaagccccaggccagaaagcugagacugagagagagacccagcugcggcuacgugcugugcaccgugcugcuggcccuggccgugcugcuggccguggccgugaccggcgccgugcuguuccugaaccacgcccacgcccccggcaccgcccccccccccguggugagcaccggcgccgccagcgccaacagcgcccuggugaccguggagagagccgacagcagccaccugagcauccugaucgaccccagaugccccgaccugaccgacagcuucgccagacuggagagcgcccaggccagcgugcugcaggcccugaccgagcaccaggcccagcccagacuggugggcgaccaggagcaggagcugcuggacacccuggccgaccagcugcccagacugcuggccagagccagcgagcugcagaccgagugcaugggccugagaaagggccacggcacccuggagagaagauga

SEQ ID NO: 8520 - RNA, 540 nt, Artificial Sequence
  derived and/or modified sequence opt5 from Fibrinogen__Homo_sapiens__BAG62044
auggugaacgacagauggaagaccaugggcggggccgcucagcuggaggaucggccccgcgacaaaccucaagccagaaagcuccggcugcgcgaaagaccgagcugcggauacguccuuuguacaguucugcucgcgcuggcugugcuucuggccguggccgucacgggcgcuguucucuuccugaaucacgcccaugcucccgggaccgccccucccccugugguguccacaggagcggccucugcuaacagcgcccuggucaccguggagcgggcugauuccucucaccucagcauccugauugacccccgcugcccugaucuuacagacuccuuugccagacuggaaucugcgcaggccagcguucuccaggcucugaccgagcaucaggcccaaccgcggcuugugggcgaucaggaacaggagcugcucgacacacuggcugaucagcugccccgccuccuggccagagccuccgagcuucaaaccgaauguauggggcugcggaaaggacacggcacgcucgagcgcagauga

SEQ ID NO: 8521 - protein, 474 aa, Artificial Sequence
  Fibrinogen__Homo_sapiens__B4E1D3
MKRMVSWSFHKLKTMKHLLLLLLCVFLVKSQGVNDNEEGFFSARGHRPLDKKREEARPAKAAATQKKVERKAPDAGGCLHADPDLGVLCPTGCQLQEALLQQERPIRNSVDELNNNVEAVSQTSSSSFQYMYLLKDLWQKRQKQVKDNENVVNEYSSELEKHQLYIDETVNSNIPTNLRVLRSILENLRSKIQKLESDVSAQMEYCRTPCTVSCNIPVVSGKECEEIIRKGGETSEMYLIQPDSSVKPYRVYCDMNTENGGWTVIQNRQDGSVDFGRKWDPYKQGFGNVATNTDGKNYCGLPGEYWLGNDKISQLTRMGPTELLIEMEDWKGDKVKAHYGGFTVQNEANKYQISVNKYRGTAGNALMDGASQLMGENRTMTIHNGMFFSTYDRDNDGWLTSDPRKQCSKEDGGGWWYNRCHAANPNGRYYWGGQYTWDMAKHGTDDGVVWMNWKGSWYSMRKMSMKIRPFFPQQ

SEQ ID NO: 8522 - RNA, 1425 nt, Artificial Sequence
  Fibrinogen__Homo_sapiens__BAG64745
augaaaaggaugguuucuuggagcuuccacaaacuuaaaaccaugaaacaucuauuauugcuacuauuguguguuuuucuaguuaagucccaaggugucaacgacaaugaggaggguuucuucagugcccguggucaucgaccccuugacaagaagagagaagaggcucguccagccaaagcagcugccacucaaaagaaaguagaaagaaaagccccugaugcuggaggcugucuucacgcugacccagaccuggggguguuguguccuacaggaugucaguugcaagaggcuuugcuacaacaggaaaggccaaucagaaauaguguugaugaguuaaauaacaauguggaagcuguuucccagaccuccucuucuuccuuucaguacauguauuugcugaaagaccuguggcaaaagaggcagaagcaaguaaaagauaaugaaaauguagucaaugaguacuccucagaacuggaaaagcaccaauuauauauagaugagacugugaauagcaauaucccaacuaaccuucgugugcuucguucaauccuggaaaaccugagaagcaaaauacaaaaguuagaaucugaugucucagcucaaauggaauauugucgcaccccaugcacugucaguugcaauauuccuguggugucuggcaaagaaugugaggaaauuaucaggaaaggaggugaaacaucugaaauguaucucauucaaccugacaguucugucaaaccguauagaguauacugugacaugaauacagaaaauggaggauggacagugauucagaaccgucaagacgguaguguugacuuuggcaggaaaugggauccauauaaacagggauuuggaaauguugcaaccaacacagaugggaagaauuacuguggccuaccaggugaauauuggcuuggaaaugauaaaauuagccagcuuaccaggaugggacccacagaacuuuugauagaaauggaggacuggaaaggagacaaaguaaaggcucacuauggaggauucacuguacagaaugaagccaacaaauaccagaucucagugaacaaauacagaggaacagccgguaaugcccucauggauggagcaucucagcugaugggagaaaacaggaccaugaccauucacaacggcauguucuucagcacguaugacagagacaaugacggcugguuaacaucagaucccagaaaacaguguucuaaagaagacggugguggauggugguauaauagaugucaugcagccaauccaaacggcagauacuacugggguggacaguacaccugggacauggcaaagcauggcacagaugaugguguaguauggaugaauuggaaggggucaugguacucaaugaggaagaugaguaugaagaucaggcccuucuucccacagcaauag

SEQ ID NO: 8523 - RNA, 1425 nt, Artificial Sequence
  derived and/or modified sequence opt1 from Fibrinogen__Homo_sapiens__BAG64745
augaagcgcauggugagcugguccuuccacaagcugaagaccaugaagcaccuccugcugcuccugcugugcgucuuccucgucaagagccagggcgugaacgacaacgaggagggguucuucuccgcccggggccaccgcccccuggacaagaagcgggaggaggcccgcccggcgaaggccgccgccacccagaagaagguggagcggaaggcccccgacgccgggggcugccugcacgcggaccccgaccucggggugcugugccccacgggcugccagcugcaggaggcccuccugcagcaggagcgcccgauccggaacagcguggacgagcugaacaacaacgucgaggccgugucccagaccagcuccagcuccuuccaguacauguaccuccugaaggaccuguggcagaagcgccagaagcaggucaaggacaacgagaacguggugaacgaguacagcuccgagcucgagaagcaccagcuguacaucgacgagaccgugaacagcaacauccccaccaaccugcggguccuccgcuccauccuggagaaccugcggagcaagauccagaagcucgaguccgacgugagcgcgcagauggaguacugccgcacgcccugcaccguguccugcaacauccccgucgugagcggcaaggagugcgaggagaucauccggaagggcggggagaccuccgagauguaccugauccagccggacagcagcgugaagcccuaccgcgucuacugcgacaugaacaccgagaacgggggcuggacggugauccagaaccggcaggacggguccguggacuucggccgcaagugggaccccuacaagcagggcuucgggaacgucgccaccaacaccgacggcaagaacuacugcgggcugcccggcgaguacuggcucggcaacgacaagaucagccagcugacccggauggggccgacggagcugcucaucgagauggaggacuggaagggcgacaaggugaaggcccacuacgggggcuucaccgugcagaacgaggccaacaaguaccagaucuccgucaacaaguaccgcgggaccgccggcaacgcgcugauggacggcgccagccagcugaugggggagaaccggaccaugacgauccacaacggcauguucuucuccaccuacgaccgcgacaacgacggguggcucaccagcgacccccggaagcagugcuccaaggaggacggcgggggcuggugguacaaccgcugccacgccgccaaccccaacggccgcuacuacuggggcgggcaguacaccugggacauggccaagcacgggacggacgacggcguggucuggaugaacuggaaggggagcugguacuccaugcggaagaugagcaugaagauccgccccuucuucccgcagcaguga

SEQ ID NO: 8524 - RNA, 1425 nt, Artificial Sequence
  derived and/or modified sequence opt2 from Fibrinogen__Homo_sapiens__BAG64745
augaagcgcauggucuccugguccuuccacaagcucaagaccaugaagcaccuccuccuccuccuccucugcgucuuccucgucaagucccagggcgucaacgacaacgaggagggcuucuucuccgcccgcggccaccgcccccucgacaagaagcgcgaggaggcccgccccgccaaggccgccgccacccagaagaaggucgagcgcaaggcccccgacgccggcggcugccuccacgccgaccccgaccucggcguccucugccccaccggcugccagcuccaggaggcccuccuccagcaggagcgccccauccgcaacuccgucgacgagcucaacaacaacgucgaggccgucucccagaccuccuccuccuccuuccaguacauguaccuccucaaggaccucuggcagaagcgccagaagcaggucaaggacaacgagaacgucgucaacgaguacuccuccgagcucgagaagcaccagcucuacaucgacgagaccgucaacuccaacauccccaccaaccuccgcguccuccgcuccauccucgagaaccuccgcuccaagauccagaagcucgaguccgacgucuccgcccagauggaguacugccgcacccccugcaccgucuccugcaacauccccgucgucuccggcaaggagugcgaggagaucauccgcaagggcggcgagaccuccgagauguaccucauccagcccgacuccuccgucaagcccuaccgcgucuacugcgacaugaacaccgagaacggcggcuggaccgucauccagaaccgccaggacggcuccgucgacuucggccgcaagugggaccccuacaagcagggcuucggcaacgucgccaccaacaccgacggcaagaacuacugcggccuccccggcgaguacuggcucggcaacgacaagaucucccagcucacccgcaugggccccaccgagcuccucaucgagauggaggacuggaagggcgacaaggucaaggcccacuacggcggcuucaccguccagaacgaggccaacaaguaccagaucuccgucaacaaguaccgcggcaccgccggcaacgcccucauggacggcgccucccagcucaugggcgagaaccgcaccaugaccauccacaacggcauguucuucuccaccuacgaccgcgacaacgacggcuggcucaccuccgacccccgcaagcagugcuccaaggaggacggcggcggcuggugguacaaccgcugccacgccgccaaccccaacggccgcuacuacuggggcggccaguacaccugggacauggccaagcacggcaccgacgacggcgucgucuggaugaacuggaagggcuccugguacuccaugcgcaagauguccaugaagauccgccccuucuucccccagcaguga

SEQ ID NO: 8525 - RNA, 1425 nt, Artificial Sequence
  derived and/or modified sequence opt3 from Fibrinogen__Homo_sapiens__BAG64745
augaagagaauggugagcugguccuuccacaaacugaagaccaugaaacaucuccuucuguuguuacugugcgucuuucuaguuaagucucagggcgugaacgacaaugaggaaggguucuuuucagccaggggacaccggccccucgauaaaaagcgcgaggaagcucgaccugcaaaggccgcggcuacacaaaagaagguagagcguaaagccccagacgccgguggcugucugcaugcagauccggaccuuggggugcugugccccacuggaugucaguugcaggaagcucuccugcagcaagagagaccuaucaggaacagugucgaugagcugaauaacaauguggaagcaguuagccagacguccucuucgucauuccaguacauguaucucuuaaaggaccuguggcagaaacggcaaaaacaggugaaggauaacgagaaugucgugaacgaauacagcagugagcuugagaaacaccaguuguauauugacgaaaccguaaauuccaacauaccaacaaaucugcgcguucuaagaucuauccucgagaaccugaggagcaagauucagaaacuugaauccgaugugucagcccaaauggaguacugccggacucccuguaccgucaguugcaauaucccuguggugagcggcaaggaaugugaggagauuauccgcaaagguggggaaacaucugagauguaucugauacagccagacuccucagucaagcccuaccgaguuuauugcgauaugaacaccgaaaauggaggcuggacugugauccagaacagacaagacggcagcguagauuuugggaggaaaugggacccuuacaagcagggauucgguaacguggcuacaaauaccgacggcaagaacuacuguggguugccaggagaguauuggcucggcaaugauaaaauuagucagcugacgcggauggguccgacugaauuacugaucgagauggaggacuggaagggggauaaagucaaggcccauuacggaggcuuuaccgugcagaacgaagcgaauaaauaucaaauuucuguuaacaaguaccguggcacagcagggaaugcccucauggacggagcuucccagcuuaugggugagaaccgcacuaugaccauccacaauggcauguucuuuagcacauaugauagagacaacgauggguggcugaccucggaccccaggaagcagugcucuaaagaagauggaggcgguuggugguacaaucggugucacgccgcaaacccuaaugggcgauauuacuggggcggacaguacacgugggacauggcuaagcauggcacugaugacgggguggucuggaugaacuggaaaggauccugguauucaaugcgcaagaugaguaugaaaauaagaccauucuuuccccaacaguga

SEQ ID NO: 8526 - RNA, 1425 nt, Artificial Sequence
  derived and/or modified sequence opt4 from Fibrinogen__Homo_sapiens__BAG64745
augaagagaauggugagcuggagcuuccacaagcugaagaccaugaagcaccugcugcugcugcugcugugcguguuccuggugaagagccagggcgugaacgacaacgaggagggcuucuucagcgccagaggccacagaccccuggacaagaagagagaggaggccagacccgccaaggccgccgccacccagaagaagguggagagaaaggcccccgacgccggcggcugccugcacgccgaccccgaccugggcgugcugugccccaccggcugccagcugcaggaggcccugcugcagcaggagagacccaucagaaacagcguggacgagcugaacaacaacguggaggccgugagccagaccagcagcagcagcuuccaguacauguaccugcugaaggaccuguggcagaagagacagaagcaggugaaggacaacgagaacguggugaacgaguacagcagcgagcuggagaagcaccagcuguacaucgacgagaccgugaacagcaacauccccaccaaccugagagugcugagaagcauccuggagaaccugagaagcaagauccagaagcuggagagcgacgugagcgcccagauggaguacugcagaacccccugcaccgugagcugcaacauccccguggugagcggcaaggagugcgaggagaucaucagaaagggcggcgagaccagcgagauguaccugauccagcccgacagcagcgugaagcccuacagaguguacugcgacaugaacaccgagaacggcggcuggaccgugauccagaacagacaggacggcagcguggacuucggcagaaagugggaccccuacaagcagggcuucggcaacguggccaccaacaccgacggcaagaacuacugcggccugcccggcgaguacuggcugggcaacgacaagaucagccagcugaccagaaugggccccaccgagcugcugaucgagauggaggacuggaagggcgacaaggugaaggcccacuacggcggcuucaccgugcagaacgaggccaacaaguaccagaucagcgugaacaaguacagaggcaccgccggcaacgcccugauggacggcgccagccagcugaugggcgagaacagaaccaugaccauccacaacggcauguucuucagcaccuacgacagagacaacgacggcuggcugaccagcgaccccagaaagcagugcagcaaggaggacggcggcggcuggugguacaacagaugccacgccgccaaccccaacggcagauacuacuggggcggccaguacaccugggacauggccaagcacggcaccgacgacggcgugguguggaugaacuggaagggcagcugguacagcaugagaaagaugagcaugaagaucagacccuucuucccccagcaguga

SEQ ID NO: 8527 - RNA, 1425 nt, Artificial Sequence
  derived and/or modified sequence opt5 from Fibrinogen__Homo_sapiens__BAG64745
augaagagaauggugagcugguccuuccacaaacugaagaccaugaaacaucuccugcuucugcuccugugcgucuuucuuguuaagucucagggcgugaacgacaaugaggaaggguucuuuagcgcccggggacaccgcccccuggauaaaaagagagaggaagcucggccugccaaggcggcugccacacagaaaaagguggagcgcaaagccccggacgcuggcgggugucuccaugccgaucccgaccugggaguccugugcccuacgggcugucaacuccaggaagcucugcuucagcaagagagacccauccggaacuccguggaugagcugaauaacaauguugaagccgugucucagaccagcuccucuagcuuccaguacauguaucuccugaaggaccuuuggcagaaacgccaaaagcaggucaaggauaacgagaaugugguuaacgaauacuccagcgagcuggagaaacaccagcucuauauugacgaaacagucaauucuaacaucccuaccaaucugagagugcugcgguccauucucgagaaccugcgcagcaagauccagaaacuugaaucugauguguccgcgcaaauggaguacugcagaacacccuguaccgugagcugcaauauuccugucguuucugggaaggaaugugaggagaucauccggaaaggaggcgaaacauccgagauguaucugauucagccggacagcuccgugaagcccuaccgcguguauugcgauaugaacaccgaaaauggcggguggacggucauccagaacagacaagacggaucuguggauuuuggccggaaaugggacccuuacaagcagggguucggaaacguugccaccaauacagacggcaagaacuacugugggcuccccggagaguauuggcugggcaaugauaaaauuagccagcuuacccgcaugggcccuacagaacugcucaucgagauggaggacuggaagggggauaaagugaaggcucauuacggaggcuuuaccguccagaacgaagccaauaaauaucaaauuuccgugaacaaguacagagggacggcuggaaaugcccugauggacggcgcgagccagcugaugggggagaaccggacaaugaccauccacaauggaauguucuuuucuacauaugauagagacaacgauggcuggcucaccuccgacccccgcaagcagugcagcaaagaagauggcgggggauggugguacaaucggugucacgccgcuaacccgaauggcagauauuacuggggagggcaguacaccugggacauggccaagcauggcacagaugacgggguuguguggaugaacuggaaaggcucuugguauagcaugcgcaagauguccaugaaaauucggccuuucuuuccccaacaguga

SEQ ID NO: 8528 - protein, 344 aa, Artificial Sequence
  Fibrinogen__Homo_sapiens__D3DP13
MYLLKDLWQKRQKQVKDNENVVNEYSSELEKHQLYIDETVNSNIPTNLRVLRSILENLRSKIQKLESDVSAQMEYCRTPCTVSCNIPVVSGKECEEIIRKGGETSEMYLIQPDSSVKPYRVYCDMNTENGGWTVIQNRQDGSVDFGRKWDPYKQGFGNVATNTDGKNYCGLPGEYWLGNDKISQLTRMGPTELLIEMEDWKGDKVKAHYGGFTVQNEANKYQISVNKYRGTAGNALMDGASQLMGENRTMTIHNGMFFSTYDRDNDGWLTSDPRKQCSKEDGGGWWYNRCHAANPNGRYYWGGQYTWDMAKHGTDDGVVWMNWKGSWYSMRKMSMKIRPFFPQQ

SEQ ID NO: 8529 - RNA, 1035 nt, Artificial Sequence
  Fibrinogen__Homo_sapiens__EAX04934
auguauuugcugaaagaccuguggcaaaagaggcagaagcaaguaaaagauaaugaaaauguagucaaugaguacuccucagaacuggaaaagcaccaauuauauauagaugagacugugaauagcaauaucccaacuaaccuucgugugcuucguucaauccuggaaaaccugagaagcaaaauacaaaaguuagaaucugaugucucagcucaaauggaauauugucgcaccccaugcacugucaguugcaauauuccuguggugucuggcaaagaaugugaggaaauuaucaggaaaggaggugaaacaucugaaauguaucucauucaaccugacaguucugucaaaccguauagaguauacugugacaugaauacagaaaauggaggauggacagugauucagaaccgucaagacgguaguguugacuuuggcaggaaaugggauccauauaaacagggauuuggaaauguugcaaccaacacagaugggaagaauuacuguggccuaccaggugaauauuggcuuggaaaugauaaaauuagccagcuuaccaggaugggacccacagaacuuuugauagaaauggaggacuggaaaggagacaaaguaaaggcucacuauggaggauucacuguacagaaugaagccaacaaauaccagaucucagugaacaaauacagaggaacagccgguaaugcccucauggauggagcaucucagcugaugggagaaaacaggaccaugaccauucacaacggcauguucuucagcacguaugacagagacaaugacggcugguuaacaucagaucccagaaaacaguguucuaaagaagacggugguggauggugguauaauagaugucaugcagccaauccaaacggcagauacuacugggguggacaguacaccugggacauggcaaagcauggcacagaugaugguguaguauggaugaauuggaaggggucaugguacucaaugaggaagaugaguaugaagaucaggcccuucuucccacagcaauag

SEQ ID NO: 8530 - RNA, 1035 nt, Artificial Sequence
  derived and/or modified sequence opt1 from Fibrinogen__Homo_sapiens__EAX04934
auguaccugcucaaggaccuguggcagaagcgccagaagcaggucaaggacaacgagaacguggugaacgaguacagcuccgagcuggagaagcaccagcucuacaucgacgagaccgugaacagcaacauccccaccaaccugcggguccugcgcuccauccucgagaaccugcggagcaagauccagaagcuggaguccgacgugagcgcccagauggaguacugccgcacgccgugcaccguguccugcaacauccccgucgugagcggcaaggagugcgaggagaucauccggaagggcggggagaccuccgagauguaccucauccagcccgacagcuccgugaagcccuaccgcgucuacugcgacaugaacaccgagaacgggggcuggacggugauccagaaccggcaggacgggagcguggacuucggccgcaagugggacccguacaagcagggcuucgggaacgucgccaccaacaccgacggcaagaacuacugcgggcugcccggcgaguacuggcuggggaacgacaagaucucccagcucacccggaugggccccacggagcugcugaucgagauggaggacuggaagggcgacaaggugaaggcgcacuacgggggcuucaccgugcagaacgaggccaacaaguaccagaucagcgucaacaaguaccgcgggaccgccggcaacgcccucauggacggcgccucccagcugaugggggagaaccggaccaugacgauccacaacggcauguucuucagcaccuacgaccgcgacaacgacggguggcugaccuccgacccccggaagcagugcagcaaggaggacggcgggggcuggugguacaaccgcugccacgcggccaacccgaacggccgguacuacuggggcgggcaguacaccugggacauggccaagcacgggacggacgacggcgugguguggaugaacuggaagggguccugguacagcaugcgcaagaugagcaugaagauccggcccuucuucccccagcaguga

SEQ ID NO: 8531 - RNA, 1035 nt, Artificial Sequence
  derived and/or modified sequence opt2 from Fibrinogen__Homo_sapiens__EAX04934
auguaccuccucaaggaccucuggcagaagcgccagaagcaggucaaggacaacgagaacgucgucaacgaguacuccuccgagcucgagaagcaccagcucuacaucgacgagaccgucaacuccaacauccccaccaaccuccgcguccuccgcuccauccucgagaaccuccgcuccaagauccagaagcucgaguccgacgucuccgcccagauggaguacugccgcacccccugcaccgucuccugcaacauccccgucgucuccggcaaggagugcgaggagaucauccgcaagggcggcgagaccuccgagauguaccucauccagcccgacuccuccgucaagcccuaccgcgucuacugcgacaugaacaccgagaacggcggcuggaccgucauccagaaccgccaggacggcuccgucgacuucggccgcaagugggaccccuacaagcagggcuucggcaacgucgccaccaacaccgacggcaagaacuacugcggccuccccggcgaguacuggcucggcaacgacaagaucucccagcucacccgcaugggccccaccgagcuccucaucgagauggaggacuggaagggcgacaaggucaaggcccacuacggcggcuucaccguccagaacgaggccaacaaguaccagaucuccgucaacaaguaccgcggcaccgccggcaacgcccucauggacggcgccucccagcucaugggcgagaaccgcaccaugaccauccacaacggcauguucuucuccaccuacgaccgcgacaacgacggcuggcucaccuccgacccccgcaagcagugcuccaaggaggacggcggcggcuggugguacaaccgcugccacgccgccaaccccaacggccgcuacuacuggggcggccaguacaccugggacauggccaagcacggcaccgacgacggcgucgucuggaugaacuggaagggcuccugguacuccaugcgcaagauguccaugaagauccgccccuucuucccccagcaguga

SEQ ID NO: 8532 - RNA, 1035 nt, Artificial Sequence
  derived and/or modified sequence opt3 from Fibrinogen__Homo_sapiens__EAX04934
auguaccugcucaaggaccuuuggcagaaaagacaaaaacaggugaaggauaacgagaaugucguuaacgaauauagcuccgagcuggaaaagcaccaguuguacaucgacgagaccguaaauucuaacauucccacaaauuuaagggugcugcggucaauacuagaaaaccuccgcaguaaaauccagaagcuggagagcgauguguccgcccaaauggaguauugccgaacuccuuguacggucucuugcaauauuccagugguuucgggcaaggaaugugaggaaaucauucguaaagggggagagaccucagagauguaccuuauccagccggacagcagugugaagcccuauagagucuacugcgauaugaacacagaaaaugguggcuggacugugauacagaacaggcaggacggguccguagauuucggacggaaaugggacccuuauaagcaaggcuuugguaauguugcuaccaacacagaugggaaaaauuacuguggacugccaggcgaguacugguugggcaacgacaagaucucucagcucacccgcauggggcccacugaacugcugauugagauggaagauuggaagggagacaaagugaaggcacauuaugguggcuucacaguccagaaugaggccaacaaauaccagaucagcgugaacaaguauagagggaccgcgggaaaugcucucauggauggcgccucccaauuaaugggugagaacaggacgaugacuauucacaaugggauguuuuucucaaccuacgaccgggacaacgauggauggcugacaagugacccucgcaaacagugcagcaaggaagauggcggcggguggugguauaaucgaugucaugcagccaacccaaauggaagauacuauugggguggccaguacacuugggacauggcuaaacacgggaccgaugacggaguggucuggaugaacuggaagggcucuugguacuccaugaggaagaugucaaugaaaauccggcccuuuuucccucaacaguga

SEQ ID NO: 8533 - RNA, 1035 nt, Artificial Sequence
  derived and/or modified sequence opt4 from Fibrinogen__Homo_sapiens__EAX04934
auguaccugcugaaggaccuguggcagaagagacagaagcaggugaaggacaacgagaacguggugaacgaguacagcagcgagcuggagaagcaccagcuguacaucgacgagaccgugaacagcaacauccccaccaaccugagagugcugagaagcauccuggagaaccugagaagcaagauccagaagcuggagagcgacgugagcgcccagauggaguacugcagaacccccugcaccgugagcugcaacauccccguggugagcggcaaggagugcgaggagaucaucagaaagggcggcgagaccagcgagauguaccugauccagcccgacagcagcgugaagcccuacagaguguacugcgacaugaacaccgagaacggcggcuggaccgugauccagaacagacaggacggcagcguggacuucggcagaaagugggaccccuacaagcagggcuucggcaacguggccaccaacaccgacggcaagaacuacugcggccugcccggcgaguacuggcugggcaacgacaagaucagccagcugaccagaaugggccccaccgagcugcugaucgagauggaggacuggaagggcgacaaggugaaggcccacuacggcggcuucaccgugcagaacgaggccaacaaguaccagaucagcgugaacaaguacagaggcaccgccggcaacgcccugauggacggcgccagccagcugaugggcgagaacagaaccaugaccauccacaacggcauguucuucagcaccuacgacagagacaacgacggcuggcugaccagcgaccccagaaagcagugcagcaaggaggacggcggcggcuggugguacaacagaugccacgccgccaaccccaacggcagauacuacuggggcggccaguacaccugggacauggccaagcacggcaccgacgacggcgugguguggaugaacuggaagggcagcugguacagcaugagaaagaugagcaugaagaucagacccuucuucccccagcaguga

SEQ ID NO: 8534 - RNA, 1035 nt, Artificial Sequence
  derived and/or modified sequence opt5 from Fibrinogen__Homo_sapiens__EAX04934
auguaccugcucaaggaccuguggcagaaaagacaaaaacaggugaaggauaacgagaaugucguuaacgaauauagcuccgagcuugaaaagcaccagcuguacaucgacgagaccgucaauucuaacauucccacaaaucuccgggugcugcgcagcauccuugaaaaccugagauccaaaauucagaagcucgagucugaugugagcgcccaaauggaguauugccggacgccuuguaccguguccugcaauaucccgguugugucuggcaaggaaugugaggaaauuauccgcaaagggggagagacaagcgagauguaccugauccagcccgacuccagcgucaagccuuauagaguguacugcgauaugaacaccgaaaauggcggguggacaguuauucagaaccggcaggacggaucuguggauuucggccgcaaaugggaccccuauaagcaaggguuuggaaaugucgcuaccaacacagauggcaaaaauuacuguggccugccuggggaguacuggcucggaaacgacaagaucucccagcugaccagaaugggccccacggaacuucugauugagauggaagauuggaagggggacaaagugaaggcccauuauggaggcuucaccgugcagaaugaggcgaacaaauaccagaucagcgucaacaaguaucgggggacagcuggaaaugcccucauggauggcgccucucaacugaugggcgagaaccgcaccaugacaauucacaaugggauguuuuucuccaccuacgacagagacaacgauggauggcuuacgagcgacccucggaaacagugcucuaaggaagauggcgggggauggugguauaaucgcugucaugcugccaacccgaauggcagauacuauuggggagggcaguacacaugggacauggcuaaacacggcaccgaugacggcguuguguggaugaacuggaagggguccugguacagcaugcggaagauguccaugaaaauccgccccuuuuucccucaacaguga

SEQ ID NO: 8535 - protein, 334 aa, Artificial Sequence
  Fibrinogen__Homo_sapiens__D3DP16
MIDAATLKSRKMLEEIMKYEASILTHDSSIRYLQEIYNSNNQKIVNLKEKVAQLEAQCQEPCKDTVQIHDITGKDCQDIANKGAKQSGLYFIKPLKANQQFLVYCEIDGSGNGWTVFQKRLDGSVDFKKNWIQYKEGFGHLSPTGTTEFWLGNEKIHLISTQSAIPYALRVELEDWNGRTSTADYAMFKVGPEADKYRLTYAYFAGGDAGDAFDGFDFGDDPSDKFFTSHNGMQFSTWDNDNDKFEGNCAEQDGSGWWMNKCHAGHLNGVYYQGGTYSKASTPNGYDNGIIWATWKTRWYSMKKTTMKIIPFNRLTIGEGQQHHLGGAKQAGDV

SEQ ID NO: 8536 - RNA, 1005 nt, Artificial Sequence
  Fibrinogen__Homo_sapiens__EAX04905
augauagacgcugcuacuuugaaguccaggaaaauguuagaagaaauuaugaaauaugaagcaucgauuuuaacacaugacucaaguauucgauauuugcaggaaauauauaauucaaauaaucaaaagauuguuaaccugaaagagaagguagcccagcuugaagcacagugccaggaaccuugcaaagacacggugcaaauccaugauaucacugggaaagauugucaagacauugccaauaagggagcuaaacagagcgggcuuuacuuuauuaaaccucugaaagcuaaccagcaauucuuagucuacugugaaaucgaugggucuggaaauggauggacuguguuucagaagagacuugauggcaguguagauuucaagaaaaacuggauucaauauaaagaaggauuuggacaucugucuccuacuggcacaacagaauuuuggcugggaaaugagaagauucauuugauaagcacacagucugccaucccauaugcauuaagaguggaacuggaagacuggaauggcagaaccaguacugcagacuaugccauguucaaggugggaccugaagcugacaaguaccgccuaacauaugccuacuucgcugguggggaugcuggagaugccuuugauggcuuugauuuuggcgaugauccuagugacaaguuuuucacaucccauaauggcaugcaguucaguaccugggacaaugacaaugauaaguuugaaggcaacugugcugaacaggauggaucugguugguggaugaacaagugucacgcuggccaucucaauggaguuuauuaccaagguggcacuuacucaaaagcaucuacuccuaaugguuaugauaauggcauuauuugggccacuuggaaaacccggugguauuccaugaagaaaaccacuaugaagauaaucccauucaacagacucacaauuggagaaggacagcaacaccaccuggggggagccaaacaggcuggagacguuuaa

SEQ ID NO: 8537 - RNA, 1005 nt, Artificial Sequence
  derived and/or modified sequence opt1 from Fibrinogen__Homo_sapiens__EAX04905
augaucgacgccgccacccucaagagccgcaagaugcuggaggagaucaugaaguacgaggcguccauccugacccacgacagcuccauccgguaccugcaggagaucuacaacagcaacaaccagaagaucgugaaccucaaggagaaggucgcccagcuggaggcccagugccaggagcccugcaaggacacggugcagauccacgacaucaccggcaaggacugccaggacaucgccaacaagggggccaagcaguccggccuguacuucaucaagccgcucaaggcgaaccagcaguuccugguguacugcgagaucgacgggagcggcaacggguggaccgucuuccagaagcgccuggacggcuccguggacuucaagaagaacuggauccaguacaaggagggcuucgggcaccucagccccaccggcacgaccgaguucuggcuggggaacgagaagauccaccugaucuccacccagagcgccauccccuacgcccuccggguggagcuggaggacuggaacggccgcaccuccacggccgacuacgcgauguucaaggucgggcccgaggccgacaaguaccggcugaccuacgccuacuucgccggcggcgacgccggggacgcguucgacggcuucgacuucggggacgacccgagcgacaaguucuucaccucccacaacggcaugcaguucagcaccugggacaacgacaacgacaaguucgagggcaacugcgccgagcaggacggguccggcugguggaugaacaagugccacgccgggcaccucaacggcguguacuaccagggcgggacguacagcaaggccuccacccccaacggcuacgacaacgggaucaucugggccaccuggaagacccgcugguacagcaugaagaagacgaccaugaagaucauccccuucaaccggcugaccaucggcgaggggcagcagcaccaccugggcggggcgaagcaggccggcgacguguga

SEQ ID NO: 8538 - RNA, 1005 nt, Artificial Sequence
  derived and/or modified sequence opt2 from Fibrinogen__Homo_sapiens__EAX04905
augaucgacgccgccacccucaagucccgcaagaugcucgaggagaucaugaaguacgaggccuccauccucacccacgacuccuccauccgcuaccuccaggagaucuacaacuccaacaaccagaagaucgucaaccucaaggagaaggucgcccagcucgaggcccagugccaggagcccugcaaggacaccguccagauccacgacaucaccggcaaggacugccaggacaucgccaacaagggcgccaagcaguccggccucuacuucaucaagccccucaaggccaaccagcaguuccucgucuacugcgagaucgacggcuccggcaacggcuggaccgucuuccagaagcgccucgacggcuccgucgacuucaagaagaacuggauccaguacaaggagggcuucggccaccucucccccaccggcaccaccgaguucuggcucggcaacgagaagauccaccucaucuccacccaguccgccauccccuacgcccuccgcgucgagcucgaggacuggaacggccgcaccuccaccgccgacuacgccauguucaaggucggccccgaggccgacaaguaccgccucaccuacgccuacuucgccggcggcgacgccggcgacgccuucgacggcuucgacuucggcgacgaccccuccgacaaguucuucaccucccacaacggcaugcaguucuccaccugggacaacgacaacgacaaguucgagggcaacugcgccgagcaggacggcuccggcugguggaugaacaagugccacgccggccaccucaacggcgucuacuaccagggcggcaccuacuccaaggccuccacccccaacggcuacgacaacggcaucaucugggccaccuggaagacccgcugguacuccaugaagaagaccaccaugaagaucauccccuucaaccgccucaccaucggcgagggccagcagcaccaccucggcggcgccaagcaggccggcgacgucuga

SEQ ID NO: 8539 - RNA, 1005 nt, Artificial Sequence
  derived and/or modified sequence opt3 from Fibrinogen__Homo_sapiens__EAX04905
augaucgacgccgcuacccugaaaagcagaaaaaugcucgaggaaauuaugaaguacgaggcauccauacuuacacacgauucuucaaucagguaucugcaggaaauuuacaacaguaauaaccaaaagaucgugaauuugaaggagaaagucgcccaguuagaagcgcagugccaggagcccuguaaggacacuguucaaauucaugauaucacgggcaaggacugccaggauauagcuaacaaaggggccaagcagagcggacuguauuucaucaaaccucuaaaggcaaaucagcaauuucucguguacugugagauugacgguuccggcaacggguggaccguauuccagaaacggcuggauggaucuguggacuuuaagaagaauuggauccaguauaaagaaggcuucggucaccuuucgccaacagggacuaccgaguuuuggcugggaaacgaaaagauucauuugaucucaacacagagcgccauaccguacgcucuccgcgucgagcuggaggauuggaauggccgaaccaguacugcagacuaugccauguucaaagugggccccgaagcugauaaguaccgucugacauacgccuauuuugcagggggagacgcgggugaugccuucgacggcuuugacuucggggaugacccuuccgauaaauuuuucaccucucacaacggaaugcaauuuagcacgugggacaaugauaacgacaaguucgagggcaauugcgcugaacaggaugguuccgggugguggaugaacaaaugucaugccggacaccucaauggcguuuacuaucagggcgggacuuacucaaaggcaaguaccccaaacggauaugacaacgguauuaucugggcuacauggaagacuagaugguacagcaugaaaaagaccacaaugaaaauuauccccuucaauagguuaaccaucggcgaggggcaacagcaccaucugggaggcgccaagcaggcgggugauguguga

SEQ ID NO: 8540 - RNA, 1005 nt, Artificial Sequence
  derived and/or modified sequence opt4 from Fibrinogen__Homo_sapiens__EAX04905
augaucgacgccgccacccugaagagcagaaagaugcuggaggagaucaugaaguacgaggccagcauccugacccacgacagcagcaucagauaccugcaggagaucuacaacagcaacaaccagaagaucgugaaccugaaggagaagguggcccagcuggaggcccagugccaggagcccugcaaggacaccgugcagauccacgacaucaccggcaaggacugccaggacaucgccaacaagggcgccaagcagagcggccuguacuucaucaagccccugaaggccaaccagcaguuccugguguacugcgagaucgacggcagcggcaacggcuggaccguguuccagaagagacuggacggcagcguggacuucaagaagaacuggauccaguacaaggagggcuucggccaccugagccccaccggcaccaccgaguucuggcugggcaacgagaagauccaccugaucagcacccagagcgccauccccuacgcccugagaguggagcuggaggacuggaacggcagaaccagcaccgccgacuacgccauguucaaggugggccccgaggccgacaaguacagacugaccuacgccuacuucgccggcggcgacgccggcgacgccuucgacggcuucgacuucggcgacgaccccagcgacaaguucuucaccagccacaacggcaugcaguucagcaccugggacaacgacaacgacaaguucgagggcaacugcgccgagcaggacggcagcggcugguggaugaacaagugccacgccggccaccugaacggcguguacuaccagggcggcaccuacagcaaggccagcacccccaacggcuacgacaacggcaucaucugggccaccuggaagaccagaugguacagcaugaagaagaccaccaugaagaucauccccuucaacagacugaccaucggcgagggccagcagcaccaccugggcggcgccaagcaggccggcgacguguga

SEQ ID NO: 8541 - RNA, 1005 nt, Artificial Sequence
  derived and/or modified sequence opt5 from Fibrinogen__Homo_sapiens__EAX04905
augaucgacgccgcuacccucaagagcagaaaaaugcuggaggaaauuaugaaguacgaggccuccauccugacacacgauucuagcauucgguaucuucaggaaaucuacaacuccaauaaccagaaaauugugaaucugaaggagaaagucgcgcagcucgaagcucagugccaggagcccuguaaggacacgguucaaauccaugauaucaccggcaaggacugccaggauauugccaacaaaggggccaagcagucuggacuguauuucaucaaaccucuuaaggcuaaucagcaauuucugguguacugugagauugacggcagcgggaacggauggacaguguuccagaaacgccucgauggcuccgucgacuuuaagaagaauuggauccaguauaaagaaggguucggacaccugucuccgaccggcacaaccgaguuuuggcugggcaacgaaaagauucaucucaucagcacacaguccgccauucccuacgcucugagaguggagcuugaggauuggaaugggcggaccagcacggccgacuaugcgauguucaaaguuggaccugaagccgauaaguaccgccugaccuacgcuuauuuugccggcggggacgcuggagaugccuucgacggcuuugacuucggggaugaccccucugauaaauuuuucacaucccacaacggaaugcaauuuagcaccugggacaaugauaacgacaaguucgagggcaauugcgcggaacaggauggcucugggugguggaugaacaaaugucaugccggacaccucaauggcguguacuaucaagggggaacauacuccaaggcuagcaccccuaacggcuaugacaacgggaucaucugggccacguggaagacaagaugguacucuaugaaaaagaccacaaugaaaauuauccccuucaaucggcugaccauuggagagggccaacagcaccaucuuggcggggcuaagcaggccggagaugucuga

SEQ ID NO: 8542 - protein, 253 aa, Artificial Sequence
  Fibrinogen__Homo_sapiens__D3DSP9
MAKVFSFILVTTALIMGREISADCSEIFNDGYKLSGFYKIKPLQSPAEFSVYCDMSDGGGWTVIQRRSDGSENFNRGWKDYENGFGNFVQKHGEYWLGNKNLHFLTTQEDYTLKIDLADFEKNSRYAQYKNFKVGDEKNFYELNIGEYSGTAGDSLAGNFHPEVQWWASHQRMKFSTWDRDHDNYEGNCAEEDQSGWWFNRCHSANLNGVYYSGPYTAKTDNGIVWYTWHGWWYSLKSVVMKIRPNDFIPNVI

SEQ ID NO: 8543 - RNA, 762 nt, Artificial Sequence
  Fibrinogen__Homo_sapiens__EAW63802
auggcaaagguguucaguuucauccuuguuaccaccgcucugauaaugggcagggaaauuucggcagauuguucagagauuuucaaugauggguauaagcucaguggauuuuacaaaaucaaaccucuccagagcccagcagaauuuucuguuuauugugacauguccgauggaggaggauggacuguaauucagagacgaucugauggcagugaaaacuuuaacagaggauggaaagacuaugaaaauggcuuuggaaauuuuguccaaaaacauggugaauauuggcugggcaauaaaaaucuucacuucuugaccacucaagaagacuacacuuuaaaaaucgaccuugcagauuuugaaaaaaauagccguuaugcacaauauaagaauuucaaaguuggagaugaaaagaauuucuacgaguugaauauuggggaauauucuggaacagcuggagauucccuugcggggaauuuucauccugaggugcaguggugggcuagucaccaaagaaugaaauucagcacgugggacagagaucaugacaacuaugaagggaacugcgcagaagaagaucagucuggcuggugguuuaacaggugucacucugcaaaccugaaugguguauacuacagcggccccuacacggcuaaaacagacaaugggauugucugguacaccuggcauggguggugguauucucugaaaucugugguuaugaaaauuaggccaaaugauuuuauuccaaauguaauuuaa

SEQ ID NO: 8544 - RNA, 762 nt, Artificial Sequence
  derived and/or modified sequence opt1 from Fibrinogen__Homo_sapiens__EAW63802
auggccaagguguucagcuucauccuggucaccaccgcccugaucaugggccgcgagaucuccgcggacugcagcgagaucuucaacgacggguacaagcuguccggcuucuacaagaucaagccccugcagagcccggccgaguucuccguguacugcgacaugagcgacgggggcggguggacggugauccagcggcgcuccgacggcagcgagaacuucaaccggggcuggaaggacuacgagaacggguucggcaacuucguccagaagcacggggaguacuggcucggcaacaagaaccugcacuuccugaccacccaggaggacuacacccucaagaucgaccuggccgacuucgagaagaacucccgcuacgcccaguacaagaacuucaaggugggggacgagaagaacuucuacgagcugaacaucggcgaguacagcggcacggccggggacucccucgcgggcaacuuccaccccgaggugcaguggugggccagccaccagcggaugaaguucuccaccugggaccgcgaccacgacaacuacgaggggaacugcgccgaggaggaccagagcggcuggugguucaaccggugccacuccgccaaccugaacggcgucuacuacagcgggcccuacaccgcgaagaccgacaacggcaucgugugguacacguggcacggguggugguacucccucaagagcguggucaugaagauccgccccaacgacuucaucccgaacgugaucuga

SEQ ID NO: 8545 - RNA, 762 nt, Artificial Sequence
  derived and/or modified sequence opt2 from Fibrinogen__Homo_sapiens__EAW63802
auggccaaggucuucuccuucauccucgucaccaccgcccucaucaugggccgcgagaucuccgccgacugcuccgagaucuucaacgacggcuacaagcucuccggcuucuacaagaucaagccccuccagucccccgccgaguucuccgucuacugcgacauguccgacggcggcggcuggaccgucauccagcgccgcuccgacggcuccgagaacuucaaccgcggcuggaaggacuacgagaacggcuucggcaacuucguccagaagcacggcgaguacuggcucggcaacaagaaccuccacuuccucaccacccaggaggacuacacccucaagaucgaccucgccgacuucgagaagaacucccgcuacgcccaguacaagaacuucaaggucggcgacgagaagaacuucuacgagcucaacaucggcgaguacuccggcaccgccggcgacucccucgccggcaacuuccaccccgagguccaguggugggccucccaccagcgcaugaaguucuccaccugggaccgcgaccacgacaacuacgagggcaacugcgccgaggaggaccaguccggcuggugguucaaccgcugccacuccgccaaccucaacggcgucuacuacuccggccccuacaccgccaagaccgacaacggcaucgucugguacaccuggcacggcuggugguacucccucaaguccgucgucaugaagauccgccccaacgacuucauccccaacgucaucuga

SEQ ID NO: 8546 - RNA, 762 nt, Artificial Sequence
  derived and/or modified sequence opt3 from Fibrinogen__Homo_sapiens__EAW63802
auggccaagguguucagcuuuauccuggucaccacagcucucauuaugggcagagagauauccgcagacugcucugaaaucuucaacgauggguacaaacuuucaggauuuuauaagauuaaaccccugcagaguccugccgaguucagcguuuacugugacauguccgaugguggcggguggacugugauccaaaggcggucugacggaucggaaaauuuuaaccgcggcuggaaggauuaugagaaugguuucgggaacuuuguacagaaacacggagaauacugguugggcaauaagaacuuacauuuccugacgacccaggaggacuauacacuaaagauugaucucgcggacuuugagaaaaauucacgauacgcucaguauaagaacuucaaagugggcgaugaaaagaauuuuuacgagcugaacaucggggaauacagcggaacugccggugacagucuugcaggcaauuuccacccagagguccaauggugggccucccaucagcguaugaaauuuucuaccugggauagagaccacgauaacuaugaggggaauugcgcugaagaggaccagagcggauggugguucaacaggugucauuccgcaaaucugaacggcguguacuauucagguccguacacagccaagaccgacaacgggauaguuugguauacuuggcacggauggugguacaguuugaaaagcguggucaugaagauccggcccaaugauuucauuccuaacgugaucuga

SEQ ID NO: 8547 - RNA, 762 nt, Artificial Sequence
  derived and/or modified sequence opt4 from Fibrinogen__Homo_sapiens__EAW63802
auggccaagguguucagcuucauccuggugaccaccgcccugaucaugggcagagagaucagcgccgacugcagcgagaucuucaacgacggcuacaagcugagcggcuucuacaagaucaagccccugcagagccccgccgaguucagcguguacugcgacaugagcgacggcggcggcuggaccgugauccagagaagaagcgacggcagcgagaacuucaacagaggcuggaaggacuacgagaacggcuucggcaacuucgugcagaagcacggcgaguacuggcugggcaacaagaaccugcacuuccugaccacccaggaggacuacacccugaagaucgaccuggccgacuucgagaagaacagcagauacgcccaguacaagaacuucaaggugggcgacgagaagaacuucuacgagcugaacaucggcgaguacagcggcaccgccggcgacagccuggccggcaacuuccaccccgaggugcaguggugggccagccaccagagaaugaaguucagcaccugggacagagaccacgacaacuacgagggcaacugcgccgaggaggaccagagcggcuggugguucaacagaugccacagcgccaaccugaacggcguguacuacagcggccccuacaccgccaagaccgacaacggcaucgugugguacaccuggcacggcuggugguacagccugaagagcguggugaugaagaucagacccaacgacuucauccccaacgugaucuga

SEQ ID NO: 8548 - RNA, 762 nt, Artificial Sequence
  derived and/or modified sequence opt5 from Fibrinogen__Homo_sapiens__EAW63802
auggccaagguguucagcuuuauccuggucaccacagcucucauuaugggcagagagaucuccgccgacugcucugaaauuuucaacgauggguacaaacugagcggauuuuauaagaucaaaccccuucaguccccugcggaguucucuguuuacugugacaugagcgauggcgggggauggacggugauucaacggcgcuccgacggcucugaaaauuuuaacagaggguggaaggauuaugagaauggauucggcaacuuugugcagaaacacggcgaauacuggcuggggaauaagaaccuccauuuccugaccacacaggaggacuauacccuuaagaucgaucuggcugacuuugagaaaaauagccgguacgcccaguauaagaacuucaaagucggagaugaaaagaauuuuuacgagcucaacaucggcgaauacuccgggacagccggagacagccuggcuggcaauuuccacccggaggugcaauggugggccucucaucagcgcaugaaauuuuccaccugggauagagaccacgauaacuaugaggggaauugcgcugaagaggaccagagcggauggugguucaaccggugucauucugccaaucugaacggcguuuacuauuccggccccuacacagcgaagaccgacaacgggauugugugguauacguggcacggauggugguacagccucaagucugucgugaugaaaauccgcccuaaugauuucauucccaacguuaucuga

SEQ ID NO: 8549 - protein, 866 aa, Artificial Sequence
  Fibrinogen__Homo_sapiens__P02671
MFSMRIVCLVLSVVGTAWTADSGEGDFLAEGGGVRGPRVVERHQSACKDSDWPFCSDEDWNYKCPSGCRMKGLIDEVNQDFTNRINKLKNSLFEYQKNNKDSHSLTTNIMEILRGDFSSANNRDNTYNRVSEDLRSRIEVLKRKVIEKVQHIQLLQKNVRAQLVDMKRLEVDIDIKIRSCRGSCSRALAREVDLKDYEDQQKQLEQVIAKDLLPSRDRQHLPLIKMKPVPDLVPGNFKSQLQKVPPEWKALTDMPQMRMELERPGGNEITRGGSTSYGTGSETESPRNPSSAGSWNSGSSGPGSTGNRNPGSSGTGGTATWKPGSSGPGSTGSWNSGSSGTGSTGNQNPGSPRPGSTGTWNPGSSERGSAGHWTSESSVSGSTGQWHSESGSFRPDSPGSGNARPNNPDWGTFEEVSGNVSPGTRREYHTEKLVTSKGDKELRTGKEKVTSGSTTTTRRSCSKTVTKTVIGPDGHKEVTKEVVTSEDGSDCPEAMDLGTLSGIGTLDGFRHRHPDEAAFFDTASTGKTFPGFFSPMLGEFVSETESRGSESGIFTNTKESSSHHPGIAEFPSRGKSSSYSKQFTSSTSYNRGDSTFESKSYKMADEAGSEADHEGTHSTKRGHAKSRPVRDCDDVLQTHPSGTQSGIFNIKLPGSSKIFSVYCDQETSLGGWLLIQQRMDGSLNFNRTWQDYKRGFGSLNDEGEGEFWLGNDYLHLLTQRGSVLRVELEDWAGNEAYAEYHFRVGSEAEGYALQVSSYEGTAGDALIEGSVEEGAEYTSHNNMQFSTFDRDADQWEENCAEVYGGGWWYNNCQAANLNGIYYPGGSYDPRNNSPYEIENGVVWVSFRGADYSLRAVRMKIRPLVTQ

SEQ ID NO: 8550 - RNA, 2601 nt, Artificial Sequence
  Fibrinogen__Homo_sapiens__AAA17056
auguuuuccaugaggaucgucugccuaguucuaaguguggugggcacagcauggacugcagauaguggugaaggugacuuucuagcugaaggaggaggcgugcguggcccaaggguuguggaaagacaucaaucugccugcaaagauucagacuggcccuucugcucugaugaagacuggaacuacaaaugcccuucuggcugcaggaugaaaggguugauugaugaagucaaucaagauuuuacaaacagaauaaauaagcucaaaaauucacuauuugaauaucagaagaacaauaaggauucucauucguugaccacuaauauaauggaaauuuugagaggcgauuuuuccucagccaauaaccgugauaauaccuacaaccgagugucagaggaucugagaagcagaauugaaguccugaagcgcaaagucauagaaaaaguacagcauauccagcuucugcagaaaaauguuagagcucaguugguugauaugaaacgacuggagguggacauugauauuaagauccgaucuugucgagggucaugcaguagggcuuuagcucgugaaguagaucugaaggacuaugaagaucagcagaagcaacuugaacaggucauugccaaagacuuacuucccucuagagauaggcaacacuuaccacugauaaaaaugaaaccaguuccagacuugguucccggaaauuuuaagagccagcuucagaagguacccccagaguggaaggcauuaacagacaugccgcagaugagaauggaguuagagagaccugguggaaaugagauuacucgaggaggcuccaccucuuauggaaccggaucagagacggaaagccccaggaacccuagcagugcuggaagcuggaacucugggagcucuggaccuggaaguacuggaaaccgaaacccugggagcucugggacuggagggacugcaaccuggaaaccugggagcucuggaccuggaaguacuggaagcuggaacucugggagcucuggaacuggaaguacuggaaaccaaaacccugggagcccuagaccugguaguaccggaaccuggaauccuggcagcucugaacgcggaagugcugggcacuggaccucugagagcucuguaucugguaguacuggacaauggcacucugaaucuggaaguuuuaggccagauagcccaggcucugggaacgcgaggccuaacaacccagacuggggcacauuugaagaggugucaggaaauguaaguccagggacaaggagagaguaccacacagaaaaacuggucacuucuaaaggagauaaagagcucaggacugguaaagagaaggucaccucugguagcacaaccaccacgcgucguucaugcucuaaaaccguuacuaagacuguuauugguccugauggucacaaagaaguuaccaaagaaguggugaccuccgaagaugguucugacugucccgaggcaauggauuuaggcacauugucuggcauagguacucuggauggguuccgccauaggcacccugaugaagcugccuucuucgacacugccucaacuggaaaaacauucccagguuucuucucaccuauguuaggagaguuugucagugagacugagucuaggggcucagaaucuggcaucuucacaaauacaaaggaauccaguucucaucacccugggauagcugaauucccuucccgugguaaaucuucaaguuacagcaaacaauuuacuaguagcacgaguuacaacagaggagacuccacauuugaaagcaagagcuauaaaauggcagaugaggccggaagugaagccgaucaugaaggaacacauagcaccaagagaggccaugcuaaaucucgcccugucagagacugugaugauguccuccaaacacauccuucagguacccaaaguggcauuuucaauaucaagcuaccgggauccaguaagauuuuuucuguuuauugcgaucaagagaccaguuugggaggauggcuuuugauccagcaaagaauggauggaucacugaauuuuaaccggaccuggcaagacuacaagagagguuucggcagccugaaugacgagggggaaggagaauucuggcuaggcaaugacuaccuccacuuacuaacccaaaggggcucuguucuuaggguugaauuagaggacugggcugggaaugaagcuuaugcagaauaucacuuccggguaggcucugaggcugaaggcuaugcccuccaagucuccuccuaugaaggcacugcgggugaugcucugauugaggguuccguagaggaaggggcagaguacaccucucacaacaacaugcaguucagcaccuuugacagggaugcagaccagugggaagagaacugugcagaagucuaugggggaggcuggugguauaauaacugccaagcagccaaucucaauggaaucuacuacccugggggcuccuaugacccaaggaauaacaguccuuaugagauugagaauggaguggucuggguuuccuuuagaggggcagauuauucccucagggcuguucgcaugaaaauuaggccccuugugacccaauag

SEQ ID NO: 8551 - RNA, 2601 nt, Artificial Sequence
  derived and/or modified sequence opt1 from Fibrinogen__Homo_sapiens__AAA17056
auguucagcaugcgcaucgugugccugguccucuccguggugggcaccgccuggaccgccgacagcggggagggcgacuuccuggcggagggcggcgggguccgggggccccgcgugguggagcggcaccaguccgccugcaaggacagcgacuggccguucugcuccgacgaggacuggaacuacaagugccccagcggcugccgcaugaaggggcugaucgacgaggucaaccaggacuucacgaaccggaucaacaagcucaagaacucccuguucgaguaccagaagaacaacaaggacagccacucccugaccaccaacaucauggagauccuccgcggcgacuucagcuccgccaacaaccgggacaacaccuacaaccgcgugagcgaggaccugcggucccgcaucgaggugcugaagcggaaggucaucgagaaggugcagcacauccagcuccugcagaagaacgugcgcgcccagcuggucgacaugaagcggcucgagguggacaucgacaucaagauccgcagcugccggggguccugcagccgcgcccuggcgcgggagguggaccugaaggacuacgaggaccagcagaagcagcucgagcaggucaucgccaaggaccugcugcccucccgcgaccggcagcaccucccccugaucaagaugaagccggugcccgaccuggugcccggcaacuucaagagccagcuccagaaggugcccccggaguggaaggcccugacggacaugccccagaugcgcauggagcuggagcggcccgggggcaacgagaucacccgcggcggguccaccagcuacggcaccgggagcgagacggagagcccccgcaacccguccuccgccggcagcuggaacuccggcagcuccgggcccggcagcaccgggaaccggaaccccggcuccagcgggaccggcggcaccgcgacguggaagcccggguccagcggcccgggguccaccggcagcuggaacuccgggagcuccggcaccggcagcaccgggaaccagaaccccggcagcccccgccccggguccacgggcaccuggaacccggggagcuccgagcggggcagcgccggccacuggaccuccgagagcuccgucagcggguccaccggccaguggcacagcgaguccgggagcuuccgccccgacucccccggcagcggcaacgcccggcccaacaacccggacugggggacguucgaggagguguccggcaacgucagccccgggacccgccgggaguaccacaccgagaagcucgugaccuccaagggcgacaaggagcugcgcacggggaaggagaaggugaccagcggcuccaccaccacgacccggcgcagcugcagcaagaccgucaccaagacggugaucggccccgacgggcacaaggaggucaccaaggagguggugaccuccgaggacggcagcgacugccccgaggccauggaccuggggacccucuccggcaucgggacgcuggacggcuuccggcaccgccacccggacgaggccgcguucuucgacaccgccagcaccggcaagaccuuccccggguucuucucccccaugcugggcgaguucgucagcgagaccgagucccgggggagcgaguccggcaucuucacgaacaccaaggagagcuccagccaccacccggggaucgccgaguuccccucccgcggcaagagcuccagcuacuccaagcaguucaccagcuccaccagcuacaaccggggcgacagcacguucgaguccaagagcuacaagauggccgacgaggccggguccgaggcggaccacgagggcacccacagcaccaagcgcgggcacgccaagucccggcccgugcgcgacugcgacgacgugcuccagacccaccccagcggcacgcaguccgggaucuucaacaucaagcugccgggcagcuccaagaucuucagcgucuacugcgaccaggagaccucccugggcggguggcuccugauccagcagcggauggacggcagccugaacuucaaccgcaccuggcaggacuacaagcgcggguucggcucccucaacgacgagggcgagggggaguucuggcugggcaacgacuaccugcaccuccugacccagcgggggagcgugcugcgcguggagcucgaggacugggccggcaacgaggccuacgccgaguaccacuuccgggucggguccgaggcggagggcuacgcccuccaggugagcuccuacgagggcacggccggggacgcccugaucgagggcagcguggaggagggggccgaguacaccucccacaacaacaugcaguucagcaccuucgaccgcgacgcggaccagugggaggagaacugcgccgaggucuacggcgggggcuggugguacaacaacugccaggccgccaaccugaacggcaucuacuaccccgggggcagcuacgacccccggaacaacucccccuacgagaucgagaacgggguggugugggucagcuuccgcggcgcggacuacucccugcgggccgugcgcaugaagauccggccgcuggugacccaguga

SEQ ID NO: 8552 - RNA, 2601 nt, Artificial Sequence
  derived and/or modified sequence opt2 from Fibrinogen__Homo_sapiens__AAA17056
auguucuccaugcgcaucgucugccucguccucuccgucgucggcaccgccuggaccgccgacuccggcgagggcgacuuccucgccgagggcggcggcguccgcggcccccgcgucgucgagcgccaccaguccgccugcaaggacuccgacuggcccuucugcuccgacgaggacuggaacuacaagugccccuccggcugccgcaugaagggccucaucgacgaggucaaccaggacuucaccaaccgcaucaacaagcucaagaacucccucuucgaguaccagaagaacaacaaggacucccacucccucaccaccaacaucauggagauccuccgcggcgacuucuccuccgccaacaaccgcgacaacaccuacaaccgcgucuccgaggaccuccgcucccgcaucgagguccucaagcgcaaggucaucgagaagguccagcacauccagcuccuccagaagaacguccgcgcccagcucgucgacaugaagcgccucgaggucgacaucgacaucaagauccgcuccugccgcggcuccugcucccgcgcccucgcccgcgaggucgaccucaaggacuacgaggaccagcagaagcagcucgagcaggucaucgccaaggaccuccuccccucccgcgaccgccagcaccucccccucaucaagaugaagcccguccccgaccucguccccggcaacuucaagucccagcuccagaaggucccccccgaguggaaggcccucaccgacaugccccagaugcgcauggagcucgagcgccccggcggcaacgagaucacccgcggcggcuccaccuccuacggcaccggcuccgagaccgaguccccccgcaaccccuccuccgccggcuccuggaacuccggcuccuccggccccggcuccaccggcaaccgcaaccccggcuccuccggcaccggcggcaccgccaccuggaagcccggcuccuccggccccggcuccaccggcuccuggaacuccggcuccuccggcaccggcuccaccggcaaccagaaccccggcuccccccgccccggcuccaccggcaccuggaaccccggcuccuccgagcgcggcuccgccggccacuggaccuccgaguccuccgucuccggcuccaccggccaguggcacuccgaguccggcuccuuccgccccgacucccccggcuccggcaacgcccgccccaacaaccccgacuggggcaccuucgaggaggucuccggcaacgucucccccggcacccgccgcgaguaccacaccgagaagcucgucaccuccaagggcgacaaggagcuccgcaccggcaaggagaaggucaccuccggcuccaccaccaccacccgccgcuccugcuccaagaccgucaccaagaccgucaucggccccgacggccacaaggaggucaccaaggaggucgucaccuccgaggacggcuccgacugccccgaggccauggaccucggcacccucuccggcaucggcacccucgacggcuuccgccaccgccaccccgacgaggccgccuucuucgacaccgccuccaccggcaagaccuuccccggcuucuucucccccaugcucggcgaguucgucuccgagaccgagucccgcggcuccgaguccggcaucuucaccaacaccaaggaguccuccucccaccaccccggcaucgccgaguuccccucccgcggcaaguccuccuccuacuccaagcaguucaccuccuccaccuccuacaaccgcggcgacuccaccuucgaguccaaguccuacaagauggccgacgaggccggcuccgaggccgaccacgagggcacccacuccaccaagcgcggccacgccaagucccgccccguccgcgacugcgacgacguccuccagacccaccccuccggcacccaguccggcaucuucaacaucaagcuccccggcuccuccaagaucuucuccgucuacugcgaccaggagaccucccucggcggcuggcuccucauccagcagcgcauggacggcucccucaacuucaaccgcaccuggcaggacuacaagcgcggcuucggcucccucaacgacgagggcgagggcgaguucuggcucggcaacgacuaccuccaccuccucacccagcgcggcuccguccuccgcgucgagcucgaggacugggccggcaacgaggccuacgccgaguaccacuuccgcgucggcuccgaggccgagggcuacgcccuccaggucuccuccuacgagggcaccgccggcgacgcccucaucgagggcuccgucgaggagggcgccgaguacaccucccacaacaacaugcaguucuccaccuucgaccgcgacgccgaccagugggaggagaacugcgccgaggucuacggcggcggcuggugguacaacaacugccaggccgccaaccucaacggcaucuacuaccccggcggcuccuacgacccccgcaacaacucccccuacgagaucgagaacggcgucgucugggucuccuuccgcggcgccgacuacucccuccgcgccguccgcaugaagauccgcccccucgucacccaguga

SEQ ID NO: 8553 - RNA, 2601 nt, Artificial Sequence
  derived and/or modified sequence opt3 from Fibrinogen__Homo_sapiens__AAA17056
auguucagcaugagaaucgugugccugguccucuccguugugggcaccgccuggacagcugacucuggggagggagauuuucuugcagaagguggcgggguaaggggaccccggguggucgagcgccaccagucagccuguaaggacagugauuggccuuucugcagcgacgaagauuggaacuacaaauguccauccggcugccgaaugaagggucugauugacgaggugaaucaagauuuuacuaaccguauaaauaaauugaagaacucuuuauucgaauaucagaaaaauaacaaggacucgcauucacugacgaccaauaucauggagauucuaagaggggauuuuagcagugcgaacaauagggacaacacauacaaucggguuuccgaggaucuccgcucuagaaucgaagugcugaagaggaaagucauugagaaggugcagcacauccagcuucugcaaaagaacguacgggcucaguugguugacaugaagcgccucgaaguggauauagacaucaaaauucgaagcuguagaggauccugcucaagggcccuggcacgggaggucgaccugaaggauuaugaggaccagcagaagcaacucgaacaggugaucgccaaagauuuacugccgagucgugaccgccagcaucuucccuugauuaagaugaaaccugugccagaucugguccccggcaauuucaagagccagcuacaaaaaguuccuccagaguggaaggcucucacugacaugccccagaugagaauggaacuggagaggccuggcgggaacgaaaucacccggggagguucuacauccuacggcaccgggucagagacugagagcccacgaaauccgaguucugcaggauccuggaacagcggcucgucuggucccggguccacaggaaaccgcaauccuggcucaaguggcaccgggggaacggccacuuggaaaccagguagcuccggccccgggucuaccggaagcuggaacucaggcaguuccgguacagggagcacuggcaaucagaacccuggaucuccaagacccggcucaaccgggacauggaauccgggaaguagcgaaagggguuccgcuggccacuggaccucugagucgagcguguccgggucaacgggacaauggcauagugaaucuggcagcuuucggccugauucccccgguucagggaacgcccgcccaaauaacccugacuggggcacuuucgaggaaguaagcggaaaugugucucccggcacaagaagggaguaucacaccgagaaacuugucacuuccaagggggauaaagaacugcguacaggaaaggagaaagugaccagugguagcacgaccacaacucggcgaucuuguuccaagaccguuacaaaaacugugauaggcccagacgggcacaaggaagucaccaaggaggugguaacaucagaagauggaagugacugccccgaggcgauggacuugggcacccucagcgguauugggacucuggauggcuuuagacauaggcacccugacgaggcagccuucuuugauacggcuucgacaggaaaaaccuucccaggcuuuuucuccccgauguuaggggaguucguuucugaaacugaaagccgcggaucagagaguggcaucuuuaccaacacaaaggaguccucuagccaucaccccgguauugccgaguucccuucccgggggaaaucaagcaguuacucuaagcaguuuaccuccagcacuucguauaauagaggagacucaacauucgaaucuaaaaguuacaagauggcagaugaagcuggcuccgaggccgaccacgaagguacgcauagcaccaagaggggccacgcgaaaucucgcccagugcgagauugugacgauguccugcagacucaucccagcgggacacaguccggaaucuuuaacaucaagcucccuggcucaaguaaaauuuucagcguguacugcgaccaagagaccucucuugggggauggcuguugauacagcagcggauggauggcucccuaaauuuuaaccguacauggcaggacuauaagagagguuucgggucacugaaugaugagggagaaggcgaguuuuggcucgguaacgacuaccugcaccuucugacucaaaggggcagugucuugcgcguggaacucgaggacugggccgggaacgaagcauaugcugaguaccauuuccggguuggaagcgaggccgaaggcuaugcuuuacagguguccucuuacgaggggaccgccggagaugcacugaucgaaggcucgguagaggaaggugccgaguauacgagccacaauaacaugcaguuuucaaccuucgacagagaugcugaccagugggaggaaaauugugcggaggucuacgggggaggcuggugguacaacaauugccaagcagccaaccugaaugguauuuauuacccaggcggguccuaugaucccaggaacaauaguccguacgaaaucgagaacggagugguuugggugucuuuucgaggcgcugacuauagccuacgcgccguccggaugaaaauaagaccucucgugacacaguga

SEQ ID NO: 8554 - RNA, 2601 nt, Artificial Sequence
  derived and/or modified sequence opt4 from Fibrinogen__Homo_sapiens__AAA17056
auguucagcaugagaaucgugugccuggugcugagcguggugggcaccgccuggaccgccgacagcggcgagggcgacuuccuggccgagggcggcggcgugagaggccccagagugguggagagacaccagagcgccugcaaggacagcgacuggcccuucugcagcgacgaggacuggaacuacaagugccccagcggcugcagaaugaagggccugaucgacgaggugaaccaggacuucaccaacagaaucaacaagcugaagaacagccuguucgaguaccagaagaacaacaaggacagccacagccugaccaccaacaucauggagauccugagaggcgacuucagcagcgccaacaacagagacaacaccuacaacagagugagcgaggaccugagaagcagaaucgaggugcugaagagaaaggugaucgagaaggugcagcacauccagcugcugcagaagaacgugagagcccagcugguggacaugaagagacuggagguggacaucgacaucaagaucagaagcugcagaggcagcugcagcagagcccuggccagagagguggaccugaaggacuacgaggaccagcagaagcagcuggagcaggugaucgccaaggaccugcugcccagcagagacagacagcaccugccccugaucaagaugaagcccgugcccgaccuggugcccggcaacuucaagagccagcugcagaaggugccccccgaguggaaggcccugaccgacaugccccagaugagaauggagcuggagagacccggcggcaacgagaucaccagaggcggcagcaccagcuacggcaccggcagcgagaccgagagccccagaaaccccagcagcgccggcagcuggaacagcggcagcagcggccccggcagcaccggcaacagaaaccccggcagcagcggcaccggcggcaccgccaccuggaagcccggcagcagcggccccggcagcaccggcagcuggaacagcggcagcagcggcaccggcagcaccggcaaccagaaccccggcagccccagacccggcagcaccggcaccuggaaccccggcagcagcgagagaggcagcgccggccacuggaccagcgagagcagcgugagcggcagcaccggccaguggcacagcgagagcggcagcuucagacccgacagccccggcagcggcaacgccagacccaacaaccccgacuggggcaccuucgaggaggugagcggcaacgugagccccggcaccagaagagaguaccacaccgagaagcuggugaccagcaagggcgacaaggagcugagaaccggcaaggagaaggugaccagcggcagcaccaccaccaccagaagaagcugcagcaagaccgugaccaagaccgugaucggccccgacggccacaaggaggugaccaaggagguggugaccagcgaggacggcagcgacugccccgaggccauggaccugggcacccugagcggcaucggcacccuggacggcuucagacacagacaccccgacgaggccgccuucuucgacaccgccagcaccggcaagaccuuccccggcuucuucagccccaugcugggcgaguucgugagcgagaccgagagcagaggcagcgagagcggcaucuucaccaacaccaaggagagcagcagccaccaccccggcaucgccgaguuccccagcagaggcaagagcagcagcuacagcaagcaguucaccagcagcaccagcuacaacagaggcgacagcaccuucgagagcaagagcuacaagauggccgacgaggccggcagcgaggccgaccacgagggcacccacagcaccaagagaggccacgccaagagcagacccgugagagacugcgacgacgugcugcagacccaccccagcggcacccagagcggcaucuucaacaucaagcugcccggcagcagcaagaucuucagcguguacugcgaccaggagaccagccugggcggcuggcugcugauccagcagagaauggacggcagccugaacuucaacagaaccuggcaggacuacaagagaggcuucggcagccugaacgacgagggcgagggcgaguucuggcugggcaacgacuaccugcaccugcugacccagagaggcagcgugcugagaguggagcuggaggacugggccggcaacgaggccuacgccgaguaccacuucagagugggcagcgaggccgagggcuacgcccugcaggugagcagcuacgagggcaccgccggcgacgcccugaucgagggcagcguggaggagggcgccgaguacaccagccacaacaacaugcaguucagcaccuucgacagagacgccgaccagugggaggagaacugcgccgagguguacggcggcggcuggugguacaacaacugccaggccgccaaccugaacggcaucuacuaccccggcggcagcuacgaccccagaaacaacagccccuacgagaucgagaacggcguggugugggugagcuucagaggcgccgacuacagccugagagccgugagaaugaagaucagaccccuggugacccaguga

SEQ ID NO: 8555 - RNA, 2601 nt, Artificial Sequence
  derived and/or modified sequence opt5 from Fibrinogen__Homo_sapiens__AAA17056
auguucagcaugagaaucgugugccugguccucuccguugugggcaccgccuggacagcugacucuggggagggagauuuucuggccgaaggcgggggagugcggggcccccgcgucguggagagacaccagagcgcguguaaggacuccgauuggccuuucugcucugacgaagauuggaacuacaaauguccgagcgggugccggaugaagggacuuauugacgagguuaaucaagauuuuacgaaccgcaucaauaaacugaagaacucccucuucgaauaucagaaaaauaacaaggacucucauagccugaccacaaauauuauggagauccuuagaggcgauuuuuccagcgcuaacaaucgggacaacaccuacaaucgcgugucugaggaucugagaucccggauugaaguccucaagcgcaaagugaucgagaagguucagcacauccagcugcugcaaaagaacgugagagcccagcucgucgacaugaagcggcuggaaguggauauugacaucaaaauucgcagcuguagaggcucuugcucccgggcccuugcucgcgagguggaccugaaggauuaugaggaccagcagaagcaacucgaacaggucaucgccaaagaucugcuucccagcagagaccggcagcaucugccucucauuaagaugaaacccguuccugaucuggugcccgggaauuucaagucucagcugcaaaaagugccuccggaguggaaggcucucacagacaugccccagaugagaauggaacuggagcgcccuggaggcaacgaaaucaccagagggggauccacaagcuacggcaccggguccgagacggagucuccccggaauccuagcuccgccggaagcuggaacucuggcuccagcggccccgggucuaccggaaaccgcaauccgggcagcuccgggacaggaggcaccgcgacauggaaaccugggucuagcggacccggcuccaccggcagcuggaacucuggguccagcggaacgggcucuacagggaaucagaacccuggaagcccccggcccggcuccaccgggacauggaauccuggcuccucugaaagaggaagcgccggccacuggaccuccgagucuagcgucuccgggagcaccggacaauggcauucugaauccggcagcuuucgcccggauucucccggguccggaaacgcucggccuaauaaccccgacuggggcacauucgaggaagugagcgggaauguuucuccuggcacgagacgcgaguaucacaccgagaaacuugugacaagcaagggagauaaagaacugcggaccggcaaggagaaagucacauccgggagcaccacgacaaccagacgcucuuguuccaagaccgugacaaaaaccguuauuggacccgacggccacaaggaagugacaaaggaggucgugacgagcgaagauggguccgacugcccggaggccauggaccucggaacccugucuggcaucgggacacuugauggcuuucggcauagacacccugacgaggcugccuucuuugauaccgcgagcacaggaaaaaccuuccccggcuuuuucuccccuaugcugggggaguucgucucugaaacggaaagccggggauccgagucuggcaucuuuaccaacacaaaggagagcuccagccaucaccccgggauugccgaguucccuucucgcggaaaauccagcucuuacuccaagcaguuuaccagcucuacauccuauaauagaggcgacagcaccuucgaauccaaaagcuacaagauggcugaugaagccgggucugaggcugaccacgaaggcacgcauagcacaaagcggggacacgccaaauccagacccgugcgcgauugugacgauguucuccagacccauccgucuggcacacagagcgggaucuuuaacauuaagcugccuggauccucuaaaaucuucagcguguacugcgaccaagagaccucccugggcggguggcuccugauucagcagcggauggauggaucucuuaauuuuaacagaaccuggcaggacuauaagcgcggcuucggcagccugaaugaugagggggaaggagaguuuuggcucggcaacgacuaccugcaccuucugacacaaagaggguccguccuccggguggaacuggaggacugggccggaaacgaggcuuaugcggaauaccauuuccgcguuggcagcgaggccgaaggguaugcucuccaggugucuuccuacgagggaacggccggcgaugcccugaucgaaggcagcgucgaggaaggggcugaguauaccucucacaauaacaugcaguuuuccacauucgacagagaugccgaccagugggaggaaaauugugcggagguguacggaggcggguggugguacaacaauugccaagcugccaaccugaauggaaucuauuaccccggcgggagcuaugauccccggaacaauuccccuuacgaaauugagaacggagugguuugggucucuuuucgcggcgccgacuauagccuuagagcugugcggaugaaaauccgcccgcuggugacccaguga

SEQ ID NO: 8556 - protein, 491 aa, Artificial Sequence
  Fibrinogen__Homo_sapiens__P02675
MKRMVSWSFHKLKTMKHLLLLLLCVFLVKSQGVNDNEEGFFSARGHRPLDKKREEAPSLRPAPPPISGGGYRARPAKAAATQKKVERKAPDAGGCLHADPDLGVLCPTGCQLQEALLQQERPIRNSVDELNNNVEAVSQTSSSSFQYMYLLKDLWQKRQKQVKDNENVVNEYSSELEKHQLYIDETVNSNIPTNLRVLRSILENLRSKIQKLESDVSAQMEYCRTPCTVSCNIPVVSGKECEEIIRKGGETSEMYLIQPDSSVKPYRVYCDMNTENGGWTVIQNRQDGSVDFGRKWDPYKQGFGNVATNTDGKNYCGLPGEYWLGNDKISQLTRMGPTELLIEMEDWKGDKVKAHYGGFTVQNEANKYQISVNKYRGTAGNALMDGASQLMGENRTMTIHNGMFFSTYDRDNDGWLTSDPRKQCSKEDGGGWWYNRCHAANPNGRYYWGGQYTWDMAKHGTDDGVVWMNWKGSWYSMRKMSMKIRPFFPQQ

SEQ ID NO: 8557 - RNA, 1476 nt, Artificial Sequence
  Fibrinogen__Homo_sapiens__AAA18024
augaaaaggaugguuucuuggagcuuccacaaacuuaaaaccaugaaacaucuauuauugcuacuauuguguguuuuucuaguuaagucccaaggugucaacgacaaugaggaggguuucuucagugcccguggucaucgaccccuugacaagaagagagaagaggcucccagccugaggccugccccaccgcccaucaguggagguggcuaucgggcucguccagccaaagcagcugccacucaaaagaaaguagaaagaaaagccccugaugcuggaggcugucuucacgcugacccagaccuggggguguuguguccuacaggaugucaguugcaagaggcuuugcuacaacaggaaaggccaaucagaaauaguguugaugaguuaaauaacaauguggaagcuguuucccagaccuccucuucuuccuuucaguacauguauuugcugaaagaccuguggcaaaagaggcagaagcaaguaaaagauaaugaaaauguagucaaugaguacuccucagaacuggaaaagcaccaauuauauauagaugagacugugaauagcaauaucccaacuaaccuucgugugcuucguucaauccuggaaaaccugagaagcaaaauacaaaaguuagaaucugaugucucagcucaaauggaauauugucgcaccccaugcacugucaguugcaauauuccuguggugucuggcaaagaaugugaggaaauuaucaggaaaggaggugaaacaucugaaauguaucucauucaaccugacaguucugucaaaccguauagaguauacugugacaugaauacagaaaauggaggauggacagugauucagaaccgucaagacgguaguguugacuuuggcaggaaaugggauccauauaaacagggauuuggaaauguugcaaccaacacagaugggaagaauuacuguggccuaccaggugaauauuggcuuggaaaugauaaaauuagccagcuuaccaggaugggacccacagaacuuuugauagaaauggaggacuggaaaggagacaaaguaaaggcucacuauggaggauucacuguacagaaugaagccaacaaauaccagaucucagugaacaaauacagaggaacagccgguaaugcccucauggauggagcaucucagcugaugggagaaaacaggaccaugaccauucacaacggcauguucuucagcacguaugacagagacaaugacggcugguuaacaucagaucccagaaaacaguguucuaaagaagacggugguggauggugguauaauagaugucaugcagccaauccaaacggcagauacuacugggguggacaguacaccugggacauggcaaagcauggcacagaugaugguguaguauggaugaauuggaaggggucaugguacucaaugaggaagaugaguaugaagaucaggcccuucuucccacagcaauag

SEQ ID NO: 8558 - RNA, 1476 nt, Artificial Sequence
  derived and/or modified sequence opt1 from Fibrinogen__Homo_sapiens__AAA18024
augaagcgcauggugagcugguccuuccacaagcugaagaccaugaagcaccuccugcugcuccugcugugcgucuuccucgucaagagccagggcgugaacgacaacgaggagggguucuucuccgcccggggccaccgcccccuggacaagaagcgggaggaggccccgagccugcgccccgcgcccccgcccaucuccgggggcggguaccgggcccgccccgccaaggccgccgcgacccagaagaagguggagcggaaggcccccgacgccggcggcugccuccacgccgaccccgaccugggggugcugugcccgacgggcugccagcuccaggaggcgcugcugcagcaggagcgccccauccggaacagcguggacgagcucaacaacaacgucgaggccgugucccagaccagcuccagcuccuuccaguacauguaccugcugaaggaccucuggcagaagcgccagaagcaggucaaggacaacgagaacguggugaacgaguacagcuccgagcuggagaagcaccagcuguacaucgacgagaccgugaacagcaacauccccaccaaccuccggguccugcgcuccauccuggagaaccuccggagcaagauccagaagcuggaguccgacgugagcgcccagauggaguacugccgcacgcccugcaccguguccugcaacaucccggucgugagcgggaaggagugcgaggagaucauccggaagggcggggagaccagcgagauguaccugauccagcccgacuccagcgugaagcccuaccgcgucuacugcgacaugaacaccgagaacggcggcuggacggugauccagaaccggcaggacggguccguggacuucggccgcaagugggaccccuacaagcagggguucggcaacgucgccaccaacaccgacggcaagaacuacugcgggcucccgggcgaguacuggcuggggaacgacaagaucagccagcugacccggaugggccccacggagcuccugaucgagauggaggacuggaagggggacaaggugaaggcccacuacggcggcuucaccgugcagaacgaggcgaacaaguaccagaucuccgucaacaaguaccgcgggaccgccggcaacgcccugauggacggggccagccagcucaugggcgagaaccggaccaugacgauccacaacgggauguucuucuccaccuacgaccgcgacaacgacggcuggcugaccagcgacccccgcaagcagugcuccaaggaggacggcgggggcuggugguacaaccggugccacgccgcgaaccccaacgggcgcuacuacuggggcgggcaguacaccugggacauggccaagcacggcacggacgacggcguggucuggaugaacuggaaggggagcugguacuccaugcggaagaugagcaugaagauccgcccguucuucccccagcaguga

SEQ ID NO: 8559 - RNA, 1476 nt, Artificial Sequence
  derived and/or modified sequence opt2 from Fibrinogen__Homo_sapiens__AAA18024
augaagcgcauggucuccugguccuuccacaagcucaagaccaugaagcaccuccuccuccuccuccucugcgucuuccucgucaagucccagggcgucaacgacaacgaggagggcuucuucuccgcccgcggccaccgcccccucgacaagaagcgcgaggaggcccccucccuccgccccgcccccccccccaucuccggcggcggcuaccgcgcccgccccgccaaggccgccgccacccagaagaaggucgagcgcaaggcccccgacgccggcggcugccuccacgccgaccccgaccucggcguccucugccccaccggcugccagcuccaggaggcccuccuccagcaggagcgccccauccgcaacuccgucgacgagcucaacaacaacgucgaggccgucucccagaccuccuccuccuccuuccaguacauguaccuccucaaggaccucuggcagaagcgccagaagcaggucaaggacaacgagaacgucgucaacgaguacuccuccgagcucgagaagcaccagcucuacaucgacgagaccgucaacuccaacauccccaccaaccuccgcguccuccgcuccauccucgagaaccuccgcuccaagauccagaagcucgaguccgacgucuccgcccagauggaguacugccgcacccccugcaccgucuccugcaacauccccgucgucuccggcaaggagugcgaggagaucauccgcaagggcggcgagaccuccgagauguaccucauccagcccgacuccuccgucaagcccuaccgcgucuacugcgacaugaacaccgagaacggcggcuggaccgucauccagaaccgccaggacggcuccgucgacuucggccgcaagugggaccccuacaagcagggcuucggcaacgucgccaccaacaccgacggcaagaacuacugcggccuccccggcgaguacuggcucggcaacgacaagaucucccagcucacccgcaugggccccaccgagcuccucaucgagauggaggacuggaagggcgacaaggucaaggcccacuacggcggcuucaccguccagaacgaggccaacaaguaccagaucuccgucaacaaguaccgcggcaccgccggcaacgcccucauggacggcgccucccagcucaugggcgagaaccgcaccaugaccauccacaacggcauguucuucuccaccuacgaccgcgacaacgacggcuggcucaccuccgacccccgcaagcagugcuccaaggaggacggcggcggcuggugguacaaccgcugccacgccgccaaccccaacggccgcuacuacuggggcggccaguacaccugggacauggccaagcacggcaccgacgacggcgucgucuggaugaacuggaagggcuccugguacuccaugcgcaagauguccaugaagauccgccccuucuucccccagcaguga

SEQ ID NO: 8560 - RNA, 1476 nt, Artificial Sequence
  derived and/or modified sequence opt3 from Fibrinogen__Homo_sapiens__AAA18024
augaagagaauggugagcugguccuuccacaaacugaagaccaugaaacaucuccuucuguuguuacugugcgucuuucuaguuaagucucagggcgugaacgacaaugaggaaggguucuuuucagccaggggacaccggccccucgauaaaaagcgcgaggaagcuccuagucugcgaccagcaccgcccccuaucagcgguggcggguaccgugccagaccagcgaaggcugccgcaacacaaaagaagguagagaggaaagcccccgacgcuggaggcugucuucaugcagauccugaccuggguguguugugcccaacugggugucagcuccaggaagcccugcugcagcaagagcggcccauucgcaacuccgucgaugagcucaauaacaauguggaagcuguuucucagacgucgucaagcaguuuccaguauauguacuuacugaaggaccuuuggcagaaaagacaaaaacaggugaaggauaacgagaaugucgugaacgaauauuccucugaguuggagaaacaccagcuguacauagacgaaaccguaaauagcaacaucccuacaaaucuaaggguucuccgguccauucuggagaaccuucgcucaaagauccagaaacuggaaagugaugugagcgcccaaauggaguauugccgaacuccauguaccgucucuugcaauauuccggugguguccggaaaggaaugugaggagaucauaagaaaaggcggcgaaacaucagagauguacuugauccagcccgacagcagugucaagccuuauaggguuuacugcgauaugaacaccgaaaaugggggauggacugugauucagaaccggcaagacgguucuguagauuuuggccguaaaugggacccauacaagcagggguucggaaacguggcgacaaauaccgacggcaagaacuauuguggucuccccggggaguacuggcugggaaaugauaaaaucucccaguuaacgcgcaugggcccuacugaacugcucauugagauggaggacuggaagggcgauaaagucaaggcacauuaugggggauuuaccgugcagaacgaagccaauaaauaccaaaucagcguuaacaaguauagagguacagcuggcaaugcccuuauggacggggcaucgcagcugaugggagagaacaggacuaugaccauacacaauggcauguucuuuucuacauacgaucgggacaacgaugguugguugaccuccgacccacgaaagcagugcucaaaagaagaugggggcggauggugguauaaucgcugucacgcugccaaccccaauggcagauacuacuggggagggcaguauacgugggacauggcgaagcaugguacugaugacggcguggucuggaugaacuggaaagggaguugguacagcaugaggaagauguccaugaaaauucggccguucuuuccucaacaguga

SEQ ID NO: 8561 - RNA, 1476 nt, Artificial Sequence
  derived and/or modified sequence opt4 from Fibrinogen__Homo_sapiens__AAA18024
augaagagaauggugagcuggagcuuccacaagcugaagaccaugaagcaccugcugcugcugcugcugugcguguuccuggugaagagccagggcgugaacgacaacgaggagggcuucuucagcgccagaggccacagaccccuggacaagaagagagaggaggcccccagccugagacccgcccccccccccaucagcggcggcggcuacagagccagacccgccaaggccgccgccacccagaagaagguggagagaaaggcccccgacgccggcggcugccugcacgccgaccccgaccugggcgugcugugccccaccggcugccagcugcaggaggcccugcugcagcaggagagacccaucagaaacagcguggacgagcugaacaacaacguggaggccgugagccagaccagcagcagcagcuuccaguacauguaccugcugaaggaccuguggcagaagagacagaagcaggugaaggacaacgagaacguggugaacgaguacagcagcgagcuggagaagcaccagcuguacaucgacgagaccgugaacagcaacauccccaccaaccugagagugcugagaagcauccuggagaaccugagaagcaagauccagaagcuggagagcgacgugagcgcccagauggaguacugcagaacccccugcaccgugagcugcaacauccccguggugagcggcaaggagugcgaggagaucaucagaaagggcggcgagaccagcgagauguaccugauccagcccgacagcagcgugaagcccuacagaguguacugcgacaugaacaccgagaacggcggcuggaccgugauccagaacagacaggacggcagcguggacuucggcagaaagugggaccccuacaagcagggcuucggcaacguggccaccaacaccgacggcaagaacuacugcggccugcccggcgaguacuggcugggcaacgacaagaucagccagcugaccagaaugggccccaccgagcugcugaucgagauggaggacuggaagggcgacaaggugaaggcccacuacggcggcuucaccgugcagaacgaggccaacaaguaccagaucagcgugaacaaguacagaggcaccgccggcaacgcccugauggacggcgccagccagcugaugggcgagaacagaaccaugaccauccacaacggcauguucuucagcaccuacgacagagacaacgacggcuggcugaccagcgaccccagaaagcagugcagcaaggaggacggcggcggcuggugguacaacagaugccacgccgccaaccccaacggcagauacuacuggggcggccaguacaccugggacauggccaagcacggcaccgacgacggcgugguguggaugaacuggaagggcagcugguacagcaugagaaagaugagcaugaagaucagacccuucuucccccagcaguga

SEQ ID NO: 8562 - RNA, 1476 nt, Artificial Sequence
  derived and/or modified sequence opt5 from Fibrinogen__Homo_sapiens__AAA18024
augaagagaauggugagcugguccuuccacaaacugaagaccaugaaacaucuccugcuucugcuccugugcgucuuucuuguuaagucucagggcgugaacgacaaugaggaaggguucuuuagcgcccggggacaccgcccccuggauaaaaagagagaggaagcuccuucccuccggccggcgcccccucccaucucuggcgggggauaccgcgccagaccugcuaaggccgccgcuacacagaaaaagguggagcggaaagcccccgacgcuggcgggugucugcaugccgauccugaccugggaguccucugcccgacgggcugucaacugcaggaagcgcuucugcagcaagagcgccccauuagaaacagcguggaugagcucaauaacaauguugaagccgugucccagaccucuagcuccagcuuccaguauauguaccugcuuaaggaccuguggcagaaacggcaaaagcaggucaaggauaacgagaaugugguuaacgaauauucuuccgagcucgagaaacaccagcuguacaucgacgaaacagugaauagcaacauuccuaccaaucugcgcguccucagaucuauccuggagaaccuucgguccaagauucagaaacuggaaagcgaugugucugcucaaauggaguauugccgcacacccuguaccguguccugcaauaucccugucguuagcggcaaggaaugugaggagaucauuagaaaagggggagaaacauccgagauguaccucauccagcccgacucuagcgugaagccguaucggguguacugcgauaugaacaccgaaaauggcggguggacggucauucagaaccgccaagacggauccguggauuuuggcagaaaaugggacccuuacaagcagggguucggaaacguugccaccaauacagacggcaagaacuauuguggccugcccggggaguacuggcuuggaaaugauaaaaucagccagcugacccggaugggcccuacagaacuccugauugagauggaggacuggaagggggauaaagugaaggcucauuauggaggcuuuaccguccagaacgaagccaauaaauaccaaaucucugugaacaaguauagagggacggcgggaaaugcccugauggacggcgcuucccagcucaugggcgagaaccgcacaaugaccauucacaaugggauguucuuuagcacauacgaucgggacaacgauggauggcugaccucugaccccagaaagcagugcagcaaagaagauggcgggggauggugguauaaucgcugucacgccgcuaaccccaauggccgguacuacuggggcgggcaguauaccugggacauggccaagcauggaacagaugacggcguuguguggaugaacuggaaaggguccugguacucuaugagaaagaugagcaugaaaauccgcccuuucuuuccgcaacaguga

SEQ ID NO: 8563 - protein, 453 aa, Artificial Sequence
  Fibrinogen__Homo_sapiens__P02679
MSWSLHPRNLILYFYALLFLSSTCVAYVATRDNCCILDERFGSYCPTTCGIADFLSTYQTKVDKDLQSLEDILHQVENKTSEVKQLIKAIQLTYNPDESSKPNMIDAATLKSRKMLEEIMKYEASILTHDSSIRYLQEIYNSNNQKIVNLKEKVAQLEAQCQEPCKDTVQIHDITGKDCQDIANKGAKQSGLYFIKPLKANQQFLVYCEIDGSGNGWTVFQKRLDGSVDFKKNWIQYKEGFGHLSPTGTTEFWLGNEKIHLISTQSAIPYALRVELEDWNGRTSTADYAMFKVGPEADKYRLTYAYFAGGDAGDAFDGFDFGDDPSDKFFTSHNGMQFSTWDNDNDKFEGNCAEQDGSGWWMNKCHAGHLNGVYYQGGTYSKASTPNGYDNGIIWATWKTRWYSMKKTTMKIIPFNRLTIGEGQQHHLGGAKQVRPEHPAETEYDSLYPEDDL

SEQ ID NO: 8564 - RNA, 1362 nt, Artificial Sequence
  Fibrinogen__Homo_sapiens__AAK19752
augaguugguccuugcacccccggaauuuaauucucuacuucuaugcucuuuuauuucucucuucaacauguguagcauauguugcuaccagagacaacugcugcaucuuagaugaaagauucgguaguuauuguccaacuaccuguggcauugcagauuuccugucuacuuaucaaaccaaaguagacaaggaucuacagucuuuggaagacaucuuacaucaaguugaaaacaaaacaucagaagucaaacagcugauaaaagcaauccaacucacuuauaauccugaugaaucaucaaaaccaaauaugauagacgcugcuacuuugaaguccaggaaaauguuagaagaaauuaugaaauaugaagcaucgauuuuaacacaugacucaaguauucgauauuugcaggaaauauauaauucaaauaaucaaaagauuguuaaccugaaagagaagguagcccagcuugaagcacagugccaggaaccuugcaaagacacggugcaaauccaugauaucacugggaaagauugucaagacauugccaauaagggagcuaaacagagcgggcuuuacuuuauuaaaccucugaaagcuaaccagcaauucuuagucuacugugaaaucgaugggucuggaaauggauggacuguguuucagaagagacuugauggcaguguagauuucaagaaaaacuggauucaauauaaagaaggauuuggacaucugucuccuacuggcacaacagaauuuuggcugggaaaugagaagauucauuugauaagcacacagucugccaucccauaugcauuaagaguggaacuggaagacuggaauggcagaaccaguacugcagacuaugccauguucaaggugggaccugaagcugacaaguaccgccuaacauaugccuacuucgcugguggggaugcuggagaugccuuugauggcuuugauuuuggcgaugauccuagugacaaguuuuucacaucccauaauggcaugcaguucaguaccugggacaaugacaaugauaaguuugaaggcaacugugcugaacaggauggaucugguugguggaugaacaagugucacgcuggccaucucaauggaguuuauuaccaagguggcacuuacucaaaagcaucuacuccuaaugguuaugauaauggcauuauuugggccacuuggaaaacccggugguauuccaugaagaaaaccacuaugaagauaaucccauucaacagacucacaauuggagaaggacagcaacaccaccuggggggagccaaacaggucagaccagagcacccugcggaaacagaauaugacucacuuuacccugaggaugauuuguag

SEQ ID NO: 8565 - RNA, 1362 nt, Artificial Sequence
  derived and/or modified sequence opt1 from Fibrinogen__Homo_sapiens__AAK19752
augagcuggucccugcacccccgcaaccucauccuguacuucuacgcccugcucuuccugagcuccaccugcguggccuacgucgcgacccgggacaacugcugcauccuggacgagcgcuucggcagcuacugcccgacgaccugcgggaucgccgacuuccucuccaccuaccagaccaagguggacaaggaccugcagagccuggaggacauccuccaccagguggagaacaagacguccgaggucaagcagcugaucaaggccauccagcugaccuacaaccccgacgagagcuccaagcccaacaugaucgacgccgccacccucaagagccggaagaugcuggaggagaucaugaaguacgaggcguccauccugacccacgacagcuccauccgcuaccuccaggagaucuacaacagcaacaaccagaagaucgugaaccugaaggagaagguggcccagcuggaggcccagugccaggagcccugcaaggacacgguccagauccacgacaucaccggcaaggacugccaggacaucgccaacaagggggcgaagcaguccggccucuacuucaucaagccgcugaaggccaaccagcaguuccugguguacugcgagaucgacgggagcggcaacggcuggaccguguuccagaagcggcucgacggguccgucgacuucaagaagaacuggauccaguacaaggagggcuucgggcaccugagccccaccggcacgaccgaguucuggcuggggaacgagaagauccaccucaucuccacccagagcgccauccccuacgcccugcgcguggagcuggaggacuggaacggccggaccagcacggccgacuacgcgauguucaaggugggccccgaggccgacaaguaccgccucaccuacgccuacuucgccgggggcgacgccggggacgcguucgacggcuucgacuucggcgacgacccguccgacaaguucuucaccagccacaacgggaugcaguucuccaccugggacaacgacaacgacaaguucgagggcaacugcgccgagcaggacgggagcggcugguggaugaacaagugccacgccgggcaccugaacggcgucuacuaccagggcgggacguacuccaaggccagcacccccaacggcuacgacaacgggaucaucugggccaccuggaagacccggugguacuccaugaagaagacgaccaugaagaucauccccuucaaccgccugaccaucggcgaggggcagcagcaccaccucggcggcgcgaagcaggugcggcccgagcacccggccgagaccgaguacgacagccuguaccccgaggacgaccuguga

SEQ ID NO: 8566 - RNA, 1362 nt, Artificial Sequence
  derived and/or modified sequence opt2 from Fibrinogen__Homo_sapiens__AAK19752
auguccuggucccuccacccccgcaaccucauccucuacuucuacgcccuccucuuccucuccuccaccugcgucgccuacgucgccacccgcgacaacugcugcauccucgacgagcgcuucggcuccuacugccccaccaccugcggcaucgccgacuuccucuccaccuaccagaccaaggucgacaaggaccuccagucccucgaggacauccuccaccaggucgagaacaagaccuccgaggucaagcagcucaucaaggccauccagcucaccuacaaccccgacgaguccuccaagcccaacaugaucgacgccgccacccucaagucccgcaagaugcucgaggagaucaugaaguacgaggccuccauccucacccacgacuccuccauccgcuaccuccaggagaucuacaacuccaacaaccagaagaucgucaaccucaaggagaaggucgcccagcucgaggcccagugccaggagcccugcaaggacaccguccagauccacgacaucaccggcaaggacugccaggacaucgccaacaagggcgccaagcaguccggccucuacuucaucaagccccucaaggccaaccagcaguuccucgucuacugcgagaucgacggcuccggcaacggcuggaccgucuuccagaagcgccucgacggcuccgucgacuucaagaagaacuggauccaguacaaggagggcuucggccaccucucccccaccggcaccaccgaguucuggcucggcaacgagaagauccaccucaucuccacccaguccgccauccccuacgcccuccgcgucgagcucgaggacuggaacggccgcaccuccaccgccgacuacgccauguucaaggucggccccgaggccgacaaguaccgccucaccuacgccuacuucgccggcggcgacgccggcgacgccuucgacggcuucgacuucggcgacgaccccuccgacaaguucuucaccucccacaacggcaugcaguucuccaccugggacaacgacaacgacaaguucgagggcaacugcgccgagcaggacggcuccggcugguggaugaacaagugccacgccggccaccucaacggcgucuacuaccagggcggcaccuacuccaaggccuccacccccaacggcuacgacaacggcaucaucugggccaccuggaagacccgcugguacuccaugaagaagaccaccaugaagaucauccccuucaaccgccucaccaucggcgagggccagcagcaccaccucggcggcgccaagcagguccgccccgagcaccccgccgagaccgaguacgacucccucuaccccgaggacgaccucuga

SEQ ID NO: 8567 - RNA, 1362 nt, Artificial Sequence
  derived and/or modified sequence opt3 from Fibrinogen__Homo_sapiens__AAK19752
augagcuggucccugcaccccagaaaccucauccuuuacuucuaugcccuguuguuuuuaucuucaaccugcguggcuuacgucgcaacaagggacaauuguugcauucuggaugagcgguucggcaguuauuguccuacuacgugcgggauagccgacuuucuaagcaccuaccagacaaagguugauaaagaccuccaaucccuggaagauauccuucaucagguggagaacaagacuucugaaguaaaacagcugauuaaggcgauccaguugaccuauaauccagacgagucgucaaaaccgaacaugauugaugcugccacacucaagagccgcaagaugcuggaagagaucaugaaauacgaggcaaguauacugacccacgacuccucuauccgauaucuccaagaaauuuacaauagcaacaaucagaagaucgugaacuuaaaagagaaggucgcccagcuggaagcucagugucaagagcccugcaaagauacugugcagauucaugacaucacaggaaaggauugucaggacauagcaaauaagggugccaaacaguccggccuuuacuucauuaagccuuugaaagcuaaccaacaguuucugguuuauugcgagaucgaugggucaggaaauggcuggaccguguuccagaagcgucuagacgguagugucgacuuuaaaaagaacuggauucaauacaaagaaggguucggacaccucagcccaacgggcacuaccgaguuuuggcugggcaaugaaaagauccaucuuaucucuacacaguccgccauucccuaugcgcugagaguggaguuggaagauuggaacgggaggacuucaaccgcagacuacgccauguucaagguaggaccugaggcugauaaauaucggcucacauacgccuauuuugcugguggcgacgcaggggaugccuucgacggauuugauuucggcgacgauccaagcgacaaguucuuuaccagucacaaugguaugcaguucucuacgugggauaacgacaacgacaaauuugaggggaauugugcggaacaggauggauccggcugguggaugaacaagugccacgccggccaucugaaugggguuuacuaccaaggagguacuuauagcaaagcaucgacacccaacggcuacgacaaugggauaaucugggcuaccuggaagacucgcugguauucuaugaagaaaacaaccaugaagauuaucccuuucaacagauuaacgauaggagagggccagcagcaccaucuggguggggccaaacaggugaggccagaacacccggcugagaccgaauacgauucccucuaucccgaggacgaucuuuga

SEQ ID NO: 8568 - RNA, 1362 nt, Artificial Sequence
  derived and/or modified sequence opt4 from Fibrinogen__Homo_sapiens__AAK19752
augagcuggagccugcaccccagaaaccugauccuguacuucuacgcccugcuguuccugagcagcaccugcguggccuacguggccaccagagacaacugcugcauccuggacgagagauucggcagcuacugccccaccaccugcggcaucgccgacuuccugagcaccuaccagaccaagguggacaaggaccugcagagccuggaggacauccugcaccagguggagaacaagaccagcgaggugaagcagcugaucaaggccauccagcugaccuacaaccccgacgagagcagcaagcccaacaugaucgacgccgccacccugaagagcagaaagaugcuggaggagaucaugaaguacgaggccagcauccugacccacgacagcagcaucagauaccugcaggagaucuacaacagcaacaaccagaagaucgugaaccugaaggagaagguggcccagcuggaggcccagugccaggagcccugcaaggacaccgugcagauccacgacaucaccggcaaggacugccaggacaucgccaacaagggcgccaagcagagcggccuguacuucaucaagccccugaaggccaaccagcaguuccugguguacugcgagaucgacggcagcggcaacggcuggaccguguuccagaagagacuggacggcagcguggacuucaagaagaacuggauccaguacaaggagggcuucggccaccugagccccaccggcaccaccgaguucuggcugggcaacgagaagauccaccugaucagcacccagagcgccauccccuacgcccugagaguggagcuggaggacuggaacggcagaaccagcaccgccgacuacgccauguucaaggugggccccgaggccgacaaguacagacugaccuacgccuacuucgccggcggcgacgccggcgacgccuucgacggcuucgacuucggcgacgaccccagcgacaaguucuucaccagccacaacggcaugcaguucagcaccugggacaacgacaacgacaaguucgagggcaacugcgccgagcaggacggcagcggcugguggaugaacaagugccacgccggccaccugaacggcguguacuaccagggcggcaccuacagcaaggccagcacccccaacggcuacgacaacggcaucaucugggccaccuggaagaccagaugguacagcaugaagaagaccaccaugaagaucauccccuucaacagacugaccaucggcgagggccagcagcaccaccugggcggcgccaagcaggugagacccgagcaccccgccgagaccgaguacgacagccuguaccccgaggacgaccuguga

SEQ ID NO: 8569 - RNA, 1362 nt, Artificial Sequence
  derived and/or modified sequence opt5 from Fibrinogen__Homo_sapiens__AAK19752
augagcuggucccugcaccccagaaaccucauccuguacuucuaugcccuucuguuucucucuagcacaugcguggcuuacgucgccacccgggacaauuguugcauucuggaugagcgcuucggcuccuauuguccuacgaccugcgggaucgcggacuuucuuucuacauaccagaccaagguugauaaagaccugcaaagccucgaagauauucugcaucagguggagaacaagacauccgaagugaaacagcugaucaaggcuauucagcucaccuauaauccggacgagucuagcaaacccaacaugaucgaugccgccacacugaaguccagaaagaugcuugaagagaucaugaaauacgaggcuagcauucugacccacgacucuuccauccgguaucuccaagaaauuuacaauagcaacaaucagaagaucgucaaccugaaagagaagguggcccagcuugaagcucagugucaagagccuugcaaagauacgguucagauucaugacaucaccggaaaggauugucaggacauugccaauaagggcgcgaaacagucugggcuguacuucaucaagccccucaaagccaaccaacaguuucugguguauugcgagaucgauggauccggcaauggguggacagucuuccagaagcgccuggacggaagcguggacuuuaaaaagaacuggauucaauacaaagaaggcuucggccaccucucuccuaccgggacaaccgaguuuuggcugggaaaugaaaagauccaucuuauuuccacgcagagcgcuauccccuaugcccugagaguugagcucgaagauuggaacggccggacauccaccgcugacuacgccauguucaagguggggccugaggcggauaaauaucgccugacauacgccuauuuugcuggaggcgacgccggggaugcuuucgacggauuugauuucggcgacgauccgucugacaaguucuuuaccagccacaauggcaugcaguucuccaccugggauaacgacaacgacaaauuugaggggaauugugccgaacaggauggaagcggcugguggaugaacaagugccacgccgggcaucuuaauggagucuacuaccaaggcgggacauauucuaaggcuuccacgcccaacggauacgacaauggcauuaucugggcgaccuggaaaacaagaugguauagcaugaagaaaaccacaaugaagaucauuccuuucaaccggcugaccaucggcgaggggcagcagcaccaucucggaggcgccaaacaggugcgccccgaacacccugcugagacggaauacgauucucuguaucccgaggacgaucuguga

SEQ ID NO: 8570 - protein, 312 aa, Artificial Sequence
  Fibrinogen__Homo_sapiens__Q08830
MAKVFSFILVTTALTMGREISALEDCAQEQMRLRAQVRLLETRVKQQQVKIKQLLQENEVQFLDKGDENTVIDLGSKRQYADCSEIFNDGYKLSGFYKIKPLQSPAEFSVYCDMSDGGGWTVIQRRSDGSENFNRGWKDYENGFGNFVQKHGEYWLGNKNLHFLTTQEDYTLKIDLADFEKNSRYAQYKNFKVGDEKNFYELNIGEYSGTAGDSLAGNFHPEVQWWASHQRMKFSTWDRDHDNYEGNCAEEDQSGWWFNRCHSANLNGVYYSGPYTAKTDNGIVWYTWHGWWYSLKSVVMKIRPNDFIPNVI

SEQ ID NO: 8571 - RNA, 939 nt, Artificial Sequence
  Fibrinogen__Homo_sapiens__AAH07047
auggcaaagguguucaguuucauccuuguuaccaccgcucuuacaaugggcagggaaauuucggcgcucgaggacugugcccaggagcagaugcggcucagagcccaggugcgccugcuugagacccgggucaaacagcaacaggucaagaucaagcagcuuuugcaggagaaugaaguccaguuccuugauaaaggagaugagaauacugucauugaucuuggaagcaagaggcaguaugcagauuguucagagauuuucaaugauggguauaagcucaguggauuuuacaaaaucaaaccucuccagagcccagcagaauuuucuguuuauugugacauguccgauggaggaggauggacuguaauucagagacgaucugauggcagugaaaacuuuaacagaggauggaaagacuaugaaaauggcuuuggaaauuuuguccaaaaacauggugaauauuggcugggcaauaaaaaucuucacuucuugaccacucaagaagacuacacuuuaaaaaucgaccuugcagauuuugaaaaaaauagccguuaugcacaauauaagaauuucaaaguuggagaugaaaagaauuucuacgaguugaauauuggggaauauucuggaacagcuggagauucccuugcggggaauuuucauccugaggugcaguggugggcuagucaccaaagaaugaaauucagcacgugggacagagaucaugacaacuaugaagggaacugcgcagaagaagaucagucuggcuggugguuuaacaggugucacucugcaaaccugaaugguguauacuacagcggccccuacacggcuaaaacagacaaugggauugucugguacaccuggcauggguggugguauucucugaaaucugugguuaugaaaauuaggccaaaugauuuuauuccaaauguaauuuaa

SEQ ID NO: 8572 - RNA, 939 nt, Artificial Sequence
  derived and/or modified sequence opt1 from Fibrinogen__Homo_sapiens__AAH07047
auggccaagguguucagcuucauccuggucaccaccgcccucacgaugggccgcgagaucuccgcgcuggaggacugcgcccaggagcagaugcggcugcgcgcccaggugcggcuccuggagacccgcgugaagcagcagcaggucaagaucaagcagcugcuccaggagaacgaggugcaguuccuggacaagggggacgagaacaccgugaucgaccugggcagcaagcggcaguacgccgacugcuccgagaucuucaacgacggguacaagcucagcggcuucuacaagaucaagccccugcaguccccggccgaguucagcgucuacugcgacauguccgacgggggcggcuggaccgugauccagcgccggagcgacggguccgagaacuucaaccgcggcuggaaggacuacgagaacggguucggcaacuucgugcagaagcacggggaguacuggcugggcaacaagaaccuccacuuccugacgacccaggaggacuacacccugaagaucgaccucgcggacuucgagaagaacagccgguacgcccaguacaagaacuucaaggucggcgacgagaagaacuucuacgagcugaacaucggggaguacuccggcaccgccggggacagccuggccggcaacuuccaccccgaggugcaguggugggcgucccaccagcgcaugaaguucagcacgugggaccgggaccacgacaacuacgagggcaacugcgccgaggaggaccaguccggguggugguucaaccgcugccacagcgccaaccucaacggcguguacuacuccgggcccuacaccgccaagaccgacaacggcaucgucugguacaccuggcacggguggugguacagccugaaguccguggugaugaagauccggcccaacgacuucaucccgaacgucaucuga

SEQ ID NO: 8573 - RNA, 939 nt, Artificial Sequence
  derived and/or modified sequence opt2 from Fibrinogen__Homo_sapiens__AAH07047
auggccaaggucuucuccuucauccucgucaccaccgcccucaccaugggccgcgagaucuccgcccucgaggacugcgcccaggagcagaugcgccuccgcgcccagguccgccuccucgagacccgcgucaagcagcagcaggucaagaucaagcagcuccuccaggagaacgagguccaguuccucgacaagggcgacgagaacaccgucaucgaccucggcuccaagcgccaguacgccgacugcuccgagaucuucaacgacggcuacaagcucuccggcuucuacaagaucaagccccuccagucccccgccgaguucuccgucuacugcgacauguccgacggcggcggcuggaccgucauccagcgccgcuccgacggcuccgagaacuucaaccgcggcuggaaggacuacgagaacggcuucggcaacuucguccagaagcacggcgaguacuggcucggcaacaagaaccuccacuuccucaccacccaggaggacuacacccucaagaucgaccucgccgacuucgagaagaacucccgcuacgcccaguacaagaacuucaaggucggcgacgagaagaacuucuacgagcucaacaucggcgaguacuccggcaccgccggcgacucccucgccggcaacuuccaccccgagguccaguggugggccucccaccagcgcaugaaguucuccaccugggaccgcgaccacgacaacuacgagggcaacugcgccgaggaggaccaguccggcuggugguucaaccgcugccacuccgccaaccucaacggcgucuacuacuccggccccuacaccgccaagaccgacaacggcaucgucugguacaccuggcacggcuggugguacucccucaaguccgucgucaugaagauccgccccaacgacuucauccccaacgucaucuga

SEQ ID NO: 8574 - RNA, 939 nt, Artificial Sequence
  derived and/or modified sequence opt3 from Fibrinogen__Homo_sapiens__AAH07047
auggccaagguguucagcuuuauccuggucaccacagcucucacuaugggcagagagauuuccgcacuugaagacugcgcccaggagcaaaugaggcugcgggcgcagguucgcuuguuagaaacgcgagugaaacagcagcaaguaaagauaaaacagcugcuacaggagaacgaagugcaguuccucgauaagggggacgagaauaccgucaucgaucugggaucuaaacgucaauacgcugacuguucagagauuuuuaacgaugguuauaaacuuaguggcuucuacaagaucaagccccugcagagcccugccgaauuuuccguguauugcgacaugucugaugggggaggcuggacaguuauucagagaaggucggacgguucagagaauuucaaccggggguggaaggauuacgaaaauggauuuggcaacuucgugcagaaacacggcgaguauugguuggggaauaagaaccuccauuuucugacuacccaagaggacuacacacugaaaaucgaucucgcagacuucgaaaagaauagccgcuaugcccaguacaagaacuuuaaagucggagaugagaagaauuucuacgaauuaaacauaggugaguauaguggcaccgcuggggacucccuggcaggaaauuuucacccagaagugcaguggugggccucucaucaaagaaugaaauucagcacuugggacagggaucacgacaacuacgagggcaauugugcugaggaagaucaguccgguuggugguucaaccggugccauucagccaaccuuaaugggguauauuacaguggaccguauacagcgaagaccgacaacggcaucguuugguacacguggcacggcuggugguauagcuugaaaucuguggucaugaagauucgccccaaugauuuuaucccuaacgugauuuga

SEQ ID NO: 8575 - RNA, 939 nt, Artificial Sequence
  derived and/or modified sequence opt4 from Fibrinogen__Homo_sapiens__AAH07047
auggccaagguguucagcuucauccuggugaccaccgcccugaccaugggcagagagaucagcgcccuggaggacugcgcccaggagcagaugagacugagagcccaggugagacugcuggagaccagagugaagcagcagcaggugaagaucaagcagcugcugcaggagaacgaggugcaguuccuggacaagggcgacgagaacaccgugaucgaccugggcagcaagagacaguacgccgacugcagcgagaucuucaacgacggcuacaagcugagcggcuucuacaagaucaagccccugcagagccccgccgaguucagcguguacugcgacaugagcgacggcggcggcuggaccgugauccagagaagaagcgacggcagcgagaacuucaacagaggcuggaaggacuacgagaacggcuucggcaacuucgugcagaagcacggcgaguacuggcugggcaacaagaaccugcacuuccugaccacccaggaggacuacacccugaagaucgaccuggccgacuucgagaagaacagcagauacgcccaguacaagaacuucaaggugggcgacgagaagaacuucuacgagcugaacaucggcgaguacagcggcaccgccggcgacagccuggccggcaacuuccaccccgaggugcaguggugggccagccaccagagaaugaaguucagcaccugggacagagaccacgacaacuacgagggcaacugcgccgaggaggaccagagcggcuggugguucaacagaugccacagcgccaaccugaacggcguguacuacagcggccccuacaccgccaagaccgacaacggcaucgugugguacaccuggcacggcuggugguacagccugaagagcguggugaugaagaucagacccaacgacuucauccccaacgugaucuga

SEQ ID NO: 8576 - RNA, 939 nt, Artificial Sequence
  derived and/or modified sequence opt5 from Fibrinogen__Homo_sapiens__AAH07047
auggccaagguguucagcuuuauccuggucaccacagcucucacgaugggcagagagauuuccgcccuggaagacugcgcgcaggagcaaaugcggcuucgcgcucagguuagacugcucgaaacccgggugaaacagcagcaagugaagaucaaacagcugcuucaggagaacgaaguccaguuccuggauaagggggacgagaauacagugauugaucucggaucuaaacgccaauacgccgacuguagcgagaucuuuaacgauggcuauaagcuguccggguucuacaagauuaaaccccugcagucuccugccgaauuuagcguuuauugcgacauguccgauggaggcggguggaccgugauccagagacggucugacggaagcgagaauuucaaccgcggcuggaaggauuacgaaaauggcuuugggaacuucguccagaaacacggagaguauuggcucggcaauaagaaccugcauuuucuuacaacccaagaggacuacacacugaaaaucgaucucgcugacuucgaaaagaacuccagauaugcccaguacaagaauuuuaaagugggggaugagaagaauuucuacgaacugaacauuggagaguauagcggcaccgcuggggacucucuugccggaaauuuucacccggaaguucaguggugggcgucccaucaacggaugaaauucagcacgugggaccgcgaucacgacaacuacgagggcaauugugccgaggaagaucagucuggcuggugguucaacagaugccauuccgcuaaccugaaugggguguauuacagcggacccuauaccgccaagacagacaacggcaucgucugguacaccuggcacggguggugguauucucucaaauccguggugaugaagauucggccuaaugauuuuauccccaacgucauuuga

SEQ ID NO: 8577 - protein, 439 aa, Artificial Sequence; identical to SEQ ID NO: 8500
  Fibrinogen__Homo_sapiens__Q14314

SEQ ID NO: 8578 - RNA, 1320 nt, Artificial Sequence
  Fibrinogen__Homo_sapiens__AAD10825
augaagcuggcuaacugguacuggcugagcucagcuguucuugccacuuacgguuuuuugguuguggcaaacaaugaaacagaggaaauuaaagaugaaagagcaaaggaugucugcccagugagacuagaaagcagagggaaaugcgaagaggcaggggagugccccuaccagguaagccugccccccuugacuauucagcucccgaagcaauucagcaggaucgaggagguguucaaagaaguccaaaaccucaaggaaaucguaaauagucuaaagaaaucuugccaagacugcaagcugcaggcugaugacaacggagacccaggcagaaacggacuguuguuacccaguacaggagccccgggagagguuggugauaacagaguuagagaauuagagagugagguuaacaagcuguccucugagcuaaagaaugccaaagaggagaucaauguacuucauggucgccuggagaagcugaaucuuguaaauaugaacaacauagaaaauuauguugacagcaaaguggcaaaucuaacauuuguugucaauaguuuggauggcaaauguucaaagugucccagccaagaacaaauacagucacguccaguucaacaucuaauauauaaagauugcucugacuacuacgcaauaggcaaaagaagcagugagaccuacagaguuacaccugaucccaaaaauaguagcuuugaaguuuacugugacauggagaccauggggggaggcuggacagugcugcaggcacgucucgaugggagcaccaacuucaccagaacauggcaagacuacaaagcaggcuuuggaaaccucagaagggaauuuuggcuggggaacgauaaaauucaucuucugaccaagaguaaggaaaugauucugagaauagaucuugaagacuuuaauggugucgaacuauaugccuuguaugaucaguuuuauguggcuaaugaguuucucaaauaucguuuacacguugguaacuauaauggcacagcuggagaugcauuacguuucaacaaacauuacaaccacgaucugaaguuuuucaccacuccagauaaagacaaugaucgauauccuucugggaacugugggcuguacuacaguucaggcuggugguuugaugcaugucuuucugcaaacuuaaauggcaaauauuaucaccaaaaauacagagguguccguaaugggauuuucugggguaccuggccugguguaagugaggcacacccugguggcuacaaguccuccuucaaagaggcuaagaugaugaucagacccaagcacuuuaagccauaa

SEQ ID NO: 8579 - RNA, 1320 nt, Artificial Sequence; identical to SEQ ID NO: 8502
  derived and/or modified sequence opt1 from Fibrinogen__Homo_sapiens__AAD10825

SEQ ID NO: 8580 - RNA, 1320 nt, Artificial Sequence; identical to SEQ ID NO: 8503
  derived and/or modified sequence opt2 from Fibrinogen__Homo_sapiens__AAD10825

SEQ ID NO: 8581 - RNA, 1320 nt, Artificial Sequence; identical to SEQ ID NO: 8504
  derived and/or modified sequence opt3 from Fibrinogen__Homo_sapiens__AAD10825

SEQ ID NO: 8582 - RNA, 1320 nt, Artificial Sequence; identical to SEQ ID NO: 8505
  derived and/or modified sequence opt4 from Fibrinogen__Homo_sapiens__AAD10825

SEQ ID NO: 8583 - RNA, 1320 nt, Artificial Sequence; identical to SEQ ID NO: 8506
  derived and/or modified sequence opt5 from Fibrinogen__Homo_sapiens__AAD10825

SEQ ID NO: 8584 - protein, 288 aa, Artificial Sequence
  Fibrinogen__Homo_sapiens__Q6UXM4
MDLLWILPSLWLLLLGGPACLKTQEHPSCPGPRELEASKVVLLPSCPGAPGSPGEKGAPGPQGPPGPPGKMGPKGEPGPRNCRELLSQGATLSGWYHLCLPEGRALPVFCDMDTEGGGWLVFQRRQDGSVDFFRSWSSYRAGFGNQESEFWLGNENLHQLTLQGNWELRVELEDFNGNRTFAHYATFRLLGEVDHYQLALGKFSEGTAGDSLSLHSGRPFTTYDADHDSSNSNCAVIVHGAWWYASCYRSNLNGRYAVSEAAAHKYGIDWASGRGVGHPYRRVRMMLR

SEQ ID NO: 8585 - RNA, 867 nt, Artificial Sequence
  Fibrinogen__Homo_sapiens__AAQ88650
auggaucuacuguggauccugcccucccuguggcuucuccugcuuggggggccugccugccugaagacccaggaacaccccagcugcccaggacccagggaacuggaagccagcaaaguuguccuccugcccaguugucccggagcuccaggaaguccuggggagaagggagccccagguccucaagggccaccuggaccaccaggcaagaugggccccaagggugagccaggccccagaaacugccgggagcuguugagccagggcgccaccuugagcggcugguaccaucugugccuaccugagggcagggcccucccagucuuuugugacauggacaccgaggggggcggcuggcugguguuucagaggcgccaggaugguucuguggauuucuuccgcucuugguccuccuacagagcagguuuugggaaccaagagucugaauucuggcugggaaaugagaauuugcaccagcuuacucuccaggguaacugggagcugcggguagagcuggaagacuuuaaugguaaccguacuuucgcccacuaugcgaccuuccgccuccucggugagguagaccacuaccagcuggcacugggcaaguucucagagggcacugcaggggauucccugagccuccacagugggaggcccuuuaccaccuaugacgcugaccacgauucaagcaacagcaacugugcagugauuguccacggugccuggugguaugcauccuguuaccgaucaaaucucaauggucgcuaugcagugucugaggcugccgcccacaaauauggcauugacugggccucaggccguggugugggccaccccuaccgcaggguucggaugaugcuucgauag

SEQ ID NO: 8586 - RNA, 867 nt, Artificial Sequence
  derived and/or modified sequence opt1 from Fibrinogen__Homo_sapiens__AAQ88650
auggaccugcucuggauccugcccagccuguggcuccugcugcucggcgggccggccugccugaagacccaggagcaccccuccugccccggcccccgcgagcuggaggccagcaaggugguccuccugccguccugccccggggcgcccggcagccccggggagaagggcgccccgggcccccaggggccgcccggcccgcccgggaagaugggccccaagggggagcccggcccccggaacugccgcgagcugcucucccagggcgccacccugagcgggugguaccaccugugccuccccgagggccgggcccugcccguguucugcgacauggacacggagggcgggggcuggcugguguuccagcgccggcaggacggguccgucgacuucuuccgcagcugguccagcuaccgggccggcuucgggaaccaggaguccgaguucuggcucggcaacgagaaccugcaccagcugacccuccaggggaacugggagcugcgcguggagcuggaggacuucaacggcaaccggaccuucgcgcacuacgccaccuuccgccuccugggcgagguggaccacuaccagcuggcccucgggaaguucagcgagggcacggccggggacucccugagccugcacuccggccggcccuucaccaccuacgacgcggaccacgacagcuccaacagcaacugcgccgucaucgugcacggggccuggugguacgccuccugcuaccgcagcaaccucaacggccgguacgccgugagcgaggcggccgcccacaaguacggcaucgacugggccuccgggcgcggcgucgggcacccguaccggcgcgugcggaugaugcugcgcuga

SEQ ID NO: 8587 - RNA, 867 nt, Artificial Sequence
  derived and/or modified sequence opt2 from Fibrinogen__Homo_sapiens__AAQ88650
auggaccuccucuggauccuccccucccucuggcuccuccuccucggcggccccgccugccucaagacccaggagcaccccuccugccccggcccccgcgagcucgaggccuccaaggucguccuccuccccuccugccccggcgcccccggcucccccggcgagaagggcgcccccggcccccagggcccccccggcccccccggcaagaugggccccaagggcgagcccggcccccgcaacugccgcgagcuccucucccagggcgccacccucuccggcugguaccaccucugccuccccgagggccgcgcccuccccgucuucugcgacauggacaccgagggcggcggcuggcucgucuuccagcgccgccaggacggcuccgucgacuucuuccgcuccugguccuccuaccgcgccggcuucggcaaccaggaguccgaguucuggcucggcaacgagaaccuccaccagcucacccuccagggcaacugggagcuccgcgucgagcucgaggacuucaacggcaaccgcaccuucgcccacuacgccaccuuccgccuccucggcgaggucgaccacuaccagcucgcccucggcaaguucuccgagggcaccgccggcgacucccucucccuccacuccggccgccccuucaccaccuacgacgccgaccacgacuccuccaacuccaacugcgccgucaucguccacggcgccuggugguacgccuccugcuaccgcuccaaccucaacggccgcuacgccgucuccgaggccgccgcccacaaguacggcaucgacugggccuccggccgcggcgucggccaccccuaccgccgcguccgcaugaugcuccgcuga

SEQ ID NO: 8588 - RNA, 867 nt, Artificial Sequence
  derived and/or modified sequence opt3 from Fibrinogen__Homo_sapiens__AAQ88650
auggaccugcucuggauccuucccagccugugguuguuacugcuaggcgggccugccugccucaagacccaggagcacccauccuguccgggacccagagaacuggaggcuucuaaagugguccuucugccuucaugcccaggugcacccggcaguccuggggaaaagggagccccaggcccccaagguccuccagggccgcccggaaaaaugggcccuaagggcgagccagggcccaggaacugucgggaauugcucagccagggagcgacacuguccgguugguaccaucugugccucccugagggccgcgcuuuaccaguuuucugugauauggacacugaagggggaggcuggcugguguuucagcgacgucaggaugguucuguagacuucuuuagaucguggucaagcuauagggccggguucggaaaucaagagagugaguuuuggcuuggcaacgaaaauuugcaccagcugacgcuacagggcaacugggagcuccggguggagcuggaagauuucaaugggaaccgcaccuuugcacauuacgccacauucagacuucugggagaggucgaccacuaucaguuggcucucgguaaauuuuccgaaggcacugcaggggauucucugagcuuacauuccggaaggcccuucaccacauacgacgccgaucacgacucaaguaauagcaacugcgcugugauuguucacggcgccuggugguaugcgucuuguuaccgguccaaucugaacggucgcuaugcagugucagaggccgcugcccauaaguacgggauagauugggcaagcggccgaggagucggccacccguacagaagggugcggaugaugcuccguuga

SEQ ID NO: 8589 - RNA, 867 nt, Artificial Sequence
  derived and/or modified sequence opt4 from Fibrinogen__Homo_sapiens__AAQ88650
auggaccugcuguggauccugcccagccuguggcugcugcugcugggcggccccgccugccugaagacccaggagcaccccagcugccccggccccagagagcuggaggccagcaagguggugcugcugcccagcugccccggcgcccccggcagccccggcgagaagggcgcccccggcccccagggcccccccggcccccccggcaagaugggccccaagggcgagcccggccccagaaacugcagagagcugcugagccagggcgccacccugagcggcugguaccaccugugccugcccgagggcagagcccugcccguguucugcgacauggacaccgagggcggcggcuggcugguguuccagagaagacaggacggcagcguggacuucuucagaagcuggagcagcuacagagccggcuucggcaaccaggagagcgaguucuggcugggcaacgagaaccugcaccagcugacccugcagggcaacugggagcugagaguggagcuggaggacuucaacggcaacagaaccuucgcccacuacgccaccuucagacugcugggcgagguggaccacuaccagcuggcccugggcaaguucagcgagggcaccgccggcgacagccugagccugcacagcggcagacccuucaccaccuacgacgccgaccacgacagcagcaacagcaacugcgccgugaucgugcacggcgccuggugguacgccagcugcuacagaagcaaccugaacggcagauacgccgugagcgaggccgccgcccacaaguacggcaucgacugggccagcggcagaggcgugggccaccccuacagaagagugagaaugaugcugagauga

SEQ ID NO: 8590 - RNA, 867 nt, Artificial Sequence
  derived and/or modified sequence opt5 from Fibrinogen__Homo_sapiens__AAQ88650
auggaccugcucuggauccugcccagccuuuggcugcuccugcuuggcgggccugccugccugaagacccaggagcacccguccugucccggaccuagagaacucgaggcuucuaaagugguccugcugcccagcugcccuggcgcccccggguccccuggagaaaagggcgcgccggggccccaaggaccucccggcccucccggcaaaauggggccgaagggagagccuggcccccggaacugucgcgaacuccugucucagggggcuacacuuagcggaugguaccaucugugccucccugagggcagagcccugcccguuuucugugauauggacacggaagggggaggcuggcuuguguuucagcggcgccaggauggcuccguggacuucuuuagaucuuggagcuccuaucgggccggguucggaaaucaagagagcgaguuuuggcugggcaacgaaaaucuccaccagcugacccugcaggggaacugggagcuccgcgucgagcuggaagauuucaauggaaacagaacauuugcucauuacgccaccuuccggcuucugggcgagguggaccacuaucagcucgcucuggggaaauuuucugaaggaacagccggcgauucccuuagccugcauucuggccgccccuucaccacauacgacgcggaucacgacuccagcaauucuaacugcgccguuauugugcacggggcuuggugguaugccuccuguuacagaagcaaucucaacggacgguaugcugucuccgaggccgcggcccauaaguacggcaucgauugggcuucugggcgcggagugggccacccuuacagacggguucgcaugaugcugagauga

SEQ ID NO: 8591 - protein, 211 aa, Artificial Sequence [sequence omitted]

SEQ ID NO: 8592 - RNA, 636 nt, Artificial Sequence
  Fibrinogen__Homo_sapiens__CAA50740
augcagaacggagccggugccuccaggaccagcaccaucuuccucaacggcaaccgcgagcggccccugaacguguuuugcgacauggagacugaugggggcggcuggcugguguuccagcgccgcauggauggacagacagacuucuggagggacugggaggacuaugcccaugguuuugggaacaucucuggagaguucuggcugggcaaugaggcccugcacagccugacacaggcaggugacuacuccauccgcguggaccugcgggcuggggacgaggcuguguucgcccaguacgacuccuuccacguagacucggcugcggaguacuaccgccuccacuuggagggcuaccacggcaccgcaggggacuccaugagcuaccacagcggcagugucuucucugcccgugaucgggaccccaacagcuugcucaucuccugcgcugucuccuaccgaggggccuggugguacaggaacugccacuacgccaaccucaacgggcucuacgggagcacaguggaccaucagggagugagcugguaccacuggaagggcuucgaguucucggugcccuucacggaaaugaagcugagaccaagaaacuuucgcuccccagcggggggaggcuga

SEQ ID NO: 8593 - RNA, 636 nt, Artificial Sequence
  derived and/or modified sequence opt1 from Fibrinogen__Homo_sapiens__CAA50740
augcagaacggcgccggggccagccgcaccuccaccaucuuccugaacggcaaccgggagcgcccccucaacguguucugcgacauggagacggacgggggcggguggcuggucuuccagcggcgcauggacggccagaccgacuucuggcgggacugggaggacuacgcgcacggcuucgggaacaucagcggcgaguucuggcuggggaacgaggcccuccacucccugacccaggccggcgacuacagcauccgcguggaccugcgggccggggacgaggccguguucgcgcaguacgacuccuuccacgucgacagcgccgccgaguacuaccgccuccaccuggagggcuaccacggcaccgccggggacuccaugagcuaccacuccggcagcguguucuccgcgcgggaccgcgacccgaacagccugcucaucuccugcgccgugagcuaccgcggggccuggugguaccggaacugccacuacgccaaccugaacggccuguacggcuccacggucgaccaccagggggugagcugguaccacuggaagggcuucgaguucuccgugcccuucaccgagaugaagcuccggccccgcaacuuccggagccccgccgggggcggguga

SEQ ID NO: 8594 - RNA, 636 nt, Artificial Sequence
  derived and/or modified sequence opt2 from Fibrinogen__Homo_sapiens__CAA50740
augcagaacggcgccggcgccucccgcaccuccaccaucuuccucaacggcaaccgcgagcgcccccucaacgucuucugcgacauggagaccgacggcggcggcuggcucgucuuccagcgccgcauggacggccagaccgacuucuggcgcgacugggaggacuacgcccacggcuucggcaacaucuccggcgaguucuggcucggcaacgaggcccuccacucccucacccaggccggcgacuacuccauccgcgucgaccuccgcgccggcgacgaggccgucuucgcccaguacgacuccuuccacgucgacuccgccgccgaguacuaccgccuccaccucgagggcuaccacggcaccgccggcgacuccauguccuaccacuccggcuccgucuucuccgcccgcgaccgcgaccccaacucccuccucaucuccugcgccgucuccuaccgcggcgccuggugguaccgcaacugccacuacgccaaccucaacggccucuacggcuccaccgucgaccaccagggcgucuccugguaccacuggaagggcuucgaguucuccguccccuucaccgagaugaagcuccgcccccgcaacuuccgcucccccgccggcggcggcuga

SEQ ID NO: 8595 - RNA, 636 nt, Artificial Sequence
  derived and/or modified sequence opt3 from Fibrinogen__Homo_sapiens__CAA50740
augcagaacggcgccggggcuagcagaaccuccacaaucuuccugaauggaaacagggagcggccccucaauguguuuugcgacauggaaacugaugguggcggguggcuugucuuccaacgccgaauggacggacagacggauuuuuggcgugacugggaggauuacgcacacggcuucgguaacauuucuggggaauuuuggcugggaaaugaggccuugcauucauuaacccaggcgggcgacuauaguauaagaguugaucugagggcuggcgacgaagccguguucgcacaguacgauagcuuucacguagacuccgccgcugaguauuaccggcuacaucucgagggguaucacggaacagcaggggauucuaugucguaccauucaggcagcguguucagugcccgcgacagagauccuaacucccugcuuaucucuugugcugucagcuauaggggugccuggugguaccggaauugccacuacgcgaaccugaauggauuguauggcuccacuguggaccaccaagguguuucaugguaccauuggaagggguuugaguucagugugccauuuaccgaaaugaaacuccgcccgcgaaacuucagaagccccgcaggaggcggcuga

SEQ ID NO: 8596 - RNA, 636 nt, Artificial Sequence
  derived and/or modified sequence opt4 from Fibrinogen__Homo_sapiens__CAA50740
augcagaacggcgccggcgccagcagaaccagcaccaucuuccugaacggcaacagagagagaccccugaacguguucugcgacauggagaccgacggcggcggcuggcugguguuccagagaagaauggacggccagaccgacuucuggagagacugggaggacuacgcccacggcuucggcaacaucagcggcgaguucuggcugggcaacgaggcccugcacagccugacccaggccggcgacuacagcaucagaguggaccugagagccggcgacgaggccguguucgcccaguacgacagcuuccacguggacagcgccgccgaguacuacagacugcaccuggagggcuaccacggcaccgccggcgacagcaugagcuaccacagcggcagcguguucagcgccagagacagagaccccaacagccugcugaucagcugcgccgugagcuacagaggcgccuggugguacagaaacugccacuacgccaaccugaacggccuguacggcagcaccguggaccaccagggcgugagcugguaccacuggaagggcuucgaguucagcgugcccuucaccgagaugaagcugagacccagaaacuucagaagccccgccggcggcggcuga

SEQ ID NO: 8597 - RNA, 636 nt, Artificial Sequence
  derived and/or modified sequence opt5 from Fibrinogen__Homo_sapiens__CAA50740
augcagaacggcgccggggcuagcagaaccuccacaaucuuccugaauggaaaccgggagcgcccccucaauguguuuugcgacauggaaacggauggcgggggauggcuggucuuccaaagacggauggacggccagaccgauuuuuggcgcgacugggaggauuacgcccacggguucggaaacauuucuggcgaauuuuggcuuggcaaugaggcgcugcauagccucacacaggcuggggacuauuccaucagaguugaucugcgggccggagacgaagccguguucgcucaguacgauucuuuucacguggacagcgccgcugaguauuaccgccuucaucuggagggcuaucacgggaccgccggagauuccaugucuuaccauagcggcuccgucuucagcgcgagagaccgggauccuaacucucuccugauuuccugugccgugagcuaucgcggggcuuggugguacagaaauugccacuacgccaaccugaauggacucuauggcucuacaguugaccaccaaggcguguccugguaccauuggaagggguuugaguucagcgucccguuuaccgaaaugaaacugcggccccgcaacuucagaucuccugcuggaggcggguga

SEQ ID NO: 8598 - protein, 508 aa, Artificial Sequence
  FOS__Homo_sapiens__A0A024RD16
MLPTQAGAAAALGRGSALGGSLNRTPTGRPGGGGGTRGANGGRVPGNGAGLGPGRLEREAAAAAATTPAPTAGALYSGSEGDSESGEEEELGAERRGLKRSLSEMEIGMVVGGPEASAAATGGYGPVSGAVSGAKPGKKTRGRVKIKMEFIDNKLRRYTTFSKRKTGIMKKAYELSTLTGTQVLLLVASETGHVYTFATRKLQPMITSETGKALIQTCLNSPDSPPRSDPTTDQRMSATGFEETDLTYQVSESDSSGETKDTLKPAFTVTNLPGTTSTIQTAPSTSTTMQVSSGPSFPITNYLAPVSASVSPSAVSSANGTVLKSTGSGPVSSGGLMQLPTSFTLMPGGAVAQQVPVQAIQVHQAPQQASPSRDSSTDLTQTSSSGTVTLPATIMTSSVPTTVGGHMMYPSPHAVMYAPTSGLGDGSLTVLNAFSQAPSTMQVSHSQVQEPGGVPQVFLTASSGTVQIPVSAVQLHQMAVIGQQAGSSSNLTELQVVNLDTAHSTKSE

SEQ ID NO: 8599 - RNA, 1527 nt, Artificial Sequence
  FOS__Homo_sapiens__EAX04162
auguuaccgacccaagcuggggccgcggcggcucugggccggggcucggcccuggggggcagccugaaccggaccccgacggggcggccgggcggcggcggcgggacacgcggggcuaacgggggccggguccccgggaauggcgcggggcucgggcccggccgccuggagcgggaggcugcggcagcggcggcaaccaccccggcgcccaccgcgggggcccucuacagcggcagcgagggcgacucggagucgggcgaggaggaggagcugggcgccgagcggcgcggccugaagcggagccugagcgagauggagaucgguaugguggucggugggcccgaggcgucggcagcggccaccgggggcuacgggccggugagcggcgcggugagcggggccaagccggguaagaagacccggggccgcgugaagaucaagauggaguucaucgacaacaagcugcggcgcuacacgaccuucagcaagaggaagacgggcaucaugaagaaggccuaugagcuguccacgcugacagggacacaggugcuguugcugguggccagugagacaggccauguguauaccuuugccacccgaaaacugcagcccaugaucaccagugagaccggcaaggcacugauucagaccugccucaacucgccagacucuccaccccguucagaccccacaacagaccagagaaugagugccacuggcuuugaagagacagaucucaccuaccaggugucggagucugacagcaguggggagaccaaggacacacugaagccggcguucacagucaccaaccugccggguacaaccuccaccauccaaacagcaccuagcaccucuaccaccaugcaagucagcagcggccccuccuuucccaucaccaacuaccuggcaccagugucugcuagugucagccccagugcugucagcagugccaaugggacugugcugaagaguacaggcagcggcccugucuccucugggggccuuaugcagcugccuaccagcuucacccucaugccugguggggcaguggcccagcaggucccagugcaggccauucaagugcaccaggccccacagcaagcgucucccucccgugacagcagcacagaccucacgcagaccuccuccagcgggacagugacgcugcccgccaccaucaugacgucauccgugcccacaacuguggguggccacaugauguacccuagcccgcaugcggugauguaugcccccaccucgggccugggugauggcagccucaccgugcugaaugccuucucccaggcaccauccaccaugcaggugucacacagccagguccaggagccagguggcgucccccagguguuccugacagcaucaucugggacagugcagaucccuguuucagcaguucagcuccaccagauggcugugauagggcagcaggccgggagcagcagcaaccucaccgagcuacagguggugaaccuggacaccgcccacagcaccaagagugaauga

SEQ ID NO: 8600 - RNA, 1527 nt, Artificial Sequence
  derived and/or modified sequence opt1 from FOS__Homo_sapiens__EAX04162
augcugcccacccaggccggcgccgcggccgcccuggggcgcggcagcgcccucgggggcucccugaaccggaccccgacggggcgccccggcggcgggggcgggacccggggcgccaacgggggccgcgugcccggcaacggggcgggccuggggcccggccggcuggagcgcgaggccgccgccgcggccgccaccaccccggcccccacggccggcgcgcuguacagcggguccgagggcgacagcgaguccggggaggaggaggagcucggcgccgagcggcgcgggcugaagcggagccuguccgagauggagaucggcauggucgugggcgggcccgaggccagcgccgccgcgaccggcggguacggccccguguccggggccgucagcggcgccaagccgggcaagaagacccgcgggcgggugaagaucaagauggaguucaucgacaacaagcuccgccgguacaccacguucuccaagcgcaagaccggcaucaugaagaaggccuacgagcugagcacccugaccgggacccaggugcuccugcuggucgccuccgagacgggccacguguacaccuucgcgacccggaagcuccagcccaugaucacgagcgagaccgggaaggcccugauccagaccugccugaacucccccgacagcccgccccgcuccgaccccaccacggaccagcggaugagcgccaccggcuucgaggagaccgaccucaccuaccagguguccgagagcgacagcuccggcgagacgaaggacacccugaagcccgccuucaccgucaccaaccugcccgggacgaccagcaccauccagaccgccccguccacgagcaccaccaugcaggucuccagcggccccuccuuccccaucaccaacuaccucgcgcccgugagcgccuccgugagcccguccgccgugagcuccgccaacgggacggugcugaaguccaccggcuccggccccgucagcuccgggggccugaugcagcuccccaccagcuucacccugaugcccgggggcgcgguggcccagcaggucccggugcaggccauccaggugcaccaggcgccccagcaggccucccccagccgcgacagcuccaccgaccugacgcagaccagcuccagcgggaccgugacccuccccgccacgaucaugaccuccagcgucccgaccaccgugggcggccacaugauguaccccagcccccacgccgugauguacgccccgacgagcgggcugggcgacgggucccugaccguccucaacgccuucagccaggcccccuccaccaugcaggucagccacucccaggugcaggagcccggcggggugccccagguguuccugaccgcgagcuccggcacgguccagaucccggugagcgccgugcagcugcaccagauggccgucaucggccagcaggccggguccagcagcaaccucaccgagcuccagguggugaaccuggacaccgcccacuccaccaagagcgaguga

SEQ ID NO: 8601 - RNA, 1527 nt, Artificial Sequence
  derived and/or modified sequence opt2 from FOS__Homo_sapiens__EAX04162
augcuccccacccaggccggcgccgccgccgcccucggccgcggcuccgcccucggcggcucccucaaccgcacccccaccggccgccccggcggcggcggcggcacccgcggcgccaacggcggccgcguccccggcaacggcgccggccucggccccggccgccucgagcgcgaggccgccgccgccgccgccaccacccccgcccccaccgccggcgcccucuacuccggcuccgagggcgacuccgaguccggcgaggaggaggagcucggcgccgagcgccgcggccucaagcgcucccucuccgagauggagaucggcauggucgucggcggccccgaggccuccgccgccgccaccggcggcuacggccccgucuccggcgccgucuccggcgccaagcccggcaagaagacccgcggccgcgucaagaucaagauggaguucaucgacaacaagcuccgccgcuacaccaccuucuccaagcgcaagaccggcaucaugaagaaggccuacgagcucuccacccucaccggcacccagguccuccuccucgucgccuccgagaccggccacgucuacaccuucgccacccgcaagcuccagcccaugaucaccuccgagaccggcaaggcccucauccagaccugccucaacucccccgacucccccccccgcuccgaccccaccaccgaccagcgcauguccgccaccggcuucgaggagaccgaccucaccuaccaggucuccgaguccgacuccuccggcgagaccaaggacacccucaagcccgccuucaccgucaccaaccuccccggcaccaccuccaccauccagaccgcccccuccaccuccaccaccaugcaggucuccuccggccccuccuuccccaucaccaacuaccucgcccccgucuccgccuccgucucccccuccgccgucuccuccgccaacggcaccguccucaaguccaccggcuccggccccgucuccuccggcggccucaugcagcuccccaccuccuucacccucaugcccggcggcgccgucgcccagcagguccccguccaggccauccagguccaccaggccccccagcaggccucccccucccgcgacuccuccaccgaccucacccagaccuccuccuccggcaccgucacccuccccgccaccaucaugaccuccuccguccccaccaccgucggcggccacaugauguaccccuccccccacgccgucauguacgcccccaccuccggccucggcgacggcucccucaccguccucaacgccuucucccaggcccccuccaccaugcaggucucccacucccagguccaggagcccggcggcgucccccaggucuuccucaccgccuccuccggcaccguccagauccccgucuccgccguccagcuccaccagauggccgucaucggccagcaggccggcuccuccuccaaccucaccgagcuccaggucgucaaccucgacaccgcccacuccaccaaguccgaguga

SEQ ID NO: 8602 - RNA, 1527 nt, Artificial Sequence
  derived and/or modified sequence opt3 from FOS__Homo_sapiens__EAX04162
augcugcccacccaggccggcgcugcagccgcgcucgggagaggaagcgcucuugguggcucccugaacaggacaccuacugggcggccaggaggcggugggggaacgcgcggcgccaauggcgggcgagugccgggaaacggugcaggcuuggggcccggacguuuagagagagaagccgcugcagccgcugccaccacuccugcgccaacugcaggcgcccuguacucugguucagagggggacagugaaagcggagaggaagaggagcuaggcgcugaaaggcggggccucaagcgcucccugucugagauggaaaucgggauggucguuggaggucccgaggccucggcagcugccaccggcggguauggaccugugucaggcgcgguaagcggugccaaaccagggaagaaaacaagaggcagggugaagauuaaaauggaguucauagauaauaaacuucggcgcuacaccacuuuuaguaagcgaaaaacaggaaucaugaagaaagcauaugaacuguccaccuugacgggcacucaaguccuccugcugguggcuucugagaccgggcacguuuacacauucgccacuagaaagcuccagcccaugauuaccagcgaaacaggaaaggcuuuaauccagaccugccugaacuccccugacucaccaccgaggagugaucccacgacugaccagcggaugagcgccacagguuuugaggaaaccgaucuuacuuaucaagugucugaguccgacucaagcggcgagacaaaggauaccuugaagccugcauucacggucaccaaucugccagggacaacaaguaccauucagacagcccccucuacuuccaccacaaugcaagugagcucgggaccuucuuuuccaaucaccaacuaccuagcucccguauccgcgucaguuaguccgagcgcaguguccucugccaauggcacuguccucaaaagcacggguucagggccugugaguuccggcggacugaugcagcuucccacaucuuucacccugaugccaggcggggcuguggcccagcaggucccuguucaggcaauacaggugcaucaagcuccccagcaggccucuccaucacgugacaguagcacugauuugacccaaacauccucuucgggaaccguaacucuccccgccacaaucaugacgagcuccgugccuaccacugucgguggccacaugauguauccaucaccgcaugcagugauguacgcgcccacaagugggcugggagacggcucuuuaaccguucugaacgcuuuuagccaggccccuuccacaaugcaagugucacacagccagguccaggaaccagguggggugccccagguauuccucacugcaucuuccggcaccguucagauuccugugagugccguccagcuucaucaaauggcugugaucggacagcaggccggcagcagcuccaaucugacggaguugcaggucgugaaccuagauaccgcacacucaacaaagagugaauga

SEQ ID NO: 8603 - RNA, 1527 nt, Artificial Sequence
  derived and/or modified sequence opt4 from FOS__Homo_sapiens__EAX04162
augcugcccacccaggccggcgccgccgccgcccugggcagaggcagcgcccugggcggcagccugaacagaacccccaccggcagacccggcggcggcggcggcaccagaggcgccaacggcggcagagugcccggcaacggcgccggccugggccccggcagacuggagagagaggccgccgccgccgccgccaccacccccgcccccaccgccggcgcccuguacagcggcagcgagggcgacagcgagagcggcgaggaggaggagcugggcgccgagagaagaggccugaagagaagccugagcgagauggagaucggcaugguggugggcggccccgaggccagcgccgccgccaccggcggcuacggccccgugagcggcgccgugagcggcgccaagcccggcaagaagaccagaggcagagugaagaucaagauggaguucaucgacaacaagcugagaagauacaccaccuucagcaagagaaagaccggcaucaugaagaaggccuacgagcugagcacccugaccggcacccaggugcugcugcugguggccagcgagaccggccacguguacaccuucgccaccagaaagcugcagcccaugaucaccagcgagaccggcaaggcccugauccagaccugccugaacagccccgacagcccccccagaagcgaccccaccaccgaccagagaaugagcgccaccggcuucgaggagaccgaccugaccuaccaggugagcgagagcgacagcagcggcgagaccaaggacacccugaagcccgccuucaccgugaccaaccugcccggcaccaccagcaccauccagaccgcccccagcaccagcaccaccaugcaggugagcagcggccccagcuuccccaucaccaacuaccuggcccccgugagcgccagcgugagccccagcgccgugagcagcgccaacggcaccgugcugaagagcaccggcagcggccccgugagcagcggcggccugaugcagcugcccaccagcuucacccugaugcccggcggcgccguggcccagcaggugcccgugcaggccauccaggugcaccaggccccccagcaggccagccccagcagagacagcagcaccgaccugacccagaccagcagcagcggcaccgugacccugcccgccaccaucaugaccagcagcgugcccaccaccgugggcggccacaugauguaccccagcccccacgccgugauguacgcccccaccagcggccugggcgacggcagccugaccgugcugaacgccuucagccaggcccccagcaccaugcaggugagccacagccaggugcaggagcccggcggcgugccccagguguuccugaccgccagcagcggcaccgugcagauccccgugagcgccgugcagcugcaccagauggccgugaucggccagcaggccggcagcagcagcaaccugaccgagcugcagguggugaaccuggacaccgcccacagcaccaagagcgaguga

SEQ ID NO: 8604 - RNA, 1527 nt, Artificial Sequence
  derived and/or modified sequence opt5 from FOS__Homo_sapiens__EAX04162
augcugcccacccaggccggcgcugccgcggcucucgggagaggaagcgcccugggcgggucccuuaaccggacaccuacgggacgcccgggcgggggaggcggcaccagaggggccaauggaggccgggugcccgggaacggagcuggccuggggccuggacgccucgagagagaagccgcugccgcggccgcuacaacccccgccccuacagcuggcgcccuguacucuggcagcgagggggacuccgaaucuggagaggaagaggagcuuggcgcggaacggcgcgggcugaagagaagccucuccgagauggaaaucggaauggucguuggcgggcccgaggccucugcugccgcuaccggaggcuauggcccugugagcggggccguguccggagccaaaccgggcaagaaaacacgggggcgcgucaagauuaaaauggaguucaucgauaauaagcugagacgguacaccacguuuagcaagcgcaaaaccggaauuaugaagaaggcuuaugaacugucuacacucaccggcacacaagugcugcuucugguugcguccgagaccgggcacguguacacguucgccacaagaaaacuccagcccaugaucaccagcgaaacaggcaaagcucugauucagaccugccuuaacucuccugacagcccgccucggagcgaucccaccacagaccagcgcaugucugccacgggauuugaggaaaccgaucugacauaucaagucuccgagagcgacuccucuggcgagaccaaggauacacucaagccggccuucaccgugacgaaucugccugggacaaccagcaccauccagacagcucccuccaccagcacaacgaugcagguuucuuccggaccuagcuuucccaucaccaacuaccuggcccccgugucugcgagcgucuccccuucugcugugagcuccgccaauggcacagugcucaaaagcaccgggucuggaccggucuccagcggcgggcugaugcagcuucccacaucuuucacccugaugccuggcggagccguugcucaacaggugcccgugcaggccauucagguccaucaagcuccucagcaggccucccccagcagagacuccucuacggaucucacccaaacaagcuccucuggcaccgugacacugccggcgaccaucaugacgagcuccguuccuacaaccgucgggggacacaugauguaucccagcccucaugccgugauguacgcucccacaucuggccuuggggacggaucccugaccgugcucaacgccuuuagccaggcuccuucuaccaugcagguuucccacagccaggugcaagaacccggcggggucccccagguguuccugacagccucuagcggcacgguccagauuccuguguccgcgguucagcugcaucaaauggccgugaucggacagcaggcuggcuccucuuccaaucucaccgagcugcaggucgugaaccuugauacagcccacagcaccaaguccgaauga

SEQ ID NO: 8605 - protein, 483 aa, Artificial Sequence
  GSK3A__Homo_sapiens__P49840
MSGGGPSGGGPGGSGRARTSSFAEPGGGGGGGGGGPGGSASGPGGTGGGKASVGAMGGGVGASSSGGGPGGSGGGGSGGPGAGTSFPPPGVKLGRDSGKVTTVVATLGQGPERSQEVAYTDIKVIGNGSFGVVYQARLAETRELVAIKKVLQDKRFKNRELQIMRKLDHCNIVRLRYFFYSSGEKKDELYLNLVLEYVPETVYRVARHFTKAKLTIPILYVKVYMYQLFRSLAYIHSQGVCHRDIKPQNLLVDPDTAVLKLCDFGSAKQLVRGEPNVSYICSRYYRAPELIFGATDYTSSIDVWSAGCVLAELLLGQPIFPGDSGVDQLVEIIKVLGTPTREQIREMNPNYTEFKFPQIKAHPWTKVFKSRTPPEAIALCSSLLEYTPSSRLSPLEACAHSFFDELRCLGTQLPNNRPLPPLFNFSAGELSIQPSLNAILIPPHLRSPAGTTTLTPSSQALTETPTSSDWQSTDATPTLTNSS

SEQ ID NO: 8606 - RNA, 1452 nt, Artificial Sequence
  GSK3A__Homo_sapiens__CCDS12599.1
augagcggcggcgggccuucgggaggcggcccugggggcucgggcagggcgcggacuagcucguucgcggagcccggcggcggaggcggaggaggcggcggcggccccggaggcucggccuccggcccaggcggcaccggcggcggaaaggcaucugucggggccaugggugggggcgucggggccucgagcuccggggguggacccggcggcagcggcggaggaggcagcggaggccccggcgcaggcacuagcuucccgccgcccggggugaagcugggccgugacagcgggaaggugaccacagucguagccacucuaggccaaggcccagagcgcucccaagaaguggcuuacacggacaucaaagugauuggcaauggcucauuuggggucguguaccaggcacggcuggcagagaccagggaacuagucgccaucaagaagguucuccaggacaagagguucaagaaccgagagcugcagaucaugcguaagcuggaccacugcaauauugugaggcugagauacuuuuucuacuccaguggcgagaagaaagacgagcuuuaccuaaaucuggugcuggaauaugugcccgagacaguguaccggguggcccgccacuucaccaaggccaaguugaccaucccuauccucuaugucaagguguacauguaccagcucuuccgcagcuuggccuacauccacucccagggcgugugucaccgcgacaucaagccccagaaccugcugguggacccugacacugcuguccucaagcucugcgauuuuggcagugcaaagcaguugguccgaggggagcccaaugucuccuacaucuguucucgcuacuaccgggccccagagcucaucuuuggagccacugauuacaccucauccaucgauguuuggucagcuggcuguguacuggcagagcuccucuugggccagcccaucuucccuggggacagugggguggaccagcugguggagaucaucaaggugcugggaacaccaacccgggaacaaauccgagagaugaaccccaacuacacggaguucaaguucccucagauuaaagcucaccccuggacaaagguguucaaaucucgaacgccgccagaggccaucgcgcucugcucuagccugcuggaguacaccccauccucaaggcucuccccacuagaggccugugcgcacagcuucuuugaugaacugcgaugucugggaacccagcugccuaacaaccgcccacuucccccucucuucaacuucagugcuggugaacucuccauccaaccgucucucaacgccauucucaucccuccucacuugagguccccagcgggcacuaccacccucaccccguccucacaagcuuuaacugagacuccgaccagcucagacuggcagucgaccgaugccacaccuacccucacuaacuccuccuga

SEQ ID NO: 8607 - RNA, 1452 nt, Artificial Sequence
  derived and/or modified sequence opt1 from GSK3A__Homo_sapiens__CCDS12599.1
augagcggcgggggccccuccgggggcgggccgggcggcagcgggcgcgcccggaccuccagcuucgccgagcccggcgggggcgggggcggcgggggcgggggccccggcggguccgcgagcggccccgggggcaccgggggcggcaaggccuccgugggggccaugggcgggggcgucggggccagcuccagcggcggcgggccgggcggguccggcgggggcggcagcgggggccccggggccggcacguccuucccgccgcccggcgugaagcuggggcgcgacagcggcaaggugaccaccgucguggcgacccucgggcagggccccgagcggucccaggagguggccuacacggacaucaaggucaucgggaacggcagcuucggcgugguguaccaggcccgccuggccgagacccgggagcuggucgcgaucaagaaggugcuccaggacaagcgcuucaagaaccgggagcugcagaucaugcgcaagcuggaccacugcaacaucgugcggcuccgcuacuucuucuacuccagcggggagaagaaggacgagcuguaccugaaccucguccuggaguacgugcccgagaccguguaccgggucgcccgccacuucaccaaggccaagcugacgauccccauccucuacgugaagguguacauguaccagcuguuccggucccuggccuacauccacagccagggcgucugccaccgcgacaucaagccccagaaccuccugguggaccccgacaccgccgugcugaagcucugcgacuucgggagcgcgaagcagcugguccggggcgagcccaacguguccuacaucugcagccgcuacuaccgggcccccgagcugaucuucggggccaccgacuacaccuccagcaucgacgugugguccgccggcugcguccucgccgagcugcugcucggccagccgaucuuccccggggacagcggcguggaccagcuggucgagaucaucaaggugcuggggacgcccacccgcgagcagauccgggagaugaaccccaacuacaccgaguucaaguucccgcagaucaaggcgcaccccuggaccaagguguucaagucccgcacgccgcccgaggccaucgcccucugcagcucccugcuggaguacacccccagcucccggcucagcccccuggaggccugcgcccacuccuucuucgacgagcugcgcugccucggcacccagcugcccaacaaccgcccccugccgccccucuucaacuucagcgcgggggagcuguccauccagcccagccugaacgccauccucaucccgccccaccuccggucccccgccggcaccacgacccugacccccagcucccaggcccugaccgagacgccgaccagcagcgacuggcaguccaccgacgccacccccacgcugaccaacagcuccuga

SEQ ID NO: 8608 - RNA, 1452 nt, Artificial Sequence
  derived and/or modified sequence opt2 from GSK3A__Homo_sapiens__CCDS12599.1
auguccggcggcggccccuccggcggcggccccggcggcuccggccgcgcccgcaccuccuccuucgccgagcccggcggcggcggcggcggcggcggcggcggccccggcggcuccgccuccggccccggcggcaccggcggcggcaaggccuccgucggcgccaugggcggcggcgucggcgccuccuccuccggcggcggccccggcggcuccggcggcggcggcuccggcggccccggcgccggcaccuccuuccccccccccggcgucaagcucggccgcgacuccggcaaggucaccaccgucgucgccacccucggccagggccccgagcgcucccaggaggucgccuacaccgacaucaaggucaucggcaacggcuccuucggcgucgucuaccaggcccgccucgccgagacccgcgagcucgucgccaucaagaagguccuccaggacaagcgcuucaagaaccgcgagcuccagaucaugcgcaagcucgaccacugcaacaucguccgccuccgcuacuucuucuacuccuccggcgagaagaaggacgagcucuaccucaaccucguccucgaguacguccccgagaccgucuaccgcgucgcccgccacuucaccaaggccaagcucaccauccccauccucuacgucaaggucuacauguaccagcucuuccgcucccucgccuacauccacucccagggcgucugccaccgcgacaucaagccccagaaccuccucgucgaccccgacaccgccguccucaagcucugcgacuucggcuccgccaagcagcucguccgcggcgagcccaacgucuccuacaucugcucccgcuacuaccgcgcccccgagcucaucuucggcgccaccgacuacaccuccuccaucgacgucugguccgccggcugcguccucgccgagcuccuccucggccagcccaucuuccccggcgacuccggcgucgaccagcucgucgagaucaucaagguccucggcacccccacccgcgagcagauccgcgagaugaaccccaacuacaccgaguucaaguucccccagaucaaggcccaccccuggaccaaggucuucaagucccgcaccccccccgaggccaucgcccucugcuccucccuccucgaguacacccccuccucccgccucuccccccucgaggccugcgcccacuccuucuucgacgagcuccgcugccucggcacccagcuccccaacaaccgcccccuccccccccucuucaacuucuccgccggcgagcucuccauccagcccucccucaacgccauccucauccccccccaccuccgcucccccgccggcaccaccacccucacccccuccucccaggcccucaccgagacccccaccuccuccgacuggcaguccaccgacgccacccccacccucaccaacuccuccuga

SEQ ID NO: 8609 - RNA, 1452 nt, Artificial Sequence
  derived and/or modified sequence opt3 from GSK3A__Homo_sapiens__CCDS12599.1
augagcggcgggggacccuccgguggcgggccuggaggcucugguagagccaggaccucaaguuucgcugagccagggggaggcggcgggggagguggcgggggaccgggcgguagcgcauccgggcccggaggcacaggcgggggaaaggccucugugggugcgaugggcgggggagucggcgcuucgucaagcggugggggcccuggaggcagugggggagguggcuccgggggaccaggcgccgguacuucuuuucccccuccagggguuaaacugggccgggacagcggaaaggugacgaccguaguggcaacacucggccaggggcccgaacgcucccaagaggucgccuacacugauaucaaagugauuggaaacgguucauucggcguuguguaucaggcucgacuugcagaaacccgugagcuggucgccauaaagaaaguguugcaggacaagagauuuaagaauagggaauuacagaucaugcggaaacuggaucacugcaacauuguacgccuaagauacuucuuuuauaguagcggggagaagaaagacgagcucuaccugaaucuuguucuggaauaugugccugagacagucuacaggguggcucggcacuucaccaaggccaaauugacuaucccaauucucuaugugaaggucuacauguaccaacuguuucgcucucuggcguauauccacucccagggaguuugucaucgagauauaaagccgcagaaccucuuaguggaccccgauacagcaguacugaaacuuugcgacuucggcucagccaagcaguuggugagaggugaaccuaaugucagcuacaucuguaguagguauuaccgggcuccagagcugauuuuuggggccaccgauuauacgucuuccaucgacguguggagcgcaggcugcguucuagcugagcuccugcuuggacaacccauuuucccuggcgauucggggguggaccagcuggucgaaaucauaaaaguguugggaacuccaacccgugagcagauucgcgaaaugaaccccaauuacacagaguuuaaguucccgcagaucaaagcccacccuuggacuaagguauuuaaaucuagaacacccccagaagcgauugcccucuguuccucacuguuagaguauaccccuaguagcaggcugucuccccucgaggcaugcgcucauuccuucuucgaugaacuucggugucugggcacccaauugccaaacaaucgaccccuaccuccacuguuuaacuucagcgccggugagcucucaauccagccgagucugaaugcuauccuuauucccccucaucugcgcuccccagccgggacgacuacauugacccccagcucucaggcacucacugaaacaccuaccucaagugacuggcaaagcacggacgccaccccaacacugacuaacuccucuuga

SEQ ID NO: 8610 - RNA, 1452 nt, Artificial Sequence
  derived and/or modified sequence opt4 from GSK3A__Homo_sapiens__CCDS12599.1
augagcggcggcggccccagcggcggcggccccggcggcagcggcagagccagaaccagcagcuucgccgagcccggcggcggcggcggcggcggcggcggcggccccggcggcagcgccagcggccccggcggcaccggcggcggcaaggccagcgugggcgccaugggcggcggcgugggcgccagcagcagcggcggcggccccggcggcagcggcggcggcggcagcggcggccccggcgccggcaccagcuuccccccccccggcgugaagcugggcagagacagcggcaaggugaccaccgugguggccacccugggccagggccccgagagaagccaggagguggccuacaccgacaucaaggugaucggcaacggcagcuucggcgugguguaccaggccagacuggccgagaccagagagcugguggccaucaagaaggugcugcaggacaagagauucaagaacagagagcugcagaucaugagaaagcuggaccacugcaacaucgugagacugagauacuucuucuacagcagcggcgagaagaaggacgagcuguaccugaaccuggugcuggaguacgugcccgagaccguguacagaguggccagacacuucaccaaggccaagcugaccauccccauccuguacgugaagguguacauguaccagcuguucagaagccuggccuacauccacagccagggcgugugccacagagacaucaagccccagaaccugcugguggaccccgacaccgccgugcugaagcugugcgacuucggcagcgccaagcagcuggugagaggcgagcccaacgugagcuacaucugcagcagauacuacagagcccccgagcugaucuucggcgccaccgacuacaccagcagcaucgacguguggagcgccggcugcgugcuggccgagcugcugcugggccagcccaucuuccccggcgacagcggcguggaccagcugguggagaucaucaaggugcugggcacccccaccagagagcagaucagagagaugaaccccaacuacaccgaguucaaguucccccagaucaaggcccaccccuggaccaagguguucaagagcagaaccccccccgaggccaucgcccugugcagcagccugcuggaguacacccccagcagcagacugagcccccuggaggccugcgcccacagcuucuucgacgagcugagaugccugggcacccagcugcccaacaacagaccccugcccccccuguucaacuucagcgccggcgagcugagcauccagcccagccugaacgccauccugauccccccccaccugagaagccccgccggcaccaccacccugacccccagcagccaggcccugaccgagacccccaccagcagcgacuggcagagcaccgacgccacccccacccugaccaacagcagcuga

SEQ ID NO: 8611 - RNA, 1452 nt, Artificial Sequence
  derived and/or modified sequence opt5 from GSK3A__Homo_sapiens__CCDS12599.1
augagcggcgggggacccuccggcgggggaccuggcgggucuggacgcgcccggaccagcuccuucgcugagccgggcggcgggggaggcgggggaggcgggggacccggcggcucugccagcgggccuggaggcacagggggaggcaaggcguccgugggggcuaugggaggcggcgucggggccucuagcuccggaggcgggcccggaggcagcgggggcggaggcucugggggaccuggcgccgggacguccuuucccccuccgggaguuaaacugggccgcgacagcgggaaggugaccacaguggucgcuacccucggccagggacccgaaagaucucaagagguggccuacacagauaucaaaguuaucggcaacggguccuucggaguggucuaucaggcucggcuggccgaaacccgcgagcuuguggcgaucaagaaaguucugcaggacaagagauuuaagaaucgggaacuccagauuaugcgcaaacuggaucacugcaacaucgugagacuucgguacuucuuuuauagcucuggcgagaagaaagacgagcuguaccucaaucugguccuggaauaugugccugagacaguguaccgcgucgccagacauuucaccaaggcuaaacucacgauucccauccuguauguuaagguguacauguaccaacuuuuucggucccuggccuauauccacagccagggggugugucaucgcgauauuaagccucagaaccuccuggucgaccccgauaccgcugugcuuaaacugugcgacuucggauccgccaagcagcucguuagaggcgaaccgaaugugucuuacaucuguagccgguauuaccgcgcgccugagcugauuuuuggggccacagauuauaccuccagcaucgacgucuggucugcuggcugcgugcuggccgagcuccugcuuggacaacccauuuucccuggcgauuccgggguugaccagcugguggaaaucauuaaaguccucggaacacccaccagagagcagauccgggaaaugaaccccaauuacacggaguuuaaguucccucagaucaaagcucacccguggacaaagguguuuaaaagcagaacacccccugaagccauugcccuguguucuagccuucuggaguauacccccuccucucgccucagcccucuggaggcuugcgcgcauuccuucuucgaugaacugcggugucucggcacccaacugcccaacaauagaccgcuuccuccccuguuuaacuucagcgccggggagcucucuauccagccuucccugaaugcuauucuuauucccccucaccugagaagccccgccggaaccacaacgcucaccccgucuucccaggcccugacagaaaccccuacaagcuccgacuggcaaucuaccgacgcuacgcccacacugaccaacagcuccuga

SEQ ID NO: 8612 - protein, 420 aa, Artificial Sequence; identical to SEQ ID NO: 393
  GSK3B__Homo_sapiens__P49841

SEQ ID NO: 8613 - RNA, 1263 nt, Artificial Sequence
  GSK3B__Homo_sapiens__AAH12760
augucagggcggcccagaaccaccuccuuugcggagagcugcaagccggugcagcagccuucagcuuuuggcagcaugaaaguuagcagagacaaggacggcagcaaggugacaacagugguggcaacuccugggcaggguccagacaggccacaagaagucagcuauacagacacuaaagugauuggaaauggaucauuuggugugguauaucaagccaaacuuugugauucaggagaacuggucgccaucaagaaaguauugcaggacaagagauuuaagaaucgagagcuccagaucaugagaaagcuagaucacuguaacauaguccgauugcguuauuucuucuacuccaguggugagaagaaagaugaggucuaucuuaaucuggugcuggacuauguuccggaaacaguauacagaguugccagacacuauagucgagccaaacagacgcucccugugauuuaugucaaguuguauauguaucagcuguuccgaaguuuagccuauauccauuccuuuggaaucugccaucgggauauuaaaccgcagaaccucuuguuggauccugauacugcuguauuaaaacucugugacuuuggaagugcaaagcagcugguccgaggagaacccaauguuucguauaucuguucucgguacuauagggcaccagaguugaucuuuggagccacugauuauaccucuaguauagauguauggucugcuggcuguguguuggcugagcuguuacuaggacaaccaauauuuccaggggauagugguguggaucaguugguagaaauaaucaagguccugggaacuccaacaagggagcaaaucagagaaaugaacccaaacuacacagaauuuaaauucccucaaauuaaggcacauccuuggacuaaggucuuccgaccccgaacuccaccggaggcaauugcacuguguagccgucugcuggaguauacaccaacugcccgacuaacaccacuggaagcuugugcacauucauuuuuugaugaauuacgggacccaaaugucaaacuaccaaaugggcgagacacaccugcacucuucaacuucaccacucaagaacugucaaguaauccaccucuggcuaccauccuuauuccuccucaugcucggauucaagcagcugcuucaacccccacaaaugccacagcagcgucagaugcuaauacuggagaccguggacagaccaauaaugcugcuucugcaucagcuuccaacuccaccuga

SEQ ID NO: 8614 - RNA, 1263 nt, Artificial Sequence
  derived and/or modified sequence opt1 from GSK3B__Homo_sapiens__AAH12760
augagcggccgcccccggaccaccuccuucgccgagagcugcaagcccgugcagcagcccuccgccuucgggagcaugaaggucucccgcgacaaggacggcagcaaggugacgaccguggucgcgacccccgggcagggccccgaccggccgcaggagguguccuacaccgacacgaaggugaucgggaacggcagcuucggcgucguguaccaggccaagcugugcgacuccggggagcucguggccaucaagaagguccugcaggacaagcgcuucaagaaccgggagcugcagaucaugcgcaagcucgaccacugcaacaucgugcggcugcgcuacuucuucuacagcuccggcgagaagaaggacgagguguaccugaaccucguccuggacuacgugcccgagaccguguaccgggucgcccgccacuacagccgggccaagcagacccugcccgugaucuacgugaagcucuacauguaccagcuguuccgcucccuggcguacauccacagcuucgggaucugccaccgggacaucaagccccagaaccuccugcuggacccggacaccgccguccucaagcugugcgacuucggcuccgccaagcagcuggugcgcggggagcccaacgugagcuacaucugcucccgguacuaccgcgcccccgagcucaucuucggcgcgacggacuacaccagcuccaucgacgucuggagcgccggcugcgugcuggccgagcugcuccuggggcagcccaucuucccgggcgacagcgggguggaccagcuggucgagaucaucaaggugcucggcacccccacccgggagcagauccgcgagaugaaccccaacuacacggaguucaaguucccccagaucaaggcccacccguggaccaaggucuuccggccccgcaccccgcccgaggccaucgcgcugugcucccggcugcucgaguacacccccacggcccgccugacgccccuggaggccugcgcccacagcuucuucgacgagcuccgcgaccccaacgugaagcugcccaacggccgggacaccccggcccuguucaacuucaccacccaggagcucuccagcaacccgccccuggcgaccauccugaucccgccccacgcccgcauccaggccgccgccuccacccccaccaacgcgacggccgccagcgacgccaacaccggggaccggggccagaccaacaacgccgcguccgccagcgccuccaacagcaccuga

SEQ ID NO: 8615 - RNA, 1263 nt, Artificial Sequence
  derived and/or modified sequence opt2 from GSK3B__Homo_sapiens__AAH12760
auguccggccgcccccgcaccaccuccuucgccgaguccugcaagcccguccagcagcccuccgccuucggcuccaugaaggucucccgcgacaaggacggcuccaaggucaccaccgucgucgccacccccggccagggccccgaccgcccccaggaggucuccuacaccgacaccaaggucaucggcaacggcuccuucggcgucgucuaccaggccaagcucugcgacuccggcgagcucgucgccaucaagaagguccuccaggacaagcgcuucaagaaccgcgagcuccagaucaugcgcaagcucgaccacugcaacaucguccgccuccgcuacuucuucuacuccuccggcgagaagaaggacgaggucuaccucaaccucguccucgacuacguccccgagaccgucuaccgcgucgcccgccacuacucccgcgccaagcagacccuccccgucaucuacgucaagcucuacauguaccagcucuuccgcucccucgccuacauccacuccuucggcaucugccaccgcgacaucaagccccagaaccuccuccucgaccccgacaccgccguccucaagcucugcgacuucggcuccgccaagcagcucguccgcggcgagcccaacgucuccuacaucugcucccgcuacuaccgcgcccccgagcucaucuucggcgccaccgacuacaccuccuccaucgacgucugguccgccggcugcguccucgccgagcuccuccucggccagcccaucuuccccggcgacuccggcgucgaccagcucgucgagaucaucaagguccucggcacccccacccgcgagcagauccgcgagaugaaccccaacuacaccgaguucaaguucccccagaucaaggcccaccccuggaccaaggucuuccgcccccgcaccccccccgaggccaucgcccucugcucccgccuccucgaguacacccccaccgcccgccucaccccccucgaggccugcgcccacuccuucuucgacgagcuccgcgaccccaacgucaagcuccccaacggccgcgacacccccgcccucuucaacuucaccacccaggagcucuccuccaaccccccccucgccaccauccucauccccccccacgcccgcauccaggccgccgccuccacccccaccaacgccaccgccgccuccgacgccaacaccggcgaccgcggccagaccaacaacgccgccuccgccuccgccuccaacuccaccuga

SEQ ID NO: 8616 - RNA, 1263 nt, Artificial Sequence
  derived and/or modified sequence opt3 from GSK3B__Homo_sapiens__AAH12760
augagcggcagacccaggaccacauccuucgccgagucuugcaagccugugcagcaaccaucagcuuuugggaguaugaaagucagccgggacaaggauggauccaaaguuacuacggugguagcaaccccgggucagggccccgaccgcccucaggaagugucuuacacagauacuaaggucaucgggaacggaucguucggcgugguuuaucaggccaaacugugugacucaggugagcucguggcgaucaagaagguccuucaagauaaacgauuuaagaaucgugaacugcagauaaugagaaaauuggaccacugcaacaucgugagguuacgguacuucuuuuauagcaguggggagaagaaagaugaaguauaccugaaucuaguucucgacuaugugccagagaccgucuaccgcguggcuagacauuauuccagggccaagcagacacugcccgugauuuacgucaaacuuuacauguaucagcuguuccggucuuuggcauacauccacagcuuuggaauuugucaucgcgauaucaagccucaaaaccuccugcuggacccagauaccgccguucucaaguuaugcgacuucggcuccgcuaaacagcuggugcgaggcgagcccaauguaucauauauauguaguagauacuauagggcaccugaacuuaucuuuggggccacugauuacacaagcucuauugacgugugguccgcuggaugcgucuuggccgagcugcuacucggucagccaaucuucccgggcgacucagggguggaucagcugguugaaauuaucaaggugcuuggaacccccacgcgggagcaaauacgugagaugaacccuaauuauacugaauuuaaauucccacagauuaaggcgcaccccuggaccaaagucuuucgcccuagaacaccacccgaggcaaucgcccuguguagcagguugcucgaauacacuccgaccgcucggcugacaccuuuagaggccugcgcacauaguuucuucgacgaacugcgagaucccaacgugaagcucccaaauggccgcgacaccccugcucuuuuuaacuucacgacucaggagcugucuuccaaucccccauuggccacaauucuaauucccccucacgcgagaauccaagccgcagcuagcaccccaacuaacgccacagcugccucggaugcaaauaccggugacagggggcagacgaacaaugccgcuucugcguccgcaucaaacaguaccuga

SEQ ID NO: 8617 - RNA, 1263 nt, Artificial Sequence
  derived and/or modified sequence opt4 from GSK3B__Homo_sapiens__AAH12760
augagcggcagacccagaaccaccagcuucgccgagagcugcaagcccgugcagcagcccagcgccuucggcagcaugaaggugagcagagacaaggacggcagcaaggugaccaccgugguggccacccccggccagggccccgacagaccccaggaggugagcuacaccgacaccaaggugaucggcaacggcagcuucggcgugguguaccaggccaagcugugcgacagcggcgagcugguggccaucaagaaggugcugcaggacaagagauucaagaacagagagcugcagaucaugagaaagcuggaccacugcaacaucgugagacugagauacuucuucuacagcagcggcgagaagaaggacgagguguaccugaaccuggugcuggacuacgugcccgagaccguguacagaguggccagacacuacagcagagccaagcagacccugcccgugaucuacgugaagcuguacauguaccagcuguucagaagccuggccuacauccacagcuucggcaucugccacagagacaucaagccccagaaccugcugcuggaccccgacaccgccgugcugaagcugugcgacuucggcagcgccaagcagcuggugagaggcgagcccaacgugagcuacaucugcagcagauacuacagagcccccgagcugaucuucggcgccaccgacuacaccagcagcaucgacguguggagcgccggcugcgugcuggccgagcugcugcugggccagcccaucuuccccggcgacagcggcguggaccagcugguggagaucaucaaggugcugggcacccccaccagagagcagaucagagagaugaaccccaacuacaccgaguucaaguucccccagaucaaggcccaccccuggaccaagguguucagacccagaaccccccccgaggccaucgcccugugcagcagacugcuggaguacacccccaccgccagacugaccccccuggaggccugcgcccacagcuucuucgacgagcugagagaccccaacgugaagcugcccaacggcagagacacccccgcccuguucaacuucaccacccaggagcugagcagcaaccccccccuggccaccauccugauccccccccacgccagaauccaggccgccgccagcacccccaccaacgccaccgccgccagcgacgccaacaccggcgacagaggccagaccaacaacgccgccagcgccagcgccagcaacagcaccuga

SEQ ID NO: 8618 - RNA, 1263 nt, Artificial Sequence
  derived and/or modified sequence opt5 from GSK3B__Homo_sapiens__AAH12760
augagcggcagaccccggaccacauccuucgccgagucuugcaagccugugcagcaaccgagcgcuuuuggguccaugaaagucucucgcgacaaggauggaagcaaaguuacgaccgugguggccacacccggccaggggccugacagaccccaggaagucuccuacaccgauacaaaggugaucggaaacggcucuuucgggguuguguaucaggcgaaacugugugacagcggagagcucgucgcuauuaagaaggugcugcaagauaaacgguuuaagaaucgcgaacuucagaucaugagaaaacuggaccacugcaacauuguucggcuccgcuacuucuuuuauuccagcggcgagaagaaagaugaaguguaccugaaucuuguccuggacuaugugccugagaccguguacagagucgcccggcauuauucucgcgccaagcagacacuccccguuaucuacgugaagcuguacauguaucagcuguucagaucccucgcuuacauucacagcuuuggcaucugucaucgggauaucaaaccucaaaaccugcuucuggacccggauaccgccgugcucaagcugugcgacuucgggucugcuaaacagcuuguccgcggagagcccaauguguccuauauuuguagcagauacuaucgggccccugaacugaucuuuggcgcgacggauuacaccucuuccauugacguuuggagcgccgggugcgugcucgcugagcugcugcucggacagcccaucuucccuggcgacuccggggucgaucagcugguggaaauuaucaagguucuuggaacacccacccgcgagcaaauuagagagaugaacccgaauuauacagaauuuaaauucccucagaucaaggcccaccccuggaccaaaguguuucggccuagaacgccucccgaggcuaucgcccuguguucucgccuccuggaauacacacccaccgcgcggcuuacaccgcuggaggccugcgcucauagcuucuucgacgaacucagagaucccaacgucaagcugccuaauggccgcgacacccccgcccuguuuaacuucaccacacaggagcucuccagcaauccuccccuggcuacgauucuuaucccgccucacgcccggauucaagccgcugcgucuacccccacaaacgccaccgcugccuccgaugccaauacaggcgacagagggcagaccaacaaugcugccagcgcgucugcuagcaacuccacguga

SEQ ID NO: 8619 - protein, 102 aa, Artificial Sequence
  HSP10__Homo_sapiens__P61604
MAGQAFRKFLPLFDRVLVERSAAETVTKGGIMLPEKSQGKVLQATVVAVGSGSKGKGGEIQPVSVKVGDKVLLPEYGGTKVVLDDKDYFLFRDGDILGKYVD

SEQ ID NO: 8620 - RNA, 309 nt, Artificial Sequence
  HSP10__Homo_sapiens__AAA50953
auggcaggacaagcguuuagaaaguuucuuccacucuuugaccgaguauugguugaaaggagugcugcugaaacuguaaccaaaggaggcauuaugcuuccagaaaaaucucaaggaaaaguauugcaagcaacaguagucgcuguuggaucggguucuaaaggaaaggguggagagauucaaccaguuagcgugaaaguuggagauaaaguucuucucccagaauauggaggcaccaaaguaguucuagaugacaaggauuauuuccuauuuagagauggugacauucuuggaaaguacguagacuga

SEQ ID NO: 8621 - RNA, 309 nt, Artificial Sequence
  derived and/or modified sequence opt1 from HSP10__Homo_sapiens__AAA50953
auggccggccaggccuuccgcaaguuccugccccucuucgaccgggugcuggucgagcgcagcgcggccgagaccgugaccaagggcgggaucaugcugccggagaagucccaggggaaggugcuccaggccacggucguggccgugggcagcggguccaagggcaagggcggggagauccagcccgucagcgugaaggugggcgacaagguccugcugcccgaguacgggggcaccaagguggugcucgacgacaaggacuacuuccuguuccgggacggggacauccugggcaaguacgucgacuga

SEQ ID NO: 8622 - RNA, 309 nt, Artificial Sequence
  derived and/or modified sequence opt2 from HSP10__Homo_sapiens__AAA50953
auggccggccaggccuuccgcaaguuccucccccucuucgaccgcguccucgucgagcgcuccgccgccgagaccgucaccaagggcggcaucaugcuccccgagaagucccagggcaagguccuccaggccaccgucgucgccgucggcuccggcuccaagggcaagggcggcgagauccagcccgucuccgucaaggucggcgacaagguccuccuccccgaguacggcggcaccaaggucguccucgacgacaaggacuacuuccucuuccgcgacggcgacauccucggcaaguacgucgacuga

SEQ ID NO: 8623 - RNA, 309 nt, Artificial Sequence
  derived and/or modified sequence opt3 from HSP10__Homo_sapiens__AAA50953
auggccggccaggcuuucagaaaguuucugccccucuucgacagggugcuugucgagcggagcgcagccgaaaccguuacaaaagggggaaucaugcugccugagaagucccaagguaaaguguugcaggcgacuguaguggcugucggcucugggucaaagggaaaaggcggugaaauucagccagugaguguuaaggugggggauaaggucuuacugccggaguacggaggcacgaaagugguacuagacgauaaggacuauuuucucuuccgcgauggcgacauacuggggaaauacguugauuga

SEQ ID NO: 8624 - RNA, 309 nt, Artificial Sequence
  derived and/or modified sequence opt4 from HSP10__Homo_sapiens__AAA50953
auggccggccaggccuucagaaaguuccugccccuguucgacagagugcugguggagagaagcgccgccgagaccgugaccaagggcggcaucaugcugcccgagaagagccagggcaaggugcugcaggccaccgugguggccgugggcagcggcagcaagggcaagggcggcgagauccagcccgugagcgugaaggugggcgacaaggugcugcugcccgaguacggcggcaccaagguggugcuggacgacaaggacuacuuccuguucagagacggcgacauccugggcaaguacguggacuga

SEQ ID NO: 8625 - RNA, 309 nt, Artificial Sequence
  derived and/or modified sequence opt5 from HSP10__Homo_sapiens__AAA50953
auggccggccaggcuuucagaaaguuucugccccucuucgaccgggugcuggucgagcgcagcgccgcggaaaccguuacaaaagggggaaucaugcuuccugagaagucccaaggcaaagugcugcaggcuacgguggucgccguggggucuggaagcaagggcaaagggggagaaauucagccgguuuccgugaaggucggcgauaaggugcuccugcccgaguacggcgggaccaaaguugugcuugacgauaaggacuauuuucuguucagagauggagacauccucggcaaauacgucgauuga

SEQ ID NO: 8626 - protein, 704 aa, Artificial Sequence
  HSP75__Homo_sapiens__Q12931
MARELRALLLWGRRLRPLLRAPALAAVPGGKPILCPRRTTAQLGPRRNPAWSLQAGRLFSTQTAEDKEEPLHSIISSTESVQGSTSKHEFQAETKKLLDIVARSLYSEKEVFIRELISNASDALEKLRHKLVSDGQALPEMEIHLQTNAEKGTITIQDTGIGMTQEELVSNLGTIARSGSKAFLDALQNQAEASSKIIGQFGVGFYSAFMVADRVEVYSRSAAPGSLGYQWLSDGSGVFEIAEASGVRTGTKIIIHLKSDCKEFSSEARVRDVVTKYSNFVSFPLYLNGRRMNTLQAIWMMDPKDVREWQHEEFYRYVAQAHDKPRYTLHYKTDAPLNIRSIFYVPDMKPSMFDVSRELGSSVALYSRKVLIQTKATDILPKWLRFIRGVVDSEDIPLNLSRELLQESALIRKLRDVLQQRLIKFFIDQSKKDAEKYAKFFEDYGLFMREGIVTATEQEVKEDIAKLLRYESSALPSGQLTSLSEYASRMRAGTRNIYYLCAPNRHLAEHSPYYEAMKKKDTEVLFCFEQFDELTLLHLREFDKKKLISVETDIVVDHYKEEKFEDRSPAAECLSEKETEELMAWMRNVLGSRVTNVKVTLRLDTHPAMVTVLEMGAARHFLRMQQLAKTQEERAQLLQPTLEINPRHALIKKLNQLRASEPGLAQLLVDQIYENAMIAAGLVDDPRAMVGRLNELLVKALERH

SEQ ID NO: 8627 - RNA, 2115 nt, Artificial Sequence
  HSP75__Homo_sapiens__AAH18950
auggcgcgcgagcugcgggcgcugcugcuguggggccgccgccugcggccuuugcugcgggcgccggcgcuggcggccgugccgggaggaaaaccaauucuguguccucggaggaccacagcccaguugggccccaggcgaaacccagccuggagcuugcaggcaggacgacuguucagcacgcagaccgccgaggacaaggaggaaccccugcacucgauuaucagcagcacagagagcgugcaggguuccacuuccaaacaugaguuccaggccgagacaaagaagcuuuuggacauuguugcccggucccuguacucagaaaaagagguguuuauacgggagcugaucuccaaugccagcgaugccuuggaaaaacugcgucacaaacuggugucugacggccaagcacugccagaaauggagauucacuugcagaccaaugccgagaaaggcaccaucaccauccaggauacugguaucgggaugacacaggaagagcugguguccaaccuggggacgauugccagaucggggucaaaggccuuccuggaugcucugcagaaccaggcugaggccagcagcaagaucaucggccaguuuggaguggguuucuacucagcuuucaugguggcugacagaguggaggucuauucccgcucggcagccccggggagccuggguuaccaguggcuuucagaugguucuggaguguuugaaaucgccgaagcuucgggaguuagaaccgggacaaaaaucaucauccaccugaaauccgacugcaaggaguuuuccagcgaggcccgggugcgagaugugguaacgaaguacagcaacuucgucagcuuccccuuguacuugaauggaaggcggaugaacaccuugcaggccaucuggaugauggaccccaaggauguccgugaguggcaacaugaggaguucuaccgcuacgucgcgcaggcucacgacaagccccgcuacacccugcacuauaagacggacgcaccgcucaacauccgcagcaucuucuacgugcccgacaugaaaccguccauguuugaugugagccgggagcugggcuccagcguugcacuguacagccgcaaaguccucauccagaccaaggccacggacauccugcccaaguggcugcgcuucauccgaggugugguggacagugaggacauuccccugaaccucagccgggagcugcugcaggagagcgcacucaucaggaaacuccgggacguuuuacagcagaggcugaucaaauucuucauugaccagaguaaaaaagaugcugagaaguaugcaaaguuuuuugaagauuacggccuguucaugcgggagggcauugugaccgccaccgagcaggaggucaaggaggacauagcaaagcugcugcgcuacgaguccucggcgcugcccuccgggcagcuaaccagccucucagaauacgccagccgcaugcgggccggcacccgcaacaucuacuaccugugcgcccccaaccgucaccuggcagagcacucacccuacuaugaggccaugaagaagaaagacacagagguucucuucugcuuugagcaguuugaugagcucacccugcugcaccuucgugaguuugacaagaagaagcugaucucuguggagacggacauagucguggaucacuacaaggaggagaaguuugaggacagguccccagccgccgagugccuaucagagaaggagacggaggagcucauggccuggaugagaaaugugcuggggucgcgugucaccaacgugaaggugacccuccgacuggacacccacccugccauggucaccgugcuggagaugggggcugcccgccacuuccugcgcaugcagcagcuggccaagacccaggaggagcgcgcacagcuccugcagcccacgcuggagaucaaccccaggcacgcgcucaucaagaagcugaaucagcugcgcgcaagcgagccuggccuggcucagcugcugguggaucagauauacgagaacgccaugauugcugcuggacuuguugacgacccuagggccauggugggccgcuugaaugagcugcuugucaaggcccuggagcgacacuga

SEQ ID NO: 8628 - RNA, 2115 nt, Artificial Sequence
  derived and/or modified sequence opt1 from HSP75__Homo_sapiens__AAH18950
auggcccgcgagcugcgggcccuccugcuguggggccgccggcuccgcccccugcugcgggcgccggcccucgccgccgugcccgggggcaagcccauccugugcccccgccggaccaccgcccagcuggggccgcgccggaaccccgcguggagccuccaggccggccgccuguucuccacgcagaccgccgaggacaaggaggagccccugcacagcaucaucuccagcaccgaguccguccaggggagcaccuccaagcacgaguuccaggccgagacgaagaagcuccuggacaucguggcgcggagccuguacuccgagaaggagguguucauccgcgagcucaucagcaacgccuccgacgcccuggagaagcugcggcacaagcucgucagcgacggccaggcccugcccgagauggagauccaccuccagaccaacgccgagaagggcaccaucaccauccaggacacggggaucggcaugacccaggaggagcugguguccaaccuggggaccaucgcgcgcagcggcuccaaggccuuccuggacgcccuccagaaccaggccgaggccagcuccaagaucaucgggcaguucggcgugggcuucuacagcgcguucauggucgccgaccggguggagguguacucccgcagcgccgccccggggagccugggcuaccaguggcuguccgacgggagcggcgucuucgagaucgccgaggcguccggcgugcggaccgggacgaagaucaucauccaccucaagagcgacugcaaggaguucuccagcgaggcccgcgugcgggacgucgugaccaaguacuccaacuucgugagcuucccccuguaccugaacggccgccggaugaacacccuccaggccaucuggaugauggaccccaaggacguccgcgaguggcagcacgaggaguucuaccgcuacguggcccaggcccacgacaagccccgguacacccugcacuacaagacggacgcgccgcugaacauccgcuccaucuucuacgugcccgacaugaagcccagcauguucgacgucucccgggagcucgggagcuccguggcccuguacagccgcaaggugcugauccagaccaaggccaccgacauccuccccaaguggcugcgguucauccgcggcgucguggacuccgaggacaucccgcugaaccucagccgggagcugcugcaggaguccgcccucauccgcaagcugcgggacgugcugcagcagcgccucaucaaguucuucaucgaccagagcaagaaggacgcggagaaguacgccaaguucuucgaggacuacgggcuguucaugcgggagggcaucgucaccgccacggagcaggaggugaaggaggacaucgccaagcugcuccgcuacgaguccagcgcccugcccagcggccagcugaccucccugagcgaguacgcgucccggaugcgcgccgggacccggaacaucuacuaccucugcgcccccaaccgccaccuggccgagcacagccccuacuacgaggccaugaagaagaaggacaccgagguccuguucugcuucgagcaguucgacgagcucacgcugcugcaccuccgggaguucgacaagaagaagcugaucuccguggagaccgacaucguggucgaccacuacaaggaggagaaguucgaggaccgcagcccggcggccgagugccuguccgagaaggagaccgaggagcucauggccuggaugcggaacgugcugggcagccgcgugaccaacgucaaggugacgcugcgccucgacacccaccccgccauggugaccguccuggagaugggggccgcgcggcacuuccugcgcaugcagcagcucgccaagacccaggaggagcgggcccagcugcugcagcccacgcucgagaucaacccccgccacgcccugaucaagaagcugaaccagcuccgggcguccgagccgggccuggcccagcugcucguggaccagaucuacgagaacgccaugaucgccgccgggcugguggacgacccccgcgcgauggucggccggcugaacgagcuccuggugaaggcccuggagcgccacuga

SEQ ID NO: 8629 - RNA, 2115 nt, Artificial Sequence
  derived and/or modified sequence opt2 from HSP75__Homo_sapiens__AAH18950
auggcccgcgagcuccgcgcccuccuccucuggggccgccgccuccgcccccuccuccgcgcccccgcccucgccgccguccccggcggcaagcccauccucugcccccgccgcaccaccgcccagcucggcccccgccgcaaccccgccuggucccuccaggccggccgccucuucuccacccagaccgccgaggacaaggaggagccccuccacuccaucaucuccuccaccgaguccguccagggcuccaccuccaagcacgaguuccaggccgagaccaagaagcuccucgacaucgucgcccgcucccucuacuccgagaaggaggucuucauccgcgagcucaucuccaacgccuccgacgcccucgagaagcuccgccacaagcucgucuccgacggccaggcccuccccgagauggagauccaccuccagaccaacgccgagaagggcaccaucaccauccaggacaccggcaucggcaugacccaggaggagcucgucuccaaccucggcaccaucgcccgcuccggcuccaaggccuuccucgacgcccuccagaaccaggccgaggccuccuccaagaucaucggccaguucggcgucggcuucuacuccgccuucauggucgccgaccgcgucgaggucuacucccgcuccgccgcccccggcucccucggcuaccaguggcucuccgacggcuccggcgucuucgagaucgccgaggccuccggcguccgcaccggcaccaagaucaucauccaccucaaguccgacugcaaggaguucuccuccgaggcccgcguccgcgacgucgucaccaaguacuccaacuucgucuccuucccccucuaccucaacggccgccgcaugaacacccuccaggccaucuggaugauggaccccaaggacguccgcgaguggcagcacgaggaguucuaccgcuacgucgcccaggcccacgacaagccccgcuacacccuccacuacaagaccgacgccccccucaacauccgcuccaucuucuacguccccgacaugaagcccuccauguucgacgucucccgcgagcucggcuccuccgucgcccucuacucccgcaagguccucauccagaccaaggccaccgacauccuccccaaguggcuccgcuucauccgcggcgucgucgacuccgaggacaucccccucaaccucucccgcgagcuccuccaggaguccgcccucauccgcaagcuccgcgacguccuccagcagcgccucaucaaguucuucaucgaccaguccaagaaggacgccgagaaguacgccaaguucuucgaggacuacggccucuucaugcgcgagggcaucgucaccgccaccgagcaggaggucaaggaggacaucgccaagcuccuccgcuacgaguccuccgcccuccccuccggccagcucaccucccucuccgaguacgccucccgcaugcgcgccggcacccgcaacaucuacuaccucugcgcccccaaccgccaccucgccgagcacucccccuacuacgaggccaugaagaagaaggacaccgagguccucuucugcuucgagcaguucgacgagcucacccuccuccaccuccgcgaguucgacaagaagaagcucaucuccgucgagaccgacaucgucgucgaccacuacaaggaggagaaguucgaggaccgcucccccgccgccgagugccucuccgagaaggagaccgaggagcucauggccuggaugcgcaacguccucggcucccgcgucaccaacgucaaggucacccuccgccucgacacccaccccgccauggucaccguccucgagaugggcgccgcccgccacuuccuccgcaugcagcagcucgccaagacccaggaggagcgcgcccagcuccuccagcccacccucgagaucaacccccgccacgcccucaucaagaagcucaaccagcuccgcgccuccgagcccggccucgcccagcuccucgucgaccagaucuacgagaacgccaugaucgccgccggccucgucgacgacccccgcgccauggucggccgccucaacgagcuccucgucaaggcccucgagcgccacuga

SEQ ID NO: 8630 - RNA, 2115 nt, Artificial Sequence
  derived and/or modified sequence opt3 from HSP75__Homo_sapiens__AAH18950
auggccagagagcugagggcucuccuucuguggggccggcgcuugcgacccuuacugcgugcuccugcccuagcggcugugccagggggaaagccgauccucugccccagaaggaccacagcccagcuggguccucggcgcaacccagcauggagccuucaagccggcagacuguucuccacucagacggcugaagacaaagaggaacccuugcacucuauuauaucaaguaccgagagcguccagggguccacaucuaagcaugaauuucaggcagagacuaaaaagcuccuggauaucguugccaggucgcuguacucagagaaagaaguguucauucgggagcucaucagcaaugcuagugacgccuuagaaaagcugcgccacaagcuaguauccgauggacaagcguugccugagauggagauucaucugcagaccaacgcagaaaaaggcacaaucaccauacaggacacugguaucgggaugacacaggaggaacuugugucuaaucucggaaccauugcccgaagcggcuccaaggcuuuucuggaugcccuucaaaaccaggcagaggcuucaaguaaaaucauuggccaguucggggucggauuuuauagcgccuucaugguggcggacagaguugaaguguacucuagguccgccgcaccagguucacugggcuaucagugguugagcgaugggaguggagucuuugagaucgcugaggccucuggcgugcggacggguacuaagauaauuauccaccucaaauccgacuguaaggaauuuagcucggaggcucguguacgcgauguugugaccaaguacucuaauuuugucuccuucccccuguauuuaaacgggagaaggaugaauacacugcaagccauuuggaugauggacccuaaagaugugcgggaauggcagcaugaggaauuuuaccgauauguggcacaggcccacgacaagccacgcuacacucuccacuacaaaaccgaugcuccgcuuaacaucagaucaaucuucuauguccccgacaugaagccuaguauguuugacguuagcagggagcugggauccucuguggcguuguacagccggaaaguacuaauucaaacaaaggcaaccgauauacugccaaaauggcuccgcuucaucagaggcguggucgacucagaggauauuccccugaaucuuaguagggaacuguugcaggaguccgcccucauccguaagcugcgggacguguuacagcagcgacugauaaaguucuuuauugaucaaagcaaaaaggacgcugaaaaauaugccaaguucuuugaggauuacggccuauucaugagagaagggaucguuacggcaacugagcaggaggugaaagaagacaucgccaagcuccugagguaugagucuucagcacuuccuaguggacaguugacaagccuguccgaauacgccucucgcaugcgggcagguaccagaaacauuuauuaccucugcgcgccaaauaggcaucuggcugagcacucgcccuacuaugaggccaugaagaaaaaggauacugaaguccuuuucuguuucgagcaguuugacgaacugacauugcuccaucugcgcgaguucgauaaaaagaaauuaaucagcguggaaaccgacauuguaguugaccacuacaaggaggagaaguuugaagaucgauccccggcagccgagugccugucagaaaaagagacggaagaacuaauggcuuggaugcggaacgugcucggcagucgugucaccaaugugaaggucacacugagacuugacacucacccugccauggugaccguuuuggagaugggggcagcuaggcauuuccugcgcaugcaacagcucgccaaaacacaggaggagcgggcgcagcuguuacaacccacucuggaaauaaacccaagacacgcccuuaucaagaaauugaaucagcucagggcuucugagccuggacuggcacagcuacugguggaucagauuuaugaaaacgccaugaucgcugccggccucguagacgauccccgagcaauggucggucgccugaacgagcuuuuggugaaggcgcuggagcggcauuga

SEQ ID NO: 8631 - RNA, 2115 nt, Artificial Sequence
  derived and/or modified sequence opt4 from HSP75__Homo_sapiens__AAH18950
auggccagagagcugagagcccugcugcuguggggcagaagacugagaccccugcugagagcccccgcccuggccgccgugcccggcggcaagcccauccugugccccagaagaaccaccgcccagcugggccccagaagaaaccccgccuggagccugcaggccggcagacuguucagcacccagaccgccgaggacaaggaggagccccugcacagcaucaucagcagcaccgagagcgugcagggcagcaccagcaagcacgaguuccaggccgagaccaagaagcugcuggacaucguggccagaagccuguacagcgagaaggagguguucaucagagagcugaucagcaacgccagcgacgcccuggagaagcugagacacaagcuggugagcgacggccaggcccugcccgagauggagauccaccugcagaccaacgccgagaagggcaccaucaccauccaggacaccggcaucggcaugacccaggaggagcuggugagcaaccugggcaccaucgccagaagcggcagcaaggccuuccuggacgcccugcagaaccaggccgaggccagcagcaagaucaucggccaguucggcgugggcuucuacagcgccuucaugguggccgacagaguggagguguacagcagaagcgccgcccccggcagccugggcuaccaguggcugagcgacggcagcggcguguucgagaucgccgaggccagcggcgugagaaccggcaccaagaucaucauccaccugaagagcgacugcaaggaguucagcagcgaggccagagugagagacguggugaccaaguacagcaacuucgugagcuucccccuguaccugaacggcagaagaaugaacacccugcaggccaucuggaugauggaccccaaggacgugagagaguggcagcacgaggaguucuacagauacguggcccaggcccacgacaagcccagauacacccugcacuacaagaccgacgccccccugaacaucagaagcaucuucuacgugcccgacaugaagcccagcauguucgacgugagcagagagcugggcagcagcguggcccuguacagcagaaaggugcugauccagaccaaggccaccgacauccugcccaaguggcugagauucaucagaggcgugguggacagcgaggacaucccccugaaccugagcagagagcugcugcaggagagcgcccugaucagaaagcugagagacgugcugcagcagagacugaucaaguucuucaucgaccagagcaagaaggacgccgagaaguacgccaaguucuucgaggacuacggccuguucaugagagagggcaucgugaccgccaccgagcaggaggugaaggaggacaucgccaagcugcugagauacgagagcagcgcccugcccagcggccagcugaccagccugagcgaguacgccagcagaaugagagccggcaccagaaacaucuacuaccugugcgcccccaacagacaccuggccgagcacagccccuacuacgaggccaugaagaagaaggacaccgaggugcuguucugcuucgagcaguucgacgagcugacccugcugcaccugagagaguucgacaagaagaagcugaucagcguggagaccgacaucgugguggaccacuacaaggaggagaaguucgaggacagaagccccgccgccgagugccugagcgagaaggagaccgaggagcugauggccuggaugagaaacgugcugggcagcagagugaccaacgugaaggugacccugagacuggacacccaccccgccauggugaccgugcuggagaugggcgccgccagacacuuccugagaaugcagcagcuggccaagacccaggaggagagagcccagcugcugcagcccacccuggagaucaaccccagacacgcccugaucaagaagcugaaccagcugagagccagcgagcccggccuggcccagcugcugguggaccagaucuacgagaacgccaugaucgccgccggccugguggacgaccccagagccauggugggcagacugaacgagcugcuggugaaggcccuggagagacacuga

SEQ ID NO: 8632 - RNA, 2115 nt, Artificial Sequence
  derived and/or modified sequence opt5 from HSP75__Homo_sapiens__AAH18950
auggccagagagcugcgggcucuccugcuuuggggccgcagacugcggccccuccugcgcgccccugcgcuugcugccgugcccgggggaaagccgauccugugcccuagacggaccacagcccagcucggcccccgcagaaacccugcuuggagccugcaagccgggcggcuguucuccacgcagaccgcugaagacaaagaggaaccccuccacucuauuaucagcuccacagagucuguccagggaagcaccuccaagcaugaauuucaggccgagacaaagaagcugcuugauauuguugcgcgcucucuguacagcgagaaagaaguguucaucagagagcucauuuccaaugccagcgacgcucuggaaaaacuucggcacaagcuggugucugauggccaagcccucccugagauggagauccaucugcagaccaacgcugaaaaagggacaaucaccauucaggacacgggaaucggcaugacccaggaggaacuggucuccaaucucggcacaauugcccgcagcgggucuaaggcguuucuggaugcccuucaaaaccaggcugaggccuccagcaaaaucauuggacaguucggcgugggguuuuauucugcuuucaugguugccgacagaguggaagucuacucccggagcgccgcuccgggaucccugggcuaucaguggcucucugaugggagcggaguguuugagaucgcggaggccuccggcguucgcaccggcacaaagauuaucauccaccugaaaagcgacuguaaggaguucucuuccgaggcuagagugcgggaugucgugaccaaguacagcaauuuugugucuuucccccuuuaucugaacgggagacgcaugaauacgcuccaagccauuuggaugauggacccuaaagauguccgggaauggcagcaugaggaauuuuacagauauguugcccaggcucacgacaagccccgcuacacacugcacuacaaaaccgaugccccucugaacauccggagcauuuucuaugugcccgacaugaagccguccauguuugacgugucuagagagcucggaagcuccgucgcgcuguacagccgcaaagugcuuauccaaacaaaggcuaccgauauucugccuaaauggcuccgguucaucagaggcguuguggacucugaggauaucccccugaaucuuucccgcgaacugcuccaggagagcgcccugauucggaagcugagagacguccuccagcagcgccugaucaaguucuuuauugaucaaucuaaaaaggacgccgaaaaauaugcuaaguucuuugaggauuacgggcuuuucaugcgggaaggaaucgugaccgccacagagcaggagguuaaagaagacauugcuaagcugcucagauaugaguccagcgcccugccuuccggccagcugacgucucuuagcgaauacgcgucccggaugcgcgccgggaccagaaacaucuauuaccucugcgcucccaaucggcaucuggccgagcacucucccuacuaugaggcuaugaagaaaaaggauacagaagugcuguuuuguuucgagcaguuugacgaacucacccugcuucaucugagagaguucgauaaaaagaaacucaucagcgucgaaacagacauuguggucgaccacuacaaggaggagaaguuugaagaucgcuccccugccgcggagugccugagcgaaaaagagaccgaagaacugauggccuggaugcggaacgugcuuggaucuagaguuacgaaugugaaggucacacuccgccuggacacccacccggcuauggugaccguucuggagaugggcgccgcuagacauuuccuccggaugcaacagcuggccaaaacacaggaggaacgcgcccagcuucugcaacccacccucgaaaucaacccuagacacgcucugauuaagaaacugaaucagcuucgggcguccgagcccggccucgcccagcugcugguggaucagaucuaugaaaacgcuaugauugccgccgggcucgucgacgauccucgcgcuauggugggaagacugaacgagcuucuggugaaggcccucgagcggcauuga

SEQ ID NO: 8633 - protein, 802 aa, Artificial Sequence
  HSP90B1__Homo_sapiens__Q5CAQ5
MRALWVLGLCCVLLTFGSVRADDEVDVDGTVEEDLGKSREGSRTDDEVVQREEEAIQLDGLNASQIRELREKSEKFAFQAEVNRMMKLIINSLYKNKEIFLRELISNASDALDKIRLISLTDENALSGNEELTVKIKCDKEKNLLHVTDTGVGMTREELVKNLGTIAKSGTSEFLNKMTEAQEDGQSTSELIGQFGVGFYSAFLVADKVIVTSKHNNDTQHIWESDSNEFSVIADPRGNTLGRGTTITLVLKEEASDYLELDTIKNLVKKYSQFINFPIYVWSSKTETVEEPMEEEEAAKEEKEESDDEAAVEEEEEEKKPKTKKVEKTVWDWELMNDIKPIWQRPSKEVEEDEYKAFYKSFSKESDDPMAYIHFTAEGEVTFKSILFVPTSAPRGLFDEYGSKKSDYIKLYVRRVFITDDFHDMMPKYLNFVKGVVDSDDLPLNVSRETLQQHKLLKVIRKKLVRKTLDMIKKIADDKYNDTFWKEFGTNIKLGVIEDHSNRTRLAKLLRFQSSHHPTDITSLDQYVERMKEKQDKIYFMAGSSRKEAESSPFVERLLKKGYEVIYLTEPVDEYCIQALPEFDGKRFQNVAKEGVKFDESEKTKESREAVEKEFEPLLNWMKDKALKDKIEKAVVSQRLTESPCALVASQYGWSGNMERIMKAQAYQTGKDISTNYYASQKKTFEINPRHPLIRDMLRRIKEDEDDKTVLDLAVVLFETATLRSGYLLPDTKAYGDRIERMLRLSLNIDPDAKVEEEPEEEPEETAEDTTEDTEQDEDEEMDVGTDEEETAKESTAEKDEL

SEQ ID NO: 8634 - RNA, 2409 nt, Artificial Sequence
  HSP90B1__Homo_sapiens__CAI64497
augagggcccugugggugcugggccucugcugcguccugcugaccuucgggucggucagagcugacgaugaaguugauguggaugguacaguagaagaggaucuggguaaaaguagagaaggaucaaggacggaugaugaaguaguacagagagaggaagaagcuauucaguuggauggauuaaaugcaucacaaauaagagaacuuagagagaagucggaaaaguuugccuuccaagccgaaguuaacagaaugaugaaacuuaucaucaauucauuguauaaaaauaaagagauuuuccugagagaacugauuucaaaugcuucugaugcuuuagauaagauaaggcuaauaucacugacugaugaaaaugcucuuucuggaaaugaggaacuaacagucaaaauuaagugugauaaggagaagaaccugcugcaugucacagacaccgguguaggaaugaccagagaagaguugguuaaaaaccuugguaccauagccaaaucugggacaagcgaguuuuuaaacaaaaugacugaagcacaggaagauggccagucaacuucugaauugauuggccaguuuggugucgguuucuauuccgccuuccuuguagcagauaagguuauugucacuucaaaacacaacaacgauacucagcacaucugggagucugacuccaaugaauuuucuguaauugcugacccaagaggaaacacucuaggacggggaacgacaauuacccuugucuuaaaagaagaagcaucugauuaccuugaauuggauacaauuaaaaaucucgucaaaaaauauucacaguucauaaacuuuccuauuuauguauggagcagcaagacugaaacuguugaggagcccauggaggaagaagaagcagccaaagaagagaaagaagaaucugaugaugaagcugcaguagaggaagaagaagaagaaaagaaaccaaagacuaaaaaaguugaaaaaacugucugggacugggaacuuaugaaugauaucaaaccaauauggcagagaccaucaaaagaaguagaagaagaugaauacaaagcuuucuacaaaucauuuucaaaggaaagugaugaccccauggcuuauauucacuuuacugcugaaggggaaguuaccuucaaaucaauuuuauuuguacccacaucugcuccacguggucuguuugacgaauauggaucuaaaaagagcgauuacauuaagcucuaugugcgccguguauucaucacagacgacuuccaugauaugaugccuaaauaccucaauuuugucaagggugugguggacucagaugaucuccccuugaauguuucccgcgagacucuucagcaacauaaacugcuuaaggugauuaggaagaagcuuguucguaaaacgcuggacaugaucaagaagauugcugaugauaaauacaaugauacuuuuuggaaagaauuugguaccaacaucaagcuuggugugauugaagaccacucgaaucgaacacgucuugcuaaacuucuuagguuccagucuucucaucauccaacugacauuacuagccuagaccaguauguggaaagaaugaaggaaaaacaagacaaaaucuacuucauggcuggguccagcagaaaagaggcugaaucuucuccauuuguugagcgacuucugaaaaagggcuaugaaguuauuuaccucacagaaccuguggaugaauacuguauucaggcccuucccgaauuugaugggaagagguuccagaauguugccaaggaaggagugaaguucgaugaaagugagaaaacuaaggagagucgugaagcaguugagaaagaauuugagccucugcugaauuggaugaaagauaaagcccuuaaggacaagauugaaaaggcuguggugucucagcgccugacagaaucuccgugugcuuugguggccagccaguacggauggucuggcaacauggagagaaucaugaaagcacaagcguaccaaacgggcaaggacaucucuacaaauuacuaugcgagucagaagaaaacauuugaaauuaaucccagacacccgcugaucagagacaugcuucgacgaauuaaggaagaugaagaugauaaaacaguuuuggaucuugcugugguuuuguuugaaacagcaacgcuucggucaggguaucuuuuaccagacacuaaagcauauggagauagaauagaaagaaugcuucgccucaguuugaacauugacccugaugcaaagguggaagaagagcccgaagaagaaccugaagagacagcagaagacacaacagaagacacagagcaagacgaagaugaagaaauggaugugggaacagaugaagaagaaacagcaaaggaaucuacagcugaaaaagaugaauuguaa

SEQ ID NO: 8635 - RNA, 2409 nt, Artificial Sequence
  derived and/or modified sequence opt1 from HSP90B1__Homo_sapiens__CAI64497
augcgcgcccugugggugcucggccugugcugcguccugcucaccuucgggagcgugcgggccgacgacgagguggacgucgacggcaccguggaggaggaccuggggaagucccgcgagggcagccggacggacgacgaggugguccagcgcgaggaggaggcgauccagcuggacgggcucaacgccucccagauccgggagcugcgcgagaaguccgagaaguucgccuuccaggccgaggugaaccggaugaugaagcugaucaucaacagccucuacaagaacaaggagaucuuccugcgcgagcugaucagcaacgccuccgacgcgcucgacaagauccggcugaucagccugaccgacgagaacgcccucuccggcaacgaggagcugaccgugaagaucaagugcgacaaggagaagaaccugcuccacgucaccgacacgggcguggggaugacccgcgaggagcuggugaagaaccugggcaccaucgccaagagcgggaccuccgaguuccucaacaagaugacggaggcccaggaggacggccagagcaccuccgagcugaucgggcaguucggcgucggcuucuacagcgcguuccugguggccgacaaggugaucgucaccuccaagcacaacaacgacacccagcacaucugggagagcgacuccaacgaguucagcgugaucgccgacccccgggggaacacgcucggccgcgggaccaccaucacccuggugcugaaggaggaggccuccgacuaccucgagcuggacacgaucaagaaccuggucaagaaguacagccaguucaucaacuucccgaucuacguguggagcuccaagaccgagaccguggaggagcccauggaggaggaggaggccgcgaaggaggagaaggaggagagcgacgacgaggccgccgucgaggaggaggaggaggagaagaagcccaagaccaagaagguggagaagacggugugggacugggagcucaugaacgacaucaagcccaucuggcagcggccguccaaggaggucgaggaggacgaguacaaggccuucuacaagagcuucuccaaggagagcgacgaccccauggccuacauccacuucaccgcggagggcgaggugaccuucaaguccauccuguucguccccaccagcgcgccccgcggccuguucgacgaguacggguccaagaaguccgacuacaucaagcucuacgugcggcgcguguucaucacggacgacuuccacgacaugaugccgaaguaccugaacuucgucaagggcgugguggacagcgacgaccugccccucaacgucagccgggagacccugcagcagcacaagcugcucaaggugauccgcaagaagcuggugcggaagacccuggacaugaucaagaagaucgccgacgacaaguacaacgacaccuucuggaaggaguucgggacgaacaucaagcucggcgucaucgaggaccacuccaaccgcacccggcuggccaagcugcuccgcuuccagagcucccaccaccccaccgacaucaccagccuggaccaguacguggagcgcaugaaggagaagcaggacaagaucuacuucauggccggguccagccggaaggaggccgaguccagccccuucguggagcgccugcucaagaagggcuacgaggucaucuaccugacggagccgguggacgaguacugcauccaggcccugcccgaguucgacggcaagcgguuccagaacguggccaaggagggggucaaguucgacgagagcgagaagaccaaggagucccgcgaggccguggagaaggaguucgagccccugcucaacuggaugaaggacaaggcccugaaggacaagaucgagaaggcgguggucagccagcggcugaccgagucccccugcgcccucguggccagccaguacggcugguccgggaacauggagcgcaucaugaaggcccaggcguaccagaccggcaaggacaucagcacgaacuacuacgccucccagaagaagaccuucgagaucaacccgcggcacccccugauccgcgacaugcugcggcgcaucaaggaggacgaggacgacaagaccgugcucgaccuggccgucgugcuguucgagaccgccacccuccggagcggguaccugcugcccgacacgaaggccuacggcgaccgcaucgagcggaugcuccgccugucccugaacaucgaccccgacgcgaagguggaggaggagccggaggaggagcccgaggagaccgccgaggacaccaccgaggacacggagcaggacgaggacgaggagauggacgucggcaccgacgaggaggagaccgccaaggagagcaccgccgagaaggacgagcucuga

SEQ ID NO: 8636 - RNA, 2409 nt, Artificial Sequence
  derived and/or modified sequence opt2 from HSP90B1__Homo_sapiens__CAI64497
augcgcgcccucuggguccucggccucugcugcguccuccucaccuucggcuccguccgcgccgacgacgaggucgacgucgacggcaccgucgaggaggaccucggcaagucccgcgagggcucccgcaccgacgacgaggucguccagcgcgaggaggaggccauccagcucgacggccucaacgccucccagauccgcgagcuccgcgagaaguccgagaaguucgccuuccaggccgaggucaaccgcaugaugaagcucaucaucaacucccucuacaagaacaaggagaucuuccuccgcgagcucaucuccaacgccuccgacgcccucgacaagauccgccucaucucccucaccgacgagaacgcccucuccggcaacgaggagcucaccgucaagaucaagugcgacaaggagaagaaccuccuccacgucaccgacaccggcgucggcaugacccgcgaggagcucgucaagaaccucggcaccaucgccaaguccggcaccuccgaguuccucaacaagaugaccgaggcccaggaggacggccaguccaccuccgagcucaucggccaguucggcgucggcuucuacuccgccuuccucgucgccgacaaggucaucgucaccuccaagcacaacaacgacacccagcacaucugggaguccgacuccaacgaguucuccgucaucgccgacccccgcggcaacacccucggccgcggcaccaccaucacccucguccucaaggaggaggccuccgacuaccucgagcucgacaccaucaagaaccucgucaagaaguacucccaguucaucaacuuccccaucuacgucugguccuccaagaccgagaccgucgaggagcccauggaggaggaggaggccgccaaggaggagaaggaggaguccgacgacgaggccgccgucgaggaggaggaggaggagaagaagcccaagaccaagaaggucgagaagaccgucugggacugggagcucaugaacgacaucaagcccaucuggcagcgccccuccaaggaggucgaggaggacgaguacaaggccuucuacaaguccuucuccaaggaguccgacgaccccauggccuacauccacuucaccgccgagggcgaggucaccuucaaguccauccucuucguccccaccuccgccccccgcggccucuucgacgaguacggcuccaagaaguccgacuacaucaagcucuacguccgccgcgucuucaucaccgacgacuuccacgacaugaugcccaaguaccucaacuucgucaagggcgucgucgacuccgacgaccucccccucaacgucucccgcgagacccuccagcagcacaagcuccucaaggucauccgcaagaagcucguccgcaagacccucgacaugaucaagaagaucgccgacgacaaguacaacgacaccuucuggaaggaguucggcaccaacaucaagcucggcgucaucgaggaccacuccaaccgcacccgccucgccaagcuccuccgcuuccaguccucccaccaccccaccgacaucaccucccucgaccaguacgucgagcgcaugaaggagaagcaggacaagaucuacuucauggccggcuccucccgcaaggaggccgaguccucccccuucgucgagcgccuccucaagaagggcuacgaggucaucuaccucaccgagcccgucgacgaguacugcauccaggcccuccccgaguucgacggcaagcgcuuccagaacgucgccaaggagggcgucaaguucgacgaguccgagaagaccaaggagucccgcgaggccgucgagaaggaguucgagccccuccucaacuggaugaaggacaaggcccucaaggacaagaucgagaaggccgucgucucccagcgccucaccgagucccccugcgcccucgucgccucccaguacggcugguccggcaacauggagcgcaucaugaaggcccaggccuaccagaccggcaaggacaucuccaccaacuacuacgccucccagaagaagaccuucgagaucaacccccgccacccccucauccgcgacaugcuccgccgcaucaaggaggacgaggacgacaagaccguccucgaccucgccgucguccucuucgagaccgccacccuccgcuccggcuaccuccuccccgacaccaaggccuacggcgaccgcaucgagcgcaugcuccgccucucccucaacaucgaccccgacgccaaggucgaggaggagcccgaggaggagcccgaggagaccgccgaggacaccaccgaggacaccgagcaggacgaggacgaggagauggacgucggcaccgacgaggaggagaccgccaaggaguccaccgccgagaaggacgagcucuga

SEQ ID NO: 8637 - RNA, 2409 nt, Artificial Sequence
  derived and/or modified sequence opt3 from HSP90B1__Homo_sapiens__CAI64497
augagagcccugugggugcucggccuuugcuguguccuguugaccuucgggagcguuagggcugacgaugagguggacguagauggaacaguggaagaggacuuagguaagucccgggaaggcucucgcacugaugacgaggucgugcagcgagaagaggaggcaauccaacuggaugggcuaaacgccucacagauucgugaacucagagagaaaagugaaaaguuugcguuccaggcugagguuaauaggaugaugaaacugauaaucaacagccuuuacaagaauaaagagauuuuucugcgggaauugaucuccaacgccucugacgcacucgauaagauucgccugaucucgcugacggacgagaaugcccucucaggaaacgaagaguuaaccgugaagauaaaaugcgauaaggagaaaaaucugcuucacgucacagacacuggcguggguaugaccagagaggaguugguaaagaaccuggggacaaucgcuaaaagcggaaccagugaguuccuaaauaagaugacugaagcacaggaagauggccaauccacaucugagcucauuggccaguuugggguuggauucuauagcgccuuucugguggcugacaaggucaucgugaccuccaaacauaacaaugacacgcagcacauuugggaaucagauaguaacgaguucagcgugaucgccgaccccagggguaauacucuuggccgggggaccacaauaacucuggucuugaaggaggaagcgucugauuaccucgagcuggacaccauuaaaaacuuaguuaagaaauauucccaguuuaucaauuucccuauuuacguguggucaagcaagacagaaaccguagaggaaccaauggaggaggaagaggcagccaaagaagagaaggaggaaagugaugacgaggcugccguggaagaggaagaggaggaaaagaaaccgaagacgaaaaaggucgagaaaacugugugggauugggaacugaugaacgacaucaagcccaucuggcaacgcccuucuaaggagguugaagaggaugaguauaaagcauuuuacaaguccuucagcaaagaaucggacgauccaauggcuuauauucauuuuacagccgagggagaagugaccuucaagucuauacucuucguccccacuuccgcgccucgaggccuuuuugacgaguacgguaguaaaaagucagacuacaucaagcuguaugugagaaggguauucauuacagaugacuuucacgauaugaugccaaaauacuugaacuucguuaaggggguggucgacagcgaugaccuaccccugaaugugucccgggaaacccuccagcagcauaaacugcuuaaggucauccguaaaaagcuggugcgcaagacguuggauaugauuaaaaagauagccgacgauaaauauaacgacaccuuuuggaaggaguucggaacaaauaucaaacucggcguuaucgaggaucacucuaacagaacuaggcuggcaaaguuacugcgguuucagagcucacaccauccuaccgacauuacaagucuagaucaauacguggaacgaaugaaagagaagcaggacaagaucuauuucauggcuggcuccagccgcaaagaagccgagucuucaccauuuguagagagacuccugaagaaaggguacgaagucauuuaucuuacugagccgguggacgaauacuguauacaggcuuugcccgaguucgauggaaagagguuucaaaauguugccaaagaaggugugaaguucgacgagagugagaagaccaaagaaagccgggaggcagucgaaaaggaguuugaaccucugcucaacuggaugaaagauaaggcccugaaagacaagaucgagaaggcugugguaucccagcgccuuacagagucuccaugcgcgcugguggcaucgcaguacggcuggagcgggaauauggaaagaauuaugaaagcccaggcuuaucaaaccggaaaggauaucuccacuaacuacuaugccucacagaaaaagacguucgagaucaaucccaggcacccuuugauucgugacaugcuccggcgaauaaaagaagaugaggacgauaagacaguucuggacuuagcagucgugcuguucgaaaccgccacucuaagaaguggcuaccuccugccagauaccaaggcuuauggugacaggaucgagcgcaugcuucgguugucucugaacauugaucccgacgccaaaguggaggaagaaccggaagaggagccugaagagacagcagaagacaccacugaggauacagaacaggacgaggaugaggaaauggacgucgggacggaugaggaagagaccgcgaaggaaagcacugcugagaaagacgagcucuga

SEQ ID NO: 8638 - RNA, 2409 nt, Artificial Sequence
  derived and/or modified sequence opt4 from HSP90B1__Homo_sapiens__CAI64497
augagagcccugugggugcugggccugugcugcgugcugcugaccuucggcagcgugagagccgacgacgagguggacguggacggcaccguggaggaggaccugggcaagagcagagagggcagcagaaccgacgacgagguggugcagagagaggaggaggccauccagcuggacggccugaacgccagccagaucagagagcugagagagaagagcgagaaguucgccuuccaggccgaggugaacagaaugaugaagcugaucaucaacagccuguacaagaacaaggagaucuuccugagagagcugaucagcaacgccagcgacgcccuggacaagaucagacugaucagccugaccgacgagaacgcccugagcggcaacgaggagcugaccgugaagaucaagugcgacaaggagaagaaccugcugcacgugaccgacaccggcgugggcaugaccagagaggagcuggugaagaaccugggcaccaucgccaagagcggcaccagcgaguuccugaacaagaugaccgaggcccaggaggacggccagagcaccagcgagcugaucggccaguucggcgugggcuucuacagcgccuuccugguggccgacaaggugaucgugaccagcaagcacaacaacgacacccagcacaucugggagagcgacagcaacgaguucagcgugaucgccgaccccagaggcaacacccugggcagaggcaccaccaucacccuggugcugaaggaggaggccagcgacuaccuggagcuggacaccaucaagaaccuggugaagaaguacagccaguucaucaacuuccccaucuacguguggagcagcaagaccgagaccguggaggagcccauggaggaggaggaggccgccaaggaggagaaggaggagagcgacgacgaggccgccguggaggaggaggaggaggagaagaagcccaagaccaagaagguggagaagaccgugugggacugggagcugaugaacgacaucaagcccaucuggcagagacccagcaaggagguggaggaggacgaguacaaggccuucuacaagagcuucagcaaggagagcgacgaccccauggccuacauccacuucaccgccgagggcgaggugaccuucaagagcauccuguucgugcccaccagcgcccccagaggccuguucgacgaguacggcagcaagaagagcgacuacaucaagcuguacgugagaagaguguucaucaccgacgacuuccacgacaugaugcccaaguaccugaacuucgugaagggcgugguggacagcgacgaccugccccugaacgugagcagagagacccugcagcagcacaagcugcugaaggugaucagaaagaagcuggugagaaagacccuggacaugaucaagaagaucgccgacgacaaguacaacgacaccuucuggaaggaguucggcaccaacaucaagcugggcgugaucgaggaccacagcaacagaaccagacuggccaagcugcugagauuccagagcagccaccaccccaccgacaucaccagccuggaccaguacguggagagaaugaaggagaagcaggacaagaucuacuucauggccggcagcagcagaaaggaggccgagagcagccccuucguggagagacugcugaagaagggcuacgaggugaucuaccugaccgagcccguggacgaguacugcauccaggcccugcccgaguucgacggcaagagauuccagaacguggccaaggagggcgugaaguucgacgagagcgagaagaccaaggagagcagagaggccguggagaaggaguucgagccccugcugaacuggaugaaggacaaggcccugaaggacaagaucgagaaggccguggugagccagagacugaccgagagccccugcgcccugguggccagccaguacggcuggagcggcaacauggagagaaucaugaaggcccaggccuaccagaccggcaaggacaucagcaccaacuacuacgccagccagaagaagaccuucgagaucaaccccagacacccccugaucagagacaugcugagaagaaucaaggaggacgaggacgacaagaccgugcuggaccuggccguggugcuguucgagaccgccacccugagaagcggcuaccugcugcccgacaccaaggccuacggcgacagaaucgagagaaugcugagacugagccugaacaucgaccccgacgccaagguggaggaggagcccgaggaggagcccgaggagaccgccgaggacaccaccgaggacaccgagcaggacgaggacgaggagauggacgugggcaccgacgaggaggagaccgccaaggagagcaccgccgagaaggacgagcuguga

SEQ ID NO: 8639 - RNA, 2409 nt, Artificial Sequence
  derived and/or modified sequence opt5 from HSP90B1__Homo_sapiens__CAI64497
augagagcccugugggugcucggccugugcuguguccuucugaccuucgggagcguucgggcugacgaugagguggacguggauggaacagucgaagaggaccucggcaagucccgcgaagggucuagaacggaugacgaggugguucagcgggaagaggaggccauccaacuggauggacuuaacgcgagccagauucgcgaacugagagagaaauccgaaaaguuugcuuuccaggccgaggugaaucggaugaugaaacucaucauuaacucucuguacaagaauaaagagaucuuucugcgcgaacucauuagcaacgccuccgacgcucuggauaagaucagacuuaucucucugaccgacgagaaugcccucagcggcaacgaagaacugacagucaagauuaaaugcgauaaggagaaaaaucuucugcacgugaccgacacagggguuggaaugacccgggaggagcucgugaagaaccugggcacaaucgcuaaauccggcaccagcgaguuccugaauaagaugacggaggcccaggaagaugggcaaucuaccuccgagcucauuggacaguuuggcgucggguucuauagcgcguuucugguggccgacaaggugaucgucacaucuaaacauaacaaugacacccagcacauuugggaauccgauagcaacgaguucucuguuaucgcugacccccgcggaaauacacuuggcagagggaccacgauuacacuggugcucaaggaggaagccuccgauuaccuggagcuugacaccaucaaaaaccuggugaagaaauauagccaguuuaucaauuucccuauuuacgucugguccucuaagacagaaaccguggaggaaccgauggaggaggaagaggcugccaaagaagagaaggaggaaagcgaugacgaggcggccguugaagaggaagaggaggaaaagaaacccaagaccaaaaagguggagaaaacagucugggauugggaacucaugaacgacaucaagccuauuuggcaacggcccuccaaggagguggaagaggaugaguauaaagccuuuuacaagagcuucucuaaagaauccgacgauccuauggcuuauauccauuuuacggcugagggagaaguuaccuucaagagcauucuguucgugcccacaucugccccucgcggccuguuugacgaguacggcagcaaaaaguccgacuacaucaagcucuaugucagacggguguucaucaccgaugacuuucacgauaugaugccgaaauaccugaacuucgucaagggggugguugacucugaugaccuuccccugaaugugagccgcgaaacacuccagcagcauaaacugcuuaaggucauucggaaaaagcuggugagaaagacccucgauaugaucaaaaagauugccgacgauaaauauaacgacacguuuuggaaggaguucggaacaaauaucaaacugggcguuauugaggaucacuccaacagaacccgccuggcuaagcuccugcgguuucagagcucucaccauccuaccgacaucacaucccuugaucaauacguggaaagaaugaaagagaagcaggacaagaucuauuucauggcggggagcucucgcaaagaagccgaguccagccccuuugucgagcggcugcucaagaaaggauacgaagugauuuaucugaccgagccuguggacgaauacuguauccaggcucugcccgaguucgauggcaagagauuucaaaauguugccaaagaaggggucaaguucgacgaguccgagaagacaaaagaaucucgcgaggccguggaaaaggaguuugaaccgcuucucaacuggaugaaagauaaggcucugaaagacaagauugagaaggccguggucagccagcggcugacggaguccccuugcgcgcucguggcuucucaguacggauggagcggcaauauggaaagaaucaugaaagcccaggccuaucaaaccggcaaggauauuuccacaaacuacuaugcuagccagaaaaagaccuucgagaucaauccccgccacccucugauucgggacaugcuuagacgcaucaaagaagaugaggacgauaagacaguucuggaccucgccgugguccuguucgaaaccgcuacgcugcggucuggguaccuucuccccgauaccaaggccuauggagacagaaucgagcggaugcugcgccugucccucaacauugaucccgacgcgaaaguggaggaagaaccugaagaggagccggaagagacagccgaagacaccacagaggauaccgaacaggacgaggaugaggaaauggacguuggcacggaugaggaagagacagcuaaggaaagcaccgccgagaaagacgagcuguga

SEQ ID NO: 8640 - protein, 756 aa, Artificial Sequence
  IKK__Homo_sapiens__O14920
MSWSPSLTTQTCGAWEMKERLGTGGFGNVIRWHNQETGEQIAIKQCRQELSPRNRERWCLEIQIMRRLTHPNVVAARDVPEGMQNLAPNDLPLLAMEYCQGGDLRKYLNQFENCCGLREGAILTLLSDIASALRYLHENRIIHRDLKPENIVLQQGEQRLIHKIIDLGYAKELDQGSLCTSFVGTLQYLAPELLEQQKYTVTVDYWSFGTLAFECITGFRPFLPNWQPVQWHSKVRQKSEVDIVVSEDLNGTVKFSSSLPYPNNLNSVLAERLEKWLQLMLMWHPRQRGTDPTYGPNGCFKALDDILNLKLVHILNMVTGTIHTYPVTEDESLQSLKARIQQDTGIPEEDQELLQEAGLALIPDKPATQCISDGKLNEGHTLDMDLVFLFDNSKITYETQISPRPQPESVSCILQEPKRNLAFFQLRKVWGQVWHSIQTLKEDCNRLQQGQRAAMMNLLRNNSCLSKMKNSMASMSQQLKAKLDFFKTSIQIDLEKYSEQTEFGITSDKLLLAWREMEQAVELCGRENEVKLLVERMMALQTDIVDLQRSPMGRKQGGTLDDLEEQARELYRRLREKPRDQRTEGDSQEMVRLLLQAIQSFEKKVRVIYTQLSKTVVCKQKALELLPKVEEVVSLMNEDEKTVVRLQEKRQKELWNLLKIACSKVRGPVSGSPDSMNASRLSQPGQLMSQPSTASNSLPEPAKKSEELVAEAHNLCTLLENAIQDTVREQDQSFTALDWSWLQTEEEEHSCLEQAS

SEQ ID NO: 8641 - RNA, 2271 nt, Artificial Sequence
  IKK__Homo_sapiens__AAD08997
augagcuggucaccuucccugacaacgcagacauguggggccugggaaaugaaagagcgccuugggacagggggauuuggaaaugucauccgauggcacaaucaggaaacaggugagcagauugccaucaagcagugccggcaggagcucagcccccggaaccgagagcgguggugccuggagauccagaucaugagaaggcugacccaccccaaugugguggcugcccgagaugucccugaggggaugcagaacuuggcgcccaaugaccugccccugcuggccauggaguacugccaaggaggagaucuccggaaguaccugaaccaguuugagaacugcuguggucugcgggaaggugccauccucaccuugcugagugacauugccucugcgcuuagauaccuucaugaaaacagaaucauccaucgggaucuaaagccagaaaacaucguccugcagcaaggagaacagagguuaauacacaaaauuauugaccuaggauaugccaaggagcuggaucagggcagucuuugcacaucauucguggggacccugcaguaccuggccccagagcuacuggagcagcagaaguacacagugaccgucgacuacuggagcuucggcacccuggccuuugagugcaucacgggcuuccggcccuuccuccccaacuggcagcccgugcaguggcauucaaaagugcggcagaagagugagguggacauuguuguuagcgaagacuugaauggaacggugaaguuuucaagcucuuuacccuaccccaauaaucuuaacaguguccuggcugagcgacuggagaaguggcugcaacugaugcugauguggcacccccgacagaggggcacggaucccacguaugggcccaauggcugcuucaaggcccuggaugacaucuuaaacuuaaagcugguucauaucuugaacauggucacgggcaccauccacaccuacccugugacagaggaugagagucugcagagcuugaaggccagaauccaacaggacacgggcaucccagaggaggaccaggagcugcugcaggaagcgggccuggcguugauccccgauaagccugccacucaguguauuucagacggcaaguuaaaugagggccacacauuggacauggaucuuguuuuucucuuugacaacaguaaaaucaccuaugagacucagaucuccccacggccccaaccugaaagugucagcuguauccuucaagagcccaagaggaaucucgccuucuuccagcugaggaagguguggggccaggucuggcacagcauccagacccugaaggaagauugcaaccggcugcagcagggacagcgagccgccaugaugaaucuccuccgaaacaacagcugccucuccaaaaugaagaauuccauggcuuccaugucucagcagcucaaggccaaguuggauuucuucaaaaccagcauccagauugaccuggagaaguacagcgagcaaaccgaguuugggaucacaucagauaaacugcugcuggccuggagggaaauggagcaggcuguggagcucugugggcgggagaacgaagugaaacuccugguagaacggaugauggcucugcagaccgacauuguggacuuacagaggagccccaugggccggaagcaggggggaacgcuggacgaccuagaggagcaagcaagggagcuguacaggagacuaagggaaaaaccucgagaccagcgaacugagggugacagucaggaaaugguacggcugcugcuucaggcaauucagagcuucgagaagaaagugcgagugaucuauacgcagcucaguaaaacugugguuugcaagcagaaggcgcuggaacuguugcccaagguggaagagguggugagcuuaaugaaugaggaugagaagacuguuguccggcugcaggagaagcggcagaaggagcucuggaaucuccugaagauugcuuguagcaagguccgugguccugucaguggaagcccggauagcaugaaugccucucgacuuagccagccugggcagcugaugucucagcccuccacggccuccaacagcuuaccugagccagccaagaagagugaagaacugguggcugaagcacauaaccucugcacccugcuagaaaaugccauacaggacacugugagggaacaagaccagaguuucacggcccuagacuggagcugguuacagacggaagaagaagagcacagcugccuggagcaggccucauga

SEQ ID NO: 8642 - RNA, 2271 nt, Artificial Sequence
  derived and/or modified sequence opt1 from IKK__Homo_sapiens__AAD08997
augagcuggucccccagccugaccacccagacgugcggcgccugggagaugaaggagcgccucgggaccggcggguucggcaacgugauccgguggcacaaccaggagaccggggagcagaucgccaucaagcagugccgccaggagcuguccccgcggaaccgcgagcgguggugccuggagauccagaucaugcgccggcucacccaccccaacgucguggcggcccgcgacgugcccgagggcaugcagaaccuggcccccaacgaccugccgcuccuggccauggaguacugccagggcggggaccugcggaaguaccucaaccaguucgagaacugcugcggccugcgcgagggggccauccugacgcuccugagcgacaucgcguccgcccugcgguaccuccacgagaaccgcaucauccaccgggaccugaagcccgagaacaucguccugcagcagggcgagcagcgccucauccacaagaucaucgaccugggguacgccaaggagcuggaccagggcagccucugcaccuccuucgugggcacccugcaguaccuggcccccgagcuccuggagcagcagaaguacaccgugacggucgacuacuggagcuucgggacccuggcguucgagugcaucaccggcuuccggcccuuccucccgaacuggcagcccgugcaguggcacuccaaggugcgccagaaguccgaggucgacaucguggugagcgaggaccugaacgggaccgucaaguucagcuccagccugcccuaccccaacaaccucaacuccgugcuggccgagcggcuggagaaguggcuccagcugaugcugauguggcacccgcgccagcggggcacggaccccaccuacggccccaacgggugcuucaaggcccucgacgacauccugaaccugaagcucgugcacauccugaacauggucaccggcaccauccacacguaccccgugaccgaggacgagagccugcagucccucaaggcccgcauccagcaggacaccgggaucccggaggaggaccaggagcugcugcaggaggccggccucgcgcugauccccgacaagcccgccacccagugcaucagcgacgggaagcugaacgagggccacacgcucgacauggaccugguguuccuguucgacaacuccaagaucaccuacgagacccagaucagcccccggccgcagcccgagagcgucuccugcauccugcaggagcccaagcgcaaccucgccuucuuccagcugcgcaagguguggggccagguguggcacagcauccagacccugaaggaggacugcaaccggcuccagcaggggcagcgcgccgccaugaugaaccugcugcggaacaacuccugccucagcaagaugaagaacuccauggcgagcaugucccagcagcugaaggccaagcuggacuucuucaagacgagcauccagaucgaccucgagaaguacuccgagcagaccgaguucggcaucaccagcgacaagcugcugcucgccuggcgcgagauggagcaggccgucgagcugugcgggcgggagaacgaggugaagcugcucguggagcgcaugauggcccugcagaccgacaucgucgaccugcagcggucccccaugggccgcaagcagggcgggacgcucgacgaccuggaggagcaggcgcgggagcuguaccgccggcuccgcgagaagccgcgggaccagcgcaccgagggcgacagccaggagauggugcggcugcugcuccaggccauccaguccuucgagaagaagguccgcgugaucuacacccagcugagcaagaccguggucugcaagcagaaggcccuggagcuccugcccaagguggaggagguggucucccugaugaacgaggacgagaagacgguggugcggcuccaggagaagcgccagaaggagcuguggaaccugcucaagaucgccugcagcaagguccgggggcccguguccggcagccccgacuccaugaacgccagccgccugagccagccggggcagcugaugucccagcccagcaccgcguccaacagccuccccgagccggccaagaaguccgaggagcugguggccgaggcccacaaccugugcacccuccuggagaacgcgauccaggacaccguccgcgagcaggaccagagcuucacggcccuggacugguccuggcuccagaccgaggaggaggagcacagcugccuggagcaggccuccuga

SEQ ID NO: 8643 - RNA, 2271 nt, Artificial Sequence
  derived and/or modified sequence opt2 from IKK__Homo_sapiens__AAD08997
auguccuggucccccucccucaccacccagaccugcggcgccugggagaugaaggagcgccucggcaccggcggcuucggcaacgucauccgcuggcacaaccaggagaccggcgagcagaucgccaucaagcagugccgccaggagcucuccccccgcaaccgcgagcgcuggugccucgagauccagaucaugcgccgccucacccaccccaacgucgucgccgcccgcgacguccccgagggcaugcagaaccucgcccccaacgaccucccccuccucgccauggaguacugccagggcggcgaccuccgcaaguaccucaaccaguucgagaacugcugcggccuccgcgagggcgccauccucacccuccucuccgacaucgccuccgcccuccgcuaccuccacgagaaccgcaucauccaccgcgaccucaagcccgagaacaucguccuccagcagggcgagcagcgccucauccacaagaucaucgaccucggcuacgccaaggagcucgaccagggcucccucugcaccuccuucgucggcacccuccaguaccucgcccccgagcuccucgagcagcagaaguacaccgucaccgucgacuacugguccuucggcacccucgccuucgagugcaucaccggcuuccgccccuuccuccccaacuggcagcccguccaguggcacuccaagguccgccagaaguccgaggucgacaucgucgucuccgaggaccucaacggcaccgucaaguucuccuccucccuccccuaccccaacaaccucaacuccguccucgccgagcgccucgagaaguggcuccagcucaugcucauguggcacccccgccagcgcggcaccgaccccaccuacggccccaacggcugcuucaaggcccucgacgacauccucaaccucaagcucguccacauccucaacauggucaccggcaccauccacaccuaccccgucaccgaggacgagucccuccagucccucaaggcccgcauccagcaggacaccggcauccccgaggaggaccaggagcuccuccaggaggccggccucgcccucauccccgacaagcccgccacccagugcaucuccgacggcaagcucaacgagggccacacccucgacauggaccucgucuuccucuucgacaacuccaagaucaccuacgagacccagaucuccccccgcccccagcccgaguccgucuccugcauccuccaggagcccaagcgcaaccucgccuucuuccagcuccgcaaggucuggggccaggucuggcacuccauccagacccucaaggaggacugcaaccgccuccagcagggccagcgcgccgccaugaugaaccuccuccgcaacaacuccugccucuccaagaugaagaacuccauggccuccaugucccagcagcucaaggccaagcucgacuucuucaagaccuccauccagaucgaccucgagaaguacuccgagcagaccgaguucggcaucaccuccgacaagcuccuccucgccuggcgcgagauggagcaggccgucgagcucugcggccgcgagaacgaggucaagcuccucgucgagcgcaugauggcccuccagaccgacaucgucgaccuccagcgcucccccaugggccgcaagcagggcggcacccucgacgaccucgaggagcaggcccgcgagcucuaccgccgccuccgcgagaagccccgcgaccagcgcaccgagggcgacucccaggagaugguccgccuccuccuccaggccauccaguccuucgagaagaagguccgcgucaucuacacccagcucuccaagaccgucgucugcaagcagaaggcccucgagcuccuccccaaggucgaggaggucgucucccucaugaacgaggacgagaagaccgucguccgccuccaggagaagcgccagaaggagcucuggaaccuccucaagaucgccugcuccaagguccgcggccccgucuccggcucccccgacuccaugaacgccucccgccucucccagcccggccagcucaugucccagcccuccaccgccuccaacucccuccccgagcccgccaagaaguccgaggagcucgucgccgaggcccacaaccucugcacccuccucgagaacgccauccaggacaccguccgcgagcaggaccaguccuucaccgcccucgacugguccuggcuccagaccgaggaggaggagcacuccugccucgagcaggccuccuga

SEQ ID NO: 8644 - RNA, 2271 nt, Artificial Sequence
  derived and/or modified sequence opt3 from IKK__Homo_sapiens__AAD08997
augagcuggucccccucucugaccacacagacuugcggcgccugggagaugaaggaaagacucgggacgggagguuucggcaacgugaucagguggcacaaucaagagaccggggaacagauugcuauaaaacagugucggcaggagcuuucaccucgcaaccgagaacguuggugccuggagauccaaauuaugagaagguugacacauccaaaugucguugcagcccgggacgugccggagggaaugcagaacuuagcgcccaaugaucugccucuacucgcuauggaauacugucagggcggugaccugcgcaaguaucuuaaccaguuugagaauugcugugggcugagagaaggagccaucuugacucuccugagugauauugcaagcgcccugagguaccuccacgagaaccggaucauacaucgcgacuuaaaaccagagaauaucguacugcaacagggcgaacagcgacuuauucacaagaucauugauuugggcuaugcuaaagagcuggaccaggggucccuaugcaccucuuucgugggaacacuccaauaccuggcacccgaacuucuggagcagcagaaguauaccgucacuguggauuacuggucguuugguacauuggccuucgaauguaucaccggcuuuagaccuuuccucccaaacuggcaacccguucaguggcauucaaaggugaggcagaaaagcgaggucgacauagugguaagugaggaucugaaugggacgguuaaguuuuccucuagcuuaccuuauccaaacaaucugaacuccgugcucgcugaacggcuugagaaauggcugcaguugaugcuaauguggcacccgcgucaacgcggaacugaccccaccuacggcccuaaugguugcuucaaggcccuggaugacauucucaaccugaaacuuguccacauccugaacauggugacagggacuauucauaccuacccagugacagaagaugagucauugcagagucucaaggcgagaauccagcaggacaccggaauccccgaagaggaccaagagcuguuacaggaagcaggccuggcccuaauuccugauaagccagcuacgcaguguauaagcgacggcaaacucaaugaggggcacacucuggauauggaccuugucuuuuuguucgauaacucuaagaucacauaugaaacccagauuucccccaggccgcaaccugagucaguuagcugcauccugcaggaacccaaacggaaucucgccuuuuuccagcugcgaaagguguggggacagguauggcauaguauacaaacucuuaaagaggacuguaaccgccugcagcagggucaaagagcagcuaugaugaauuugcucaggaacaauucuugccuguccaagaugaaaaacagcauggccucgaugucucagcaguuaaaggcgaagcuggacuuuuucaaaacauccauucagaucgaucuagagaaguacucagaacaaaccgaguucggcaucacgagugauaaacuccugcuugccuggcgggaaauggagcaggcaguggaguugugcgggcgcgaaaaugaggucaagcugcucguggaaagaaugauggcucugcagaccgacauuguugauuuacagaggagcccaaugggacguaaacaaggcgguacacuggacgaccuugaggaacaggcccgggaguuguaucgaagacucagggagaagccucgcgaucagcggacugaaggggacucccaggagauggugagacugcuacugcaagcuauccagucuuuugaaaagaaagucagggugauuuacacccagcucagcaagacaguaguuuguaaacaaaaggcccuggagcuuuugcccaaaguggaagaggucgugucacugaugaacgaggaugaaaagacugucgugcgcuuacaggagaagcgacagaaagaacucuggaaucugcuuaagauagcaugcaguaaaguucggggcccaguguccggaagccccgacucuaugaacgccucacgucugagucagccuggccaauugaugagccagccauccaccgcuucuaauucgcucccggagcccgcgaagaaaagcgaggaacugguagcagaggcccacaaccuauguacacugcucgaaaaugcuauccaggauaccgucagagagcaggaccaauccuucacugcccuggauuggucauggcuucagacggaagaggaggaacacaguugcuuggagcaggcaucuuga

SEQ ID NO: 8645 - RNA, 2271 nt, Artificial Sequence
  derived and/or modified sequence opt4 from IKK__Homo_sapiens__AAD08997
augagcuggagccccagccugaccacccagaccugcggcgccugggagaugaaggagagacugggcaccggcggcuucggcaacgugaucagauggcacaaccaggagaccggcgagcagaucgccaucaagcagugcagacaggagcugagccccagaaacagagagagauggugccuggagauccagaucaugagaagacugacccaccccaacgugguggccgccagagacgugcccgagggcaugcagaaccuggcccccaacgaccugccccugcuggccauggaguacugccagggcggcgaccugagaaaguaccugaaccaguucgagaacugcugcggccugagagagggcgccauccugacccugcugagcgacaucgccagcgcccugagauaccugcacgagaacagaaucauccacagagaccugaagcccgagaacaucgugcugcagcagggcgagcagagacugauccacaagaucaucgaccugggcuacgccaaggagcuggaccagggcagccugugcaccagcuucgugggcacccugcaguaccuggcccccgagcugcuggagcagcagaaguacaccgugaccguggacuacuggagcuucggcacccuggccuucgagugcaucaccggcuucagacccuuccugcccaacuggcagcccgugcaguggcacagcaaggugagacagaagagcgagguggacaucguggugagcgaggaccugaacggcaccgugaaguucagcagcagccugcccuaccccaacaaccugaacagcgugcuggccgagagacuggagaaguggcugcagcugaugcugauguggcaccccagacagagaggcaccgaccccaccuacggccccaacggcugcuucaaggcccuggacgacauccugaaccugaagcuggugcacauccugaacauggugaccggcaccauccacaccuaccccgugaccgaggacgagagccugcagagccugaaggccagaauccagcaggacaccggcauccccgaggaggaccaggagcugcugcaggaggccggccuggcccugauccccgacaagcccgccacccagugcaucagcgacggcaagcugaacgagggccacacccuggacauggaccugguguuccuguucgacaacagcaagaucaccuacgagacccagaucagccccagaccccagcccgagagcgugagcugcauccugcaggagcccaagagaaaccuggccuucuuccagcugagaaagguguggggccagguguggcacagcauccagacccugaaggaggacugcaacagacugcagcagggccagagagccgccaugaugaaccugcugagaaacaacagcugccugagcaagaugaagaacagcauggccagcaugagccagcagcugaaggccaagcuggacuucuucaagaccagcauccagaucgaccuggagaaguacagcgagcagaccgaguucggcaucaccagcgacaagcugcugcuggccuggagagagauggagcaggccguggagcugugcggcagagagaacgaggugaagcugcugguggagagaaugauggcccugcagaccgacaucguggaccugcagagaagccccaugggcagaaagcagggcggcacccuggacgaccuggaggagcaggccagagagcuguacagaagacugagagagaagcccagagaccagagaaccgagggcgacagccaggagauggugagacugcugcugcaggccauccagagcuucgagaagaaggugagagugaucuacacccagcugagcaagaccguggugugcaagcagaaggcccuggagcugcugcccaagguggaggagguggugagccugaugaacgaggacgagaagaccguggugagacugcaggagaagagacagaaggagcuguggaaccugcugaagaucgccugcagcaaggugagaggccccgugagcggcagccccgacagcaugaacgccagcagacugagccagcccggccagcugaugagccagcccagcaccgccagcaacagccugcccgagcccgccaagaagagcgaggagcugguggccgaggcccacaaccugugcacccugcuggagaacgccauccaggacaccgugagagagcaggaccagagcuucaccgcccuggacuggagcuggcugcagaccgaggaggaggagcacagcugccuggagcaggccagcuga

SEQ ID NO: 8646 - RNA, 2271 nt, Artificial Sequence
  derived and/or modified sequence opt5 from IKK__Homo_sapiens__AAD08997
augagcuggucccccucucugaccacacagacgugcggcgccugggagaugaaggaaagacucgggaccggaggcuucgggaacgugauccgguggcacaaucaagagacaggagaacagauugcuaucaaacagugucgccaggagcugagcccuagaaaccgggaacgcuggugccuugagauucaaaucaugagacggcugacccauccgaaugucguugccgcgcgcgacgugcccgagggcaugcagaaccucgcuccuaaugaucugccccuucuggccauggaauacugucagggaggagaccucagaaaguaucugaaccaguuugagaauugcuguggccugcgggaaggcgccauucucacacugcuuuccgauaucgcuucugcccugcgcuaccuccacgagaacagaaucauucaucgggaccugaaaccugagaauaucgugcuucaacagggggaacagcgccugauucacaagaucauugaucucggauaugcuaaagagcuggaccagggcagccugugcaccuccuucgucgggacacuccaauaccuggcccccgaacuucuggagcagcagaaguauaccgugacgguugauuacuggucuuuuggaacccucgcguucgaauguaucacaggcuuuagaccuuuccugccgaacuggcaacccgugcaguggcauagcaagguccggcagaaauccgagguggacauuguugugagcgaggaucuuaaugggaccgucaaguuuucuuccagccugccuuaucccaacaaucucaacucugugcuggccgaacgccuggagaaauggcuccagcugaugcuuauguggcacccuagacaacggggaacagaccccaccuacggcccgaauggcugcuucaaggcucuggaugacauccucaaccugaaacuugugcacauccugaacauggucacggggacaauucauaccuacccuguuacagaagaugagucccuccagagccugaaggccagaauccagcaggacaccgggauucccgaagaggaccaagagcugcuccaggaagcuggccuggcccuuaucccugauaagcccgcgacccaguguauuucugacgggaaacugaaugagggacacacacucgauauggaccugguguuucuguucgauaacuccaagaucacguaugaaacccagaucagcccccgcccucaaccggaguccgugucuugcauucuucaggaacccaaacggaaucucgccuuuuuccagcugagaaaggucuggggccagguguggcauagcauccaaacacugaaagaggacuguaaccgccuccagcaggggcaacgggcugccaugaugaaucugcuuagaaacaauuccugccugagcaagaugaaaaacucuauggcuuccaugagccagcagcucaaggccaagcuggacuuuuucaaaaccucuauucagaucgaucuggagaaguacagcgaacaaacagaguucggaauuaccuccgauaaacuucuccuggccuggcgcgaaauggagcaggcuguugagcugugcggccgggaaaaugaggugaagcuccuggucgaaagaaugauggcgcuucagacggacaucguggaucugcagcgcucuccuaugggccggaaacaagggggaacacucgacgaccuggaggaacaggccagagagcuguaucgccggcuuagagagaagccccgggaucagcgcaccgaaggcgacagccaggagaugguuagacuccugcugcaagcuauccaguccuuugaaaagaaagugcgggucauuuacacccagcucagcaagacaguggucuguaaacaaaaggcccuggagcuucugccuaaaguggaagagguugugucucucaugaacgaggaugaaaagaccgucgugagacugcaggagaagcgccagaaagaacuguggaaucuucucaagaucgccugcuccaaaguucgggggcccgugagcggaucuccggacuccaugaacgcuagcagacugucccagccuggccaacugaugucucagcccagcacagccuccaauucucucccugagcccgcgaagaaaagcgaggaacuggucgcugaggcccacaaccuuuguacgcugcucgaaaaugccauucaggauaccgugcgcgagcaggaccaauccuucacagcucuggauuggagcuggcugcagaccgaagaggaggaacacucuugccuugagcaggccuccuga

SEQ ID NO: 8647 - protein, 716 aa, Artificial Sequence
  IKK__Homo_sapiens__Q14164
MQSTANYLWHTDDLLGQGATASVYKARNKKSGELVAVKVFNTTSYLRPREVQVREFEVLRKLNHQNIVKLFAVEETGGSRQKVLVMEYCSSGSLLSVLESPENAFGLPEDEFLVVLRCVVAGMNHLRENGIVHRDIKPGNIMRLVGEEGQSIYKLTDFGAARELDDDEKFVSVYGTEEYLHPDMYERAVLRKPQQKAFGVTVDLWSIGVTLYHAATGSLPFIPFGGPRRNKEIMYRITTEKPAGAIAGAQRRENGPLEWSYTLPITCQLSLGLQSQLVPILANILEVEQAKCWGFDQFFAETSDILQRVVVHVFSLSQAVLHHIYIHAHNTIAIFQEAVHKQTSVAPRHQEYLFEGHLCVLEPSVSAQHIAHTTASSPLTLFSTAIPKGLAFRDPALDVPKFVPKVDLQADYNTAKGVLGAGYQALRLARALLDGQELMFRGLHWVMEVLQATCRRTLEVARTSLLYLSSSLGTERFSSVAGTPEIQELKAAAELRSRLRTLAEVLSRCSQNITETQESLSSLNRELVKSRDQVHEDRSIQQIQCCLDKMNFIYKQFKKSRMRPGLGYNEEQIHKLDKVNFSHLAKRLLQVFQEECVQKYQASLVTHGKRMRVVHETRNHLRLVGCSVAACNTEAQGVQESLSKLLEELSHQLLQDRAKGAQASPPPIAPYPSPTRKDLLLHMQELCEGMKLLASDLLDNNRIIERLNRVPAPPDV

SEQ ID NO: 8648 - RNA, 2151 nt, Artificial Sequence
  IKK__Homo_sapiens__AAF45307
augcagagcacagccaauuaccuguggcacacagaugaccugcuggggcagggggccacugccaguguguacaaggcccgcaacaagaaauccggagagcugguugcugugaaggucuucaacacuaccagcuaccugcggccccgcgaggugcaggugagggaguuugagguccugcggaagcugaaccaccagaacaucgucaagcucuuugcgguggaggagacgggcggaagccggcagaagguacuggugauggaguacugcuccagugggagccugcugagugugcuggagagcccugagaaugccuuugggcugccugaggaugaguuccugguggugcugcgcugugugguggccggcaugaaccaccugcgggagaacggcauugugcaucgcgacaucaagccggggaacaucaugcgccucguaggggaggaggggcagagcaucuacaagcugacagacuucggcgcugcccgggagcuggaugaugaugagaaguucgucucggucuaugggacugaggaguaccugcaucccgacauguaugagcgggcggugcuucgaaagccccagcaaaaagcguucggggugacuguggaucucuggagcauuggagugaccuuguaccaugcagccacuggcagccugcccuucauccccuuuggugggccacggcggaacaaggagaucauguaccggaucaccacggagaagccggcuggggccauugcaggugcccagaggcgggagaacgggccccuggaguggagcuacacccuccccaucaccugccagcugucacuggggcugcagagccagcuggugcccauccuggccaacauccuggagguggagcaggccaagugcuggggcuucgaccaguucuuugcggagaccagugacauccugcagcgaguugucguccaugucuucucccugucccaggcaguccugcaccacaucuauauccaugcccacaacacgauagccauuuuccaggaggccgugcacaagcagaccaguguggccccccgacaccaggaguaccucuuugagggucaccucuguguccucgagcccagcgucucagcacagcacaucgcccacacgacggcaagcagcccccugacccucuucagcacagccaucccuaaggggcuggccuucagggacccugcucuggacguccccaaguucguccccaaaguggaccugcaggcggauuacaacacugccaagggcguguugggcgccggcuaccaggcccugcggcuggcacgggcccugcuggaugggcaggagcuaauguuucgggggcugcacugggucauggaggugcuccaggccacaugcagacggacucuggaaguggcaaggacaucccuccucuaccucagcagcagccugggaacugagagguucagcagcguggcuggaacgccugagauccaggaacugaaggcggcugcagaacugagguccaggcugcggacucuagcggagguccucuccagaugcucccaaaauaucacggagacccaggagagccugagcagccugaaccgggagcuggugaagagccgggaucagguacaugaggacagaagcauccagcagauucagugcuguuuggacaagaugaacuucaucuacaaacaguucaagaagucuaggaugaggccagggcuuggcuacaacgaggagcagauucacaagcuggauaaggugaauuucagucauuuagccaaaagacuccugcagguguuccaggaggagugcgugcagaaguaucaagcguccuuagucacacacggcaagaggaugaggguggugcacgagaccaggaaccaccugcgccugguuggcuguucuguggcugccuguaacacagaagcccaggggguccaggagagucucagcaagcuccuggaagagcuaucucaccagcuccuucaggaccgagcaaagggggcucaggccucgccgccucccauagcuccuuaccccagcccuacacgaaaggaccugcuucuccacaugcaagagcucugcgaggggaugaagcugcuggcaucugaccuccuggacaacaaccgcaucaucgaacggcuaaauagagucccagcaccuccugaugucuga

SEQ ID NO: 8649 - RNA, 2151 nt, Artificial Sequence
  derived and/or modified sequence opt1 from IKK__Homo_sapiens__AAF45307
augcagagcaccgccaacuaccuguggcacaccgacgaccuccugggccagggggccacggcguccguguacaaggcccgcaacaagaaguccggcgagcuggucgccgugaagguguucaacaccaccuccuaccuccggccccgcgagguccaggugcgggaguucgaggugcugcgcaagcugaaccaccagaacaucgucaagcuguucgccguggaggagaccgggggcagccggcagaaggugcuggucauggaguacugcuccagcgggucccugcucagcgugcuggagucccccgagaacgccuucggccugcccgaggacgaguuccucgugguccugcgcugcgugguggcgggcaugaaccaccuccgggagaacgggaucguccaccgcgacaucaagcccggcaacaucaugcggcucgugggggaggagggccagagcaucuacaagcugacggacuucggggccgcccgcgagcuggacgacgacgagaaguucguguccgucuacggcaccgaggaguaccuccaccccgacauguacgagcgggccgugcugcgcaagccgcagcagaaggcguucggcgugaccgucgaccuguggagcaucggggugacccucuaccacgccgccacgggcucccugcccuucauccccuucgggggcccccggcgcaacaaggagaucauguaccggaucaccaccgagaagccggccggcgccaucgcgggggcccagcgccgggagaacggcccccuggaguggagcuacacccuccccaucacgugccagcugucccuggggcuccagagccagcuggugcccauccuggccaacauccucgaggucgagcaggccaagugcuggggcuucgaccaguucuucgccgagaccuccgacauccugcagcgcguggucgugcacguguucagccugucccaggcgguccuccaccacaucuacauccacgcccacaacaccaucgccaucuuccaggaggccgugcacaagcagaccagcguggccccgcggcaccaggaguaccuguucgaggggcaccugugcguccucgagcccagcguguccgcgcagcacaucgcccacacgaccgccagcagcccccugacccuguucagcaccgccauccccaagggccucgccuuccgcgacccggcgcuggacgugcccaaguucguccccaagguggaccugcaggccgacuacaacacggccaagggcgugcucggggccggcuaccaggcgcugcggcuggcccgcgcccuccuggacgggcaggagcugauguuccgcggccuccacugggucauggaggugcugcaggcgaccugccggcgcacccuggagguggcccggaccucccugcucuaccugagcuccagccuggggacggagcgcuucuccagcgucgccggcacccccgagauccaggagcucaaggccgccgccgagcugcggucccgccugcggacccucgccgaggugcugagccgcugcucccagaacaucaccgagacgcaggagagccuguccagccucaaccgggagcuggugaagucccgcgaccagguccacgaggaccggagcauccagcagauccagugcugccuggacaagaugaacuucaucuacaagcaguucaagaagucccgcaugcggccgggccucggguacaacgaggagcagauccacaagcuggacaaggugaacuucagccaccuggcgaagcgccuccugcaggucuuccaggaggagugcgugcagaaguaccaggccagccuggugacccacggcaagcggaugcgcgugguccacgagacccggaaccaccuccgccugguggggugcuccguggccgccugcaacaccgaggcccagggcguccaggagagccuguccaagcuccuggaggagcugagccaccagcuccugcaggaccgggcgaagggggcccaggccagcccgccgcccaucgcccccuaccccucccccacgcgcaaggaccugcuccugcacaugcaggagcugugcgagggcaugaagcuccuggcguccgaccugcucgacaacaaccgcaucaucgagcggcugaaccgcgugcccgccccgcccgacguguga

SEQ ID NO: 8650 - RNA, 2151 nt, Artificial Sequence
  derived and/or modified sequence opt2 from IKK__Homo_sapiens__AAF45307
augcaguccaccgccaacuaccucuggcacaccgacgaccuccucggccagggcgccaccgccuccgucuacaaggcccgcaacaagaaguccggcgagcucgucgccgucaaggucuucaacaccaccuccuaccuccgcccccgcgagguccagguccgcgaguucgagguccuccgcaagcucaaccaccagaacaucgucaagcucuucgccgucgaggagaccggcggcucccgccagaagguccucgucauggaguacugcuccuccggcucccuccucuccguccucgagucccccgagaacgccuucggccuccccgaggacgaguuccucgucguccuccgcugcgucgucgccggcaugaaccaccuccgcgagaacggcaucguccaccgcgacaucaagcccggcaacaucaugcgccucgucggcgaggagggccaguccaucuacaagcucaccgacuucggcgccgcccgcgagcucgacgacgacgagaaguucgucuccgucuacggcaccgaggaguaccuccaccccgacauguacgagcgcgccguccuccgcaagccccagcagaaggccuucggcgucaccgucgaccucugguccaucggcgucacccucuaccacgccgccaccggcucccuccccuucauccccuucggcggcccccgccgcaacaaggagaucauguaccgcaucaccaccgagaagcccgccggcgccaucgccggcgcccagcgccgcgagaacggcccccucgagugguccuacacccuccccaucaccugccagcucucccucggccuccagucccagcucguccccauccucgccaacauccucgaggucgagcaggccaagugcuggggcuucgaccaguucuucgccgagaccuccgacauccuccagcgcgucgucguccacgucuucucccucucccaggccguccuccaccacaucuacauccacgcccacaacaccaucgccaucuuccaggaggccguccacaagcagaccuccgucgccccccgccaccaggaguaccucuucgagggccaccucugcguccucgagcccuccgucuccgcccagcacaucgcccacaccaccgccuccuccccccucacccucuucuccaccgccauccccaagggccucgccuuccgcgaccccgcccucgacguccccaaguucguccccaaggucgaccuccaggccgacuacaacaccgccaagggcguccucggcgccggcuaccaggcccuccgccucgcccgcgcccuccucgacggccaggagcucauguuccgcggccuccacugggucauggagguccuccaggccaccugccgccgcacccucgaggucgcccgcaccucccuccucuaccucuccuccucccucggcaccgagcgcuucuccuccgucgccggcacccccgagauccaggagcucaaggccgccgccgagcuccgcucccgccuccgcacccucgccgagguccucucccgcugcucccagaacaucaccgagacccaggagucccucuccucccucaaccgcgagcucgucaagucccgcgaccagguccacgaggaccgcuccauccagcagauccagugcugccucgacaagaugaacuucaucuacaagcaguucaagaagucccgcaugcgccccggccucggcuacaacgaggagcagauccacaagcucgacaaggucaacuucucccaccucgccaagcgccuccuccaggucuuccaggaggagugcguccagaaguaccaggccucccucgucacccacggcaagcgcaugcgcgucguccacgagacccgcaaccaccuccgccucgucggcugcuccgucgccgccugcaacaccgaggcccagggcguccaggagucccucuccaagcuccucgaggagcucucccaccagcuccuccaggaccgcgccaagggcgcccaggccucccccccccccaucgcccccuaccccucccccacccgcaaggaccuccuccuccacaugcaggagcucugcgagggcaugaagcuccucgccuccgaccuccucgacaacaaccgcaucaucgagcgccucaaccgcguccccgccccccccgacgucuga

SEQ ID NO: 8651 - RNA, 2151 nt, Artificial Sequence
  derived and/or modified sequence opt3 from IKK__Homo_sapiens__AAF45307
augcagagcaccgccaacuaccuguggcacacagacgaucuccuuggccaaggggcuacugcauccguguauaaggccagaaauaaaaagucuggagagcuggucgcgguuaaaguguucaacacgaccucauacuugaggccccgggaaguacaggugcgcgaguuugaagucuuacgaaagcugaaucaucagaacaucgugaaacuauucgcuguugaggaaacagguggcagucgucagaaggugcucgucauggaguauugcagcuccgggucucugcuuucggugcuggagucaccugaaaaugccuuuggauugccagaggacgaguuccucguaguucugagauguguggucgcaggcaugaaccaccugagggaaaaugguauugugcaucgggauauaaagccggggaacaucaugcgccucgugggagaggaaggccaaagcauuuacaaauuaacugacuuuggcgccgcuagagagcuggaugacgaugaaaaguucgucaguguuuaugggaccgaggaauaccuucaccccgacauguaugagagggcaguguugcggaaaccucagcagaaggccuuuggaguaacaguggaucugugguccaucggugucacccuauaccaugcugccacuggcucucucccauucauucccuuugggggaccucgccgaaauaaagagaucauguacagaauaacaaccgaaaagccagcgggcgcaaucgccggugcucagaggcgggagaacgggccccuggaauggagcuauacgcuuccuauuacuugccaacuguccuugggacuccagucacagcuggugccaaucuuagccaauauucuggagguugaacaggcaaaguguuggggcuucgaccaauuuuucgcugagaccagugauauccuccagcguguggucgugcacguauuuagccuuucucaggccguucugcaccauauauacauucacgcgcauaacacaaucgccauuuuccaagaggcagugcacaaacagacuuccgucgcuccgcgccaccaggaauauuuguucgagggccaucuaugcgugcuggaacccucagucagcgcccagcacaucgcucauaccacagccaguucuccucucacccuguuuuccacggcaaucccaaaggggcuugccuucagagaccccgcucuggaugugccuaaauuuguuccaaagguggacuugcaagcggacuacaauacugcaaaaggaguacucggugccggcuaucaggcucugagguuagcccgggcacugcuagaugggcaggagcucauguuccgaggacugcacugggucauggaagugcuucaggccacaugucgcagaaccuuggagguugcuaggacuagccugcucuaccugucgucuucccuuggcacagagcgguuuucaaguguggccgguacccccgaaauucaagagcugaaggcagcggcugaauugcgcagcagacucaggacgcuggccgaggucuuaucccguugcucucagaacauaaccgagacacaggaaagccugucaagucuaaaucgggagcucgugaaaucccgagaccagguacaugaagauagaagcauccaacagauucaguguugccuggacaagaugaacuucaucuauaagcaguuuaaaaagucuaggaugcgcccggggcuuggcuacaacgaggaacaaauacacaaauuggauaaggugaauuucucacaccuggcaaaacggcuccugcagguuuuucaggaggaguguguccaaaaguaccaggccaguuuagugacucauggaaagagaaugagggugguccacgaaacccgcaaccaucugcgacuuguuggcugcagcguggcugccuguaauacagaggcacagggggugcaggaauccuugucuaaacuccuggaggaacuaucgcaccaacugcuccaggaccgggcuaagggagcccaggcgagcccucccccaauugccccuuaucccuccccaacucguaaagaucugcuuuugcacaugcaggagcugugcgaggguaugaaguuacucgcuucagaccugcuugauaacaauagaaucaucgaaaggcugaaccgcguacccgcaccuccagacgucuga

SEQ ID NO: 8652 - RNA, 2151 nt, Artificial Sequence
  derived and/or modified sequence opt4 from IKK__Homo_sapiens__AAF45307
augcagagcaccgccaacuaccuguggcacaccgacgaccugcugggccagggcgccaccgccagcguguacaaggccagaaacaagaagagcggcgagcugguggccgugaagguguucaacaccaccagcuaccugagacccagagaggugcaggugagagaguucgaggugcugagaaagcugaaccaccagaacaucgugaagcuguucgccguggaggagaccggcggcagcagacagaaggugcuggugauggaguacugcagcagcggcagccugcugagcgugcuggagagccccgagaacgccuucggccugcccgaggacgaguuccugguggugcugagaugcgugguggccggcaugaaccaccugagagagaacggcaucgugcacagagacaucaagcccggcaacaucaugagacuggugggcgaggagggccagagcaucuacaagcugaccgacuucggcgccgccagagagcuggacgacgacgagaaguucgugagcguguacggcaccgaggaguaccugcaccccgacauguacgagagagccgugcugagaaagccccagcagaaggccuucggcgugaccguggaccuguggagcaucggcgugacccuguaccacgccgccaccggcagccugcccuucauccccuucggcggccccagaagaaacaaggagaucauguacagaaucaccaccgagaagcccgccggcgccaucgccggcgcccagagaagagagaacggcccccuggaguggagcuacacccugcccaucaccugccagcugagccugggccugcagagccagcuggugcccauccuggccaacauccuggagguggagcaggccaagugcuggggcuucgaccaguucuucgccgagaccagcgacauccugcagagagugguggugcacguguucagccugagccaggccgugcugcaccacaucuacauccacgcccacaacaccaucgccaucuuccaggaggccgugcacaagcagaccagcguggcccccagacaccaggaguaccuguucgagggccaccugugcgugcuggagcccagcgugagcgcccagcacaucgcccacaccaccgccagcagcccccugacccuguucagcaccgccauccccaagggccuggccuucagagaccccgcccuggacgugcccaaguucgugcccaagguggaccugcaggccgacuacaacaccgccaagggcgugcugggcgccggcuaccaggcccugagacuggccagagcccugcuggacggccaggagcugauguucagaggccugcacugggugauggaggugcugcaggccaccugcagaagaacccuggagguggccagaaccagccugcuguaccugagcagcagccugggcaccgagagauucagcagcguggccggcacccccgagauccaggagcugaaggccgccgccgagcugagaagcagacugagaacccuggccgaggugcugagcagaugcagccagaacaucaccgagacccaggagagccugagcagccugaacagagagcuggugaagagcagagaccaggugcacgaggacagaagcauccagcagauccagugcugccuggacaagaugaacuucaucuacaagcaguucaagaagagcagaaugagacccggccugggcuacaacgaggagcagauccacaagcuggacaaggugaacuucagccaccuggccaagagacugcugcagguguuccaggaggagugcgugcagaaguaccaggccagccuggugacccacggcaagagaaugagaguggugcacgagaccagaaaccaccugagacuggugggcugcagcguggccgccugcaacaccgaggcccagggcgugcaggagagccugagcaagcugcuggaggagcugagccaccagcugcugcaggacagagccaagggcgcccaggccagccccccccccaucgcccccuaccccagccccaccagaaaggaccugcugcugcacaugcaggagcugugcgagggcaugaagcugcuggccagcgaccugcuggacaacaacagaaucaucgagagacugaacagagugcccgccccccccgacguguga

SEQ ID NO: 8653 - RNA, 2151 nt, Artificial Sequence
  derived and/or modified sequence opt5 from IKK__Homo_sapiens__AAF45307
augcagagcaccgccaacuaccuguggcacacagacgaucuccugggccaaggggcuacggccuccguguauaaggcgagaaauaaaaagucuggagagcuugucgcuguuaaaguguucaacaccacaagcuaccugcggccccgcgaagugcaggucagagaguuugaagugcuccggaagcugaaucaucagaacaucguuaaacuuuucgccguggaggaaaccggcgggucccgccagaagguccuggugauggaguauugcucuagcggaucccuccugucuguucuggagagcccugaaaaugccuuuggccucccggaggacgaguuccuggugguccuuagaugugugguggcugggaugaaccaucugcgggaaaauggaauuguccaccgcgauaucaagcccggcaacauuaugagacucguuggcgaggaagggcaauccaucuacaaacugacagacuuuggagccgcucgggagcuugaugacgaugaaaaguucgugagcguguauggcaccgaggaauaccugcacccugacauguaugagcgcgccguccucagaaaaccccagcagaaggcguuuggggugacaguugaucuguggucuauuggagugacccuguaccaugccgcuacgggcucccucccuuucauccccuuugggggaccucggcgcaauaaagagaucauguacagaauuaccacagaaaagccggccggcgcuaucgccggcgcgcagcggcgcgagaacgggccccuggaauggagcuauacccuuccuauuacaugccaacugucucucggacugcagucccagcuuguccccauccuggccaauauucucgagguggaacaggcuaaguguuggggcuucgaccaauuuuucgccgagaccagcgauauccugcagagaguugugguccacguguuuucucugucccaggcuguccuccaccauauuuacauccacgcccauaacacgaucgccauuuuccaagaggcugugcacaaacagacaagcguugcgccucggcaccaggaauaucuguucgaggggcaucuuugcgugcuggaacccuccgucucugcccagcacaucgcucauaccacagccagcuccccgcucacccuguuuagcaccgccauuccuaagggacuugcuuucagagaccccgcccuggaugugccuaaauuuguucccaagguggaccuccaagcggacuacaauacagcuaaaggcguccugggggccggauaucaggcccugcgccucgcucgggcccugcuugauggccaggagcugauguucagaggccuccacugggugauggaagugcugcaggcuacgugucgccggacccuggagguugccagaacaucucuucucuaccuguccagcucucuggggaccgagcgcuuuagcuccgucgcgggaacacccgaaauccaagagcucaaggccgcugccgaacugcggucuagacuucgcacccuggcugaggugcucagccggugcucccagaacauuacggagacacaggaaagccugucuucccugaauagagagcuugugaaaagccgcgaccagguccaugaagaucggucuauccaacagauccaguguugccucgacaagaugaacuucauuuauaagcaguuuaaaaaguccagaaugcggccuggccugggguacaacgaggaacaaauccacaaacuggauaaggugaauuucagccaccucgccaaacgccugcuucagguuuuucaggaggagugugugcaaaaguaccaggcgucccuggucacccauggaaagagaaugcgggugguucacgaaaccagaaaccaucuccgccuggugggcugcucugucgccgcuuguaauacagaggcccagggggugcaggaaagccuguccaaacuucucgaggaacugucucaccaacugcuccaggaccgggcuaagggcgcccaggccagcccgcccccuauugcucccuauccuucccccaccagaaaagaucugcuucugcacaugcaggagcucugcgagggaaugaagcugcuggcgagcgaccuucucgauaacaaucgcaucauugaaagacugaaccggguuccggccccucccgacguguga

SEQ ID NO: 8654 - protein, 419 aa, Artificial Sequence
  IKK__Homo_sapiens__Q9Y6K9
MNRHLWKSQLCEMVQPSGGPAADQDVLGEESPLGKPAMLHLPSEQGAPETLQRCLEENQELRDAIRQSNQILRERCEELLHFQASQREEKEFLMCKFQEARKLVERLGLEKLDLKRQKEQALREVEHLKRCQQQMAEDKASVKAQVTSLLGELQESQSRLEAATKECQALEGRARAASEQARQLESEREALQQQHSVQVDQLRMQGQSVEAALRMERQAASEEKRKLAQLQVAYHQLFQEYDNHIKSSVVGSERKRGMQLEDLKQQLQQAEEALVAKQEVIDKLKEEAEQHKIVMETVPVLKAQADIYKADFQAERQAREKLAEKKELLQEQLEQLQREYSKLKASCQESARIEDMRKRHVEVSQAPLPPAPAYLSSPLALPSQRRSPPEEPPDFCCPKCQYQAPDMDTLQIHVMECIE

SEQ ID NO: 8655 - RNA, 1260 nt, Artificial Sequence
  IKK__Homo_sapiens__AAC36330
augaauaggcaccucuggaagagccaacugugugagauggugcagcccagugguggcccggcagcagaucaggacguacugggcgaagagucuccucuggggaagccagccaugcugcaccugccuucagaacagggcgcuccugagacccuccagcgcugccuggaggagaaucaagagcuccgagaugccauccggcagagcaaccagauucugcgggagcgcugcgaggagcuucugcauuuccaagccagccagagggaggagaaggaguuccucaugugcaaguuccaggaggccaggaaacugguggagagacucggccuggagaagcucgaucugaagaggcagaaggagcaggcucugcgggagguggagcaccugaagagaugccagcagcagauggcugaggacaaggccucugugaaagcccaggugacguccuugcucggggagcugcaggagagccagagucgcuuggaggcugccacuaaggaaugccaggcucuggagggucgggcccgggcggccagcgagcaggcgcggcagcuggagagugagcgcgaggcgcugcagcagcagcacagcgugcagguggaccagcugcgcaugcagggccagagcguggaggccgcgcuccgcauggagcgccaggccgccucggaggagaagaggaagcuggcccaguugcagguggccuaucaccagcucuuccaagaauacgacaaccacaucaagagcagcguggugggcagugagcggaagcgaggaaugcagcuggaagaucucaaacagcagcuccagcaggccgaggaggcccugguggccaaacaggaggugaucgauaagcugaaggaggaggccgagcagcacaagauugugauggagaccguuccggugcugaaggcccaggcggauaucuacaaggcggacuuccaggcugagaggcaggcccgggagaagcuggccgagaagaaggagcuccugcaggagcagcuggagcagcugcagagggaguacagcaaacugaaggccagcugucaggagucggccaggaucgaggacaugaggaagcggcaugucgaggucucccaggcccccuugccccccgccccugccuaccucuccucuccccuggcccugcccagccagaggaggagcccccccgaggagccaccugacuucugcugucccaagugccaguaucaggccccugauauggacacccugcagauacaugucauggagugcauugaguag

SEQ ID NO: 8656 - RNA, 1260 nt, Artificial Sequence
  derived and/or modified sequence opt1 from IKK__Homo_sapiens__AAC36330
augaaccgccaccuguggaagucccagcucugcgagauggugcagcccagcggcgggccggccgccgaccaggacguccugggcgaggagagcccccuggggaagcccgcgaugcuccaccuccccuccgagcagggcgccccggagacccugcagcggugccucgaggagaaccaggagcugcgcgacgccauccggcagagcaaccagauccugcgcgagcggugcgaggagcuccugcacuuccaggccucccagcgcgaggagaaggaguuccugaugugcaaguuccaggaggcccggaagcucguggagcgccuggggcuggagaagcucgaccugaagcggcagaaggagcaggcgcugcgcgagguggagcaccucaagcggugccagcagcagauggccgaggacaaggccagcgucaaggcccaggugaccucccugcugggcgagcuccaggagagccagucccgccuggaggcggccacgaaggagugccaggcccuggagggccgggcccgcgccgcgagcgagcaggcccggcagcucgaguccgagcgcgaggcccugcagcagcagcacagcgugcaggucgaccagcugcggaugcaggggcaguccguggaggccgcccuccgcauggagcggcaggcggccagcgaggagaagcgcaagcuggcccagcuccagguggccuaccaccagcuguuccaggaguacgacaaccacaucaaguccagcgucgugggcuccgagcggaagcgcgggaugcagcuggaggaccugaagcagcagcugcagcaggccgaggaggcgcugguggccaagcaggaggucaucgacaagcugaaggaggaggccgagcagcacaagaucgugauggagaccgugcccguccucaaggcccaggccgacaucuacaaggcggacuuccaggccgagcgccaggcccgggagaagcuggccgagaagaaggagcugcuccaggagcagcuggagcagcugcagcgcgaguacagcaagcucaaggcguccugccaggagagcgcccggaucgaggacaugcgcaagcggcacguggaggugagccaggcgccccugcccccggcccccgccuaccuguccagcccccucgcccugcccucccagcgccggagcccgcccgaggagccgcccgacuucugcugccccaagugccaguaccaggcccccgacauggacacccugcagauccacgucauggagugcaucgaguga

SEQ ID NO: 8657 - RNA, 1260 nt, Artificial Sequence
  derived and/or modified sequence opt2 from IKK__Homo_sapiens__AAC36330
augaaccgccaccucuggaagucccagcucugcgagaugguccagcccuccggcggccccgccgccgaccaggacguccucggcgaggaguccccccucggcaagcccgccaugcuccaccuccccuccgagcagggcgcccccgagacccuccagcgcugccucgaggagaaccaggagcuccgcgacgccauccgccaguccaaccagauccuccgcgagcgcugcgaggagcuccuccacuuccaggccucccagcgcgaggagaaggaguuccucaugugcaaguuccaggaggcccgcaagcucgucgagcgccucggccucgagaagcucgaccucaagcgccagaaggagcaggcccuccgcgaggucgagcaccucaagcgcugccagcagcagauggccgaggacaaggccuccgucaaggcccaggucaccucccuccucggcgagcuccaggagucccagucccgccucgaggccgccaccaaggagugccaggcccucgagggccgcgcccgcgccgccuccgagcaggcccgccagcucgaguccgagcgcgaggcccuccagcagcagcacuccguccaggucgaccagcuccgcaugcagggccaguccgucgaggccgcccuccgcauggagcgccaggccgccuccgaggagaagcgcaagcucgcccagcuccaggucgccuaccaccagcucuuccaggaguacgacaaccacaucaaguccuccgucgucggcuccgagcgcaagcgcggcaugcagcucgaggaccucaagcagcagcuccagcaggccgaggaggcccucgucgccaagcaggaggucaucgacaagcucaaggaggaggccgagcagcacaagaucgucauggagaccguccccguccucaaggcccaggccgacaucuacaaggccgacuuccaggccgagcgccaggcccgcgagaagcucgccgagaagaaggagcuccuccaggagcagcucgagcagcuccagcgcgaguacuccaagcucaaggccuccugccaggaguccgcccgcaucgaggacaugcgcaagcgccacgucgaggucucccaggccccccucccccccgcccccgccuaccucuccuccccccucgcccuccccucccagcgccgcuccccccccgaggagccccccgacuucugcugccccaagugccaguaccaggcccccgacauggacacccuccagauccacgucauggagugcaucgaguga

SEQ ID NO: 8658 - RNA, 1260 nt, Artificial Sequence
  derived and/or modified sequence opt3 from IKK__Homo_sapiens__AAC36330
augaacagacaccuguggaaaagccagcucugcgagauggugcaacccuccggcgggccugccgcugaccaggauguccuuggagaagagucuccacuggguaaaccggcaauguugcauuuacccucagaacagggcgccccugagacccugcagaggugucuagaagagaaucaagagcuccgggacgcgauccgccagaguaaccagauucugcgagaacguugcgaggaacuucugcacuuccaggcuagccaaagagaggagaaggaauuuuugauguguaaauuccaggaggccaggaagcucguugaacggcuggggcuggagaaacucgauuuaaagcgccagaaggaacaggcacugagagagguggagcaucuuaaaaggugccaacagcagauggccgaagacaaggcuuccguaaaagcacaagugacaucuuugcugggagagcuacaggaaucgcagucacggcucgaggccgcuacuaaggaaugucaggcccuggagggccgcgcgcgagcagccagcgagcaagcuagacagcuugaaagugagagggaagcccugcagcagcaacacuccguccagguggaucaguugcggaugcagggucaaucuguugaggcagcucuccguauggaacgccaggccgcgagcgaggagaaaagaaagcuggcccaguuacagguggcauaccaucaacuguuucaggaauaugacaaucacauaaaguccucagucguggggagugagaggaaacggggaaugcagcucgaagaucuuaagcaacagcugcagcaggcugaggaggccuugguagcuaaacaagaaguuaucgacaagcuaaaagaggaagccgagcagcacaagauugugauggaaacggucccagugcugaaagcacaggccgauaucuacaaggcugacuuccaggcggagcgacaagcacgcgagaagcucgccgaaaagaaggagcugcuucaggaacagcuggagcaguugcaaagagaauauagcaaacucaaggcuucuugccaggaguccgccaggauugaggauaugcggaaacgccauguggaagucucacaggcaccccugccuccagcccccgcuuacuuaagcaguccucuggcccuaccaucucaaagaagguccccgcccgaggaaccuccagacuuuuguugccccaagugucaguaucaggcaccugauauggacacccuccagauccacguuauggagugcauagaauga

SEQ ID NO: 8659 - RNA, 1260 nt, Artificial Sequence
  derived and/or modified sequence opt4 from IKK__Homo_sapiens__AAC36330
augaacagacaccuguggaagagccagcugugcgagauggugcagcccagcggcggccccgccgccgaccaggacgugcugggcgaggagagcccccugggcaagcccgccaugcugcaccugcccagcgagcagggcgcccccgagacccugcagagaugccuggaggagaaccaggagcugagagacgccaucagacagagcaaccagauccugagagagagaugcgaggagcugcugcacuuccaggccagccagagagaggagaaggaguuccugaugugcaaguuccaggaggccagaaagcugguggagagacugggccuggagaagcuggaccugaagagacagaaggagcaggcccugagagagguggagcaccugaagagaugccagcagcagauggccgaggacaaggccagcgugaaggcccaggugaccagccugcugggcgagcugcaggagagccagagcagacuggaggccgccaccaaggagugccaggcccuggagggcagagccagagccgccagcgagcaggccagacagcuggagagcgagagagaggcccugcagcagcagcacagcgugcagguggaccagcugagaaugcagggccagagcguggaggccgcccugagaauggagagacaggccgccagcgaggagaagagaaagcuggcccagcugcagguggccuaccaccagcuguuccaggaguacgacaaccacaucaagagcagcguggugggcagcgagagaaagagaggcaugcagcuggaggaccugaagcagcagcugcagcaggccgaggaggcccugguggccaagcaggaggugaucgacaagcugaaggaggaggccgagcagcacaagaucgugauggagaccgugcccgugcugaaggcccaggccgacaucuacaaggccgacuuccaggccgagagacaggccagagagaagcuggccgagaagaaggagcugcugcaggagcagcuggagcagcugcagagagaguacagcaagcugaaggccagcugccaggagagcgccagaaucgaggacaugagaaagagacacguggaggugagccaggccccccugccccccgcccccgccuaccugagcagcccccuggcccugcccagccagagaagaagcccccccgaggagccccccgacuucugcugccccaagugccaguaccaggcccccgacauggacacccugcagauccacgugauggagugcaucgaguga

SEQ ID NO: 8660 - RNA, 1260 nt, Artificial Sequence
  derived and/or modified sequence opt5 from IKK__Homo_sapiens__AAC36330
augaacagacaccuguggaaaagccagcucugcgagauggugcaacccuccggcgggccugccgcugaccaggauguccugggagaagagucuccgcuuggcaaacccgccaugcugcaucucccuagcgaacagggggcgcccgagacccugcagcggugucuugaagagaaucaagagcugcgcgacgcuaucagacaguccaaccagauucuccgggaacgcugcgaggaacugcugcacuuccaggccucucaaagagaggagaaggaauuucucauguguaaauuccaggaggcccggaagcugguugaacgccuuggacuggagaaacucgaucugaagagacagaaggaacaggcccuucgggagguggagcaucugaaacgcugccaacagcagauggccgaagacaaggcuagcgugaaagcccaagucacaucccuccugggcgagcugcaggaaucucagagcagacucgaggcggccacgaaggaaugucaggcucuggaggggcgggcccgcgcugccuccgagcaagcgagacagcuugaaagcgagcgggaagcccugcagcagcaacacucugugcagguugaucagcuccgcaugcagggacaauccguggaggcugcccugagaauggaacggcaggcugccagcgaggagaaaagaaaacuugcccagcugcaggucgcuuaccaucaacucuuucaggaauaugacaaucacaucaagucuuccgugguuggcagcgagcgcaagcggggcaugcagcuggaagaucugaagcaacagcuccagcaggcggaggaggcccugguggcuaaacaagaagucauugacaaacuuaaggaggaagccgagcagcacaagaucgugauggaaaccgugccuguccugaaagcccaggcugauauuuacaaggccgacuuccaggcggagagacaagcucgcgagaagcucgccgaaaagaaggagcugcuucaggaacagcuggagcagcuccaacgggaauauucuaaacugaaggccuccugccaggagagcgcuagaaucgaggauaugcgcaaacggcauguugaagugucccaggcuccccugccuccggcucccgccuaccucucuagcccucuggcgcuucccucccaaagacgcagcccucccgaggaaccgccugacuuuuguugccccaagugucaguaucaggccccugauauggacacacugcagauccacgugauggagugcauugaauga

SEQ ID NO: 8661 - protein, 540 aa, Artificial Sequence
  IL-1__Homo_sapiens__O43353
MNGEAICSALPTIPYHKLADLRYLSRGASGTVSSARHADWRVQVAVKHLHIHTPLLDSERKDVLREAEILHKARFSYILPILGICNEPEFLGIVTEYMPNGSLNELLHRKTEYPDVAWPLRFRILHEIALGVNYLHNMTPPLLHHDLKTQNILLDNEFHVKIADFGLSKWRMMSLSQSRSSKSAPEGGTIIYMPPENYEPGQKSRASIKHDIYSYAVITWEVLSRKQPFEDVTNPLQIMYSVSQGHRPVINEESLPYDIPHRARMISLIESGWAQNPDERPSFLKCLIELEPVLRTFEEITFLEAVIQLKKTKLQSVSSAIHLCDKKKMELSLNIPVNHGPQEESCGSSQLHENSGSPETSRSLPAPQDNDFLSRKAQDCYFMKLHHCPGNHSWDSTISGSQRAAFCDHKTTPCSSAIINPLSTAGNSERLQPGIAQQWIQSKREDIVNQMTEACLNQSLDALLSRDLIMKEDYELVSTKPTRTSKVRQLLDTTDIQGEEFAKVIVQKLKDNKQMGLQPYPEILVVSRSPSLNLLQNKSM

SEQ ID NO: 8662 - RNA, 1623 nt, Artificial Sequence
  IL-1__Homo_sapiens__AAC24561
augaacggggaggccaucugcagcgcccugcccaccauucccuaccacaaacucgccgaccugcgcuaccugagccgcggcgccucuggcacugugucguccgcccgccacgcagacuggcgcguccagguggccgugaagcaccugcacauccacacuccgcugcucgacagugaaagaaaggaugucuuaagagaagcugaaauuuuacacaaagcuagauuuaguuacauucuuccaauuuugggaauuugcaaugagccugaauuuuugggaauaguuacugaauacaugccaaauggaucauuaaaugaacuccuacauaggaaaacugaauauccugauguugcuuggccauugagauuucgcauccugcaugaaauugcccuugguguaaauuaccugcacaauaugacuccuccuuuacuucaucaugacuugaagacucagaauaucuuauuggacaaugaauuucauguuaagauugcagauuuugguuuaucaaaguggcgcaugaugucccucucacagucacgaaguagcaaaucugcaccagaaggagggacaauuaucuauaugccaccugaaaacuaugaaccuggacaaaaaucaagggccaguaucaagcacgauauauauagcuaugcaguuaucacaugggaaguguuauccagaaaacagccuuuugaagaugucaccaauccuuugcagauaauguauagugugucacaaggacaucgaccuguuauuaaugaagaaaguuugccauaugauauaccucaccgagcacguaugaucucucuaauagaaaguggaugggcacaaaauccagaugaaagaccaucuuucuuaaaauguuuaauagaacuugaaccaguuuugagaacauuugaagagauaacuuuucuugaagcuguuauucagcuaaagaaaacaaaguuacagaguguuucaagugccauucaccuaugugacaagaagaaaauggaauuaucucugaacauaccuguaaaucaugguccacaagaggaaucauguggauccucucagcuccaugaaaauagugguucuccugaaacuucaaggucccugccagcuccucaagacaaugauuuuuuaucuagaaaagcucaagacuguuauuuuaugaagcugcaucacuguccuggaaaucacaguugggauagcaccauuucuggaucucaaagggcugcauucugugaucacaagaccacuccaugcucuucagcaauaauaaauccacucucaacugcaggaaacucagaacgucugcagccugguauagcccagcaguggauccagagcaaaagggaagacauugugaaccaaaugacagaagccugccuuaaccagucgcuagaugcccuucuguccagggacuugaucaugaaagaggacuaugaacuuguuaguaccaagccuacaaggaccucaaaagucagacaauuacuagacacuacugacauccaaggagaagaauuugccaaaguuauaguacaaaaauugaaagauaacaaacaaaugggucuucagccuuacccggaaauacuugugguuucuagaucaccaucuuuaaauuuacuucaaaauaaaagcauguaa

SEQ ID NO: 8663 - RNA, 1623 nt, Artificial Sequence
  derived and/or modified sequence opt1 from IL-1__Homo_sapiens__AAC24561
augaacggcgaggccaucugcagcgcccugcccaccaucccguaccacaagcucgcggaccugcgcuaccugucccgcggggccagcggcaccguguccagcgcccggcacgccgacuggcggguccagguggccgugaagcaccuccacauccacacgccccugcuggacuccgagcgcaaggacguccuccgggaggcggagauccugcacaaggcccgcuucagcuacauccugcccauccucgggaucugcaacgagcccgaguuccugggcaucgugaccgaguacaugccgaacgggucccugaacgagcuccugcaccggaagaccgaguaccccgacguggccuggccccugcgcuuccggauccuccacgagaucgcccugggcgucaacuaccugcacaacaugacgcccccgcuccugcaccacgaccugaagacccagaacauccuccuggacaacgaguuccacgugaagaucgcggacuucggccugagcaaguggcgcaugaugucccucagccagucccggagcuccaagagcgcccccgagggcgggaccaucaucuacaugccgcccgagaacuacgagcccgggcagaagucccgcgccagcaucaagcacgacaucuacuccuacgccgugaucaccugggagguccugagccggaagcagcccuucgaggacgugaccaacccccugcagaucauguacuccgugagccagggccaccgccccgucaucaacgaggagagccucccguacgacaucccccaccgggcccgcaugaucucccugaucgagagcgggugggcgcagaaccccgacgagcggcccuccuuccugaagugccucaucgagcuggagccggugcugcgcacguucgaggagaucaccuuccucgaggccgugauccagcugaagaagaccaagcugcagagcgucuccagcgccauccaccucugcgacaagaagaagauggagcugucccugaacauccccgugaaccacggcccccaggaggagagcugcggcuccagccagcuccacgagaacuccgggagccccgagaccucccggagccugccggcgccccaggacaacgacuuccugucccgcaaggcccaggacugcuacuucaugaagcuccaccacugccccggcaaccacagcugggacuccacgaucagcgggucccagcgggccgccuucugcgaccacaagaccacccccugcagcagcgccaucaucaacccgcuguccaccgccggcaacagcgagcgccugcagcccggcaucgcccagcaguggauccaguccaagcgcgaggacaucgugaaccagaugacggaggcgugccucaaccagagccuggacgcccugcucucccgggaccugaucaugaaggaggacuacgagcuggucagcaccaagcccacccgcaccuccaaggugcggcagcugcucgacacgaccgacauccagggggaggaguucgccaaggugaucguccagaagcugaaggacaacaagcagaugggccugcagccguaccccgagauccucguggugagccgcucccccagccugaaccugcuccagaacaaguccauguga

SEQ ID NO: 8664 - RNA, 1623 nt, Artificial Sequence
  derived and/or modified sequence opt2 from IL-1__Homo_sapiens__AAC24561
augaacggcgaggccaucugcuccgcccuccccaccauccccuaccacaagcucgccgaccuccgcuaccucucccgcggcgccuccggcaccgucuccuccgcccgccacgccgacuggcgcguccaggucgccgucaagcaccuccacauccacaccccccuccucgacuccgagcgcaaggacguccuccgcgaggccgagauccuccacaaggcccgcuucuccuacauccuccccauccucggcaucugcaacgagcccgaguuccucggcaucgucaccgaguacaugcccaacggcucccucaacgagcuccuccaccgcaagaccgaguaccccgacgucgccuggccccuccgcuuccgcauccuccacgagaucgcccucggcgucaacuaccuccacaacaugacccccccccuccuccaccacgaccucaagacccagaacauccuccucgacaacgaguuccacgucaagaucgccgacuucggccucuccaaguggcgcaugaugucccucucccagucccgcuccuccaaguccgcccccgagggcggcaccaucaucuacaugccccccgagaacuacgagcccggccagaagucccgcgccuccaucaagcacgacaucuacuccuacgccgucaucaccugggagguccucucccgcaagcagcccuucgaggacgucaccaacccccuccagaucauguacuccgucucccagggccaccgccccgucaucaacgaggagucccuccccuacgacaucccccaccgcgcccgcaugaucucccucaucgaguccggcugggcccagaaccccgacgagcgccccuccuuccucaagugccucaucgagcucgagcccguccuccgcaccuucgaggagaucaccuuccucgaggccgucauccagcucaagaagaccaagcuccaguccgucuccuccgccauccaccucugcgacaagaagaagauggagcucucccucaacauccccgucaaccacggcccccaggaggaguccugcggcuccucccagcuccacgagaacuccggcucccccgagaccucccgcucccuccccgccccccaggacaacgacuuccucucccgcaaggcccaggacugcuacuucaugaagcuccaccacugccccggcaaccacuccugggacuccaccaucuccggcucccagcgcgccgccuucugcgaccacaagaccacccccugcuccuccgccaucaucaacccccucuccaccgccggcaacuccgagcgccuccagcccggcaucgcccagcaguggauccaguccaagcgcgaggacaucgucaaccagaugaccgaggccugccucaaccagucccucgacgcccuccucucccgcgaccucaucaugaaggaggacuacgagcucgucuccaccaagcccacccgcaccuccaagguccgccagcuccucgacaccaccgacauccagggcgaggaguucgccaaggucaucguccagaagcucaaggacaacaagcagaugggccuccagcccuaccccgagauccucgucgucucccgcucccccucccucaaccuccuccagaacaaguccauguga

SEQ ID NO: 8665 - RNA, 1623 nt, Artificial Sequence
  derived and/or modified sequence opt3 from IL-1__Homo_sapiens__AAC24561
augaacggcgaggccaucugcagcgcucugccaaccauuccuuaccacaagcucgcagaccuuagauaucuguccaggggagccucugggacagugucaagugcgcggcaugcugauuggcgcguccagguugccgugaaacacuugcauauacacacuccauuacuggacagcgaacgaaaggauguacuacgugaggcagaaauccuccauaaagccagauucuccuacauucugccgauccuugguauuuguaaugagcccgaauuucugggcaucgugacggaguauaugccuaacgggucuuugaaugagcuccugcacaggaagaccgaauacccagacgucgcuuggccccugcgguuccgcauacuccacgagaucgcauuaggagugaacuaucugcauaauaugacaccuccacuuuugcaccaugaucugaaaacucaaaacauucuacucgacaaugaauuucacguuaagaucgccgauuucggccugucgaaguggagaaugaugucacuuagccagaguagguccucuaaaagcgcucccgagggugggaccauuaucuacaugccuccagagaacuaugaaccgggacagaagucccgggccucaauaaaacacgacauuuacaguuacgcggugaucacaugggagguccugagccgcaagcagcccuuugaagaugugaccaauccuuugcaaauuauguauucuguaucccagggccaucgaccaguuaucaacgaggaaucacuccccuacgacaucccucacagagcaaggaugauuagccugauagagaguggcugggcccagaauccagaugagcggcccucuuucuuaaaaugccugaucgaacucgagccggugcuucguacuuuugaagagauuacauuccuggaagcugucauccaguugaagaagaccaaacuacaauccgugagcucggccauacaucugugugacaagaaaaagauggagcucucucugaacauuccugugaaucacgggccccaggaggaauccugcggaucaagucagcuucaugagaacagcgguuccccagaaacgucucgcagccugccugcaccccaggauaaugacuuuuugucaagaaaagcucaagacuguuauuucaugaagcuccaccacugcccaggcaaccauaguugggauuccacuaucagcgggucucagagggccgcguuuugugaccacaaaaccacacccugcucaagugccaucauuaacccucugagcacugcaggaaauuccgagcgguuacagccaggcaucgcucaacaguggauucagucuaagcgagaagauauagucaaccagaugaccgaggccugucugaaucaaucgcuagacgcucuccugagccgcgaucuuaucaugaaggaggacuacgaauugguuuccacaaaaccgaccagaacgucaaaggugaggcagcugcucgauacuacagacauucagggugaggaguucgccaaaguaaucgugcagaagcugaaagauaacaagcaaauggggcuucagcccuauccugaaauccuggucgugagucggucucccagcuugaaucuccugcagaacaaguccauguga

SEQ ID NO: 8666 - RNA, 1623 nt, Artificial Sequence
  derived and/or modified sequence opt4 from IL-1__Homo_sapiens__AAC24561
augaacggcgaggccaucugcagcgcccugcccaccauccccuaccacaagcuggccgaccugagauaccugagcagaggcgccagcggcaccgugagcagcgccagacacgccgacuggagagugcagguggccgugaagcaccugcacauccacaccccccugcuggacagcgagagaaaggacgugcugagagaggccgagauccugcacaaggccagauucagcuacauccugcccauccugggcaucugcaacgagcccgaguuccugggcaucgugaccgaguacaugcccaacggcagccugaacgagcugcugcacagaaagaccgaguaccccgacguggccuggccccugagauucagaauccugcacgagaucgcccugggcgugaacuaccugcacaacaugacccccccccugcugcaccacgaccugaagacccagaacauccugcuggacaacgaguuccacgugaagaucgccgacuucggccugagcaaguggagaaugaugagccugagccagagcagaagcagcaagagcgcccccgagggcggcaccaucaucuacaugccccccgagaacuacgagcccggccagaagagcagagccagcaucaagcacgacaucuacagcuacgccgugaucaccugggaggugcugagcagaaagcagcccuucgaggacgugaccaacccccugcagaucauguacagcgugagccagggccacagacccgugaucaacgaggagagccugcccuacgacaucccccacagagccagaaugaucagccugaucgagagcggcugggcccagaaccccgacgagagacccagcuuccugaagugccugaucgagcuggagcccgugcugagaaccuucgaggagaucaccuuccuggaggccgugauccagcugaagaagaccaagcugcagagcgugagcagcgccauccaccugugcgacaagaagaagauggagcugagccugaacauccccgugaaccacggcccccaggaggagagcugcggcagcagccagcugcacgagaacagcggcagccccgagaccagcagaagccugcccgccccccaggacaacgacuuccugagcagaaaggcccaggacugcuacuucaugaagcugcaccacugccccggcaaccacagcugggacagcaccaucagcggcagccagagagccgccuucugcgaccacaagaccacccccugcagcagcgccaucaucaacccccugagcaccgccggcaacagcgagagacugcagcccggcaucgcccagcaguggauccagagcaagagagaggacaucgugaaccagaugaccgaggccugccugaaccagagccuggacgcccugcugagcagagaccugaucaugaaggaggacuacgagcuggugagcaccaagcccaccagaaccagcaaggugagacagcugcuggacaccaccgacauccagggcgaggaguucgccaaggugaucgugcagaagcugaaggacaacaagcagaugggccugcagcccuaccccgagauccugguggugagcagaagccccagccugaaccugcugcagaacaagagcauguga

SEQ ID NO: 8667 - RNA, 1623 nt, Artificial Sequence
  derived and/or modified sequence opt5 from IL-1__Homo_sapiens__AAC24561
augaacggcgaggccaucugcagcgcucugcccaccauuccuuaccacaagcucgccgaccugagauaucuuuccagaggggcgucuggaacagugagcuccgcucgccaugccgauuggagaguccagguugccgugaaacaucugcacauccacacgccgcuccuggacucugaacggaaggaugugcuucgcgaggcugaaauucugcauaaagccagauucagcuacauccuccccauucugggcaucuguaaugagccugaauuucuggggaucgucaccgaguauaugcccaacggaucccucaaugagcugcuucaccggaagacagaauacccugacguggcuuggccccugcgcuuccggauucuccacgagaucgcccugggcguuaacuaucuucauaauaugaccccuccgcugcuccaccaugaucugaaaacacaaaacauucugcucgacaaugaauuucacgugaagaucgcggauuucgggcugucuaaguggcggaugaugagccuuucccagagcagaucuuccaaaagcgcccccgagggaggcaccauuaucuacaugccucccgagaacuaugaaccuggccagaagucucgcgcuuccauuaaacacgacaucuacagcuacgccgucaucacaugggaggugcugucucggaagcagcccuuugaagauguuaccaauccgcuccaaauuauguauuccgugagccaggggcaucgcccugucaucaacgaggaaucccugcccuacgacauuccucacagagcucggaugaucucucuuauugagagcggaugggcccagaaucccgaugagcgccccuccuuccugaaaugccucaucgaacuggagccugugcugagaacguuugaagagaucaccuuccucgaagcggugauucagcugaagaagacaaaacuucaaagcgucucuuccgccauccaucugugugacaagaaaaagauggagcucagccugaacauuccgguuaaucacggcccccaggaggaaucuugcgggagcucccagcuucaugagaacucuggaagcccugaaaccucccggagccugcccgcuccucaggauaaugacuuucucucuagaaaagcccaagacuguuauuucaugaagcugcaccacugccccggcaaccauuccugggauagcacaaucucugggucccagcgcgcugccuuuugugaccacaaaaccacgccgugcagcuccgccauuaucaacccucugucuacagcuggaaauagcgagcggcuccagcccggcaucgcgcaacaguggauucaguccaagagagaagauaucgugaaccagaugaccgaggccugucugaaucaaucucuugacgcucugcucagccgcgaucugauuaugaaggaggacuacgaacugguguccacaaaaccuacccggaccagcaaggucagacagcuucucgauacaacggacauccagggcgaggaguucgccaaagugauuguucagaagcugaaagauaacaagcaaauggggcugcagcccuauccugaaauccucguggucucucgcucccccagccugaaucuucugcagaacaagucuauguga

SEQ ID NO: 8668 - protein, 224 aa, Artificial Sequence
  IL-1__Homo_sapiens__Q8N9C1
MIVVLSPDYVTEKSISMLEFKLGVMCQNSIATKLIVVEYRPLEHPHPGILQLKESVSFVSWKGEKSKHSGSKFWKALRLALPLRSLSASSGWNESCSSQSDISLDHVQRRRSRLKEPPELQSSERAAGSPPAPGTMSKHRGKSSATCRCCVTYCEGENHLRNKSRAEIHNQPQWETHLCKPVPQESETQWIQNGTRLEPPAPQISALALHHFTDLSNNNDFYIL

SEQ ID NO: 8669 - RNA, 675 nt, Artificial Sequence
  IL-1__Homo_sapiens__BAC04487
augauuguuguucugagcccugacuaugugacagaaaagagcaucagcaugcuggaguuuaaacugggugucaugugccagaacuccauugccaccaagcucauugugguugaguaccguccccuugagcacccucacccaggcauucuucagcucaaagagucugugucuuuugugagcuggaagggagaaaaguccaaacauucuggcucuaaauucuggaaagcuuugcgguuggcucuuccccugagaagucugagugccaguucuggcuggaaugagagcugcucuucccagucugacaucagucuggaucacguucaaaggaggagaagucguuugaaagagcccccagaacuucagagcucagagagggcugcagguagcccuccagccccaggcacaauguccaagcaccgagggaaguccuccgccaccugccgcuguugugucaccuacugugaaggagagaaucaccuuaggaacaagagccgggcagagauucauaaccagccccagugggagacacaccucuguaagccuguuccccaagagucagaaacucaauggauacaaaauggcaccagauuggaacccccugcuccccagaucucagcccuugcucuucaucauuucacggacuuauccaauaacaacgacuuuuauauccuauaa

SEQ ID NO: 8670 - RNA, 675 nt, Artificial Sequence
  derived and/or modified sequence opt1 from IL-1__Homo_sapiens__BAC04487
augaucgugguccugagccccgacuacgugaccgagaaguccaucagcaugcucgaguucaagcugggcgugaugugccagaacuccaucgccaccaagcugaucgucguggaguaccgcccgcucgagcacccccaccccgggauccugcagcugaaggagagcguguccuucgucagcuggaagggcgagaaguccaagcacagcggguccaaguucuggaaggcccuccggcuggcgcugccccuccgcagccuguccgccagcuccggcuggaacgagagcugcuccagccaguccgacaucagccuggaccacgugcagcggcgccggucccgccucaaggagccgcccgagcugcagagcagcgagcgggccgccggguccccgcccgcccccggcacgaugagcaagcaccgcggcaaguccagcgcgaccugccggugcugcgugaccuacugcgagggggagaaccaccuccgcaacaagucccgggccgagauccacaaccagccccagugggagacccaccugugcaagcccgucccccaggagagcgagacgcaguggauccagaacggcacccgccuggagccgcccgcgccccagaucuccgcccuggcccuccaccacuucaccgaccugagcaacaacaacgacuucuacauccuguga

SEQ ID NO: 8671 - RNA, 675 nt, Artificial Sequence
  derived and/or modified sequence opt2 from IL-1__Homo_sapiens__BAC04487
augaucgucguccucucccccgacuacgucaccgagaaguccaucuccaugcucgaguucaagcucggcgucaugugccagaacuccaucgccaccaagcucaucgucgucgaguaccgcccccucgagcacccccaccccggcauccuccagcucaaggaguccgucuccuucgucuccuggaagggcgagaaguccaagcacuccggcuccaaguucuggaaggcccuccgccucgcccucccccuccgcucccucuccgccuccuccggcuggaacgaguccugcuccucccaguccgacaucucccucgaccacguccagcgccgccgcucccgccucaaggagccccccgagcuccaguccuccgagcgcgccgccggcuccccccccgcccccggcaccauguccaagcaccgcggcaaguccuccgccaccugccgcugcugcgucaccuacugcgagggcgagaaccaccuccgcaacaagucccgcgccgagauccacaaccagccccagugggagacccaccucugcaagcccgucccccaggaguccgagacccaguggauccagaacggcacccgccucgagccccccgccccccagaucuccgcccucgcccuccaccacuucaccgaccucuccaacaacaacgacuucuacauccucuga

SEQ ID NO: 8672 - RNA, 675 nt, Artificial Sequence
  derived and/or modified sequence opt3 from IL-1__Homo_sapiens__BAC04487
augaucgugguccugagccccgacuacguuaccgagaaguccauuucuaugcucgaguucaaacuuggcgugaugugccagaacucaauagccacaaagcugaucguaguggaauauagaccuuuggaacacccacauccggggauuuuacaacugaaagagagugucagcuuuguguccuggaagggagaaaaaucuaagcacucggguucaaaguucuggaaagcucuaaggcucgcacugccccuucggagccugagugccuccucuggcuggaaugagagcuguuccucacagagugauaucagcuuggaccauguucagcgccgacguucuagacucaaggagccuccagaacugcaguccucagagagggcggcugggagucccccugccccaggaacuaugagcaaacaccggggcaagucuuccgcaacgugccgcuguugcgugaccuacugugaaggugagaaccaucugagaaauaaaagcagggccgagauucacaaccaaccccagugggaaacacaccucugcaagccugucccacaggagucggaaacucaguggauccaaaaugggacccgguuagagccgcccgcuccucagauaucugcacuggcccuucaucacuuuacagauuuguccaacaauaacgacuucuauauccuguga

SEQ ID NO: 8673 - RNA, 675 nt, Artificial Sequence
  derived and/or modified sequence opt4 from IL-1__Homo_sapiens__BAC04487
augaucguggugcugagccccgacuacgugaccgagaagagcaucagcaugcuggaguucaagcugggcgugaugugccagaacagcaucgccaccaagcugaucgugguggaguacagaccccuggagcacccccaccccggcauccugcagcugaaggagagcgugagcuucgugagcuggaagggcgagaagagcaagcacagcggcagcaaguucuggaaggcccugagacuggcccugccccugagaagccugagcgccagcagcggcuggaacgagagcugcagcagccagagcgacaucagccuggaccacgugcagagaagaagaagcagacugaaggagccccccgagcugcagagcagcgagagagccgccggcagcccccccgcccccggcaccaugagcaagcacagaggcaagagcagcgccaccugcagaugcugcgugaccuacugcgagggcgagaaccaccugagaaacaagagcagagccgagauccacaaccagccccagugggagacccaccugugcaagcccgugccccaggagagcgagacccaguggauccagaacggcaccagacuggagccccccgccccccagaucagcgcccuggcccugcaccacuucaccgaccugagcaacaacaacgacuucuacauccuguga

SEQ ID NO: 8674 - RNA, 675 nt, Artificial Sequence
  derived and/or modified sequence opt5 from IL-1__Homo_sapiens__BAC04487
augaucgugguccugagccccgacuacguuaccgagaaguccauuucuaugcucgaguucaaacugggcgugaugugccagaacagcaucgccacaaaacuuauuguggucgaauauagaccucuggaacacccgcaucccgggauccuccaacugaaggaguccgugucuuuuguuagcuggaagggagaaaaauccaagcacucuggcagcaaguucuggaaagcccuucggcuggcucucccucugcgcucccugagcgcgucuuccggguggaaugagagcuguucuucccagagcgauauuucucucgaccaugugcagagacggcgcuccagacugaaggagcccccugaacuucagagcuccgagcgggcugccggaucucccccugccccgggcacgaugagcaaacaccgcgggaaguccagcgcuaccugcagauguugcgucacauacugugaaggagagaaccaucugcggaauaaaucucgcgccgagauccacaaccaaccccagugggaaacccaccucugcaagccugugccccaggaguccgaaacacaguggauccaaaauggcaccagacuggagccucccgcuccgcagauuagcgcccuugcgcugcaucacuuuacagaucucucuaacaauaacgacuucuauauccuguga

SEQ ID NO: 8675 - protein, 152 aa, Artificial Sequence
  IL-1__Homo_sapiens__Q8WWZ1
MCSLPMARYYIIKYADQKALYTRDGQLLVGDPVADNCCAEKICILPNRGLARTKVPIFLGIQGGSRCLACVETEEGPSLQLEDVNIEELYKGGEEATRFTFFQSSSGSAFRLEAAAWPGWFLCGPAEPQQPVQLTKESEPSARTKFYFEQSW

SEQ ID NO: 8676 - RNA, 459 nt, Artificial Sequence
  IL-1__Homo_sapiens__AAK33010
auguguucccuccccauggcaagauacuacauaauuaaauaugcagaccagaaggcucuauacacaagagauggccagcugcuggugggagauccuguugcagacaacugcugugcagagaagaucugcauacuuccuaacagaggcuuggcccgcaccaagguccccauuuuccuggggauccagggagggagccgcugccuggcauguguggagacagaagaggggccuucccuacagcuggaggaugugaacauugaggaacuguacaaagguggugaagaggccacacgcuucaccuucuuccagagcagcucaggcuccgccuucaggcuugaggcugcugccuggccuggcugguuccuguguggcccggcagagccccagcagccaguacagcucaccaaggagagugagcccucagcccguaccaaguuuuacuuugaacagagcugguag

SEQ ID NO: 8677 - RNA, 459 nt, Artificial Sequence
  derived and/or modified sequence opt1 from IL-1__Homo_sapiens__AAK33010
augugcagccugcccauggcccgcuacuacaucaucaaguacgccgaccagaaggcgcucuacacccgggacggccagcugcuggugggggacccggucgccgacaacugcugcgccgagaagaucugcauccuccccaaccgcggccuggcccggaccaaggugcccaucuuccuggggauccagggcgggucccgcugccucgccugcguggagacggaggagggccccagccugcagcuggaggacgucaacaucgaggagcucuacaagggcggggaggaggcgacccgguucaccuucuuccaguccagcuccggcagcgccuuccgccuggaggccgccgcguggccggggugguuccugugcggccccgccgagccccagcagcccgugcagcucaccaaggaguccgagccgagcgcccggacgaaguucuacuucgagcaguccugguga

SEQ ID NO: 8678 - RNA, 459 nt, Artificial Sequence
  derived and/or modified sequence opt2 from IL-1__Homo_sapiens__AAK33010
augugcucccuccccauggcccgcuacuacaucaucaaguacgccgaccagaaggcccucuacacccgcgacggccagcuccucgucggcgaccccgucgccgacaacugcugcgccgagaagaucugcauccuccccaaccgcggccucgcccgcaccaagguccccaucuuccucggcauccagggcggcucccgcugccucgccugcgucgagaccgaggagggccccucccuccagcucgaggacgucaacaucgaggagcucuacaagggcggcgaggaggccacccgcuucaccuucuuccaguccuccuccggcuccgccuuccgccucgaggccgccgccuggcccggcugguuccucugcggccccgccgagccccagcagcccguccagcucaccaaggaguccgagcccuccgcccgcaccaaguucuacuucgagcaguccugguga

SEQ ID NO: 8679 - RNA, 459 nt, Artificial Sequence
  derived and/or modified sequence opt3 from IL-1__Homo_sapiens__AAK33010
augugcagccugcccauggccagauacuauaucauuaaguacgcugaccagaaagcacucuauaccagggauggccaacuucuggugggggacccugucgccgauaacuguugcgcggagaagauauguaucuugccaaaucggggauuagcucgcacaaaaguuccgauuuuccuggguauccagggcgggucccgaugccuagccuguguggaaacugaggaaggacccucucuccagcuggaggacguaaacauugaggaacuuuacaagggcggugaggaagcaacgcguuuuaccuucuuucagucaaguagcggguccgccuucagacuggaggcugcagccuggccuggaugguuuuugugcggcccagcugaaccccaacagccugugcagcucacaaaagagucugagccaucggccaggacuaaguucuauuuugaacagucaugguga

SEQ ID NO: 8680 - RNA, 459 nt, Artificial Sequence
  derived and/or modified sequence opt4 from IL-1__Homo_sapiens__AAK33010
augugcagccugcccauggccagauacuacaucaucaaguacgccgaccagaaggcccuguacaccagagacggccagcugcuggugggcgaccccguggccgacaacugcugcgccgagaagaucugcauccugcccaacagaggccuggccagaaccaaggugcccaucuuccugggcauccagggcggcagcagaugccuggccugcguggagaccgaggagggccccagccugcagcuggaggacgugaacaucgaggagcuguacaagggcggcgaggaggccaccagauucaccuucuuccagagcagcagcggcagcgccuucagacuggaggccgccgccuggcccggcugguuccugugcggccccgccgagccccagcagcccgugcagcugaccaaggagagcgagcccagcgccagaaccaaguucuacuucgagcagagcugguga

SEQ ID NO: 8681 - RNA, 459 nt, Artificial Sequence
  derived and/or modified sequence opt5 from IL-1__Homo_sapiens__AAK33010
augugcagccugcccauggccagauacuauaucauuaaguacgcugaccagaaagcccucuauacccgggauggccaacugcuugugggggacccugucgcggauaacuguugcgcugagaagaucuguauucugccgaaucgcggacucgccagaacaaaaguucccaucuuccugggcauucaagggggaucccggugccuugccuguguggaaacggaggaaggcccuucucugcagcucgaggacgugaacaucgaggaacuguacaaagggggagaggaagcuacccgcuuuacauucuuucagagcuccucuggcagcgccuucagacuggaggcugccgcguggcccggcugguuucucugcgggccugccgaaccccagcagccuguccagcugaccaaggaguccgagccgucugcucggacaaaguucuauuuugaacagagcugguga

SEQ ID NO: 8682 - protein, 164 aa, Artificial Sequence
  IL-1__Homo_sapiens__Q9NZH7
MNPQREAAPKSYAIRDSRQMVWVLSGNSLIAAPLSRSIKPVTLHLIACRDTEFSDKEKGNMVYLGIKGKDLCLFCAEIQGKPTLQLKLQGSQDNIGKDTCWKLVGIHTCINLDVRESCFMGTLDQWGIGVGRKKWKSSFQHHHLRKKDKDFSSMRTNIGMPGRM

SEQ ID NO: 8683 - RNA, 495 nt, Artificial Sequence
  IL-1__Homo_sapiens__AAF69250
augaacccacaacgggaggcagcacccaaauccuaugcuauucgugauucucgacagaugguguggguccugaguggaaauucuuuaauagcagcuccucuuagccgcagcauuaagccugucacucuucauuuaauagccuguagagacacagaauucagugacaaggaaaaggguaauaugguuuaccugggaaucaagggaaaagaucucugucucuucugugcagaaauucagggcaagccuacuuugcagcuuaagcuucagggcucccaagauaacauagggaaggacacuugcuggaaacuaguuggaauucacacaugcauaaaccuggaugugagagagagcugcuucaugggaacccuugaccaauggggaauaggaguggguagaaagaaguggaagaguuccuuucaacaucaccaucucaggaagaaggacaaagauuucucauccaugcggaccaacauaggaaugccaggaaggauguag

SEQ ID NO: 8684 - RNA, 495 nt, Artificial Sequence
  derived and/or modified sequence opt1 from IL-1__Homo_sapiens__AAF69250
augaacccccagcgcgaggccgcccccaagagcuacgcgauccgggacucccgccagaugguguggguccugagcggcaacucccugaucgccgccccgcugagccgguccaucaagcccgugacccugcaccucaucgccugccgcgacaccgaguucagcgacaaggagaaggggaacaugguguaccugggcaucaaggggaaggaccugugccucuucugcgccgagauccagggcaagcccacccugcagcugaagcuccaggggucccaggacaacaucggcaaggacacgugcuggaagcuggucggcauccacacgugcaucaaccuggacgugcgggagagcugcuucauggggacccucgaccaguggggcaucggggugggccgcaagaaguggaaguccagcuuccagcaccaccaccuccggaagaaggacaaggacuucuccagcaugcgcaccaacaucgggaugccgggccggauguga

SEQ ID NO: 8685 - RNA, 495 nt, Artificial Sequence
  derived and/or modified sequence opt2 from IL-1__Homo_sapiens__AAF69250
augaacccccagcgcgaggccgcccccaaguccuacgccauccgcgacucccgccagauggucuggguccucuccggcaacucccucaucgccgccccccucucccgcuccaucaagcccgucacccuccaccucaucgccugccgcgacaccgaguucuccgacaaggagaagggcaacauggucuaccucggcaucaagggcaaggaccucugccucuucugcgccgagauccagggcaagcccacccuccagcucaagcuccagggcucccaggacaacaucggcaaggacaccugcuggaagcucgucggcauccacaccugcaucaaccucgacguccgcgaguccugcuucaugggcacccucgaccaguggggcaucggcgucggccgcaagaaguggaaguccuccuuccagcaccaccaccuccgcaagaaggacaaggacuucuccuccaugcgcaccaacaucggcaugcccggccgcauguga

SEQ ID NO: 8686 - RNA, 495 nt, Artificial Sequence
  derived and/or modified sequence opt3 from IL-1__Homo_sapiens__AAF69250
augaacccccagagagaggccgcuccuaagagcuacgcaaucagggacucccggcaaaugguguggguccugucuggcaauucacucauugccgcgccacuuagucgcagcauaaaaccgguuacccugcacuugaucgcuugccgagauacagaguucuccgacaaggaaaaagggaacaugguguauuuaggaauuaaggguaaagaucugugucuauuuugcgccgaaauccagggcaagcccacucuccagcugaaacuucaggggucucaagacaauauuggaaaagauacguguuggaagcugguaggcauccauaccugcauaaacuuggacgugcgugagucguguuucauggguacacucgaucagugggggaucggagucggcagaaagaaguggaaaagcucauuucagcaccaucaccugaggaagaaggacaaagauuucaguuccaugcggacuaauauuggcaugccugggcgcauguga

SEQ ID NO: 8687 - RNA, 495 nt, Artificial Sequence
  derived and/or modified sequence opt4 from IL-1__Homo_sapiens__AAF69250
augaacccccagagagaggccgcccccaagagcuacgccaucagagacagcagacagauggugugggugcugagcggcaacagccugaucgccgccccccugagcagaagcaucaagcccgugacccugcaccugaucgccugcagagacaccgaguucagcgacaaggagaagggcaacaugguguaccugggcaucaagggcaaggaccugugccuguucugcgccgagauccagggcaagcccacccugcagcugaagcugcagggcagccaggacaacaucggcaaggacaccugcuggaagcuggugggcauccacaccugcaucaaccuggacgugagagagagcugcuucaugggcacccuggaccaguggggcaucggcgugggcagaaagaaguggaagagcagcuuccagcaccaccaccugagaaagaaggacaaggacuucagcagcaugagaaccaacaucggcaugcccggcagaauguga

SEQ ID NO: 8688 - RNA, 495 nt, Artificial Sequence
  derived and/or modified sequence opt5 from IL-1__Homo_sapiens__AAF69250
augaacccccagagagaggccgcuccuaagagcuacgccauccgggacucccgccaaaugguguggguccugucuggcaauagccucauugcggcuccgcuguccagaucuaucaaacccguuacccuucaccugauugccugccgggauacagaauuuagcgacaaggagaaagggaacaugguguaucucggaaucaagggcaaagaucugugucuuuucugcgccgaaauucaggggaagccuacgcugcagcucaagcugcagggaucccaagacaauaucggcaaagauaccuguuggaagcugguggggauccauacaugcauuaaccucgacguccgcgagucuuguuucaugggaacccuggaucaguggggcaucggcguggggcggaaaaaguggaaaagcuccuuucagcaccaucaccuuagaaagaaggacaaagauuucagcucuaugcgcacaaauauuggaaugcccggcagaauguga

SEQ ID NO: 8689 - protein, 155 aa, Artificial Sequence
  IL-1__Homo_sapiens__Q9UBH0
MVLSGALCFRMKDSALKVLYLHNNQLLAGGLHAGKVIKGEEISVVPNRWLDASLSPVILGVQGGSQCLSCGVGQEPTLTLEPVNIMELYLGAKESKSFTFYRRDMGLTSSFESAAYPGWFLCTVPEADQPVRLTQLPENGGWNAPITDFYFQQCD

SEQ ID NO: 8690 - RNA, 468 nt, Artificial Sequence
  IL-1__Homo_sapiens__AAF02757
augguccugaguggggcgcugugcuuccgaaugaaggacucggcauugaaggugcuuuaucugcauaauaaccagcuucuagcuggagggcugcaugcagggaaggucauuaaaggugaagagaucagcgugguccccaaucgguggcuggaugccagccugucccccgucauccuggguguccaggguggaagccagugccugucaugugggguggggcaggagccgacucuaacacuagagccagugaacaucauggagcucuaucuuggugccaaggaauccaagagcuucaccuucuaccggcgggacauggggcucaccuccagcuucgagucggcugccuacccgggcugguuccugugcacggugccugaagccgaucagccugucagacucacccagcuucccgagaaugguggcuggaaugcccccaucacagacuucuacuuccagcagugugacuag

SEQ ID NO: 8691 - RNA, 468 nt, Artificial Sequence
  derived and/or modified sequence opt1 from IL-1__Homo_sapiens__AAF02757
auggugcugagcggcgcccucugcuuccgcaugaaggacuccgcccugaagguccuguaccuccacaacaaccagcugcuggccgggggccuccacgcggggaaggugaucaagggcgaggagaucagcgugguccccaaccgguggcuggacgccucccugagcccggugauccucggggugcagggcggcucccagugccugagcugcggggucggccaggagcccacccugacccucgagcccgugaacaucauggagcuguaccugggggccaaggaguccaagagcuucacguucuaccgccgggacaugggccucaccuccagcuucgaguccgccgcguaccccgggugguuccugugcaccgugccggaggccgaccagcccguccgccugacccagcuccccgagaacggcggcuggaacgcccccaucacggacuucuacuuccagcagugcgacuga

SEQ ID NO: 8692 - RNA, 468 nt, Artificial Sequence
  derived and/or modified sequence opt2 from IL-1__Homo_sapiens__AAF02757
augguccucuccggcgcccucugcuuccgcaugaaggacuccgcccucaagguccucuaccuccacaacaaccagcuccucgccggcggccuccacgccggcaaggucaucaagggcgaggagaucuccgucguccccaaccgcuggcucgacgccucccucucccccgucauccucggcguccagggcggcucccagugccucuccugcggcgucggccaggagcccacccucacccucgagcccgucaacaucauggagcucuaccucggcgccaaggaguccaaguccuucaccuucuaccgccgcgacaugggccucaccuccuccuucgaguccgccgccuaccccggcugguuccucugcaccguccccgaggccgaccagcccguccgccucacccagcuccccgagaacggcggcuggaacgcccccaucaccgacuucuacuuccagcagugcgacuga

SEQ ID NO: 8693 - RNA, 468 nt, Artificial Sequence
  derived and/or modified sequence opt3 from IL-1__Homo_sapiens__AAF02757
auggugcugagcggcgcccucugcuucagaaugaaggacuccgcucuuaaaguccuguacuugcacaacaaucaguuacuggcagggggacuacaugccgguaagguuaucaaaggcgaggaaauuucugugguacccaacagguggcucgaugcgucacugaguccugugauacuugggguccaaggaggcagccagugucuguccugcgguguggggcaggagccaaccuugacacucgaaccgguuaauaucauggagcuguaucugggagcuaaggaaucuaaaucguuuacuuucuaccggcgcgacaugggccucacgagcucauuugagagugccgcauaucccggcugguucuuauguaccgugccugaggccgaucagccaguccgacugacacaacuucccgaaaacgggggauggaaugcuccuauuacugacuuuuacuuccagcagugcgauuga

SEQ ID NO: 8694 - RNA, 468 nt, Artificial Sequence
  derived and/or modified sequence opt4 from IL-1__Homo_sapiens__AAF02757
auggugcugagcggcgcccugugcuucagaaugaaggacagcgcccugaaggugcuguaccugcacaacaaccagcugcuggccggcggccugcacgccggcaaggugaucaagggcgaggagaucagcguggugcccaacagauggcuggacgccagccugagccccgugauccugggcgugcagggcggcagccagugccugagcugcggcgugggccaggagcccacccugacccuggagcccgugaacaucauggagcuguaccugggcgccaaggagagcaagagcuucaccuucuacagaagagacaugggccugaccagcagcuucgagagcgccgccuaccccggcugguuccugugcaccgugcccgaggccgaccagcccgugagacugacccagcugcccgagaacggcggcuggaacgcccccaucaccgacuucuacuuccagcagugcgacuga

SEQ ID NO: 8695 - RNA, 468 nt, Artificial Sequence
  derived and/or modified sequence opt5 from IL-1__Homo_sapiens__AAF02757
auggugcugagcggcgcccucugcuucagaaugaaggacuccgcucugaaaguccuuuaccugcacaacaaucagcuccuggccgggggacuucaugcgggcaagguuaucaaaggggaggaaauuucuguggugcccaaccgguggcuggaugcuagccucuccccugucauccugggagugcaaggcgggucucagugucugagcugcggaguuggccaggagccgacccucacacuggaacccgugaauauuauggagcuuuaucugggcgccaaggaauccaaaucuuuuacguucuaccgcagagacauggggcucaccagcuccuuugagagcgccgcuuauccuggaugguuccuguguacaguccccgaggccgaucagccugugcggcuuacccaacugcccgaaaacggcggguggaaugcuccuaucacagacuuuuacuuccagcagugcgauuga

SEQ ID NO: 8696 - protein, 158 aa, Artificial Sequence
  IL-1__Homo_sapiens__Q9UHA7
MEKALKIDTPQQGSIQDINHRVWVLQDQTLIAVPRKDRMSPVTIALISCRHVETLEKDRGNPIYLGLNGLNLCLMCAKVGDQPTLQLKEKDIMDLYNQPEPVKSFLFYHSQSGRNSTFESVAFPGWFIAVSSEGGCPLILTQELGKANTTDFGLTMLF

SEQ ID NO: 8697 - RNA, 477 nt, Artificial Sequence
  IL-1__Homo_sapiens__AAF25211
auggaaaaagcauugaaaauugacacaccucagcaggggagcauucaggauaucaaucaucggguguggguucuucaggaccagacgcucauagcagucccgaggaaggaccguaugucuccagucacuauugccuuaaucucaugccgacauguggagacccuugagaaagacagagggaaccccaucuaccugggccugaauggacucaaucucugccugaugugugcuaaagucggggaccagcccacacugcagcugaaggaaaaggauauaauggauuuguacaaccaacccgagccugugaaguccuuucucuucuaccacagccagaguggcaggaacuccaccuucgagucuguggcuuucccuggcugguucaucgcugucagcucugaaggaggcuguccucucauccuuacccaagaacuggggaaagccaacacuacugacuuuggguuaacuaugcuguuuuaa

SEQ ID NO: 8698 - RNA, 477 nt, Artificial Sequence
  derived and/or modified sequence opt1 from IL-1__Homo_sapiens__AAF25211
auggagaaggcccugaagaucgacacgccccagcagggcagcauccaggacaucaaccaccgcguguggguccuccaggaccagacccugaucgccgugccgcggaaggaccgcaugucccccgugaccaucgcgcugaucagcugccggcacgucgagacccucgagaaggaccgcgggaaccccaucuaccugggccugaacgggcucaaccugugccugaugugcgccaaggugggcgaccagcccacccuccagcugaaggagaaggacaucauggaccuguacaaccagccggagcccgugaaguccuuccucuucuaccacagccaguccgggcggaacagcaccuucgaguccgucgccuuccccggcugguucaucgccgugagcuccgagggcgggugcccccugauccugacgcaggagcucggcaaggccaacaccaccgacuucgggcugaccaugcuguucuga

SEQ ID NO: 8699 - RNA, 477 nt, Artificial Sequence
  derived and/or modified sequence opt2 from IL-1__Homo_sapiens__AAF25211
auggagaaggcccucaagaucgacaccccccagcagggcuccauccaggacaucaaccaccgcgucuggguccuccaggaccagacccucaucgccgucccccgcaaggaccgcaugucccccgucaccaucgcccucaucuccugccgccacgucgagacccucgagaaggaccgcggcaaccccaucuaccucggccucaacggccucaaccucugccucaugugcgccaaggucggcgaccagcccacccuccagcucaaggagaaggacaucauggaccucuacaaccagcccgagcccgucaaguccuuccucuucuaccacucccaguccggccgcaacuccaccuucgaguccgucgccuuccccggcugguucaucgccgucuccuccgagggcggcugcccccucauccucacccaggagcucggcaaggccaacaccaccgacuucggccucaccaugcucuucuga

SEQ ID NO: 8700 - RNA, 477 nt, Artificial Sequence
  derived and/or modified sequence opt3 from IL-1__Homo_sapiens__AAF25211
auggagaaggcccugaaaaucgacacaccccagcaaggcagcauucaggauauaaaccacagaguguggguccuccaggaccagacccuuaucgcuguuccuaggaaggaucggauguccccagugacuauugcacugaucucuugccgccauguagaaacguuggagaaagaccgagggaauccgauuuacuuaggacugaacggucuaaaucucugucugaugugcgccaaggugggcgaucaacccacccuucagcugaaagaaaaggacaucauggauuuguauaaccagccugagccagucaagucauuccucuuuuaccacagucagagcgggcguaauuccacauucgaaucuguggcguuucccggaugguucauagcuguuucgucagagggcgguuguccucugauccugacucaagagcucgggaaagccaacaccacagacuuuggauuaaccaugcuguucuga

SEQ ID NO: 8701 - RNA, 477 nt, Artificial Sequence
  derived and/or modified sequence opt4 from IL-1__Homo_sapiens__AAF25211
auggagaaggcccugaagaucgacaccccccagcagggcagcauccaggacaucaaccacagagugugggugcugcaggaccagacccugaucgccgugcccagaaaggacagaaugagccccgugaccaucgcccugaucagcugcagacacguggagacccuggagaaggacagaggcaaccccaucuaccugggccugaacggccugaaccugugccugaugugcgccaaggugggcgaccagcccacccugcagcugaaggagaaggacaucauggaccuguacaaccagcccgagcccgugaagagcuuccuguucuaccacagccagagcggcagaaacagcaccuucgagagcguggccuuccccggcugguucaucgccgugagcagcgagggcggcugcccccugauccugacccaggagcugggcaaggccaacaccaccgacuucggccugaccaugcuguucuga

SEQ ID NO: 8702 - RNA, 477 nt, Artificial Sequence
  derived and/or modified sequence opt5 from IL-1__Homo_sapiens__AAF25211
auggagaaggcccugaaaaucgacacaccccagcaaggcagcauucaggauaucaaccacagaguguggguccuccaggaccagacccugauugcuguuccucggaaggaucgcauguccccggugacgaucgcccuuauuucuugcagacauguggagacccuggagaaagaccgggggaaucccaucuaccucggacugaacggccuuaaucugugucucaugugcgcgaaggucggggaucaaccuacacugcagcugaaagaaaaggacaucauggaucucuauaaccagcccgagccuguuaagagcuuccuguuuuaccacucccagucuggacgcaauagcaccuucgaauccguggcuuuucccggcugguucauugccgugucuagcgaagggggauguccucuuauccugacacaagagcucggcaaagccaacaccacagacuuuggccugaccaugcuuuucuga

SEQ ID NO: 8703 - protein, 569 aa, Artificial Sequence
  IL-1R1__Homo_sapiens__P14778
MKVLLRLICFIALLISSLEADKCKEREEKIILVSSANEIDVRPCPLNPNEHKGTITWYKDDSKTPVSTEQASRIHQHKEKLWFVPAKVEDSGHYYCVVRNSSYCLRIKISAKFVENEPNLCYNAQAIFKQKLPVAGDGGLVCPYMEFFKNENNELPKLQWYKDCKPLLLDNIHFSGVKDRLIVMNVAEKHRGNYTCHASYTYLGKQYPITRVIEFITLEENKPTRPVIVSPANETMEVDLGSQIQLICNVTGQLSDIAYWKWNGSVIDEDDPVLGEDYYSVENPANKRRSTLITVLNISEIESRFYKHPFTCFAKNTHGIDAAYIQLIYPVTNFQKHMIGICVTLTVIIVCSVFIYKIFKIDIVLWYRDSCYDFLPIKASDGKTYDAYILYPKTVGEGSTSDCDIFVFKVLPEVLEKQCGYKLFIYGRDDYVGEDIVEVINENVKKSRRLIIILVRETSGFSWLGGSSEEQIAMYNALVQDGIKVVLLELEKIQDYEKMPESIKFIKQKHGAIRWSGDFTQGPQSAKTRFWKNVRYHMPVQRRSPSSKHQLLSPATKEKLQREAHVPLG

SEQ ID NO: 8704 - RNA, 1710 nt, Artificial Sequence
  IL-1R1__Homo_sapiens__AAA59137
augaaaguguuacucagacuuauuuguuucauagcucuacugauuucuucucuggaggcugauaaaugcaaggaacgugaagaaaaaauaauuuuagugucaucugcaaaugaaauugauguucgucccuguccucuuaacccaaaugaacacaaaggcacuauaacuugguauaaagaugacagcaagacaccuguaucuacagaacaagccuccaggauucaucaacacaaagagaaacuuugguuuguuccugcuaagguggaggauucaggacauuacuauugcgugguaagaaauucaucuuacugccucagaauuaaaauaagugcaaaauuuguggagaaugagccuaacuuauguuauaaugcacaagccauauuuaagcagaaacuacccguugcaggagacggaggacuugugugcccuuauauggaguuuuuuaaaaaugaaaauaaugaguuaccuaaauuacagugguauaaggauugcaaaccucuacuucuugacaauauacacuuuaguggagucaaagauaggcucaucgugaugaauguggcugaaaagcauagagggaacuauacuugucaugcauccuacacauacuugggcaagcaauauccuauuacccggguaauagaauuuauuacucuagaggaaaacaaacccacaaggccugugauugugagcccagcuaaugagacaauggaaguagacuugggaucccagauacaauugaucuguaaugucaccggccaguugagugacauugcuuacuggaaguggaaugggucaguaauugaugaagaugacccagugcuaggggaagacuauuacaguguggaaaauccugcaaacaaaagaaggaguacccucaucacagugcuuaauauaucggaaauugaaaguagauuuuauaaacauccauuuaccuguuuugccaagaauacacaugguauagaugcagcauauauccaguuaauauauccagucacuaauuuccagaagcacaugauugguauaugugucacguugacagucauaauuguguguucuguuuucaucuauaaaaucuucaagauugacauugugcuuugguacagggauuccugcuaugauuuucucccaauaaaagcuucagauggaaagaccuaugacgcauauauacuguauccaaagacuguuggggaagggucuaccucugacugugauauuuuuguguuuaaagucuugccugaggucuuggaaaaacaguguggauauaagcuguucauuuauggaagggaugacuacguuggggaagacauuguugaggucauuaaugaaaacguaaagaaaagcagaagacugauuaucauuuuagucagagaaacaucaggcuucagcuggcugggugguucaucugaagagcaaauagccauguauaaugcucuuguucaggauggaauuaaaguuguccugcuugagcuggagaaaauccaagacuaugagaaaaugccagaaucgauuaaauucauuaagcagaaacauggggcuauccgcuggucaggggacuuuacacagggaccacagucugcaaagacaagguucuggaagaaugucagguaccacaugccaguccagcgacggucaccuucaucuaaacaccaguuacugucaccagccacuaaggagaaacugcaaagagaggcucacgugccucucggguag

SEQ ID NO: 8705 - RNA, 1710 nt, Artificial Sequence
  derived and/or modified sequence opt1 from IL-1R1__Homo_sapiens__AAA59137
augaaggugcugcuccgccugaucugcuucaucgcccugcucaucagcucccuggaggccgacaagugcaaggagcgggaggagaagaucauccuggucagcuccgcgaacgagaucgacgugcgccccugcccgcucaaccccaacgagcacaagggcaccaucaccugguacaaggacgacagcaagacgcccguguccaccgagcaggccagccggauccaccagcacaaggagaagcugugguucguccccgccaagguggaggacuccgggcacuacuacugcgugguccgcaacagcuccuacugccugcggaucaagaucagcgccaaguucguggagaacgagccgaaccucugcuacaacgcccaggcgaucuucaagcagaagcugcccguggccggcgacgggggccuggucugccccuacauggaguucuucaagaacgagaacaacgagcuccccaagcugcagugguacaaggacugcaagccgcugcuccuggacaacauccacuucuccggggugaaggaccgccugaucgugaugaacgucgccgagaagcaccggggcaacuacacgugccacgccagcuacaccuaccucggcaagcaguaccccaucacccgcgugaucgaguucaucacccuggaggagaacaagcccacccggcccgugaucgucuccccggcgaacgagaccauggagguggaccuggggagccagauccagcucaucugcaacgugacgggccagcuguccgacaucgccuacuggaaguggaacgggagcgucaucgacgaggacgaccccgugcugggcgaggacuacuacuccguggagaaccccgccaacaagcgccggagcacccucaucaccguccugaacaucuccgagaucgagagccgcuucuacaagcaccccuucacgugcuucgccaagaacacccacgggaucgacgccgcguacauccagcugaucuacccggugaccaacuuccagaagcacaugaucggcaucugcgugacccucaccgucaucaucgugugcagcgucuucaucuacaagaucuucaagaucgacaucgugcugugguaccgggacuccugcuacgacuuccugcccaucaaggccagcgacggcaagacguacgacgccuacauccucuaccccaagaccgugggggagggcuccaccagcgacugcgacaucuucgucuucaaggugcugcccgaggugcuggagaagcagugcggguacaagcuguucaucuacggccgcgacgacuacgucggcgaggacaucguggaggugaucaacgagaacgucaagaagucccggcgccucaucaucauccuggugcgggagaccagcggguucuccuggcucggcgggagcuccgaggagcagaucgccauguacaacgcccuggugcaggacggcaucaaggucgugcugcucgagcuggagaagauccaggacuacgagaagaugccggagagcaucaaguucaucaagcagaagcacggggcgauccgcugguccggcgacuucacgcagggcccccagagcgccaagacccgguucuggaagaacgugcgcuaccacaugcccguccagcggcgcucccccagcuccaagcaccagcugcucagcccggccaccaaggagaagcugcagcgcgaggcccacgugccccugggguga

SEQ ID NO: 8706 - RNA, 1710 nt, Artificial Sequence
  derived and/or modified sequence opt2 from IL-1R1__Homo_sapiens__AAA59137
augaagguccuccuccgccucaucugcuucaucgcccuccucaucuccucccucgaggccgacaagugcaaggagcgcgaggagaagaucauccucgucuccuccgccaacgagaucgacguccgccccugcccccucaaccccaacgagcacaagggcaccaucaccugguacaaggacgacuccaagacccccgucuccaccgagcaggccucccgcauccaccagcacaaggagaagcucugguucguccccgccaaggucgaggacuccggccacuacuacugcgucguccgcaacuccuccuacugccuccgcaucaagaucuccgccaaguucgucgagaacgagcccaaccucugcuacaacgcccaggccaucuucaagcagaagcuccccgucgccggcgacggcggccucgucugccccuacauggaguucuucaagaacgagaacaacgagcuccccaagcuccagugguacaaggacugcaagccccuccuccucgacaacauccacuucuccggcgucaaggaccgccucaucgucaugaacgucgccgagaagcaccgcggcaacuacaccugccacgccuccuacaccuaccucggcaagcaguaccccaucacccgcgucaucgaguucaucacccucgaggagaacaagcccacccgccccgucaucgucucccccgccaacgagaccauggaggucgaccucggcucccagauccagcucaucugcaacgucaccggccagcucuccgacaucgccuacuggaaguggaacggcuccgucaucgacgaggacgaccccguccucggcgaggacuacuacuccgucgagaaccccgccaacaagcgccgcuccacccucaucaccguccucaacaucuccgagaucgagucccgcuucuacaagcaccccuucaccugcuucgccaagaacacccacggcaucgacgccgccuacauccagcucaucuaccccgucaccaacuuccagaagcacaugaucggcaucugcgucacccucaccgucaucaucgucugcuccgucuucaucuacaagaucuucaagaucgacaucguccucugguaccgcgacuccugcuacgacuuccuccccaucaaggccuccgacggcaagaccuacgacgccuacauccucuaccccaagaccgucggcgagggcuccaccuccgacugcgacaucuucgucuucaagguccuccccgagguccucgagaagcagugcggcuacaagcucuucaucuacggccgcgacgacuacgucggcgaggacaucgucgaggucaucaacgagaacgucaagaagucccgccgccucaucaucauccucguccgcgagaccuccggcuucuccuggcucggcggcuccuccgaggagcagaucgccauguacaacgcccucguccaggacggcaucaaggucguccuccucgagcucgagaagauccaggacuacgagaagaugcccgaguccaucaaguucaucaagcagaagcacggcgccauccgcugguccggcgacuucacccagggcccccaguccgccaagacccgcuucuggaagaacguccgcuaccacaugcccguccagcgccgcucccccuccuccaagcaccagcuccucucccccgccaccaaggagaagcuccagcgcgaggcccacgucccccucggcuga

SEQ ID NO: 8707 - RNA, 1710 nt, Artificial Sequence
  derived and/or modified sequence opt3 from IL-1R1__Homo_sapiens__AAA59137
augaaggugcugcucagacuuaucugcuucauugcccuguugauaagcuccuuagaggcugacaaauguaaggaaagggaggagaaaaucauucuggucucuucagcaaacgaaaucgauguucggcccugcccucuaaauccaaacgaacacaagggcaccauuacaugguacaaagacgauaguaagacuccggugagcacggagcaggccucccgcauccaucaacacaaggagaaacucugguuuguacccgcgaagguggaagacucugggcauuauuacugugucgugcgaaauucgucauauugccugcguauaaaaaucagcgcuaaguucguugagaacgaaccuaaucuuuguuacaacgcccaggcaauuuuuaaacagaagcugccaguggccggagaugguggcuuggucugccccuauauggaguucuuuaagaaugagaacaaugaacucccuaaacugcagugguacaaggacuguaaaccacugcucuuagauaacauccacuucaguggggugaaggacagacugauuguaaugaauguugcugagaaacauaggggaaacuauaccugccacgcauccuacacauaccuuggcaagcaauaucccaucacucgggugauagaauuuauuaccuuggaggaaaauaaaccuacacgcccagucaucgugucuccggccaacgagaccauggagguggaucuggguagccagauucagcuaaucuguaaugucacugggcagcucuccgacaucgcuuacuggaaguggaacggaucaguuauugaugaagacgaucccgugcugggcgaggacuauuacaguguagaaaacccugccaauaagagaaggagcacacuuauaaccgugcugaacaucucugagauugaaucccgguucuauaaacacccauuuacgugcuucgcgaagaauacucauggcaucgacgcagccuacauacaauugauuuaucccgucaccaacuuucagaaacacaugaucgggaucugugugacacucacuguuauuaucgugugcucagucuucauuuacaagauauuuaaaaucgauauugugcugugguaccgcgacagcugcuaugauuucuuaccuaucaaggcuagugacggaaagaccuacgaugccuauauccuguacccaaaaacaguaggugagggcucuaccuccgacugugauauuuucguuuuuaaggugcuccccgagguccuugaaaaacagugcggguauaagcuguucauauacggacgagacgauuaugugggcgaggacaucgucgaagugauuaaugagaacguuaaaaagagcagaagguugaucauuauccuagugcgggaaacgucggguuuuucuuggcucgggggauccucagaggagcagauagcaauguacaaugcucugguacaagauggcaucaaggucgugcugcuugaacuggagaaaauucaggacuacgaaaagaugccggagaguaucaaauucauuaagcagaaacauggcgccauccguuggagcggggacuuuacucaaggaccucaguccgcgaagacacgcuucuggaagaacguuagauaucacaugcccgugcagaggcggucuccaagcucaaaacaccaguugcucaguccugccaccaaggagaaacugcaacgagaagcacauguccccuuagguuga

SEQ ID NO: 8708 - RNA, 1710 nt, Artificial Sequence
  derived and/or modified sequence opt4 from IL-1R1__Homo_sapiens__AAA59137
augaaggugcugcugagacugaucugcuucaucgcccugcugaucagcagccuggaggccgacaagugcaaggagagagaggagaagaucauccuggugagcagcgccaacgagaucgacgugagacccugcccccugaaccccaacgagcacaagggcaccaucaccugguacaaggacgacagcaagacccccgugagcaccgagcaggccagcagaauccaccagcacaaggagaagcugugguucgugcccgccaagguggaggacagcggccacuacuacugcguggugagaaacagcagcuacugccugagaaucaagaucagcgccaaguucguggagaacgagcccaaccugugcuacaacgcccaggccaucuucaagcagaagcugcccguggccggcgacggcggccuggugugccccuacauggaguucuucaagaacgagaacaacgagcugcccaagcugcagugguacaaggacugcaagccccugcugcuggacaacauccacuucagcggcgugaaggacagacugaucgugaugaacguggccgagaagcacagaggcaacuacaccugccacgccagcuacaccuaccugggcaagcaguaccccaucaccagagugaucgaguucaucacccuggaggagaacaagcccaccagacccgugaucgugagccccgccaacgagaccauggagguggaccugggcagccagauccagcugaucugcaacgugaccggccagcugagcgacaucgccuacuggaaguggaacggcagcgugaucgacgaggacgaccccgugcugggcgaggacuacuacagcguggagaaccccgccaacaagagaagaagcacccugaucaccgugcugaacaucagcgagaucgagagcagauucuacaagcaccccuucaccugcuucgccaagaacacccacggcaucgacgccgccuacauccagcugaucuaccccgugaccaacuuccagaagcacaugaucggcaucugcgugacccugaccgugaucaucgugugcagcguguucaucuacaagaucuucaagaucgacaucgugcugugguacagagacagcugcuacgacuuccugcccaucaaggccagcgacggcaagaccuacgacgccuacauccuguaccccaagaccgugggcgagggcagcaccagcgacugcgacaucuucguguucaaggugcugcccgaggugcuggagaagcagugcggcuacaagcuguucaucuacggcagagacgacuacgugggcgaggacaucguggaggugaucaacgagaacgugaagaagagcagaagacugaucaucauccuggugagagagaccagcggcuucagcuggcugggcggcagcagcgaggagcagaucgccauguacaacgcccuggugcaggacggcaucaagguggugcugcuggagcuggagaagauccaggacuacgagaagaugcccgagagcaucaaguucaucaagcagaagcacggcgccaucagauggagcggcgacuucacccagggcccccagagcgccaagaccagauucuggaagaacgugagauaccacaugcccgugcagagaagaagccccagcagcaagcaccagcugcugagccccgccaccaaggagaagcugcagagagaggcccacgugccccugggcuga

SEQ ID NO: 8709 - RNA, 1710 nt, Artificial Sequence
  derived and/or modified sequence opt5 from IL-1R1__Homo_sapiens__AAA59137
augaaggugcugcucagacugaucugcuucauugcccuucugaucagcucccucgaggcugacaaauguaaggaacgggaggaaaagauuauccuggucucuagcgccaacgagauugauguucgccccugcccucuuaauccgaacgaacacaagggcaccaucacaugguacaaagacgauuccaagacgcccgugucuaccgagcaggcgagcagaauccaucaacacaaggagaaacugugguuugugccugcuaaggucgaagacuccgggcauuauuacugugugguucgcaauucuagcuauugccuccggauuaaaaucuccgccaaguucguggagaacgaacccaaucuguguuacaacgcccaggcuauuuuuaaacagaagcugccugucgccggagauggcgggcucgugugccccuauauggaguucuuuaagaaugagaacaaugaacugccuaaacuucagugguacaaggacuguaaaccgcugcuccuggauaacauccacuucagcggaguuaaggacagacuuauugugaugaaugucgcugagaaacaucggggcaacuauacaugccacgccucuuacaccuaccuggggaagcaauaucccaucacacgcgugauugaauuuaucacccucgaggaaaauaaaccuacaagacccgugaucgucuccccugcgaacgagaccauggagguugaucugggaagccagauucagcugaucuguaaugugacgggccagcucucugacauugccuacuggaaguggaacggcuccgugaucgaugaagacgaucccguccugggggaggacuauuacagcguggaaaacccggcuaauaagcggcgcucuacccuuauuacaguucugaacaucuccgagaucgaaagcagauucuauaaacacccuuuuaccugcuucgccaagaauacacauggaauugacgcugccuacauccaacucauuuaucccgugaccaacuuucagaaacacaugaucggcauuugugucacgcugacagugaucaucguuugcuccguguucauuuacaagaucuuuaaaauugauaucguccuuugguaccgggacucuugcuaugauuuccugccuauuaaggcgagcgacgggaagaccuacgaugccuauauccucuaccccaaaacagugggagagggcuccaccagcgacugugauauuuucgucuuuaaggugcugcccgagguucuggaaaaacagugcggguauaaacucuucaucuacggacgcgacgauuaugugggcgaggacaucgucgaagugauuaaugagaacguuaaaaagucuagacggcugaucauuauccuugugcgcgaaaccuccggcuuuagcuggcucgggggaucuagcgaggagcagauugcuauguacaaugcccugguccaagauggcaucaagguggugcugcuugaacuggagaaaauccaggacuacgaaaagaugccugaguccauuaaauucaucaagcagaaacauggggcuauuagauggucuggagacuuuacacaaggcccgcagagcgccaagacgcgguucuggaagaacguuagauaucacaugcccguccagcgccgguccccuagcucuaaacaccagcuccugucccccgccaccaaggagaaacugcaaagagaagcucaugugccucucggguga

SEQ ID NO: 8710 - protein, 569 aa, Artificial Sequence [sequence omitted]

SEQ ID NO: 8711 - RNA, 1710 nt, Artificial Sequence
  IL-1R1__Homo_sapiens__AAH67508
augaaaguguuacucagacuuauuuguuucauagcucuacugauuucuucucuggaggcugauaaaugcaaggaacgugaagaaaaaauaauuuuagugucaucugcaaaugaaauugauguucgucccuguccucuuaacccaaaugaacacaaaggcacuauaacuugguauaaagaugacagcaagacaccuguaucuacagaacaagccuccaggauucaucaacacaaagagaaacuuugguuuguuccugcuaagguggaggauucaggacauuacuauugcgugguaagaaauucaucuuacugccucagaauuaaaauaagugcaaaauuuguggagaaugagccuaacuuauguuauaaugcacaagccauauuuaagcagaaccuacccguugcaggagacggaggacuugugugcccuuauauggaguuuuuuaaaaaugaaaauaaugaguuaccuaaauuacagugguauaaggauugcaaaccucuacuucuugacaauauacacuuuaguggagucaaagauaggcucaucgugaugaauguggcugaaaagcauagagggaacuauacuugucaugcauccuacacauacuugggcaagcaauauccuauuacccggguaauagaauuuauuacucuagaggaaaacaaacccacaaggccugugauugugagcccagcuaaugagacaauggaaguagacuugggaucccagauacaauugaucuguaaugucaccggccaguugagugacauugcuuacuggaaguggaaugggucaguaauugaugaagaugacccagugcuaggggaagacuauuacaguguggaaaauccugcaaacaaaagaaggaguacccucaucacagugcuuaauauaucggaaauugaaaguagauuuuauaaacauccauuuaccuguuuugccaagaauacacaugguauagaugcagcauauauccaguuaauauauccagucacuaauuuccagaagcacaugauugguauaugugucacguugacagucauaauuguguguucuguuuucaucuauaaaaucuucaagauugacauugugcuuugguacagggauuccugcuaugauuuucucccaauaaaagcuucagauggaaagaccuaugacgcauauauacuguauccaaagacuguuggggaagggucuaccucugacugugauauuuuuguguuuaaagucuugccugaggucuuggaaaaacaguguggauauaagcuguucauuuauggaagggaugacuacguuggggaagacauuguugaggucauuaaugaaaacguaaagaaaagcagaagacugauuaucauuuuagucagagaaacaucaagcuucagcuggcugggugguucaucugaagagcaaauagccauguauaaugcucuuguucaggauggaauuaaaguuguccugcuugagcuggagaaaauccaagacuaugagaaaaugccagaaucgauuaaauucauuaagcagaaacauggggcuauccgcuggucaggggacuuuacacagggaccacagucugcaaagacaagguucuggaagaaugucagguaccacaugccaguccagcgacggucaccuucaucuaaacaccaguuacugucaccagccacuaaggagaaacugcaaagagaggcucacgugccucucggguag

SEQ ID NO: 8712 - RNA, 1710 nt, Artificial Sequence
  derived and/or modified sequence opt1 from IL-1R1__Homo_sapiens__AAH67508
augaaggugcugcuccgccugaucugcuucaucgcccugcucaucagcucccuggaggccgacaagugcaaggagcgggaggagaagaucauccuggucagcuccgcgaacgagaucgacgugcgccccugcccgcucaaccccaacgagcacaagggcaccaucaccugguacaaggacgacagcaagacgcccguguccaccgagcaggccagccggauccaccagcacaaggagaagcugugguucguccccgccaagguggaggacuccgggcacuacuacugcgugguccgcaacagcuccuacugccugcggaucaagaucagcgccaaguucguggagaacgagccgaaccucugcuacaacgcccaggcgaucuucaagcagaaccugcccguggccggcgacgggggccuggucugccccuacauggaguucuucaagaacgagaacaacgagcuccccaagcugcagugguacaaggacugcaagccgcugcuccuggacaacauccacuucuccggggugaaggaccgccugaucgugaugaacgucgccgagaagcaccggggcaacuacacgugccacgccagcuacaccuaccucggcaagcaguaccccaucacccgcgugaucgaguucaucacccuggaggagaacaagcccacccggcccgugaucgucuccccggcgaacgagaccauggagguggaccuggggagccagauccagcucaucugcaacgugacgggccagcuguccgacaucgccuacuggaaguggaacgggagcgucaucgacgaggacgaccccgugcugggcgaggacuacuacuccguggagaaccccgccaacaagcgccggagcacccucaucaccguccugaacaucuccgagaucgagagccgcuucuacaagcaccccuucacgugcuucgccaagaacacccacgggaucgacgccgcguacauccagcugaucuacccggugaccaacuuccagaagcacaugaucggcaucugcgugacccucaccgucaucaucgugugcagcgucuucaucuacaagaucuucaagaucgacaucgugcugugguaccgggacuccugcuacgacuuccugcccaucaaggccagcgacggcaagacguacgacgccuacauccucuaccccaagaccgugggggagggcuccaccagcgacugcgacaucuucgucuucaaggugcugcccgaggugcuggagaagcagugcggguacaagcuguucaucuacggccgcgacgacuacgucggcgaggacaucguggaggugaucaacgagaacgucaagaagucccggcgccucaucaucauccuggugcgggagaccagcuccuucagcuggcucgggggcuccagcgaggagcagaucgccauguacaacgcccuggugcaggacgggaucaaggucgugcugcucgagcuggagaagauccaggacuacgagaagaugccggaguccaucaaguucaucaagcagaagcacggcgcgauccgcuggagcggggacuucacgcagggcccccaguccgccaagacccgguucuggaagaacgugcgcuaccacaugcccguccagcggcgcagccccuccagcaagcaccagcugcucuccccggccaccaaggagaagcugcagcgcgaggcccacgugccccugggcuga

SEQ ID NO: 8713 - RNA, 1710 nt, Artificial Sequence
  derived and/or modified sequence opt2 from IL-1R1__Homo_sapiens__AAH67508
augaagguccuccuccgccucaucugcuucaucgcccuccucaucuccucccucgaggccgacaagugcaaggagcgcgaggagaagaucauccucgucuccuccgccaacgagaucgacguccgccccugcccccucaaccccaacgagcacaagggcaccaucaccugguacaaggacgacuccaagacccccgucuccaccgagcaggccucccgcauccaccagcacaaggagaagcucugguucguccccgccaaggucgaggacuccggccacuacuacugcgucguccgcaacuccuccuacugccuccgcaucaagaucuccgccaaguucgucgagaacgagcccaaccucugcuacaacgcccaggccaucuucaagcagaaccuccccgucgccggcgacggcggccucgucugccccuacauggaguucuucaagaacgagaacaacgagcuccccaagcuccagugguacaaggacugcaagccccuccuccucgacaacauccacuucuccggcgucaaggaccgccucaucgucaugaacgucgccgagaagcaccgcggcaacuacaccugccacgccuccuacaccuaccucggcaagcaguaccccaucacccgcgucaucgaguucaucacccucgaggagaacaagcccacccgccccgucaucgucucccccgccaacgagaccauggaggucgaccucggcucccagauccagcucaucugcaacgucaccggccagcucuccgacaucgccuacuggaaguggaacggcuccgucaucgacgaggacgaccccguccucggcgaggacuacuacuccgucgagaaccccgccaacaagcgccgcuccacccucaucaccguccucaacaucuccgagaucgagucccgcuucuacaagcaccccuucaccugcuucgccaagaacacccacggcaucgacgccgccuacauccagcucaucuaccccgucaccaacuuccagaagcacaugaucggcaucugcgucacccucaccgucaucaucgucugcuccgucuucaucuacaagaucuucaagaucgacaucguccucugguaccgcgacuccugcuacgacuuccuccccaucaaggccuccgacggcaagaccuacgacgccuacauccucuaccccaagaccgucggcgagggcuccaccuccgacugcgacaucuucgucuucaagguccuccccgagguccucgagaagcagugcggcuacaagcucuucaucuacggccgcgacgacuacgucggcgaggacaucgucgaggucaucaacgagaacgucaagaagucccgccgccucaucaucauccucguccgcgagaccuccuccuucuccuggcucggcggcuccuccgaggagcagaucgccauguacaacgcccucguccaggacggcaucaaggucguccuccucgagcucgagaagauccaggacuacgagaagaugcccgaguccaucaaguucaucaagcagaagcacggcgccauccgcugguccggcgacuucacccagggcccccaguccgccaagacccgcuucuggaagaacguccgcuaccacaugcccguccagcgccgcucccccuccuccaagcaccagcuccucucccccgccaccaaggagaagcuccagcgcgaggcccacgucccccucggcuga

SEQ ID NO: 8714 - RNA, 1710 nt, Artificial Sequence
  derived and/or modified sequence opt3 from IL-1R1__Homo_sapiens__AAH67508
augaaggugcugcucagacuuaucugcuucauugcccuguugauaagcuccuuagaggcugacaaauguaaggaaagggaggagaaaaucauucuggucucuucagcaaacgaaaucgauguucggcccugcccucuaaauccaaacgaacacaagggcaccauuacaugguacaaagacgauaguaagacuccggugagcacggagcaggccucccgcauccaucaacacaaggagaaacucugguuuguacccgcgaagguggaagacucugggcauuauuacugugucgugcgaaauucgucauauugccugcguauaaaaaucagcgcuaaguucguugagaacgaaccuaaucuuuguuacaacgcccaggcaauuuuuaaacagaaucugccaguggccggagaugguggcuuggucugccccuauauggaguucuuuaagaacgagaauaacgaacucccuaagcugcagugguacaaagacuguaagccacugcucuuagauaauauccacuucaguggggugaaagacagacugauuguaaugaacguugcugagaagcauaggggaaauuauaccugccacgcauccuacacauaccuuggcaaacaauaucccaucacucgggugauagaauuuauuaccuuggaggaaaacaagccuacacgcccagucaucgugucuccggccaaugagaccauggagguggaucuggguagccagauucagcuaaucuguaacgucacugggcagcucuccgacaucgcuuacuggaaauggaacggaucaguuauugaugaagacgaucccgugcugggcgaggacuauuacaguguagaaaauccugccaacaagagaaggagcacacuuauaaccgugcugaauaucucugagauugaaucccgguucuauaagcacccauuuacgugcuucgcgaaaaacacucauggcaucgacgcagccuacauacaauugauuuaucccgucaccaauuuucagaagcacaugaucgggaucugugugacacucacuguuauuaucgugugcucagucuucauuuacaaaauauuuaagaucgauauugugcugugguaccgcgacagcugcuaugauuucuuaccuaucaaagcuagugacggaaagaccuacgaugccuauauccuguacccaaagacaguaggugagggcucuaccuccgacugugauauuuucguuuuuaaagugcuccccgagguccuugaaaagcagugcggguauaaacuguucauauacggacgagacgauuaugugggcgaggacaucgucgaagugauuaacgagaauguuaagaaaagcagaagguugaucauuauccuagugcgggaaacgucgucuuuuuccuggcugggugggucaagugaggagcagauagcaauguacaacgcucucguacaagauggaaucaaggucgugcugcuugaacuggagaagauucaggacuacgagaaaaugccggaaagcaucaaguucauuaaacagaagcauggcgccauccguugguccggcgacuuuacucaagggccucagucugcgaaaacacgcuucuggaagaauguuagauaucacaugcccgugcagaggcggagcccaucaaguaagcaccaguugcucuccccugccaccaaagagaagcugcaacgagaagcacauguccccuuaggauga

SEQ ID NO: 8715 - RNA, 1710 nt, Artificial Sequence
  derived and/or modified sequence opt4 from IL-1R1__Homo_sapiens__AAH67508
augaaggugcugcugagacugaucugcuucaucgcccugcugaucagcagccuggaggccgacaagugcaaggagagagaggagaagaucauccuggugagcagcgccaacgagaucgacgugagacccugcccccugaaccccaacgagcacaagggcaccaucaccugguacaaggacgacagcaagacccccgugagcaccgagcaggccagcagaauccaccagcacaaggagaagcugugguucgugcccgccaagguggaggacagcggccacuacuacugcguggugagaaacagcagcuacugccugagaaucaagaucagcgccaaguucguggagaacgagcccaaccugugcuacaacgcccaggccaucuucaagcagaaccugcccguggccggcgacggcggccuggugugccccuacauggaguucuucaagaacgagaacaacgagcugcccaagcugcagugguacaaggacugcaagccccugcugcuggacaacauccacuucagcggcgugaaggacagacugaucgugaugaacguggccgagaagcacagaggcaacuacaccugccacgccagcuacaccuaccugggcaagcaguaccccaucaccagagugaucgaguucaucacccuggaggagaacaagcccaccagacccgugaucgugagccccgccaacgagaccauggagguggaccugggcagccagauccagcugaucugcaacgugaccggccagcugagcgacaucgccuacuggaaguggaacggcagcgugaucgacgaggacgaccccgugcugggcgaggacuacuacagcguggagaaccccgccaacaagagaagaagcacccugaucaccgugcugaacaucagcgagaucgagagcagauucuacaagcaccccuucaccugcuucgccaagaacacccacggcaucgacgccgccuacauccagcugaucuaccccgugaccaacuuccagaagcacaugaucggcaucugcgugacccugaccgugaucaucgugugcagcguguucaucuacaagaucuucaagaucgacaucgugcugugguacagagacagcugcuacgacuuccugcccaucaaggccagcgacggcaagaccuacgacgccuacauccuguaccccaagaccgugggcgagggcagcaccagcgacugcgacaucuucguguucaaggugcugcccgaggugcuggagaagcagugcggcuacaagcuguucaucuacggcagagacgacuacgugggcgaggacaucguggaggugaucaacgagaacgugaagaagagcagaagacugaucaucauccuggugagagagaccagcagcuucagcuggcugggcggcagcagcgaggagcagaucgccauguacaacgcccuggugcaggacggcaucaagguggugcugcuggagcuggagaagauccaggacuacgagaagaugcccgagagcaucaaguucaucaagcagaagcacggcgccaucagauggagcggcgacuucacccagggcccccagagcgccaagaccagauucuggaagaacgugagauaccacaugcccgugcagagaagaagccccagcagcaagcaccagcugcugagccccgccaccaaggagaagcugcagagagaggcccacgugccccugggcuga

SEQ ID NO: 8716 - RNA, 1710 nt, Artificial Sequence
  derived and/or modified sequence opt5 from IL-1R1__Homo_sapiens__AAH67508
augaaggugcugcucagacugaucugcuucauugcccuucugaucagcucccucgaggcugacaaauguaaggaacgggaggaaaagauuauccuggucucuagcgccaacgagauugauguucgccccugcccucuuaauccgaacgaacacaagggcaccaucacaugguacaaagacgauuccaagacgcccgugucuaccgagcaggcgagcagaauccaucaacacaaggagaaacugugguuugugccugcuaaggucgaagacuccgggcauuauuacugugugguucgcaauucuagcuauugccuccggauuaaaaucuccgccaaguucguggagaacgaacccaaucuguguuacaacgcccaggcuauuuuuaaacagaaucugccugucgccggagauggcgggcucgugugccccuauauggaguucuuuaagaacgagaauaacgaacugccuaaacuucagugguacaaagacuguaagccgcugcuccuggauaauauccacuucagcggaguuaaagacagacuuauugugaugaacgucgcugagaagcaucggggcaauuauacaugccacgccucuuacaccuaccuggggaaacaauaucccaucacacgcgugauugaauuuaucacccucgaggaaaacaagccuacaagacccgugaucgucuccccugcgaaugagaccauggagguugaucugggaagccagauucagcugaucuguaacgugacgggccagcucucugacauugccuacuggaaauggaacggcuccgugaucgaugaagacgaucccguccugggggaggacuauuacagcguggaaaauccggcuaacaagcggcgcucuacccuuauuacaguucugaauaucuccgagaucgaaagcagauucuauaagcacccuuuuaccugcuucgccaaaaacacacauggaauugacgcugccuacauccaacucauuuaucccgugaccaauuuucagaagcacaugaucggcauuugugucacgcugacagugaucaucguuugcuccguguucauuuacaaaaucuuuaagauugauaucguccuuugguaccgggacucuugcuaugauuuccugccuauuaaagcgagcgacgggaagaccuacgaugccuauauccucuaccccaagacagugggagagggcuccaccagcgacugugauauuuucgucuuuaaagugcugcccgagguucuggaaaagcagugcggguauaaacucuucaucuacggacgcgacgauuaugugggcgaggacaucgucgaagugauuaacgagaauguuaagaaaucuagacggcugaucauuauccuugugcgcgaaaccuccagcuuuucuuggcugggcgggagcuccgaggagcagauugcuauguacaacgcccucguccaagauggaaucaagguggugcugcuugaacuggagaagauccaggacuacgagaaaaugccugaaucuauuaaguucaucaaacagaagcauggcgcuauuagauggagcggggacuuuacacaaggaccgcaguccgccaaaacgcgguucuggaagaauguuagauaucacaugcccguccagcgccggagcccuucuuccaagcaccagcuccugagccccgccaccaaagagaagcugcaaagagaagcucaugugccucucggcuga

SEQ ID NO: 8717 - protein, 569 aa, Artificial Sequence [sequence omitted]

SEQ ID NO: 8718 - RNA, 1710 nt, Artificial Sequence
  IL-1R1__Homo_sapiens__AAH67507
augaaaguguuacucagacuuauuuguuucauagcucuacugauuucuucucuggaggcugauaaaugcaaggaacgugaagaaaaaauaauuuuagugucaucugcaaaugaaauugauguucgucccuguccucuuaacccaaaugaacacaaaggcacuauaacuugguauaaagaugacagcaagacaccuguaucuacagaacaagccuccaggauucaucaacacaaagagaaacuuugguuuguuccugcuaagguggaagauucaggacauuacuauugcgugguaagaaauucaucuuacugccucagaauuaaaauaagugcaaaauuuguggagaaugagccuaacuuauguuauaaugcacaagccauauuuaagcagaaacuacccguugcaggagacggaggacuugugugcccuuauauggaguuuuuuaaaaaugaaaauaaugaguuaccuaaauuacagugguauaaggauugcaaaccucuacuucuugacaauauacacuuuaguggagucaaagauaggcucaucgugaugaauguggcugaaaagcauagagggaacuauacucgucaugcauccuacacauacuugggcaagcaauauccuauuacccggguaauagaauuuauuacucuagaggaaaacaaacccacaaggccugugauugugagcccagcuaaugagacaauggaaguagacuugggaucccagauacaauugaucuguaaugucaccggccaguugagugacauugcuuacuggaaguggaaugggucaguaauugaugaagaugacccagugcuaggggaagacuauuacaguguggagaauccugcaaacaaaagaaggaguacccucaucacagugcuuaauauaucggaaauugaaaguagauuuuauaaacauccauuuaccuguuuugccaagaauacacaugguauagaugcagcauauauccaguuaauauauccagucacuaauuuccagaagcacaugauugguauaugugucacguugacagucauaauuguguguucuguuuucaucuauaaaaucuucaagauugacauugugcuuugguacagggauuccugcuaugauuuucucccaauaaaagcuucagauggaaagaccuaugacgcauauauacuguauccaaagacuguuggggaagggucuaccucugacugugauauuuuuguguuuaaagucuugccuggggucuuggaaaaacaguguggauauaagcuguucauuuauggaagggaugacuacguuggggaagacauuguugaggucauuaaugaaaacguaaagaaaagcagaagacugauuaucauuuuagucagagaaacaucaggcuucagcuggcugggugguucaucugaagagcaaauagccauguauaaugcucuuguucaggacggaauuaaaguuguccugcuugagcuggagaaaauccaagacuaugagaaaaugccagaaucgauuaaauucauuaagcagaaacaugggacuauccgcuggucaggggacuuuacacagggaccacagucugcaaagacaagguucuggaagaaugucagauaccacaugccaguccagcgacggucaccuucaucuaaacaccaguuacugucaccagccacuaaggagaaacugcaaagagaggcucacgugccucucggguag

SEQ ID NO: 8719 - RNA, 1710 nt, Artificial Sequence
  derived and/or modified sequence opt1 from IL-1R1__Homo_sapiens__AAH67507
augaaggugcugcuccgccugaucugcuucaucgcccugcucaucagcucccuggaggccgacaagugcaaggagcgggaggagaagaucauccuggucagcuccgcgaacgagaucgacgugcgccccugcccgcucaaccccaacgagcacaagggcaccaucaccugguacaaggacgacagcaagacgcccguguccaccgagcaggccagccggauccaccagcacaaggagaagcugugguucguccccgccaagguggaggacuccgggcacuacuacugcgugguccgcaacagcuccuacugccugcggaucaagaucagcgccaaguucguggagaacgagccgaaccucugcuacaacgcccaggcgaucuucaagcagaagcugcccguggccggcgacgggggccuggucugccccuacauggaguucuucaagaacgagaacaacgagcuccccaagcugcagugguacaaggacugcaagccgcugcuccuggacaacauccacuucuccggggugaaggaccgccugaucgugaugaacgucgccgagaagcaccggggcaacuacacccgccacgccagcuacaccuaccucggcaagcaguaccccaucacgcgggugaucgaguucaucacccuggaggagaacaagcccacccgccccgugaucgucuccccggcgaacgagaccauggagguggaccuggggagccagauccagcucaucugcaacgugacgggccagcuguccgacaucgccuacuggaaguggaacgggagcgucaucgacgaggacgaccccgugcugggcgaggacuacuacuccguggagaaccccgccaacaagcggcgcagcacccucaucaccguccugaacaucuccgagaucgagagccgguucuacaagcaccccuucacgugcuucgccaagaacacccacgggaucgacgccgcguacauccagcugaucuacccggugaccaacuuccagaagcacaugaucggcaucugcgugacccucaccgucaucaucgugugcagcgucuucaucuacaagaucuucaagaucgacaucgugcugugguaccgcgacuccugcuacgacuuccugcccaucaaggccagcgacggcaagacguacgacgccuacauccucuaccccaagaccgugggggagggcuccaccagcgacugcgacaucuucgucuucaaggugcugcccggggugcuggagaagcagugcggcuacaagcuguucaucuacggccgggacgacuacgucggggaggacaucguggaggugaucaacgagaacgucaagaagucccgccggcucaucaucauccuggugcgcgagaccagcggcuucuccuggcucgggggcagcuccgaggagcagaucgccauguacaacgcccuggugcaggacgggaucaaggucgugcugcucgagcuggagaagauccaggacuacgagaagaugccggagagcaucaaguucaucaagcagaagcacggcacgauccggugguccggcgacuucacccaggggccccagagcgcgaagacccgcuucuggaagaacgugcgguaccacaugcccguccagcgccgcucccccagcuccaagcaccagcugcucagcccggccaccaaggagaagcugcagcgggaggcccacgugccccugggcuga

SEQ ID NO: 8720 - RNA, 1710 nt, Artificial Sequence
  derived and/or modified sequence opt2 from IL-1R1__Homo_sapiens__AAH67507
augaagguccuccuccgccucaucugcuucaucgcccuccucaucuccucccucgaggccgacaagugcaaggagcgcgaggagaagaucauccucgucuccuccgccaacgagaucgacguccgccccugcccccucaaccccaacgagcacaagggcaccaucaccugguacaaggacgacuccaagacccccgucuccaccgagcaggccucccgcauccaccagcacaaggagaagcucugguucguccccgccaaggucgaggacuccggccacuacuacugcgucguccgcaacuccuccuacugccuccgcaucaagaucuccgccaaguucgucgagaacgagcccaaccucugcuacaacgcccaggccaucuucaagcagaagcuccccgucgccggcgacggcggccucgucugccccuacauggaguucuucaagaacgagaacaacgagcuccccaagcuccagugguacaaggacugcaagccccuccuccucgacaacauccacuucuccggcgucaaggaccgccucaucgucaugaacgucgccgagaagcaccgcggcaacuacacccgccacgccuccuacaccuaccucggcaagcaguaccccaucacccgcgucaucgaguucaucacccucgaggagaacaagcccacccgccccgucaucgucucccccgccaacgagaccauggaggucgaccucggcucccagauccagcucaucugcaacgucaccggccagcucuccgacaucgccuacuggaaguggaacggcuccgucaucgacgaggacgaccccguccucggcgaggacuacuacuccgucgagaaccccgccaacaagcgccgcuccacccucaucaccguccucaacaucuccgagaucgagucccgcuucuacaagcaccccuucaccugcuucgccaagaacacccacggcaucgacgccgccuacauccagcucaucuaccccgucaccaacuuccagaagcacaugaucggcaucugcgucacccucaccgucaucaucgucugcuccgucuucaucuacaagaucuucaagaucgacaucguccucugguaccgcgacuccugcuacgacuuccuccccaucaaggccuccgacggcaagaccuacgacgccuacauccucuaccccaagaccgucggcgagggcuccaccuccgacugcgacaucuucgucuucaagguccuccccggcguccucgagaagcagugcggcuacaagcucuucaucuacggccgcgacgacuacgucggcgaggacaucgucgaggucaucaacgagaacgucaagaagucccgccgccucaucaucauccucguccgcgagaccuccggcuucuccuggcucggcggcuccuccgaggagcagaucgccauguacaacgcccucguccaggacggcaucaaggucguccuccucgagcucgagaagauccaggacuacgagaagaugcccgaguccaucaaguucaucaagcagaagcacggcaccauccgcugguccggcgacuucacccagggcccccaguccgccaagacccgcuucuggaagaacguccgcuaccacaugcccguccagcgccgcucccccuccuccaagcaccagcuccucucccccgccaccaaggagaagcuccagcgcgaggcccacgucccccucggcuga

SEQ ID NO: 8721 - RNA, 1710 nt, Artificial Sequence
  derived and/or modified sequence opt3 from IL-1R1__Homo_sapiens__AAH67507
augaaggugcugcucagacuuaucugcuucauugcccuguugauaagcuccuuagaggcugacaaauguaaggaaagggaggagaaaaucauucuggucucuucagcaaacgagaucgauguucggcccugcccucuaaauccaaacgaacacaagggcaccauuacaugguacaaagacgauaguaagacuccggugagcacggagcaggccucccgcauccaucaacacaaggagaaacucugguuuguacccgcgaagguggaagacucugggcauuauuacugugucgugcgaaauucgucauauugccugcguauaaaaaucagcgcuaaguucguugagaacgaaccuaaucuuuguuacaacgcccaggcaauuuuuaaacagaagcugccaguggccggagaugguggcuuggucugccccuauauggaguucuuuaagaaugagaacaaugaacucccuaaacugcagugguacaaggacuguaaaccacugcucuuagauaacauccacuucaguggggugaaggacagacugauuguaaugaauguugcugagaaacauaggggaaacuauacccggcacgcauccuacacauaccuuggcaagcaauaucccaucacucgcgugauagaauuuauuaccuuggaggaaaauaaaccuacaagaccagucaucgugucuccggccaacgagaccauggagguggaucuggguagccagauucagcuaaucugcaaugucacugggcagcucuccgacaucgcuuacuggaaguggaacggaucaguuauugaugaagacgaucccgugcugggcgaggacuauuacaguguagaaaacccugccaauaagaggcggagcacacuuauaaccgugcugaacaucucugagauugaaucccgcuucuauaaacacccauuuacguguuucgcgaagaauacucauggcaucgacgcagccuacauacaauugauuuaucccgucaccaacuuucagaaacacaugaucgggaucugcgugacacucacuguuauuaucguguguucagucuucauuuacaagauauuuaaaaucgauauugugcugugguaccgagacagcugcuaugauuucuuaccuaucaaggcuagugacggaaagaccuacgaugccuauauccuguacccaaaaacaguaggugagggcucuaccuccgacugcgauauuuucguuuuuaaggugcuccccgggguccuugagaaacaguguggauauaagcuguucauauacggcagagacgauuaugugggugaagacaucgucgaggugauuaaugaaaacguuaaaaagagcaggcgguugaucauuauccuagugcgugagacgucgggguuuucuuggcugggaggcuccucagaagaacagauagcaauguacaaugcucucguacaagauggcaucaaggucgugcugcuugagcuggagaaaauucaggacuacgaaaagaugccggaaaguaucaaauucauuaagcagaaacaugggacuauccgcuggagcggagacuuuacacaagguccucaguccgccaagaccagauucuggaagaacguuagguaucacaugcccgugcagcggcgaucuccaagcucaaaacaccaguugcucaguccugcgacuaaggagaaacugcaacgcgaggcccauguccccuuaggcuga

SEQ ID NO: 8722 - RNA, 1710 nt, Artificial Sequence
  derived and/or modified sequence opt4 from IL-1R1__Homo_sapiens__AAH67507
augaaggugcugcugagacugaucugcuucaucgcccugcugaucagcagccuggaggccgacaagugcaaggagagagaggagaagaucauccuggugagcagcgccaacgagaucgacgugagacccugcccccugaaccccaacgagcacaagggcaccaucaccugguacaaggacgacagcaagacccccgugagcaccgagcaggccagcagaauccaccagcacaaggagaagcugugguucgugcccgccaagguggaggacagcggccacuacuacugcguggugagaaacagcagcuacugccugagaaucaagaucagcgccaaguucguggagaacgagcccaaccugugcuacaacgcccaggccaucuucaagcagaagcugcccguggccggcgacggcggccuggugugccccuacauggaguucuucaagaacgagaacaacgagcugcccaagcugcagugguacaaggacugcaagccccugcugcuggacaacauccacuucagcggcgugaaggacagacugaucgugaugaacguggccgagaagcacagaggcaacuacaccagacacgccagcuacaccuaccugggcaagcaguaccccaucaccagagugaucgaguucaucacccuggaggagaacaagcccaccagacccgugaucgugagccccgccaacgagaccauggagguggaccugggcagccagauccagcugaucugcaacgugaccggccagcugagcgacaucgccuacuggaaguggaacggcagcgugaucgacgaggacgaccccgugcugggcgaggacuacuacagcguggagaaccccgccaacaagagaagaagcacccugaucaccgugcugaacaucagcgagaucgagagcagauucuacaagcaccccuucaccugcuucgccaagaacacccacggcaucgacgccgccuacauccagcugaucuaccccgugaccaacuuccagaagcacaugaucggcaucugcgugacccugaccgugaucaucgugugcagcguguucaucuacaagaucuucaagaucgacaucgugcugugguacagagacagcugcuacgacuuccugcccaucaaggccagcgacggcaagaccuacgacgccuacauccuguaccccaagaccgugggcgagggcagcaccagcgacugcgacaucuucguguucaaggugcugcccggcgugcuggagaagcagugcggcuacaagcuguucaucuacggcagagacgacuacgugggcgaggacaucguggaggugaucaacgagaacgugaagaagagcagaagacugaucaucauccuggugagagagaccagcggcuucagcuggcugggcggcagcagcgaggagcagaucgccauguacaacgcccuggugcaggacggcaucaagguggugcugcuggagcuggagaagauccaggacuacgagaagaugcccgagagcaucaaguucaucaagcagaagcacggcaccaucagauggagcggcgacuucacccagggcccccagagcgccaagaccagauucuggaagaacgugagauaccacaugcccgugcagagaagaagccccagcagcaagcaccagcugcugagccccgccaccaaggagaagcugcagagagaggcccacgugccccugggcuga

SEQ ID NO: 8723 - RNA, 1710 nt, Artificial Sequence
  derived and/or modified sequence opt5 from IL-1R1__Homo_sapiens__AAH67507
augaaggugcugcucagacugaucugcuucauugcccuucugaucagcucccucgaggcugacaaauguaaggaacgggaggaaaagauuauccuggucucuagcgccaacgagauugauguucgccccugcccucuuaauccgaacgaacacaagggcaccaucacaugguacaaagacgauuccaagacgcccgugucuaccgagcaggcgagcagaauccaucaacacaaggagaaacugugguuugugccugcuaaggucgaagacuccgggcauuauuacugugugguucgcaauucuagcuauugccuccggauuaaaaucuccgccaaguucguggagaacgaacccaaucuguguuacaacgcccaggcuauuuuuaaacagaagcugccugucgccggagauggcgggcucgugugccccuauauggaguucuuuaagaaugagaacaaugaacugccuaaacuucagugguacaaggacuguaaaccgcugcuccuggauaacauccacuucagcggaguuaaggacagacuuauugugaugaaugucgcugagaaacaucggggcaacuauacacgccacgccucuuacaccuaccuggggaagcaauaucccaucacaagagugauugaauuuaucacccucgaggaaaauaaaccuacacggcccgugaucgucuccccugcgaacgagaccauggagguugaucugggaagccagauucagcugaucugcaaugugacgggccagcucucugacauugccuacuggaaguggaacggcuccgugaucgaugaagacgaucccguccugggggaggacuauuacagcguggaaaacccggcuaauaagcgcagaucuacccuuauuacaguucugaacaucuccgagaucgaaagccgguucuauaaacacccuuuuaccuguuucgccaagaauacacauggaauugacgcugccuacauccaacucauuuaucccgugaccaacuuucagaaacacaugaucggcauuugcgucacgcugacagugaucaucguuuguuccguguucauuuacaagaucuuuaaaauugauaucguccuuugguaccgcgacucuugcuaugauuuccugccuauuaaggcgagcgacgggaagaccuacgaugccuauauccucuaccccaaaacagugggagagggcuccaccagcgacugcgauauuuucgucuuuaaggugcugcccgggguucuggagaaacaguguggauauaaacucuucaucuacggcagagacgauuaugugggcgaagacaucgucgaggugauuaaugaaaacguuaaaaagucucggcgccugaucauuauccuugugagagagaccuccggguuuagcuggcugggaggcucuagcgaagaacagauugcuauguacaaugcccucguccaagaugggaucaagguggugcugcuugagcuggagaaaauccaggacuacgagaagaugccugaauccauuaaauucaucaagcagaaacauggaacaauucgguggucuggcgacuuuacgcaagggccgcagagcgcuaagaccagauucuggaagaacguucgcuaucacaugcccguccagcggagauccccuagcucuaaacaccagcuccugucccccgccacaaaggagaaacugcaacgcgaggcccaugugccucucggauga

SEQ ID NO: 8724 - protein, 85 aa, Artificial Sequence
  IRAK1__Homo_sapiens__L8E7M9
MGPWTACSCCRPAPSQAWAWNRTGRGPKKVMNFRADVFTWADPPNPEVKVLMVRSSHGARVLSTLPAVGVGAHARGGEKEVALLF

SEQ ID NO: 8725 - RNA, 258 nt, Artificial Sequence
  IRAK1__Homo_sapiens__CCQ43144
auggggcccuggacagccugcagcugcugucguccagcucccucccaggcuugggccuggaacaggacaggcaggggcccgaagaaagugaugaauuucagagcugauguguucaccugggcagaucccccaaauccggaagucaaaguucucauggucagaaguucucauggugcacgaguccucagcacucugccggcagugggggugggggcccaugcccgcgggggagagaaggagguggcccugcuguucuag

SEQ ID NO: 8726 - RNA, 258 nt, Artificial Sequence
  derived and/or modified sequence opt1 from IRAK1__Homo_sapiens__CCQ43144
augggccccuggaccgccugcagcugcugccgcccggcccccucccaggcgugggccuggaaccggaccgggcgcggccccaagaaggugaugaacuuccgggccgacgucuucacgugggccgacccgcccaaccccgaggugaaggugcugaugguccgcagcucccacggggcccgggugcucagcacccugcccgcggugggcgucggggcccacgcccgcggcggcgagaaggagguggcccuccuguucuga

SEQ ID NO: 8727 - RNA, 258 nt, Artificial Sequence
  derived and/or modified sequence opt2 from IRAK1__Homo_sapiens__CCQ43144
augggccccuggaccgccugcuccugcugccgccccgcccccucccaggccugggccuggaaccgcaccggccgcggccccaagaaggucaugaacuuccgcgccgacgucuucaccugggccgacccccccaaccccgaggucaagguccucaugguccgcuccucccacggcgcccgcguccucuccacccuccccgccgucggcgucggcgcccacgcccgcggcggcgagaaggaggucgcccuccucuucuga

SEQ ID NO: 8728 - RNA, 258 nt, Artificial Sequence
  derived and/or modified sequence opt3 from IRAK1__Homo_sapiens__CCQ43144
augggccccuggaccgccugcagcuguugcagaccugcuccaucccaggcaugggccuggaacaggacagggcggggaccgaagaaagugaugaauuuccgcgcggacgucuuuacuugggcugaucccccuaacccagagguuaaggugcugaugguacgaucuucacacggugcccgugugcucaguacgcuucccgcagucggcgugggggcccaugcuagaggaggcgaaaaagagguugcacuguuguucuga

SEQ ID NO: 8729 - RNA, 258 nt, Artificial Sequence
  derived and/or modified sequence opt4 from IRAK1__Homo_sapiens__CCQ43144
augggccccuggaccgccugcagcugcugcagacccgcccccagccaggccugggccuggaacagaaccggcagaggccccaagaaggugaugaacuucagagccgacguguucaccugggccgacccccccaaccccgaggugaaggugcugauggugagaagcagccacggcgccagagugcugagcacccugcccgccgugggcgugggcgcccacgccagaggcggcgagaaggagguggcccugcuguucuga

SEQ ID NO: 8730 - RNA, 258 nt, Artificial Sequence
  derived and/or modified sequence opt5 from IRAK1__Homo_sapiens__CCQ43144
augggccccuggaccgccugcagcuguugcagaccugcuccgucccaggccugggcguggaaccggacagggcgcggacccaagaaagugaugaauuucagagcugacgucuuuacgugggccgauccucccaacccugagguuaaggugcugauggugcggucuagccacggcgcccgcguccucuccacccugcccgcuguggggguuggagcccaugcuagaggcggggaaaaagagguggcccuucuguucuga

SEQ ID NO: 8731 - protein, 712 aa, Artificial Sequence
  IRAK1__Homo_sapiens__P51617
MAGGPGPGEPAAPGAQHFLYEVPPWVMCRFYKVMDALEPADWCQFAALIVRDQTELRLCERSGQRTASVLWPWINRNARVADLVHILTHLQLLRARDIITAWHPPAPLPSPGTTAPRPSSIPAPAEAEAWSPRKLPSSASTFLSPAFPGSQTHSGPELGLVPSPASLWPPPPSPAPSSTKPGPESSVSLLQGARPFPFCWPLCEISRGTHNFSEELKIGEGGFGCVYRAVMRNTVYAVKRLKENADLEWTAVKQSFLTEVEQLSRFRHPNIVDFAGYCAQNGFYCLVYGFLPNGSLEDRLHCQTQACPPLSWPQRLDILLGTARAIQFLHQDSPSLIHGDIKSSNVLLDERLTPKLGDFGLARFSRFAGSSPSQSSMVARTQTVRGTLAYLPEEYIKTGRLAVDTDTFSFGVVVLETLAGQRAVKTHGARTKYLKDLVEEEAEEAGVALRSTQSTLQAGLAADAWAAPIAMQIYKKHLDPRPGPCPPELGLGLGQLACCCLHRRAKRRPPMTQVYERLEKLQAVVAGVPGHSEAASCIPPSPQENSYVSSTGRAHSGAAPWQPLAAPSGASAQAAEQLQRGPNQPVESDESLGGLSAALRSWHLTPSCPLDPAPLREAGCPQGDTAGESSWGSGPGSRPTAVEGLALGSSASSSSEPPQIIINPARQKMVQKLALYEDGALDSLQLLSSSSLPGLGLEQDRQGPEESDEFQS

SEQ ID NO: 8732 - RNA, 2139 nt, Artificial Sequence
  IRAK1__Homo_sapiens__AAC08756
auggccggggggccgggcccgggggagcccgcagcccccggcgcccagcacuucuuguacgaggugccgcccugggucaugugccgcuucuacaaagugauggacgcccuggagcccgccgacuggugccaguucgccgcccugaucgugcgcgaccagaccgagcugcggcugugcgagcgcuccgggcagcgcacggccagcguccuguggcccuggaucaaccgcaacgcccguguggccgaccucgugcacauccucacgcaccugcagcugcuccgugcgcgggacaucaucacagccuggcacccucccgccccgcuuccguccccaggcaccacugccccgaggcccagcagcaucccugcacccgccgaggccgaggccuggagcccccggaaguugccauccucagccuccaccuuccucuccccagcuuuuccaggcucccagacccauucagggccugagcucggccuggucccaagcccugcuucccuguggccuccaccgccaucuccagccccuucuucuaccaagccaggcccagagagcucagugucccuccugcagggagcccgccccuuuccguuuugcuggccccucugugagauuucccggggcacccacaacuucucggaggagcucaagaucggggaggguggcuuugggugcguguaccgggcggugaugaggaacacgguguaugcugugaagaggcugaaggagaacgcugaccuggaguggacugcagugaagcagagcuuccugaccgagguggagcagcuguccagguuucgucacccaaacauuguggacuuugcuggcuacugugcucagaacggcuucuacugccugguguacggcuuccugcccaacggcucccuggaggaccgucuccacugccagacccaggccugcccaccucucuccuggccucagcgacuggacauccuucuggguacagcccgggcaauucaguuucuacaucaggacagccccagccucauccauggagacaucaagaguuccaacguccuucuggaugagaggcugacacccaagcugggagacuuuggccuggcccgguucagccgcuuugccggguccagccccagccagagcagcaugguggcccggacacagacagugcggggcacccuggccuaccugcccgaggaguacaucaagacgggaaggcuggcuguggacacggacaccuucagcuuuggggugguagugcuagagaccuuggcuggucagagggcugugaagacgcacggugccaggaccaaguaucugaaagaccugguggaagaggaggcugaggaggcuggaguggcuuugagaagcacccagagcacacugcaagcaggucuggcugcagaugccugggcugcucccaucgccaugcagaucuacaagaagcaccuggaccccaggcccgggcccugcccaccugagcugggccugggccugggccagcuggccugcugcugccugcaccgccgggccaaaaggaggccuccuaugacccagguguacgagaggcuagagaagcugcaggcagugguggcgggggugcccgggcauucggaggccgccagcugcauccccccuuccccgcaggagaacuccuacguguccagcacuggcagagcccacaguggggcugcuccauggcagccccuggcagcgccaucaggagccagugcccaggcagcagagcagcugcagagaggccccaaccagcccguggagagugacgagagccuaggcggccucucugcugcccugcgcuccuggcacuugacuccaagcugcccucuggacccagcaccccucagggaggccggcuguccucagggggacacggcaggagaaucgagcugggggaguggcccaggaucccggcccacagccguggaaggacuggcccuuggcagcucugcaucaucgucgucagagccaccgcagauuaucaucaacccugcccgacagaagaugguccagaagcuggcccuguacgaggauggggcccuggacagccugcagcugcugucguccagcucccucccaggcuugggccuggaacaggacaggcaggggcccgaagaaagugaugaauuucagagcuga

SEQ ID NO: 8733 - RNA, 2139 nt, Artificial Sequence
  derived and/or modified sequence opt1 from IRAK1__Homo_sapiens__AAC08756
auggccggcgggcccggcccgggggagcccgccgcgcccggcgcccagcacuuccuguacgaggugcccccgugggucaugugccgcuucuacaaggugauggacgcccucgagcccgccgacuggugccaguucgccgcgcugaucgugcgggaccagaccgagcugcgccucugcgagcggagcgggcagcgcaccgccuccguccuguggcccuggaucaaccggaacgcccgcguggccgaccuggugcacauccucacgcaccuccagcugcugcgggcgcgcgacaucaucaccgccuggcacccgcccgcgccccugcccagccccggcaccaccgccccgcggcccuccagcauccccgcccccgccgaggccgaggccugguccccgcgcaagcugcccagcuccgccagcacguuccucucccccgccuuccccggcagccagacccacuccgggccggagcugggccugguccccagccccgcgucccucuggcccccgccgcccagccccgcccccuccagcaccaagcccgggcccgaguccagcgugucccugcugcagggcgcccggccguuccccuucugcuggccccucugcgagaucagccgcgggacccacaacuucagcgaggagcugaagaucggcgagggcggguucggcugcguguaccgggccgucaugcgcaacacgguguacgccgugaagcggcugaaggagaacgcggaccucgaguggaccgccgucaagcaguccuuccugaccgagguggagcagcugagccgcuuccggcaccccaacaucguggacuucgccggguacugcgcccagaacggcuucuacugccucgucuacggcuuccugccgaacgggucccuggaggaccgccuccacugccagacccaggccugcccgccccugagcuggccccagcggcuggacauccuccugggcacggcgcgcgccauccaguuccugcaccaggacucccccagccucauccacggggacaucaaguccagcaacgugcugcuggacgagcggcucacccccaagcugggcgacuucgggcuggcccgcuucucccgcuucgccggcagcucccccagccaguccagcaugguggcgcggacccagaccguccgcggcacgcucgccuaccugcccgaggaguacaucaagaccgggcggcuggccguggacaccgacaccuucuccuucggcguggucgugcucgagacgcuggccgggcagcgcgccgugaagacccacggcgcgcggaccaaguaccugaaggaccucgucgaggaggaggccgaggaggccgggguggcccugcgcagcacccaguccacgcugcaggccggccucgcggccgacgccugggccgccccgaucgcgaugcagaucuacaagaagcaccuggacccccggcccggccccugcccgcccgagcuggggcugggccucgggcagcuggccugcugcugccugcaccgccgggccaagcgccggccgcccaugacccaggucuacgagcgccucgagaagcugcaggccgugguggcgggcguccccgggcacagcgaggccgccuccugcaucccgcccagcccccaggagaacagcuacguguccagcaccggccgggcccacuccggcgccgcgcccuggcagccccuggccgcccccagcggggccuccgcccaggcggccgagcagcuccagcgcggcccgaaccagcccguggagagcgacgagucccucgggggccugagcgccgcccugcgguccuggcaccugacccccagcugcccccuggacccggcgccccuccgcgaggccggcugcccccagggggacacggccggcgaguccagcuggggguccggccccgggagccggccgaccgccgucgagggccuggcccugggcuccagcgcguccagcagcuccgagccgccccagaucaucaucaaccccgcccgccagaagauggugcagaagcucgcccuguacgaggacggggcccuggacagccuccagcugcuguccagcuccagccuccccggccuggggcuggagcaggaccggcagggccccgaggaguccgacgaguuccagagcuga

SEQ ID NO: 8734 - RNA, 2139 nt, Artificial Sequence
  derived and/or modified sequence opt2 from IRAK1__Homo_sapiens__AAC08756
auggccggcggccccggccccggcgagcccgccgcccccggcgcccagcacuuccucuacgaggucccccccugggucaugugccgcuucuacaaggucauggacgcccucgagcccgccgacuggugccaguucgccgcccucaucguccgcgaccagaccgagcuccgccucugcgagcgcuccggccagcgcaccgccuccguccucuggcccuggaucaaccgcaacgcccgcgucgccgaccucguccacauccucacccaccuccagcuccuccgcgcccgcgacaucaucaccgccuggcacccccccgccccccuccccucccccggcaccaccgccccccgccccuccuccauccccgcccccgccgaggccgaggccugguccccccgcaagcuccccuccuccgccuccaccuuccucucccccgccuuccccggcucccagacccacuccggccccgagcucggccucguccccucccccgccucccucuggccccccccccccucccccgcccccuccuccaccaagcccggccccgaguccuccgucucccuccuccagggcgcccgccccuuccccuucugcuggccccucugcgagaucucccgcggcacccacaacuucuccgaggagcucaagaucggcgagggcggcuucggcugcgucuaccgcgccgucaugcgcaacaccgucuacgccgucaagcgccucaaggagaacgccgaccucgaguggaccgccgucaagcaguccuuccucaccgaggucgagcagcucucccgcuuccgccaccccaacaucgucgacuucgccggcuacugcgcccagaacggcuucuacugccucgucuacggcuuccuccccaacggcucccucgaggaccgccuccacugccagacccaggccugccccccccucuccuggccccagcgccucgacauccuccucggcaccgcccgcgccauccaguuccuccaccaggacucccccucccucauccacggcgacaucaaguccuccaacguccuccucgacgagcgccucacccccaagcucggcgacuucggccucgcccgcuucucccgcuucgccggcuccucccccucccaguccuccauggucgcccgcacccagaccguccgcggcacccucgccuaccuccccgaggaguacaucaagaccggccgccucgccgucgacaccgacaccuucuccuucggcgucgucguccucgagacccucgccggccagcgcgccgucaagacccacggcgcccgcaccaaguaccucaaggaccucgucgaggaggaggccgaggaggccggcgucgcccuccgcuccacccaguccacccuccaggccggccucgccgccgacgccugggccgcccccaucgccaugcagaucuacaagaagcaccucgacccccgccccggccccugcccccccgagcucggccucggccucggccagcucgccugcugcugccuccaccgccgcgccaagcgccgcccccccaugacccaggucuacgagcgccucgagaagcuccaggccgucgucgccggcguccccggccacuccgaggccgccuccugcaucccccccuccccccaggagaacuccuacgucuccuccaccggccgcgcccacuccggcgccgcccccuggcagccccucgccgcccccuccggcgccuccgcccaggccgccgagcagcuccagcgcggccccaaccagcccgucgaguccgacgagucccucggcggccucuccgccgcccuccgcuccuggcaccucacccccuccugcccccucgaccccgccccccuccgcgaggccggcugcccccagggcgacaccgccggcgaguccuccuggggcuccggccccggcucccgccccaccgccgucgagggccucgcccucggcuccuccgccuccuccuccuccgagcccccccagaucaucaucaaccccgcccgccagaagaugguccagaagcucgcccucuacgaggacggcgcccucgacucccuccagcuccucuccuccuccucccuccccggccucggccucgagcaggaccgccagggccccgaggaguccgacgaguuccaguccuga

SEQ ID NO: 8735 - RNA, 2139 nt, Artificial Sequence
  derived and/or modified sequence opt3 from IRAK1__Homo_sapiens__AAC08756
auggccggcgggcccggaccuggugagccagcugcaccgggcgcccagcacuuccuguacgaagugcccccuugggucaugugcagauuuuauaagguuauggacgcgcucgagccagcugauuggugucaauucgccgcacuuaucgugagggaccagaccgaacugcgguugugcgagcgcagcgggcagcgaacagccuccguauuauggcccuggauuaaccguaaugcuagaguggcagaucugguccauauacuaacucaccuccagcugcuuagggcccgggacaucauuacggcuuggcauccuccagcgccccugccuucuccaggaaccacagccccgcgccccucaaguaucccugcaccagccgaagcugaggccuggagccccagaaaauugccuuccucugcaucgacuuuucucucaccagcuuuccccggcagccaaacccacagugguccggagcuggggcuggugccuucccccgccucucucuggccaccucccccaagccccgcgccuuccucaacaaagccaggaccggaaaguagcguuucuuuacugcagggcgccaggcccuuuccuuucuguuggccacuuugcgagauuucccggggcacccauaacuuuucagaagaguugaaaaucggggagggagguuucggcuguguguaccgcgcagucaugcgaaauacuguguaugcuguaaagagacugaaagaaaacgccgaucuagaguggacagcuguuaagcagagcuuucucaccgaaguggagcagcugaguagguuccggcaccccaauauagucgacuuugccggguacugcgcacaaaacggauucuauugucuuguguacggcuuucugccuaaugguucuuuggaagaucgucuccacugccagacgcaggccuguccaccccuguccuggccgcagcgcuuagacauccugcucgggacugcuagagcgauucaauuccuucaucaggauagcccuucgcugauccacggagacauuaagucuuccaacguguugcuagaugagaggcugaccccaaaacucggcgacuucggccuggcacgguuuucacgauucgccgggaguagccccucccagucuagcauggucgcucgcacacaaacuguuagaggaacccuugccuaucugccugaggaauacaucaagacagguagguuggcaguggauaccgacacguuuucauucggcguagugguccucgagacucuggccgggcagcgggcugugaaaacacauggagcccgcaccaaguacuuaaaagaccugguugaagaggaagcagaggaggcgggcguggcucuaagaaguacucaguccacacuccaggccggucuggcagccgaugcuugggccgcacccauagcuaugcaaauuuauaagaagcaccuugacccaaggccugggcccugcccaccggaauugggccugggacucggccagcuggccuguugcugccuucaccgucgggcgaaacgaagaccucccaugacccaggucuacgagaggcuggaaaaguugcaggccgugguagcugggguuccaggacauagcgaggcagccucuuguauucccccuucaccacaagaaaauaguuaugugagcuccacgggucgcgcucacucuggcgccgcacccuggcagccucucgcggccccgucgggggcuagcgcccaggcagcugagcagcugcaacggggaccaaaccagcccgucgaguccgaugaaucauuaggcggucugagugccgcacuaagaucuuggcaucucaccccuagcugcccacuggaccccgccccucuuagggaggcuggguguccgcagggcgauacagcgggagaauccucauggggcagcgggcccggaucucgcccaacugccguggaggguuuggcacugggcuccagugcuucuagcuccucagagccuccccagaucaucaucaauccagcccgacagaaaaugguccaaaagcucgcccuguacgaagacggggcuuuagauagucugcagcuuuugagcucguccucucucccuggacugggccuagagcaagaccggcagggucccgaagagagcgaugaauuucagucauga

SEQ ID NO: 8736 - RNA, 2139 nt, Artificial Sequence
  derived and/or modified sequence opt4 from IRAK1__Homo_sapiens__AAC08756
auggccggcggccccggccccggcgagcccgccgcccccggcgcccagcacuuccuguacgaggugccccccugggugaugugcagauucuacaaggugauggacgcccuggagcccgccgacuggugccaguucgccgcccugaucgugagagaccagaccgagcugagacugugcgagagaagcggccagagaaccgccagcgugcuguggcccuggaucaacagaaacgccagaguggccgaccuggugcacauccugacccaccugcagcugcugagagccagagacaucaucaccgccuggcacccccccgccccccugcccagccccggcaccaccgcccccagacccagcagcauccccgcccccgccgaggccgaggccuggagccccagaaagcugcccagcagcgccagcaccuuccugagccccgccuuccccggcagccagacccacagcggccccgagcugggccuggugcccagccccgccagccuguggccccccccccccagccccgcccccagcagcaccaagcccggccccgagagcagcgugagccugcugcagggcgccagacccuuccccuucugcuggccccugugcgagaucagcagaggcacccacaacuucagcgaggagcugaagaucggcgagggcggcuucggcugcguguacagagccgugaugagaaacaccguguacgccgugaagagacugaaggagaacgccgaccuggaguggaccgccgugaagcagagcuuccugaccgagguggagcagcugagcagauucagacaccccaacaucguggacuucgccggcuacugcgcccagaacggcuucuacugccugguguacggcuuccugcccaacggcagccuggaggacagacugcacugccagacccaggccugccccccccugagcuggccccagagacuggacauccugcugggcaccgccagagccauccaguuccugcaccaggacagccccagccugauccacggcgacaucaagagcagcaacgugcugcuggacgagagacugacccccaagcugggcgacuucggccuggccagauucagcagauucgccggcagcagccccagccagagcagcaugguggccagaacccagaccgugagaggcacccuggccuaccugcccgaggaguacaucaagaccggcagacuggccguggacaccgacaccuucagcuucggcgugguggugcuggagacccuggccggccagagagccgugaagacccacggcgccagaaccaaguaccugaaggaccugguggaggaggaggccgaggaggccggcguggcccugagaagcacccagagcacccugcaggccggccuggccgccgacgccugggccgcccccaucgccaugcagaucuacaagaagcaccuggaccccagacccggccccugcccccccgagcugggccugggccugggccagcuggccugcugcugccugcacagaagagccaagagaagaccccccaugacccagguguacgagagacuggagaagcugcaggccgugguggccggcgugcccggccacagcgaggccgccagcugcaucccccccagcccccaggagaacagcuacgugagcagcaccggcagagcccacagcggcgccgcccccuggcagccccuggccgcccccagcggcgccagcgcccaggccgccgagcagcugcagagaggccccaaccagcccguggagagcgacgagagccugggcggccugagcgccgcccugagaagcuggcaccugacccccagcugcccccuggaccccgccccccugagagaggccggcugcccccagggcgacaccgccggcgagagcagcuggggcagcggccccggcagcagacccaccgccguggagggccuggcccugggcagcagcgccagcagcagcagcgagcccccccagaucaucaucaaccccgccagacagaagauggugcagaagcuggcccuguacgaggacggcgcccuggacagccugcagcugcugagcagcagcagccugcccggccugggccuggagcaggacagacagggccccgaggagagcgacgaguuccagagcuga

SEQ ID NO: 8737 - RNA, 2139 nt, Artificial Sequence
  derived and/or modified sequence opt5 from IRAK1__Homo_sapiens__AAC08756
auggccggcgggcccggaccuggcgagccggcugcccccggggcgcagcacuuccuguacgaagugccucccugggucaugugcagauuuuauaagguuauggacgcucucgagccugccgauuggugucaauucgccgcucugaucgugcgggaccagaccgaacuucgccugugcgagagaagcggacagcggacagccuccgugcucuggcccuggauuaaccgcaaugcuagagucgccgaucuggugcauauccuuacgcaucugcagcuccugcgggcgcgcgacauuaucaccgccuggcacccuccggcuccccugccuucucccggcacaaccgccccuagacccagcuccauuccggcuccugccgaagcggaggccuggucuccccggaaacucccuagcuccgcuucuacauuucugagccccgccuuccccgggucccaaacccacagcggaccugagcuuggccugguuccgucucccgcuucccucuggccucccccucccagcccggccccuucuuccacaaagcccggcccugaaagcucugugucccugcuucagggggcccgccccuuuccuuucuguuggccccugugcgagaucagcagaggaacccauaacuuuuccgaggagcucaaaaucggcgaagggggauucggcugugucuaccgggcugugaugcgcaauacgguuuaugcggugaagagacugaaagaaaacgccgaucuggaguggaccgcugucaagcagucuuuucucacagaaguggagcagcugagccgguuccgccacccgaauauuguggacuuugccggguacugcgcccaaaacggauucuauugucuugucuacggcuuucugccuaauggcucccucgaagauagacugcacugccagacccaggcuuguccuccccuuagcuggccccagcggcuggacauccuccuggggacagccagagcgauucaauuccugcaucaggauucuccgucccucauccacggagacauuaagagcucuaacguucugcuugaugagcgccugacccccaaacucggcgacuucgggcuggcucgguuuagcagauucgccggauccucuccuagccaguccagcaugguggcccgcacgcaaacagugcggggcacccuugcuuaucugcccgaggaauacaucaagacagggagacucgccgucgauaccgacaccuuuucuuucggagugguugugcuggagacacuggcuggccagcgcgccgucaaaacgcauggcgcgcggaccaaguaccucaaagaccugguggaagaggaagccgaggaggcugggguugcccuuagauccacacagagcacccugcaggcuggacucgccgcggaugccugggcugccccuauugcuaugcaaaucuauaagaagcaccuggacccccgcccuggccccugcccgccugaacuggggcuuggacucggccagcuggccuguugcugccugcaccggagagccaaacgccggcccccuaugacacagguguacgagagacucgaaaagcugcaggcugucguggcggggguccccggccauucugaggccgcuuccuguaucccgccuagcccccaagaaaauuccuaugugucuagcaccggacgggcccacuccggcgccgcuccuuggcagccccuugccgcgcccucuggggcuagcgcccaggccgcugagcagcugcaacgcggaccuaaccagccgguugaguccgaugaaagccucggcgggcugucugccgcgcugagauccuggcaucuuacgcccagcugcccucucgaccccgcuccucugcgggaggccggauguccccagggcgauacagccggggaaucuuccuggggcagcggaccuggcucuagaccgaccgcuguggaggggcuggcccucggaagcuccgcuucuagcuccagcgagcccccucagauuaucauuaaucccgcccgccagaaaaugguccaaaagcuggcgcuuuacgaagacggcgcccuggauucccuccagcugcugucuagcuccucucuuccugggcucggacuggagcaagaccggcagggccccgaagagagcgaugaauuucaguccuga

SEQ ID NO: 8738 - protein, 625 aa, Artificial Sequence
  IRAK2__Homo_sapiens__O43187
MACYIYQLPSWVLDDLCRNMDALSEWDWMEFASYVITDLTQLRKIKSMERVQGVSITRELLWWWGMRQATVQQLVDLLCRLELYRAAQIILNWKPAPEIRCPIPAFPDSVKPEKPLAASVRKAEDEQEEGQPVRMATFPGPGSSPARAHQPAFLQPPEEDAPHSLRSDLPTSSDSKDFSTSIPKQEKLLSLAGDSLFWSEADVVQATDDFNQNRKISQGTFADVYRGHRHGKPFVFKKLRETACSSPGSIERFFQAELQICLRCCHPNVLPVLGFCAARQFHSFIYPYMANGSLQDRLQGQGGSDPLPWPQRVSICSGLLCAVEYLHGLEIIHSNVKSSNVLLDQNLTPKLAHPMAHLCPVNKRSKYTMMKTHLLRTSAAYLPEDFIRVGQLTKRVDIFSCGIVLAEVLTGIPAMDNNRSPVYLKDLLLSDIPSSTASLCSRKTGVENVMAKEICQKYLEKGAGRLPEDCAEALATAACLCLRRRNTSLQEVCGSVAAVEERLRGRETLLPWSGLSEGTGSSSNTPEETDDVDNSSLDASSSMSVAPWAGAATPLLPTENGEGRLRVIVGREADSSSEACVGLEPPQDVTETSWQIEINEAKRKLMENILLYKEEKVDSIELFGP

SEQ ID NO: 8739 - RNA, 1878 nt, Artificial Sequence
  IRAK2__Homo_sapiens__AAI25185
auggccugcuacaucuaccagcugcccuccugggugcuggacgaccugugccgcaacauggacgcgcucagcgagugggacuggauggaguucgccuccuacgugaucacagaccugacccagcugcggaagaucaaguccauggagcgggugcagggugugagcaucacgcgggagcugcuguggugguggggcaugcggcaggccaccguccagcaacuuguggaccuccugugccgccuggagcucuaccgggcugcccagaucauccugaacuggaaaccggcuccugaaaucaggugucccauuccagccuucccugacucugugaagccagaaaagccuuuggcagcuucuguaagaaaggcugaggaugaacaggaagaggggcagccugugaggauggccaccuuuccaggcccaggguccucuccagccagagcccaccagccggccuuucuccagccuccugaagaagaugccccucauuccuugagaagcgaccuccccacuucgucugauucaaaggacuucagcaccuccauuccuaagcaggaaaaacuuuugagcuuggcuggagacagccuuuucuggagugaggcagacgugguccaggcaaccgaugacuucaaucaaaaccgcaaaaucagccaggggaccuuugcugacgucuacagagggcacaggcacgggaagccauucgucuucaagaagcucagagagacagccuguucaaguccaggaucaaucgaaagauucuuccaggcagaguugcagauuugucuuagaugcugccaccccaaugucuuaccugugcugggcuucugugcugcaagacaguuucacagcuucaucuaccccuacauggcaaaugguucccuacaggacagacugcagggucaggguggcucggacccccuccccuggccccagcgugucagcaucugcucagggcugcucugugccgucgaguaccugcauggucuggagaucauccacagcaacgucaagagcucuaaugucuugcuggaccaaaaucucacccccaaacuugcucacccaauggcucaucuguguccugucaacaaaaggucaaaauacaccaugaugaagacucaccugcuccggacgucagccgcguaucugccagaggauuucauccggguggggcagcugacaaagcgaguggacaucuucagcuguggaauaguguuggccgagguccucacgggcaucccugcaauggauaacaaccgaagcccgguuuaccugaaggacuuacuccucagugauauuccaagcagcaccgccucgcucugcuccaggaagacgggcguggagaacgugauggcaaaggagaucugccagaaguaccuggagaagggcgcagggaggcuuccggaggacugcgccgaggcccuggccacggcugccugccugugccugcggaggcguaacaccagccugcaggagguguguggcucuguggcugcuguggaagagcggcuccgaggucgggagacguugcucccuuggagugggcuuucugaggguacaggcucuucuuccaacaccccagaggaaacagacgacguugacaauuccagccuugaugccuccuccuccaugaguguggcacccugggcaggggcugccaccccacuucuccccacagagaauggggaaggaaggcugcgggucaucgugggaagggaggcugacuccuccucugaggccuguguuggccuggagccuccccaggauguuacagaaacuucguggcaaauugagaucaaugaggccaaaaggaaacugauggagaauauucugcucuacaaagaggaaaaaguggacagcauugagcucuuuggccccuga

SEQ ID NO: 8740 - RNA, 1878 nt, Artificial Sequence
  derived and/or modified sequence opt1 from IRAK2__Homo_sapiens__AAI25185
auggccugcuacaucuaccagcugcccagcugggugcucgacgaccugugccgcaacauggacgcccuguccgagugggacuggauggaguucgcgagcuacgucaucaccgaccucacccagcugcggaagaucaaguccauggagcgcgugcagggcgugagcaucacgcgggagcugcucugguggugggggaugcgccaggccaccguccagcagcugguggaccugcucugccggcuggagcuguaccgcgccgcccagaucauccucaacuggaagccggcccccgagauccggugccccauccccgcguucccggacuccgugaagcccgagaagccccuggccgccagcguccgcaaggccgaggacgagcaggaggagggccagcccgugcggauggcgaccuucccggggcccggcuccagccccgcccgcgcccaccagcccgccuuccugcagccgcccgaggaggacgcgccccacucccuccggagcgaccugcccaccuccagcgacuccaaggacuucagcacguccaucccgaagcaggagaagcugcucagccuggccggggacucccuguucuggagcgaggccgacgugguccaggccaccgacgacuucaaccagaaccgcaagaucucccagggcaccuucgccgacguguaccggggccaccgccacgggaagcccuucguguucaagaagcuccgggagaccgccugcagcagccccggcuccaucgagcgcuucuuccaggcggagcugcagaucugccugcggugcugccaccccaacguccucccggugcugggguucugcgccgcccgccaguuccacagcuucaucuaccccuacauggccaacggcucccugcaggaccggcuccaggggcagggcggcagcgacccccugcccuggccgcagcgcguguccaucugcagcgggcugcucugcgccgucgaguaccugcacggccuggagaucauccacuccaacgucaagagcuccaacgugcuccuggaccagaaccugacgcccaagcucgcgcaccccauggcccaccugugccccgugaacaagcggagcaaguacaccaugaugaagacccaccuccuccgcaccuccgccgccuaccugccggaggacuucauccgcguggggcagcugacgaagcggguggacaucuucagcugcggcaucguccucgccgaggugcugaccggcauccccgcgauggacaacaaccgcucccccguguaccugaaggaccuccugcugagcgacaucccguccagcaccgccucccucugcagccggaagaccggggucgagaacgugauggccaaggagaucugccagaaguaccuggagaagggcgccgggcgccugcccgaggacugcgcggaggcccuggccacggccgccugccucugccugcggcgccggaacaccucccugcaggaggucugcggcagcguggcggccguggaggagcgccuccgggggcgcgagacccugcugcccuggagcggccucuccgagggcaccgggagcuccagcaacacgcccgaggagaccgacgacgucgacaacuccagccuggacgccuccagcuccaugagcguggccccgugggccggcgcggccacgccccugcuccccaccgagaacggggagggccggcugcgcgugaucgucgggcgggaggccgacuccagcuccgaggccugcgugggccuggagcccccgcaggacgugaccgagaccagcuggcagaucgagaucaacgaggccaagcgcaagcucauggagaacauccugcuguacaaggaggagaaggucgacuccaucgagcuguucggccccuga

SEQ ID NO: 8741 - RNA, 1878 nt, Artificial Sequence
  derived and/or modified sequence opt2 from IRAK2__Homo_sapiens__AAI25185
auggccugcuacaucuaccagcuccccuccuggguccucgacgaccucugccgcaacauggacgcccucuccgagugggacuggauggaguucgccuccuacgucaucaccgaccucacccagcuccgcaagaucaaguccauggagcgcguccagggcgucuccaucacccgcgagcuccucuggugguggggcaugcgccaggccaccguccagcagcucgucgaccuccucugccgccucgagcucuaccgcgccgcccagaucauccucaacuggaagcccgcccccgagauccgcugccccauccccgccuuccccgacuccgucaagcccgagaagccccucgccgccuccguccgcaaggccgaggacgagcaggaggagggccagcccguccgcauggccaccuuccccggccccggcuccucccccgcccgcgcccaccagcccgccuuccuccagccccccgaggaggacgccccccacucccuccgcuccgaccuccccaccuccuccgacuccaaggacuucuccaccuccauccccaagcaggagaagcuccucucccucgccggcgacucccucuucugguccgaggccgacgucguccaggccaccgacgacuucaaccagaaccgcaagaucucccagggcaccuucgccgacgucuaccgcggccaccgccacggcaagcccuucgucuucaagaagcuccgcgagaccgccugcuccucccccggcuccaucgagcgcuucuuccaggccgagcuccagaucugccuccgcugcugccaccccaacguccuccccguccucggcuucugcgccgcccgccaguuccacuccuucaucuaccccuacauggccaacggcucccuccaggaccgccuccagggccagggcggcuccgacccccuccccuggccccagcgcgucuccaucugcuccggccuccucugcgccgucgaguaccuccacggccucgagaucauccacuccaacgucaaguccuccaacguccuccucgaccagaaccucacccccaagcucgcccaccccauggcccaccucugccccgucaacaagcgcuccaaguacaccaugaugaagacccaccuccuccgcaccuccgccgccuaccuccccgaggacuucauccgcgucggccagcucaccaagcgcgucgacaucuucuccugcggcaucguccucgccgagguccucaccggcauccccgccauggacaacaaccgcucccccgucuaccucaaggaccuccuccucuccgacauccccuccuccaccgccucccucugcucccgcaagaccggcgucgagaacgucauggccaaggagaucugccagaaguaccucgagaagggcgccggccgccuccccgaggacugcgccgaggcccucgccaccgccgccugccucugccuccgccgccgcaacaccucccuccaggaggucugcggcuccgucgccgccgucgaggagcgccuccgcggccgcgagacccuccuccccugguccggccucuccgagggcaccggcuccuccuccaacacccccgaggagaccgacgacgucgacaacuccucccucgacgccuccuccuccauguccgucgcccccugggccggcgccgccaccccccuccuccccaccgagaacggcgagggccgccuccgcgucaucgucggccgcgaggccgacuccuccuccgaggccugcgucggccucgagcccccccaggacgucaccgagaccuccuggcagaucgagaucaacgaggccaagcgcaagcucauggagaacauccuccucuacaaggaggagaaggucgacuccaucgagcucuucggccccuga

SEQ ID NO: 8742 - RNA, 1878 nt, Artificial Sequence
  derived and/or modified sequence opt3 from IRAK2__Homo_sapiens__AAI25185
auggccugcuacaucuaucagcugcccagcugggugcucgacgaucuuuguagaaacauggacgcucuguccgagugggauuggauggaauuugcaucuuacgucauuaccgacuugacacaauuaaggaagauaaaaucaauggagcggguucagggcgugaguaucacucgcgaacugcuaugguggugggggaugcgacaggccacgguacagcaacucguggaucugcuuugccgucuggaguuguauagagcggcucagauuauccucaauuggaagccugccccagaaauuagguguccgauccccgcauuuccugacagcgucaaaccagagaagccccuggccgcuuccgugcggaaagcagaggaugaacaggaggaaggacagccuguucgcauggccaccuucccaggucccgggucuucgccugcuagagcccaccaaccagcguuucugcagccgcccgaggaggacgcaccucauucacucaggagcgauuuaccaacaaguuccgacucuaaggauuucagcacuuccauacccaagcaggaaaaacugcuuucauuggccggcgacagucuguuuuggagcgaggcugaugugguccaggccaccgacgacuucaaccaaaaucggaagaucucucagggaacauuugcagauguguaccgcggccaccgacaugguaaaccuuucguauuuaagaaacuaagagaaaccgcuugcuccucaccagggagcauugagagguucuuucaggccgaacuccaaaucugucugcggugcugucaccccaacguucuuccggugcugggauucugcgcggcccgucaguuucauaguuucauuuauccuuacauggcaaauggcucuuugcaggaccgccuccagggccaagggggauccgauccccugccauggccucagagagucagcaucuguucggguuuacugugcgcuguggaguaucuccacggccuugagauaauucacucuaacgugaaguccucaaauguccuguuggaccagaaccuaacucccaagcuggcccauccaauggcucaccucugucccguuaauaaaaggaguaaguacacaaugaugaaaacccaucugcuucggacgagcgccgcauaccugccugaagauuucauccgaguggggcaguugacuaagcgcguagacauuuucuccugcggaaucgugcucgccgagguccugaccggcaucccagcuauggauaacaauagaucuccgguguauuuaaaagaccugcuacucagcgauauucccucaaguacagcgucccugugcagcaggaagacugguguugaaaacgugauggcaaaagagauaugucaaaaguaccuugaaaagggggccggacgguugccugaggacugcgcugaggcccuggcaaccgccgcuugucucugccugcgcagaaggaauacaucucuucaggaagucuguggcucaguggccgcaguagaggaacgucugcggggccgagagaccuugcucccauggagugggcugagcgaaggaacggguuccucuucgaacacucccgaggagacagaugacguugacaauagcuccuuagaugcgucaaguucuaugagcguggcuccuugggccggcgcagccaccccacugcuacccacugaaaacggggagggaagacucagggucaucgugggccgcgaagcugacuccucaagcgaggccugcgucggucuggagccgccucaggaugugacagaaaccucuuggcagauugagaucaacgaagcaaaacggaagcucauggagaauauauugcuguauaaagaagagaagguugacuccauugagcuuuucgggccauga

SEQ ID NO: 8743 - RNA, 1878 nt, Artificial Sequence
  derived and/or modified sequence opt4 from IRAK2__Homo_sapiens__AAI25185
auggccugcuacaucuaccagcugcccagcugggugcuggacgaccugugcagaaacauggacgcccugagcgagugggacuggauggaguucgccagcuacgugaucaccgaccugacccagcugagaaagaucaagagcauggagagagugcagggcgugagcaucaccagagagcugcuguggugguggggcaugagacaggccaccgugcagcagcugguggaccugcugugcagacuggagcuguacagagccgcccagaucauccugaacuggaagcccgcccccgagaucagaugccccauccccgccuuccccgacagcgugaagcccgagaagccccuggccgccagcgugagaaaggccgaggacgagcaggaggagggccagcccgugagaauggccaccuuccccggccccggcagcagccccgccagagcccaccagcccgccuuccugcagccccccgaggaggacgccccccacagccugagaagcgaccugcccaccagcagcgacagcaaggacuucagcaccagcauccccaagcaggagaagcugcugagccuggccggcgacagccuguucuggagcgaggccgacguggugcaggccaccgacgacuucaaccagaacagaaagaucagccagggcaccuucgccgacguguacagaggccacagacacggcaagcccuucguguucaagaagcugagagagaccgccugcagcagccccggcagcaucgagagauucuuccaggccgagcugcagaucugccugagaugcugccaccccaacgugcugcccgugcugggcuucugcgccgccagacaguuccacagcuucaucuaccccuacauggccaacggcagccugcaggacagacugcagggccagggcggcagcgacccccugcccuggccccagagagugagcaucugcagcggccugcugugcgccguggaguaccugcacggccuggagaucauccacagcaacgugaagagcagcaacgugcugcuggaccagaaccugacccccaagcuggcccaccccauggcccaccugugccccgugaacaagagaagcaaguacaccaugaugaagacccaccugcugagaaccagcgccgccuaccugcccgaggacuucaucagagugggccagcugaccaagagaguggacaucuucagcugcggcaucgugcuggccgaggugcugaccggcauccccgccauggacaacaacagaagccccguguaccugaaggaccugcugcugagcgacauccccagcagcaccgccagccugugcagcagaaagaccggcguggagaacgugauggccaaggagaucugccagaaguaccuggagaagggcgccggcagacugcccgaggacugcgccgaggcccuggccaccgccgccugccugugccugagaagaagaaacaccagccugcaggaggugugcggcagcguggccgccguggaggagagacugagaggcagagagacccugcugcccuggagcggccugagcgagggcaccggcagcagcagcaacacccccgaggagaccgacgacguggacaacagcagccuggacgccagcagcagcaugagcguggcccccugggccggcgccgccaccccccugcugcccaccgagaacggcgagggcagacugagagugaucgugggcagagaggccgacagcagcagcgaggccugcgugggccuggagcccccccaggacgugaccgagaccagcuggcagaucgagaucaacgaggccaagagaaagcugauggagaacauccugcuguacaaggaggagaagguggacagcaucgagcuguucggccccuga

SEQ ID NO: 8744 - RNA, 1878 nt, Artificial Sequence
  derived and/or modified sequence opt5 from IRAK2__Homo_sapiens__AAI25185
auggccugcuacaucuaucagcugcccagcugggugcucgacgaucuguguagaaacauggacgcucuuuccgagugggauuggauggaguucgccucuuacgucauuaccgaccugacacaacuccggaagaucaaaagcauggaacgcguucagggcguguccauuacgagagaacugcuuugguggugggggaugcggcaggcgaccgugcagcaacuggucgaucuccugugccgccuggagcucuauagagcugcccagaucauucugaauuggaagccugccccggaaauccggugucccaucccugcuuuucccgacucugugaaaccugagaagccccuugccgcuagcguucgcaaagccgaggaugaacaggaggaaggacagccugugagaauggcgacauucccgggccccggguccucuccugcccgggcucaccaacccgccuuucugcagccucccgaggaggacgcuccgcauagccuccgcuccgaucugccuaccagcucugacuccaaggauuucagcacaucuauucccaagcaggaaaaacuucugucccucgccggagacagccuguuuuggucugaggcggaugucgugcaggccaccgacgacuucaaccaaaauagaaagaucucccagggcacauuugcugauguuuaccgggggcaccgccauggaaaaccuuucguguuuaagaaacugagagaaaccgccugcagcucccccggcucuauugagcgguucuuucaggcugaacuccaaaucugucugcgcugcugucaccccaacguccuuccugugcugggcuucugcgccgccagacaguuucauagcuucauuuauccguacauggcuaaugggucccuccaggaccggcugcagggacaaggcgggagcgauccccuuccuuggccccagagagugucuaucuguuccggacugcucugcgcggucgaguaucugcacggccuggagauuauccacagcaacguuaagucuagcaaugugcuccuggaccagaaccuuacgccuaagcuggcccaucccauggcucaccucuguccggugaauaaacgcuccaaguacaccaugaugaaaacacaucugcuucggaccucugccgccuaccugccugaagauuucaucagagucgggcagcucacaaagcgcguggacauuuuuagcugcggaaucguucuggcugaggugcugaccggcauucccgccauggauaacaaucgguccccugucuaucucaaagaccugcuucugagcgauauccccucuuccacggcgagccucugcucuagaaagacaggcguggaaaacguuauggcuaaagagauuugucaaaaguaccuggaaaagggggccggacgccugccugaggacugcgccgaggcucuugccaccgcugccugucucugccugcggagacgcaauacaucccugcaggaaguguguggcagcgucgcggccguggaggaacggcucagagggcgcgagacccugcuucccugguccggacugucugaaggcaccgggagcuccucuaacacaccggaggagacggaugacgucgacaauagcucccucgaugcuucuagcuccaugagcguggccccuugggcuggagccgcgacaccccugcugcccaccgaaaacggcgagggccggcuuagaguuaucguggggcgggaagccgacucuuccagcgaggcuugcgucggacucgagccuccgcaggaugugaccgaaacaucuuggcagaucgagauuaacgaagccaaacgcaagcugauggagaauauccugcucuauaaagaagagaagguugacagcauugagcuguucggccccuga

SEQ ID NO: 8745 - protein, 460 aa, Artificial Sequence
  IRAK4__Homo_sapiens__Q69FE3
MNKPITPSTYVRCLNVGLIRKLSDFIDPQEGWKKLAVAIKKPSGDDRYNQFHIRRFEALLQTGKSPTSELLFDWGTTNCTVGDLVDLLIQNEFFAPASLLLPDAVPKTANTLPSKEAITVQQKQMPFCDKDRTLMTPVQNLEQSYMPPDSSSPENKSLEVSDTRFHSFSFYELKNVTNNFDERPISVGGNKMGEGGFGVVYKGYVNNTTVAVKKLAAMVDITTEELKQQFDQEIKVMAKCQHENLVELLGFSSDGDDLCLVYVYMPNGSLLDRLSCLDGTPPLSWHMRCKIAQGAANGINFLHENHHIHRDIKSANILLDEAFTAKISDFGLARASEKFAQTVMTSRIVGTTAYMAPEALRGEITPKSDIYSFGVVLLEIITGLPAVDEHREPQLLLDIKEEIEDEEKTIEDYIDKKMNDADSTSVEAMYSVASQCLHEKKNKRPDIKKVQQLLQEMTAS

SEQ ID NO: 8746 - RNA, 1383 nt, Artificial Sequence
  IRAK4__Homo_sapiens__AAR02358
augaacaaacccauaacaccaucaacauaugugcgcugccucaauguuggacuaauuaggaagcugucagauuuuauugauccucaagaaggauggaagaaguuagcuguagcuauuaaaaaaccaucuggugaugauagauacaaucaguuucacauaaggagauuugaagcauuacuucaaacuggaaaaagucccacuucugaauuacuguuugacuggggcaccacaaauugcacaguuggugaucuuguggaucuuuugauccaaaaugaauuuuuugcuccugcgagucuuuugcucccagaugcuguucccaaaacugcuaauacacuaccuucuaaagaagcuauaacaguucagcaaaaacagaugccuuucugugacaaagacaggacauugaugacaccugugcagaaucuugaacaaagcuauaugccaccugacuccucaaguccagaaaauaaaaguuuagaaguuagugauacacguuuucacaguuuuucauuuuaugaauugaagaaugucacaaauaacuuugaugaacgacccauuucuguuggugguaauaaaaugggagagggaggauuuggaguuguauauaaaggcuacguaaauaacacaacuguggcagugaagaagcuugcagcaaugguugacauuacuacugaagaacugaaacagcaguuugaucaagaaauaaaaguaauggcaaagugucaacaugaaaacuuaguagaacuacuugguuucucaagugauggagaugaccucugcuuaguauauguuuacaugccuaaugguucauugcuagacagacucucuugcuuggaugguacuccaccacuuucuuggcacaugagaugcaagauugcucagggugcagcuaauggcaucaauuuucuacaugaaaaucaucauauucauagagauauuaaaagugcaaauaucuuacuggaugaagcuuuuacugcuaaaauaucugacuuuggccuugcacgggcuucugagaaguuugcccagacagucaugacuagcagaauugugggaacaacagcuuauauggcaccagaagcuuugcguggagaaauaacacccaaaucugauauuuacagcuuuggugugguuuuacuagaaauaauaacuggacuuccagcuguggaugaacaccgugaaccucaguuauugcuagauauuaaagaagaaauugaagaugaagaaaagacaauugaagauuauauugauaaaaagaugaaugaugcugauuccacuucaguugaagcuauguacucuguugcuagucaaugucugcaugaaaagaaaaauaagagaccagacauuaagaagguucaacagcugcugcaagagaugacagcuucuuaa

SEQ ID NO: 8747 - RNA, 1383 nt, Artificial Sequence
  derived and/or modified sequence opt1 from IRAK4__Homo_sapiens__AAR02358
augaacaagcccaucaccccgagcaccuacgugcgcugccugaacgucggccucauccggaagcuguccgacuucaucgacccccaggagggguggaagaagcuggccguggccaucaagaagcccagcggcgacgaccgcuacaaccaguuccacauccggcgcuucgaggcgcuccugcagacggggaagucccccaccagcgagcuccuguucgacuggggcaccaccaacugcacggugggggaccuggucgaccugcucauccagaacgaguucuucgccccggccucccugcugcuccccgacgccgugcccaagaccgccaacacccugcccagcaaggaggcgaucaccgugcagcagaagcagaugccguucugcgacaaggaccggacgcugaugacccccguccagaaccucgagcaguccuacaugccgcccgacagcuccagccccgagaacaagucccuggaggugagcgacacccgcuuccacuccuucagcuucuacgagcugaagaacgugaccaacaacuucgacgagcggcccaucuccgucggcggcaacaagaugggggagggcggguucggcgugguguacaagggguacgucaacaacacgaccguggccgugaagaagcucgccgccauggucgacaucaccaccgaggagcugaagcagcaguucgaccaggagaucaaggugauggcgaagugccagcacgagaaccugguggagcuccugggcuucagcuccgacggcgacgaccugugccucgucuacguguacaugcccaacgggagccugcuggaccgccucuccugccuggacggcacgcccccgcugagcuggcacaugcggugcaagaucgcccagggggccgccaacggcaucaacuuccuccacgagaaccaccacauccaccgcgacaucaagagcgccaacauccugcuggacgaggcguucaccgccaagaucuccgacuucggccucgcccgggccagcgagaaguucgcccagaccgugaugaccucccgcaucgucgggacgaccgcguacauggcccccgaggcccugcggggcgagaucacccccaagagcgacaucuacuccuucgggguggugcugcucgagaucaucaccggccugcccgccgucgacgagcaccgcgagccgcagcugcuccuggacaucaaggaggagaucgaggacgaggagaagacgaucgaggacuacaucgacaagaagaugaacgacgccgacagcaccuccguggaggcgauguacagcgucgccucccagugccugcacgagaagaagaacaagcggcccgacaucaagaaggugcagcagcuccugcaggagaugaccgccagcuga

SEQ ID NO: 8748 - RNA, 1383 nt, Artificial Sequence
  derived and/or modified sequence opt2 from IRAK4__Homo_sapiens__AAR02358
augaacaagcccaucacccccuccaccuacguccgcugccucaacgucggccucauccgcaagcucuccgacuucaucgacccccaggagggcuggaagaagcucgccgucgccaucaagaagcccuccggcgacgaccgcuacaaccaguuccacauccgccgcuucgaggcccuccuccagaccggcaagucccccaccuccgagcuccucuucgacuggggcaccaccaacugcaccgucggcgaccucgucgaccuccucauccagaacgaguucuucgcccccgccucccuccuccuccccgacgccguccccaagaccgccaacacccuccccuccaaggaggccaucaccguccagcagaagcagaugcccuucugcgacaaggaccgcacccucaugacccccguccagaaccucgagcaguccuacaugccccccgacuccuccucccccgagaacaagucccucgaggucuccgacacccgcuuccacuccuucuccuucuacgagcucaagaacgucaccaacaacuucgacgagcgccccaucuccgucggcggcaacaagaugggcgagggcggcuucggcgucgucuacaagggcuacgucaacaacaccaccgucgccgucaagaagcucgccgccauggucgacaucaccaccgaggagcucaagcagcaguucgaccaggagaucaaggucauggccaagugccagcacgagaaccucgucgagcuccucggcuucuccuccgacggcgacgaccucugccucgucuacgucuacaugcccaacggcucccuccucgaccgccucuccugccucgacggcacccccccccucuccuggcacaugcgcugcaagaucgcccagggcgccgccaacggcaucaacuuccuccacgagaaccaccacauccaccgcgacaucaaguccgccaacauccuccucgacgaggccuucaccgccaagaucuccgacuucggccucgcccgcgccuccgagaaguucgcccagaccgucaugaccucccgcaucgucggcaccaccgccuacauggcccccgaggcccuccgcggcgagaucacccccaaguccgacaucuacuccuucggcgucguccuccucgagaucaucaccggccuccccgccgucgacgagcaccgcgagccccagcuccuccucgacaucaaggaggagaucgaggacgaggagaagaccaucgaggacuacaucgacaagaagaugaacgacgccgacuccaccuccgucgaggccauguacuccgucgccucccagugccuccacgagaagaagaacaagcgccccgacaucaagaagguccagcagcuccuccaggagaugaccgccuccuga

SEQ ID NO: 8749 - RNA, 1383 nt, Artificial Sequence
  derived and/or modified sequence opt3 from IRAK4__Homo_sapiens__AAR02358
augaacaagcccaucaccccuagcacauacgugagaugccugaaugucggccucauuaggaaacuuuccgacuucauagauccacaggagggguggaagaaacuggccguugcuaucaagaaaccgucuggagacgaucgguauaaccaauuucacauucgccgauucgaagcauuguuacagacugguaagucacccacgagugagcugcuauuugacuggggcaccacaaauuguacugugggggaucucguagaccugcuuauccagaacgaguucuuugccccugcgagccuguugcucccagaugcugugcccaagaccgccaauacacugccuuccaaagaagcaauuaccguccagcaaaagcagaugccauucugcgacaaagaucguacucugaugacacccgugcagaaccucgaacagucuuacaugccuccagacucgucaagcccggagaauaagaguuuagagguuuccgauaccagauuucauucuuucagcuuuuaugaacugaaaaacgugacgaauaacuucgacgagaggcccaucuccgucggaggcaauaagaugggugaagggggauuuggcgugguauacaagggcuauguuaacaauacuaccguggccgucaaaaaguuggcugcaaugguggauauaacaacugaggagcuuaaacaacaguucgaccaggaaaucaaggugauggccaaaugucagcacgagaaccuggucgaacuacucggguuuucaagugacggagaugaccugugccuuguuuacguguauaugccuaaugguagccuguuggaucggcucucuugucuggacggcaccccacccuuauccuggcauaugcgcugcaagauugcucaaggggccgcgaacggaaucaacuuccugcacgagaaucaucacauucacagagauaucaaaucagcaaacauacuccuugacgaagccuucacagcuaagauuagcgauuuuggccuggccagggcaagugagaaguucgcucagaccguaaugacgucucggaucguggguacuacagccuacauggcgccugaggccuugcgcggggaaauuaccccaaaauccgacaucuacagcuuuggagucgugcuacuggagaucauuacuggccuccccgcaguugaugaacaucgagagccgcagcugcuucuggacauaaaggaagagaucgaggaugaagagaaaacaauugaagacuauaucgacaagaaaaugaaugaugcugacucgaccucuguggaggccauguacuccgucgcuucacaauguuugcacgaaaagaagaacaaaagaccugauauaaagaaagugcagcagcuccugcaggagaugacggccaguuga

SEQ ID NO: 8750 - RNA, 1383 nt, Artificial Sequence
  derived and/or modified sequence opt4 from IRAK4__Homo_sapiens__AAR02358
augaacaagcccaucacccccagcaccuacgugagaugccugaacgugggccugaucagaaagcugagcgacuucaucgacccccaggagggcuggaagaagcuggccguggccaucaagaagcccagcggcgacgacagauacaaccaguuccacaucagaagauucgaggcccugcugcagaccggcaagagccccaccagcgagcugcuguucgacuggggcaccaccaacugcaccgugggcgaccugguggaccugcugauccagaacgaguucuucgcccccgccagccugcugcugcccgacgccgugcccaagaccgccaacacccugcccagcaaggaggccaucaccgugcagcagaagcagaugcccuucugcgacaaggacagaacccugaugacccccgugcagaaccuggagcagagcuacaugccccccgacagcagcagccccgagaacaagagccuggaggugagcgacaccagauuccacagcuucagcuucuacgagcugaagaacgugaccaacaacuucgacgagagacccaucagcgugggcggcaacaagaugggcgagggcggcuucggcgugguguacaagggcuacgugaacaacaccaccguggccgugaagaagcuggccgccaugguggacaucaccaccgaggagcugaagcagcaguucgaccaggagaucaaggugauggccaagugccagcacgagaaccugguggagcugcugggcuucagcagcgacggcgacgaccugugccugguguacguguacaugcccaacggcagccugcuggacagacugagcugccuggacggcacccccccccugagcuggcacaugagaugcaagaucgcccagggcgccgccaacggcaucaacuuccugcacgagaaccaccacauccacagagacaucaagagcgccaacauccugcuggacgaggccuucaccgccaagaucagcgacuucggccuggccagagccagcgagaaguucgcccagaccgugaugaccagcagaaucgugggcaccaccgccuacauggcccccgaggcccugagaggcgagaucacccccaagagcgacaucuacagcuucggcguggugcugcuggagaucaucaccggccugcccgccguggacgagcacagagagccccagcugcugcuggacaucaaggaggagaucgaggacgaggagaagaccaucgaggacuacaucgacaagaagaugaacgacgccgacagcaccagcguggaggccauguacagcguggccagccagugccugcacgagaagaagaacaagagacccgacaucaagaaggugcagcagcugcugcaggagaugaccgccagcuga

SEQ ID NO: 8751 - RNA, 1383 nt, Artificial Sequence
  derived and/or modified sequence opt5 from IRAK4__Homo_sapiens__AAR02358
augaacaagcccaucaccccuagcacauacgugagaugccugaaugucggccucauucggaaacuguccgacuucaucgauccgcaggagggguggaagaaacuugccguugcuauuaagaaacccucuggagacgaucgcuauaaccaauuucacaucagacgguucgaagcccugcuccagacgggcaagagcccuaccuccgagcugcuuuuugacugggggacaaccaauuguacagugggagaucugguggaccuccugauucagaacgaguucuuugcgcccgcuucucugcuccugccugaugccguccccaagaccgccaauacacuuccuagcaaagaagcuaucaccgugcagcaaaagcagaugccguucugcgacaaagaucgcacgcugaugacccccguucagaaccucgaacaguccuacaugccucccgacucuagcuccccugagaauaagagccuggaggugucugauacaagauuucauuccuucagcuuuuaugaacuuaaaaacgucaccaauaacuucgacgagcggcccaucucugugggcgggaauaagaugggagaaggcggcuuugggguuguguacaagggauaugucaacaauacaaccguggccgugaaaaagcuggcugccauggucgauauuacgacagaggagcucaaacaacaguucgaccaggaaaucaagguuauggcgaaaugucagcacgagaaccugguggaacugcucggcuuuuccagcgacggggaugaccugugccuuguguacgucuauaugccgaauggaucucugcucgaucgccuguccugucuugacggcaccccuccccugagcuggcauaugagaugcaagauugcccaaggggcugccaacggaaucaacuuccuccacgagaaucaucacauucaccgggauaucaaauccgcuaacauucugcuggacgaagccuucacagcgaagaucucugauuuuggccucgcccgcgcuagcgagaaguucgcccagaccgugaugaccuccagaaucguuggcacaacggcuuacauggccccugaggcccugcgcggggaaauuacccccaaaagcgacaucuacucuuuuggagugguccuucuggagauuaucacaggccuccccgcuguggaugaacaucgggagccucagcugcuucuggacauuaaggaagagaucgaggaugaagagaaaaccaucgaagacuauauugacaagaaaaugaaugaugcggacuccacaagcguugaggccauguacucuguggcuagccaaugucuccacgaaaagaagaacaaaagaccggauaucaagaaaguccagcagcugcugcaggagaugaccgccuccuga

SEQ ID NO: 8752 - protein, 218 aa, Artificial Sequence [sequence omitted]

SEQ ID NO: 8753 - RNA, 657 nt, Artificial Sequence
  IRAK4__Homo_sapiens__AAP57090
augaacaaacccauaacaccaucaacauaugugcgcugccucaauguuggacuaauuaggaagcugucagauuuuauugauccucaagaaggauggaagaaguuagcuguagcuauuaaaaaaccaucuggugaugauagauacaaucaguuucacauaaggagauuugaagcauuacuucaaacuggaaaaagucccacuucugaauuacuguuugacuggggcaccacaaauugcacagcuggugaucuuguggaucuuuugauccaaaaugaauuuuuugcuccugcgagucuuuugcucccagaugcuguucccaaaacugcuaauacacuaccuucuaaagaagcuauaacaguucagcaaaaacagaugccuuucugugacaaagacaggacauugaugacaccugugcagaaucuugaacaaagcuauaugccaccugacuccucaaguccagaaaauaaaaguuuagaaguuagugauacacguuuucacaguuuuucauuuuaugaauugaagaaugucacaaauaacuuugaugaacgacccauuucuguuggugguaauaaaaugggagagggaggauuuggaguuguauauaaaggcuacguaaauaacaacuguggcagugaagaagcuugcagcaaugguuga

SEQ ID NO: 8754 - RNA, 657 nt, Artificial Sequence
  derived and/or modified sequence opt1 from IRAK4__Homo_sapiens__AAP57090
augaacaagcccaucaccccgagcaccuacgugcgcugccugaacgucggccucauccggaagcuguccgacuucaucgacccccaggagggguggaagaagcuggccguggccaucaagaagcccagcggcgacgaccgcuacaaccaguuccacauccggcgcuucgaggcgcuccugcagacggggaagucccccaccagcgagcuccuguucgacuggggcaccaccaacugcacggccggggaccugguggaccugcucauccagaacgaguucuucgccccggccucccugcugcuccccgacgccguccccaagaccgcgaacacccugcccagcaaggaggccaucaccgugcagcagaagcagaugccguucugcgacaaggaccggacgcugaugacccccgugcagaaccucgagcaguccuacaugccgcccgacagcuccagccccgagaacaagucccuggaggucagcgacacccgcuuccacuccuucagcuucuacgagcugaagaacgugaccaacaacuucgacgagcggcccaucuccgugggcggcaacaagaugggggagggcggguucggcgucguguacaagggguacgugaacaacaacugcggcagcgaggaggccugcuccaacggcuga

SEQ ID NO: 8755 - RNA, 657 nt, Artificial Sequence
  derived and/or modified sequence opt2 from IRAK4__Homo_sapiens__AAP57090
augaacaagcccaucacccccuccaccuacguccgcugccucaacgucggccucauccgcaagcucuccgacuucaucgacccccaggagggcuggaagaagcucgccgucgccaucaagaagcccuccggcgacgaccgcuacaaccaguuccacauccgccgcuucgaggcccuccuccagaccggcaagucccccaccuccgagcuccucuucgacuggggcaccaccaacugcaccgccggcgaccucgucgaccuccucauccagaacgaguucuucgcccccgccucccuccuccuccccgacgccguccccaagaccgccaacacccuccccuccaaggaggccaucaccguccagcagaagcagaugcccuucugcgacaaggaccgcacccucaugacccccguccagaaccucgagcaguccuacaugccccccgacuccuccucccccgagaacaagucccucgaggucuccgacacccgcuuccacuccuucuccuucuacgagcucaagaacgucaccaacaacuucgacgagcgccccaucuccgucggcggcaacaagaugggcgagggcggcuucggcgucgucuacaagggcuacgucaacaacaacugcggcuccgaggaggccugcuccaacggcuga

SEQ ID NO: 8756 - RNA, 657 nt, Artificial Sequence
  derived and/or modified sequence opt3 from IRAK4__Homo_sapiens__AAP57090
augaacaagcccaucaccccuagcacauacgugagaugccugaaugucggccucauuaggaaacuuuccgacuucauagauccacaggagggguggaagaaacuggccguugcuaucaagaaaccgucuggagacgaucgguauaaccaauuucacauucgccgauucgaagcauuguuacagacugguaagucacccacgagugagcugcuauuugacuggggcaccacaaauuguacugccggggaucucguggaccugcuuauccagaacgaguucuuugcgccugcuagccuguugcucccagaugccguacccaagaccgcaaauacacugccuuccaaagaagccauuaccgugcagcaaaagcagaugccauucugcgacaaagaucguacucugaugacacccguccagaaccucgaacagucuuacaugccuccagacucgucaagcccggagaauaagaguuuagagguguccgauaccagauuucauucuuucagcuuuuaugaacugaaaaacguuacgaauaacuucgacgagaggcccaucuccgugggaggcaauaagaugggugaagggggauuuggcgucguguacaagggcuauguaaacaauaacugugggucagaggaggcuugcaguaauggauga

SEQ ID NO: 8757 - RNA, 657 nt, Artificial Sequence
  derived and/or modified sequence opt4 from IRAK4__Homo_sapiens__AAP57090
augaacaagcccaucacccccagcaccuacgugagaugccugaacgugggccugaucagaaagcugagcgacuucaucgacccccaggagggcuggaagaagcuggccguggccaucaagaagcccagcggcgacgacagauacaaccaguuccacaucagaagauucgaggcccugcugcagaccggcaagagccccaccagcgagcugcuguucgacuggggcaccaccaacugcaccgccggcgaccugguggaccugcugauccagaacgaguucuucgcccccgccagccugcugcugcccgacgccgugcccaagaccgccaacacccugcccagcaaggaggccaucaccgugcagcagaagcagaugcccuucugcgacaaggacagaacccugaugacccccgugcagaaccuggagcagagcuacaugccccccgacagcagcagccccgagaacaagagccuggaggugagcgacaccagauuccacagcuucagcuucuacgagcugaagaacgugaccaacaacuucgacgagagacccaucagcgugggcggcaacaagaugggcgagggcggcuucggcgugguguacaagggcuacgugaacaacaacugcggcagcgaggaggccugcagcaacggcuga

SEQ ID NO: 8758 - RNA, 657 nt, Artificial Sequence
  derived and/or modified sequence opt5 from IRAK4__Homo_sapiens__AAP57090
augaacaagcccaucaccccuagcacauacgugagaugccugaaugucggccucauucggaaacuguccgacuucaucgauccgcaggagggguggaagaaacuugccguugcuauuaagaaacccucuggagacgaucgcuauaaccaauuucacaucagacgguucgaagcccugcuccagacgggcaagagcccuaccuccgagcugcuuuuugacugggggacaaccaauuguacagcgggagaucugguggaccuccugauucagaacgaguucuuugcucccgccucucugcuccugccugaugccgugcccaagaccgcuaauacacuuccuagcaaagaagccaucaccguccagcaaaagcagaugccguucugcgacaaagaucgcacgcugaugacccccgugcagaaccucgaacaguccuacaugccucccgacucuagcuccccugagaauaagagccuggagguuucugauacaagauuucauuccuucagcuuuuaugaacuuaaaaacgugaccaauaacuucgacgagcggcccaucucugucggcgggaauaagaugggagaaggcggcuuuggggugguuuacaagggauaugugaacaauaacuguggcuccgaggaggcuugcagcaauggguga

SEQ ID NO: 8759 - protein, 292 aa, Artificial Sequence [sequence omitted]

SEQ ID NO: 8760 - RNA, 879 nt, Artificial Sequence
  IRAK4__Homo_sapiens__AAP57089
augaacaaacccauaacaccaucaacauaugugcgcugccucaauguuggacuaauuaggaagcugucagauuuuauugauccucaagaaggauggaagaaguuagcuguagcuauuaaaaaaccaucuggugaugauagauacaaucaguuucacauaaggagauuugaagcauuacuucaaacuggaaaaagucccacuucugaauuacuguuugacuggggcaccacaaauugcacagcuggugaucuuguggaucuuuugauccaaaaugaauuuuuugcuccugcgagucuuuugcucccagaugcuguucccaaaacugcuaauacacuaccuucuaaagaagcuauaacaguucagcaaaaacagaugccuuucugugacaaagacaggacauugaugacaccugugcagaaucuugaacaaagcuauaugccaccugacuccucaaguccagaaaauaaaaguuuagaaguuagugauacacguuuucacaguuuuucauuuuaugaauugaagaaugucacaaauaacuuugaugaacgacccauuucuguuggugguaauaaaaugggagagggaggauuuggaguuguauauaaaggcuacguaaauaacacaacuguggcagugaagaagcuugcagcaaugguugacauuacuacugaagaacugaaacagcaguuugaucaagaaauaaaaguaauggcaaagugucaacaugaaaacuuaguagaacuacuugguuucucaagugauggagaugaccucugcuuaguauauguuuacaugccuaaugguucauugcuagacagacucucuugcuuggaugguacuccaccacuuucuuggcacaugagaugcaagauugcuuag

SEQ ID NO: 8761 - RNA, 879 nt, Artificial Sequence
  derived and/or modified sequence opt1 from IRAK4__Homo_sapiens__AAP57089
augaacaagcccaucaccccgagcaccuacgugcgcugccugaacgucggccucauccggaagcuguccgacuucaucgacccccaggagggguggaagaagcuggccguggccaucaagaagcccagcggcgacgaccgcuacaaccaguuccacauccggcgcuucgaggcgcuccugcagacggggaagucccccaccagcgagcuccuguucgacuggggcaccaccaacugcacggccggggaccugguggaccugcucauccagaacgaguucuucgccccggccucccugcugcuccccgacgccguccccaagaccgcgaacacccugcccagcaaggaggccaucaccgugcagcagaagcagaugccguucugcgacaaggaccggacgcugaugacccccgugcagaaccucgagcaguccuacaugccgcccgacagcuccagccccgagaacaagucccuggaggucagcgacacccgcuuccacuccuucagcuucuacgagcugaagaacgugaccaacaacuucgacgagcggcccaucuccgugggcggcaacaagaugggggagggcggguucggcgucguguacaagggguacgugaacaacacgaccgucgccgugaagaagcucgccgcgaugguggacaucaccaccgaggagcugaagcagcaguucgaccaggagaucaaggucauggccaagugccagcacgagaaccugguggagcuccugggcuucagcuccgacggcgacgaccugugccucguguacgucuacaugcccaacgggagccugcuggaccgccucuccugccuggacggcacgcccccgcugagcuggcacaugcggugcaagaucgccuga

SEQ ID NO: 8762 - RNA, 879 nt, Artificial Sequence
  derived and/or modified sequence opt2 from IRAK4__Homo_sapiens__AAP57089
augaacaagcccaucacccccuccaccuacguccgcugccucaacgucggccucauccgcaagcucuccgacuucaucgacccccaggagggcuggaagaagcucgccgucgccaucaagaagcccuccggcgacgaccgcuacaaccaguuccacauccgccgcuucgaggcccuccuccagaccggcaagucccccaccuccgagcuccucuucgacuggggcaccaccaacugcaccgccggcgaccucgucgaccuccucauccagaacgaguucuucgcccccgccucccuccuccuccccgacgccguccccaagaccgccaacacccuccccuccaaggaggccaucaccguccagcagaagcagaugcccuucugcgacaaggaccgcacccucaugacccccguccagaaccucgagcaguccuacaugccccccgacuccuccucccccgagaacaagucccucgaggucuccgacacccgcuuccacuccuucuccuucuacgagcucaagaacgucaccaacaacuucgacgagcgccccaucuccgucggcggcaacaagaugggcgagggcggcuucggcgucgucuacaagggcuacgucaacaacaccaccgucgccgucaagaagcucgccgccauggucgacaucaccaccgaggagcucaagcagcaguucgaccaggagaucaaggucauggccaagugccagcacgagaaccucgucgagcuccucggcuucuccuccgacggcgacgaccucugccucgucuacgucuacaugcccaacggcucccuccucgaccgccucuccugccucgacggcacccccccccucuccuggcacaugcgcugcaagaucgccuga

SEQ ID NO: 8763 - RNA, 879 nt, Artificial Sequence
  derived and/or modified sequence opt3 from IRAK4__Homo_sapiens__AAP57089
augaacaagcccaucaccccuagcacauacgugagaugccugaaugucggccucauuaggaaacuuuccgacuucauagauccacaggagggguggaagaaacuggccguugcuaucaagaaaccgucuggagacgaucgguauaaccaauuucacauucgccgauucgaagcauuguuacagacugguaagucacccacgagugagcugcuauuugacuggggcaccacaaauuguacugccggggaucucguggaccugcuuauccagaacgaguucuuugcgccugcuagccuguugcucccagaugccguacccaagaccgcaaauacacugccuuccaaagaagccauuaccgugcagcaaaagcagaugccauucugcgacaaagaucguacucugaugacacccguccagaaccucgaacagucuuacaugccuccagacucgucaagcccggagaauaagaguuuagagguguccgauaccagauuucauucuuucagcuuuuaugaacugaaaaacguuacgaauaacuucgacgagaggcccaucuccgugggaggcaauaagaugggugaagggggauuuggcgucguguacaagggcuauguaaacaauacuaccguugcugugaaaaaguuggcagccauggucgauauaacaacugaggagcuuaaacaacaguucgaccaggaaaucaaggugauggcuaaaugucagcacgagaaccugguggaacuacucggguuuucaagugacggagaugaccugugccuugucuacguuuauaugccuaaugguagccuguuggaucggcucucuugucuggacggcaccccacccuuauccuggcauaugcgcugcaagauugccuga

SEQ ID NO: 8764 - RNA, 879 nt, Artificial Sequence
  derived and/or modified sequence opt4 from IRAK4__Homo_sapiens__AAP57089
augaacaagcccaucacccccagcaccuacgugagaugccugaacgugggccugaucagaaagcugagcgacuucaucgacccccaggagggcuggaagaagcuggccguggccaucaagaagcccagcggcgacgacagauacaaccaguuccacaucagaagauucgaggcccugcugcagaccggcaagagccccaccagcgagcugcuguucgacuggggcaccaccaacugcaccgccggcgaccugguggaccugcugauccagaacgaguucuucgcccccgccagccugcugcugcccgacgccgugcccaagaccgccaacacccugcccagcaaggaggccaucaccgugcagcagaagcagaugcccuucugcgacaaggacagaacccugaugacccccgugcagaaccuggagcagagcuacaugccccccgacagcagcagccccgagaacaagagccuggaggugagcgacaccagauuccacagcuucagcuucuacgagcugaagaacgugaccaacaacuucgacgagagacccaucagcgugggcggcaacaagaugggcgagggcggcuucggcgugguguacaagggcuacgugaacaacaccaccguggccgugaagaagcuggccgccaugguggacaucaccaccgaggagcugaagcagcaguucgaccaggagaucaaggugauggccaagugccagcacgagaaccugguggagcugcugggcuucagcagcgacggcgacgaccugugccugguguacguguacaugcccaacggcagccugcuggacagacugagcugccuggacggcacccccccccugagcuggcacaugagaugcaagaucgccuga

SEQ ID NO: 8765 - RNA, 879 nt, Artificial Sequence
  derived and/or modified sequence opt5 from IRAK4__Homo_sapiens__AAP57089
augaacaagcccaucaccccuagcacauacgugagaugccugaaugucggccucauucggaaacuguccgacuucaucgauccgcaggagggguggaagaaacuugccguugcuauuaagaaacccucuggagacgaucgcuauaaccaauuucacaucagacgguucgaagcccugcuccagacgggcaagagcccuaccuccgagcugcuuuuugacugggggacaaccaauuguacagcgggagaucugguggaccuccugauucagaacgaguucuuugcucccgccucucugcuccugccugaugccgugcccaagaccgcuaauacacuuccuagcaaagaagccaucaccguccagcaaaagcagaugccguucugcgacaaagaucgcacgcugaugacccccgugcagaaccucgaacaguccuacaugccucccgacucuagcuccccugagaauaagagccuggagguuucugauacaagauuucauuccuucagcuuuuaugaacuuaaaaacgugaccaauaacuucgacgagcggcccaucucugucggcgggaauaagaugggagaaggcggcuuuggggugguuuacaagggauaugugaacaauacaaccgucgcugugaaaaagcuggccgcgaugguggauauuacgacagaggagcucaaacaacaguucgaccaggaaaucaaggucauggccaaaugucagcacgagaaccugguugaacugcucggcuuuuccagcgacggggaugaccugugccuuguguacguguauaugccgaauggaucucugcucgaucgccuguccugucuugacggcaccccuccccugagcuggcauaugagaugcaagauugcuuga

SEQ ID NO: 8766 - protein, 460 aa, Artificial Sequence; identical to SEQ ID NO: 8745
  IRAK4__Homo_sapiens__Q9NWZ3

SEQ ID NO: 8767 - RNA, 1383 nt, Artificial Sequence
  IRAK4__Homo_sapiens__AAH13316
augaacaaacccauaacaccaucaacauaugugcgcugccucaauguuggacuaauuaggaagcugucagauuuuauugauccucaagaaggauggaagaaguuagcuguagcuauuaaaaaaccaucuggugaugauagauacaaucaguuucacauaaggagauuugaagcauuacuucaaacuggaaaaagucccacuucugaauuacuguuugacuggggcaccacaaauugcacaguuggugaucuuguggaucuuuugauccaaaaugaauuuuuugcuccugcaagucuuuugcucccagaugcuguucccaaaacugcuaauacacuaccuucuaaagaagcuauaacaguucagcaaaaacagaugccuuucugugacaaagacaggacauugaugacaccugugcagaaucuugaacaaagcuauaugccaccugacuccucaaguccagaaaauaaaaguuuagaaguuagugauacacguuuucacaguuuuucauuuuaugaauugaagaaugucacaaauaacuuugaugaacgacccauuucuguuggugguaauaaaaugggagagggaggauuuggaguuguauauaaaggcuacguaaauaacacaacuguggcagugaagaagcuugcagcaaugguugacauuacuacugaagaacugaaacagcaguuugaucaagaaauaaaaguaauggcaaagugucaacaugaaaacuuaguagaacuacuugguuucucaagugauggagaugaccucugcuuaguauauguuuacaugccuaaugguucauugcuagacagacucucuugcuuggaugguacuccaccacuuucuuggcacaugagaugcaagauugcucagggugcagcuaauggcaucaauuuucuacaugaaaaucaucauauucauagagauauuaaaagugcaaauaucuuacuggaugaagcuuuuacugcuaaaauaucugacuuuggccuugcacgggcuucugagaaguuugcccagacagucaugacuagcagaauugugggaacaacagcuuauauggcaccagaagcuuugcguggagaaauaacacccaaaucugauauuuacagcuuuggugugguuuuacuagaaauaauaacuggacuuccagcuguggaugaacaccgugaaccucaguuauugcuagauauuaaagaagaaauugaagaugaagaaaagacaauugaagauuauauugauaaaaagaugaaugaugcugauuccacuucaguugaagcuauguacucuguugcuagucaaugucugcaugaaaagaaaaauaagagaccagacauuaagaagguucaacagcugcugcaagagaugacagcuucuuaa

SEQ ID NO: 8768 - RNA, 1383 nt, Artificial Sequence; identical to SEQ ID NO: 8747
  derived and/or modified sequence opt1 from IRAK4__Homo_sapiens__AAH13316

SEQ ID NO: 8769 - RNA, 1383 nt, Artificial Sequence; identical to SEQ ID NO: 8748
  derived and/or modified sequence opt2 from IRAK4__Homo_sapiens__AAH13316

SEQ ID NO: 8770 - RNA, 1383 nt, Artificial Sequence; identical to SEQ ID NO: 8749
  derived and/or modified sequence opt3 from IRAK4__Homo_sapiens__AAH13316

SEQ ID NO: 8771 - RNA, 1383 nt, Artificial Sequence; identical to SEQ ID NO: 8750
  derived and/or modified sequence opt4 from IRAK4__Homo_sapiens__AAH13316

SEQ ID NO: 8772 - RNA, 1383 nt, Artificial Sequence; identical to SEQ ID NO: 8751
  derived and/or modified sequence opt5 from IRAK4__Homo_sapiens__AAH13316

SEQ ID NO: 8773 - protein, 427 aa, Artificial Sequence
  IRF3__Homo_sapiens__A0A024QZE1
MGTPKPRILPWLVSQLDLGQLEGVAWVNKSRTRFRIPWKHGLRQDAQQEDFGIFQAWAEATGAYVPGRDKPDLPTWKRNFRSALNRKEGLRLAEDRSKDPHDPHKIYEFVNSGVGDFSQPDTSPDTNGGGSTSDTQEDILDELLGNMVLAPLPDPGPPSLAVAPEPCPQPLRSPSLDNPTPFPNLGPSENPLKRLLVPGEEWEFEVTAFYRGRQVFQQTISCPEGLRLVGSEVGDRTLPGWPVTLPDPGMSLTDRGVMSYVRHVLSCLGGGLALWRAGQWLWAQRLGHCHTYWAVSEELLPNSGHGPDGEVPKDKEGGVFDLGPFIVDLITFTEGSGRSPRYALWFCVGESWPQDQPWTKRLVMVKVVPTCLRALVEMARVGGASSLENTVDLHISNSHPLSLTSDQYKAYLQDLVEGMDFQGPGET

SEQ ID NO: 8774 - RNA, 1284 nt, Artificial Sequence
  IRF3__Homo_sapiens__EAW52513
augggaaccccaaagccacggauccugcccuggcuggugucgcagcuggaccuggggcaacuggagggcguggccugggugaacaagagccgcacgcgcuuccgcaucccuuggaagcacggccuacggcaggaugcacagcaggaggauuucggaaucuuccaggccugggccgaggccacuggugcauauguucccgggagggauaagccagaccugccaaccuggaagaggaauuuccgcucugcccucaaccgcaaagaaggguugcguuuagcagaggaccggagcaaggacccucacgacccacauaaaaucuacgaguuugugaacucaggaguuggggacuuuucccagccagacaccucuccggacaccaaugguggaggcaguacuucugauacccaggaagacauucuggaugaguuacuggguaacaugguguuggccccacucccagauccgggacccccaagccuggcuguagccccugagcccugcccucagccccugcggagccccagcuuggacaaucccacucccuucccaaaccuggggcccucugagaacccacugaagcggcuguuggugccgggggaagagugggaguucgaggugacagccuucuaccggggccgccaagucuuccagcagaccaucuccugcccggagggccugcggcuggugggguccgaagugggagacaggacgcugccuggauggccagucacacugccagacccuggcaugucccugacagacaggggagugaugagcuacgugaggcaugugcugagcugccugggugggggacuggcucucuggcgggccgggcaguggcucugggcccagcggcuggggcacugccacacauacugggcagugagcgaggagcugcuccccaacagcgggcaugggccugauggcgagguccccaaggacaaggaaggaggcguguuugaccuggggcccuucauuguagaucugauuaccuucacggaaggaagcggacgcucaccacgcuaugcccucugguucugugugggggagucauggccccaggaccagccguggaccaagaggcucgugauggucaagguugugcccacgugccucagggccuugguagaaauggcccggguagggggugccuccucccuggagaauacuguggaccugcacauuuccaacagccacccacucucccucaccuccgaccaguacaaggccuaccugcaggacuugguggagggcauggauuuccagggcccuggggagaccuga

SEQ ID NO: 8775 - RNA, 1284 nt, Artificial Sequence
  derived and/or modified sequence opt1 from IRF3__Homo_sapiens__EAW52513
augggcacccccaagccgcgcauccugcccuggcucgugagccagcuggaccuggggcagcucgagggcgucgccugggugaacaagucccggacccgcuuccggauccccuggaagcacgggcugcgccaggacgcccagcaggaggacuucggcaucuuccaggcgugggccgaggccacgggggccuacgugcccggccgggacaagccggaccugcccaccuggaagcgcaacuuccggagcgcccucaaccgcaaggagggccugcggcuggcggaggaccgcuccaaggacccccacgacccccacaagaucuacgaguucgucaacagcggggugggcgacuucucccagccggacaccagccccgacaccaacgggggcggguccacgagcgacacccaggaggacauccucgacgagcugcugggcaacauggugcucgcgccccugcccgacccgggcccgcccucccuggccgucgcccccgagcccugcccccagccccuccggagccccucccuggacaacccgacccccuuccccaaccuggggcccagcgagaacccgcucaagcgccugcuggugcccggcgaggagugggaguucgaggugaccgccuucuaccgggggcgccaggucuuccagcagacgaucuccugccccgagggccuccggcuggugggcagcgaggugggggaccgcacccugcccggcuggccggucacccuccccgaccccgggaugucccugaccgaccggggcgugaugagcuacgugcgccacguccuguccugccucgggggcggccuggcccuguggcgggccgggcaguggcucugggcccagcgccugggccacugccacacguacugggccgugagcgaggagcugcucccgaacuccgggcacggccccgacggggaggugcccaaggacaaggagggcggcgucuucgaccuggggcccuucaucguggaccugaucaccuucaccgagggcagcgggcggagcccgcgcuacgcgcucugguucugcgugggcgaguccuggccccaggaccagcccuggaccaagcgccuggucauggugaaggugguccccacgugccugcgggcccucguggagauggcccgcgucgggggcgccagcucccuggagaacaccguggaccugcacaucagcaacucccacccgcucagccugaccuccgaccaguacaaggccuaccugcaggaccucguggagggcauggacuuccaggggcccggcgagaccuga

SEQ ID NO: 8776 - RNA, 1284 nt, Artificial Sequence
  derived and/or modified sequence opt2 from IRF3__Homo_sapiens__EAW52513
augggcacccccaagccccgcauccuccccuggcucgucucccagcucgaccucggccagcucgagggcgucgccugggucaacaagucccgcacccgcuuccgcauccccuggaagcacggccuccgccaggacgcccagcaggaggacuucggcaucuuccaggccugggccgaggccaccggcgccuacguccccggccgcgacaagcccgaccuccccaccuggaagcgcaacuuccgcuccgcccucaaccgcaaggagggccuccgccucgccgaggaccgcuccaaggacccccacgacccccacaagaucuacgaguucgucaacuccggcgucggcgacuucucccagcccgacaccucccccgacaccaacggcggcggcuccaccuccgacacccaggaggacauccucgacgagcuccucggcaacaugguccucgccccccuccccgaccccggcccccccucccucgccgucgcccccgagcccugcccccagccccuccgcucccccucccucgacaaccccacccccuuccccaaccucggccccuccgagaacccccucaagcgccuccucguccccggcgaggagugggaguucgaggucaccgccuucuaccgcggccgccaggucuuccagcagaccaucuccugccccgagggccuccgccucgucggcuccgaggucggcgaccgcacccuccccggcuggcccgucacccuccccgaccccggcaugucccucaccgaccgcggcgucauguccuacguccgccacguccucuccugccucggcggcggccucgcccucuggcgcgccggccaguggcucugggcccagcgccucggccacugccacaccuacugggccgucuccgaggagcuccuccccaacuccggccacggccccgacggcgagguccccaaggacaaggagggcggcgucuucgaccucggccccuucaucgucgaccucaucaccuucaccgagggcuccggccgcuccccccgcuacgcccucugguucugcgucggcgaguccuggccccaggaccagcccuggaccaagcgccucgucauggucaaggucguccccaccugccuccgcgcccucgucgagauggcccgcgucggcggcgccuccucccucgagaacaccgucgaccuccacaucuccaacucccacccccucucccucaccuccgaccaguacaaggccuaccuccaggaccucgucgagggcauggacuuccagggccccggcgagaccuga

SEQ ID NO: 8777 - RNA, 1284 nt, Artificial Sequence
  derived and/or modified sequence opt3 from IRF3__Homo_sapiens__EAW52513
augggcacccccaagccuagaauccugccauggcucgugagccagcuugaccuggggcaauuggagggagucgccuggguuaacaaauccaggacacgguuccgcauuccguggaagcacgguuuacgacaggaugcucagcaggaagacuuuggcauauuccaagcaugggccgaggcgacuggggcuuacgugcccggacgugauaaaccugaccugccaacguggaagagaaauuuuaggucugcccuaaaccggaaagaaggccuccgccuggcagaggauagaucaaaggacccccaugauccucacaagaucuaugaguucguaaauaguggugugggggacuuuagccagccagauaccucccccgacacaaacggaggcggcucuacuucggauacccaggaagacauucuugaugagcuguuggggaauaugguccucgccccucugccagacccgggacccccuucacuggcuguggcaccagaacccugcccucagccacucaggagccccaguuuagacaacccgacaccuuuccccaaucuggguccauccgagaacccucuuaaacgguugcugguucccggcgaagagugggaguuugaagugaccgccuucuaccgcgggcgacaagucuuucagcagacuaucucuuguccagagggacuaagacucgugggcagcgaaguaggugauaggacacugcccggguggccuguuacccuuccagacccgggaaugucccugacggaucggggcgugaugucauauguccgucauguguugaguugccucggcgggggacuggcuuuauggcgcgccggucaguggcugugggcgcaaagacucggccacugucauacuuacugggcagugagcgaggaacuucugcccaauucugggcacggaccugacggcgaggucccaaaggauaaagagggugggguuuucgacuugggccccuuuauuguggaucuaaucaccuucacagaaggauccggcaggucaccucgguaugcccugugguuuugcguaggggagagcuggccacaggaccagcccuggacuaagcgacucgugauggucaaagugguuccgaccugucugcgcgcucuuguggaaauggccagagucggaggugcaaguucucuggagaacacaguggauuugcacauauccaauagccauccucucucgcugaccucugaccaauacaaggcuuauuuacaggaucugguagaaggcauggacuuccaggggccaggagagacguga

SEQ ID NO: 8778 - RNA, 1284 nt, Artificial Sequence
  derived and/or modified sequence opt4 from IRF3__Homo_sapiens__EAW52513
augggcacccccaagcccagaauccugcccuggcuggugagccagcuggaccugggccagcuggagggcguggccugggugaacaagagcagaaccagauucagaauccccuggaagcacggccugagacaggacgcccagcaggaggacuucggcaucuuccaggccugggccgaggccaccggcgccuacgugcccggcagagacaagcccgaccugcccaccuggaagagaaacuucagaagcgcccugaacagaaaggagggccugagacuggccgaggacagaagcaaggacccccacgacccccacaagaucuacgaguucgugaacagcggcgugggcgacuucagccagcccgacaccagccccgacaccaacggcggcggcagcaccagcgacacccaggaggacauccuggacgagcugcugggcaacauggugcuggccccccugcccgaccccggcccccccagccuggccguggcccccgagcccugcccccagccccugagaagccccagccuggacaaccccacccccuuccccaaccugggccccagcgagaacccccugaagagacugcuggugcccggcgaggagugggaguucgaggugaccgccuucuacagaggcagacagguguuccagcagaccaucagcugccccgagggccugagacuggugggcagcgaggugggcgacagaacccugcccggcuggcccgugacccugcccgaccccggcaugagccugaccgacagaggcgugaugagcuacgugagacacgugcugagcugccugggcggcggccuggcccuguggagagccggccaguggcugugggcccagagacugggccacugccacaccuacugggccgugagcgaggagcugcugcccaacagcggccacggccccgacggcgaggugcccaaggacaaggagggcggcguguucgaccugggccccuucaucguggaccugaucaccuucaccgagggcagcggcagaagccccagauacgcccugugguucugcgugggcgagagcuggccccaggaccagcccuggaccaagagacuggugauggugaagguggugcccaccugccugagagcccugguggagauggccagagugggcggcgccagcagccuggagaacaccguggaccugcacaucagcaacagccacccccugagccugaccagcgaccaguacaaggccuaccugcaggaccugguggagggcauggacuuccagggccccggcgagaccuga

SEQ ID NO: 8779 - RNA, 1284 nt, Artificial Sequence
  derived and/or modified sequence opt5 from IRF3__Homo_sapiens__EAW52513
augggcacccccaagccuagaauccugccguggcucgugagccagcuggaccuugggcaacuggagggagucgccuggguuaacaaaucccggacacgcuuccggauucccuggaagcacggccucagacaggaugcucagcaggaagacuuugggaucuuccaagccugggcggaggcuacgggagccuacgugccuggccgcgauaaacccgaccugccuaccuggaagagaaauuuucggucugcccuuaaccgcaaagaagggcugagacucgcugaggaucggagcaaggacccccaugauccucacaagauuuaugaguucgucaauuccggagugggcgacuuuucucagccggauacaagccccgacaccaacggcgggggauccacaucugauacccaggaagacauccuggaugagcugcucggcaauauggugcuggccccucuucccgacccugggcccccgagccuggcuguugccccugaacccugcccucagccccuccgcucccccagccuggacaacccuacaccguuccccaaucuuggaccuucugagaacccccugaaaagacuccuggugccuggcgaagagugggaguuugaagucaccgcguucuaccgggggcgccaaguguuucagcagacgauuuccugucccgagggacugagacucguuggcagcgaagugggcgaucggacccugccgggguggccugucacacuucccgacccuggaaugucucugaccgaucgcggcgugauguccuaugugagacauguccucagcugccuugggggaggccuggcccuguggcgggcugggcaguggcucugggcccaaagacugggacacugucauacauacugggcuguuucugaggaacugcuccccaauuccggccacggcccugacggggaggugcccaaggauaaagagggaggcguguucgaccuggggccguuuaucgucgaucuuaucaccuucacggaaggaagcggccgcuccccucgguaugcccugugguuuugcgugggggagucuuggccccaggaccagcccuggacaaagagacucguuauggugaaagucgugccuaccugucugcgcgcgcuuguugaaauggcccgggugggcggagcuagcucccuggagaacacagucgaucuccacauuagcaauucucauccgcugucccugaccagcgaccaauacaaggccuaucuccaggaucugguggaaggcauggacuuccaggggcccggagagaccuga

SEQ ID NO: 8780 - protein, 392 aa, Artificial Sequence [sequence omitted]

SEQ ID NO: 8781 - RNA, 1179 nt, Artificial Sequence
  IRF3__Homo_sapiens__ADN86147
augguggggcgcaagcaggguuggagcugcaggcuuacgggaauaaaaccgggaaagccggccugggccgaggccacuggugcauauguucccgggagggauaagccagaccugccaaccuggaagaggaauuuccgcucugcccucaaccgcaaagaaggguugcguuuagcagaggaccggagcaaggacccucacgacccacauaaaaucuacgaguuugugaacucaggaguuggggacuuuucccagccagacaccucuccggacaccaaugguggaggcaguacuucugauacccaggaagacauucuggaugaguuacuggguaacaugguguuggccccacucccagauccgggacccccaagccuggcuguagccccugagcccugcccucagccccugcggagccccagcuuggacaaucccacucccuucccaaaccuggggcccucugagaacccacugaagcggcuguuggugccgggggaagagugggaguucgaggugacagccuucuaccggggccgccaagucuuccagcagaccaucuccugcccggagggccugcggcuggugggguccgaagugggagacaggacgcugccuggauggccagucacacugccagacccuggcaugucccugacagacaggggagugaugagcuacgugaggcaugugccgagcugccugggugggggacuggcucucuggcgggccgggcaguggcucugggcccagcggcuggggcacugccacacauacugggcagugagcgaggagcugcuccccaacagcgggcaugggccugauggcgagguccccaaggacaaggaaggaggcguguuugaccuggggcccuucauuguagaucugauuaccuucacggaaggaagcggacgcucaccacgcuaugcccucugguucugugugggggagucauggccccaggaccagccguggaccaagaggcucgugauggucaagguugugcccacgugccucagggccuugguagaaauggcccggguagggggugccuccucccuggagaauacuguggaccugcacauuuccaacagccacccacucucccucaccuccgaccaguacaaggccuaccugcaggacuugguggagggcauggauuuccagggcccuggggagaccuga

SEQ ID NO: 8782 - RNA, 1179 nt, Artificial Sequence
  derived and/or modified sequence opt1 from IRF3__Homo_sapiens__ADN86147
auggugggccgcaagcagggguggagcugccggcugaccggcaucaagcccgggaagccggccugggccgaggcgaccggcgccuacguccccgggcgcgacaagcccgaccuccccacguggaagcggaacuuccgcuccgcccugaaccggaaggagggccugcgccucgccgaggaccggagcaaggacccgcacgacccccacaagaucuacgaguucgugaacuccggcgugggggacuucagccagcccgacaccucccccgacaccaacggcgggggcagcaccuccgacacgcaggaggacauccuggacgagcugcucgggaacaugguccuggccccgcugcccgaccccgggcccccgagccucgcgguggcccccgagcccugcccccagccgcugcgcucccccagccuggacaaccccacccccuucccgaaccucggccccuccgagaacccccugaagcggcugcucgugcccggggaggagugggaguucgaggucaccgccuucuaccgcggccgccagguguuccagcagaccaucagcugcccggaggggcugcggcuggugggcuccgaggucggcgaccggacgcuccccggguggcccgugacccugcccgacccgggcaugagccugaccgaccgcggggugauguccuacguccggcacgugcccagcugccucggcgggggccuggcccuguggcgcgcgggccaguggcucugggcccagcggcuggggcacugccacaccuacugggccguguccgaggagcugcuccccaacagcggccacgggccggacggcgagguccccaaggacaaggagggcggcguguucgaccugggccccuucaucguggaccugaucacguucaccgagggguccggccgcagcccccgguacgcccucugguucugcgucggggagagcuggccgcaggaccagcccuggaccaagcgccuggugauggugaaggucgugccgaccugccugcgggcccucguggagauggcgcgcgucggcggggccuccagccuggagaacacgguggaccugcacaucuccaacagccacccccucucccugaccagcgaccaguacaaggccuaccugcaggaccucgucgagggcauggacuuccagggccccggggagaccuga

SEQ ID NO: 8783 - RNA, 1179 nt, Artificial Sequence
  derived and/or modified sequence opt2 from IRF3__Homo_sapiens__ADN86147
auggucggccgcaagcagggcugguccugccgccucaccggcaucaagcccggcaagcccgccugggccgaggccaccggcgccuacguccccggccgcgacaagcccgaccuccccaccuggaagcgcaacuuccgcuccgcccucaaccgcaaggagggccuccgccucgccgaggaccgcuccaaggacccccacgacccccacaagaucuacgaguucgucaacuccggcgucggcgacuucucccagcccgacaccucccccgacaccaacggcggcggcuccaccuccgacacccaggaggacauccucgacgagcuccucggcaacaugguccucgccccccuccccgaccccggcccccccucccucgccgucgcccccgagcccugcccccagccccuccgcucccccucccucgacaaccccacccccuuccccaaccucggccccuccgagaacccccucaagcgccuccucguccccggcgaggagugggaguucgaggucaccgccuucuaccgcggccgccaggucuuccagcagaccaucuccugccccgagggccuccgccucgucggcuccgaggucggcgaccgcacccuccccggcuggcccgucacccuccccgaccccggcaugucccucaccgaccgcggcgucauguccuacguccgccacguccccuccugccucggcggcggccucgcccucuggcgcgccggccaguggcucugggcccagcgccucggccacugccacaccuacugggccgucuccgaggagcuccuccccaacuccggccacggccccgacggcgagguccccaaggacaaggagggcggcgucuucgaccucggccccuucaucgucgaccucaucaccuucaccgagggcuccggccgcuccccccgcuacgcccucugguucugcgucggcgaguccuggccccaggaccagcccuggaccaagcgccucgucauggucaaggucguccccaccugccuccgcgcccucgucgagauggcccgcgucggcggcgccuccucccucgagaacaccgucgaccuccacaucuccaacucccacccccucucccucaccuccgaccaguacaaggccuaccuccaggaccucgucgagggcauggacuuccagggccccggcgagaccuga

SEQ ID NO: 8784 - RNA, 1179 nt, Artificial Sequence
  derived and/or modified sequence opt3 from IRF3__Homo_sapiens__ADN86147
auggugggcagaaagcagggguggagcugcaggcugaccggaaucaaacccgguaagccugccugggcugaggcaacaggcgccuacgucccagggcgggacaaaccggaucuccccacuuggaagcgcaacuuccgauccgcgcuuaaucguaaagaaggacugagauuggcugaggacaggucuaaggauccucacgacccacauaagauuuaugaauuuguuaacucaggcgugggugauuucagucaacccgacacgagcccugauaccaaugggggaggcuccacaucugacacucaggaggauauauuagacgaacugcuaggcaacaugguacucgccccacugcccgauccugggccaccgucgcuugcaguggcccccgagccuuguccacagccccugcggucaccuagcuuggacaauccaacccccuuuccgaaccucggaccuagugagaauccccugaaacgccugcucgucccaggugaagagugggaguucgaagugacagcuuuuuacagaggcaggcagguuuuccaacagaccaucuccugcccugagggguuacggcuggugggaucugaagucggcgaucgcacucuucccgguuggccagugacauugcccgacccugggaugagccugaccgaccgaggaguaauguccuauguuagacacgugccaucaugucuaggcggcgggcucgcacuguggagggccggacaguggcuuugggcucagcggcugggucauugccacacguacugggccgucagugaggaauugcucccgaacagcggccaugggcccgauggagaggugccuaaggacaaagaaggcgguguguuugaucuggggccauucauugucgacuuaaucacuuuuaccgagggcucuggacguucaccccgcuaugcgcugugguucuguguuggcgaguccuggccucaagaucagccauggacaaagagacucgugaugguaaaagugguccccacuugccuuagggcacugguggaaauggcccggguugggggagcuagcaguuuggagaauaccguggaccuacacauuucuaacucccacccgcugagccucacaucggaucaguacaaggccuaucugcaggaccuugucgaagguauggauuuucaaggcccuggggagaccuga

SEQ ID NO: 8785 - RNA, 1179 nt, Artificial Sequence
  derived and/or modified sequence opt4 from IRF3__Homo_sapiens__ADN86147
auggugggcagaaagcagggcuggagcugcagacugaccggcaucaagcccggcaagcccgccugggccgaggccaccggcgccuacgugcccggcagagacaagcccgaccugcccaccuggaagagaaacuucagaagcgcccugaacagaaaggagggccugagacuggccgaggacagaagcaaggacccccacgacccccacaagaucuacgaguucgugaacagcggcgugggcgacuucagccagcccgacaccagccccgacaccaacggcggcggcagcaccagcgacacccaggaggacauccuggacgagcugcugggcaacauggugcuggccccccugcccgaccccggcccccccagccuggccguggcccccgagcccugcccccagccccugagaagccccagccuggacaaccccacccccuuccccaaccugggccccagcgagaacccccugaagagacugcuggugcccggcgaggagugggaguucgaggugaccgccuucuacagaggcagacagguguuccagcagaccaucagcugccccgagggccugagacuggugggcagcgaggugggcgacagaacccugcccggcuggcccgugacccugcccgaccccggcaugagccugaccgacagaggcgugaugagcuacgugagacacgugcccagcugccugggcggcggccuggcccuguggagagccggccaguggcugugggcccagagacugggccacugccacaccuacugggccgugagcgaggagcugcugcccaacagcggccacggccccgacggcgaggugcccaaggacaaggagggcggcguguucgaccugggccccuucaucguggaccugaucaccuucaccgagggcagcggcagaagccccagauacgcccugugguucugcgugggcgagagcuggccccaggaccagcccuggaccaagagacuggugauggugaagguggugcccaccugccugagagcccugguggagauggccagagugggcggcgccagcagccuggagaacaccguggaccugcacaucagcaacagccacccccugagccugaccagcgaccaguacaaggccuaccugcaggaccugguggagggcauggacuuccagggccccggcgagaccuga

SEQ ID NO: 8786 - RNA, 1179 nt, Artificial Sequence
  derived and/or modified sequence opt5 from IRF3__Homo_sapiens__ADN86147
auggugggcagaaagcagggguggagcugccggcugaccggaaucaaacccggcaagccugccugggcugaggccacaggggcguacgucccgggacgcgacaaacccgaucucccuacguggaagagaaacuuccgguccgcucugaaucgcaaagaaggccuuagacuggccgaggaccggucuaaggauccccacgacccucauaagauuuaugaauuuguuaacagcggggugggagauuucucccaacccgacaccucuccugauacaaauggcggcgggagcaccuccgacacacaggaggauauccucgacgaacugcuuggaaacauggugcuggccccgcuccccgauccugggcccccuucucuggcugucgcccccgagccguguccucagccccugcgcagcccuucccucgacaaucccacccccuuuccuaaccuggggccgagcgagaauccccuuaaaagacugcucgugccuggagaagagugggaguucgaaguuacagcuuuuuaccggggccgccagguguuccaacagaccauuucuugccccgaggggcugagacuugucggauccgaagugggcgaucggacgcugccuggcuggcccguuacccucccggacccugggaugagccugacagaccgcggagugaugucuuaugucagacacgugcccuccugucugggcgggggacucgcccuguggcgggcgggccaguggcuuugggcccagcgccuggggcauugccacaccuacugggcugugagcgaggaacuccugccuaacucuggacauggccccgauggcgaggucccuaaggacaaagaagggggaguuuuugaucuuggccccuucaucguggaccugauuacauuuaccgagggguccggaagaagcccgcgguaugcccucugguucugugugggcgaguccuggccucaagaucagcccuggacgaagagacuggucauggugaaaguugugcccacaugccugcgcgcucucgucgaaauggcccgggugggcggcgcgucuagccuggagaauaccguugaccuucacaucuccaacagccacccucugucucucacauccgaucaguacaaggccuaucugcaggaccuuguggaaggaauggauuuucaaggcccgggggagaccuga

SEQ ID NO: 8787 - protein, 154 aa, Artificial Sequence [sequence omitted]

SEQ ID NO: 8788 - RNA, 465 nt, Artificial Sequence
  IRF3__Homo_sapiens__ADN86148
augguguuggccccacucccagauccgggacccccaagccuggcuguagccccugagcccugcccucagccccugcggagccccagcuuggacaaucccacucccuucccaaaccuggggcccucugagaacccacugaagcggcuguuggugccgggggaagaucugauuaccuucacggaaggaagcggacgcucaccacgcuaugcccucugguucugugugggggagucauggccccaggaccagccguggaccaagaggcucgugauggucaagguugugcccacgugccucagggccuugguagaaauggcccggguagggggugccuccucccuggagaauacuguggaccugcacauuuccaacagccacccacucucccucaccuccgaccagcacaaggccuaccugcaggacuugguggagggcauggauuuccagggcccuggggagaccuga

SEQ ID NO: 8789 - RNA, 465 nt, Artificial Sequence
  derived and/or modified sequence opt1 from IRF3__Homo_sapiens__ADN86148
auggugcuggcgccccucccggaccccggcccgcccagccuggccgucgcccccgagcccugcccccagccccugcgcuccccgagccucgacaaccccacccccuuccccaaccuggggccguccgagaacccccugaagcggcuccuggugcccggcgaggaccugaucaccuucacggaggggagcggccgcagcccccgguacgcccucugguucugcgugggggaguccuggccgcaggaccagcccuggaccaagcgccuggucauggugaagguggucccgaccugccugcgggcccucguggagauggcccgcgugggcggcgccuccagccuggagaacaccgucgaccugcacaucuccaacagccacccccucucccugacgagcgaccagcacaaggcguaccugcaggaccucguggaggggauggacuuccagggccccggggagaccuga

SEQ ID NO: 8790 - RNA, 465 nt, Artificial Sequence
  derived and/or modified sequence opt2 from IRF3__Homo_sapiens__ADN86148
augguccucgccccccuccccgaccccggcccccccucccucgccgucgcccccgagcccugcccccagccccuccgcucccccucccucgacaaccccacccccuuccccaaccucggccccuccgagaacccccucaagcgccuccucguccccggcgaggaccucaucaccuucaccgagggcuccggccgcuccccccgcuacgcccucugguucugcgucggcgaguccuggccccaggaccagcccuggaccaagcgccucgucauggucaaggucguccccaccugccuccgcgcccucgucgagauggcccgcgucggcggcgccuccucccucgagaacaccgucgaccuccacaucuccaacucccacccccucucccucaccuccgaccagcacaaggccuaccuccaggaccucgucgagggcauggacuuccagggccccggcgagaccuga

SEQ ID NO: 8791 - RNA, 465 nt, Artificial Sequence
  derived and/or modified sequence opt3 from IRF3__Homo_sapiens__ADN86148
auggugcuggcuccccucccugacccaggcccgcccagccuugccgucgcaccugagccaugcccccagccucugagauccccaucuuuggauaaccccaccccuuucccaaauuuagggccgucagaaaacccccugaagaggcuacucguuccuggagaggaccugaucacauuuacugaagguaguggccggagcccacgcuacgcccuuugguucugugugggggaguccuggccccaagaucagccuuggacgaaacgacugguaauggugaaggucgugccaaccugcuugcgugcgcucguugaaauggcuagagugggaggcgccucuucgcuggagaauacagucgaccugcacauuucaaacagccauccccucaguuuaacuuccgaucagcacaaagcauaucugcaggaccuuguggaggguauggauuuucaagggccgggagaaaccuga

SEQ ID NO: 8792 - RNA, 465 nt, Artificial Sequence
  derived and/or modified sequence opt4 from IRF3__Homo_sapiens__ADN86148
auggugcuggccccccugcccgaccccggcccccccagccuggccguggcccccgagcccugcccccagccccugagaagccccagccuggacaaccccacccccuuccccaaccugggccccagcgagaacccccugaagagacugcuggugcccggcgaggaccugaucaccuucaccgagggcagcggcagaagccccagauacgcccugugguucugcgugggcgagagcuggccccaggaccagcccuggaccaagagacuggugauggugaagguggugcccaccugccugagagcccugguggagauggccagagugggcggcgccagcagccuggagaacaccguggaccugcacaucagcaacagccacccccugagccugaccagcgaccagcacaaggccuaccugcaggaccugguggagggcauggacuuccagggccccggcgagaccuga

SEQ ID NO: 8793 - RNA, 465 nt, Artificial Sequence
  derived and/or modified sequence opt5 from IRF3__Homo_sapiens__ADN86148
auggugcuggcuccccucccugacccggggcccccuagccuggcugucgcccccgagccuugcccccagccucuuagauccccgucucuggauaaccccaccccuuuccccaaucucggcccuagcgaaaacccccugaagcggcuucugguuccgggagaggaccucaucacauuuacggaaggcuccgggcgcucuccuagauacgcgcugugguucugugugggagagagcuggccccaagaucagccuuggaccaaacggcuggugauggucaaggugguucccacaugccuccgcgcucugguggaaauggccagagucggcggggccuccucucuugagaauaccguggaccugcacauuagcaacucccauccccucagccugacaucugaucagcacaaagccuaucuucaggaccugguugagggaauggauuuucaaggcccuggcgaaaccuga

SEQ ID NO: 8794 - protein, 281 aa, Artificial Sequence
  IRF3__Homo_sapiens__E2GIM7
MVLAPLPDPGPPSLAVAPEPCPQPLRSPSLDNPTPFPNLGPSENPLKRLLVPGEEWEFEVTAFYRGRQVFQQTISCPEGLRLVGSEVGDRTLPGWPVTLPDPGMSLTDRGVMSYVRHVLSCLGGGLALWRAGQWLWAQRLGHCHTYWAVSEELLPNSGHGPDGEVPKDKEGGVFDLGPFIVDLITFTEGSGRSPRYALWFCVGESWPQDQPWTKRLVMVKVVPTCLRALVEMARVGGASSLENTVDLHISNSHPLSLTSDQYKAYLQDLVEGMDFQGPGET

SEQ ID NO: 8795 - RNA, 846 nt, Artificial Sequence
  IRF3__Homo_sapiens__ADN86149
augguguuggccccacucccagauccgggacccccaagccuggcuguagccccugagcccugcccucagccccugcggagccccagcuuggacaaucccacucccuucccaaaccuggggcccucugagaacccacugaagcggcuguuggugccgggggaagagugggaguucgaggugacagccuucuaccggggccgccaagucuuccagcagaccaucuccugcccggagggccugcggcuggugggguccgaagugggagacaggacgcugccuggauggccagucacacugccagacccuggcaugucccugacagacaggggagugaugagcuacgugaggcaugugcugagcugccugggugggggacuggcucucuggcgggccgggcaguggcucugggcccagcggcuggggcacugccacacauacugggcagugagcgaggagcugcuccccaacagcgggcaugggccugauggcgagguccccaaggacaaggaaggaggcguguuugaccuggggcccuucauuguagaucugauuaccuucacggaaggaagcggacgcucaccacgcuaugcccucugguucugugugggggagucauggccccaggaccagccguggaccaagaggcucgugauggucaagguugugcccacgugccucagggccuugguagaaauggcccggguagggggugccuccucccuggagaauacuguggaccugcacauuuccaacagccacccacucucccucaccuccgaccaguacaaggccuaccugcaggacuugguggagggcauggauuuccagggcccuggggagaccuga

SEQ ID NO: 8796 - RNA, 846 nt, Artificial Sequence
  derived and/or modified sequence opt1 from IRF3__Homo_sapiens__ADN86149
auggugcuggcgccccucccggaccccggcccgcccagccuggccgucgcccccgagcccugcccccagccccugcgcuccccgagccucgacaaccccacccccuuccccaaccuggggccguccgagaacccccugaagcggcuccuggugcccggcgaggagugggaguucgaggugaccgccuucuaccgcgggcggcaggucuuccagcagacgaucagcugccccgagggccugcgccucgugggguccgaggugggcgaccggacccugccgggcuggcccgucacccugcccgaccccgggaugagccucaccgaccgcggcgugauguccuacgugcggcacguccugagcugccucgggggcgggcuggcccuguggcgcgccggccaguggcugugggcccagcggcucggccacugccacacguacugggcgguguccgaggagcugcugccgaacagcgggcacggccccgacggggaggugcccaaggacaaggagggcggcgucuucgaccucgggcccuucaucguggaccugaucaccuucaccgagggcuccgggcgcagcccgcgguacgcccugugguucugcgugggcgaguccuggccccaggaccagcccuggaccaagcgccucgucauggugaaggugguccccacgugccugcgggcccugguggagauggcccgcgucgggggcgcgagcucccucgagaacaccguggaccugcacaucagcaacucccacccgcugagccucaccuccgaccaguacaaggccuaccugcaggaccugguggagggcauggacuuccaggggcccggcgagaccuga

SEQ ID NO: 8797 - RNA, 846 nt, Artificial Sequence
  derived and/or modified sequence opt2 from IRF3__Homo_sapiens__ADN86149
augguccucgccccccuccccgaccccggcccccccucccucgccgucgcccccgagcccugcccccagccccuccgcucccccucccucgacaaccccacccccuuccccaaccucggccccuccgagaacccccucaagcgccuccucguccccggcgaggagugggaguucgaggucaccgccuucuaccgcggccgccaggucuuccagcagaccaucuccugccccgagggccuccgccucgucggcuccgaggucggcgaccgcacccuccccggcuggcccgucacccuccccgaccccggcaugucccucaccgaccgcggcgucauguccuacguccgccacguccucuccugccucggcggcggccucgcccucuggcgcgccggccaguggcucugggcccagcgccucggccacugccacaccuacugggccgucuccgaggagcuccuccccaacuccggccacggccccgacggcgagguccccaaggacaaggagggcggcgucuucgaccucggccccuucaucgucgaccucaucaccuucaccgagggcuccggccgcuccccccgcuacgcccucugguucugcgucggcgaguccuggccccaggaccagcccuggaccaagcgccucgucauggucaaggucguccccaccugccuccgcgcccucgucgagauggcccgcgucggcggcgccuccucccucgagaacaccgucgaccuccacaucuccaacucccacccccucucccucaccuccgaccaguacaaggccuaccuccaggaccucgucgagggcauggacuuccagggccccggcgagaccuga

SEQ ID NO: 8798 - RNA, 846 nt, Artificial Sequence
  derived and/or modified sequence opt3 from IRF3__Homo_sapiens__ADN86149
auggugcuggcuccccucccugacccaggcccgcccagccuugcugucgcaccugagccaugcccccagccucugagauccccaucuuuggauaaccccaccccuuucccaaauuuagggccgucagaaaacccccugaagaggcuacucguuccuggagaggaaugggaguuugaagugacagccuucuaccggggucgccaaguauuucagcagacuaucaguuguccagagggccugcgacuuguggggagcgaggucggagaccguacgcugcccggcuggccugugaccuugccagaucccgguaugucccucacagacagagggguuaugucuuaugugaggcacguccugucgugccugggaggcggccucgcguuauggcgggcugggcaguggcugugggcccaacgccuuggacauugucacacuuacugggcagugucagaagaguugcugccgaauagcggucauggcccugauggggaaguacccaaagacaaggagggaggcguuuucgaucuagguccauuuauuguggaccucauaaccuucacagaggggaguggaagauccccuagguaugcccugugguuuugcgucggcgaaucuuggccccaggaucagccauggaccaaacggcuugugauggugaaggucguucccacuugucugcgcgcuuugguggagauggcacgaguaggcggggccagcucccucgaaaacacaguggaccugcacaucucaaauagucauccuuuaagccugaccucugaucaguacaaagccuaucuccaagaccuugucgagggaauggauuuccaggguccaggcgaaacguga

SEQ ID NO: 8799 - RNA, 846 nt, Artificial Sequence
  derived and/or modified sequence opt4 from IRF3__Homo_sapiens__ADN86149
auggugcuggccccccugcccgaccccggcccccccagccuggccguggcccccgagcccugcccccagccccugagaagccccagccuggacaaccccacccccuuccccaaccugggccccagcgagaacccccugaagagacugcuggugcccggcgaggagugggaguucgaggugaccgccuucuacagaggcagacagguguuccagcagaccaucagcugccccgagggccugagacuggugggcagcgaggugggcgacagaacccugcccggcuggcccgugacccugcccgaccccggcaugagccugaccgacagaggcgugaugagcuacgugagacacgugcugagcugccugggcggcggccuggcccuguggagagccggccaguggcugugggcccagagacugggccacugccacaccuacugggccgugagcgaggagcugcugcccaacagcggccacggccccgacggcgaggugcccaaggacaaggagggcggcguguucgaccugggccccuucaucguggaccugaucaccuucaccgagggcagcggcagaagccccagauacgcccugugguucugcgugggcgagagcuggccccaggaccagcccuggaccaagagacuggugauggugaagguggugcccaccugccugagagcccugguggagauggccagagugggcggcgccagcagccuggagaacaccguggaccugcacaucagcaacagccacccccugagccugaccagcgaccaguacaaggccuaccugcaggaccugguggagggcauggacuuccagggccccggcgagaccuga

SEQ ID NO: 8800 - RNA, 846 nt, Artificial Sequence
  derived and/or modified sequence opt5 from IRF3__Homo_sapiens__ADN86149
auggugcuggcuccccucccugacccggggcccccuagccuggccgucgcccccgagccuugcccccagccucuuagauccccgucucuggauaaccccaccccuuuccccaaucucgggccuagcgaaaacccccugaagcggcuucugguuccgggagaggaaugggaguuugaagugacagcguucuaccgcggcagacaaguguuucagcagacgaucuccuguccugaggggcuccggcuggucggaucugaggugggcgaccgcacccugcccggguggccuguuacacuccccgaucccggaaugagccugaccgacagaggcgugauguccuauguccggcacgugcuuucuugccugggcgggggacucgcucuguggcgcgccggccaguggcuuugggcccaaagacuggggcauugucacacauacugggcuguuagcgaggaacuccugccuaauuccggacauggcccggauggggaagugcccaaagacaaggagggaggcgucuucgaucugggcccuuuuauuguggaccucaucaccuucacagaggggagcggacggucuccccgcuaugcccugugguuuugcgugggcgaauccuggccucaggaucagcccuggaccaaaagacuugucaugguuaagguggugccgacgugucugcgggcucucgucgagauggcccgcgugggcggagcgagcucucuggaaaacaccguugaccuucacauuuccaauagccauccucugucucucacauccgaucaguacaaagccuaucugcaagaccugguggagggcauggauuuccaggggcccggagaaaccuga

SEQ ID NO: 8801 - protein, 154 aa, Artificial Sequence [sequence omitted]

SEQ ID NO: 8802 - RNA, 465 nt, Artificial Sequence
  IRF3__Homo_sapiens__ADN86150
augguguuggccccacucccagauccgggacccccaagccuggcuguagccccugagcccugcccucagccccugcggagccccagcuuggacaaucccacucccuucccaaaccuggggcccucugagaacccacugaagcggcuguuggugccgggggaagaucugauuaccuucacggaaggaagcggacgcucaccacgcuaugcccucugguucugugugggggagucauggccccaggaccagccguggaccaagaggcucgugauggucaagguugugcccacgugccucagggccuugguagaaauggcccggguagggggugccuccucccuggagaauacuguggaccugcacauuuccaacagccacccacucucccucaccuccgaccaguacaaggccuaccugcaggacuugguggagggcauggauuuccagggcccuggggagaccuga

SEQ ID NO: 8803 - RNA, 465 nt, Artificial Sequence
  derived and/or modified sequence opt1 from IRF3__Homo_sapiens__ADN86150
auggugcuggcgccccucccggaccccggcccgcccagccuggccgucgcccccgagcccugcccccagccccugcgcuccccgagccucgacaaccccacccccuuccccaaccuggggccguccgagaacccccugaagcggcuccuggugcccggcgaggaccugaucaccuucacggaggggagcggccgcagcccccgguacgcccucugguucugcgugggggaguccuggccgcaggaccagcccuggaccaagcgccuggucauggugaagguggucccgaccugccugcgggcccucguggagauggcccgcgugggcggcgccuccagccuggagaacaccgucgaccugcacaucuccaacagccacccccucucccugacgagcgaccaguacaaggcguaccugcaggaccucguggaggggauggacuuccagggccccggggagaccuga

SEQ ID NO: 8804 - RNA, 465 nt, Artificial Sequence
  derived and/or modified sequence opt2 from IRF3__Homo_sapiens__ADN86150
augguccucgccccccuccccgaccccggcccccccucccucgccgucgcccccgagcccugcccccagccccuccgcucccccucccucgacaaccccacccccuuccccaaccucggccccuccgagaacccccucaagcgccuccucguccccggcgaggaccucaucaccuucaccgagggcuccggccgcuccccccgcuacgcccucugguucugcgucggcgaguccuggccccaggaccagcccuggaccaagcgccucgucauggucaaggucguccccaccugccuccgcgcccucgucgagauggcccgcgucggcggcgccuccucccucgagaacaccgucgaccuccacaucuccaacucccacccccucucccucaccuccgaccaguacaaggccuaccuccaggaccucgucgagggcauggacuuccagggccccggcgagaccuga

SEQ ID NO: 8805 - RNA, 465 nt, Artificial Sequence
  derived and/or modified sequence opt3 from IRF3__Homo_sapiens__ADN86150
auggugcuggcuccccucccugacccaggcccgcccagccuugccgucgcaccugagccaugcccccagccucugagauccccaucuuuggauaaccccaccccuuucccaaauuuagggccgucagaaaacccccugaagaggcuacucguuccuggagaggaccugaucacauuuacugaagguaguggccggagcccacgcuacgcccuuugguucugugugggggaguccuggccccaagaucagccuuggacgaaacgacugguaauggugaaggucgugccaaccugcuugcgugcgcucguugaaauggcuagagugggaggcgccucuucgcuggagaauacagucgaccugcacauuucaaacagccauccccucaguuuaacuuccgaucaguauaaagcauaccugcaggaccuuguggaggguauggauuuucaagggccgggagaaaccuga

SEQ ID NO: 8806 - RNA, 465 nt, Artificial Sequence
  derived and/or modified sequence opt4 from IRF3__Homo_sapiens__ADN86150
auggugcuggccccccugcccgaccccggcccccccagccuggccguggcccccgagcccugcccccagccccugagaagccccagccuggacaaccccacccccuuccccaaccugggccccagcgagaacccccugaagagacugcuggugcccggcgaggaccugaucaccuucaccgagggcagcggcagaagccccagauacgcccugugguucugcgugggcgagagcuggccccaggaccagcccuggaccaagagacuggugauggugaagguggugcccaccugccugagagcccugguggagauggccagagugggcggcgccagcagccuggagaacaccguggaccugcacaucagcaacagccacccccugagccugaccagcgaccaguacaaggccuaccugcaggaccugguggagggcauggacuuccagggccccggcgagaccuga

SEQ ID NO: 8807 - RNA, 465 nt, Artificial Sequence
  derived and/or modified sequence opt5 from IRF3__Homo_sapiens__ADN86150
auggugcuggcuccccucccugacccggggcccccuagccuggcugucgcccccgagccuugcccccagccucuuagauccccgucucuggauaaccccaccccuuuccccaaucucggcccuagcgaaaacccccugaagcggcuucugguuccgggagaggaccucaucacauuuacggaaggcuccgggcgcucuccuagauacgcgcugugguucugugugggagagagcuggccccaagaucagccuuggaccaaacggcuggugauggucaaggugguucccacaugccuccgcgcucugguggaaauggccagagucggcggggccuccucucuugagaauaccguggaccugcacauuagcaacucccauccccucagccugacaucugaucaguauaaagccuaccuucaggaccugguugagggaauggauuuucaaggcccuggcgaaaccuga

SEQ ID NO: 8808 - protein, 300 aa, Artificial Sequence [sequence omitted]

SEQ ID NO: 8809 - RNA, 903 nt, Artificial Sequence
  IRF3__Homo_sapiens__ADN86151
augggaaccccaaagccacggauccugcccuggcuggugucgcagcuggaccuggggcaacuggagggcguggccugggugaacaagagccgcacgcgcuuccgcaucccuuggaagcacggccuacggcaggaugcacagcaggaggauuucggaaucuuccaggccugggccgaggccacuggugcauauguucccgggagggauaagccagaccugccaaccuggaagaggaauuuccgcucugcccucaaccgcaaagaaggguugcguuuagcagaggaccggagcaaggacccucacgacccacauaaaaucuacgaguuugugaacucaggaguuggggacuuuucccagccagacaccucuccggacaccaaugguggaggcaguacuucugauacccaggaagacauucuggacgaguuacuggguaacaugguguuggccccacucccagauccgggacccccaagccuggcuguagccccugagcccugcccucagccccugcggagccccagcuuggacaaucccacucccuucccaaaccuggggcccucugagaacccacugaagcggcuguuggugccgggggaagaucugauuaccuucacggaaggaagcggacguucaccacgcuaugcccucugguucugugugggggagucauggccccaggaccagccguggaccaagaggcucgugauggucaagguugugcccacgugccucagggccuugguagaaauggcccggguagggggugccuccucccuggagaauacuguggaccugcacauuuccaacagccacccacucucccucaccuccgaccaguacaaggccuaccugcaggacuugguggagggcauggauuuccagggcccuggggagaccuga

SEQ ID NO: 8810 - RNA, 903 nt, Artificial Sequence
  derived and/or modified sequence opt1 from IRF3__Homo_sapiens__ADN86151
augggcacccccaagccgcgcauccugcccuggcucgugagccagcuggaccuggggcagcucgagggcgucgccugggugaacaagucccggacccgcuuccggauccccuggaagcacgggcugcgccaggacgcccagcaggaggacuucggcaucuuccaggcgugggccgaggccacgggggccuacgugcccggccgggacaagccggaccugcccaccuggaagcgcaacuuccggagcgcccucaaccgcaaggagggccugcggcuggcggaggaccgcuccaaggacccccacgacccccacaagaucuacgaguucgucaacagcggggugggcgacuucucccagccggacaccagccccgacaccaacgggggcggguccacgagcgacacccaggaggacauccucgacgagcugcugggcaacauggugcucgcgccccugcccgacccgggcccgcccucccuggccgucgcccccgagcccugcccccagccccuccggagccccucccuggacaacccgacccccuuccccaaccuggggcccagcgagaacccgcucaagcgccugcuggugcccggcgaggaccucaucaccuucacggagggguccggccggagcccccgcuacgcccugugguucugcgugggcgaguccuggccccaggaccagccguggaccaagcggcuggucauggugaagguggucccgaccugccuccgcgcccugguggagauggcccgggucgggggcgccagcucccuggagaacaccguggaccuccacaucagcaacucccacccccugagccugacgagcgaccaguacaaggccuaccuccaggaccugguggaggggauggacuuccagggccccggggagaccuga

SEQ ID NO: 8811 - RNA, 903 nt, Artificial Sequence
  derived and/or modified sequence opt2 from IRF3__Homo_sapiens__ADN86151
augggcacccccaagccccgcauccuccccuggcucgucucccagcucgaccucggccagcucgagggcgucgccugggucaacaagucccgcacccgcuuccgcauccccuggaagcacggccuccgccaggacgcccagcaggaggacuucggcaucuuccaggccugggccgaggccaccggcgccuacguccccggccgcgacaagcccgaccuccccaccuggaagcgcaacuuccgcuccgcccucaaccgcaaggagggccuccgccucgccgaggaccgcuccaaggacccccacgacccccacaagaucuacgaguucgucaacuccggcgucggcgacuucucccagcccgacaccucccccgacaccaacggcggcggcuccaccuccgacacccaggaggacauccucgacgagcuccucggcaacaugguccucgccccccuccccgaccccggcccccccucccucgccgucgcccccgagcccugcccccagccccuccgcucccccucccucgacaaccccacccccuuccccaaccucggccccuccgagaacccccucaagcgccuccucguccccggcgaggaccucaucaccuucaccgagggcuccggccgcuccccccgcuacgcccucugguucugcgucggcgaguccuggccccaggaccagcccuggaccaagcgccucgucauggucaaggucguccccaccugccuccgcgcccucgucgagauggcccgcgucggcggcgccuccucccucgagaacaccgucgaccuccacaucuccaacucccacccccucucccucaccuccgaccaguacaaggccuaccuccaggaccucgucgagggcauggacuuccagggccccggcgagaccuga

SEQ ID NO: 8812 - RNA, 903 nt, Artificial Sequence
  derived and/or modified sequence opt3 from IRF3__Homo_sapiens__ADN86151
augggcacccccaagccuagaauccugccauggcucgugagccagcuugaccuggggcaauuggagggagucgccuggguuaacaaauccaggacacgguuccgcauuccguggaagcacgguuuacgacaggaugcucagcaggaagacuuuggcauauuccaagcaugggccgaggcgacuggggcuuacgugcccggacgugauaaaccugaccugccaacguggaagagaaauuuuaggucugcccuaaaccggaaagaaggccuccgccuggcagaggauagaucaaaggacccccaugauccucacaagaucuaugaguucguaaauaguggugugggggacuuuagccagccagauaccucccccgacacaaacggaggcggcucuacuucggauacccaggaagacauucuugaugagcuguuggggaauaugguccucgccccucugccagacccgggacccccuucacuggcuguggcaccagaacccugcccucagccacucaggagccccaguuuagacaacccgacaccuuuccccaaucuggguccauccgagaacccucuuaaacgguugcugguucccggcgaagaucuaaucaccuuuacugaggggucuggacgcagcccacgauacgcccucugguucugugugggcgaguccuggccccaagaccagccuuggacaaagagacuggucauggugaaaguaguuccaaccugccuuagggcucugguggaaauggcccgggucgguggggcgucaaguuuggagaauacgguggaucuccauauuagcaacucucacccgcuguccuuaacuucagaccaguauaaggcauaccugcaggaucucguggaaggaauggacuuucaaggccccggcgagaccuga

SEQ ID NO: 8813 - RNA, 903 nt, Artificial Sequence
  derived and/or modified sequence opt4 from IRF3__Homo_sapiens__ADN86151
augggcacccccaagcccagaauccugcccuggcuggugagccagcuggaccugggccagcuggagggcguggccugggugaacaagagcagaaccagauucagaauccccuggaagcacggccugagacaggacgcccagcaggaggacuucggcaucuuccaggccugggccgaggccaccggcgccuacgugcccggcagagacaagcccgaccugcccaccuggaagagaaacuucagaagcgcccugaacagaaaggagggccugagacuggccgaggacagaagcaaggacccccacgacccccacaagaucuacgaguucgugaacagcggcgugggcgacuucagccagcccgacaccagccccgacaccaacggcggcggcagcaccagcgacacccaggaggacauccuggacgagcugcugggcaacauggugcuggccccccugcccgaccccggcccccccagccuggccguggcccccgagcccugcccccagccccugagaagccccagccuggacaaccccacccccuuccccaaccugggccccagcgagaacccccugaagagacugcuggugcccggcgaggaccugaucaccuucaccgagggcagcggcagaagccccagauacgcccugugguucugcgugggcgagagcuggccccaggaccagcccuggaccaagagacuggugauggugaagguggugcccaccugccugagagcccugguggagauggccagagugggcggcgccagcagccuggagaacaccguggaccugcacaucagcaacagccacccccugagccugaccagcgaccaguacaaggccuaccugcaggaccugguggagggcauggacuuccagggccccggcgagaccuga

SEQ ID NO: 8814 - RNA, 903 nt, Artificial Sequence
  derived and/or modified sequence opt5 from IRF3__Homo_sapiens__ADN86151
augggcacccccaagccuagaauccugccguggcucgugagccagcuggaccuugggcaacuggagggagucgccuggguuaacaaaucccggacacgcuuccggauucccuggaagcacggccucagacaggaugcucagcaggaagacuuugggaucuuccaagccugggcggaggcuacgggagccuacgugccuggccgcgauaaacccgaccugccuaccuggaagagaaauuuucggucugcccuuaaccgcaaagaagggcugagacucgcugaggaucggagcaaggacccccaugauccucacaagauuuaugaguucgucaauuccggagugggcgacuuuucucagccggauacaagccccgacaccaacggcgggggauccacaucugauacccaggaagacauccuggaugagcugcucggcaauauggugcuggccccucuucccgacccugggcccccgagccuggcuguugccccugaacccugcccucagccccuccgcucccccagccuggacaacccuacaccguuccccaaucuuggaccuucugagaacccccugaaaagacuccuggugccuggcgaagaucugauuaccuuuacggagggguccggacggagcccccgcuacgcgcucugguucugugucggcgagucuuggccgcaagaccagccuuggaccaagagacuggugaugguuaaagugguccccacaugccuucgggcccugguggaaauggcucgcgugggcggggccuccagccucgagaauaccgucgaucugcauaucucuaacucccacccucuuagccugacauccgaccaguauaaggcuuaccuccaggaucugguugaaggaauggacuuucaaggccccggggagaccuga

SEQ ID NO: 8815 - protein, 427 aa, Artificial Sequence
  IRF3__Homo_sapiens__Q14653
MGTPKPRILPWLVSQLDLGQLEGVAWVNKSRTRFRIPWKHGLRQDAQQEDFGIFQAWAEATGAYVPGRDKPDLPTWKRNFRSALNRKEGLRLAEDRSKDPHDPHKIYEFVNSGVGDFSQPDTSPDTNGGGSTSDTQEDILDELLGNMVLAPLPDPGPPSLAVAPEPCPQPLRSPSLDNPTPFPNLGPSENPLKRLLVPGEEWEFEVTAFYRGRQVFQQTISCPEGLRLVGSEVGDRTLPGWPVTLPDPGMSLTDRGVMSYVRHVLSCLGGGLALWRAGQWLWAQRLGHCHTYWAVSEELLPNSGHGPDGEVPKDKEGGVFDLGPFIVDLITFTEGSGRSPRYALWFCVGESWPQDQPWTKRLVMVKVVPTCLRALVEMARVGGASSLENTVDLHISNSHPLSLTSDQYKAYLQDLVEGMDFQGPGES

SEQ ID NO: 8816 - RNA, 1284 nt, Artificial Sequence
  IRF3__Homo_sapiens__AAH71721
augggaaccccaaagccacggauccugcccuggcuggugucgcagcuggaccuggggcaacuggagggcguggccugggugaacaagagccgcacgcgcuuccgcaucccuuggaagcacggccuacggcaggaugcacagcaggaggauuucggaaucuuccaggccugggccgaggccacuggugcauauguucccgggagggauaagccagaccugccaaccuggaagaggaauuuccgcucugcccucaaccgcaaagaaggguugcguuuagcagaggaccggagcaaggacccucacgacccacauaaaaucuacgaguuugugaacucaggaguuggggacuuuucccagccagacaccucuccggacaccaaugguggaggcaguacuucugauacccaggaagacauucuggaugaguuacuggguaacaugguguuggccccacucccagauccgggacccccaagccuggcuguagccccugagcccugcccucagccccugcggagccccagcuuggacaaucccacucccuucccaaaccuggggcccucugagaacccacugaagcggcuguuggugccgggggaagagugggaguucgaggugacagccuucuaccggggccgccaagucuuccagcagaccaucuccugcccggagggccugcggcuggugggguccgaagugggagacaggacgcugccuggauggccagucacacugccagacccuggcaugucccugacagacaggggagugaugagcuacgugaggcaugugcugagcugccugggugggggacuggcucucuggcgggccgggcaguggcucugggcccagcggcuggggcacugccacacauacugggcagugagcgaggagcugcuccccaacagcgggcaugggccugauggcgagguccccaaggacaaggaaggaggcguguuugaccuggggcccuucauuguagaucugauuaccuucacggaaggaagcggacgcucaccacgcuaugcccucugguucugugugggggagucauggccccaggaccagccguggaccaagaggcucgugauggucaagguugugcccacgugccucagggccuugguagaaauggcccggguagggggugccuccucccuggagaauacuguggaccugcacauuuccaacagccacccacucucccucaccuccgaccaguacaaggccuaccugcaggacuugguggagggcauggauuuccagggcccuggggagagcuga

SEQ ID NO: 8817 - RNA, 1284 nt, Artificial Sequence
  derived and/or modified sequence opt1 from IRF3__Homo_sapiens__AAH71721
augggcacccccaagccgcgcauccugcccuggcucgugagccagcuggaccuggggcagcucgagggcgucgccugggugaacaagucccggacccgcuuccggauccccuggaagcacgggcugcgccaggacgcccagcaggaggacuucggcaucuuccaggcgugggccgaggccacgggggccuacgugcccggccgggacaagccggaccugcccaccuggaagcgcaacuuccggagcgcccucaaccgcaaggagggccugcggcuggcggaggaccgcuccaaggacccccacgacccccacaagaucuacgaguucgucaacagcggggugggcgacuucucccagccggacaccagccccgacaccaacgggggcggguccacgagcgacacccaggaggacauccucgacgagcugcugggcaacauggugcucgcgccccugcccgacccgggcccgcccucccuggccgucgcccccgagcccugcccccagccccuccggagccccucccuggacaacccgacccccuuccccaaccuggggcccagcgagaacccgcucaagcgccugcuggugcccggcgaggagugggaguucgaggugaccgccuucuaccgggggcgccaggucuuccagcagacgaucuccugccccgagggccuccggcuggugggcagcgaggugggggaccgcacccugcccggcuggccggucacccuccccgaccccgggaugucccugaccgaccggggcgugaugagcuacgugcgccacguccuguccugccucgggggcggccuggcccuguggcgggccgggcaguggcucugggcccagcgccugggccacugccacacguacugggccgugagcgaggagcugcucccgaacuccgggcacggccccgacggggaggugcccaaggacaaggagggcggcgucuucgaccuggggcccuucaucguggaccugaucaccuucaccgagggcagcgggcggagcccgcgcuacgcgcucugguucugcgugggcgaguccuggccccaggaccagcccuggaccaagcgccuggucauggugaaggugguccccacgugccugcgggcccucguggagauggcccgcgucgggggcgccagcucccuggagaacaccguggaccugcacaucagcaacucccacccgcucagccugaccuccgaccaguacaaggccuaccugcaggaccucguggagggcauggacuuccaggggcccggcgagagcuga

SEQ ID NO: 8818 - RNA, 1284 nt, Artificial Sequence
  derived and/or modified sequence opt2 from IRF3__Homo_sapiens__AAH71721
augggcacccccaagccccgcauccuccccuggcucgucucccagcucgaccucggccagcucgagggcgucgccugggucaacaagucccgcacccgcuuccgcauccccuggaagcacggccuccgccaggacgcccagcaggaggacuucggcaucuuccaggccugggccgaggccaccggcgccuacguccccggccgcgacaagcccgaccuccccaccuggaagcgcaacuuccgcuccgcccucaaccgcaaggagggccuccgccucgccgaggaccgcuccaaggacccccacgacccccacaagaucuacgaguucgucaacuccggcgucggcgacuucucccagcccgacaccucccccgacaccaacggcggcggcuccaccuccgacacccaggaggacauccucgacgagcuccucggcaacaugguccucgccccccuccccgaccccggcccccccucccucgccgucgcccccgagcccugcccccagccccuccgcucccccucccucgacaaccccacccccuuccccaaccucggccccuccgagaacccccucaagcgccuccucguccccggcgaggagugggaguucgaggucaccgccuucuaccgcggccgccaggucuuccagcagaccaucuccugccccgagggccuccgccucgucggcuccgaggucggcgaccgcacccuccccggcuggcccgucacccuccccgaccccggcaugucccucaccgaccgcggcgucauguccuacguccgccacguccucuccugccucggcggcggccucgcccucuggcgcgccggccaguggcucugggcccagcgccucggccacugccacaccuacugggccgucuccgaggagcuccuccccaacuccggccacggccccgacggcgagguccccaaggacaaggagggcggcgucuucgaccucggccccuucaucgucgaccucaucaccuucaccgagggcuccggccgcuccccccgcuacgcccucugguucugcgucggcgaguccuggccccaggaccagcccuggaccaagcgccucgucauggucaaggucguccccaccugccuccgcgcccucgucgagauggcccgcgucggcggcgccuccucccucgagaacaccgucgaccuccacaucuccaacucccacccccucucccucaccuccgaccaguacaaggccuaccuccaggaccucgucgagggcauggacuuccagggccccggcgaguccuga

SEQ ID NO: 8819 - RNA, 1284 nt, Artificial Sequence
  derived and/or modified sequence opt3 from IRF3__Homo_sapiens__AAH71721
augggcacccccaagccuagaauccugccauggcucgugagccagcuugaccuggggcaauuggagggagucgccuggguuaacaaauccaggacacgguuccgcauuccguggaagcacgguuuacgacaggaugcucagcaggaagacuuuggcauauuccaagcaugggccgaggcgacuggggcuuacgugcccggacgugauaaaccugaccugccaacguggaagagaaauuuuaggucugcccuaaaccggaaagaaggccuccgccuggcagaggauagaucaaaggacccccaugauccucacaagaucuaugaguucguaaauaguggugugggggacuuuagccagccagauaccucccccgacacaaacggaggcggcucuacuucggauacccaggaagacauucuugaugagcuguuggggaauaugguccucgccccucugccagacccgggacccccuucacuggcuguggcaccagaacccugcccucagccacucaggagccccaguuuagacaacccgacaccuuuccccaaucuggguccauccgagaacccucuuaaacgguugcugguucccggcgaagagugggaguuugaagugaccgccuucuaccgcgggcgacaagucuuucagcagacuaucucuuguccagagggacuaagacucgugggcagcgaaguaggugauaggacacugcccggguggccuguuacccuuccagacccgggaaugucccugacggaucggggcgugaugucauauguccgucauguguugaguugccucggcgggggacuggcuuuauggcgcgccggucaguggcugugggcgcaaagacucggccacugucauacuuacugggcagugagcgaggaacuucugcccaauucugggcacggaccugacggcgaggucccaaaggauaaagagggugggguuuucgacuugggccccuuuauuguggaucuaaucaccuucacagaaggauccggcaggucaccucgguaugcccugugguuuugcguaggggagagcuggccacaggaccagcccuggacuaagcgacucgugauggucaaagugguuccgaccugucugcgcgcucuuguggaaauggccagagucggaggugcaaguucucuggagaacacaguggauuugcacauauccaauagccauccucucucgcugaccucugaccaauacaaggcuuauuuacaggaucugguagaaggcauggacuuccaggggccaggagaguccuga

SEQ ID NO: 8820 - RNA, 1284 nt, Artificial Sequence
  derived and/or modified sequence opt4 from IRF3__Homo_sapiens__AAH71721
augggcacccccaagcccagaauccugcccuggcuggugagccagcuggaccugggccagcuggagggcguggccugggugaacaagagcagaaccagauucagaauccccuggaagcacggccugagacaggacgcccagcaggaggacuucggcaucuuccaggccugggccgaggccaccggcgccuacgugcccggcagagacaagcccgaccugcccaccuggaagagaaacuucagaagcgcccugaacagaaaggagggccugagacuggccgaggacagaagcaaggacccccacgacccccacaagaucuacgaguucgugaacagcggcgugggcgacuucagccagcccgacaccagccccgacaccaacggcggcggcagcaccagcgacacccaggaggacauccuggacgagcugcugggcaacauggugcuggccccccugcccgaccccggcccccccagccuggccguggcccccgagcccugcccccagccccugagaagccccagccuggacaaccccacccccuuccccaaccugggccccagcgagaacccccugaagagacugcuggugcccggcgaggagugggaguucgaggugaccgccuucuacagaggcagacagguguuccagcagaccaucagcugccccgagggccugagacuggugggcagcgaggugggcgacagaacccugcccggcuggcccgugacccugcccgaccccggcaugagccugaccgacagaggcgugaugagcuacgugagacacgugcugagcugccugggcggcggccuggcccuguggagagccggccaguggcugugggcccagagacugggccacugccacaccuacugggccgugagcgaggagcugcugcccaacagcggccacggccccgacggcgaggugcccaaggacaaggagggcggcguguucgaccugggccccuucaucguggaccugaucaccuucaccgagggcagcggcagaagccccagauacgcccugugguucugcgugggcgagagcuggccccaggaccagcccuggaccaagagacuggugauggugaagguggugcccaccugccugagagcccugguggagauggccagagugggcggcgccagcagccuggagaacaccguggaccugcacaucagcaacagccacccccugagccugaccagcgaccaguacaaggccuaccugcaggaccugguggagggcauggacuuccagggccccggcgagagcuga

SEQ ID NO: 8821 - RNA, 1284 nt, Artificial Sequence
  derived and/or modified sequence opt5 from IRF3__Homo_sapiens__AAH71721
augggcacccccaagccuagaauccugccguggcucgugagccagcuggaccuugggcaacuggagggagucgccuggguuaacaaaucccggacacgcuuccggauucccuggaagcacggccucagacaggaugcucagcaggaagacuuugggaucuuccaagccugggcggaggcuacgggagccuacgugccuggccgcgauaaacccgaccugccuaccuggaagagaaauuuucggucugcccuuaaccgcaaagaagggcugagacucgcugaggaucggagcaaggacccccaugauccucacaagauuuaugaguucgucaauuccggagugggcgacuuuucucagccggauacaagccccgacaccaacggcgggggauccacaucugauacccaggaagacauccuggaugagcugcucggcaauauggugcuggccccucuucccgacccugggcccccgagccuggcuguugccccugaacccugcccucagccccuccgcucccccagccuggacaacccuacaccguuccccaaucuuggaccuucugagaacccccugaaaagacuccuggugccuggcgaagagugggaguuugaagucaccgcguucuaccgggggcgccaaguguuucagcagacgauuuccugucccgagggacugagacucguuggcagcgaagugggcgaucggacccugccgggguggccugucacacuucccgacccuggaaugucucugaccgaucgcggcgugauguccuaugugagacauguccucagcugccuugggggaggccuggcccuguggcgggcugggcaguggcucugggcccaaagacugggacacugucauacauacugggcuguuucugaggaacugcuccccaauuccggccacggcccugacggggaggugcccaaggauaaagagggaggcguguucgaccuggggccguuuaucgucgaucuuaucaccuucacggaaggaagcggccgcuccccucgguaugcccugugguuuugcgugggggagucuuggccccaggaccagcccuggacaaagagacucguuauggugaaagucgugccuaccugucugcgcgcgcuuguugaaauggcccgggugggcggagcuagcucccuggagaacacagucgaucuccacauuagcaauucucauccgcugucccugaccagcgaccaauacaaggccuaucuccaggaucugguggaaggcauggacuuccaggggcccggagagucuuga

SEQ ID NO: 8822 - protein, 452 aa, Artificial Sequence
  IRF3__Homo_sapiens__Q96GL3
MGTPKPRILPWLVSQLDLGQLEGVAWVNKSRTRFRIPWKHGLRQDAQQEDFGIFQAWAEATGAYVPGRDKPDLPTWKRNFRSALNRKEGLRLAEDRSKDPHDPHKIYEFVNSGVGDFSQPDTSPDTNGGGSTSDTQEDILDELLGNMVLAPLPDPGPPSLAVAPEPCPQPLRSPSLDNPTPFPNLGPSENPLKRLLVPGEEWEFEVTAFYRGRQVFQQTISCPEGLRLVGSEVGDRTLPGWPVTLPDPGMSLTDRGVMSYVRHVLSCLGGGLALWRAGQWLWAQRLGHCHTYWAVSEELLPNSGHGPDGEVPKDKEGGVFDLGPFIVGSWAPRSDYLHGRKRTLTTLCPLVLCGGVMAPGPAVDQEARDGQGCAHVPQGLGRNGPGRGCLLPGEYCGPAHFQQPPTLPHLRPVQGLPAGLGGGHGFPGPWGDLSPRSSWCASNPPVPHHLNQ

SEQ ID NO: 8823 - RNA, 1359 nt, Artificial Sequence
  IRF3__Homo_sapiens__AAH09395
augggaaccccaaagccacggauccugcccuggcuggugucgcagcuggaccuggggcaacuggagggcguggccugggugaacaagagccgcacgcgcuuccgcaucccuuggaagcacggccuacggcaggaugcacagcaggaggauuucggaaucuuccaggccugggccgaggccacuggugcauauguucccgggagggauaagccagaccugccaaccuggaagaggaauuuccgcucugcccucaaccgcaaagaaggguugcguuuagcagaggaccggagcaaggacccucacgacccacauaaaaucuacgaguuugugaacucaggaguuggggacuuuucccagccagacaccucuccggacaccaaugguggaggcaguacuucugauacccaggaagacauucuggaugaguuacuggguaacaugguguuggccccacucccagauccgggacccccaagccuggcuguagccccugagcccugcccucagccccugcggagccccagcuuggacaaucccacucccuucccaaaccuggggcccucugagaacccacugaagcggcuguuggugccgggggaagagugggaguucgaggugacagccuucuaccggggccgccaagucuuccagcagaccaucuccugcccggagggccugcggcuggugggguccgaagugggagacaggacgcugccuggauggccagucacacugccagacccuggcaugucccugacagacaggggagugaugagcuacgugaggcaugugcugagcugccugggugggggacuggcucucuggcgggccgggcaguggcucugggcccagcggcuggggcacugccacacauacugggcagugagcgaggagcugcuccccaacagcgggcaugggccugauggcgagguccccaaggacaaggaaggaggcguguuugaccuggggcccuucauuguaggcuccugggcccccagaucugauuaccuucacggaaggaagcggacgcucaccacgcuaugcccucugguucugugugggggagucauggccccaggaccagccguggaccaagaggcucgugauggucaagguugugcccacgugccucagggccuugguagaaauggcccggguagggggugccuccucccuggagaauacuguggaccugcacauuuccaacagccacccacucucccucaccuccgaccaguacaaggccuaccugcaggacuugguggagggcauggauuuccagggcccuggggagaccugagcccucgcuccucauggugugccuccaaccccccuguuccccaccaccucaaccaauaa

SEQ ID NO: 8824 - RNA, 1359 nt, Artificial Sequence
  derived and/or modified sequence opt1 from IRF3__Homo_sapiens__AAH09395
augggcacccccaagccgcgcauccugcccuggcucgugagccagcuggaccuggggcagcucgagggcgucgccugggugaacaagucccggacccgcuuccggauccccuggaagcacgggcugcgccaggacgcccagcaggaggacuucggcaucuuccaggcgugggccgaggccacgggggccuacgugcccggccgggacaagccggaccugcccaccuggaagcgcaacuuccggagcgcccucaaccgcaaggagggccugcggcuggcggaggaccgcuccaaggacccccacgacccccacaagaucuacgaguucgucaacagcggggugggcgacuucucccagccggacaccagccccgacaccaacgggggcggguccacgagcgacacccaggaggacauccucgacgagcugcugggcaacauggugcucgcgccccugcccgacccgggcccgcccucccuggccgucgcccccgagcccugcccccagccccuccggagccccucccuggacaacccgacccccuuccccaaccuggggcccagcgagaacccgcucaagcgccugcuggugcccggcgaggagugggaguucgaggugaccgccuucuaccgggggcgccaggucuuccagcagacgaucuccugccccgagggccuccggcuggugggcagcgaggugggggaccgcacccugcccggcuggccggucacccuccccgaccccgggaugucccugaccgaccggggcgugaugagcuacgugcgccacguccuguccugccucgggggcggccuggcccuguggcgggccgggcaguggcucugggcccagcgccugggccacugccacacguacugggccgugagcgaggagcugcucccgaacuccgggcacggccccgacggggaggugcccaaggacaaggagggcggcgucuucgaccuggggcccuucaucgugggcagcugggcgccgcggagcgacuaccugcacgggcgcaagcgcacccucaccacccugugcccccuggugcucugcggcggggucauggcccccggccccgccguggaccaggaggcccgggacggccaggggugcgcccacgugccgcagggccuggggcgcaacggccccggccgggggugccugcuccccggcgaguacugcgggcccgcgcacuuccagcagccgcccacgcugccccaccuccgccccguccagggccugccggccgggcugggcggcgggcacggcuuccccgggcccuggggcgaccugagcccccgguccuccuggugcgccagcaacccgcccgugccccaccaccucaaccaguga

SEQ ID NO: 8825 - RNA, 1359 nt, Artificial Sequence
  derived and/or modified sequence opt2 from IRF3__Homo_sapiens__AAH09395
augggcacccccaagccccgcauccuccccuggcucgucucccagcucgaccucggccagcucgagggcgucgccugggucaacaagucccgcacccgcuuccgcauccccuggaagcacggccuccgccaggacgcccagcaggaggacuucggcaucuuccaggccugggccgaggccaccggcgccuacguccccggccgcgacaagcccgaccuccccaccuggaagcgcaacuuccgcuccgcccucaaccgcaaggagggccuccgccucgccgaggaccgcuccaaggacccccacgacccccacaagaucuacgaguucgucaacuccggcgucggcgacuucucccagcccgacaccucccccgacaccaacggcggcggcuccaccuccgacacccaggaggacauccucgacgagcuccucggcaacaugguccucgccccccuccccgaccccggcccccccucccucgccgucgcccccgagcccugcccccagccccuccgcucccccucccucgacaaccccacccccuuccccaaccucggccccuccgagaacccccucaagcgccuccucguccccggcgaggagugggaguucgaggucaccgccuucuaccgcggccgccaggucuuccagcagaccaucuccugccccgagggccuccgccucgucggcuccgaggucggcgaccgcacccuccccggcuggcccgucacccuccccgaccccggcaugucccucaccgaccgcggcgucauguccuacguccgccacguccucuccugccucggcggcggccucgcccucuggcgcgccggccaguggcucugggcccagcgccucggccacugccacaccuacugggccgucuccgaggagcuccuccccaacuccggccacggccccgacggcgagguccccaaggacaaggagggcggcgucuucgaccucggccccuucaucgucggcuccugggccccccgcuccgacuaccuccacggccgcaagcgcacccucaccacccucugcccccucguccucugcggcggcgucauggcccccggccccgccgucgaccaggaggcccgcgacggccagggcugcgcccacgucccccagggccucggccgcaacggccccggccgcggcugccuccuccccggcgaguacugcggccccgcccacuuccagcagccccccacccucccccaccuccgccccguccagggccuccccgccggccucggcggcggccacggcuuccccggccccuggggcgaccucuccccccgcuccuccuggugcgccuccaacccccccgucccccaccaccucaaccaguga

SEQ ID NO: 8826 - RNA, 1359 nt, Artificial Sequence
  derived and/or modified sequence opt3 from IRF3__Homo_sapiens__AAH09395
augggcacccccaagccuagaauccugccauggcucgugagccagcuugaccuggggcaauuggagggagucgccuggguuaacaaauccaggacacgguuccgcauuccguggaagcacgguuuacgacaggaugcucagcaggaagacuuuggcauauuccaagcaugggccgaggcgacuggggcuuacgugcccggacgugauaaaccugaccugccaacguggaagagaaauuuuaggucugcccuaaaccggaaagaaggccuccgccuggcagaggauagaucaaaggacccccaugauccucacaagaucuaugaguucguaaauaguggugugggggacuuuagccagccagauaccucccccgacacaaacggaggcggcucuacuucggauacccaggaagacauucuugaugagcuguuggggaauaugguccucgccccucugccagacccgggacccccuucacuggcuguggcaccagaacccugcccucagccacucaggagccccaguuuagacaacccgacaccuuuccccaaucuggguccauccgagaacccucuuaaacgguugcugguucccggcgaagagugggaguuugaagugaccgccuucuaccgcgggcgacaagucuuucagcagacuaucucuuguccagagggacuaagacucgugggcagcgaaguaggugauaggacacugcccggguggccuguuacccuuccagacccgggaaugucccugacggaucggggcgugaugucauauguccgucauguguugaguugccucggcgggggacuggcuuuauggcgcgccggucaguggcugugggcgcaaagacucggccacugucauacuuacugggcagugagcgaggaacuucugcccaauucugggcacggaccugacggcgaggucccaaaggauaaagagggugggguuuucgacuugggccccuuuauugugggauccugggccccuaggucagauuaucuacacggccggaagcgaacccugacaacucucugcccacugguacuuugugggggagugauggcucccgguccggccgucgaccaggaagcacgcgauggccaggggugcgcucaugugccucaaggacugggcagaaacgguccagggaggggcuguuugcuccccggagaguacugcggcccugcccacuuccagcagcccccaacccugccucauuuacggcccguucaggggcugccagcgggacuagguggcgggcacggauuuccgggcccuuggggugaccucagcccccgcaguucuuggugugccuccaauccacccgugccucaccaucugaaccaauga

SEQ ID NO: 8827 - RNA, 1359 nt, Artificial Sequence
  derived and/or modified sequence opt4 from IRF3__Homo_sapiens__AAH09395
augggcacccccaagcccagaauccugcccuggcuggugagccagcuggaccugggccagcuggagggcguggccugggugaacaagagcagaaccagauucagaauccccuggaagcacggccugagacaggacgcccagcaggaggacuucggcaucuuccaggccugggccgaggccaccggcgccuacgugcccggcagagacaagcccgaccugcccaccuggaagagaaacuucagaagcgcccugaacagaaaggagggccugagacuggccgaggacagaagcaaggacccccacgacccccacaagaucuacgaguucgugaacagcggcgugggcgacuucagccagcccgacaccagccccgacaccaacggcggcggcagcaccagcgacacccaggaggacauccuggacgagcugcugggcaacauggugcuggccccccugcccgaccccggcccccccagccuggccguggcccccgagcccugcccccagccccugagaagccccagccuggacaaccccacccccuuccccaaccugggccccagcgagaacccccugaagagacugcuggugcccggcgaggagugggaguucgaggugaccgccuucuacagaggcagacagguguuccagcagaccaucagcugccccgagggccugagacuggugggcagcgaggugggcgacagaacccugcccggcuggcccgugacccugcccgaccccggcaugagccugaccgacagaggcgugaugagcuacgugagacacgugcugagcugccugggcggcggccuggcccuguggagagccggccaguggcugugggcccagagacugggccacugccacaccuacugggccgugagcgaggagcugcugcccaacagcggccacggccccgacggcgaggugcccaaggacaaggagggcggcguguucgaccugggccccuucaucgugggcagcugggcccccagaagcgacuaccugcacggcagaaagagaacccugaccacccugugcccccuggugcugugcggcggcgugauggcccccggccccgccguggaccaggaggccagagacggccagggcugcgcccacgugccccagggccugggcagaaacggccccggcagaggcugccugcugcccggcgaguacugcggccccgcccacuuccagcagccccccacccugccccaccugagacccgugcagggccugcccgccggccugggcggcggccacggcuuccccggccccuggggcgaccugagccccagaagcagcuggugcgccagcaacccccccgugccccaccaccugaaccaguga

SEQ ID NO: 8828 - RNA, 1359 nt, Artificial Sequence
  derived and/or modified sequence opt5 from IRF3__Homo_sapiens__AAH09395
augggcacccccaagccuagaauccugccguggcucgugagccagcuggaccuugggcaacuggagggagucgccuggguuaacaaaucccggacacgcuuccggauucccuggaagcacggccucagacaggaugcucagcaggaagacuuugggaucuuccaagccugggcggaggcuacgggagccuacgugccuggccgcgauaaacccgaccugccuaccuggaagagaaauuuucggucugcccuuaaccgcaaagaagggcugagacucgcugaggaucggagcaaggacccccaugauccucacaagauuuaugaguucgucaauuccggagugggcgacuuuucucagccggauacaagccccgacaccaacggcgggggauccacaucugauacccaggaagacauccuggaugagcugcucggcaauauggugcuggccccucuucccgacccugggcccccgagccuggcuguugccccugaacccugcccucagccccuccgcucccccagccuggacaacccuacaccguuccccaaucuuggaccuucugagaacccccugaaaagacuccuggugccuggcgaagagugggaguuugaagucaccgcguucuaccgggggcgccaaguguuucagcagacgauuuccugucccgagggacugagacucguuggcagcgaagugggcgaucggacccugccgggguggccugucacacuucccgacccuggaaugucucugaccgaucgcggcgugauguccuaugugagacauguccucagcugccuugggggaggccuggcccuguggcgggcugggcaguggcucugggcccaaagacugggacacugucauacauacugggcuguuucugaggaacugcuccccaauuccggccacggcccugacggggaggugcccaaggauaaagagggaggcguguucgaccuggggccguuuaucgucggaagcugggccccucgcuccgauuaucuucacggccggaagagaacccugacgacacucugcccccuggugcuuugugggggcguuauggcgcccggaccugccguggaccaggaagcucgcgauggccaggggugcgcccaugucccgcaaggacugggccggaacgggcccggaagaggcugucuccugccuggggaguacugcggccccgcucacuuccagcagccucccacccugccucaucuccgccccgugcagggacugccggccggccuugggggaggccacggguuuccuggacccuggggcgaccugucuccucggagcuccuggugugccagcaaucccccgguuccucaccaucucaaccaauga

SEQ ID NO: 8829 - protein, 503 aa, Artificial Sequence
  IRF-7__Homo_sapiens__Q92985
MALAPERAAPRVLFGEWLLGEISSGCYEGLQWLDEARTCFRVPWKHFARKDLSEADARIFKAWAVARGRWPPSSRGGGPPPEAETAERAGWKTNFRCALRSTRRFVMLRDNSGDPADPHKVYALSRELCWREGPGTDQTEAEAPAAVPPPQGGPPGPFLAHTHAGLQAPGPLPAPAGDKGDLLLQAVQQSCLADHLLTASWGADPVPTKAPGEGQEGLPLTGACAGGPGLPAGELYGWAVETTPSPGPQPAALTTGEAAAPESPHQAEPYLSPSPSACTAVQEPSPGALDVTIMYKGRTVLQKVVGHPSCTFLYGPPDPAVRATDPQQVAFPSPAELPDQKQLRYTEELLRHVAPGLHLELRGPQLWARRMGKCKVYWEVGGPPGSASPSTPACLLPRNCDTPIFDFRVFFQELVEFRARQRRGSPRYTIYLGFGQDLSAGRPKEKSLVLVKLEPWLCRVHLEGTQREGVSSLDSSSLSLCLSSANSLYDDIECFLMELEQPA

SEQ ID NO: 8830 - RNA, 1512 nt, Artificial Sequence
  IRF-7__Homo_sapiens__AAB80686
auggccuuggcuccugagagggcagccccacgcgugcuguucggagaguggcuccuuggagagaucagcagcggcugcuaugaggggcugcaguggcuggacgaggcccgcaccuguuuccgcgugcccuggaagcacuucgcgcgcaaggaccugagcgaggccgacgcgcgcaucuucaaggccugggcuguggcccgcggcagguggccgccuagcagcaggggagguggcccgccccccgaggcugagacugcggagcgcgccggcuggaaaaccaacuuccgcugcgcacugcgcagcacgcgucgcuucgugaugcugcgggauaacucgggggacccggccgacccgcacaagguguacgcgcucagccgggagcugugcuggcgagaaggcccaggcacggaccagacugaggcagaggcccccgcagcugucccaccaccacagggugggcccccagggccauucuuggcacacacacaugcuggacuccaagccccaggcccccucccugccccagcuggugacaagggggaccuccugcuccaggcagugcaacagagcugccuggcagaccaucugcugacagcgucauggggggcagauccagucccaaccaaggcuccuggagagggacaagaagggcuuccccugacuggggccugugcuggaggcccagggcucccugcuggggagcuguacgggugggcaguagagacgacccccagccccgggccccagcccgcggcacuaacgacaggcgaggccgcggccccagaguccccgcaccaggcagagccguaccugucacccuccccaagcgccugcaccgcggugcaagagcccagcccaggggcgcuggacgugaccaucauguacaagggccgcacggugcugcagaagguggugggacacccgagcugcacguuccuauacggccccccagacccagcuguccgggccacagacccccagcagguagcauuccccagcccugccgagcucccggaccagaagcagcugcgcuacacggaggaacugcugcggcacguggccccuggguugcaccuggagcuucgggggccacagcugugggcccggcgcaugggcaagugcaagguguacugggaggugggcggacccccaggcuccgccagccccuccaccccagccugccugcugccucggaacugugacacccccaucuucgacuucagagucuucuuccaagagcugguggaauuccgggcacggcagcgccguggcuccccacgcuauaccaucuaccugggcuucgggcaggaccugucagcugggaggcccaaggagaagagccugguccuggugaagcuggaacccuggcugugccgagugcaccuagagggcacgcagcgugagggugugucuucccuggauagcagcagccucagccucugccuguccagcgccaacagccucuaugacgacaucgagugcuuccuuauggagcuggagcagcccgccuag

SEQ ID NO: 8831 - RNA, 1512 nt, Artificial Sequence
  derived and/or modified sequence opt1 from IRF-7__Homo_sapiens__AAB80686
auggcccuggcccccgagcgcgcggccccgcggguccucuucggcgaguggcugcugggggagaucagcuccggcugcuacgaggggcuccaguggcuggacgaggcccggaccugcuuccgcgugcccuggaagcacuucgcccgcaaggaccugagcgaggccgacgcgcggaucuucaaggccugggccguggcccgcggccgguggccgcccuccagccgcgggggcgggcccccgcccgaggcggagaccgccgagcgggccggcuggaagacgaacuuccgcugcgcccuccgguccacccgccgguucgugaugcugcgcgacaacagcggcgaccccgccgacccccacaaggucuacgcgcugucccgggagcucugcuggcgcgaggggcccggcaccgaccagaccgaggccgaggcccccgccgccgugcccccgccccagggcgggccgcccggccccuuccuggcgcacacgcacgccgggcugcaggcccccggcccccuccccgccccggccggggacaagggcgaccugcugcuccaggcggugcagcagagcugccuggccgaccaccuccugaccgccuccuggggcgccgaccccguccccaccaaggcccccggggagggccaggaggggcugccgcugaccggcgcgugcgccgggggccccggccuccccgccggggagcuguacggcugggccguggagacgacccccagcccggggccccagcccgcggcccugaccaccggcgaggccgccgccccggagagcccccaccaggcggagcccuaccucagccccuccccgagcgccugcacggccgugcaggagcccucccccggggcccuggacgucaccaucauguacaagggccggaccgugcugcagaagguggucggccaccccagcugcaccuuccucuacgggccgcccgaccccgccgugcgcgcgacggacccccagcaggucgccuucccgucccccgccgagcugcccgaccagaagcagcugcgguacaccgaggagcuccugcgccacguggcccccggccugcaccucgagcugcgggggccgcagcugugggcccgccgcaugggcaagugcaagguguacugggaggucgggggcccgcccggcagcgcgucccccagcacccccgccugccuccugccccggaacugcgacacccccaucuucgacuuccgcguguucuuccaggagcugguggaguuccgggcccgccagcggcgcgggagcccccgguacacgaucuaccucggcuucgggcaggaccuguccgccggccgcccgaaggagaagucccuggugcucgucaagcuggagcccuggcugugccgggugcaccucgagggcacccagcgcgaggggguguccagccuggacuccagcucccugagccucugccuguccagcgcgaacucccuguacgacgacaucgagugcuuccugauggagcucgagcagcccgccuga

SEQ ID NO: 8832 - RNA, 1512 nt, Artificial Sequence
  derived and/or modified sequence opt2 from IRF-7__Homo_sapiens__AAB80686
auggcccucgcccccgagcgcgccgccccccgcguccucuucggcgaguggcuccucggcgagaucuccuccggcugcuacgagggccuccaguggcucgacgaggcccgcaccugcuuccgcguccccuggaagcacuucgcccgcaaggaccucuccgaggccgacgcccgcaucuucaaggccugggccgucgcccgcggccgcuggccccccuccucccgcggcggcggccccccccccgaggccgagaccgccgagcgcgccggcuggaagaccaacuuccgcugcgcccuccgcuccacccgccgcuucgucaugcuccgcgacaacuccggcgaccccgccgacccccacaaggucuacgcccucucccgcgagcucugcuggcgcgagggccccggcaccgaccagaccgaggccgaggcccccgccgccgucccccccccccagggcggcccccccggccccuuccucgcccacacccacgccggccuccaggcccccggcccccuccccgcccccgccggcgacaagggcgaccuccuccuccaggccguccagcaguccugccucgccgaccaccuccucaccgccuccuggggcgccgaccccguccccaccaaggcccccggcgagggccaggagggccucccccucaccggcgccugcgccggcggccccggccuccccgccggcgagcucuacggcugggccgucgagaccacccccucccccggcccccagcccgccgcccucaccaccggcgaggccgccgcccccgaguccccccaccaggccgagcccuaccucucccccucccccuccgccugcaccgccguccaggagcccucccccggcgcccucgacgucaccaucauguacaagggccgcaccguccuccagaaggucgucggccaccccuccugcaccuuccucuacggcccccccgaccccgccguccgcgccaccgacccccagcaggucgccuuccccucccccgccgagcuccccgaccagaagcagcuccgcuacaccgaggagcuccuccgccacgucgcccccggccuccaccucgagcuccgcggcccccagcucugggcccgccgcaugggcaagugcaaggucuacugggaggucggcggcccccccggcuccgccucccccuccacccccgccugccuccucccccgcaacugcgacacccccaucuucgacuuccgcgucuucuuccaggagcucgucgaguuccgcgcccgccagcgccgcggcuccccccgcuacaccaucuaccucggcuucggccaggaccucuccgccggccgccccaaggagaagucccucguccucgucaagcucgagcccuggcucugccgcguccaccucgagggcacccagcgcgagggcgucuccucccucgacuccuccucccucucccucugccucuccuccgccaacucccucuacgacgacaucgagugcuuccucauggagcucgagcagcccgccuga

SEQ ID NO: 8833 - RNA, 1512 nt, Artificial Sequence
  derived and/or modified sequence opt3 from IRF-7__Homo_sapiens__AAB80686
auggcccuggcucccgagagagcagccccuaggguucucuucggcgaauggcuucugggggagaucagcuccggaugcuacgaagguuugcagugguuagacgaggcgcggaccuguuuucgcgucccauggaagcacuucgcucgaaaagaucugucugaagccgacgcacguauuuuuaaggccugggcuguugcaagagggagguggccgcccucaagucggggcggaggcccuccacccgaggccgagacagcugaacgcgccgguuggaaaacuaacuucagaugcgcgcuaaggagcacgcggcgcuuugugaugcuccgagauaauuccggggacccugcagauccacauaagguauaugcccugucuagagagcuuuguuggagggaaggacccggcaccgaccaaacagaggcugaggccccugcagcugugccaccgccccagggcgggccuccaggacccuuccuggcccacacucaugcggguuugcaggccccuggcccacuccccgcaccggcuggggauaaaggagaccugcugcuccaggccguccaacagucgugcuuagcugaucaucugcuuaccgccucauggggcgcagacccugugcccacaaaggccccaggugaagggcaggagggauugccucugaccggcgcuugugcgggcgggcccggacuaccagccggugaacucuacggcugggcaguugagacuacacccagcccugggccacagccggcugcccugaccacgggagaagcagccgcucccgagaguccucaccaagccgagccauaucuuucccccucuccuagcgcaugcacugcggugcaggaaccaucccccggcgcucuggaugucaccauaauguacaagggucggacaguguugcagaaaguaguugggcacccgucauguacuuuucucuauggcccuccagaccccgccgugcgugcaaccgauccucagcaagucgccuuccccaguccagcugagcugccugaccagaagcaguuacgcuacacagaggaacugcucagacacguggcccccggacuucaucuggaauugaggggcccacaacuaugggcacggcgaauggggaaaugcaagguguauugggaggucggagguccgccuggcagcgcuucucccuccaccccagccugucugcucccccgcaacugcgacacgccuaucuuugauuucagaguguuuuuccaggagcugguggaauuuagggcgcggcagcgcagagggucaccaagguacacuauuuaccuuggauucggccaggaccugagcgccggucgucccaaagagaagaguuugguacucgugaagcuggaaccuugguuaugucggguccaccuggaggggacacaacgagaaggcgugucuucccuagauagcucgucucucucccugugccuuucaagugcuaauagcuuguaugacgauaucgagugcuuccugauggagcucgaacagccggcauga

SEQ ID NO: 8834 - RNA, 1512 nt, Artificial Sequence
  derived and/or modified sequence opt4 from IRF-7__Homo_sapiens__AAB80686
auggcccuggcccccgagagagccgcccccagagugcuguucggcgaguggcugcugggcgagaucagcagcggcugcuacgagggccugcaguggcuggacgaggccagaaccugcuucagagugcccuggaagcacuucgccagaaaggaccugagcgaggccgacgccagaaucuucaaggccugggccguggccagaggcagauggccccccagcagcagaggcggcggccccccccccgaggccgagaccgccgagagagccggcuggaagaccaacuucagaugcgcccugagaagcaccagaagauucgugaugcugagagacaacagcggcgaccccgccgacccccacaagguguacgcccugagcagagagcugugcuggagagagggccccggcaccgaccagaccgaggccgaggcccccgccgccgugccccccccccagggcggcccccccggccccuuccuggcccacacccacgccggccugcaggcccccggcccccugcccgcccccgccggcgacaagggcgaccugcugcugcaggccgugcagcagagcugccuggccgaccaccugcugaccgccagcuggggcgccgaccccgugcccaccaaggcccccggcgagggccaggagggccugccccugaccggcgccugcgccggcggccccggccugcccgccggcgagcuguacggcugggccguggagaccacccccagccccggcccccagcccgccgcccugaccaccggcgaggccgccgcccccgagagcccccaccaggccgagcccuaccugagccccagccccagcgccugcaccgccgugcaggagcccagccccggcgcccuggacgugaccaucauguacaagggcagaaccgugcugcagaagguggugggccaccccagcugcaccuuccuguacggcccccccgaccccgccgugagagccaccgacccccagcagguggccuuccccagccccgccgagcugcccgaccagaagcagcugagauacaccgaggagcugcugagacacguggcccccggccugcaccuggagcugagaggcccccagcugugggccagaagaaugggcaagugcaagguguacugggaggugggcggcccccccggcagcgccagccccagcacccccgccugccugcugcccagaaacugcgacacccccaucuucgacuucagaguguucuuccaggagcugguggaguucagagccagacagagaagaggcagccccagauacaccaucuaccugggcuucggccaggaccugagcgccggcagacccaaggagaagagccuggugcuggugaagcuggagcccuggcugugcagagugcaccuggagggcacccagagagagggcgugagcagccuggacagcagcagccugagccugugccugagcagcgccaacagccuguacgacgacaucgagugcuuccugauggagcuggagcagcccgccuga

SEQ ID NO: 8835 - RNA, 1512 nt, Artificial Sequence
  derived and/or modified sequence opt5 from IRF-7__Homo_sapiens__AAB80686
auggcccuggcucccgagagagccgcgccucggguccucuucggcgaauggcugcuuggggagaucagcuccggaugcuacgaaggccugcaguggcucgacgaggcucgcaccuguuuuagagucccguggaagcacuucgcccggaaagaucugucugaagccgacgcucgcauuuuuaaggccugggcuguugccagagggcgguggcccccuagcucccgcggaggcgggcccccucccgaggcggagacagccgaaagagcuggauggaaaacgaacuuccggugcgcccuucgcucuaccagacgguuugugaugcugcgcgauaauagcggcgacccugcugauccgcauaagguguaugcccucuccagagagcuguguuggcgggaaggccccgggacagaccaaaccgaggcggaggccccugcugccgugcccccuccccagggaggcccgccugggcccuuccuggcucacacacaugccggacuccaggccccuggcccccugcccgcuccugcgggggauaaaggagaccuucugcuccaggccgugcaacagucuugccuggcugaucaccuucugaccgccagcuggggcgccgacccgguucccacaaaggcuccuggcgaagggcaggagggacucccccugaccggcgccugugcugggggaccuggccugcccgcgggggaacucuacggaugggccguggagacgaccccguccccuggcccccagccugccgcucugacaaccggcgaagccgcugcccccgagagcccucaucaagcggagcccuaucuuucuccguccccuagcgccugcacagcuguccaggaacccucucccggggcccuggaugugaccaucauguacaagggacgcacgguucuccagaaaguggucggccacccuuccuguacauuucuguaugggccgcccgacccugcugugagagccaccgauccccagcaaguggcguucccuagccccgccgagcuuccugaccagaagcagcugcgguacacagaggagcuccugagacacgucgcucccggacugcaucucgaacugcgcggcccgcaacuuugggcccggagaauggggaaaugcaagguuuauugggaggugggcggaccucccggcucugcuuccccuagcacccccgccugucugcucccgcgcaacugcgacaccccuauuuuugauuuccggguguuuuuccaggagcuggucgaauuuagagcccgccagcggagagggucuccccgcuacacaaucuaccuuggauucggccaggaccuguccgcugggcggccuaaagaaaagagccucgugcugguuaagcuggaacccuggcucuguagagugcaccuggagggaacgcaacgcgaaggcgucuccagccuugauucuuccagccugucucucugccugagcuccgccaauucucuguaugacgauauugagugcuuccuuauggagcucgaacagcccgcguga

SEQ ID NO: 8836 - protein, 320 aa, Artificial Sequence
  JNK__Homo_sapiens__B4DU99
MISPDPRPSPGLARWAESYEAKCERRQEIRESRRCRPNVTTCRQVGKTLRIQQRELEEKGKAQHPQAREQGPSRRPGQVTVLKEPLSCARRISSPREQVTGTSSEVFPAQHPPPSGICRDLSDHLSSQAGGLPPQDTPIKKPPKHHRGTQTKAEGPTIKNDASQQTNYGVAVLDKEIIQLSDYLKEALQRELVLKQKMVILQDLLSTLIQASDSSWKGQLNEDKLKGKLRSLENQLYTCTQKYSPWGMKKVLLEMEDQKNSYEQKAKESLQKVLEEKMNAEQQLQSTQVWGCHIDMGLGTPGSLGNKGSQLHNSLEPSPL

SEQ ID NO: 8837 - RNA, 963 nt, Artificial Sequence
  JNK__Homo_sapiens__BAG62261
augaucagcccagaccccaggcccuccccuggcuuggcccggugggcugagagcuaugaggccaagugugagcgcaggcaagagauccgugaaagccgccgcugccgucccaaugugaccacuugccgccagguggggaagacgcugaggauccaacagagagagcuagaggagaagggcaaagcgcagcauccccaggccagggagcaagggcccuccaggcggccaggacaggugacuguccucaaggaacccuugucuugugccagaaggauuucuucucccagagagcaggugacaggcaccagcucugaagucuuuccagcccagcauccuccucccucaggcaucugcagggaucugucugaccaccucuccucacaggcugggggccuuccuccacaggacacucccaucaagaagccacccaaacaccaccgugguacucagacaaaggcagaaggaccaacaauuaagaacgaugccagucagcaaaccaauuacggaguugcaguucuggauaaggaaaucauccagcuuucugauuaccucaaagaggcccuacaaagggagcugguccuaaaacagaaaauggugauucuccaagaccuacuguccacucugauucaggccucugacagcucuuggaagggacagcuuaaugaagacaaacuaaaggggaaacugagauccuuagaaaaccagcuauacaccuguacccagaaauacuccccuuggggaaugaaaaaaguacuacuggagauggaagaccagaaaaacagcuaugagcagaaggccaaggagucacugcagaaagugcuggaggagaaaaugaaugcagagcagcaacuacagagcacacagguauggggaugccacauagacauggggcuggggacuccaggcagcuuggggaacaaggggagccagcugcacaacucccuggagcccucuccucucuga

SEQ ID NO: 8838 - RNA, 963 nt, Artificial Sequence
  derived and/or modified sequence opt1 from JNK__Homo_sapiens__BAG62261
augaucucccccgacccccgccccucccccggccuggcccggugggccgagagcuacgaggcgaagugcgagcgccggcaggagauccgcgagucccggcgcugccggcccaacgugacgaccugccgccaggucgggaagacccuccggauccagcagcgcgagcuggaggagaagggcaaggcccagcacccgcaggcccgggagcaggggcccagccgccggcccggccaggugaccgugcugaaggagccccucuccugcgcccgccggaucagcuccccgcgcgagcaggucaccgggaccagcuccgagguguuccccgcccagcacccgccgcccagcggcaucugccgggaccuguccgaccaccugagcucccaggcgggcgggcucccgccccaggacacgcccaucaagaagccgcccaagcaccaccgcggcacccagaccaaggccgaggggcccaccaucaagaacgacgccagccagcagacgaacuacggcguggccguccuggacaaggagaucauccagcuguccgacuaccucaaggaggcgcugcagcgggagcuggugcucaagcagaagauggugauccugcaggaccugcucagcacccugauccaggccuccgacagcuccuggaaggggcagcugaacgaggacaagcucaagggcaagcugcgcagccuggagaaccagcucuacacgugcacccagaaguacagccccuggggcaugaagaagguccugcuggagauggaggaccagaagaacuccuacgagcagaaggccaaggagagccuccagaaggugcuggaggagaagaugaacgccgagcagcagcugcaguccacccaggugugggggugccacaucgacaugggccucgggacccccggcagccugggcaacaaggggucccagcugcacaacagccucgagcccagcccccuguga

SEQ ID NO: 8839 - RNA, 963 nt, Artificial Sequence
  derived and/or modified sequence opt2 from JNK__Homo_sapiens__BAG62261
augaucucccccgacccccgccccucccccggccucgcccgcugggccgaguccuacgaggccaagugcgagcgccgccaggagauccgcgagucccgccgcugccgccccaacgucaccaccugccgccaggucggcaagacccuccgcauccagcagcgcgagcucgaggagaagggcaaggcccagcacccccaggcccgcgagcagggccccucccgccgccccggccaggucaccguccucaaggagccccucuccugcgcccgccgcaucuccuccccccgcgagcaggucaccggcaccuccuccgaggucuuccccgcccagcaccccccccccuccggcaucugccgcgaccucuccgaccaccucuccucccaggccggcggccuccccccccaggacacccccaucaagaagccccccaagcaccaccgcggcacccagaccaaggccgagggccccaccaucaagaacgacgccucccagcagaccaacuacggcgucgccguccucgacaaggagaucauccagcucuccgacuaccucaaggaggcccuccagcgcgagcucguccucaagcagaagauggucauccuccaggaccuccucuccacccucauccaggccuccgacuccuccuggaagggccagcucaacgaggacaagcucaagggcaagcuccgcucccucgagaaccagcucuacaccugcacccagaaguacucccccuggggcaugaagaagguccuccucgagauggaggaccagaagaacuccuacgagcagaaggccaaggagucccuccagaagguccucgaggagaagaugaacgccgagcagcagcuccaguccacccaggucuggggcugccacaucgacaugggccucggcacccccggcucccucggcaacaagggcucccagcuccacaacucccucgagcccuccccccucuga

SEQ ID NO: 8840 - RNA, 963 nt, Artificial Sequence
  derived and/or modified sequence opt3 from JNK__Homo_sapiens__BAG62261
augaucagccccgacccuagaccauccccgggccuggccaggugggcugagucuuacgaagcaaagugcgagcggcgccaggaaauucgagagucacguagauguaggcccaacgugaccacaugccggcaagucgggaaaacucuccgcauacagcagagagaacuugaggagaagggaaaagcccagcacccucaagcgagggaacaggguccaagucggcgccccggccagguuacggugcugaaggagccuuugagcugugcucgaagaaucuccucuccaagggaacagguaaccgggacaucgucagagguguuccccgcccaacauccuccaccgagcggaauuugccgggauuuaagugaccaccuguccucucaggcaggcggucuacccccucaggauacuccaaucaaaaagcccccuaagcaucaccgugggacccagacaaaagccgagggaccaaccauuaagaaugacgcuagccaacagacuaacuauggcgucgcagugcucgauaaagaaaucauacagcuguccgacuaccuuaaggaggcccugcaacgcgaauugguucucaaacagaagauggugauccugcaggaucugcucucaacauuaauucaggcuagugacagcucuuggaagggccaacugaaugaggauaaacuuaaggggaaauugagaucccuggaaaaccagcuauauaccuguacgcagaaguacucacccuggggaaugaaaaagguccuccuggagauggaggaccagaaaaauagcuaugaacaaaaggccaaggagagucuucagaaagugcuggaagagaagaugaacgcggaacagcaguugcaaucuacucagguaugggguugccauaucgauaugggccucgggaccccgggaucccugggcaauaaagguagccaguuacacaacucgcuggagccuucuccccucuga

SEQ ID NO: 8841 - RNA, 963 nt, Artificial Sequence
  derived and/or modified sequence opt4 from JNK__Homo_sapiens__BAG62261
augaucagccccgaccccagacccagccccggccuggccagaugggccgagagcuacgaggccaagugcgagagaagacaggagaucagagagagcagaagaugcagacccaacgugaccaccugcagacaggugggcaagacccugagaauccagcagagagagcuggaggagaagggcaaggcccagcacccccaggccagagagcagggccccagcagaagacccggccaggugaccgugcugaaggagccccugagcugcgccagaagaaucagcagccccagagagcaggugaccggcaccagcagcgagguguuccccgcccagcaccccccccccagcggcaucugcagagaccugagcgaccaccugagcagccaggccggcggccugcccccccaggacacccccaucaagaagccccccaagcaccacagaggcacccagaccaaggccgagggccccaccaucaagaacgacgccagccagcagaccaacuacggcguggccgugcuggacaaggagaucauccagcugagcgacuaccugaaggaggcccugcagagagagcuggugcugaagcagaagauggugauccugcaggaccugcugagcacccugauccaggccagcgacagcagcuggaagggccagcugaacgaggacaagcugaagggcaagcugagaagccuggagaaccagcuguacaccugcacccagaaguacagccccuggggcaugaagaaggugcugcuggagauggaggaccagaagaacagcuacgagcagaaggccaaggagagccugcagaaggugcuggaggagaagaugaacgccgagcagcagcugcagagcacccagguguggggcugccacaucgacaugggccugggcacccccggcagccugggcaacaagggcagccagcugcacaacagccuggagcccagcccccuguga

SEQ ID NO: 8842 - RNA, 963 nt, Artificial Sequence
  derived and/or modified sequence opt5 from JNK__Homo_sapiens__BAG62261
augaucagccccgacccuagaccgucccccggccuggcccggugggcugagucuuacgaagccaagugcgagcgcagacaggaaauucgggagagccgcagaugucggccuaacgugaccacaugccgccaagucgggaaaacgcucagaauccagcagcgggaacuggaggagaagggaaaagcgcagcacccccaagcucgcgaacagggcccuuccagacggcccgggcagguuaccgugcuuaaggagccucugucuugugcccgcagaauuagcuccccgcgggaacaggugacaggaaccucuagcgaggucuuccccgcccaacauccucccccuuccggcaucugccgcgaucucagcgaccaccugucuucccaggcugggggacuucccccgcaggauacaccuauuaaaaagcccccuaagcaucacagaggcacccagacaaaagccgagggccccaccaucaagaaugacgcuagccaacagacgaacuaugggguggccguucuggauaaagaaaucauucagcucucugacuaccugaaggaggcgcugcaacgggaacucgugcugaaacagaagauggucauccuucaggaucugcucuccacccugauucaggccagcgacucuuccuggaagggacaacuuaaugaggauaaacugaagggcaaacucagaagccuggaaaaccagcuguauacauguacccagaaguacucccccugggggaugaaaaaggugcuccuggagauggaggaccagaaaaauucuuaugaacaaaaggcuaaggagagccuucagaaaguucuggaagagaagaugaacgccgaacagcagcuccaauccacacagguguggggaugccauaucgauaugggccuggggaccccuggaagccuuggcaauaaaggcucucagcugcacaacucccucgagccgagcccccuguga

SEQ ID NO: 8843 - protein, 671 aa, Artificial Sequence
  KPCB__Homo_sapiens__P05771-1
MADPAAGPPPSEGEESTVRFARKGALRQKNVHEVKNHKFTARFFKQPTFCSHCTDFIWGFGKQGFQCQVCCFVVHKRCHEFVTFSCPGADKGPASDDPRSKHKFKIHTYSSPTFCDHCGSLLYGLIHQGMKCDTCMMNVHKRCVMNVPSLCGTDHTERRGRIYIQAHIDRDVLIVLVRDAKNLVPMDPNGLSDPYVKLKLIPDPKSESKQKTKTIKCSLNPEWNETFRFQLKESDKDRRLSVEIWDWDLTSRNDFMGSLSFGISELQKASVDGWFKLLSQEEGEYFNVPVPPEGSEANEELRQKFERAKISQGTKVPEEKTTNTVSKFDNNGNRDRMKLTDFNFLMVLGKGSFGKVMLSERKGTDELYAVKILKKDVVIQDDDVECTMVEKRVLALPGKPPFLTQLHSCFQTMDRLYFVMEYVNGGDLMYHIQQVGRFKEPHAVFYAAEIAIGLFFLQSKGIIYRDLKLDNVMLDSEGHIKIADFGMCKENIWDGVTTKTFCGTPDYIAPEIIAYQPYGKSVDWWAFGVLLYEMLAGQAPFEGEDEDELFQSIMEHNVAYPKSMSKEAVAICKGLMTKHPGKRLGCGPEGERDIKEHAFFRYIDWEKLERKEIQPPYKPKARDKRDTSNFDKEFTRQPVELTPTDKLFIMNLDQNEFAGFSYTNPEFVINV

SEQ ID NO: 8844 - RNA, 2016 nt, Artificial Sequence
  KPCB__Homo_sapiens__CCDS10618.1
auggcugacccggcugcggggccgccgccgagcgagggcgaggagagcaccgugcgcuucgcccgcaaaggcgcccuccggcagaagaacgugcaugaggucaagaaccacaaauucaccgcccgcuucuucaagcagcccaccuucugcagccacugcaccgacuucaucuggggcuucgggaagcagggauuccagugccaaguuugcugcuuuguggugcacaagcggugccaugaauuugucacauucuccugcccuggcgcugacaaggguccagccuccgaugacccccgcagcaaacacaaguuuaagauccacacguacuccagccccacguuuugugaccacugugggucacugcuguauggacucauccaccaggggaugaaaugugacaccugcaugaugaaugugcacaagcgcugcgugaugaauguucccagccuguguggcacggaccacacggagcgccgcggccgcaucuacauccaggcccacaucgacagggacguccucauuguccucguaagagaugcuaaaaaccuuguaccuauggaccccaauggccugucagaucccuacguaaaacugaaacugauucccgaucccaaaagugagagcaaacagaagaccaaaaccaucaaaugcucccucaacccugaguggaaugagacauuuagauuucagcugaaagaaucggacaaagacagaagacugucaguagagauuugggauugggauuugaccagcaggaaugacuucaugggaucuuuguccuuugggauuucugaacuucagaaagccaguguugauggcugguuuaaguuacugagccaggaggaaggcgaguacuucaaugugccugugccaccagaaggaagugaggccaaugaagaacugcggcagaaauuugagagggccaagaucagucagggaaccaaggucccggaagaaaagacgaccaacacugucuccaaauuugacaacaauggcaacagagaccggaugaaacugaccgauuuuaacuuccuaauggugcuggggaaaggcagcuuuggcaaggucaugcuuucagaacgaaaaggcacagaugagcucuaugcugugaagauccugaagaaggacguugugauccaagaugaugacguggagugcacuaugguggagaagcggguguuggcccugccugggaagccgcccuuccugacccagcuccacuccugcuuccagaccauggaccgccuguacuuugugauggaguacgugaaugggggcgaccucauguaucacauccagcaagucggccgguucaaggagccccaugcuguauuuuacgcugcagaaauugccaucggucuguucuucuuacagaguaagggcaucauuuaccgugaccuaaaacuugacaacgugaugcucgauucugagggacacaucaagauugccgauuuuggcauguguaaggaaaacaucugggauggggugacaaccaagacauucuguggcacuccagacuacaucgcccccgagauaauugcuuaucagcccuaugggaaguccguggauuggugggcauuuggaguccugcuguaugaaauguuggcugggcaggcacccuuugaaggggaggaugaagaugaacucuuccaauccaucauggaacacaacguagccuaucccaagucuauguccaaggaagcuguggccaucugcaaagggcugaugaccaaacacccaggcaaacgucuggguuguggaccugaaggcgaacgugauaucaaagagcaugcauuuuuccgguauauugauugggagaaacuugaacgcaaagagauccagcccccuuauaagccaaaagcuagagacaagagagacaccuccaacuucgacaaagaguucaccagacagccuguggaacugacccccacugauaaacucuucaucaugaacuuggaccaaaaugaauuugcuggcuucucuuauacuaacccagaguuugucauuaauguguag

SEQ ID NO: 8845 - RNA, 2016 nt, Artificial Sequence
  derived and/or modified sequence opt1 from KPCB__Homo_sapiens__CCDS10618.1
auggccgaccccgccgcgggcccgccgcccagcgagggggaggaguccaccgugcgcuucgcccggaagggcgcccugcgccagaagaacguccacgaggugaagaaccacaaguucaccgcccgguucuucaagcagcccacguucugcagccacugcaccgacuucaucuggggguucggcaagcagggguuccagugccaggugugcugcuucgucgugcacaagcgcugccacgaguucgugaccuucuccugccccggcgccgacaagggccccgcgagcgacgacccccgguccaagcacaaguucaagauccacaccuacagcucccccacguucugcgaccacugcgggagccuccuguacggccugauccaccaggggaugaagugcgacacgugcaugaugaacguccacaagcgcugcgugaugaacgugccgucccucugcggcaccgaccacaccgagcggcgcgggcggaucuacauccaggcccacaucgaccgcgacguccugaucgugcuggugcgggacgccaagaaccucguccccauggaccccaacggccugagcgaccccuacgugaagcugaagcucaucccggaccccaaguccgagagcaagcagaagaccaagaccaucaagugcucccugaaccccgaguggaacgagaccuuccgcuuccagcugaaggagagcgacaaggaccggcgccucuccguggagaucugggacugggaccugaccagccggaacgacuucaugggcucccugagcuucgggaucuccgagcuccagaaggccagcgucgacggcugguucaagcugcugagccaggaggagggggaguacuucaacgugcccgugccgcccgagggcuccgaggcgaacgaggagcuccgccagaaguucgagcgggccaagaucagccagggcacgaagguccccgaggagaagaccaccaacaccguguccaaguucgacaacaacgggaaccgcgaccggaugaagcugacggacuucaacuuccugauggugcucggcaaggggagcuucggcaaggucaugcuguccgagcgcaaggggaccgacgagcuguacgccgugaagauccucaagaaggacguggucauccaggacgacgacguggagugcaccauggucgagaagcgggugcuggcccugcccggcaagccgcccuuccucacccagcugcacagcugcuuccagacgauggaccgccuguacuucgugauggaguacgucaacggcggggaccucauguaccacauccagcaggucggccgcuucaaggagccccacgccguguucuacgcggccgagaucgccaucgggcuguucuuccugcaguccaagggcaucaucuaccgggaccucaagcuggacaacgugaugcuggacagcgaggggcacaucaagaucgccgacuucggcaugugcaaggagaacaucugggacggcgugaccaccaagaccuucugcgggacgcccgacuacaucgccccggagaucaucgcguaccagcccuacggcaaguccguggacuggugggccuucgggguccuccuguacgagaugcuggccggccaggcccccuucgagggggaggacgaggacgagcuguuccagagcaucauggagcacaacguggccuaccccaaguccaugagcaaggaggcgguggccaucugcaagggccucaugaccaagcacccgggcaagcgccuggggugcggccccgagggggagcgggacaucaaggagcacgccuucuuccgcuacaucgacugggagaagcucgagcggaaggagauccagcccccguacaagcccaaggcccgcgacaagcgggacaccuccaacuucgacaaggaguucacccgccagcccgucgagcugacgcccaccgacaagcuguucaucaugaaccucgaccagaacgaguucgccggcuucagcuacaccaacccggaguucgugaucaacguguga

SEQ ID NO: 8846 - RNA, 2016 nt, Artificial Sequence
  derived and/or modified sequence opt2 from KPCB__Homo_sapiens__CCDS10618.1
auggccgaccccgccgccggccccccccccuccgagggcgaggaguccaccguccgcuucgcccgcaagggcgcccuccgccagaagaacguccacgaggucaagaaccacaaguucaccgcccgcuucuucaagcagcccaccuucugcucccacugcaccgacuucaucuggggcuucggcaagcagggcuuccagugccaggucugcugcuucgucguccacaagcgcugccacgaguucgucaccuucuccugccccggcgccgacaagggccccgccuccgacgacccccgcuccaagcacaaguucaagauccacaccuacuccucccccaccuucugcgaccacugcggcucccuccucuacggccucauccaccagggcaugaagugcgacaccugcaugaugaacguccacaagcgcugcgucaugaacguccccucccucugcggcaccgaccacaccgagcgccgcggccgcaucuacauccaggcccacaucgaccgcgacguccucaucguccucguccgcgacgccaagaaccucguccccauggaccccaacggccucuccgaccccuacgucaagcucaagcucauccccgaccccaaguccgaguccaagcagaagaccaagaccaucaagugcucccucaaccccgaguggaacgagaccuuccgcuuccagcucaaggaguccgacaaggaccgccgccucuccgucgagaucugggacugggaccucaccucccgcaacgacuucaugggcucccucuccuucggcaucuccgagcuccagaaggccuccgucgacggcugguucaagcuccucucccaggaggagggcgaguacuucaacguccccgucccccccgagggcuccgaggccaacgaggagcuccgccagaaguucgagcgcgccaagaucucccagggcaccaagguccccgaggagaagaccaccaacaccgucuccaaguucgacaacaacggcaaccgcgaccgcaugaagcucaccgacuucaacuuccucaugguccucggcaagggcuccuucggcaaggucaugcucuccgagcgcaagggcaccgacgagcucuacgccgucaagauccucaagaaggacgucgucauccaggacgacgacgucgagugcaccauggucgagaagcgcguccucgcccuccccggcaagccccccuuccucacccagcuccacuccugcuuccagaccauggaccgccucuacuucgucauggaguacgucaacggcggcgaccucauguaccacauccagcaggucggccgcuucaaggagccccacgccgucuucuacgccgccgagaucgccaucggccucuucuuccuccaguccaagggcaucaucuaccgcgaccucaagcucgacaacgucaugcucgacuccgagggccacaucaagaucgccgacuucggcaugugcaaggagaacaucugggacggcgucaccaccaagaccuucugcggcacccccgacuacaucgcccccgagaucaucgccuaccagcccuacggcaaguccgucgacuggugggccuucggcguccuccucuacgagaugcucgccggccaggcccccuucgagggcgaggacgaggacgagcucuuccaguccaucauggagcacaacgucgccuaccccaaguccauguccaaggaggccgucgccaucugcaagggccucaugaccaagcaccccggcaagcgccucggcugcggccccgagggcgagcgcgacaucaaggagcacgccuucuuccgcuacaucgacugggagaagcucgagcgcaaggagauccagccccccuacaagcccaaggcccgcgacaagcgcgacaccuccaacuucgacaaggaguucacccgccagcccgucgagcucacccccaccgacaagcucuucaucaugaaccucgaccagaacgaguucgccggcuucuccuacaccaaccccgaguucgucaucaacgucuga

SEQ ID NO: 8847 - RNA, 2016 nt, Artificial Sequence
  derived and/or modified sequence opt3 from KPCB__Homo_sapiens__CCDS10618.1
auggccgaccccgcugcaggcccuccaccgagcgagggggaagaguccaccgugagauucgccaggaagggagcgcugcggcagaaaaacguccacgaaguuaagaaucauaaauuuacagcucgcuucuuuaagcaacccacuuucugcucucacuguacggauuuuaucugggguuucggcaaacagggguuucagugccagguguguugcuucguagugcauaagcgaugucacgaguuugucaccuucucaugcccuggagccgacaagggcccagcaagugaugacccccguagcaaacauaaguuuaaaauucacacauacuccucuccuacuuucugugaucacugcgguucgcuccuuuaugggcugauacaucaaggaaugaagugugauaccugcaugaugaacgugcacaaaagauguguuaugaaugugccaucauugugcggcacagaccauaccgaaaggcggggccgcaucuacauucaggcccacaucgacagagaugucuuaauugugcugguaagggacgcuaagaaccuaguucccauggauccuaaugggcucagcgacccauaugugaagcugaaacuuaucccggaucccaagagugaguccaaacagaagacuaaaacaauaaagugcucucugaacccugaguggaaugaaaccuuucgguuccaguugaaagagagcgacaaggaccgccgacucuccgucgaaaucugggauugggaccugacgucaagaaacgauuucaugggaagucugagcuuugguauuucugagcuccaaaaggcauccguggacggcugguucaaauuacugucacaggaggaaggggaguacuuuaaugugccaguucccccugaaggaagcgaggccaacgaggaacuuaggcagaaguucgagcgggcuaaaaucagucagggcacuaaggucccagaagagaaaaccacaaauacugugucuaaguuugauaacaaugguaaccgugaccgcaugaaguugaccgauuucaauuuucugaugguacuagggaaaggauccuucggcaaggugaugcucagcgaaagaaaaggcacagacgagcuguaugccgucaagauucuuaaaaaggaugugguuauccaagacgaugacguggaauguaccauggucgagaagagggugcuggcguugcccgggaaaccgccuuuucucacgcagcugcacucgugcuuccagacuauggaccgguuauacuuuguaauggaguauguuaacggaggugaucugauguaccauauacaacaggugggccgauucaaggaaccccacgcagucuuuuacgccgcugagauugccaucggacucuucuuccuucagucuaaagggauuaucuaucgcgaccugaaguuggauaacgugaugcuagacuccgaaggccauaucaaaauugcagauuuugguauguguaaggagaauauaugggacggggucacaaccaagacuuucugcggcacaccagauuacaucgcuccugaaauuaucgccuaucagcccuacggaaaaucaguggacuggugggcguuuggcguucugcucuaugagaugcuggccgggcaagcaccauucgagggagaagaugaggacgaacuuuuucagaguauaauggagcacaacguggcuuaccccaagagcauguccaaagaggccguagcuauuuguaagggucugaugaccaaacauccuggcaagagauuggggugcggaccagaaggcgagagggauaucaaagaacacgccuucuuucgguauaucgacugggagaagcucgaacgcaaggagauucagccgcccuacaaaccuaaggcaagagauaaaagggacacgucuaauuucgacaaggaguuuacccgucagccagucgaacugacacccacugauaaauuauucaucaugaaccuggaccaaaaugaguuugccgguuucagcuacaccaacccugaauuugugauuaauguuuga

SEQ ID NO: 8848 - RNA, 2016 nt, Artificial Sequence
  derived and/or modified sequence opt4 from KPCB__Homo_sapiens__CCDS10618.1
auggccgaccccgccgccggccccccccccagcgagggcgaggagagcaccgugagauucgccagaaagggcgcccugagacagaagaacgugcacgaggugaagaaccacaaguucaccgccagauucuucaagcagcccaccuucugcagccacugcaccgacuucaucuggggcuucggcaagcagggcuuccagugccaggugugcugcuucguggugcacaagagaugccacgaguucgugaccuucagcugccccggcgccgacaagggccccgccagcgacgaccccagaagcaagcacaaguucaagauccacaccuacagcagccccaccuucugcgaccacugcggcagccugcuguacggccugauccaccagggcaugaagugcgacaccugcaugaugaacgugcacaagagaugcgugaugaacgugcccagccugugcggcaccgaccacaccgagagaagaggcagaaucuacauccaggcccacaucgacagagacgugcugaucgugcuggugagagacgccaagaaccuggugcccauggaccccaacggccugagcgaccccuacgugaagcugaagcugauccccgaccccaagagcgagagcaagcagaagaccaagaccaucaagugcagccugaaccccgaguggaacgagaccuucagauuccagcugaaggagagcgacaaggacagaagacugagcguggagaucugggacugggaccugaccagcagaaacgacuucaugggcagccugagcuucggcaucagcgagcugcagaaggccagcguggacggcugguucaagcugcugagccaggaggagggcgaguacuucaacgugcccgugccccccgagggcagcgaggccaacgaggagcugagacagaaguucgagagagccaagaucagccagggcaccaaggugcccgaggagaagaccaccaacaccgugagcaaguucgacaacaacggcaacagagacagaaugaagcugaccgacuucaacuuccugauggugcugggcaagggcagcuucggcaaggugaugcugagcgagagaaagggcaccgacgagcuguacgccgugaagauccugaagaaggacguggugauccaggacgacgacguggagugcaccaugguggagaagagagugcuggcccugcccggcaagccccccuuccugacccagcugcacagcugcuuccagaccauggacagacuguacuucgugauggaguacgugaacggcggcgaccugauguaccacauccagcaggugggcagauucaaggagccccacgccguguucuacgccgccgagaucgccaucggccuguucuuccugcagagcaagggcaucaucuacagagaccugaagcuggacaacgugaugcuggacagcgagggccacaucaagaucgccgacuucggcaugugcaaggagaacaucugggacggcgugaccaccaagaccuucugcggcacccccgacuacaucgcccccgagaucaucgccuaccagcccuacggcaagagcguggacuggugggccuucggcgugcugcuguacgagaugcuggccggccaggcccccuucgagggcgaggacgaggacgagcuguuccagagcaucauggagcacaacguggccuaccccaagagcaugagcaaggaggccguggccaucugcaagggccugaugaccaagcaccccggcaagagacugggcugcggccccgagggcgagagagacaucaaggagcacgccuucuucagauacaucgacugggagaagcuggagagaaaggagauccagccccccuacaagcccaaggccagagacaagagagacaccagcaacuucgacaaggaguucaccagacagcccguggagcugacccccaccgacaagcuguucaucaugaaccuggaccagaacgaguucgccggcuucagcuacaccaaccccgaguucgugaucaacguguga

SEQ ID NO: 8849 - RNA, 2016 nt, Artificial Sequence
  derived and/or modified sequence opt5 from KPCB__Homo_sapiens__CCDS10618.1
auggccgaccccgcugccggcccuccgcccagcgagggggaagaguccaccgugagauucgcgcggaagggagcucugcgccagaaaaacguccacgaaguuaagaaucauaaauuuacagccagauucuuuaagcaaccuacguucugcucucacuguaccgauuuuaucuggggcuucgggaaacagggauuucagugccagguguguugcuucgugguccauaagcggugucacgaguuugugacauucagcugccccggcgccgacaaggggccugcuuccgaugacccccgcucuaaacauaaguuuaaaauucacaccuacagcuccccuacauucugugaucacugcggaucucuccuguauggccuuauccaucaaggcaugaagugugauaccugcaugaugaacguucacaaaagaugugugaugaaugucccgagccugugcgggacagaccauaccgaacggcgcggaagaauuuacauccaggcccacauugaccgggaugugcucaucguucuggugcgcgacgcuaagaaccuuguccccauggauccuaauggccuguccgaccccuaugugaagcucaaacugaucccugaucccaagagcgagucuaaacagaagacgaaaaccauuaagugcucccugaacccggaguggaaugaaacauuuagauuccagcucaaagagagcgacaaggaccggcgccugucuguggaaaucugggauugggaccuuaccuccagaaacgauuucauggggagccugucuuuuggaauuuccgagcuccaaaaggccagcgucgacggcugguucaaacugcuuucccaggaggaaggggaguacuuuaauguuccugugcccccugaaggaucugaggcgaacgaggaacugcggcagaaguucgagcgcgccaaaaucagccagggcacaaaggugcccgaagagaaaaccacgaauacagucuccaaguuugauaacaauggcaacagagaccggaugaagcucaccgauuucaauuuucugauggugcuggggaaaggcagcuucggaaagguuaugcucucugaaagaaaagggacagacgagcuguaugcugugaagauucuuaaaaaggaugucgugauccaagacgaugacguugaauguaccaugguggagaagcgcguccuggcccuccccggaaaaccuccguuucugacccagcuucacuccugcuuccagacaauggaccggcuguacuuugugauggaguaugucaacggcggggaucucauguaccauauucaacaggugggaagauucaaggaaccccacgcuguguuuuacgccgcggagaucgccaucggccuguucuuccugcagagcaaaggcauuaucuaucgcgaccucaagcuggauaacguuaugcuugacucugaagggcauauuaaaaucgcugauuuuggaauguguaaggagaauauuugggacggcgucacgaccaagacauucugcgggaccccugauuacaucgcccccgaaaucauugcuuaucagccuuacggaaaaagcguggacuggugggccuuuggcguucugcucuaugagaugcuggccgggcaagcucccuucgagggcgaagaugaggacgaacuuuuucaguccaucauggagcacaacguggcguacccgaagucuaugagcaaagaggccgucgcuauuuguaagggacugaugacaaaacauccuggcaagcggcucgggugcggacccgaaggcgagagagauaucaaagaacacgccuucuuucgcuauauugacugggagaagcuggaacggaaggagauccagccucccuacaaaccuaaggccagagauaaacgcgacaccuccaauuucgacaaggaguuuacgcggcagcccguggaacugacaccgaccgauaaacucuucaucaugaaccuggaccaaaaugaguuugcuggguucagcuacaccaacccugaauuugugauuaauguuuga

SEQ ID NO: 8850 - protein, 673 aa, Artificial Sequence
  KPCB__Homo_sapiens__P05771-2
MADPAAGPPPSEGEESTVRFARKGALRQKNVHEVKNHKFTARFFKQPTFCSHCTDFIWGFGKQGFQCQVCCFVVHKRCHEFVTFSCPGADKGPASDDPRSKHKFKIHTYSSPTFCDHCGSLLYGLIHQGMKCDTCMMNVHKRCVMNVPSLCGTDHTERRGRIYIQAHIDRDVLIVLVRDAKNLVPMDPNGLSDPYVKLKLIPDPKSESKQKTKTIKCSLNPEWNETFRFQLKESDKDRRLSVEIWDWDLTSRNDFMGSLSFGISELQKASVDGWFKLLSQEEGEYFNVPVPPEGSEANEELRQKFERAKISQGTKVPEEKTTNTVSKFDNNGNRDRMKLTDFNFLMVLGKGSFGKVMLSERKGTDELYAVKILKKDVVIQDDDVECTMVEKRVLALPGKPPFLTQLHSCFQTMDRLYFVMEYVNGGDLMYHIQQVGRFKEPHAVFYAAEIAIGLFFLQSKGIIYRDLKLDNVMLDSEGHIKIADFGMCKENIWDGVTTKTFCGTPDYIAPEIIAYQPYGKSVDWWAFGVLLYEMLAGQAPFEGEDEDELFQSIMEHNVAYPKSMSKEAVAICKGLMTKHPGKRLGCGPEGERDIKEHAFFRYIDWEKLERKEIQPPYKPKACGRNAENFDRFFTRHPPVLTPPDQEVIRNIDQSEFEGFSFVNSEFLKPEVKS

SEQ ID NO: 8851 - RNA, 2022 nt, Artificial Sequence
  KPCB__Homo_sapiens__CCDS10619.1
auggcugacccggcugcggggccgccgccgagcgagggcgaggagagcaccgugcgcuucgcccgcaaaggcgcccuccggcagaagaacgugcaugaggucaagaaccacaaauucaccgcccgcuucuucaagcagcccaccuucugcagccacugcaccgacuucaucuggggcuucgggaagcagggauuccagugccaaguuugcugcuuuguggugcacaagcggugccaugaauuugucacauucuccugcccuggcgcugacaaggguccagccuccgaugacccccgcagcaaacacaaguuuaagauccacacguacuccagccccacguuuugugaccacugugggucacugcuguauggacucauccaccaggggaugaaaugugacaccugcaugaugaaugugcacaagcgcugcgugaugaauguucccagccuguguggcacggaccacacggagcgccgcggccgcaucuacauccaggcccacaucgacagggacguccucauuguccucguaagagaugcuaaaaaccuuguaccuauggaccccaauggccugucagaucccuacguaaaacugaaacugauucccgaucccaaaagugagagcaaacagaagaccaaaaccaucaaaugcucccucaacccugaguggaaugagacauuuagauuucagcugaaagaaucggacaaagacagaagacugucaguagagauuugggauugggauuugaccagcaggaaugacuucaugggaucuuuguccuuugggauuucugaacuucagaaagccaguguugauggcugguuuaaguuacugagccaggaggaaggcgaguacuucaaugugccugugccaccagaaggaagugaggccaaugaagaacugcggcagaaauuugagagggccaagaucagucagggaaccaaggucccggaagaaaagacgaccaacacugucuccaaauuugacaacaauggcaacagagaccggaugaaacugaccgauuuuaacuuccuaauggugcuggggaaaggcagcuuuggcaaggucaugcuuucagaacgaaaaggcacagaugagcucuaugcugugaagauccugaagaaggacguugugauccaagaugaugacguggagugcacuaugguggagaagcggguguuggcccugccugggaagccgcccuuccugacccagcuccacuccugcuuccagaccauggaccgccuguacuuugugauggaguacgugaaugggggcgaccucauguaucacauccagcaagucggccgguucaaggagccccaugcuguauuuuacgcugcagaaauugccaucggucuguucuucuuacagaguaagggcaucauuuaccgugaccuaaaacuugacaacgugaugcucgauucugagggacacaucaagauugccgauuuuggcauguguaaggaaaacaucugggauggggugacaaccaagacauucuguggcacuccagacuacaucgcccccgagauaauugcuuaucagcccuaugggaaguccguggauuggugggcauuuggaguccugcuguaugaaauguuggcugggcaggcacccuuugaaggggaggaugaagaugaacucuuccaauccaucauggaacacaacguagccuaucccaagucuauguccaaggaagcuguggccaucugcaaagggcugaugaccaaacacccaggcaaacgucuggguuguggaccugaaggcgaacgugauaucaaagagcaugcauuuuuccgguauauugauugggagaaacuugaacgcaaagagauccagcccccuuauaagccaaaagcuugugggcgaaaugcugaaaacuucgaccgauuuuucacccgccauccaccaguccuaacaccucccgaccaggaagucaucaggaauauugaccaaucagaauucgaaggauuuuccuuuguuaacucugaauuuuuaaaacccgaagucaagagcuaa

SEQ ID NO: 8852 - RNA, 2022 nt, Artificial Sequence
  derived and/or modified sequence opt1 from KPCB__Homo_sapiens__CCDS10619.1
auggccgaccccgccgcggggcccccgcccagcgagggcgaggaguccaccgugcgcuucgcccggaagggcgcccugcgccagaagaacguccacgaggugaagaaccacaaguucaccgcccgguucuucaagcagcccacguucugcagccacugcaccgacuucaucuggggguucggcaagcagggguuccagugccaggugugcugcuucgucgugcacaagcgcugccacgaguucgugaccuucuccugccccggcgccgacaagggccccgcgagcgacgacccccgguccaagcacaaguucaagauccacaccuacagcucccccacguucugcgaccacugcgggagccuccuguacggccugauccaccaggggaugaagugcgacacgugcaugaugaacguccacaagcgcugcgugaugaacgugccgucccucugcggcaccgaccacaccgagcggcgcgggcggaucuacauccaggcccacaucgaccgcgacguccugaucgugcuggugcgggacgccaagaaccucguccccauggaccccaacggccugagcgaccccuacgugaagcugaagcucaucccggaccccaaguccgagagcaagcagaagaccaagaccaucaagugcucccugaaccccgaguggaacgagaccuuccgcuuccagcugaaggagagcgacaaggaccggcgccucuccguggagaucugggacugggaccugaccagccggaacgacuucaugggcucccugagcuucgggaucuccgagcuccagaaggccagcgucgacggcugguucaagcugcugagccaggaggagggggaguacuucaacgugcccgugccgcccgagggcuccgaggcgaacgaggagcuccgccagaaguucgagcgggccaagaucagccagggcacgaagguccccgaggagaagaccaccaacaccguguccaaguucgacaacaacgggaaccgcgaccggaugaagcugacggacuucaacuuccugauggugcucggcaaggggagcuucggcaaggucaugcuguccgagcgcaaggggaccgacgagcuguacgccgugaagauccucaagaaggacguggucauccaggacgacgacguggagugcaccauggucgagaagcgggugcuggcccugcccggcaagccgcccuuccucacccagcugcacagcugcuuccagacgauggaccgccuguacuucgugauggaguacgucaacggcggggaccucauguaccacauccagcaggucggccgcuucaaggagccccacgccguguucuacgcggccgagaucgccaucgggcuguucuuccugcaguccaagggcaucaucuaccgggaccucaagcuggacaacgugaugcuggacagcgaggggcacaucaagaucgccgacuucggcaugugcaaggagaacaucugggacggcgugaccaccaagaccuucugcgggacgcccgacuacaucgccccggagaucaucgcguaccagcccuacggcaaguccguggacuggugggccuucgggguccuccuguacgagaugcuggccggccaggcccccuucgagggggaggacgaggacgagcuguuccagagcaucauggagcacaacguggccuaccccaaguccaugagcaaggaggcgguggccaucugcaagggccucaugaccaagcacccgggcaagcgccuggggugcggccccgagggggagcgggacaucaaggagcacgccuucuuccgcuacaucgacugggagaagcucgagcggaaggagauccagcccccguacaagcccaaggccugcggccgcaacgccgagaacuucgaccgguucuucacccgccacccgcccguccugaccccgcccgaccaggaggugauccggaacaucgaccaguccgaguucgagggcuucagcuucgugaacuccgaguuccugaagcccgaggucaagagcuga

SEQ ID NO: 8853 - RNA, 2022 nt, Artificial Sequence
  derived and/or modified sequence opt2 from KPCB__Homo_sapiens__CCDS10619.1
auggccgaccccgccgccggccccccccccuccgagggcgaggaguccaccguccgcuucgcccgcaagggcgcccuccgccagaagaacguccacgaggucaagaaccacaaguucaccgcccgcuucuucaagcagcccaccuucugcucccacugcaccgacuucaucuggggcuucggcaagcagggcuuccagugccaggucugcugcuucgucguccacaagcgcugccacgaguucgucaccuucuccugccccggcgccgacaagggccccgccuccgacgacccccgcuccaagcacaaguucaagauccacaccuacuccucccccaccuucugcgaccacugcggcucccuccucuacggccucauccaccagggcaugaagugcgacaccugcaugaugaacguccacaagcgcugcgucaugaacguccccucccucugcggcaccgaccacaccgagcgccgcggccgcaucuacauccaggcccacaucgaccgcgacguccucaucguccucguccgcgacgccaagaaccucguccccauggaccccaacggccucuccgaccccuacgucaagcucaagcucauccccgaccccaaguccgaguccaagcagaagaccaagaccaucaagugcucccucaaccccgaguggaacgagaccuuccgcuuccagcucaaggaguccgacaaggaccgccgccucuccgucgagaucugggacugggaccucaccucccgcaacgacuucaugggcucccucuccuucggcaucuccgagcuccagaaggccuccgucgacggcugguucaagcuccucucccaggaggagggcgaguacuucaacguccccgucccccccgagggcuccgaggccaacgaggagcuccgccagaaguucgagcgcgccaagaucucccagggcaccaagguccccgaggagaagaccaccaacaccgucuccaaguucgacaacaacggcaaccgcgaccgcaugaagcucaccgacuucaacuuccucaugguccucggcaagggcuccuucggcaaggucaugcucuccgagcgcaagggcaccgacgagcucuacgccgucaagauccucaagaaggacgucgucauccaggacgacgacgucgagugcaccauggucgagaagcgcguccucgcccuccccggcaagccccccuuccucacccagcuccacuccugcuuccagaccauggaccgccucuacuucgucauggaguacgucaacggcggcgaccucauguaccacauccagcaggucggccgcuucaaggagccccacgccgucuucuacgccgccgagaucgccaucggccucuucuuccuccaguccaagggcaucaucuaccgcgaccucaagcucgacaacgucaugcucgacuccgagggccacaucaagaucgccgacuucggcaugugcaaggagaacaucugggacggcgucaccaccaagaccuucugcggcacccccgacuacaucgcccccgagaucaucgccuaccagcccuacggcaaguccgucgacuggugggccuucggcguccuccucuacgagaugcucgccggccaggcccccuucgagggcgaggacgaggacgagcucuuccaguccaucauggagcacaacgucgccuaccccaaguccauguccaaggaggccgucgccaucugcaagggccucaugaccaagcaccccggcaagcgccucggcugcggccccgagggcgagcgcgacaucaaggagcacgccuucuuccgcuacaucgacugggagaagcucgagcgcaaggagauccagccccccuacaagcccaaggccugcggccgcaacgccgagaacuucgaccgcuucuucacccgccacccccccguccucaccccccccgaccaggaggucauccgcaacaucgaccaguccgaguucgagggcuucuccuucgucaacuccgaguuccucaagcccgaggucaaguccuga

SEQ ID NO: 8854 - RNA, 2022 nt, Artificial Sequence
  derived and/or modified sequence opt3 from KPCB__Homo_sapiens__CCDS10619.1
auggccgaccccgcugcaggcccuccaccgagcgagggggaagaguccaccgugagauucgccaggaagggagcgcugcggcagaaaaacguccacgaaguuaagaaucauaaauuuacagcucgcuucuuuaagcaacccacuuucugcucucacuguacggauuuuaucugggguuucggcaaacagggguuucagugccagguguguugcuucguagugcauaagcgaugucacgaguuugucaccuucucaugcccuggagccgacaagggcccagcaagugaugacccccguagcaaacauaaguuuaaaauucacacauacuccucuccuacuuucugugaucacugcgguucgcuccuuuaugggcugauacaucaaggaaugaagugugauaccugcaugaugaacgugcacaaaagauguguuaugaaugugccaucauugugcggcacagaccauaccgaaaggcggggccgcaucuacauucaggcccacaucgacagagaugucuuaauugugcugguaagggacgcuaagaaccuaguucccauggauccuaaugggcucagcgacccauaugugaagcugaaacuuaucccggaucccaagagugaguccaaacagaagacuaaaacaauaaagugcucucugaacccugaguggaaugaaaccuuucgguuccaguugaaagagagcgacaaggaccgccgacucuccgucgaaaucugggauugggaccugacgucaagaaacgauuucaugggaagucugagcuuugguauuucugagcuccaaaaggcauccguggacggcugguucaaauuacugucacaggaggaaggggaguacuuuaaugugccaguucccccugaaggaagcgaggccaacgaggaacuuaggcagaaguucgagcgggcuaaaaucagucagggcacuaaggucccagaagagaaaaccacaaauacugugucuaaguuugauaacaaugguaaccgugaccgcaugaaguugaccgauuucaauuuucugaugguacuagggaaaggauccuucggcaaggugaugcucagcgaaagaaaaggcacagacgagcuguaugccgucaagauucuuaaaaaggaugugguuauccaagacgaugacguggaauguaccauggucgagaagagggugcuggcguugcccgggaaaccgccuuuucucacgcagcugcacucgugcuuccagacuauggaccgguuauacuuuguaauggaguauguuaacggaggugaucugauguaccauauacaacaggugggccgauucaaggaaccccacgcagucuuuuacgccgcugagauugccaucggacucuucuuccuucagucuaaagggauuaucuaucgcgaccugaaguuggauaacgugaugcuagacuccgaaggccauaucaaaauugcagauuuugguauguguaaggagaauauaugggacggggucacaaccaagacuuucugcggcacaccagauuacaucgcuccugaaauuaucgccuaucagcccuacggaaaaucaguggacuggugggcguuuggcguucugcucuaugagaugcuggccgggcaagcaccauucgagggagaagaugaggacgaacuuuuucagaguauaauggagcacaacguggcuuaccccaagagcauguccaaagaggccguagcuauuuguaagggucugaugaccaaacauccuggcaagagauuggggugcggaccagaaggcgagagggauaucaaagaacacgccuucuuucgguauaucgacugggagaagcucgaacgcaaggagauucagccgcccuacaaaccuaaggcaugugguagaaaugccgagaacuucgauagguuuuucacgcgucacccacccguccugaccccuccagaccaggaagugauccggaauauugaccaaucugaguuugaaggguucagcuuuguuaacucagaguucuuaaaacccgaagugaagaguuga

SEQ ID NO: 8855 - RNA, 2022 nt, Artificial Sequence
  derived and/or modified sequence opt4 from KPCB__Homo_sapiens__CCDS10619.1
auggccgaccccgccgccggccccccccccagcgagggcgaggagagcaccgugagauucgccagaaagggcgcccugagacagaagaacgugcacgaggugaagaaccacaaguucaccgccagauucuucaagcagcccaccuucugcagccacugcaccgacuucaucuggggcuucggcaagcagggcuuccagugccaggugugcugcuucguggugcacaagagaugccacgaguucgugaccuucagcugccccggcgccgacaagggccccgccagcgacgaccccagaagcaagcacaaguucaagauccacaccuacagcagccccaccuucugcgaccacugcggcagccugcuguacggccugauccaccagggcaugaagugcgacaccugcaugaugaacgugcacaagagaugcgugaugaacgugcccagccugugcggcaccgaccacaccgagagaagaggcagaaucuacauccaggcccacaucgacagagacgugcugaucgugcuggugagagacgccaagaaccuggugcccauggaccccaacggccugagcgaccccuacgugaagcugaagcugauccccgaccccaagagcgagagcaagcagaagaccaagaccaucaagugcagccugaaccccgaguggaacgagaccuucagauuccagcugaaggagagcgacaaggacagaagacugagcguggagaucugggacugggaccugaccagcagaaacgacuucaugggcagccugagcuucggcaucagcgagcugcagaaggccagcguggacggcugguucaagcugcugagccaggaggagggcgaguacuucaacgugcccgugccccccgagggcagcgaggccaacgaggagcugagacagaaguucgagagagccaagaucagccagggcaccaaggugcccgaggagaagaccaccaacaccgugagcaaguucgacaacaacggcaacagagacagaaugaagcugaccgacuucaacuuccugauggugcugggcaagggcagcuucggcaaggugaugcugagcgagagaaagggcaccgacgagcuguacgccgugaagauccugaagaaggacguggugauccaggacgacgacguggagugcaccaugguggagaagagagugcuggcccugcccggcaagccccccuuccugacccagcugcacagcugcuuccagaccauggacagacuguacuucgugauggaguacgugaacggcggcgaccugauguaccacauccagcaggugggcagauucaaggagccccacgccguguucuacgccgccgagaucgccaucggccuguucuuccugcagagcaagggcaucaucuacagagaccugaagcuggacaacgugaugcuggacagcgagggccacaucaagaucgccgacuucggcaugugcaaggagaacaucugggacggcgugaccaccaagaccuucugcggcacccccgacuacaucgcccccgagaucaucgccuaccagcccuacggcaagagcguggacuggugggccuucggcgugcugcuguacgagaugcuggccggccaggcccccuucgagggcgaggacgaggacgagcuguuccagagcaucauggagcacaacguggccuaccccaagagcaugagcaaggaggccguggccaucugcaagggccugaugaccaagcaccccggcaagagacugggcugcggccccgagggcgagagagacaucaaggagcacgccuucuucagauacaucgacugggagaagcuggagagaaaggagauccagccccccuacaagcccaaggccugcggcagaaacgccgagaacuucgacagauucuucaccagacacccccccgugcugaccccccccgaccaggaggugaucagaaacaucgaccagagcgaguucgagggcuucagcuucgugaacagcgaguuccugaagcccgaggugaagagcuga

SEQ ID NO: 8856 - RNA, 2022 nt, Artificial Sequence
  derived and/or modified sequence opt5 from KPCB__Homo_sapiens__CCDS10619.1
auggccgaccccgcugccggcccuccgcccagcgagggggaagaguccaccgugagauucgcgcggaagggagcucugcgccagaaaaacguccacgaaguuaagaaucacaaauuuacagccagauucuuuaagcaaccuacguucugcucucacuguaccgauuuuaucuggggcuucgggaaacagggauuucagugccagguguguugcuucgugguccauaagcggugucacgaguuugugacauucagcugccccggcgccgacaaggggccugcuuccgaugacccccgcucuaaacauaaguuuaaaauucacaccuacagcuccccuacauucugugaucacugcggaucucuccuguauggccuuauccaucaaggcaugaagugugauaccugcaugaugaacguucacaaaagaugugugaugaaugucccgagccugugcgggacagaccauaccgaacggcgcggaagaauuuacauccaggcccacauugaccgggaugugcucaucguucuggugcgcgacgcuaagaaccuuguccccauggauccuaauggccuguccgaccccuaugugaagcucaaacugaucccugaucccaagagcgagucuaaacagaagacgaaaaccauuaagugcucccugaacccggaguggaaugaaacauuuagauuccagcucaaagagagcgacaaggaccggcgccugucuguggaaaucugggauugggaccuuaccuccagaaacgauuucauggggagccugucuuuuggaauuuccgagcuccaaaaggccagcgucgacggcugguucaaacugcuuucccaggaggaaggggaguacuuuaauguuccugugcccccugaaggaucugaggcgaacgaggaacugcggcagaaguucgagcgcgccaaaaucagccagggcacaaaggugcccgaagagaaaaccacgaauacagucuccaaguuugauaacaauggcaacagagaccggaugaagcucaccgauuucaauuuucugauggugcuggggaaaggcagcuucggaaagguuaugcucucugaaagaaaagggacagacgagcuguaugcugugaagauucuuaaaaaggaugucgugauccaagacgaugacguugaauguaccaugguggagaagcgcguccuggcccuccccggaaaaccuccguuucugacccagcuucacuccugcuuccagacaauggaccggcuguacuuugugauggaguaugucaacggcggggaucucauguaccauauucaacaggugggaagauucaaggaaccccacgcuguguuuuacgccgcggagaucgccaucggccuguucuuccugcagagcaaaggcauuaucuaucgcgaccucaagcuggauaacguuaugcuugacucugaagggcauauuaaaaucgcugauuuuggaauguguaaggagaauauuugggacggcgucacgaccaagacauucugcgggaccccugauuacaucgcccccgaaaucauugcuuaucagccuuacggaaaaagcguggacuggugggccuuuggcguucugcucuaugagaugcuggccgggcaagcucccuucgagggcgaagaugaggacgaacuuuuucaguccaucauggagcacaacguggcguacccgaagucuaugagcaaagaggccgucgcuauuuguaagggacugaugacaaaacauccuggcaagcggcucgggugcggacccgaaggcgagagagauaucaaagaacacgccuucuuucgcuauauugacugggagaagcuggaacggaaggagauccagccucccuacaaaccuaaggccugugggagaaaugcugagaacuucgaucgcuuuuucacccggcaucccccggugcugacgccucccgaccaggaagugaucagaaauauugaccaauccgaguuugaaggauucagcuuuguuaacucugaguuccucaaacccgaagucaaguccuga

SEQ ID NO: 8857 - protein, 912 aa, Artificial Sequence
  KPCD1__Homo_sapiens__Q15139
MSAPPVLRPPSPLLPVAAAAAAAAAALVPGSGPGPAPFLAPVAAPVGGISFHLQIGLSREPVLLLQDSSGDYSLAHVREMACSIVDQKFPECGFYGMYDKILLFRHDPTSENILQLVKAASDIQEGDLIEVVLSASATFEDFQIRPHALFVHSYRAPAFCDHCGEMLWGLVRQGLKCEGCGLNYHKRCAFKIPNNCSGVRRRRLSNVSLTGVSTIRTSSAELSTSAPDEPLLQKSPSESFIGREKRSNSQSYIGRPIHLDKILMSKVKVPHTFVIHSYTRPTVCQYCKKLLKGLFRQGLQCKDCRFNCHKRCAPKVPNNCLGEVTINGDLLSPGAESDVVMEEGSDDNDSERNSGLMDDMEEAMVQDAEMAMAECQNDSGEMQDPDPDHEDANRTISPSTSNNIPLMRVVQSVKHTKRKSSTVMKEGWMVHYTSKDTLRKRHYWRLDSKCITLFQNDTGSRYYKEIPLSEILSLEPVKTSALIPNGANPHCFEITTANVVYYVGENVVNPSSPSPNNSVLTSGVGADVARMWEIAIQHALMPVIPKGSSVGTGTNLHRDISVSISVSNCQIQENVDISTVYQIFPDEVLGSGQFGIVYGGKHRKTGRDVAIKIIDKLRFPTKQESQLRNEVAILQNLHHPGVVNLECMFETPERVFVVMEKLHGDMLEMILSSEKGRLPEHITKFLITQILVALRHLHFKNIVHCDLKPENVLLASADPFPQVKLCDFGFARIIGEKSFRRSVVGTPAYLAPEVLRNKGYNRSLDMWSVGVIIYVSLSGTFPFNEDEDIHDQIQNAAFMYPPNPWKEISHEAIDLINNLLQVKMRKRYSVDKTLSHPWLQDYQTWLDLRELECKIGERYITHESDDLRWEKYAGEQGLQYPTHLINPSASHSDTPETEETEMKALGERVSIL

SEQ ID NO: 8858 - RNA, 2739 nt, Artificial Sequence
  KPCD1__Homo_sapiens__BAG36853
augagcgccccuccgguccugcggccgcccaguccgcugcugcccguggcggcggcagcugccgcagcggccgccgcacuggucccaggguccgggcccgggcccgcgccguucuuggcuccugucgcggccccggucgggggcaucucguuccaucugcagaucggccugagccgugagccggugcugcugcugcaggacucguccggggacuacagccuggcgcacguccgcgagauggcuugcuccauugucgaccagaaguucccugaaugugguuucuacggaauguaugauaagauccugcuuuuucgccaugacccuaccucugaaaacauccuucagcuggugaaagcggccagugauauccaggaaggcgaucuuauugaaguggucuugucagcuuccgccaccuuugaagacuuucagauucguccccacgcucucuuuguucauucauacagagcuccagcuuucugugaucacuguggagaaaugcugugggggcugguacgucaaggucuuaaaugugaaggguguggucugaauuaccauaagagaugugcauuuaaaauacccaacaauugcagcggugugaggcggagaaggcucucaaacguuucccucacuggggucagcaccauccgcacaucaucugcugaacucucuacaagugccccugaugagccccuucugcaaaaaucaccaucagagucguuuauuggucgagagaagaggucaaauucucaaucauacauuggacgaccaauucaccuugacaagauuuugaugucuaaaguuaaagugccgcacacauuugucauccacuccuacacccggcccacagugugccaguacugcaagaagcuucugaaggggcuuuucaggcagggcuugcagugcaaagauugcagauucaacugccauaaacguugugcaccgaaaguaccaaacaacugccuuggcgaagugaccauuaauggagauuugcuuagcccuggggcagagucugauguggucauggaagaagggagugaugacaaugauagugaaaggaacagugggcucauggaugauauggaagaagcaaugguccaagaugcagagauggcaauggcagagugccagaacgacaguggcgagaugcaagauccagacccagaccacgaggacgccaacagaaccaucaguccaucaacaagcaacaauaucccacucaugaggguagugcagucugucaaacacacgaagaggaaaagcagcacagucaugaaagaaggauggaugguccacuacaccagcaaggacacgcugcggaaacggcacuauuggagauuggauagcaaauguauuacccucuuucagaaugacacaggaagcagguacuacaaggaaauuccuuuaucugaaauuuugucucuggaaccaguaaaaacuucagcuuuaauuccuaauggggccaauccucauuguuucgaaaucacuacggcaaauguaguguauuaugugggagaaaauguggucaauccuuccagcccaucaccaaauaacaguguucucaccaguggcguuggugcagauguggccaggaugugggagauagccauccagcaugcccuuaugcccgucauucccaagggcuccuccguggguacaggaaccaacuugcacagagauaucucugugaguauuucaguaucaaauugccagauucaagaaaauguggacaucagcacaguauaucagauuuuuccugaugaaguacuggguucuggacaguuuggaauuguuuauggaggaaaacaucguaaaacaggaagagauguagcuauuaaaaucauugacaaauuacgauuuccaacaaaacaagaaagccagcuucguaaugagguugcaauucuacagaaccuucaucacccugguguuguaaauuuggaguguauguuugagacgccugaaagaguguuuguuguuauggaaaaacuccauggagacaugcuggaaaugaucuugucaagugaaaagggcagguugccagagcacauaacgaaguuuuuaauuacucagauacucguggcuuugcggcaccuucauuuuaaaaauaucguucacugugaccucaaaccagaaaauguguugcuagccucagcugauccuuuuccucaggugaaacuuugugauuuugguuuugcccggaucauuggagagaagucuuuccggaggucagugguggguacccccgcuuaccuggcuccugagguccuaaggaacaagggcuacaaucgcucucuagacauguggucuguuggggucaucaucuauguaagccuaagcggcacauucccauuuaaugaagaugaagacauacacgaccaaauucagaaugcagcuuucauguauccaccaaaucccuggaaggaaauaucucaugaagccauugaucuuaucaacaauuugcugcaaguaaaaaugagaaagcgcuacaguguggauaagaccuugagccacccuuggcuacaggacuaucagaccugguuagauuugcgagagcuggaaugcaaaaucggggagcgcuacaucacccaugaaagugaugaccugaggugggagaaguaugcaggcgagcaggggcugcaguaccccacacaccugaucaauccaagugcuagccacagugacacuccugagacugaagaaacagaaaugaaagcccucggugagcgugucagcauccucuga

SEQ ID NO: 8859 - RNA, 2739 nt, Artificial Sequence
  derived and/or modified sequence opt1 from KPCD1__Homo_sapiens__BAG36853
augagcgcgcccccggugcugcgcccgcccagcccccuccugcccgucgccgccgccgccgccgccgcggccgccgcccuggugcccggcagcgggcccggccccgcgccguuccucgcccccguggccgcccccgucgggggcaucuccuuccaccuccagaucgggcugagccgggagcccgugcugcugcugcaggacuccagcggcgacuacucccucgcccacgugcgcgagauggcgugcagcaucgucgaccagaaguucccggagugcggcuucuacgggauguacgacaagauccugcuguuccggcacgaccccaccuccgagaacauccuccagcuggugaaggccgccagcgacauccaggagggcgaccugaucgaggugguccucuccgccagcgccaccuucgaggacuuccagauccgcccccacgcgcuguucgugcacuccuaccgggcccccgccuucugcgaccacugcggggagaugcuguggggccucgugcgccaggggcugaagugcgagggcugcggccugaacuaccacaagcggugcgccuucaagaucccgaacaacugcagcgggguccgccggcgccggcucuccaacgugagccugacgggcguguccaccauccgcaccagcuccgccgagcugagcaccagcgcgcccgacgagccccuccugcagaagucccccagcgaguccuucaucgggcgggagaagcgcagcaacucccagagcuacaucggccggccgauccaccuggacaagauccucauguccaaggucaaggugccccacacguucgugauccacagcuacacccgccccaccgucugccaguacugcaagaagcugcugaagggccucuuccggcaggggcugcagugcaaggacugccgcuucaacugccacaagcggugcgcccccaaggugccgaacaacugccugggcgaggugaccaucaacggggaccuccugucccccggcgccgagagcgacgucgugauggaggagggguccgacgacaacgacagcgagcgcaacuccggccugauggacgacauggaggaggccauggugcaggacgccgagauggcgauggccgagugccagaacgacagcggcgagaugcaggaccccgaccccgaccacgaggacgccaaccggacgaucuccccgagcaccuccaacaacaucccccucaugcgcgucgugcagagcgucaagcacaccaagcgcaaguccagcaccgugaugaaggagggguggauggugcacuacacgagcaaggacacccugcggaagcgccacuacuggcggcuggacuccaagugcaucacccucuuccagaacgacaccggcagccgcuacuacaaggagaucccccuguccgagauccugagccucgagccggucaagacguccgcccugauccccaacggggcgaacccccacugcuucgagaucaccaccgccaacgugguguacuacgucggcgagaacguggugaaccccagcuccccgagccccaacaacuccguccugaccagcggggugggcgccgacguggcccggaugugggagaucgccauccagcacgcgcucaugcccgucauccccaagggcuccagcguggggacgggcaccaaccugcaccgcgacaucuccgugagcaucuccgucagcaacugccagauccaggagaacguggacaucuccaccguguaccagaucuucccggacgagguccuggggagcggccaguucgggaucguguacggcggcaagcaccggaagaccgggcgcgacguggccaucaagaucaucgacaagcuccgguuccccacgaagcaggagagccagcugcgcaacgaggucgccauccugcagaaccugcaccaccccggcguggugaaccucgagugcauguucgagacccccgagcgggucuucguggugauggagaagcugcacggggacaugcuggagaugauccucuccagcgagaagggccgccugccggagcacaucaccaaguuccugaucacccagauccucgucgcccugcggcaccuccacuucaagaacaucgugcacugcgaccugaagcccgagaacgugcugcuggccuccgcggaccccuucccccaggucaagcucugcgacuucggcuucgcccgcaucaucggggagaaguccuuccggcgcuccguggugggcacgccggccuaccuggcccccgagguccugcggaacaagggguacaaccgcagccucgacaugugguccgugggcgugaucaucuacgucagccuguccgggaccuuccccuucaacgaggacgaggacauccacgaccagauccagaacgccgcguucauguacccgcccaaccccuggaaggagaucagccacgaggccaucgaccugaucaacaaccuccuccaggugaagaugcggaagcgcuacuccguggacaagacccugagccaccccuggcugcaggacuaccagaccuggcuggaccugcgcgagcucgagugcaagaucggcgagcgguacaucacgcacgaguccgacgaccugcgcugggagaaguacgccggcgagcaggggcugcaguaccccacccaccucaucaacccgagcgccucccacagcgacacccccgagaccgaggagacggagaugaaggcgcugggcgagcgggucuccauccuguga

SEQ ID NO: 8860 - RNA, 2739 nt, Artificial Sequence
  derived and/or modified sequence opt2 from KPCD1__Homo_sapiens__BAG36853
auguccgccccccccguccuccgcccccccuccccccuccuccccgucgccgccgccgccgccgccgccgccgccgcccucguccccggcuccggccccggccccgcccccuuccucgcccccgucgccgcccccgucggcggcaucuccuuccaccuccagaucggccucucccgcgagcccguccuccuccuccaggacuccuccggcgacuacucccucgcccacguccgcgagauggccugcuccaucgucgaccagaaguuccccgagugcggcuucuacggcauguacgacaagauccuccucuuccgccacgaccccaccuccgagaacauccuccagcucgucaaggccgccuccgacauccaggagggcgaccucaucgaggucguccucuccgccuccgccaccuucgaggacuuccagauccgcccccacgcccucuucguccacuccuaccgcgcccccgccuucugcgaccacugcggcgagaugcucuggggccucguccgccagggccucaagugcgagggcugcggccucaacuaccacaagcgcugcgccuucaagauccccaacaacugcuccggcguccgccgccgccgccucuccaacgucucccucaccggcgucuccaccauccgcaccuccuccgccgagcucuccaccuccgcccccgacgagccccuccuccagaagucccccuccgaguccuucaucggccgcgagaagcgcuccaacucccaguccuacaucggccgccccauccaccucgacaagauccucauguccaaggucaaggucccccacaccuucgucauccacuccuacacccgccccaccgucugccaguacugcaagaagcuccucaagggccucuuccgccagggccuccagugcaaggacugccgcuucaacugccacaagcgcugcgcccccaagguccccaacaacugccucggcgaggucaccaucaacggcgaccuccucucccccggcgccgaguccgacgucgucauggaggagggcuccgacgacaacgacuccgagcgcaacuccggccucauggacgacauggaggaggccaugguccaggacgccgagauggccauggccgagugccagaacgacuccggcgagaugcaggaccccgaccccgaccacgaggacgccaaccgcaccaucucccccuccaccuccaacaacaucccccucaugcgcgucguccaguccgucaagcacaccaagcgcaaguccuccaccgucaugaaggagggcuggaugguccacuacaccuccaaggacacccuccgcaagcgccacuacuggcgccucgacuccaagugcaucacccucuuccagaacgacaccggcucccgcuacuacaaggagaucccccucuccgagauccucucccucgagcccgucaagaccuccgcccucauccccaacggcgccaacccccacugcuucgagaucaccaccgccaacgucgucuacuacgucggcgagaacgucgucaaccccuccucccccucccccaacaacuccguccucaccuccggcgucggcgccgacgucgcccgcaugugggagaucgccauccagcacgcccucaugcccgucauccccaagggcuccuccgucggcaccggcaccaaccuccaccgcgacaucuccgucuccaucuccgucuccaacugccagauccaggagaacgucgacaucuccaccgucuaccagaucuuccccgacgagguccucggcuccggccaguucggcaucgucuacggcggcaagcaccgcaagaccggccgcgacgucgccaucaagaucaucgacaagcuccgcuuccccaccaagcaggagucccagcuccgcaacgaggucgccauccuccagaaccuccaccaccccggcgucgucaaccucgagugcauguucgagacccccgagcgcgucuucgucgucauggagaagcuccacggcgacaugcucgagaugauccucuccuccgagaagggccgccuccccgagcacaucaccaaguuccucaucacccagauccucgucgcccuccgccaccuccacuucaagaacaucguccacugcgaccucaagcccgagaacguccuccucgccuccgccgaccccuucccccaggucaagcucugcgacuucggcuucgcccgcaucaucggcgagaaguccuuccgccgcuccgucgucggcacccccgccuaccucgcccccgagguccuccgcaacaagggcuacaaccgcucccucgacaugugguccgucggcgucaucaucuacgucucccucuccggcaccuuccccuucaacgaggacgaggacauccacgaccagauccagaacgccgccuucauguacccccccaaccccuggaaggagaucucccacgaggccaucgaccucaucaacaaccuccuccaggucaagaugcgcaagcgcuacuccgucgacaagacccucucccaccccuggcuccaggacuaccagaccuggcucgaccuccgcgagcucgagugcaagaucggcgagcgcuacaucacccacgaguccgacgaccuccgcugggagaaguacgccggcgagcagggccuccaguaccccacccaccucaucaaccccuccgccucccacuccgacacccccgagaccgaggagaccgagaugaaggcccucggcgagcgcgucuccauccucuga

SEQ ID NO: 8861 - RNA, 2739 nt, Artificial Sequence
  derived and/or modified sequence opt3 from KPCD1__Homo_sapiens__BAG36853
augagcgcucccccugugcugagaccaccgaguccccuccuuccugucgccgcagccgcggcugccgcagccgcugcacugguuccaggcucugggcccggaccugccccauucuuggcucccguggccgcgccuguagguggcaucucauuucacuuacagauugggcugaguagggagccagugcuacuccugcaagacagcuccggagauuacucucuugcacauguccgggaaauggccugcucgauaguggaccagaaguucccggaguguggcuuuuaugguauguacgauaaaauccuguuguuccgccacgaccccaccucagaaaacauucuccagcugguuaaggcugccagcgauauccaggagggggaccugauugaagugguccucagugcauccgcuacauuugaggauuuccaaauccgaccucaugccuuauuugugcacucuuaucgugcgccagccuucugcgaccauuguggagagaugcuguggggccuuguaagacagggcuugaaaugcgaaggguguggacugaauuaccacaagaggugcgcauuuaaaauacccaacaauuguagcgguguucggcgcagaaggcuauccaacgugucacucacuggcgucaguacgauccggaccagcucugcugagcuguccacaucagccccugaugaaccacuucugcaaaagagccccagugagucuuucauugggcgcgagaagcgauccaauagccagucguauaucggaagaccgauucacuuggacaaaauccucaugucuaaggugaaagugccucauacuuuugucauacacuccuacaccaggcccacaguuugccaguauuguaagaaacuguuaaagggccuguuccggcagggucuccagugcaaggauugucguuuuaacugccauaaacgcugcgcuccaaaggugccuaauaacugucuuggggaaguaaccauuaauggagaccuguugucacccggcgccgagagugauguggucauggaagagggcagcgacgacaacgauuccgaaagaaauucugggcuaauggacgauauggaggaggcaauggugcaggacgccgaaauggcuauggcggagugccaaaacgauagcggagaaaugcaggacccagaucccgaccacgaggaugcaaauaggacuaucucaccuaguacauccaacaauauuccacugaugcggguugugcagagcgucaaacacaccaagcgaaaaucuucaacggugaugaaggaagguuggaugguacauuacacuuccaaagacacccuccgcaagagacacuacuggaggcuggauagcaaguguaucacacuuuuccaaaacgacacuggcucccgguauuacaaagagaucccgcugucugagauuuugucgcucgaacccguuaagaccagcgcccugauaccuaacggggcuaauccacauugcuucgagaucacaaccgccaacguggucuauuacgugggagaaaaugucgugaaccccuccucaccuaguccaaauaacucuguuuuaacgagcggcgugggugcagacguagcccgcaugugggagauugcuauccagcacgcccugaugcccgucauaccgaaaggguccucagugggcacuggaacaaaucuacauagagauauuagcguuucuaucuccgugaguaacugucagauccaggaaaaugucgacauuagcaccguguaucaaaucuuuccugaugagguacucggcucugggcaguucggaauuguguacgguggcaagcacaggaaaacugggcgugacguugcaauaaagaucauugauaagcugcgguuuccaacaaaacaggagucccagcuucgaaacgaagucgcgaucuugcaaaaucugcaccaucccggaguggugaaccucgagugcauguucgaaaccccugagagagucuuuguugugauggagaagcugcacggcgacaugcuugaaaugauccugucaagugagaaagguagguugcccgaacauauuacgaaguuccucauaacccagauccugguggcuuuacgccaccuucacuuuaaaaauauuguacauugugaucuaaagccagagaacguccuccuggccagcgcagacccuuucccccaggugaagcugugcgauuuuggguucgcccggaucauuggcgaaaaaucguuuagaagguccguugugggaacaccagcuuauuuggccccggagguccugcgcaauaagggcuacaaccgaucucucgacauguggagcguggggguuaucauauacgugucacugaguggaacuuucccuuuuaacgaggaugaagacauccacgaucagauucaaaaugcagcuuucauguaucccccaaaccccuggaaagagaucucccaugaagccauugacuuaaucaauaaccugcuucagguaaagaugcggaaacguuacucugucgacaagaccuugagccacccuuggcuccaggauuaucagacauggcuggaccuaagagagcuggaauguaagauaggugagagguacauuacucaugaguccgaugaccuccgcugggaaaaauaugcgggcgagcaagggcugcaguacccaacccaccuuaucaaucccucagccagccacagugauacaccugaaaccgaggaaacugagaugaaggcuuugggagagcgggugucuauucuguga

SEQ ID NO: 8862 - RNA, 2739 nt, Artificial Sequence
  derived and/or modified sequence opt4 from KPCD1__Homo_sapiens__BAG36853
augagcgccccccccgugcugagaccccccagcccccugcugcccguggccgccgccgccgccgccgccgccgccgcccuggugcccggcagcggccccggccccgcccccuuccuggcccccguggccgcccccgugggcggcaucagcuuccaccugcagaucggccugagcagagagcccgugcugcugcugcaggacagcagcggcgacuacagccuggcccacgugagagagauggccugcagcaucguggaccagaaguuccccgagugcggcuucuacggcauguacgacaagauccugcuguucagacacgaccccaccagcgagaacauccugcagcuggugaaggccgccagcgacauccaggagggcgaccugaucgagguggugcugagcgccagcgccaccuucgaggacuuccagaucagaccccacgcccuguucgugcacagcuacagagcccccgccuucugcgaccacugcggcgagaugcuguggggccuggugagacagggccugaagugcgagggcugcggccugaacuaccacaagagaugcgccuucaagauccccaacaacugcagcggcgugagaagaagaagacugagcaacgugagccugaccggcgugagcaccaucagaaccagcagcgccgagcugagcaccagcgcccccgacgagccccugcugcagaagagccccagcgagagcuucaucggcagagagaagagaagcaacagccagagcuacaucggcagacccauccaccuggacaagauccugaugagcaaggugaaggugccccacaccuucgugauccacagcuacaccagacccaccgugugccaguacugcaagaagcugcugaagggccuguucagacagggccugcagugcaaggacugcagauucaacugccacaagagaugcgcccccaaggugcccaacaacugccugggcgaggugaccaucaacggcgaccugcugagccccggcgccgagagcgacguggugauggaggagggcagcgacgacaacgacagcgagagaaacagcggccugauggacgacauggaggaggccauggugcaggacgccgagauggccauggccgagugccagaacgacagcggcgagaugcaggaccccgaccccgaccacgaggacgccaacagaaccaucagccccagcaccagcaacaacaucccccugaugagaguggugcagagcgugaagcacaccaagagaaagagcagcaccgugaugaaggagggcuggauggugcacuacaccagcaaggacacccugagaaagagacacuacuggagacuggacagcaagugcaucacccuguuccagaacgacaccggcagcagauacuacaaggagaucccccugagcgagauccugagccuggagcccgugaagaccagcgcccugauccccaacggcgccaacccccacugcuucgagaucaccaccgccaacgugguguacuacgugggcgagaacguggugaaccccagcagccccagccccaacaacagcgugcugaccagcggcgugggcgccgacguggccagaaugugggagaucgccauccagcacgcccugaugcccgugauccccaagggcagcagcgugggcaccggcaccaaccugcacagagacaucagcgugagcaucagcgugagcaacugccagauccaggagaacguggacaucagcaccguguaccagaucuuccccgacgaggugcugggcagcggccaguucggcaucguguacggcggcaagcacagaaagaccggcagagacguggccaucaagaucaucgacaagcugagauuccccaccaagcaggagagccagcugagaaacgagguggccauccugcagaaccugcaccaccccggcguggugaaccuggagugcauguucgagacccccgagagaguguucguggugauggagaagcugcacggcgacaugcuggagaugauccugagcagcgagaagggcagacugcccgagcacaucaccaaguuccugaucacccagauccugguggcccugagacaccugcacuucaagaacaucgugcacugcgaccugaagcccgagaacgugcugcuggccagcgccgaccccuucccccaggugaagcugugcgacuucggcuucgccagaaucaucggcgagaagagcuucagaagaagcguggugggcacccccgccuaccuggcccccgaggugcugagaaacaagggcuacaacagaagccuggacauguggagcgugggcgugaucaucuacgugagccugagcggcaccuuccccuucaacgaggacgaggacauccacgaccagauccagaacgccgccuucauguacccccccaaccccuggaaggagaucagccacgaggccaucgaccugaucaacaaccugcugcaggugaagaugagaaagagauacagcguggacaagacccugagccaccccuggcugcaggacuaccagaccuggcuggaccugagagagcuggagugcaagaucggcgagagauacaucacccacgagagcgacgaccugagaugggagaaguacgccggcgagcagggccugcaguaccccacccaccugaucaaccccagcgccagccacagcgacacccccgagaccgaggagaccgagaugaaggcccugggcgagagagugagcauccuguga

SEQ ID NO: 8863 - RNA, 2739 nt, Artificial Sequence
  derived and/or modified sequence opt5 from KPCD1__Homo_sapiens__BAG36853
augagcgcucccccugugcugagaccgcccuccccucuccugcccgucgccgccgcggcugccgccgcugccgcugcccuuguuccuggcucugggcccggaccugcgccguuccuggcccccguggcugccccugugggcgggaucagcuuucaccuccagauuggacugucccgggagcccguccuucugcuccaagacucuagcggcgauuacucccuggcucaugugcgcgaaauggccugcucuaucguugaccagaaguucccugaguguggguuuuauggaauguacgauaaaauucuccuguucagacacgaccccaccagcgaaaacauccugcagcuugugaaggcggccuccgauauucaggagggcgaccugaucgaagucgugcucagcgcuucugccacauuugaggauuuccaaauccggccgcaugcucuguuuguucacuccuaucgcgccccugccuucugcgaccauuguggcgagaugcuuugggggcuggugagacagggacucaaaugcgaaggcugugggcugaauuaccacaagcggugcgcuuuuaaaauucccaacaauuguagcggaguccgcagacggcgccugucuaacgugucccucacgggcgugagcaccaucagaacaucuuccgcggagcugagcaccuccgccccugaugaaccccuucugcagaagucucccagcgaguccuucauugggcgggagaagcgcagcaauucucaguccuauaucggaagaccuauucaccucgacaaaauccugaugagcaaggucaaaguuccgcauacauuugugauucacucuuacacccggcccacagugugccaauauuguaagaaacuucugaagggccucuuccgccagggccugcagugcaaggauuguagauuuaacugccauaaacggugcgcuccuaagguccccaauaacugucugggggaagugaccaucaauggagaccuccugagcccuggcgccgaguccgauguugugauggaagaggggucugacgacaacgauagcgaaagaaauuccggacuuauggacgauauggaggaggccaugguccaggacgcugaaauggccauggcggagugccaaaacgauagcggcgaaaugcaggaccccgauccggaccacgaggaugcuaaucgcacgaucucuccuuccaccagcaacaauauuccccugaugcgggugguucagucugugaaacacacaaagagaaaauccagcaccgucaugaaggaaggguggauggugcauuacacauccaaagacacccuccgcaagcggcacuacuggagacuggauucuaaguguaucacgcuuuuccaaaacgacacaggaagccgcuauuacaaagagauuccucuguccgagauccucucucuggaacccgucaagaccagcgcccugauuccuaacggcgccaauccccauugcuucgagaucacaaccgcuaacgugguuuauuacgugggcgaaaaugucgugaacccguccagcccuucucccaauaacuccguucucaccagcggggugggagccgacgucgcucggaugugggagaucgccauucagcacgcgcugaugcccgugaucccuaaaggcagcuccguggggacaggaacgaaucuucauagagauauuagcguuucuaucagcgucuccaacugucagauucaggaaaauguggacaucagcaccguguaucaaaucuuuccggaugagguccugggcucugggcaguucggcauuguguacggaggcaagcaccgcaaaacagggcgggacguugccaucaagauuaucgauaagcucagauuucccaccaaacaggagucccagcugcgcaacgaaguggcuauucugcaaaaucuucaccauccuggagucgugaaccucgagugcauguucgaaacacccgagcggguuuuuguggucauggagaagcugcacggcgacaugcuggaaaugauccucagcuccgagaaagggagacugccugaacauauuaccaaguuccuuaucacgcagauccugguggcccuccggcaucugcacuuuaaaaauauuguucacugugaucugaagcccgagaacgugcuucucgcuucugccgacccuuucccccaggucaagcugugcgauuuuggauucgcgcgcaucauuggcgaaaaaucuuuuagacgguccgugguggggacaccggccuaucuggcuccugagguccucagaaauaagggcuacaaccgcucucuggacauguggagcguuggagugaucauuuacgugucccuuucuggcaccuuccccuuuaacgaggaugaagacauccacgaucagauccaaaaugccgcuuucauguauccucccaacccguggaaagagauuagccaugaagccaucgaccugauuaauaaccuccugcaggucaagaugcggaaaagauacuccguggacaagacccugagccacccuuggcuucaggauuaucagacauggcucgaccugcgcgagcuggaauguaagaucggggagagauacauuacccaugagucugaugaccuccggugggaaaaauaugccggagagcaaggccugcaguaccccacacaccuuaucaauccuuccgcuagccacucugauacgcccgaaaccgaggaaacagagaugaaggcgcugggggagcgcguuuccauccucuga

SEQ ID NO: 8864 - protein, 890 aa, Artificial Sequence
  KPCD3__Homo_sapiens__O94806
MSANNSPPSAQKSVLPTAIPAVLPAASPCSSPKTGLSARLSNGSFSAPSLTNSRGSVHTVSFLLQIGLTRESVTIEAQELSLSAVKDLVCSIVYQKFPECGFFGMYDKILLFRHDMNSENILQLITSADEIHEGDLVEVVLSALATVEDFQIRPHTLYVHSYKAPTFCDYCGEMLWGLVRQGLKCEGCGLNYHKRCAFKIPNNCSGVRKRRLSNVSLPGPGLSVPRPLQPEYVALPSEESHVHQEPSKRIPSWSGRPIWMEKMVMCRVKVPHTFAVHSYTRPTICQYCKRLLKGLFRQGMQCKDCKFNCHKRCASKVPRDCLGEVTFNGEPSSLGTDTDIPMDIDNNDINSDSSRGLDDTEEPSPPEDKMFFLDPSDLDVERDEEAVKTISPSTSNNIPLMRVVQSIKHTKRKSSTMVKEGWMVHYTSRDNLRKRHYWRLDSKCLTLFQNESGSKYYKEIPLSEILRISSPRDFTNISQGSNPHCFEIITDTMVYFVGENNGDSSHNPVLAATGVGLDVAQSWEKAIRQALMPVTPQASVCTSPGQGKDHKDLSTSISVSNCQIQENVDISTVYQIFADEVLGSGQFGIVYGGKHRKTGRDVAIKVIDKMRFPTKQESQLRNEVAILQNLHHPGIVNLECMFETPERVFVVMEKLHGDMLEMILSSEKSRLPERITKFMVTQILVALRNLHFKNIVHCDLKPENVLLASAEPFPQVKLCDFGFARIIGEKSFRRSVVGTPAYLAPEVLRSKGYNRSLDMWSVGVIIYVSLSGTFPFNEDEDINDQIQNAAFMYPPNPWREISGEAIDLINNLLQVKMRKRYSVDKSLSHPWLQDYQTWLDLREFETRIGERYITHESDDARWEIHAYTHNLVYPKHFIMAPNPDDMEEDP

SEQ ID NO: 8865 - RNA, 2673 nt, Artificial Sequence
  KPCD3__Homo_sapiens__AAY14817
augucugcaaauaauuccccuccaucagcccagaagucuguauuacccacagcuauuccugcugugcuuccagcugcuucuccguguucaaguccuaagacgggacucucugcccgacucucuaauggaagcuucagugcaccaucacucaccaacuccagaggcucagugcauacaguuucauuucuacugcaaauuggccucacacgggagaguguuaccauugaagcccaggaacugucuuuaucugcugucaaggaucuugugugcuccauaguuuaucaaaaguuuccagaguguggauucuuuggcauguaugacaaaauucuucucuuucgccaugacaugaacucagaaaacauuuugcagcugauuaccucagcagaugaaauacaugaaggagaccuaguggaagugguucuuucagcuuuagccacaguagaagacuuccagauucguccacauacucucuauguacauucuuacaaagcuccuacuuucugugauuacuguggugagaugcucuggggauugguacgucaaggacugaaaugugaaggcuguggauuaaauuaccauaaacgaugugccuucaagauuccaaauaacuguaguggaguaagaaagagacgucugucaaauguaucuuuaccaggacccggccucucaguuccaagaccccuacagccugaauauguagcccuucccagugaagagucacauguccaccaggaaccaaguaagagaauuccuucuuggaguggucgcccaaucuggauggaaaagaugguaaugugcagagugaaaguuccacacacauuugcuguucacucuuacacccgucccacgauaugucaguacugcaagcgguuacugaaaggccucuuucgccaaggaaugcaguguaaagauugcaaauucaacugccauaaacgcugugcaucaaaaguaccaagagacugccuuggagagguuacuuucaauggagaaccuuccagucugggaacagauacagauauaccaauggauauugacaauaaugacauaaauagugauaguagucgggguuuggaugacacagaagagccaucacccccagaagauaagauguucuucuuggauccaucugaucucgauguggaaagagaugaagaagccguuaaaacaaucaguccaucaacaagcaauaauauuccgcuaaugaggguuguacaauccaucaagcacacaaagaggaagagcagcacaauggugaaggaaggguggaugguccauuacaccagcagggauaaccugagaaagaggcauuauuggagacuugacagcaaaugucuaacauuauuucagaaugaaucuggaucaaaguauuauaaggaaauuccacuuucagaaauucuccgcauaucuucaccacgagauuucacaaacauuucacaaggcagcaauccacacuguuuugaaaucauuacugauacuaugguauacuucguuggugagaacaauggggacagcucucauaauccuguucuugcugccacuggaguuggacuugauguagcacagagcugggaaaaagcaauucgccaagcccucaugccuguuacuccucaagcaaguguuugcacuucuccagggcaagggaaagaucacaaagauuugucuacaaguaucucuguaucuaauugucagauucaggagaauguggauaucaguacuguuuaccagaucuuugcagaugaggugcuugguucaggccaguuuggcaucguuuauggaggaaaacauagaaagacugggagggauguggcuauuaaaguaauugauaagaugagauuccccacaaaacaagaaagucaacuccguaaugaaguggcuauuuuacagaauuugcaccauccugggauuguaaaccuggaauguauguuugaaaccccagaacgagucuuuguaguaauggaaaagcugcauggagauauguuggaaaugauucuauccagugagaaaagucggcuuccagaacgaauuacuaaauucauggucacacagauacuuguugcuuugaggaaucugcauuuuaagaauauugugcacugugauuuaaagccagaaaaugugcugcuugcaucagcagagccauuuccucaggugaagcugugugacuuuggauuugcacgcaucauuggugaaaagucauucaggagaucugugguaggaacuccagcauacuuagccccugaaguucuccggagcaaagguuacaaccguucccuagauauguggucagugggaguuaucaucuaugugagccucaguggcacauuuccuuuuaaugaggaugaagauauaaaugaccaaauccaaaaugcugcauuuauguacccaccaaauccauggagagaaauuucuggugaagcaauugaucugauaaacaaucugcuucaagugaagaugagaaaacguuacaguguugacaaaucucuuagucaucccuggcuacaggacuaucagacuuggcuugaccuuagagaauuugaaacucgcauuggagaacguuacauuacacaugaaagugaugaugcucgcugggaaauacaugcauacacacauaaccuuguauacccaaagcacuucauuauggcuccuaauccagaugauauggaagaagauccuuaa

SEQ ID NO: 8866 - RNA, 2673 nt, Artificial Sequence
  derived and/or modified sequence opt1 from KPCD3__Homo_sapiens__AAY14817
augagcgccaacaacuccccgcccagcgcccagaaguccgugcugcccaccgcgauccccgccguccuccccgccgccagcccgugcuccagccccaagaccggccuguccgcccgccugagcaacggguccuucagcgcgcccucccucacgaacagccggggcuccgugcacaccgugagcuuccugcugcagaucgggcucacccgcgaguccgucaccaucgaggcccaggagcugagccuguccgccgugaaggaccucgugugcagcaucgucuaccagaaguuccccgagugcggcuucuucgggauguacgacaagauccugcuguuccggcacgacaugaacuccgagaacauccuccagcugaucacgagcgccgacgagauccacgagggcgaccugguggaggugguccucagcgcgcuggccaccguggaggacuuccagauccgcccgcacacccuguacgugcacuccuacaaggcccccaccuucugcgacuacugcggcgagaugcucugggggcugguccggcagggccugaagugcgaggggugcggccucaacuaccacaagcgcugcgccuucaagauccccaacaacugcagcggggugcggaagcgccggcuguccaacgugagccugcccggcccgggccucuccgucccccgcccccugcagcccgaguacguggcccugccgagcgaggagucccacgugcaccaggagcccagcaagcggauccccuccuggagcgggcgccccaucuggauggagaagauggucaugugccgggugaaggugccgcacacguucgcgguccacuccuacacccgccccaccaucugccaguacugcaagcggcuccugaagggccuguuccgccaggggaugcagugcaaggacugcaaguucaacugccacaagcggugcgccagcaaggugccccgcgacugccucggcgaggugaccuucaacggcgagcccuccagccuggggacggacaccgacaucccgauggacaucgacaacaacgacaucaacuccgacagcucccggggccuggacgacaccgaggagcccagcccgcccgaggacaagauguucuuccucgaccccuccgaccuggacgucgagcgcgacgaggaggccgugaagaccaucagccccagcacguccaacaacaucccccugaugcgggucgugcagagcaucaagcacaccaagcgcaaguccagcaccauggugaaggagggguggaugguccacuacaccucccgcgacaaccuccggaagcgccacuacuggcggcuggacagcaagugccugacccucuuccagaacgaguccggcagcaaguacuacaaggagaucccgcuguccgagauccugcgcaucagcagcccccgggacuucaccaacaucucccagggguccaacccccacugcuucgagaucaucaccgacaccaugguguacuucgugggcgagaacaacggcgacagcucccacaaccccguccucgccgccacgggggugggccuggacguggcgcagagcugggagaaggccauccgccaggcccugaugccggucacgccccaggccuccgugugcaccagccccgggcagggcaaggaccacaaggaccucagcaccuccaucagcguguccaacugccagauccaggagaacgucgacaucagcacgguguaccagaucuucgccgacgaggugcugggguccggccaguucggcaucgucuacgggggcaagcaccggaagaccgggcgcgacguggcgaucaaggugaucgacaagaugcgguuccccaccaagcaggagagccagcugcgcaacgaggucgccauccuccagaaccugcaccacccgggcaucgugaaccuggagugcauguucgagacccccgagcggguguucgucgugauggagaagcugcacggggacaugcucgagaugauccuguccagcgagaagucccgccugcccgagcggaucacgaaguucauggugacccagauccucgucgcccugcgcaaccugcacuucaagaacaucgugcacugcgaccucaagcccgagaacgugcugcuggccagcgccgagccguucccccaggucaagcucugcgacuucggcuucgcgcggaucaucggcgagaaguccuuccgccggagcgugguggggacccccgccuaccuggcccccgagguccugcgcuccaagggcuacaaccggagccucgacaugugguccgugggggugaucaucuacgucagccuguccggcaccuucccguucaacgaggacgaggacaucaacgaccagauccagaacgccgcguucauguacccgcccaaccccuggcgcgagaucagcggcgaggccaucgaccugaucaacaaccuccuccaggugaagaugcgcaagcgguacuccguggacaagagccugagccaccccuggcugcaggacuaccagacguggcuggaccugcgcgaguucgagacccggaucggggagcgcuacaucacccacgaguccgacgacgcccggugggagauccacgccuacacccacaaccucgucuaccccaagcacuucaucauggcccccaaccccgacgacauggaggaggacccguga

SEQ ID NO: 8867 - RNA, 2673 nt, Artificial Sequence
  derived and/or modified sequence opt2 from KPCD3__Homo_sapiens__AAY14817
auguccgccaacaacuccccccccuccgcccagaaguccguccuccccaccgccauccccgccguccuccccgccgccucccccugcuccucccccaagaccggccucuccgcccgccucuccaacggcuccuucuccgcccccucccucaccaacucccgcggcuccguccacaccgucuccuuccuccuccagaucggccucacccgcgaguccgucaccaucgaggcccaggagcucucccucuccgccgucaaggaccucgucugcuccaucgucuaccagaaguuccccgagugcggcuucuucggcauguacgacaagauccuccucuuccgccacgacaugaacuccgagaacauccuccagcucaucaccuccgccgacgagauccacgagggcgaccucgucgaggucguccucuccgcccucgccaccgucgaggacuuccagauccgcccccacacccucuacguccacuccuacaaggcccccaccuucugcgacuacugcggcgagaugcucuggggccucguccgccagggccucaagugcgagggcugcggccucaacuaccacaagcgcugcgccuucaagauccccaacaacugcuccggcguccgcaagcgccgccucuccaacgucucccuccccggccccggccucuccgucccccgcccccuccagcccgaguacgucgcccuccccuccgaggagucccacguccaccaggagcccuccaagcgcauccccuccugguccggccgccccaucuggauggagaagauggucaugugccgcgucaaggucccccacaccuucgccguccacuccuacacccgccccaccaucugccaguacugcaagcgccuccucaagggccucuuccgccagggcaugcagugcaaggacugcaaguucaacugccacaagcgcugcgccuccaaggucccccgcgacugccucggcgaggucaccuucaacggcgagcccuccucccucggcaccgacaccgacauccccauggacaucgacaacaacgacaucaacuccgacuccucccgcggccucgacgacaccgaggagcccuccccccccgaggacaagauguucuuccucgaccccuccgaccucgacgucgagcgcgacgaggaggccgucaagaccaucucccccuccaccuccaacaacaucccccucaugcgcgucguccaguccaucaagcacaccaagcgcaaguccuccaccauggucaaggagggcuggaugguccacuacaccucccgcgacaaccuccgcaagcgccacuacuggcgccucgacuccaagugccucacccucuuccagaacgaguccggcuccaaguacuacaaggagaucccccucuccgagauccuccgcaucuccuccccccgcgacuucaccaacaucucccagggcuccaacccccacugcuucgagaucaucaccgacaccauggucuacuucgucggcgagaacaacggcgacuccucccacaaccccguccucgccgccaccggcgucggccucgacgucgcccaguccugggagaaggccauccgccaggcccucaugcccgucaccccccaggccuccgucugcaccucccccggccagggcaaggaccacaaggaccucuccaccuccaucuccgucuccaacugccagauccaggagaacgucgacaucuccaccgucuaccagaucuucgccgacgagguccucggcuccggccaguucggcaucgucuacggcggcaagcaccgcaagaccggccgcgacgucgccaucaaggucaucgacaagaugcgcuuccccaccaagcaggagucccagcuccgcaacgaggucgccauccuccagaaccuccaccaccccggcaucgucaaccucgagugcauguucgagacccccgagcgcgucuucgucgucauggagaagcuccacggcgacaugcucgagaugauccucuccuccgagaagucccgccuccccgagcgcaucaccaaguucauggucacccagauccucgucgcccuccgcaaccuccacuucaagaacaucguccacugcgaccucaagcccgagaacguccuccucgccuccgccgagcccuucccccaggucaagcucugcgacuucggcuucgcccgcaucaucggcgagaaguccuuccgccgcuccgucgucggcacccccgccuaccucgcccccgagguccuccgcuccaagggcuacaaccgcucccucgacaugugguccgucggcgucaucaucuacgucucccucuccggcaccuuccccuucaacgaggacgaggacaucaacgaccagauccagaacgccgccuucauguacccccccaaccccuggcgcgagaucuccggcgaggccaucgaccucaucaacaaccuccuccaggucaagaugcgcaagcgcuacuccgucgacaagucccucucccaccccuggcuccaggacuaccagaccuggcucgaccuccgcgaguucgagacccgcaucggcgagcgcuacaucacccacgaguccgacgacgcccgcugggagauccacgccuacacccacaaccucgucuaccccaagcacuucaucauggcccccaaccccgacgacauggaggaggaccccuga

SEQ ID NO: 8868 - RNA, 2673 nt, Artificial Sequence
  derived and/or modified sequence opt3 from KPCD3__Homo_sapiens__AAY14817
augagcgccaacaauuccccuccuucugcucagaagucagugcugccaaccgcaaucccggccguccuccccgcggcuaguccuugcagcuccccaaaaacaggccuuucugccagacugucgaacgggucauucagcgcacccaguuugacuaauuccaggggaucuguucacacggugagcuuuuuacugcaaauuggucuaacccgggaguccguaacaauagaagcccaggagcucucacugagugcugugaaggaccuugucuguagcaucguguaccagaaauucccugaaugcggcuuuuucgggauguaugauaagauucuguuguuucgccaugacaugaacucugagaauauccuccagcugauuacuuccgcagaugaaauccacgagggagaccugguugaggugguccucucagccuuagcuaccguggaagauuuccaaauacgaccacauacacuguacguacacagcuauaaagcccccaccuuuugugacuacugcggcgagaugcuuugggguuugguucgucaggggcugaagugugaaggaugcggccuaaacuaucauaagagaugugcguucaaaaucccuaauaacugcaguggcgugaggaagcggcgccucucuaaugucucccugccagggccgggacuuagcgugcccagaccucugcagccagaguacguggcauugcccucggaggaaucucacguccaccaggagccuuccaaaaggauuccaucauggaguggucggcccaucuggauggaaaagaugguuaugugucgcgugaaaguaccgcauacuuuugccgugcacagcuauacacgaccuaccauuugccaauacuguaagagacuccugaagggcuuauucaggcaggggaugcagugcaaagauugcaaguuuaacugucauaaacggugcgcuuccaaggucccccgugacugucugggagaggugacguucaauggcgaaccaucuagccucgguacugauaccgacaucccuauggauauagacaacaaugauauuaacucagacaguucccgcgggcuugacgauacagaggagcccagcccacccgaagacaaaauguuuuuccuggauccuucugacuuggauguugagagagacgaagaggccgugaagacuaucucaccaaguaccagcaauaacauuccgcuaaugagggucgugcaguccaucaaacacacaaagcggaagucuucgaccaugguaaaagaaggauggaugguucacuacacgagccgagauaaccugcgcaagagacauuauuggaggcucgacuccaaaugccugacucuuuuccaaaaugagucaggcaguaaguacuauaaagagaucccccugucugaaauuuugcggauaagcuccccucgcgauuuuacaaacaucucacagggcagcaauccacacuguuucgagauuaucaccgacacuaugguguacuuugucggggaaaacaauggagauucuucccauaaccccgugcucgcagcuacaggugucggccuggacguggcccagaguugggagaaggcgauaagacaagccuuaaugccuguuaccccacaggcaagcgugugcacgucucccgggcagggaaaggaccacaaagaucuguccaccucaauuaguguaagcaauugucagauccaagaaaacgucgacaucucgacaguguaucagauuuucgcugaugagguucuaggcuccggucaguuugggaucguguacggcggaaagcauaggaaaacuggccgugacgucgccauuaaggugauagauaaaaugcgguucccgaccaagcaggagucucaacuccgaaaugaaguagcuauccugcagaaccuucaccacccugggauugugaauuuggagugcauguuugaaacaccagagagaguuuucgucgugauggagaagcugcauggagacaugcucgaaaugauccugagcucagagaaaaguaggcuucccgaacgcaucacuaaguuuauggugacccagauucuggucgccuugcggaaccuccacuucaaaaauauaguucauugugaucugaagccugagaacguguuacuggcauccgccgaacccuuuccacaggugaaacuaugcgacuucgguuuugcuagaaucauuggcgagaagucuuucaggcgcagcguagucgggacacccgcguaucucgcacccgaggugcugcgauccaagggauacaaucggucacuugauauguggagcguuggcgugaucauuuacgucaguuugucugguaccuucccauuuaacgaagacgaggauaucaacgaccaaauacagaaugccgcuuucauguauccgccuaaccccuggcgugaaaucuccggggaggccauugaucugaucaauaaccucuuacaggugaaaaugagaaagagguacagcguugacaaaucgcugucacacccauggcugcaggacuaucaaacuuggcuugauuugcgcgaauuugagacgcggauuggcgagagauacaucacacacgaaucugacgaugcaaggugggagauacaugccuauacccacaaucucguguaccccaagcauuucauuauggcuccuaacccagacgauauggaagaggaccccuga

SEQ ID NO: 8869 - RNA, 2673 nt, Artificial Sequence
  derived and/or modified sequence opt4 from KPCD3__Homo_sapiens__AAY14817
augagcgccaacaacagcccccccagcgcccagaagagcgugcugcccaccgccauccccgccgugcugcccgccgccagccccugcagcagccccaagaccggccugagcgccagacugagcaacggcagcuucagcgcccccagccugaccaacagcagaggcagcgugcacaccgugagcuuccugcugcagaucggccugaccagagagagcgugaccaucgaggcccaggagcugagccugagcgccgugaaggaccuggugugcagcaucguguaccagaaguuccccgagugcggcuucuucggcauguacgacaagauccugcuguucagacacgacaugaacagcgagaacauccugcagcugaucaccagcgccgacgagauccacgagggcgaccugguggagguggugcugagcgcccuggccaccguggaggacuuccagaucagaccccacacccuguacgugcacagcuacaaggcccccaccuucugcgacuacugcggcgagaugcuguggggccuggugagacagggccugaagugcgagggcugcggccugaacuaccacaagagaugcgccuucaagauccccaacaacugcagcggcgugagaaagagaagacugagcaacgugagccugcccggccccggccugagcgugcccagaccccugcagcccgaguacguggcccugcccagcgaggagagccacgugcaccaggagcccagcaagagaauccccagcuggagcggcagacccaucuggauggagaagauggugaugugcagagugaaggugccccacaccuucgccgugcacagcuacaccagacccaccaucugccaguacugcaagagacugcugaagggccuguucagacagggcaugcagugcaaggacugcaaguucaacugccacaagagaugcgccagcaaggugcccagagacugccugggcgaggugaccuucaacggcgagcccagcagccugggcaccgacaccgacauccccauggacaucgacaacaacgacaucaacagcgacagcagcagaggccuggacgacaccgaggagcccagcccccccgaggacaagauguucuuccuggaccccagcgaccuggacguggagagagacgaggaggccgugaagaccaucagccccagcaccagcaacaacaucccccugaugagaguggugcagagcaucaagcacaccaagagaaagagcagcaccauggugaaggagggcuggauggugcacuacaccagcagagacaaccugagaaagagacacuacuggagacuggacagcaagugccugacccuguuccagaacgagagcggcagcaaguacuacaaggagaucccccugagcgagauccugagaaucagcagccccagagacuucaccaacaucagccagggcagcaacccccacugcuucgagaucaucaccgacaccaugguguacuucgugggcgagaacaacggcgacagcagccacaaccccgugcuggccgccaccggcgugggccuggacguggcccagagcugggagaaggccaucagacaggcccugaugcccgugaccccccaggccagcgugugcaccagccccggccagggcaaggaccacaaggaccugagcaccagcaucagcgugagcaacugccagauccaggagaacguggacaucagcaccguguaccagaucuucgccgacgaggugcugggcagcggccaguucggcaucguguacggcggcaagcacagaaagaccggcagagacguggccaucaaggugaucgacaagaugagauuccccaccaagcaggagagccagcugagaaacgagguggccauccugcagaaccugcaccaccccggcaucgugaaccuggagugcauguucgagacccccgagagaguguucguggugauggagaagcugcacggcgacaugcuggagaugauccugagcagcgagaagagcagacugcccgagagaaucaccaaguucauggugacccagauccugguggcccugagaaaccugcacuucaagaacaucgugcacugcgaccugaagcccgagaacgugcugcuggccagcgccgagcccuucccccaggugaagcugugcgacuucggcuucgccagaaucaucggcgagaagagcuucagaagaagcguggugggcacccccgccuaccuggcccccgaggugcugagaagcaagggcuacaacagaagccuggacauguggagcgugggcgugaucaucuacgugagccugagcggcaccuuccccuucaacgaggacgaggacaucaacgaccagauccagaacgccgccuucauguacccccccaaccccuggagagagaucagcggcgaggccaucgaccugaucaacaaccugcugcaggugaagaugagaaagagauacagcguggacaagagccugagccaccccuggcugcaggacuaccagaccuggcuggaccugagagaguucgagaccagaaucggcgagagauacaucacccacgagagcgacgacgccagaugggagauccacgccuacacccacaaccugguguaccccaagcacuucaucauggcccccaaccccgacgacauggaggaggaccccuga

SEQ ID NO: 8870 - RNA, 2673 nt, Artificial Sequence
  derived and/or modified sequence opt5 from KPCD3__Homo_sapiens__AAY14817
augagcgccaacaauuccccucccucugcucagaagucugugcugccgaccgccauccccgcgguccucccugcugccucccccugcucuagcccuaaaacaggccuguccgccagacuuucuaacgggagcuucuccgcucccagccugacgaauagccggggauccguucacaccgugagcuuucuccugcaaauuggccuuacacgcgagucugugaccaucgaagcccaggagcugucccucagcgcugucaaggaccugguguguucuauuguuuaccagaaauucccugaaugcggguuuuucggaauguaugauaagauccugcucuuuagacaugacaugaacuccgagaauauucugcagcuuaucacaagcgccgaugaaauccacgagggcgaccugguggaggucgugcucuccgcgcuggccaccguugaagauuuccaaauucggccgcauacacuuuacgugcacucuuauaaagcucccaccuuuugugacuacugcggggagaugcuguggggacucguccgccagggccugaagugugaaggcugcgggcugaacuaucauaagagaugugccuucaaaaucccuaauaacugcagcggagugcggaagcgcagacucuccaaugugagccugcccggcccugggcuuucugucccccggccgcugcagccugaguacguugcucuccccuccgaggaaagccacgugcaccaggagccuucuaaacgcauucccagcugguccggaagacccaucuggauggaaaagauggugaugugucgggucaaagugccucauacguuugccguucacucuuauacccgcccgacaauuugccaauacuguaagagacugcuuaagggccuguuccggcaggggaugcagugcaaagauugcaaguuuaacugucauaaacgcugcgcgagcaaggugcccagagacugucucggagaggucaccuucaauggcgaaccuuccagccugggcacagauaccgacauccccauggauauugacaacaaugauaucaacucugacuccagccgggggcuggacgauacggaggagccuucucccccggaagacaaaauguuuuuccucgauccuuccgaccuggauguggagagagacgaagaggccguuaagacaaucagccccuccaccucuaauaacauuccucuuaugcgcgugguccagagcaucaaacacacaaagcggaaguccucuaccauggugaaagaaggauggaugguccacuacaccagcagagauaaccugcgcaagcggcauuauuggagacucgacuccaaaugccugacacuuuuccaaaaugagagcggcucuaaguacuauaaagagauuccccuguccgaaauccuccgcauuagcucuccucgggauuuuacgaacaucucccaggggagcaauccccacuguuucgagaucauuaccgacacaaugguguacuuuguuggagaaaacaauggcgauucuagccauaacccggugcuggcugccaccggggucggacuggacguggcucaguccugggagaaggccaucagacaagcccucaugccuguuacaccccaggcuagcgugugcaccucucccggccagggcaaggaccacaaagaucuguccacgagcauuuccgucucuaauugucagauccaagaaaacguggacauuagcacaguguaucagaucuucgcggaugagguucuuggguccggacaguuuggcaucgucuacgggggaaagcaucgcaaaaccggccgggacguggccauuaaggugaucgauaaaaugagauucccuaccaagcaggagucucaacugcgcaaugaagucgcuauucuccagaaccugcaccacccggggaucgugaaucuggagugcauguuugaaacacccgagcggguuuucguggucauggagaaacuucauggcgacaugcucgaaaugauucugagcuccgagaagucuagacugccugaacggaucaccaaguuuauggugacacagauucucguugcccugcgcaaccuucacuucaaaaauaucgugcauugugaucugaagcccgagaacguccuccuggccagcgcugaaccuuuuccccaggugaaacugugcgacuucggauuugccagaaucauuggcgagaaguccuuccggagaagcguuguggggacgccugcguaucuugcucccgagguccuccgcucuaagggauacaaucggucccuggauauguggagcgugggcgugaucauuuacgucucucuguccgggaccuucccguuuaacgaagacgaggauaucaacgaccaaauucagaaugccgccuucauguauccucccaacccuuggagagaaaucagcggagaggcuaucgaucucauuaauaaccugcuucagguuaaaaugcgcaagagauacucuguggacaaaucccugagccaccccuggcuccaggacuaucaaacauggcuggaucugcgggaauuugagacccgcaucggcgagagauacauuacacacgaauccgacgaugcccggugggagauccaugcuuauacccacaaucuuguguacccgaagcauuucauuauggccccuaaccccgacgauauggaagaggacccuuga

SEQ ID NO: 8871 - protein, 676 aa, Artificial Sequence
  KPCD__Homo_sapiens__Q05655
MAPFLRIAFNSYELGSLQAEDEANQPFCAVKMKEALSTERGKTLVQKKPTMYPEWKSTFDAHIYEGRVIQIVLMRAAEEPVSEVTVGVSVLAERCKKNNGKAEFWLDLQPQAKVLMSVQYFLEDVDCKQSMRSEDEAKFPTMNRRGAIKQAKIHYIKNHEFIATFFGQPTFCSVCKDFVWGLNKQGYKCRQCNAAIHKKCIDKIIGRCTGTAANSRDTIFQKERFNIDMPHRFKVHNYMSPTFCDHCGSLLWGLVKQGLKCEDCGMNVHHKCREKVANLCGINQKLLAEALNQVTQRASRRSDSASSEPVGIYQGFEKKTGVAGEDMQDNSGTYGKIWEGSSKCNINNFIFHKVLGKGSFGKVLLGELKGRGEYFAIKALKKDVVLIDDDVECTMVEKRVLTLAAENPFLTHLICTFQTKDHLFFVMEFLNGGDLMYHIQDKGRFELYRATFYAAEIMCGLQFLHSKGIIYRDLKLDNVLLDRDGHIKIADFGMCKENIFGESRASTFCGTPDYIAPEILQGLKYTFSVDWWSFGVLLYEMLIGQSPFHGDDEDELFESIRVDTPHYPRWITKESKDILEKLFEREPTKRLGVTGNIKIHPFFKTINWTLLEKRRLEPPFRPKVKSPRDYSNFDQEFLNEKARLSYSDKNLIDSMDQSAFAGFSFVNPKFEHLLED

SEQ ID NO: 8872 - RNA, 2031 nt, Artificial Sequence
  KPCD__Homo_sapiens__AAA03175
auggcgccguuccugcgcaucgccuucaacuccuaugagcugggcucccugcaggccgaggacgaggcgaaccagcccuucugugccgugaagaugaaggaggcgcucagcacagagcgugggaaaacacuggugcagaagaagccgaccauguauccugaguggaagucgacguucgaugcccacaucuaugaggggcgcgucauccagauugugcuaaugcgggcagcagaggagccagugucugaggugaccgugggugugucggugcuggccgagcgcugcaagaagaacaauggcaaggcugaguucuggcuggaccugcagccucaggccaagguguugaugucuguucaguauuuccuggaggacguggauugcaaacagucuaugcgcagugaggacgaggccaaguucccaacgaugaaccgccgcggagccaucaaacaggccaaaauccacuacaucaagaaccaugaguuuaucgccaccuucuuugggcaacccaccuucuguucugugugcaaagacuuugucuggggccucaacaagcaaggcuacaaaugcaggcaauguaacgcugccauccacaagaaaugcaucgacaagaucaucggcagaugcacuggcaccgcggccaacagccgggacacuauauuccagaaagaacgcuucaacaucgacaugccgcaccgcuucaagguucacaacuacaugagccccaccuucugugaccacugcggcagccugcucuggggacuggugaagcagggauuaaagugugaagacugcggcaugaaugugcaccauaaaugccgggagaagguggccaaccucugcggcaucaaccagaagcuuuuggcugaggccuugaaccaagucacccagagagccucccggagaucagacucagccuccucagagccuguugggauauaucaggguuucgagaagaagaccggaguugcuggggaggacaugcaagacaacagugggaccuacggcaagaucugggagggcagcagcaagugcaacaucaacaacuucaucuuccacaagguccugggcaaaggcagcuucgggaaggugcugcuuggagagcugaagggcagaggagaguacuuugccaucaaggcccucaagaaggaugugguccugaucgacgacgacguggagugcaccaugguugagaagcgggugcugacacuugccgcagagaaucccuuucucacccaccucaucugcaccuuccagaccaaggaccaccuguucuuugugauggaguuccucaacgggggggaccugauguaccacauccaggacaaaggccgcuuugaacucuaccgugccacguuuuaugccgcugagauaauguguggacugcaguuucuacacagcaagggcaucauuuacagggaccucaaacuggacaaugugcuguuggaccgggauggccacaucaagauugccgacuuugggaugugcaaagagaacauauucggggagagccgggccagcaccuucugcggcaccccugacuauaucgccccugagauccuacagggccugaaguacacauucucuguggacugguggucuuucgggguccuucuguacgagaugcucauuggccagucccccuuccauggugaugaugaggaugaacucuucgaguccauccguguggacacgccacauuauccccgcuggaucaccaaggaguccaaggacauccuggagaagcucuuugaaagggaaccaaccaagaggcugggagugacgggaaacaucaaaauccaccccuucuucaagaccauaaacuggacucugcuggaaaagcggagguuggagccacccuucaggcccaaagugaagucacccagagacuacaguaacuuugaccaggaguuccugaacgagaaggcgcgccucuccuacagcgacaagaaccucaucgacuccauggaccagucugcauucgcuggcuucuccuuugugaaccccaaauucgagcaccuccuggaagauuga

SEQ ID NO: 8873 - RNA, 2031 nt, Artificial Sequence
  derived and/or modified sequence opt1 from KPCD__Homo_sapiens__AAA03175
auggcccccuuccugcgcaucgccuucaacagcuacgagcucggcucccugcaggcggaggacgaggccaaccagcccuucugcgccgugaagaugaaggaggcccugagcaccgagcgggggaagacccucguccagaagaagcccacgauguaccccgaguggaaguccaccuucgacgcccacaucuacgagggccgcgugauccagaucgugcugaugcgggcggccgaggagcccgucagcgaggugaccgugggggucuccgugcuggccgagcgcugcaagaagaacaacggcaaggccgaguucuggcucgaccugcagccgcaggcgaaggugcugaugagcguccaguacuuccucgaggacguggacugcaagcaguccaugcggagcgaggacgaggccaaguuccccaccaugaaccgccgcggggccaucaagcaggccaagauccacuacaucaagaaccacgaguucaucgccacguucuucggccagcccaccuucugcuccgugugcaaggacuucgucuggggccugaacaagcagggguacaagugccggcagugcaacgcggccauccacaagaagugcaucgacaagaucaucggccggugcaccgggaccgccgccaacagccgcgacacgaucuuccagaaggagcgguucaacaucgacaugccccaccgcuucaaggugcacaacuacauguccccgaccuucugcgaccacugcggcagccugcucugggggcuggugaagcagggccugaagugcgaggacugcggcaugaacguccaccacaagugccgggagaagguggccaaccucugcgggaucaaccagaagcugcuggcggaggcccucaaccaggugacccagcgcgccucccggcgcagcgacuccgccagcuccgagcccgucggcaucuaccagggguucgagaagaagaccggcguggccggcgaggacaugcaggacaacagcgggacguacggcaagaucugggagggguccagcaagugcaacaucaacaacuucaucuuccacaaggugcugggcaaggggagcuucggcaagguccugcucggcgagcugaaggggcggggcgaguacuucgcgaucaaggcccugaagaaggacguggugcucaucgacgacgacgucgagugcaccaugguggagaagcgcguccugacccuggccgccgagaaccccuuccucacccaccugaucugcacguuccagaccaaggaccaccuguucuucgugauggaguuccucaacgggggcgaccugauguaccacauccaggacaaggggcgguucgagcuguaccgcgccaccuucuacgcggccgagaucaugugcggccuccaguuccugcacuccaagggcaucaucuaccgggaccugaagcucgacaacgugcugcuggaccgcgacgggcacaucaagaucgccgacuucggcaugugcaaggagaacaucuucggggagagccgcgccuccaccuucugcggcacgcccgacuacaucgcgccggagauccuccaggggcugaaguacaccuucagcgucgacuggugguccuucggcgugcugcucuacgagaugcugaucggccagagccccuuccacggggacgacgaggacgagcuguucgaguccauccggguggacacgccccacuacccccgcuggaucaccaaggagagcaaggacauccucgagaagcuguucgagcgggagccgaccaagcgccugggcgucaccgggaacaucaagauccaccccuucuucaagaccaucaacuggacccuccuggagaagcggcgccuggagccgcccuuccggcccaaggugaaguccccgcgcgacuacagcaacuucgaccaggaguuccugaacgagaaggcccggcucuccuacagcgacaagaaccugaucgacuccauggaccagagcgccuucgccggcuucuccuucgugaaccccaaguucgagcaccuccuggaggacuga

SEQ ID NO: 8874 - RNA, 2031 nt, Artificial Sequence
  derived and/or modified sequence opt2 from KPCD__Homo_sapiens__AAA03175
auggcccccuuccuccgcaucgccuucaacuccuacgagcucggcucccuccaggccgaggacgaggccaaccagcccuucugcgccgucaagaugaaggaggcccucuccaccgagcgcggcaagacccucguccagaagaagcccaccauguaccccgaguggaaguccaccuucgacgcccacaucuacgagggccgcgucauccagaucguccucaugcgcgccgccgaggagcccgucuccgaggucaccgucggcgucuccguccucgccgagcgcugcaagaagaacaacggcaaggccgaguucuggcucgaccuccagccccaggccaagguccucauguccguccaguacuuccucgaggacgucgacugcaagcaguccaugcgcuccgaggacgaggccaaguuccccaccaugaaccgccgcggcgccaucaagcaggccaagauccacuacaucaagaaccacgaguucaucgccaccuucuucggccagcccaccuucugcuccgucugcaaggacuucgucuggggccucaacaagcagggcuacaagugccgccagugcaacgccgccauccacaagaagugcaucgacaagaucaucggccgcugcaccggcaccgccgccaacucccgcgacaccaucuuccagaaggagcgcuucaacaucgacaugccccaccgcuucaagguccacaacuacaugucccccaccuucugcgaccacugcggcucccuccucuggggccucgucaagcagggccucaagugcgaggacugcggcaugaacguccaccacaagugccgcgagaaggucgccaaccucugcggcaucaaccagaagcuccucgccgaggcccucaaccaggucacccagcgcgccucccgccgcuccgacuccgccuccuccgagcccgucggcaucuaccagggcuucgagaagaagaccggcgucgccggcgaggacaugcaggacaacuccggcaccuacggcaagaucugggagggcuccuccaagugcaacaucaacaacuucaucuuccacaagguccucggcaagggcuccuucggcaagguccuccucggcgagcucaagggccgcggcgaguacuucgccaucaaggcccucaagaaggacgucguccucaucgacgacgacgucgagugcaccauggucgagaagcgcguccucacccucgccgccgagaaccccuuccucacccaccucaucugcaccuuccagaccaaggaccaccucuucuucgucauggaguuccucaacggcggcgaccucauguaccacauccaggacaagggccgcuucgagcucuaccgcgccaccuucuacgccgccgagaucaugugcggccuccaguuccuccacuccaagggcaucaucuaccgcgaccucaagcucgacaacguccuccucgaccgcgacggccacaucaagaucgccgacuucggcaugugcaaggagaacaucuucggcgagucccgcgccuccaccuucugcggcacccccgacuacaucgcccccgagauccuccagggccucaaguacaccuucuccgucgacuggugguccuucggcguccuccucuacgagaugcucaucggccagucccccuuccacggcgacgacgaggacgagcucuucgaguccauccgcgucgacaccccccacuacccccgcuggaucaccaaggaguccaaggacauccucgagaagcucuucgagcgcgagcccaccaagcgccucggcgucaccggcaacaucaagauccaccccuucuucaagaccaucaacuggacccuccucgagaagcgccgccucgagccccccuuccgccccaaggucaaguccccccgcgacuacuccaacuucgaccaggaguuccucaacgagaaggcccgccucuccuacuccgacaagaaccucaucgacuccauggaccaguccgccuucgccggcuucuccuucgucaaccccaaguucgagcaccuccucgaggacuga

SEQ ID NO: 8875 - RNA, 2031 nt, Artificial Sequence
  derived and/or modified sequence opt3 from KPCD__Homo_sapiens__AAA03175
auggcccccuuccugagaaucgcuuuuaacagcuacgagcucggcucccuucaggcagaagacgaggccaaucaaccuuucugcgcggugaagaugaaagaagcucugucuaccgagagggggaagacauugguccagaaaaagccaacuauguauccggaauggaaaucaacguuugaugcccacauuuacgagggacggguuauacagaucguguuaaugcgcgcagccgaggaacccguaagugaggugaccgucggugugagcguucuggcugaacgauguaagaagaacaauggcaaagcagaguucuggcuagaccuccagccucaagccaaggugcugauguccguccaguauuuucuugaggauguggacugcaaacagucuaugcguucggaagaugaggcuaaguucccaacaaugaacagaaggggagccauuaaacaggcgaagauccauuacauuaagaaucacgaauuuaucgcaacuuucuuugggcaacccaccuucuguucaguaugcaaagacuuuguuuggggccugaacaagcaggguuauaaaugucggcagugcaaugccgcuauacauaagaaauguaucgauaagauuaucgggcgcugcacaggaaccgccgcaaacagcagagacacuauuuuccagaaagagagguuuaauaucgauaugccucaccgguucaaggugcauaacuacaugaguccaacauucugugaccacugcggcuccuugcucuggggccuggucaagcaagggcugaaaugugaagauugcggaaugaaugugcaccauaagugccgcgagaaaguggcuaaccucugugguauaaaucagaaguuacuggccgaggcgcuuaaccaggucacccaacgagccucuagaaggagcgacuccgcaucaagugaacccguuggcauuuaucagggguuugagaaaaagacgggaguggcuggcgaagauaugcaggacaauagcgguacuuacgggaagaucugggagggaucuuccaaaugcaacauuaacaauuucaucuuucacaagguauugggcaaaggcucauucgggaaggugcugcuaggagaacucaaaggucggggcgaguacuuugccaucaaggcucugaagaaagacgucgugcuuauugaugacgauguugaguguaccaugguggaaaagcguguccugacauuggccgcagagaacccuuuccucacucaucugauaugcaccuuucagacaaaagaccacuuauucuuugugauggaauuucugaaugggggagaucucauguaucacauccaagacaagggccgcuuugagcuuuacagagccaccuucuaugcugcggaaauuauguguggucugcaguuuuugcauagcaaagggaucauauacagggaucuaaagcuggacaacguacuccuggaucgggacggccacauuaagaucgcagauuucggaaugugcaaagagaauaucuucggcgagagucgagccucuacguuuugugggacuccagacuauauugcuccggaaauccuucagggacugaaguacacauucuccguugacugguggagcuuugguguguugcucuaugagaugcugauuggccagucgcccuuccauggggaugacgaagaugaguuauuugagucuauacgcgucgacaccccucacuacccaagauggaucacuaaagaauccaaggauauucuggagaaacuauucgaaagggagcccacaaagcggcucggagugaccggcaacaucaaaauccauccuuucuucaagacgauuaauuggacccugcuugaaaagcgcagauuggagccacccuuuaggccgaaagucaagucaccucgugacuacaguaacuucgaucaagaguuucugaaugaaaaagcccggcucagcuauuccgacaagaaccugauagauucuauggaccagagcgcauucgccgguuuuucauucgugaaucccaaauucgagcaccuucuggaagauuga

SEQ ID NO: 8876 - RNA, 2031 nt, Artificial Sequence
  derived and/or modified sequence opt4 from KPCD__Homo_sapiens__AAA03175
auggcccccuuccugagaaucgccuucaacagcuacgagcugggcagccugcaggccgaggacgaggccaaccagcccuucugcgccgugaagaugaaggaggcccugagcaccgagagaggcaagacccuggugcagaagaagcccaccauguaccccgaguggaagagcaccuucgacgcccacaucuacgagggcagagugauccagaucgugcugaugagagccgccgaggagcccgugagcgaggugaccgugggcgugagcgugcuggccgagagaugcaagaagaacaacggcaaggccgaguucuggcuggaccugcagccccaggccaaggugcugaugagcgugcaguacuuccuggaggacguggacugcaagcagagcaugagaagcgaggacgaggccaaguuccccaccaugaacagaagaggcgccaucaagcaggccaagauccacuacaucaagaaccacgaguucaucgccaccuucuucggccagcccaccuucugcagcgugugcaaggacuucguguggggccugaacaagcagggcuacaagugcagacagugcaacgccgccauccacaagaagugcaucgacaagaucaucggcagaugcaccggcaccgccgccaacagcagagacaccaucuuccagaaggagagauucaacaucgacaugccccacagauucaaggugcacaacuacaugagccccaccuucugcgaccacugcggcagccugcuguggggccuggugaagcagggccugaagugcgaggacugcggcaugaacgugcaccacaagugcagagagaagguggccaaccugugcggcaucaaccagaagcugcuggccgaggcccugaaccaggugacccagagagccagcagaagaagcgacagcgccagcagcgagcccgugggcaucuaccagggcuucgagaagaagaccggcguggccggcgaggacaugcaggacaacagcggcaccuacggcaagaucugggagggcagcagcaagugcaacaucaacaacuucaucuuccacaaggugcugggcaagggcagcuucggcaaggugcugcugggcgagcugaagggcagaggcgaguacuucgccaucaaggcccugaagaaggacguggugcugaucgacgacgacguggagugcaccaugguggagaagagagugcugacccuggccgccgagaaccccuuccugacccaccugaucugcaccuuccagaccaaggaccaccuguucuucgugauggaguuccugaacggcggcgaccugauguaccacauccaggacaagggcagauucgagcuguacagagccaccuucuacgccgccgagaucaugugcggccugcaguuccugcacagcaagggcaucaucuacagagaccugaagcuggacaacgugcugcuggacagagacggccacaucaagaucgccgacuucggcaugugcaaggagaacaucuucggcgagagcagagccagcaccuucugcggcacccccgacuacaucgcccccgagauccugcagggccugaaguacaccuucagcguggacugguggagcuucggcgugcugcuguacgagaugcugaucggccagagccccuuccacggcgacgacgaggacgagcuguucgagagcaucagaguggacaccccccacuaccccagauggaucaccaaggagagcaaggacauccuggagaagcuguucgagagagagcccaccaagagacugggcgugaccggcaacaucaagauccaccccuucuucaagaccaucaacuggacccugcuggagaagagaagacuggagccccccuucagacccaaggugaagagccccagagacuacagcaacuucgaccaggaguuccugaacgagaaggccagacugagcuacagcgacaagaaccugaucgacagcauggaccagagcgccuucgccggcuucagcuucgugaaccccaaguucgagcaccugcuggaggacuga

SEQ ID NO: 8877 - RNA, 2031 nt, Artificial Sequence
  derived and/or modified sequence opt5 from KPCD__Homo_sapiens__AAA03175
auggcccccuuccugagaaucgcuuuuaacagcuacgagcucggcucccugcaggccgaagacgaggcgaaucaaccuuucugcgcugugaagaugaaagaagcccuuucuaccgagcgggggaagacacugguccagaaaaagccgacgauguaucccgaauggaaaagcaccuuugaugcccacauuuacgagggacgcguuauccagauugugcucaugagagcugccgaggaaccuguguccgaggucacagugggcguuucugugcuggcugaacgguguaagaagaacaaugggaaagccgaguucuggcuugaccugcagccccaagcgaagguccucaugagcgugcaguauuuucuggaggauguugacugcaaacaguccaugcgcucugaagaugaggccaaguucccuaccaugaacagacggggagcuaucaaacaggccaagauucacuacaucaagaaucacgaauuuaucgcuacauucuuuggccaacccaccuucuguagcgugugcaaagacuuugucugggggcugaacaagcagggauauaaaugucgccagugcaaugccgcgauucauaagaaauguaucgauaagauuaucggcagaugcacaggcaccgccgcuaacucccgggacacgauuuuccagaaagagcgcuuuaauaucgauaugccucacagauucaaggugcauaacuacaugagcccgaccuucugugaccacugcgggucucuccuguggggacuugugaagcaaggccugaaaugugaagauugcgggaugaauguccaccauaagugccgggagaaaguugccaaccucuguggaauuaaucagaagcugcuugcugaggcccugaaccaggugacacaacgcgccuccagacggagcgacucugcuuccagcgaacccgugggcaucuaucagggguuugagaaaaagaccggagucgcgggcgaagauaugcaggacaauucuggcacauacgggaagaucugggagggauccagcaaaugcaacauuaacaauuucaucuuucacaaggugcucggcaaaggguccuucggaaagguucugcugggcgaacucaaagggcgcggagaguacuuugccauuaaggcucugaagaaagacgugguccuuaucgaugacgauguggaguguaccaugguugaaaagagagugcugacgcucgccgccgagaacccuuuccugacacaucuuauuugcaccuuucagacaaaagaccaccuguucuuugucauggaguuccucaauggcggcgaucugauguaucacauccaagacaaggggcgguuugaacuguacagagcuaccuucuaugccgcggaaaucauguguggacuccaguuucugcauucuaaaggcauuaucuaccgcgaucuuaagcuggacaacgugcuccuggaucgggacgggcacauuaagaucgcugauuucggaaugugcaaagagaauauuuucggcgagagcagagccuccaccuuuugugggacacccgacuauaucgccccugaaauccuucagggccugaaguacacguucagcgucgacugguggucuuuuggagugcuccuguaugagaugcugauuggccagucccccuuccauggggaugacgaagaugagcucuuugagagcauccgcguugacaccccgcacuacccucgguggauuacaaaagaaucuaaggauauccuggagaaacuuuucgaaagagagcccaccaagcgccugggagugacaggcaacauuaaaauccaucccuuuuucaagaccauuaauuggacgcuccuggaaaagcggagacuggagccucccuuucgcccuaaagucaagagcccgcgggacuacuccaacuucgaucaagaguuucuuaaugaaaaagcuagacucucuuauagcgacaagaaccugaucgauuccauggaccagagcgccuucgcuggguuuucuuucgugaaucccaaauucgagcaucugcucgaagauuga

SEQ ID NO: 8878 - protein, 737 aa, Artificial Sequence
  KPCE__Homo_sapiens__Q02156
MVVFNGLLKIKICEAVSLKPTAWSLRHAVGPRPQTFLLDPYIALNVDDSRIGQTATKQKTNSPAWHDEFVTDVCNGRKIELAVFHDAPIGYDDFVANCTIQFEELLQNGSRHFEDWIDLEPEGRVYVIIDLSGSSGEAPKDNEERVFRERMRPRKRQGAVRRRVHQVNGHKFMATYLRQPTYCSHCRDFIWGVIGKQGYQCQVCTCVVHKRCHELIITKCAGLKKQETPDQVGSQRFSVNMPHKFGIHNYKVPTFCDHCGSLLWGLLRQGLQCKVCKMNVHRRCETNVAPNCGVDARGIAKVLADLGVTPDKITNSGQRRKKLIAGAESPQPASGSSPSEEDRSKSAPTSPCDQEIKELENNIRKALSFDNRGEEHRAASSPDGQLMSPGENGEVRQGQAKRLGLDEFNFIKVLGKGSFGKVMLAELKGKDEVYAVKVLKKDVILQDDDVDCTMTEKRILALARKHPYLTQLYCCFQTKDRLFFVMEYVNGGDLMFQIQRSRKFDEPRSRFYAAEVTSALMFLHQHGVIYRDLKLDNILLDAEGHCKLADFGMCKEGILNGVTTTTFCGTPDYIAPEILQELEYGPSVDWWALGVLMYEMMAGQPPFEADNEDDLFESILHDDVLYPVWLSKEAVSILKAFMTKNPHKRLGCVASQNGEDAIKQHPFFKEIDWVLLEQKKIKPPFKPRIKTKRDVNNFDQDFTREEPVLTLVDEAIVKQINQEEFKGFSYFGEDLMP

SEQ ID NO: 8879 - RNA, 2214 nt, Artificial Sequence
  KPCE__Homo_sapiens__AAI09034
augguaguguucaauggccuucuuaagaucaaaaucugcgaggccgugagcuugaagcccacagccuggucgcugcgccaugcggugggaccccggccgcagacuuuccuucucgaccccuacauugcccucaauguggacgacucgcgcaucggccaaacggccaccaagcagaagaccaacagcccggccuggcacgacgaguucgucaccgaugugugcaacggacgcaagaucgagcuggcugucuuucacgaugcccccauaggcuacgacgacuucguggccaacugcaccauccaguuugaggagcugcugcagaacgggagccgccacuucgaggacuggauugaucuggagccagaaggaagaguguaugugaucaucgaucucucagggucgucgggugaagccccuaaagacaaugaagagcguguguucagggaacgcaugcggccgaggaagcggcagggggccgucaggcgcaggguccaucaggucaacggccacaaguucauggccaccuaucuucggcagcccaccuacugcucccauugcagagacuucaucuggggugucauaggaaagcagggauaccagugucaagucugcaccugcgugguccacaagcggugccacgagcucauaaucacaaagugugcuggguuaaagaagcaggagacccccgaccaggugggcucccagcgguucagcgucaacaugccccacaaguucgguauccacaacuacaaggucccuaccuucugcgaucacugugggucccugcucuggggacucuugcggcaggguuugcaguguaaagucugcaaaaugaauguucaccgucgaugugagaccaacguggcucccaacuguggaguggaugccagaggaaucgccaaaguacuggccgaccugggcguuaccccagacaaaaucaccaacagcggccagagaaggaaaaagcucauugcuggugccgaguccccgcagccugcuucuggaagcucaccaucugaggaagaucgauccaagucagcacccaccuccccuugugaccaggaaauaaaagaacuugagaacaacauucggaaagccuugucauuugacaaccgaggagaggagcaccgggcagcaucgucuccugauggccagcugaugagccccggugagaauggcgaaguccggcaaggccaggccaagcgccugggccuggaugaguucaacuucaucaagguguugggcaaaggcagcuuuggcaaggucauguuggcagaacucaagggcaaagaugaaguauaugcugugaaggucuuaaagaaggacgucauccuucaggaugaugacguggacugcacaaugacagagaagaggauuuuggcucuggcacggaaacacccguaccuuacccaacucuacugcugcuuccagaccaaggaccgccucuuuuucgucauggaauauguaaaugguggagaccucauguuucagauucagcgcucccgaaaauucgacgagccucguucacgguucuaugcugcagaggucacaucggcccucauguuccuccaccagcauggagucaucuacagggauuugaaacuggacaacauccuucuggaugcagaaggucacugcaagcuggcugacuucgggaugugcaaggaagggauucugaauggugugacgaccaccacguucugugggacuccugacuacauagcuccugagauccugcaggaguuggaguauggccccuccguggacuggugggcccugggggugcugauguacgagaugauggcuggacagccucccuuugaggccgacaaugaggacgaccuauuugaguccauccuccaugacgacgugcuguacccagucuggcucagcaaggaggcugucagcaucuugaaagcuuucaugacgaagaauccccacaagcgccugggcuguguggcaucgcagaauggcgaggacgccaucaagcagcacccauucuucaaagagauugacugggugcuccuggagcagaagaagaucaagccacccuucaaaccacgcauuaaaaccaaaagagacgucaauaauuuugaccaagacuuuacccgggaagagccgguacucacccuuguggacgaagcaauuguaaagcagaucaaccaggaggaauucaaagguuucuccuacuuuggugaagaccugaugcccuga

SEQ ID NO: 8880 - RNA, 2214 nt, Artificial Sequence
  derived and/or modified sequence opt1 from KPCE__Homo_sapiens__AAI09034
augguggucuucaacggccugcucaagaucaagaucugcgaggccgugagccugaagcccaccgccuggucccugcgccacgcgguggggccgcggccccagaccuuccuccuggaccccuacaucgcccugaacgucgacgacagccgcaucggccagacggccaccaagcagaagaccaacucccccgccuggcacgacgaguucgugaccgacgugugcaacgggcggaagaucgagcucgccgucuuccacgacgcgccgaucggcuacgacgacuucguggccaacugcacgauccaguucgaggagcugcugcagaacgggagccgccacuucgaggacuggaucgaccucgagcccgagggccggguguacgucaucaucgaccuguccggcagcuccggggaggcccccaaggacaacgaggagcgcguguuccgggagcgcaugcggccccgcaagcggcagggcgccgugcgccggcgcguccaccaggugaacgggcacaaguucauggcgaccuaccugcggcagccgaccuacugcagccacugccgcgacuucaucuggggcgugaucgggaagcagggcuaccagugccaggucugcacgugcguggugcacaagcggugccacgagcucaucaucaccaagugcgccggccugaagaagcaggagacccccgaccaggucgggucccagcgcuucagcgugaacaugccccacaaguucggcauccacaacuacaaggugcccaccuucugcgaccacugcgggucccugcucuggggccugcugcggcagggccuccagugcaaggucugcaagaugaacgugcaccgccggugcgagaccaacguggccccgaacugcggggucgacgcccgcggcaucgccaaggugcuggcggaccugggggucacgcccgacaagaucaccaacagcggccagcgccggaagaagcucaucgccggggccgagagcccccagcccgccuccggcuccagcccguccgaggaggaccgcagcaaguccgcccccaccagccccugcgaccaggagaucaaggagcuggagaacaacauccggaaggcgcugagcuucgacaaccgcggcgaggagcaccgggccgccuccagccccgacgggcagcucauguccccgggcgagaacggggaggugcgccagggccaggccaagcggcuggggcuggacgaguucaacuucaucaaggugcucggcaagggcagcuucgggaaggucaugcuggccgagcugaagggcaaggacgagguguacgcggugaagguccucaagaaggacgugauccugcaggacgacgacguggacugcaccaugacggagaagcgcauccuggcccucgcccggaagcaccccuaccugacccagcuguacugcugcuuccagaccaaggaccgccucuucuucgucauggaguacgugaacgggggcgaccugauguuccagauccagcggucccgcaaguucgacgagccccggagccgcuucuacgccgccgaggugaccuccgcgcugauguuccuccaccagcacggggucaucuaccgggaccugaagcuggacaacauccuccuggacgccgagggccacugcaagcuggccgacuucggcaugugcaaggaggggauccucaacggcgugacgaccaccaccuucugcgggacgcccgacuacaucgccccggagauccugcaggagcuggaguacggccccagcguggacuggugggcgcucggcguccugauguacgagaugauggccgggcagccgcccuucgaggccgacaacgaggacgaccuguucgaguccauccugcacgacgacgugcucuaccccguguggcugagcaaggaggccgucuccauccugaaggccuucaugaccaagaacccccacaagcgccucggcugcguggcgagccagaacggggaggacgccaucaagcagcaccccuucuucaaggagaucgacugggugcugcuggagcagaagaagaucaagccgcccuucaagccccggaucaagaccaagcgcgacgucaacaacuucgaccaggacuucacccgggaggagcccgugcucacgcugguggacgaggccaucgucaagcagaucaaccaggaggaguucaagggcuucuccuacuucggggaggaccugaugccguga

SEQ ID NO: 8881 - RNA, 2214 nt, Artificial Sequence
  derived and/or modified sequence opt2 from KPCE__Homo_sapiens__AAI09034
auggucgucuucaacggccuccucaagaucaagaucugcgaggccgucucccucaagcccaccgccuggucccuccgccacgccgucggcccccgcccccagaccuuccuccucgaccccuacaucgcccucaacgucgacgacucccgcaucggccagaccgccaccaagcagaagaccaacucccccgccuggcacgacgaguucgucaccgacgucugcaacggccgcaagaucgagcucgccgucuuccacgacgcccccaucggcuacgacgacuucgucgccaacugcaccauccaguucgaggagcuccuccagaacggcucccgccacuucgaggacuggaucgaccucgagcccgagggccgcgucuacgucaucaucgaccucuccggcuccuccggcgaggcccccaaggacaacgaggagcgcgucuuccgcgagcgcaugcgcccccgcaagcgccagggcgccguccgccgccgcguccaccaggucaacggccacaaguucauggccaccuaccuccgccagcccaccuacugcucccacugccgcgacuucaucuggggcgucaucggcaagcagggcuaccagugccaggucugcaccugcgucguccacaagcgcugccacgagcucaucaucaccaagugcgccggccucaagaagcaggagacccccgaccaggucggcucccagcgcuucuccgucaacaugccccacaaguucggcauccacaacuacaagguccccaccuucugcgaccacugcggcucccuccucuggggccuccuccgccagggccuccagugcaaggucugcaagaugaacguccaccgccgcugcgagaccaacgucgcccccaacugcggcgucgacgcccgcggcaucgccaagguccucgccgaccucggcgucacccccgacaagaucaccaacuccggccagcgccgcaagaagcucaucgccggcgccgaguccccccagcccgccuccggcuccucccccuccgaggaggaccgcuccaaguccgcccccaccucccccugcgaccaggagaucaaggagcucgagaacaacauccgcaaggcccucuccuucgacaaccgcggcgaggagcaccgcgccgccuccucccccgacggccagcucaugucccccggcgagaacggcgagguccgccagggccaggccaagcgccucggccucgacgaguucaacuucaucaagguccucggcaagggcuccuucggcaaggucaugcucgccgagcucaagggcaaggacgaggucuacgccgucaagguccucaagaaggacgucauccuccaggacgacgacgucgacugcaccaugaccgagaagcgcauccucgcccucgcccgcaagcaccccuaccucacccagcucuacugcugcuuccagaccaaggaccgccucuucuucgucauggaguacgucaacggcggcgaccucauguuccagauccagcgcucccgcaaguucgacgagccccgcucccgcuucuacgccgccgaggucaccuccgcccucauguuccuccaccagcacggcgucaucuaccgcgaccucaagcucgacaacauccuccucgacgccgagggccacugcaagcucgccgacuucggcaugugcaaggagggcauccucaacggcgucaccaccaccaccuucugcggcacccccgacuacaucgcccccgagauccuccaggagcucgaguacggccccuccgucgacuggugggcccucggcguccucauguacgagaugauggccggccagccccccuucgaggccgacaacgaggacgaccucuucgaguccauccuccacgacgacguccucuaccccgucuggcucuccaaggaggccgucuccauccucaaggccuucaugaccaagaacccccacaagcgccucggcugcgucgccucccagaacggcgaggacgccaucaagcagcaccccuucuucaaggagaucgacuggguccuccucgagcagaagaagaucaagccccccuucaagccccgcaucaagaccaagcgcgacgucaacaacuucgaccaggacuucacccgcgaggagcccguccucacccucgucgacgaggccaucgucaagcagaucaaccaggaggaguucaagggcuucuccuacuucggcgaggaccucaugcccuga

SEQ ID NO: 8882 - RNA, 2214 nt, Artificial Sequence
  derived and/or modified sequence opt3 from KPCE__Homo_sapiens__AAI09034
augguggucuucaacggccugcucaagaucaaaauuugcgaggccguuagccuuaagcccaccgcuuggucccugagacacgcaguggggccuaggccacagacauuuuuguuagacccguacauagcccugaauguagaugacucucggaucggacaaacugcgacgaaacagaagaccaacucacccgcuuggcaugaugaguucgugacagacgucuguaauggucgcaaaauugagcuagccguguuucacgaugcaccuaucggcuaugacgauuucguugccaacugcacuauucaguuugaagaacuccugcagaaugggagucgacauuucgaagacuggaucgaucuugagccagagggacguguguacgucauaaucgaccugagcggcuccucuggugaagcucccaaggauaacgaggaaagaguguuuagggagcggaugcgcccuagaaagaggcaaggggcaguacggcgccgaguucaccaggugaauggacauaaauucauggccaccuauuugagacagccaacauacuguucgcacugcagggacuuuauuuggggcgucaucggcaagcagggguaucaaugucaggugugcaccugugugguccacaaacggugccaugagcucauuaucacuaagugugcuggacugaaaaagcaggaaacacccgaucagguugguucacaacguuucagcgugaacaugccucacaaguuuggcauacauaauuacaaaguaccaaccuucugcgaccacugugggagucugcucuggggauuacugcgccagggccuucagugcaaggugugcaaaaugaacguccacagaaggugugagacgaauguggccccgaacugcgguguugacgcgcgggggauugcaaagguguuggccgaucugggagucacucccgacaaaaucaccaauuccggccaacgacgcaagaaacuaauugcuggcgccgaaucuccucagccagcaagcggguccucacccagugaggaagauagaagcaagucugcuccuacauccccaugugaccaggagaucaaggagcucgaaaacaauaucaggaaagcccugucauuugauaaccggggagaggaacaucgcgcggccagcagucccgacggucagcuuaugucuccgggcgagaacggggaagugagacaaggacaggcaaagaggcugggcuuggaugaguucaauuucauuaaaguacucgguaagggguccuuuggcaaaguuaugcuggcugaguuaaagggaaaggacgaaguguaugccgucaaagugcugaagaaagaugucauacuccaggacgaugacguggacugcacuaugaccgagaagcguauccuugcucuggcccggaaacacccuuacuugacacagcuauacuguugcuuccaaaccaaggaucgacuguuuuucguuauggaauaugugaacggcggggaccucauguuucagauucagagaagcaggaaguucgaugagccccgcucgcgguuuuacgcagccgaaguaacgucugcucugauguuccuucaucagcacggagucaucuauagagaccugaaauuggauaauauacuccuggacgcggagggucauuguaaguuagcagauuuuggcaugugcaaagaggggauucugaacggagugacuacaaccacuuucuguggcacaccagacuacaucgccccugaaauccuacaagagcucgaauauggucccuccguugauuggugggcucugggggugcuuauguacgagaugauggccggccagccacccuuugaggcagacaaugaagaugacuuguucgagucaauucugcacgaugacguccucuauccuguguggcugaguaaggaagccguaagcauccuuaaggcuuuuaugaccaaaaacccacacaagaggcugggaugcguggccucccagaauggcgaggacgcaauuaaacagcauccguucuucaaggaaauagauuggguuuugcucgagcagaaaaagaucaaacccccuuuuaagccacgcauuaaaacgaagcgagacgucaacaauuucgaucaagacuuuacccgggaggaacccgugcugacauuaguggaugaggcgaucgucaagcagaucaaccaagaagaguucaaaggguuuucuuacuucggagaagaccugaugccuuga

SEQ ID NO: 8883 - RNA, 2214 nt, Artificial Sequence
  derived and/or modified sequence opt4 from KPCE__Homo_sapiens__AAI09034
auggugguguucaacggccugcugaagaucaagaucugcgaggccgugagccugaagcccaccgccuggagccugagacacgccgugggccccagaccccagaccuuccugcuggaccccuacaucgcccugaacguggacgacagcagaaucggccagaccgccaccaagcagaagaccaacagccccgccuggcacgacgaguucgugaccgacgugugcaacggcagaaagaucgagcuggccguguuccacgacgcccccaucggcuacgacgacuucguggccaacugcaccauccaguucgaggagcugcugcagaacggcagcagacacuucgaggacuggaucgaccuggagcccgagggcagaguguacgugaucaucgaccugagcggcagcagcggcgaggcccccaaggacaacgaggagagaguguucagagagagaaugagacccagaaagagacagggcgccgugagaagaagagugcaccaggugaacggccacaaguucauggccaccuaccugagacagcccaccuacugcagccacugcagagacuucaucuggggcgugaucggcaagcagggcuaccagugccaggugugcaccugcguggugcacaagagaugccacgagcugaucaucaccaagugcgccggccugaagaagcaggagacccccgaccaggugggcagccagagauucagcgugaacaugccccacaaguucggcauccacaacuacaaggugcccaccuucugcgaccacugcggcagccugcuguggggccugcugagacagggccugcagugcaaggugugcaagaugaacgugcacagaagaugcgagaccaacguggcccccaacugcggcguggacgccagaggcaucgccaaggugcuggccgaccugggcgugacccccgacaagaucaccaacagcggccagagaagaaagaagcugaucgccggcgccgagagcccccagcccgccagcggcagcagccccagcgaggaggacagaagcaagagcgcccccaccagccccugcgaccaggagaucaaggagcuggagaacaacaucagaaaggcccugagcuucgacaacagaggcgaggagcacagagccgccagcagccccgacggccagcugaugagccccggcgagaacggcgaggugagacagggccaggccaagagacugggccuggacgaguucaacuucaucaaggugcugggcaagggcagcuucggcaaggugaugcuggccgagcugaagggcaaggacgagguguacgccgugaaggugcugaagaaggacgugauccugcaggacgacgacguggacugcaccaugaccgagaagagaauccuggcccuggccagaaagcaccccuaccugacccagcuguacugcugcuuccagaccaaggacagacuguucuucgugauggaguacgugaacggcggcgaccugauguuccagauccagagaagcagaaaguucgacgagcccagaagcagauucuacgccgccgaggugaccagcgcccugauguuccugcaccagcacggcgugaucuacagagaccugaagcuggacaacauccugcuggacgccgagggccacugcaagcuggccgacuucggcaugugcaaggagggcauccugaacggcgugaccaccaccaccuucugcggcacccccgacuacaucgcccccgagauccugcaggagcuggaguacggccccagcguggacuggugggcccugggcgugcugauguacgagaugauggccggccagccccccuucgaggccgacaacgaggacgaccuguucgagagcauccugcacgacgacgugcuguaccccguguggcugagcaaggaggccgugagcauccugaaggccuucaugaccaagaacccccacaagagacugggcugcguggccagccagaacggcgaggacgccaucaagcagcaccccuucuucaaggagaucgacugggugcugcuggagcagaagaagaucaagccccccuucaagcccagaaucaagaccaagagagacgugaacaacuucgaccaggacuucaccagagaggagcccgugcugacccugguggacgaggccaucgugaagcagaucaaccaggaggaguucaagggcuucagcuacuucggcgaggaccugaugcccuga

SEQ ID NO: 8884 - RNA, 2214 nt, Artificial Sequence
  derived and/or modified sequence opt5 from KPCE__Homo_sapiens__AAI09034
augguggucuucaacggccugcucaagaucaaaauuugcgaggccguuagccugaagcccaccgcuuggucccuuagacacgccguggggccucggccgcagacauuucugcucgaccccuacaucgcgcugaauguggaugacucucgcauuggacaaacggcuaccaaacagaagacaaacagcccugccuggcaugaugaguucgucaccgacguguguaauggcagaaaaaucgagcuugccguuuuucacgaugcucccauuggguaugacgauuucguggccaacugcacaauccaguuugaagaacugcuccagaauggaucccggcauuucgaagacuggaucgaucuggagccugagggccgcgucuacgugauuaucgaccugucugggagcuccggagaagcucccaaggauaacgaggaaagaguuuuucgggagcgcaugagaccucggaagcgccaaggcgccgugagacggcgcguccaccaggugaauggccauaaauucauggcgaccuaucucagacagccgacauacuguucucacugccgggacuuuauuuggggagugaucgggaagcagggcuaucaaugucaggucugcaccuguguugugcacaaacgcugccaugagcugauuaucacgaagugugccgggcuuaaaaagcaggaaacccccgaucaggugggaagccaaagauucuccgucaacaugccucacaaguuuggcauucauaauuacaaagugcccacauucugcgaccacugugggagccugcucuggggacugcuucggcagggccugcagugcaagguuugcaaaaugaacgugcacagacgcugugagaccaaugucgcuccuaacugcggcguggacgcccgggggaucgcuaagguucucgccgaucugggagugacacccgacaaaaucaccaauucuggccaaagacgcaagaaacugauugcgggggccgaauccccgcagccugcuagcggaucuucccccagcgaggaagaucggucuaaguccgccccuacgagccccugugaccaggagaucaaggagcucgaaaacaauauuagaaaagcucuguccuuugauaaccgcggcgaggaacaucgggccgccucuagccccgacgggcagcuuauguccccuggagagaacggcgaagucagacaaggccaggcuaagcgccuggggcucgaugaguucaauuucaucaaagugcugggaaagggcagcuuugggaaagucaugcuugcggagcugaagggaaaggacgaaguguaugccguuaaagugcucaagaaagaugucauucugcaggacgaugacguggacugcacaaugaccgagaagcggauccuggcucucgccagaaaacacccguaccugacacagcuuuacuguugcuuccaaaccaaggaucgccuguuuuucguuauggaauaugugaacggcggggaccucauguuucagauccagcggucuagaaaguucgaugagccccggucccgcuuuuacgccgcugaagucaccagcgcccugauguuccuucaucagcacggcgugauuuauagagaccugaaacucgauaauauccugcuggacgcggagggacauuguaagcucgcugauuuuggcaugugcaaagaggggauucugaacggagugacaacgaccacauucuguggcaccccugacuacaucgcccccgaaauucuucaagagcuggaauaugggccuucuguugauuggugggcccucggaguccugauguacgagaugauggcuggccagcccccguuugaggccgacaaugaagaugaccuguucgagagcauccuucacgaugacgugcucuauccuguguggcuguccaaggaagcugucucuauccugaaagccuuuaugacaaagaacccccacaagcggcucgggugcguggcgagccagaauggcgaggacgccauuaaacagcauccuuucuucaaggaaaucgauuggguucugcuugagcagaaaaagauuaaacccccuuuuaagcccagaaucaaaaccaagcgcgacgugaacaauuucgaucaagacuuuacgcgggaggaaccgguccugacacucguggaugaggcuauuguuaagcagaucaaccaagaagaguucaaaggauuuuccuacuucggcgaagaccugaugccuuga

SEQ ID NO: 8885 - protein, 697 aa, Artificial Sequence
  KPCG__Homo_sapiens__P05129
MAGLGPGVGDSEGGPRPLFCRKGALRQKVVHEVKSHKFTARFFKQPTFCSHCTDFIWGIGKQGLQCQVCSFVVHRRCHEFVTFECPGAGKGPQTDDPRNKHKFRLHSYSSPTFCDHCGSLLYGLVHQGMKCSCCEMNVHRRCVRSVPSLCGVDHTERRGRLQLEIRAPTADEIHVTVGEARNLIPMDPNGLSDPYVKLKLIPDPRNLTKQKTRTVKATLNPVWNETFVFNLKPGDVERRLSVEVWDWDRTSRNDFMGAMSFGVSELLKAPVDGWYKLLNQEEGEYYNVPVADADNCSLLQKFEACNYPLELYERVRMGPSSSPIPSPSPSPTDPKRCFFGASPGRLHISDFSFLMVLGKGSFGKVMLAERRGSDELYAIKILKKDVIVQDDDVDCTLVEKRVLALGGRGPGGRPHFLTQLHSTFQTPDRLYFVMEYVTGGDLMYHIQQLGKFKEPHAAFYAAEIAIGLFFLHNQGIIYRDLKLDNVMLDAEGHIKITDFGMCKENVFPGTTTRTFCGTPDYIAPEIIAYQPYGKSVDWWSFGVLLYEMLAGQPPFDGEDEEELFQAIMEQTVTYPKSLSREAVAICKGFLTKHPGKRLGSGPDGEPTIRAHGFFRWIDWERLERLEIPPPFRPRPCGRSGENFDKFFTRAAPALTPPDRLVLASIDQADFQGFTYVNPDFVHPDARSPTSPVPVPVM

SEQ ID NO: 8886 - RNA, 2094 nt, Artificial Sequence
  KPCG__Homo_sapiens__AAH47876
auggcuggucugggccccggcguaggcgauucagaggggggaccccggccccuguuuugcagaaagggggcccugaggcagaaggugguccacgaagucaagagccacaaguucaccgcucgcuucuucaagcagcccaccuucugcagccacugcaccgacuucaucugggguaucggaaagcagggccugcaaugucaagucugcagcuuugugguucaucgacgaugccacgaauuugugaccuucgaguguccaggcgcugggaagggcccccagacggaugacccccggaacaaacacaaguuccgccugcauagcuacagcagccccaccuucugcgaccacuguggcucccuccucuacgggcuugugcaccagggcaugaaaugcuccugcugcgagaugaacgugcaccggcgcugugugcguagcgugcccucccugugcgguguggaccacaccgagcgccgcgggcgccugcagcuggagauccgggcucccacagcagaugagauccacguaacuguuggcgaggcccguaaccuaauuccuauggaccccaauggucucucugaucccuaugugaaacugaagcucaucccagacccucggaaccugacgaaacagaagacccgaacggugaaagccacgcuaaacccuguguggaaugagaccuuuguguucaaccugaagccaggggauguggagcgccggcucagcguggaggugugggacugggaccggaccucccgcaacgacuucaugggggccauguccuuuggcgucucggagcugcucaaggcgcccguggauggcugguacaaguuacugaaccaggaggagggcgaguauuacaaugugccgguggccgaugcugacaacugcagccuccuccagaaguuugaggcuuguaacuacccccuggaauuguaugagcgggugcggaugggccccucuuccucucccauccccuccccuuccccuagucccaccgaccccaagcgcugcuucuucggggcgaguccaggacgccugcacaucuccgacuucagcuuccucaugguucuaggaaaaggcaguuuugggaaggugaugcuggccgagcgcaggggcucugaugagcucuacgccaucaagaucuugaaaaaggacgugaucguccaggacgacgauguggacugcacgcugguggagaaacgugugcuggcgcuggggggccgggguccuggcggccggccccacuuccucacccagcuccacuccaccuuccagaccccggaccgccuguauuucgugauggaguacgucaccgggggagacuugauguaccacauucaacagcugggcaaguuuaaggagccccaugcagcguucuacgcggcagaaaucgcuaucggccucuucuuccuucacaaucagggcaucaucuacagggaccugaagcuggacaaugugaugcuggaugcugagggacacaucaagaucacugacuuuggcauguguaaggagaacgucuuccccgggacgacaacccgcaccuucugcgggaccccggacuacauagccccggagaucauugccuaccagcccuaugggaagucugucgauuggugguccuuuggaguucugcuguaugagauguuggcaggacagccucccuucgauggggaggacgaggaggagcuguuucaggccaucauggaacaaacugucaccuaccccaagucgcuuucccgggaagccguggccaucugcaagggguuccugaccaagcacccagggaagcgccugggcucagggccugauggggaaccuaccauccgugcacauggcuuuuuccgcuggauugacugggagcggcuggaacgauuggagaucccgccuccuuucagaccccgcccguguggccgcagcggcgagaacuuugacaaguucuucacgcgggcggcgccagcgcugaccccuccagaccgccuaguccuggccagcaucgaccaggccgauuuccagggcuucaccuacgugaaccccgacuucgugcacccggaugcccgcagccccaccagcccagugccugugcccgucauguaa

SEQ ID NO: 8887 - RNA, 2094 nt, Artificial Sequence
  derived and/or modified sequence opt1 from KPCG__Homo_sapiens__AAH47876
auggccggccuggggcccggcgugggggacagcgagggcgggccgcgcccccucuucugccggaagggcgcccugcgccagaaggucgugcacgaggugaagucccacaaguucaccgcgcgguucuucaagcagcccaccuucugcagccacugcacggacuucaucuggggcaucgggaagcagggccugcagugccaggucugcuccuucguggugcaccgccggugccacgaguucgucaccuucgagugccccggggccggcaaggggccgcagaccgacgacccccgcaacaagcacaaguuccggcuccacagcuacuccagccccaccuucugcgaccacugcggcucccugcuguacggccucgugcaccaggggaugaagugcagcugcugcgagaugaacgugcaccgccggugcguccgcuccgugcccagccugugcggcguggaccacacggagcggcgcgggcggcugcagcucgagauccgcgccccgaccgccgacgagauccacgucaccgugggcgaggcccggaaccugauccccauggaccccaacggccuguccgaccccuacgugaagcucaagcugaucccggacccccgcaaccugaccaagcagaagacgcggaccgucaaggcgacccucaaccccguguggaacgagaccuucguguucaaccugaagcccggggacgucgagcgccggcugagcguggaggugugggacugggaccgcacgucccggaacgacuucaugggcgccaugagcuucggggucuccgagcuccugaaggccccgguggacggcugguacaagcugcucaaccaggaggagggggaguacuacaacgugcccgucgccgacgcggacaacugcagccugcugcagaaguucgaggccugcaacuacccccucgagcuguacgagcgcgugcgcaugggccccuccagcuccccgauccccagccccagccccuccccgaccgaccccaagcggugcuucuucggcgccagccccgggcgccugcacaucuccgacuucagcuuccucaugguccugggcaagggguccuucggcaaggugaugcuggccgagcggcgcgggagcgacgagcucuacgccaucaagauccugaagaaggacgugaucguccaggacgacgacguggacugcacccugguggagaagcggguccucgcgcugggcggccgcgggcccggcgggcggccgcacuuccugacccagcuccacuccacguuccagacccccgaccgccuguacuucgugauggaguacgugaccggcggggaccugauguaccacauccagcagcucggcaaguucaaggagccccacgccgccuucuacgccgccgagaucgcgaucggccuguucuuccugcacaaccaggggaucaucuaccgggaccucaagcuggacaacgucaugcuggacgccgagggccacaucaagaucaccgacuucgggaugugcaaggagaacguguucccgggcacgaccacccgcaccuucugcggcacgcccgacuacaucgcccccgagaucaucgccuaccagcccuacggcaagagcguggacuggugguccuucgggguccuccuguacgagaugcuggccgggcagccgcccuucgacggcgaggacgaggaggagcuguuccaggcgaucauggagcagaccgugaccuaccccaagagccucucccgggaggccguggccaucugcaagggguuccugaccaagcaccccggcaagcgccugggcagcgggccggacggcgagcccacgauccgggcccacggguucuuccgcuggaucgacugggagcggcucgagcgccuggagaucccgccgcccuuccggccccgccccugcggccgguccggggagaacuucgacaaguucuucacccgcgccgcgcccgcccugaccccgcccgaccgccucguccuggccagcaucgaccaggccgacuuccagggcuucaccuacgugaaccccgacuucgugcaccccgacgcgcggucccccacgagccccguccccgugcccgugauguga

SEQ ID NO: 8888 - RNA, 2094 nt, Artificial Sequence
  derived and/or modified sequence opt2 from KPCG__Homo_sapiens__AAH47876
auggccggccucggccccggcgucggcgacuccgagggcggcccccgcccccucuucugccgcaagggcgcccuccgccagaaggucguccacgaggucaagucccacaaguucaccgcccgcuucuucaagcagcccaccuucugcucccacugcaccgacuucaucuggggcaucggcaagcagggccuccagugccaggucugcuccuucgucguccaccgccgcugccacgaguucgucaccuucgagugccccggcgccggcaagggcccccagaccgacgacccccgcaacaagcacaaguuccgccuccacuccuacuccucccccaccuucugcgaccacugcggcucccuccucuacggccucguccaccagggcaugaagugcuccugcugcgagaugaacguccaccgccgcugcguccgcuccguccccucccucugcggcgucgaccacaccgagcgccgcggccgccuccagcucgagauccgcgcccccaccgccgacgagauccacgucaccgucggcgaggcccgcaaccucauccccauggaccccaacggccucuccgaccccuacgucaagcucaagcucauccccgacccccgcaaccucaccaagcagaagacccgcaccgucaaggccacccucaaccccgucuggaacgagaccuucgucuucaaccucaagcccggcgacgucgagcgccgccucuccgucgaggucugggacugggaccgcaccucccgcaacgacuucaugggcgccauguccuucggcgucuccgagcuccucaaggcccccgucgacggcugguacaagcuccucaaccaggaggagggcgaguacuacaacguccccgucgccgacgccgacaacugcucccuccuccagaaguucgaggccugcaacuacccccucgagcucuacgagcgcguccgcaugggccccuccuccucccccauccccucccccucccccucccccaccgaccccaagcgcugcuucuucggcgccucccccggccgccuccacaucuccgacuucuccuuccucaugguccucggcaagggcuccuucggcaaggucaugcucgccgagcgccgcggcuccgacgagcucuacgccaucaagauccucaagaaggacgucaucguccaggacgacgacgucgacugcacccucgucgagaagcgcguccucgcccucggcggccgcggccccggcggccgcccccacuuccucacccagcuccacuccaccuuccagacccccgaccgccucuacuucgucauggaguacgucaccggcggcgaccucauguaccacauccagcagcucggcaaguucaaggagccccacgccgccuucuacgccgccgagaucgccaucggccucuucuuccuccacaaccagggcaucaucuaccgcgaccucaagcucgacaacgucaugcucgacgccgagggccacaucaagaucaccgacuucggcaugugcaaggagaacgucuuccccggcaccaccacccgcaccuucugcggcacccccgacuacaucgcccccgagaucaucgccuaccagcccuacggcaaguccgucgacuggugguccuucggcguccuccucuacgagaugcucgccggccagccccccuucgacggcgaggacgaggaggagcucuuccaggccaucauggagcagaccgucaccuaccccaagucccucucccgcgaggccgucgccaucugcaagggcuuccucaccaagcaccccggcaagcgccucggcuccggccccgacggcgagcccaccauccgcgcccacggcuucuuccgcuggaucgacugggagcgccucgagcgccucgagauccccccccccuuccgcccccgccccugcggccgcuccggcgagaacuucgacaaguucuucacccgcgccgcccccgcccucaccccccccgaccgccucguccucgccuccaucgaccaggccgacuuccagggcuucaccuacgucaaccccgacuucguccaccccgacgcccgcucccccaccucccccguccccguccccgucauguga

SEQ ID NO: 8889 - RNA, 2094 nt, Artificial Sequence
  derived and/or modified sequence opt3 from KPCG__Homo_sapiens__AAH47876
auggccggccuggggcccggagugggugacagcgagggcgggccuagaccacucuucugcaggaagggagcucuacggcagaaagucguucacgaagugaagucccauaaauuuacugcacgcuucuuuaagcaaccgacauucuguucucacugcacugauuuuaucuggggcauugguaaacaggggcugcagugucagguaugcucauucgugguccaucgacguugucacgaguuugugacguucgaaugccccggagccggcaagggcccucaaaccgacgauccaagaaacaagcauaaauuuagguugcacaguuacagcucccccacauucugugaccacugcgggucuuuacuguauggacuuguucaucaggguaugaaguguucgugcugugagaugaaugugcaccggcgcugcgucagaucagugccuagccucugcggcguagaucauacugaaaggcgggggcgccugcagcuugagauacgagcgccaaccgcugacgagauccacguuacagugggagaagccagaaaccugauucccauggauccuaauggcuugagugacccauacgucaaacucaagcugaucccggaucccaggaaccugaccaaacagaagacucggacagugaaggcaacccucaauccuguguggaacgagacguuugucuucaauuuaaaaccaggugacguugaacgucgccuguccguggagguaugggauugggacagaacuucuaggaacgauuuuaugggggccaugagcuucggaguguccgagcuuuugaaggcucccgucgacggcugguauaaacugcuaaaucaagaagagggcgaauacuauaacgugccuguugcagacgccgauaauuguucacuccugcagaaguucgaggcuugcaacuacccacuugaacuguaugagcgggugcgaauggggcccaguagcucuccgauuccuucccccucaccaagcccuaccgaccccaaacgcugcuuuuucggagccaguccagguagauugcacaucucugauuuuuccuuccucaugguccugggcaaggggagcuuuggaaaagugauguuagcggagaggcggggcucggacgaacuguacgcaauaaagauccucaagaaagauguaauuguucaggacgaugacguggauuguacacuugucgagaagcgcgugcuggccuugggugggagaggccccggaggcaggccucauuuccuaacucagcugcacucuaccuuucaaacaccagaccgucucuacuucgucauggaauaugugaccgggggagaucugauguaccauauccagcagcuugguaaauuuaaggagccgcacgcugccuucuaugcagcugaaauugccaucggccuguuuuucuugcauaaucaagggauaauuuaccgggaccucaaacuggacaacguuauguuagaugcggagggacacaucaagauuacggacuuuggcauguguaaggagaauguguuccccgguacuacaacccgaacuuucugcgggacaccugauuauaucgccccagaaaucauugcauaccagcccuauggcaaauccguagacugguggucauuuggaguccugcuauacgagaugcucgcuggccagccuccauucgauggggaagacgaggaggaacuguuucaggccauaauggagcaaaccgugacguaccccaagagucuuagcagagaagcuguugccaucuguaaaggauucuugaccaagcacccggguaaaaggcugggcuccgggccugauggagagccaacaauucgcgcacauggcuuuuuccgguggaucgacugggaaagacucgagaggcuggagauacccccucccuuucgcccacgaccuugcggucggucuggggaaaacuucgauaaguuuuucacucgugccgcucccgcgcuuaccccaccggacagacugguguuggcaagcauugaucaggccgacuuucagggcuucacauaugucaacccugauuuugugcaccccgacgcuaggucaccaaccagucccguaccugugccaguuauguga

SEQ ID NO: 8890 - RNA, 2094 nt, Artificial Sequence
  derived and/or modified sequence opt4 from KPCG__Homo_sapiens__AAH47876
auggccggccugggccccggcgugggcgacagcgagggcggccccagaccccuguucugcagaaagggcgcccugagacagaagguggugcacgaggugaagagccacaaguucaccgccagauucuucaagcagcccaccuucugcagccacugcaccgacuucaucuggggcaucggcaagcagggccugcagugccaggugugcagcuucguggugcacagaagaugccacgaguucgugaccuucgagugccccggcgccggcaagggcccccagaccgacgaccccagaaacaagcacaaguucagacugcacagcuacagcagccccaccuucugcgaccacugcggcagccugcuguacggccuggugcaccagggcaugaagugcagcugcugcgagaugaacgugcacagaagaugcgugagaagcgugcccagccugugcggcguggaccacaccgagagaagaggcagacugcagcuggagaucagagcccccaccgccgacgagauccacgugaccgugggcgaggccagaaaccugauccccauggaccccaacggccugagcgaccccuacgugaagcugaagcugauccccgaccccagaaaccugaccaagcagaagaccagaaccgugaaggccacccugaaccccguguggaacgagaccuucguguucaaccugaagcccggcgacguggagagaagacugagcguggaggugugggacugggacagaaccagcagaaacgacuucaugggcgccaugagcuucggcgugagcgagcugcugaaggcccccguggacggcugguacaagcugcugaaccaggaggagggcgaguacuacaacgugcccguggccgacgccgacaacugcagccugcugcagaaguucgaggccugcaacuacccccuggagcuguacgagagagugagaaugggccccagcagcagccccauccccagccccagccccagccccaccgaccccaagagaugcuucuucggcgccagccccggcagacugcacaucagcgacuucagcuuccugauggugcugggcaagggcagcuucggcaaggugaugcuggccgagagaagaggcagcgacgagcuguacgccaucaagauccugaagaaggacgugaucgugcaggacgacgacguggacugcacccugguggagaagagagugcuggcccugggcggcagaggccccggcggcagaccccacuuccugacccagcugcacagcaccuuccagacccccgacagacuguacuucgugauggaguacgugaccggcggcgaccugauguaccacauccagcagcugggcaaguucaaggagccccacgccgccuucuacgccgccgagaucgccaucggccuguucuuccugcacaaccagggcaucaucuacagagaccugaagcuggacaacgugaugcuggacgccgagggccacaucaagaucaccgacuucggcaugugcaaggagaacguguuccccggcaccaccaccagaaccuucugcggcacccccgacuacaucgcccccgagaucaucgccuaccagcccuacggcaagagcguggacugguggagcuucggcgugcugcuguacgagaugcuggccggccagccccccuucgacggcgaggacgaggaggagcuguuccaggccaucauggagcagaccgugaccuaccccaagagccugagcagagaggccguggccaucugcaagggcuuccugaccaagcaccccggcaagagacugggcagcggccccgacggcgagcccaccaucagagcccacggcuucuucagauggaucgacugggagagacuggagagacuggagauccccccccccuucagacccagacccugcggcagaagcggcgagaacuucgacaaguucuucaccagagccgcccccgcccugaccccccccgacagacuggugcuggccagcaucgaccaggccgacuuccagggcuucaccuacgugaaccccgacuucgugcaccccgacgccagaagccccaccagccccgugcccgugcccgugauguga

SEQ ID NO: 8891 - RNA, 2094 nt, Artificial Sequence
  derived and/or modified sequence opt5 from KPCG__Homo_sapiens__AAH47876
auggccggccuggggcccggagugggcgacagcgaagggggaccuagaccgcuuuucugccggaagggcgcucugcgccagaaagucguucacgaagugaagucccauaaauuuaccgccagauucuuuaagcaacccacauucuguucucacugcacggauuuuaucugggggauuggaaaacagggccuucagugucaggugugcagcuucgucgugcaucggcgcugucacgaguuuguuaccuucgaaugcccuggcgcggggaagggaccccaaacagacgauccuagaaacaagcauaaauuucggcugcacuccuacucuagccccaccuucugugaccacugcggcucccuccuguaugggcuugugcaucagggaaugaaguguucuugcugugagaugaauguccaccgcagaugcgugcggagcguuccuucccugugcggcguggaucauacagaacgcagagggcggcuccagcuggagauccgcgcuccgaccgccgacgagauucacgucacagugggagaagccagaaaccugauccccauggauccuaauggccucagcgaccccuacgugaaacugaagcucauuccugauccccggaaccugaccaaacagaagacgcgcaccgucaaggcuacacucaauccgguuuggaacgagaccuuuguguucaaucugaaaccuggcgacguggaaagacggcuuucugucgaggugugggauugggacagaacaucccgcaacgauuuuaugggggccaugagcuucggaguuucugagcugcucaaggcucccguggacggcugguauaaacugcugaaucaagaagagggggaauacuauaacgucccuguggccgacgcggauaauuguucccuccugcagaaguucgaggccugcaacuacccccuugaacuguaugagcggguuagaaugggacccucuagcuccccuaucccgagccccuccccuucucccaccgacccuaaacgcugcuuuuucggcgcuagccccgggcggcuccacaucuccgauuuuagcuuccugauggugcuuggaaagggcucuuuuggcaaagucaugcuggccgagagacgcggguccgacgaacucuacgcuauuaagauccugaagaaagaugugauuguccaggacgaugacguggauuguacgcugguugagaagcgggugcucgcccugggaggcagagggccgggaggccgcccucauuuccuuacacagcugcacagcaccuuucaaacacccgaccggcucuacuucgucauggaauaugugaccgggggcgaucugauguaccauauccagcagcuuggaaaauuuaaggagccucacgcggccuucuaugcugccgaaauugcuaucggccuguuuuuccuccauaaucaagggauuaucuacagagaccugaaacuggacaacguuaugcucgaugccgagggacacaucaagauuaccgacuuuggcauguguaaggagaauguguuccccgggacaacgacccgcacauucugcggaaccccugauuauaucgcccccgaaauuaucgcuuaccagccguauggcaaaucugucgacugguggagcuuuggggugcugcuuuacgagaugcuggcgggccagccucccuucgauggagaagacgaggaggagcucuuucaggccauuauggagcaaacagugaccuaccccaagucccugucucgggaagcuguugccaucuguaaaggcuuccugacgaagcacccugggaaaagacuuggaagcggcccggauggggagcccacaauccgggcccauggauuuuuccgcuggauugacugggaaagacucgagcggcuggagaucccucccccuuuuagaccccgcccuugcggccgguccggggaaaacuucgauaaguuuuucaccagagcugcccccgcgcugaccccgccugaccgccucguccuggcuagcauugaucaggccgacuuucagggcuucacauaugugaaccccgauuuugugcacccugacgccagaucucccaccuccccggucccugugcccguuauguga

SEQ ID NO: 8892 - protein, 596 aa, Artificial Sequence
  KPCI__Homo_sapiens__P41743
MPTQRDSSTMSHTVAGGGSGDHSHQVRVKAYYRGDIMITHFEPSISFEGLCNEVRDMCSFDNEQLFTMKWIDEEGDPCTVSSQLELEEAFRLYELNKDSELLIHVFPCVPERPGMPCPGEDKSIYRRGARRWRKLYCANGHTFQAKRFNRRAHCAICTDRIWGLGRQGYKCINCKLLVHKKCHKLVTIECGRHSLPQEPVMPMDQSSMHSDHAQTVIPYNPSSHESLDQVGEEKEAMNTRESGKASSSLGLQDFDLLRVIGRGSYAKVLLVRLKKTDRIYAMKVVKKELVNDDEDIDWVQTEKHVFEQASNHPFLVGLHSCFQTESRLFFVIEYVNGGDLMFHMQRQRKLPEEHARFYSAEISLALNYLHERGIIYRDLKLDNVLLDSEGHIKLTDYGMCKEGLRPGDTTSTFCGTPNYIAPEILRGEDYGFSVDWWALGVLMFEMMAGRSPFDIVGSSDNPDQNTEDYLFQVILEKQIRIPRSLSVKAASVLKSFLNKDPKERLGCHPQTGFADIQGHPFFRNVDWDMMEQKQVVPPFKPNISGEFGLDNFDSQFTNEPVQLTPDDDDIVRKIDQSEFEGFEYINPLLMSAEECV

SEQ ID NO: 8893 - RNA, 1791 nt, Artificial Sequence
  KPCI__Homo_sapiens__EAW78513
augccgacccagagggacagcagcaccaugucccacacggucgcaggcggcggcagcggggaccauucccaccagguccgggugaaagccuacuaccgcggggauaucaugauaacacauuuugaaccuuccaucuccuuugagggccuuugcaaugagguucgagacauguguucuuuugacaacgaacagcucuucaccaugaaauggauagaugaggaaggagacccguguacaguaucaucucaguuggaguuagaagaagccuuuagacuuuaugagcuaaacaaggauucugaacucuugauucauguguucccuuguguaccagaacguccugggaugccuuguccaggagaagauaaauccaucuaccguagaggugcacgccgcuggagaaagcuuuauugugccaauggccacacuuuccaagccaagcguuucaacaggcgugcucacugugccaucugcacagaccgaauauggggacuuggacgccaaggauauaagugcaucaacugcaaacucuugguucauaagaagugccauaaacucgucacaauugaaugugggcggcauucuuugccacaggaaccagugaugcccauggaucagucauccaugcauucugaccaugcacagacaguaauuccauauaauccuucaagucaugagaguuuggaucaaguuggugaagaaaaagaggcaaugaacaccagggaaaguggcaaagcuucauccagucuaggucuucaggauuuugauuugcuccggguaauaggaagaggaaguuaugccaaaguacuguugguucgauuaaaaaaaacagaucguauuuaugcaaugaaaguugugaaaaaagagcuuguuaaugaugaugaggauauugauuggguacagacagagaagcauguguuugagcaggcauccaaucauccuuuccuuguugggcugcauucuugcuuucagacagaaagcagauuguucuuuguuauagaguauguaaauggaggagaccuaauguuucauaugcagcgacaaagaaaacuuccugaagaacaugccagauuuuacucugcagaaaucagucuagcauuaaauuaucuucaugagcgagggauaauuuauagagauuugaaacuggacaauguauuacuggacucugaaggccacauuaaacucacugacuacggcauguguaaggaaggauuacggccaggagauacaaccagcacuuucugugguacuccuaauuacauugcuccugaaauuuuaagaggagaagauuaugguuucaguguugacuggugggcucuuggagugcucauguuugagaugauggcaggaaggucuccauuugauauuguugggagcuccgauaacccugaccagaacacagaggauuaucucuuccaaguuauuuuggaaaaacaaauucgcauaccacguucucugucuguaaaagcugcaaguguucugaagaguuuucuuaauaaggacccuaaggaacgauuggguugucauccucaaacaggauuugcugauauucagggacacccguucuuccgaaauguugauugggauaugauggagcaaaaacaggugguaccucccuuuaaaccaaauauuucuggggaauuugguuuggacaacuuugauucucaguuuacuaaugaaccuguccagcucacuccagaugacgaugacauugugaggaagauugaucagucugaauuugaagguuuugaguauaucaauccucuuuugaugucugcagaagaaugugucuga

SEQ ID NO: 8894 - RNA, 1791 nt, Artificial Sequence
  derived and/or modified sequence opt1 from KPCI__Homo_sapiens__EAW78513
augcccacccagcgcgacagcuccaccaugagccacacgguggccggcgggggcuccggggaccacagccaccagguccgggugaaggccuacuaccgcggcgacaucaugaucacccacuucgagccguccaucagcuucgaggggcugugcaacgaggugcgggacaugugcuccuucgacaacgagcagcuguucaccaugaaguggaucgacgaggagggcgaccccugcaccgucagcucccagcucgagcuggaggaggcguuccgccucuacgagcugaacaaggacagcgagcugcucauccacguguuccccugcgugcccgagcggccgggcaugcccugccccggggaggacaaguccaucuaccgccggggcgcccgccgguggcgcaagcuguacugcgccaacgggcacacguuccaggccaagcgguucaaccgccgggcccacugcgcgaucugcaccgaccgcaucuggggccuggggcggcagggcuacaagugcaucaacugcaagcuccugguccacaagaagugccacaagcuggugaccaucgagugcggccgccacagccucccccaggagccggugaugcccauggaccaguccagcaugcacuccgaccacgcccagaccgucauccccuacaaccccagcucccacgagagccuggaccaggugggggaggagaaggaggccaugaacacgcgggaguccggcaaggccagcagcucccuggggcuccaggacuucgaccugcugcgcgugaucggccggggcagcuacgcgaagguccuccuggugcgccugaagaagaccgaccggaucuacgccaugaagguggucaagaaggagcucgugaacgacgacgaggacaucgacugggugcagaccgagaagcacgucuucgagcaggccuccaaccacccguuccugguggggcugcacagcugcuuccagaccgagucccgccucuucuucgugaucgaguacgucaacggcggggaccugauguuccacaugcagcgccagcggaagcugcccgaggagcacgcccgcuucuacagcgccgagaucucccucgcgcugaacuaccugcacgagcggggcaucaucuaccgcgaccucaagcuggacaacgugcugcucgacagcgaggggcacaucaagcugacggacuacggcaugugcaaggagggccugcggcccggggacaccaccuccaccuucugcggcacgcccaacuacaucgccccggagauccuccgcggggaggacuacggcuucagcguggacuggugggcccuggggguccugauguucgagaugauggccggccggucccccuucgacaucgugggcagcuccgacaaccccgaccagaacaccgaggacuaccucuuccaggucauccuggagaagcagauccgcaucccccggagccuguccgugaaggccgcgagcgugcucaaguccuuccugaacaaggacccgaaggagcgccuggggugccacccccagaccggcuucgccgacauccaggggcaccccuucuuccggaacgucgacugggacaugauggagcagaagcaggucgugcccccguucaagcccaacaucagcggcgaguucgggcucgacaacuucgacucccaguucaccaacgagcccgugcagcugacgcccgacgacgacgacaucgugcgcaagaucgaccagagcgaguucgagggcuucgaguacaucaacccgcugcucaugagcgccgaggagugcguguga

SEQ ID NO: 8895 - RNA, 1791 nt, Artificial Sequence
  derived and/or modified sequence opt2 from KPCI__Homo_sapiens__EAW78513
augcccacccagcgcgacuccuccaccaugucccacaccgucgccggcggcggcuccggcgaccacucccaccagguccgcgucaaggccuacuaccgcggcgacaucaugaucacccacuucgagcccuccaucuccuucgagggccucugcaacgagguccgcgacaugugcuccuucgacaacgagcagcucuucaccaugaaguggaucgacgaggagggcgaccccugcaccgucuccucccagcucgagcucgaggaggccuuccgccucuacgagcucaacaaggacuccgagcuccucauccacgucuuccccugcguccccgagcgccccggcaugcccugccccggcgaggacaaguccaucuaccgccgcggcgcccgccgcuggcgcaagcucuacugcgccaacggccacaccuuccaggccaagcgcuucaaccgccgcgcccacugcgccaucugcaccgaccgcaucuggggccucggccgccagggcuacaagugcaucaacugcaagcuccucguccacaagaagugccacaagcucgucaccaucgagugcggccgccacucccucccccaggagcccgucaugcccauggaccaguccuccaugcacuccgaccacgcccagaccgucauccccuacaaccccuccucccacgagucccucgaccaggucggcgaggagaaggaggccaugaacacccgcgaguccggcaaggccuccuccucccucggccuccaggacuucgaccuccuccgcgucaucggccgcggcuccuacgccaagguccuccucguccgccucaagaagaccgaccgcaucuacgccaugaaggucgucaagaaggagcucgucaacgacgacgaggacaucgacuggguccagaccgagaagcacgucuucgagcaggccuccaaccaccccuuccucgucggccuccacuccugcuuccagaccgagucccgccucuucuucgucaucgaguacgucaacggcggcgaccucauguuccacaugcagcgccagcgcaagcuccccgaggagcacgcccgcuucuacuccgccgagaucucccucgcccucaacuaccuccacgagcgcggcaucaucuaccgcgaccucaagcucgacaacguccuccucgacuccgagggccacaucaagcucaccgacuacggcaugugcaaggagggccuccgccccggcgacaccaccuccaccuucugcggcacccccaacuacaucgcccccgagauccuccgcggcgaggacuacggcuucuccgucgacuggugggcccucggcguccucauguucgagaugauggccggccgcucccccuucgacaucgucggcuccuccgacaaccccgaccagaacaccgaggacuaccucuuccaggucauccucgagaagcagauccgcaucccccgcucccucuccgucaaggccgccuccguccucaaguccuuccucaacaaggaccccaaggagcgccucggcugccacccccagaccggcuucgccgacauccagggccaccccuucuuccgcaacgucgacugggacaugauggagcagaagcaggucgucccccccuucaagcccaacaucuccggcgaguucggccucgacaacuucgacucccaguucaccaacgagcccguccagcucacccccgacgacgacgacaucguccgcaagaucgaccaguccgaguucgagggcuucgaguacaucaacccccuccucauguccgccgaggagugcgucuga

SEQ ID NO: 8896 - RNA, 1791 nt, Artificial Sequence
  derived and/or modified sequence opt3 from KPCI__Homo_sapiens__EAW78513
augcccacccagagagacagcuccacaaugucucacacuguggccggcgggggaucaggugaucauagucaccaagucaggguuaaggcuuacuaucggggcgacaucaugauuacgcauuucgagccuagcauauccuuugaagggcugugcaacgaggugcgcgauauguguucuuucgacaaugaacagcucuuuaccaugaaauggaucgaugaggaaggagacccaugcacaguaucgucacagcuugagcuggaggaagcauuccgauuguacgaguuaaacaaggauagcgaacugcuaauucacguguuuccguguguccccgagcguccuggcaugccaugccccggugaggacaaaaguaucuauagaaggggagcccggcgcuggagaaagcucuacugugcgaaugggcauacuuuccaggcuaaaagguuuaaccggcgcgcccacugcgcaauuuguaccgaucgaaucuggggccugggcagacaaggguauaagugcauaaauuguaagcuacuggugcacaaaaagugccauaaauugguuacaaucgaauguggaaggcacucccucccucaggagccagugaugcccauggaccagucuagcaugcauuccgaucacgcccagaccgucauuccuuacaacccaucaagucacgaaagccuggaccaagugggugaggaaaaggaggcuaugaauacucgggagucuggcaaagcauccucaagccuggggcuccaggauuucgacuuacugcguguaaucggacgcggcaguuaugccaagguucuuuuggugagacugaagaaaacagacaggauuuacgcuaugaaggucgugaaaaaggaacuugugaacgaugacgaggauaucgacuggguccagaccgaaaaacauguuuuugagcaggccucuaaucacccguuccucgugggucugcauuccugcuuucaaacggaaagccggcuuuucuuuguaauagaguacgugaacgggggagaucugauguuccacaugcagcgacagcgcaaguugcccgaggaacaugcgagauucuauucggcagagauuucucucgcccugaauuacuuacacgaaaggggcaucauuuaucgggaccugaaacucgauaacguccuucuggacuccgagggccacaucaaguugacugauuacgggaugugcaaggaaggacuacgcccuggugacaccacaucaacuuuuuguggcaccccaaauuauaucgcucccgagauucugagaggggaggauuacggauucaguguggacuggugggcccucggcguucugauguuugaaaugauggcagguaggagcccuuucgacauagugggguccucugauaacccagaccaaaauacagaggauuaucuuuuucaggucauccuggaaaaacagauucguaucccccggagcuugucagugaaggcugccaguguacucaaauccuuccugaacaaggacccgaaagagcgauuaggcugccauccucagaccggauuugcggauauacaaggccaccccuucuuuagaaacguugacugggauaugauggagcagaaacagguggucccaccuuucaagcccaauauuagcggggaauuuggacuggacaacuucgauucucaguuuacgaaugagccagugcaacuaacucccgacgaugacgauaucgucaggaagaucgaccagucagaguucgaagguuucgaauacauuaacccucuccugaugagugccgaggaguguguguga

SEQ ID NO: 8897 - RNA, 1791 nt, Artificial Sequence
  derived and/or modified sequence opt4 from KPCI__Homo_sapiens__EAW78513
augcccacccagagagacagcagcaccaugagccacaccguggccggcggcggcagcggcgaccacagccaccaggugagagugaaggccuacuacagaggcgacaucaugaucacccacuucgagcccagcaucagcuucgagggccugugcaacgaggugagagacaugugcagcuucgacaacgagcagcuguucaccaugaaguggaucgacgaggagggcgaccccugcaccgugagcagccagcuggagcuggaggaggccuucagacuguacgagcugaacaaggacagcgagcugcugauccacguguuccccugcgugcccgagagacccggcaugcccugccccggcgaggacaagagcaucuacagaagaggcgccagaagauggagaaagcuguacugcgccaacggccacaccuuccaggccaagagauucaacagaagagcccacugcgccaucugcaccgacagaaucuggggccugggcagacagggcuacaagugcaucaacugcaagcugcuggugcacaagaagugccacaagcuggugaccaucgagugcggcagacacagccugccccaggagcccgugaugcccauggaccagagcagcaugcacagcgaccacgcccagaccgugauccccuacaaccccagcagccacgagagccuggaccaggugggcgaggagaaggaggccaugaacaccagagagagcggcaaggccagcagcagccugggccugcaggacuucgaccugcugagagugaucggcagaggcagcuacgccaaggugcugcuggugagacugaagaagaccgacagaaucuacgccaugaagguggugaagaaggagcuggugaacgacgacgaggacaucgacugggugcagaccgagaagcacguguucgagcaggccagcaaccaccccuuccuggugggccugcacagcugcuuccagaccgagagcagacuguucuucgugaucgaguacgugaacggcggcgaccugauguuccacaugcagagacagagaaagcugcccgaggagcacgccagauucuacagcgccgagaucagccuggcccugaacuaccugcacgagagaggcaucaucuacagagaccugaagcuggacaacgugcugcuggacagcgagggccacaucaagcugaccgacuacggcaugugcaaggagggccugagacccggcgacaccaccagcaccuucugcggcacccccaacuacaucgcccccgagauccugagaggcgaggacuacggcuucagcguggacuggugggcccugggcgugcugauguucgagaugauggccggcagaagccccuucgacaucgugggcagcagcgacaaccccgaccagaacaccgaggacuaccuguuccaggugauccuggagaagcagaucagaauccccagaagccugagcgugaaggccgccagcgugcugaagagcuuccugaacaaggaccccaaggagagacugggcugccacccccagaccggcuucgccgacauccagggccaccccuucuucagaaacguggacugggacaugauggagcagaagcagguggugccccccuucaagcccaacaucagcggcgaguucggccuggacaacuucgacagccaguucaccaacgagcccgugcagcugacccccgacgacgacgacaucgugagaaagaucgaccagagcgaguucgagggcuucgaguacaucaacccccugcugaugagcgccgaggagugcguguga

SEQ ID NO: 8898 - RNA, 1791 nt, Artificial Sequence
  derived and/or modified sequence opt5 from KPCI__Homo_sapiens__EAW78513
augcccacccagagagacagcuccacaaugucucacacgguggccggcgggggaagcggcgaucauucccaccaaguccggguuaaggcuuacuaucgcggggacaucaugauuacccauuucgagccuucuaucagcuuugaaggacugugcaacgaggugagagauauguguuccuucgacaaugaacagcucuuuacaaugaaauggauugaugaggaaggcgacccgugcaccgugucuagccagcuggagcuugaggaagccuuccggcuguacgagcucaacaaggauuccgaacugcuuauccacgucuuucccugugugccugagcgccccgggaugccuugccccggagaggacaaaagcauuuauagacggggcgcgcgcagauggcggaagcuguacugugcuaauggccauacauuccaggccaaacgcuuuaacagacgggcccacugcgcuaucuguaccgaucgcaucugggggcucggaagacaaggcuauaagugcauuaauuguaagcugcugguucacaaaaagugccauaaacucgugacaaucgaaugugggcggcacucucugccucaggagccggucaugcccauggaccaguccagcaugcauucugaucacgcccagaccgugauuccuuacaaccccuccagccacgaaucucuugaccaaguuggagaggaaaaggaggcuaugaauacgcgcgaguccggcaaagccagcuccucucuggggcuccaggauuucgaccugcuuagagugaucggacggggcagcuaugcgaagguccugcucgugagacugaagaaaaccgaccgcauuuacgccaugaagguggucaaaaaggaacugguuaacgaugacgaggauaucgacugggugcagacagaaaaacauguguuugagcaggcuuccaaucacccuuuccucgucggccugcauagcugcuuucaaaccgaaucucggcuuuucuuugugauugaguacguuaacgggggagaucugauguuccacaugcagagacagcgcaagcuccccgaggaacaugcccgguucuauuccgcugagaucagccuggcccuuaauuaccugcacgaaagaggcaucauuuaucgcgaccucaaacuggauaacgugcugcucgacucugaggggcacaucaagcugacagauuacggaaugugcaaggaaggccuucggccgggggacaccacgagcacauuuuguggaaccccuaauuauauugcgcccgagauccugagaggcgaggauuacggcuucuccgucgacuggugggcccucggggugcugauguuugaaaugauggcuggacgcucuccuuucgacauuguuggcagcuccgauaaccccgaccaaaauacagaggauuaucuuuuucaggugauccuggaaaaacagauccggauucccagaagccucucugucaaggccgcuuccgugcugaaaucuuuccugaacaaggacccuaaagagcgccucgggugccauccgcagaccggauuugccgauauccaaggccaccccuucuuucggaacgucgacugggauaugauggagcagaaacaggugguuccucccuucaagccuaauauuagcggggaauuuggccuggacaacuucgauucccaguuuaccaaugagcccgugcaacuuacaccggacgaugacgauaucgucagaaagauugaccagagcgaguucgaaggauucgaauacaucaacccucugcucauguccgccgaggaguguguguga

SEQ ID NO: 8899 - protein, 683 aa, Artificial Sequence
  KPCL__Homo_sapiens__P24723
MSSGTMKFNGYLRVRIGEAVGLQPTRWSLRHSLFKKGHQLLDPYLTVSVDQVRVGQTSTKQKTNKPTYNEEFCANVTDGGHLELAVFHETPLGYDHFVANCTLQFQELLRTTGASDTFEGWVDLEPEGKVFVVITLTGSFTEATLQRDRIFKHFTRKRQRAMRRRVHQINGHKFMATYLRQPTYCSHCREFIWGVFGKQGYQCQVCTCVVHKRCHHLIVTACTCQNNINKVDSKIAEQRFGINIPHKFSIHNYKVPTFCDHCGSLLWGIMRQGLQCKICKMNVHIRCQANVAPNCGVNAVELAKTLAGMGLQPGNISPTSKLVSRSTLRRQGKESSKEGNGIGVNSSNRLGIDNFEFIRVLGKGSFGKVMLARVKETGDLYAVKVLKKDVILQDDDVECTMTEKRILSLARNHPFLTQLFCCFQTPDRLFFVMEFVNGGDLMFHIQKSRRFDEARARFYAAEIISALMFLHDKGIIYRDLKLDNVLLDHEGHCKLADFGMCKEGICNGVTTATFCGTPDYIAPEILQEMLYGPAVDWWAMGVLLYEMLCGHAPFEAENEDDLFEAILNDEVVYPTWLHEDATGILKSFMTKNPTMRLGSLTQGGEHAILRHPFFKEIDWAQLNHRQIEPPFRPRIKSREDVSNFDPDFIKEEPVLTPIDEGHLPMINQDEFRNFSYVSPELQP

SEQ ID NO: 8900 - RNA, 2052 nt, Artificial Sequence
  KPCL__Homo_sapiens__AAH37268
augucgucuggcaccaugaaguucaauggcuauuugaggguccgcaucggugaggcaguggggcugcagcccacccgcuggucccugcgccacucgcucuucaagaagggccaccagcugcuggaccccuaucugacggugagcguggaccaggugcgcgugggccagaccagcaccaagcagaagaccaacaaacccacguacaacgaggaguuuugcgcuaacgucaccgacggcggccaccucgaguuggccgucuuccacgagacgccccugggcuacgaccacuucguggccaacugcacccugcaguuccaggagcugcugcgcacgaccggcgccucggacaccuucgaggguuggguggaucucgagccagaggggaaaguauucgugguaauaacccuuaccgggaguuucacugaagcuacucuccagagagaccggaucuucaaacauuuuaccaggaagcgccaaagggcuaugcgaaggcgaguccaccagaucaauggacacaaguucauggccacguaucugaggcagcccaccuacugcucucacugcagggaguuuaucuggggaguguuugggaaacaggguuaucagugccaagugugcaccugugucguccauaaacgcugccaucaucuaauuguuacagccuguacuugccaaaacaauauuaacaaaguggauucaaagauugcagaacagagguucgggaucaacaucccacacaaguucagcauccacaacuacaaagugccaacauucugcgaucacuguggcucacugcucuggggaauaaugcgacaaggacuucaguguaaaauauguaaaaugaaugugcauauucgaugucaagcgaacguggccccuaacugugggguaaaugcgguggaacuugccaagacccuggcagggaugggucuccaacccggaaauauuucuccaaccucgaaacucguuuccagaucgacccuaagacgacagggaaaggagagcagcaaagaaggaaaugggauugggguuaauucuuccaaccgacuugguaucgacaacuuugaguucauccgaguguuggggaaggggaguuuugggaaggugaugcuugcaagaguaaaagaaacaggagaccucuaugcugugaaggugcugaagaaggacgugauucugcaggaugaugauguggaaugcaccaugaccgagaaaaggauccugucucuggcccgcaaucaccccuuccucacucaguuguucugcugcuuucagacccccgaucgucuguuuuuugugauggaguuugugaaugggggugacuugauguuccacauucagaagucucgucguuuugaugaagcacgagcucgcuucuaugcugcagaaaucauuucggcucucauguuccuccaugauaaaggaaucaucuauagagaucugaaacuggacaauguccuguuggaccacgagggucacuguaaacuggcagacuucggaaugugcaaggaggggauuugcaauggugucaccacggccacauucuguggcacgccagacuauaucgcuccagagauccuccaggaaaugcuguacgggccugcaguagacuggugggcaaugggcguguugcucuaugagaugcucuguggucacgcgccuuuugaggcagagaaugaagaugaccucuuugaggccauacugaaugaugagguggucuacccuaccuggcuccaugaagaugccacagggauccuaaaaucuuucaugaccaagaaccccaccaugcgcuugggcagccugacucagggaggcgagcacgccaucuugagacauccuuuuuuuaaggaaaucgacugggcccagcugaaccaucgccaaauagaaccgccuuucagacccagaaucaaaucccgagaagaugucaguaauuuugacccugacuucauaaaggaagagccaguuuuaacuccaauugaugagggacaucuuccaaugauuaaccaggaugaguuuagaaacuuuuccuaugugucuccagaauugcaaccauag

SEQ ID NO: 8901 - RNA, 2052 nt, Artificial Sequence
  derived and/or modified sequence opt1 from KPCL__Homo_sapiens__AAH37268
augagcuccggcaccaugaaguucaacggguaccugcgcgugcggaucggcgaggccgucgggcuccagcccacccgcuggagccugcggcacucccuguucaagaagggccaccagcuccuggacccguaccugacggugagcguggaccagguccgcguggggcagaccuccaccaagcagaagaccaacaagcccacguacaacgaggaguucugcgccaacgugaccgacggcggccaccucgagcuggcggucuuccacgagacgccccugggguacgaccacuucguggccaacugcacccuccaguuccaggagcugcugcggaccaccggcgccagcgacaccuucgagggguggguggaccucgagcccgagggcaaggucuucguggugaucacccugacgggguccuucaccgaggccacccugcagcgcgaccggaucuucaagcacuucacccgcaagcggcagcgcgccaugcggcgccggguccaccagaucaacggccacaaguucauggcgacguaccuccgccagccgaccuacugcagccacugccgggaguucaucuggggcguguucgggaagcagggcuaccagugccaggugugcacgugcgucgugcacaagcgcugccaccaccugaucgugaccgccugcacgugccagaacaacaucaacaaggucgacuccaagaucgccgagcagcgguucgggaucaacaucccccacaaguucagcauccacaacuacaaggugcccaccuucugcgaccacugcggcucccugcucuggggcaucaugcgccaggggcugcagugcaagaucugcaagaugaacgugcacauccggugccaggccaacgucgcgcccaacugcggcgugaacgccguggagcuggccaagacccucgccgggaugggccugcagccggggaacaucagccccaccuccaagcuggucagccgcuccacccuccggcgccagggcaaggagagcuccaaggagggcaacgggaucggcgugaacagcuccaaccgccuggggaucgacaacuucgaguucauccggguccugggcaaggggagcuucggcaaggugaugcucgcccgcgugaaggagaccggcgaccuguacgcggucaaggugcugaagaaggacgugauccuccaggacgacgacgucgagugcaccaugaccgagaagcggauccugagccuggcccgcaaccaccccuuccucacgcagcuguucugcugcuuccagacccccgaccggcuguucuucgugauggaguucgugaacgggggcgaccucauguuccacauccagaagucccgccgguucgacgaggcccgcgcccgguucuacgccgcggagaucaucagcgcccugauguuccugcacgacaaggggaucaucuaccgcgaccucaagcuggacaacguccugcucgaccacgagggccacugcaagcuggccgacuucgggaugugcaaggagggcaucugcaacggcgugaccaccgccacguucugcgggaccccggacuacaucgcccccgagauccugcaggagaugcucuacggccccgcgguggacuggugggccauggggguccugcuguacgagaugcucugcggccacgcccccuucgaggccgagaacgaggacgaccuguucgaggccauccugaacgacgaggugguguacccgaccuggcugcacgaggacgcgaccggcauccucaaguccuucaugacgaagaaccccaccaugcggcuggggagccugacccagggcggggagcacgccauccuccgccaccccuucuucaaggagaucgacugggcccagcugaaccaccggcagaucgagcccccguuccgcccccggaucaagucccgcgaggacgucagcaacuucgaccccgacuucaucaaggaggagcccgugcugaccccgaucgacgagggccaccuccccaugaucaaccaggacgaguuccggaacuucuccuacgugagccccgagcugcagcccuga

SEQ ID NO: 8902 - RNA, 2052 nt, Artificial Sequence
  derived and/or modified sequence opt2 from KPCL__Homo_sapiens__AAH37268
auguccuccggcaccaugaaguucaacggcuaccuccgcguccgcaucggcgaggccgucggccuccagcccacccgcuggucccuccgccacucccucuucaagaagggccaccagcuccucgaccccuaccucaccgucuccgucgaccagguccgcgucggccagaccuccaccaagcagaagaccaacaagcccaccuacaacgaggaguucugcgccaacgucaccgacggcggccaccucgagcucgccgucuuccacgagaccccccucggcuacgaccacuucgucgccaacugcacccuccaguuccaggagcuccuccgcaccaccggcgccuccgacaccuucgagggcugggucgaccucgagcccgagggcaaggucuucgucgucaucacccucaccggcuccuucaccgaggccacccuccagcgcgaccgcaucuucaagcacuucacccgcaagcgccagcgcgccaugcgccgccgcguccaccagaucaacggccacaaguucauggccaccuaccuccgccagcccaccuacugcucccacugccgcgaguucaucuggggcgucuucggcaagcagggcuaccagugccaggucugcaccugcgucguccacaagcgcugccaccaccucaucgucaccgccugcaccugccagaacaacaucaacaaggucgacuccaagaucgccgagcagcgcuucggcaucaacaucccccacaaguucuccauccacaacuacaagguccccaccuucugcgaccacugcggcucccuccucuggggcaucaugcgccagggccuccagugcaagaucugcaagaugaacguccacauccgcugccaggccaacgucgcccccaacugcggcgucaacgccgucgagcucgccaagacccucgccggcaugggccuccagcccggcaacaucucccccaccuccaagcucgucucccgcuccacccuccgccgccagggcaaggaguccuccaaggagggcaacggcaucggcgucaacuccuccaaccgccucggcaucgacaacuucgaguucauccgcguccucggcaagggcuccuucggcaaggucaugcucgcccgcgucaaggagaccggcgaccucuacgccgucaagguccucaagaaggacgucauccuccaggacgacgacgucgagugcaccaugaccgagaagcgcauccucucccucgcccgcaaccaccccuuccucacccagcucuucugcugcuuccagacccccgaccgccucuucuucgucauggaguucgucaacggcggcgaccucauguuccacauccagaagucccgccgcuucgacgaggcccgcgcccgcuucuacgccgccgagaucaucuccgcccucauguuccuccacgacaagggcaucaucuaccgcgaccucaagcucgacaacguccuccucgaccacgagggccacugcaagcucgccgacuucggcaugugcaaggagggcaucugcaacggcgucaccaccgccaccuucugcggcacccccgacuacaucgcccccgagauccuccaggagaugcucuacggccccgccgucgacuggugggccaugggcguccuccucuacgagaugcucugcggccacgcccccuucgaggccgagaacgaggacgaccucuucgaggccauccucaacgacgaggucgucuaccccaccuggcuccacgaggacgccaccggcauccucaaguccuucaugaccaagaaccccaccaugcgccucggcucccucacccagggcggcgagcacgccauccuccgccaccccuucuucaaggagaucgacugggcccagcucaaccaccgccagaucgagccccccuuccgcccccgcaucaagucccgcgaggacgucuccaacuucgaccccgacuucaucaaggaggagcccguccucacccccaucgacgagggccaccuccccaugaucaaccaggacgaguuccgcaacuucuccuacgucucccccgagcuccagcccuga

SEQ ID NO: 8903 - RNA, 2052 nt, Artificial Sequence
  derived and/or modified sequence opt3 from KPCL__Homo_sapiens__AAH37268
augagcuccggcaccaugaaguucaacggguaccugagagugaggaucggagaggccgucggucuccagcccacacgguggucucuucgccacucacuguuuaaaaagggccaucaauuguuagacccuuaucugacuguuaguguggaucagguacgaguggggcagacgagcaccaaacagaagacaaauaaaccaacuuacaacgaagaguucugcgcuaaugucaccgacggaggccaccuagaacucgcaguguuucaugagacaccgcuggguuaugaucacuucguugccaacuguacccuucaauuucaggaacuguugcguacuacaggggcguccgacaccuucgagggauggguggaucucgagcccgaaggcaaggucuuugugguaauuacgcugacuggcucuuucaccgaggcuacacugcagagagacaggauauuuaagcauuucacucggaaacgccagagagccaugaggcggcgcguucaccaaaucaaugggcacaaguuuauggcaaccuaccuccgacagccuacauauugcucgcauuguagagaguucauuuggggaguguuugguaaacagggcuaccagugccaagucuguaccugcguggugcacaagaggugucaucacuuaaucgucacggccugcacuugucagaacaauauuaacaaaguugauucaaagaucgcugaacagcgguucgggauaaauaucccacacaaguucagcauucauaacuauaaagugcccacauuuugcgaccacuguggaagucugcuuuggggcaucaugcgucaagguuugcagugcaagauuugcaaaaugaauguacauauccgcugucaggcaaacguggccccuaauugcggggucaacgcuguggagcuggccaagacccuagcgggaaugggccuccagccaggcaauauaucccccacuucuaaacugguuagcagauccacacuuaggcggcaagggaaggaaucaaguaaagagggaaacgguauuggcgugaacagcucuaaucgacuggggaucgauaacuucgaauuuauucgcgucuugggaaagggcuccuucgguaaggugaugcucgcaagaguaaaagagaccggggaccuguacgccguuaaggugcugaaaaaggaugucauccugcaggacgaugacguggaauguacgaugaccgagaaaaggauccucucacuugcucggaaucacccuuuucugacacaguuguucugcuguuuucagacuccagaccgccuauucuuugucauggaguucgugaacggcggagaucugauguuucauauucaaaagagcagaagguucgacgaagcccgugcacgguuuuacgcugccgagauaaucagugcgcucauguuccugcacgauaagggcauuaucuaucgagaccuuaaacuggauaauguuuugcucgaccacgaagggcauugcaagcuggccgauuucggaauguguaaagaggguauaugcaacggcgugaccacagcaacuuuuugugggaccccggacuacauugcucccgaaaucuuacaggagaugcuguauggaccugccguagauuggugggcuaugggcguccuacucuacgagaugcugugcggucacgccccauucgaagcagagaaugaagacgaucuuuuugaggccaucuugaacgacgaagugguuuaucccacauggcugcaugaggacgcuaccgggauucucaagucuuucaugacuaaaaauccuacgaugagacugggcucccuuacacagggaggcgagcacgcgauccugaggcacccauuuuucaaggaaauugauugggcacaguugaaccaucgccaaauagagcccccguuucggccuagaaucaagagcagggaagacgugucgaauuucgaucccgacuuuauuaaagaggagccaguccucaccccuaucgaugaagggcacuuacccaugaucaaccaggacgaguuccgcaauuuuucuuacguguccccagaauuacagcccuga

SEQ ID NO: 8904 - RNA, 2052 nt, Artificial Sequence
  derived and/or modified sequence opt4 from KPCL__Homo_sapiens__AAH37268
augagcagcggcaccaugaaguucaacggcuaccugagagugagaaucggcgaggccgugggccugcagcccaccagauggagccugagacacagccuguucaagaagggccaccagcugcuggaccccuaccugaccgugagcguggaccaggugagagugggccagaccagcaccaagcagaagaccaacaagcccaccuacaacgaggaguucugcgccaacgugaccgacggcggccaccuggagcuggccguguuccacgagaccccccugggcuacgaccacuucguggccaacugcacccugcaguuccaggagcugcugagaaccaccggcgccagcgacaccuucgagggcuggguggaccuggagcccgagggcaagguguucguggugaucacccugaccggcagcuucaccgaggccacccugcagagagacagaaucuucaagcacuucaccagaaagagacagagagccaugagaagaagagugcaccagaucaacggccacaaguucauggccaccuaccugagacagcccaccuacugcagccacugcagagaguucaucuggggcguguucggcaagcagggcuaccagugccaggugugcaccugcguggugcacaagagaugccaccaccugaucgugaccgccugcaccugccagaacaacaucaacaagguggacagcaagaucgccgagcagagauucggcaucaacaucccccacaaguucagcauccacaacuacaaggugcccaccuucugcgaccacugcggcagccugcuguggggcaucaugagacagggccugcagugcaagaucugcaagaugaacgugcacaucagaugccaggccaacguggcccccaacugcggcgugaacgccguggagcuggccaagacccuggccggcaugggccugcagcccggcaacaucagccccaccagcaagcuggugagcagaagcacccugagaagacagggcaaggagagcagcaaggagggcaacggcaucggcgugaacagcagcaacagacugggcaucgacaacuucgaguucaucagagugcugggcaagggcagcuucggcaaggugaugcuggccagagugaaggagaccggcgaccuguacgccgugaaggugcugaagaaggacgugauccugcaggacgacgacguggagugcaccaugaccgagaagagaauccugagccuggccagaaaccaccccuuccugacccagcuguucugcugcuuccagacccccgacagacuguucuucgugauggaguucgugaacggcggcgaccugauguuccacauccagaagagcagaagauucgacgaggccagagccagauucuacgccgccgagaucaucagcgcccugauguuccugcacgacaagggcaucaucuacagagaccugaagcuggacaacgugcugcuggaccacgagggccacugcaagcuggccgacuucggcaugugcaaggagggcaucugcaacggcgugaccaccgccaccuucugcggcacccccgacuacaucgcccccgagauccugcaggagaugcuguacggccccgccguggacuggugggccaugggcgugcugcuguacgagaugcugugcggccacgcccccuucgaggccgagaacgaggacgaccuguucgaggccauccugaacgacgaggugguguaccccaccuggcugcacgaggacgccaccggcauccugaagagcuucaugaccaagaaccccaccaugagacugggcagccugacccagggcggcgagcacgccauccugagacaccccuucuucaaggagaucgacugggcccagcugaaccacagacagaucgagccccccuucagacccagaaucaagagcagagaggacgugagcaacuucgaccccgacuucaucaaggaggagcccgugcugacccccaucgacgagggccaccugcccaugaucaaccaggacgaguucagaaacuucagcuacgugagccccgagcugcagcccuga

SEQ ID NO: 8905 - RNA, 2052 nt, Artificial Sequence
  derived and/or modified sequence opt5 from KPCL__Homo_sapiens__AAH37268
augagcuccggcaccaugaaguucaacggguaccugagagugcggaucggagaggccgucggccuccagcccacacgcuggucucugagacacagccuuuuuaaaaaggggcaccaacugcucgacccuuaucugacgguuuccguggaucaggugcgggucggacagaccucuacaaaacagaagaccaauaaaccgacauacaacgaagaguucugcgcuaaugugaccgacggcgggcaccuugaacuggccguuuuucaugagacaccccucggauaugaucacuucguggcgaacuguacccugcaauuucaggaacugcuccgcacgaccggcgcuagcgacacauucgagggcugggucgaucuggagccugaagggaagguguuuguugugauuacccuuacaggauccuucaccgaggccacgcugcagagagaccggaucuuuaagcauuucacacgcaaaagacagcgggccaugcgcagacggguccaccaaauuaauggccacaaguuuauggcuaccuaccuccgccagcccacauauugcucucauuguagagaguucaucuggggaguguuugggaaacagggcuaccagugccaaguguguaccugcgucguucacaagcggugucaucaccugauugugaccgccugcacaugucagaacaauaucaacaaaguggauagcaagaucgcugaacagcgcuucgggauuaauaucccucacaaguucuccauucauaacuauaaaguccccacguuuugcgaccacuguggaagccuucuguggggcaucaugagacaaggccuccagugcaagauuugcaaaaugaaugugcauauccggugucaggccaacguugcgccuaauugcggggugaacgccgucgagcuggcuaagacccuggccggaaugggccuccagccggggaauauuucucccacauccaaacuggugagcagaucuacccuucgccggcaaggaaaggaauccagcaaagagggcaacgggaucggaguuaacucuuccaauagacugggcaucgauaacuucgaauuuauucgcgugcucggcaaggggagcuucggaaaggucaugcuggcucgggugaaagagacaggcgaccuuuacgccgucaaggugcugaaaaaggauguuauccuccaggacgaugacguggaauguaccaugacggagaaacgcauucugucccuggcgagaaaucacccuuuucucacacagcuguucugcuguuuucagacccccgaccggcuuuucuuugucauggaguucgugaacgggggagaucugauguuucauauccaaaagucuagacgcuucgacgaagcccgggcuagauuuuacgccgcugagauuaucagcgcccucauguuccugcacgauaagggcaucauuuaucgcgaccuuaaacuggauaauguucuccuggaccacgaagggcauugcaagcuggccgauuucggcauguguaaagagggaaucugcaacggcgugaccacagcuaccuuuugugggacaccugacuacauugcgcccgaaauccuccaggagaugcuguauggaccggccgucgauuggugggcuaugggcgugcuucuguacgagaugcucugcgggcacgccccuuucgaagccgagaaugaagacgaucuguuugaggcuauucugaacgacgaagugguuuaucccacguggcuucaugaggacgccaccggaauccucaaguccuucaugaccaaaaauccuacaaugcggcugggcagccugacacaagggggcgagcacgcgauccucagacaccccuuuuucaaggaaauugauugggcucagcugaaccaucggcagaucgagcccccuuuucgcccgagaauuaagucucgggaagacgucuccaauuucgaucccgacuuuaucaaagaggagccugugcuuacccccauugaugaaggacaucugccuaugaucaaccaggacgaguucagaaauuuuagcuacgugucucccgaacuccagccguga

SEQ ID NO: 8906 - protein, 706 aa, Artificial Sequence
  KPCT__Homo_sapiens__Q04759
MSPFLRIGLSNFDCGSCQSCQGEAVNPYCAVLVKEYVESENGQMYIQKKPTMYPPWDSTFDAHINKGRVMQIIVKGKNVDLISETTVELYSLAERCRKNNGKTEIWLELKPQGRMLMNARYFLEMSDTKDMNEFETEGFFALHQRRGAIKQAKVHHVKCHEFTATFFPQPTFCSVCHEFVWGLNKQGYQCRQCNAAIHKKCIDKVIAKCTGSAINSRETMFHKERFKIDMPHRFKVYNYKSPTFCEHCGTLLWGLARQGLKCDACGMNVHHRCQTKVANLCGINQKLMAEALAMIESTQQARCLRDTEQIFREGPVEIGLPCSIKNEARPPCLPTPGKREPQGISWESPLDEVDKMCHLPEPELNKERPSLQIKLKIEDFILHKMLGKGSFGKVFLAEFKKTNQFFAIKALKKDVVLMDDDVECTMVEKRVLSLAWEHPFLTHMFCTFQTKENLFFVMEYLNGGDLMYHIQSCHKFDLSRATFYAAEIILGLQFLHSKGIVYRDLKLDNILLDKDGHIKIADFGMCKENMLGDAKTNTFCGTPDYIAPEILLGQKYNHSVDWWSFGVLLYEMLIGQSPFHGQDEEELFHSIRMDNPFYPRWLEKEAKDLLVKLFVREPEKRLGVRGDIRQHPLFREINWEELERKEIDPPFRPKVKSPFDCSNFDKEFLNEKPRLSFADRALINSMDQNMFRNFSFMNPGMERLIS

SEQ ID NO: 8907 - RNA, 2121 nt, Artificial Sequence
  KPCT__Homo_sapiens__AAA60101
augucgccauuucuucggauuggcuuguccaacuuugacugcggguccugccagucuugucagggcgaggcuguuaacccuuacugugcugugcucgucaaagaguaugucgaaucagagaacgggcagauguauauccagaaaaagccuaccauguacccacccugggacagcacuuuugaugcccauaucaacaagggaagagucaugcagaucauugugaaaggcaaaaacguggaccucaucucugaaaccaccguggagcucuacucgcuggcugagaggugcaggaagaacaacgggaagacagaaauaugguuagagcugaaaccucaaggccgaaugcuaaugaaugcaagauacuuucuggaaaugagugacacaaaggacaugaaugaauuugagacggaaggcuucuuugcuuugcaucagcgccggggugccaucaagcaggcaaagguccaccacgucaagugccacgaguucacugccaccuucuucccacagcccacauuuugcucugucugccacgaguuugucuggggccugaacaaacagggcuaccagugccgacaaugcaaugcagcaauucacaagaaguguauugauaaaguuauagcaaagugcacaggaucagcuaucaauagccgagaaaccauguuccacaaggagagauucaaaauugacaugccacacagauuuaaagucuacaauuacaagagcccgaccuucugugaacacugugggacccugcuguggggacuggcacggcaaggacucaagugugaugcauguggcaugaaugugcaucauagaugccagacaaagguggccaaccuuuguggcauaaaccagaagcuaauggcugaagcgcuggccaugauugagagcacucaacaggcucgcugcuuaagagauacugaacagaucuucagagaagguccgguugaaauuggucucccaugcuccaucaaaaaugaagcaaggccgccauguuuaccgacaccgggaaaaagagagccucagggcauuuccugggagucuccguuggaugagguggauaaaaugugccaucuuccagaaccugaacugaacaaagaaagaccaucucugcagauuaaacuaaaaauugaggauuuuaucuugcacaaaauguuggggaaaggaaguuuuggcaaggucuuccuggcagaauucaagaaaaccaaucaauuuuucgcaauaaaggccuuaaagaaagauguggucuugauggacgaugauguugagugcacgaugguagagaagagaguucuuuccuuggccugggagcauccguuucugacgcacauguuuuguacauuccagaccaaggaaaaccucuuuuuugugauggaguaccucaacggaggggacuuaauguaccacauccaaagcugccacaaguucgaccuuuccagagcgacguuuuaugcugcugaaaucauucuuggucugcaguuccuucauuccaaaggaauagucuacagggaccugaagcuagauaacauccuguuagacaaagauggacauaucaagaucgcggauuuuggaaugugcaaggagaacauguuaggagaugccaagacgaauaccuucugugggacaccugacuacaucgccccagagaucuugcugggucagaaauacaaccacucuguggacuggugguccuucgggguucuccuuuaugaaaugcugauuggucagucgccuuuccacgggcaggaugaggaggagcucuuccacuccauccgcauggacaaucccuuuuacccacgguggcuggagaaggaagcaaaggaccuucuggugaagcucuucgugcgagaaccugagaagaggcugggcgugaggggagacauccgccagcacccuuuguuucgggagaucaacugggaggaacuugaacggaaggagauugacccaccguuccggccgaaagugaaaucaccauuugacugcagcaauuucgacaaagaauucuuaaacgagaagccccggcugucauuugccgacagagcacugaucaacagcauggaccagaauauguucaggaacuuuuccuucaugaaccccgggauggagcggcugauauccuga

SEQ ID NO: 8908 - RNA, 2121 nt, Artificial Sequence
  derived and/or modified sequence opt1 from KPCT__Homo_sapiens__AAA60101
augagccccuuccugcgcaucggccucuccaacuucgacugcgggagcugccaguccugccagggcgaggccgugaacccguacugcgccgugcuggugaaggaguacguggagagcgagaacgggcagauguacauccagaagaagcccaccauguacccgcccugggacuccaccuucgacgcgcacaucaacaagggccgggucaugcagaucaucgugaaggggaagaacguggaccugaucagcgagacgaccgucgagcucuacucccuggccgagcgcugccggaagaacaacggcaagaccgagaucuggcuggagcucaagccccagggccgcaugcugaugaacgcccgguacuuccuggagaugagcgacaccaaggacaugaacgaguucgagacggagggguucuucgcccuccaccagcgccggggcgccaucaagcaggcgaaggugcaccacgugaagugccacgaguucaccgccaccuucuucccccagcccaccuucugcuccgucugccacgaguucgugugggggcugaacaagcagggcuaccagugccgccagugcaacgccgccauccacaagaagugcaucgacaaggugaucgcgaagugcacggggagcgccaucaacucccgggagaccauguuccacaaggagcgcuucaagaucgacaugccccaccgguucaaggucuacaacuacaagagcccgaccuucugcgagcacugcggcacccugcucuggggccuggcccgccaggggcugaagugcgacgccugcggcaugaacgugcaccaccggugccagacgaagguggccaaccucugcgggaucaaccagaagcugauggcggaggcccuggccaugaucgaguccacccagcaggcccgcugccuccgggacaccgagcagaucuuccgcgagggccccgucgagaucggccugcccugcagcaucaagaacgaggcccggcccccgugccugcccacccccgggaagcgcgagccccagggcaucuccugggagagcccgcucgacgagguggacaagaugugccaccuccccgagcccgagcugaacaaggagcggcccucccuccagaucaagcugaagaucgaggacuucauccugcacaagaugcucgggaagggcagcuucgggaagguguuccuggcggaguucaagaagacgaaccaguucuucgccaucaaggcccugaagaaggacgucgugcucauggacgacgacguggagugcaccauggucgagaagcgcgugcugucccuggccugggagcacccguuccucacccacauguucugcaccuuccagacgaaggagaaccuguucuucgugauggaguaccugaacggcggcgaccucauguaccacauccagagcugccacaaguucgaccugagccgggccaccuucuacgcggccgagaucauccuggggcuccaguuccugcacuccaagggcaucgucuaccgcgaccugaagcucgacaacauccugcuggacaaggacgggcacaucaagaucgccgacuucggcaugugcaaggagaacaugcucggggacgccaagaccaacaccuucugcggcacgcccgacuacaucgcccccgagauccugcugggccagaaguacaaccacagcguggacuggugguccuucgggguccuccuguacgagaugcugaucggccagagccccuuccacgggcaggacgaggaggagcuguuccacuccauccgcauggacaacccguucuacccccgguggcucgagaaggaggcgaaggaccugcuggugaagcuguucgugcgcgagcccgagaagcggcugggcguccgcggggacauccggcagcacccccuguuccgcgagaucaacugggaggagcucgagcggaaggagaucgacccgcccuuccgccccaaggucaagagcccguucgacugcuccaacuucgacaaggaguuccugaacgagaagccccggcugagcuucgccgaccgcgcccucaucaacuccauggaccagaacauguuccggaacuucagcuucaugaaccccggcauggagcgccugaucuccuga

SEQ ID NO: 8909 - RNA, 2121 nt, Artificial Sequence
  derived and/or modified sequence opt2 from KPCT__Homo_sapiens__AAA60101
augucccccuuccuccgcaucggccucuccaacuucgacugcggcuccugccaguccugccagggcgaggccgucaaccccuacugcgccguccucgucaaggaguacgucgaguccgagaacggccagauguacauccagaagaagcccaccauguacccccccugggacuccaccuucgacgcccacaucaacaagggccgcgucaugcagaucaucgucaagggcaagaacgucgaccucaucuccgagaccaccgucgagcucuacucccucgccgagcgcugccgcaagaacaacggcaagaccgagaucuggcucgagcucaagccccagggccgcaugcucaugaacgcccgcuacuuccucgagauguccgacaccaaggacaugaacgaguucgagaccgagggcuucuucgcccuccaccagcgccgcggcgccaucaagcaggccaagguccaccacgucaagugccacgaguucaccgccaccuucuucccccagcccaccuucugcuccgucugccacgaguucgucuggggccucaacaagcagggcuaccagugccgccagugcaacgccgccauccacaagaagugcaucgacaaggucaucgccaagugcaccggcuccgccaucaacucccgcgagaccauguuccacaaggagcgcuucaagaucgacaugccccaccgcuucaaggucuacaacuacaagucccccaccuucugcgagcacugcggcacccuccucuggggccucgcccgccagggccucaagugcgacgccugcggcaugaacguccaccaccgcugccagaccaaggucgccaaccucugcggcaucaaccagaagcucauggccgaggcccucgccaugaucgaguccacccagcaggcccgcugccuccgcgacaccgagcagaucuuccgcgagggccccgucgagaucggccuccccugcuccaucaagaacgaggcccgcccccccugccuccccacccccggcaagcgcgagccccagggcaucuccugggaguccccccucgacgaggucgacaagaugugccaccuccccgagcccgagcucaacaaggagcgccccucccuccagaucaagcucaagaucgaggacuucauccuccacaagaugcucggcaagggcuccuucggcaaggucuuccucgccgaguucaagaagaccaaccaguucuucgccaucaaggcccucaagaaggacgucguccucauggacgacgacgucgagugcaccauggucgagaagcgcguccucucccucgccugggagcaccccuuccucacccacauguucugcaccuuccagaccaaggagaaccucuucuucgucauggaguaccucaacggcggcgaccucauguaccacauccaguccugccacaaguucgaccucucccgcgccaccuucuacgccgccgagaucauccucggccuccaguuccuccacuccaagggcaucgucuaccgcgaccucaagcucgacaacauccuccucgacaaggacggccacaucaagaucgccgacuucggcaugugcaaggagaacaugcucggcgacgccaagaccaacaccuucugcggcacccccgacuacaucgcccccgagauccuccucggccagaaguacaaccacuccgucgacuggugguccuucggcguccuccucuacgagaugcucaucggccagucccccuuccacggccaggacgaggaggagcucuuccacuccauccgcauggacaaccccuucuacccccgcuggcucgagaaggaggccaaggaccuccucgucaagcucuucguccgcgagcccgagaagcgccucggcguccgcggcgacauccgccagcacccccucuuccgcgagaucaacugggaggagcucgagcgcaaggagaucgacccccccuuccgccccaaggucaagucccccuucgacugcuccaacuucgacaaggaguuccucaacgagaagccccgccucuccuucgccgaccgcgcccucaucaacuccauggaccagaacauguuccgcaacuucuccuucaugaaccccggcauggagcgccucaucuccuga

SEQ ID NO: 8910 - RNA, 2121 nt, Artificial Sequence
  derived and/or modified sequence opt3 from KPCT__Homo_sapiens__AAA60101
augagccccuuccugagaaucggccucuccaacuuugacugcgggucuugucagucaugccaaggagaggccgugaauccuuacugugcuguccuuguuaaggaauauguggagagugaaaacggucagauguacauucagaaaaagccaaccauguauccgcccugggauagcacauucgacgcacacauaaauaaaggcaggguaaugcagaucauugugaaggggaaaaacgucgaucugaucuccgagacuacgguggaauuguacucuuuagccgagcggugccgcaagaauaacggaaagaccgagauuuggcuggaacuaaaaccucaaggccgaaugcucaugaaugcgcguuauuuucuggagaugucggacacaaaggauaugaacgaguucgaaacugagggguuuuucgcccuucaucagagaaggggugcuaucaaacaggcaaagguucaccaugugaaaugucacgaauuuaccgccacauucuuuccacagcccaccuucugcucagucugucaugaguuuguguggggacugaauaagcaaggcuaccagugccggcaguguaacgcugcaauacacaagaaaugcaucgacaagguaauugccaaauguacuggcagcgcuaucaauagucgcgaaacaauguuccacaaggagagauuuaaaauugauaugccucauagguucaagguuuauaacuacaaauccccaaccuucugcgaacacugcgggacguugcucuggggacuggcccggcagggucugaagugugacgcgugcggcaugaaugugcaucaccgcugucaaacuaaggucgcaaaccucugcgggaucaaucagaaauuaauggccgaggcucuggccaugauagagucuacccagcaagcacgaugucuuagagauacagaacagauuuuuagggagggacccguggaaaucggcuugccuugcagcauuaagaacgaggcucggccaccgugucugcccacuccugguaaacgugaaccacaggggaucuccugggagucaccccuagacgagguggauaagaugugccaccucccugaaccagagcugaacaaagaacgccccagucuucagaucaagcugaagauugaggacuucauauugcauaaaaugcucggaaagggcagcuuuggcaaagucuuccuggccgaauuuaagaaaaccaaucaauucuuugcgaucaaggccuuaaagaaagauguugugcugauggacgacgauguagaguguacaaugguggagaagagaguccucucucuugcaugggaacacccguuccugacccauauguuuugcacguuccagacuaaagagaacuuguuuuucgugauggaauaccuaaaugggggagaccugauguaucacauucaguccugucauaaguuugaucucucaagggcuacauucuacgccgcugagaucauacugggucuucaguuccugcacagcaaaggcauuguuuaucgggacuugaagcucgauaacauccuguuagacaaggaugggcacaucaaaauugccgacuuuggaaugugcaaggagaauaugcugggcgaugcaaaaaccaacacuuucugcgguacaccugacuacaucgcccccgaaauucuacucgggcaaaaguauaaucauaguguggauugguggucuuuuggcguccugcuuuacgagauguugauaggacaguccccauuccacggccaggacgaagaggaacuguuucauagcauccgaauggacaacccuuucuauccccgcuggcucgagaaagaggcuaaggaucugcuugugaaacuguuuguaagagaaccagagaagagguuggggguucggggagacauucgccagcacccccucuucagagaaaucaauugggaggaacuggagaggaaggagaucgauccuccauuucguccgaaagugaagucgcccuucgacuguucuaacuuugauaaagaguucuuaaaugaaaagccucggcuguccuuugcggaccgagcacuaauuaacucaauggaucaaaauauguucagaaacuucaguuuuaugaauccagguauggaaaggcucauaagcuga

SEQ ID NO: 8911 - RNA, 2121 nt, Artificial Sequence
  derived and/or modified sequence opt4 from KPCT__Homo_sapiens__AAA60101
augagccccuuccugagaaucggccugagcaacuucgacugcggcagcugccagagcugccagggcgaggccgugaaccccuacugcgccgugcuggugaaggaguacguggagagcgagaacggccagauguacauccagaagaagcccaccauguacccccccugggacagcaccuucgacgcccacaucaacaagggcagagugaugcagaucaucgugaagggcaagaacguggaccugaucagcgagaccaccguggagcuguacagccuggccgagagaugcagaaagaacaacggcaagaccgagaucuggcuggagcugaagccccagggcagaaugcugaugaacgccagauacuuccuggagaugagcgacaccaaggacaugaacgaguucgagaccgagggcuucuucgcccugcaccagagaagaggcgccaucaagcaggccaaggugcaccacgugaagugccacgaguucaccgccaccuucuucccccagcccaccuucugcagcgugugccacgaguucguguggggccugaacaagcagggcuaccagugcagacagugcaacgccgccauccacaagaagugcaucgacaaggugaucgccaagugcaccggcagcgccaucaacagcagagagaccauguuccacaaggagagauucaagaucgacaugccccacagauucaagguguacaacuacaagagccccaccuucugcgagcacugcggcacccugcuguggggccuggccagacagggccugaagugcgacgccugcggcaugaacgugcaccacagaugccagaccaagguggccaaccugugcggcaucaaccagaagcugauggccgaggcccuggccaugaucgagagcacccagcaggccagaugccugagagacaccgagcagaucuucagagagggccccguggagaucggccugcccugcagcaucaagaacgaggccagaccccccugccugcccacccccggcaagagagagccccagggcaucagcugggagagcccccuggacgagguggacaagaugugccaccugcccgagcccgagcugaacaaggagagacccagccugcagaucaagcugaagaucgaggacuucauccugcacaagaugcugggcaagggcagcuucggcaagguguuccuggccgaguucaagaagaccaaccaguucuucgccaucaaggcccugaagaaggacguggugcugauggacgacgacguggagugcaccaugguggagaagagagugcugagccuggccugggagcaccccuuccugacccacauguucugcaccuuccagaccaaggagaaccuguucuucgugauggaguaccugaacggcggcgaccugauguaccacauccagagcugccacaaguucgaccugagcagagccaccuucuacgccgccgagaucauccugggccugcaguuccugcacagcaagggcaucguguacagagaccugaagcuggacaacauccugcuggacaaggacggccacaucaagaucgccgacuucggcaugugcaaggagaacaugcugggcgacgccaagaccaacaccuucugcggcacccccgacuacaucgcccccgagauccugcugggccagaaguacaaccacagcguggacugguggagcuucggcgugcugcuguacgagaugcugaucggccagagccccuuccacggccaggacgaggaggagcuguuccacagcaucagaauggacaaccccuucuaccccagauggcuggagaaggaggccaaggaccugcuggugaagcuguucgugagagagcccgagaagagacugggcgugagaggcgacaucagacagcacccccuguucagagagaucaacugggaggagcuggagagaaaggagaucgacccccccuucagacccaaggugaagagccccuucgacugcagcaacuucgacaaggaguuccugaacgagaagcccagacugagcuucgccgacagagcccugaucaacagcauggaccagaacauguucagaaacuucagcuucaugaaccccggcauggagagacugaucagcuga

SEQ ID NO: 8912 - RNA, 2121 nt, Artificial Sequence
  derived and/or modified sequence opt5 from KPCT__Homo_sapiens__AAA60101
augagccccuuccugagaaucggccucuccaacuuugacugcgggucuugucagagcugccaaggagaggccgugaauccuuacugugcuguccugguuaaggaauauguggaguccgaaaacggccagauguacauucagaaaaagccgaccauguaucccccuugggauucuacauucgacgcccacaucaauaaagggcgggugaugcagauuaucgucaagggcaaaaacguggaucuuauuagcgagacgaccguugaacuguacucccucgcggagcgcugcagaaagaauaacggaaagacagagaucuggcuggaacuuaaaccccaagggcggaugcugaugaaugcucgcuauuuucucgagaugucugacaccaaggauaugaacgaguucgaaacagagggauuuuucgcccugcaucagagacggggcgccaucaaacaggcuaaggugcaccaugucaaaugucacgaauuuaccgccacauucuuuccucagcccaccuucugcagcgugugucaugaguuuguuuggggccugaauaagcaaggguaccagugccgccaguguaacgcugccauucacaagaaaugcaucgacaaggugauugcgaaauguacgggauccgccaucaauagcagagaaaccauguuccacaaggagcgguuuaaaauugauaugccucaucgcuucaaggucuauaacuacaaaucuccgacauucugcgaacacugcggcacccuccugugggggcuugcuagacagggacugaagugugacgccugcggcaugaaugugcaucaccggugucaaacaaagguggcuaaccucugcgggaucaaucagaaacugauggccgaggcgcuugccaugauugaguccacccagcaagcucgcugucugagagauacggaacagaucuuucgggagggacccgucgaaaucggccucccuugcagcauuaagaacgaggccagacccccuugucugcccacaccgggcaaacgcgaaccucaggggaucucuugggagagcccccuggacgagguugauaagaugugccaccucccugaacccgagcugaacaaagaacggcccucccuucagauuaagcugaagaucgaggacuucauucuccauaaaaugcugggaaagggcucuuuugggaaaguguuccuugcugaauuuaagaaaaccaaucaauucuuugccaucaaggcccugaagaaagaugugguccucauggacgacgauguggaguguacaaugguugagaagagagugcugucccuggcuugggaacacccuuuccucacccauauguuuugcaccuuccagacaaaagagaaccuguuuuucgucauggaauaccuuaauggaggcgaccugauguaucacauccagagcugucauaaguuugaucucucccgcgcgacguucuacgccgcugagauuauccuggggcuucaguuccugcacucuaaaggaauuguguaucgggaccucaagcuggauaacauccugcucgacaaggauggccacauuaaaaucgccgacuuuggcaugugcaaggagaauaugcugggggaugccaaaaccaacacauucugcggaaccccggacuacaucgcucccgaaauucuucugggccaaaaguauaaucauagcguugauuggugguccuuuggggugcuccuguacgagaugcugaucggacagagcccuuuccacggccaggacgaagaggaacuuuuucauucuauuagaauggacaaccccuucuauccucgcuggcucgagaaagaggccaaggaucugcuggucaaacucuuugugcgggaacccgagaagagacuggggguccgcggcgacauccggcagcacccgcuuuucagagaaauuaauugggaggaacuggagcgcaaggagaucgauccucccuuucggccuaaagugaagucccccuucgacuguagcaacuuugauaaagaguuccucaaugaaaagccuagacugucuuuugcggaccgcgcucugauuaacagcauggaucaaaauauguuccggaacuucuccuuuaugaaucccggaauggaaagacuuaucucuuga

SEQ ID NO: 8913 - protein, 592 aa, Artificial Sequence
  KPCZ__Homo_sapiens__Q05513
MPSRTGPKMEGSGGRVRLKAHYGGDIFITSVDAATTFEELCEEVRDMCRLHQQHPLTLKWVDSEGDPCTVSSQMELEEAFRLARQCRDEGLIIHVFPSTPEQPGLPCPGEDKSIYRRGARRWRKLYRANGHLFQAKRFNRRAYCGQCSERIWGLARQGYRCINCKLLVHKRCHGLVPLTCRKHMDSVMPSQEPPVDDKNEDADLPSEETDGIAYISSSRKHDSIKDDSEDLKPVIDGMDGIKISQGLGLQDFDLIRVIGRGSYAKVLLVRLKKNDQIYAMKVVKKELVHDDEDIDWVQTEKHVFEQASSNPFLVGLHSCFQTTSRLFLVIEYVNGGDLMFHMQRQRKLPEEHARFYAAEICIALNFLHERGIIYRDLKLDNVLLDADGHIKLTDYGMCKEGLGPGDTTSTFCGTPNYIAPEILRGEEYGFSVDWWALGVLMFEMMAGRSPFDIITDNPDMNTEDYLFQVILEKPIRIPRFLSVKASHVLKGFLNKDPKERLGCRPQTGFSDIKSHAFFRSIDWDLLEKKQALPPFQPQITDDYGLDNFDTQFTSEPVQLTPDDEDAIKRIDQSEFEGFEYINPLLLSTEESV

SEQ ID NO: 8914 - RNA, 1779 nt, Artificial Sequence
  KPCZ__Homo_sapiens__AAH08058
augcccagcaggaccggccccaagauggaagggagcggcggccgcguccgccucaaggcgcauuacgggggggacaucuucaucaccagcguggacgccgccacgaccuucgaggagcucugugaggaagugagagacaugugucgucugcaccagcagcacccgcucacccucaaguggguggacagcgaaggugacccuugcacgguguccucccagauggagcuggaagaggcuuuccgccuggcccgucagugcagggaugaaggccucaucauucauguuuucccgagcaccccugagcagccuggccugccauguccgggagaagacaaaucuaucuaccgccggggagccagaagauggaggaagcuguaccgugccaacggccaccucuuccaagccaagcgcuuuaacaggagagcguacugcggucagugcagcgagaggauauggggccucgcgaggcaaggcuacaggugcaucaacugcaaacugcugguccauaagcgcugccacggccucgucccgcugaccugcaggaagcauauggauucugucaugccuucccaagagccuccaguagacgacaagaacgaggacgccgaccuuccuuccgaggagacagauggaauugcuuacauuuccucaucccggaagcaugacagcauuaaagacgacucggaggaccuuaagccaguuaucgaugggauggauggaaucaaaaucucucaggggcuugggcugcaggacuuugaccuaaucagagucaucgggcgcgggagcuacgccaagguucuccuggugcgguugaagaagaaugaccaaauuuacgccaugaaaguggugaagaaagagcuggugcaugaugacgaggauauugacuggguacagacagagaagcacguguuugagcaggcauccagcaaccccuuccuggucggauuacacuccugcuuccagacgacaagucgguuguuccuggucauugaguacgucaacggcggggaccugauguuccacaugcagaggcagaggaagcucccugaggagcacgccagguucuacgcggccgagaucugcaucgcccucaacuuccugcacgagagggggaucaucuacagggaccugaagcuggacaacguccuccuggaugcggacgggcacaucaagcucacagacuacggcaugugcaaggaaggccugggcccuggugacacaacgagcacuuucugcggaaccccgaauuacaucgcccccgaaauccugcggggagaggaguacggguucagcguggacuggugggcgcugggaguccucauguuugagaugauggccgggcgcuccccguucgacaucaucaccgacaacccggacaugaacacagaggacuaccuuuuccaagugauccuggagaagcccauccggaucccccgguuccuguccgucaaagccucccauguuuuaaaaggauuuuuaaauaaggaccccaaagagaggcucggcugccggccacagacuggauuuucugacaucaagucccacgcguucuuccgcagcauagacugggacuugcuggagaagaagcaggcgcucccuccauuccagccacagaucacagacgacuacggucuggacaacuuugacacacaguucaccagcgagcccgugcagcugaccccagacgaugaggaugccauaaagaggaucgaccagucagaguucgaaggcuuugaguauaucaacccauuauugcuguccaccgaggagucgguguga

SEQ ID NO: 8915 - RNA, 1779 nt, Artificial Sequence
  derived and/or modified sequence opt1 from KPCZ__Homo_sapiens__AAH08058
augcccagccgcaccggcccgaagauggagggguccggcgggcgggugcgccugaaggcccacuacggcggggacaucuucaucaccagcgucgacgccgcgacgaccuucgaggagcucugcgaggaggugcgggacaugugccgccugcaccagcagcacccccugacccucaaguggguggacuccgagggcgaccccugcaccgucagcucccagauggagcuggaggaggccuuccggcuggcccgccagugccgggacgagggccucaucauccacguguuccccagcacgccggagcagcccgggcugcccugccccggcgaggacaaguccaucuaccgccgcggggcccggcgguggcgcaagcuguaccgggccaacggccaccucuuccaggcgaagcgcuucaaccggcgcgccuacugcgggcagugcagcgagcggaucuggggccuggcccgccagggcuaccggugcaucaacugcaagcugcucgugcacaagcgcugccacgggcuggucccgcugaccugccggaagcacauggacuccgugaugcccagccaggagccgcccguggacgacaagaacgaggacgccgaccuccccuccgaggagaccgacggcaucgcguacaucagcuccagccgcaagcacgacuccaucaaggacgacagcgaggaccugaagcccgucaucgacgggauggacggcaucaagaucucccagggccuggggcuccaggacuucgaccugauccgcgugaucggccgggggagcuacgccaaggugcugcucguccgccugaagaagaacgaccagaucuacgccaugaagguggugaagaaggagcugguccacgacgacgaggacaucgacugggugcagaccgagaagcacguguucgagcaggccuccagcaaccccuuccucgucggccugcacagcugcuuccagacgaccucccggcuguuccucgugaucgaguacgugaacgggggcgaccugauguuccacaugcagcgccagcggaagcugcccgaggagcacgcccgcuucuacgcggccgagaucugcaucgcccucaacuuccugcacgagcggggcaucaucuaccgcgaccugaagcucgacaacguccugcuggacgccgacgggcacaucaagcucaccgacuacggcaugugcaaggaggggcugggcccgggggacaccacgagcaccuucugcggcacccccaacuacaucgcccccgagauccugcggggcgaggaguacggguucuccguggacuggugggcgcucggcgugcugauguucgagaugauggccgggcgcagccccuucgacaucaucaccgacaacccggacaugaacacggaggacuaccuguuccaggucauccucgagaagcccauccggaucccccgcuuccuguccgugaaggccagccacguccugaagggcuuccucaacaaggaccccaaggagcggcuggggugccgcccgcagaccggcuucuccgacaucaagagccacgccuucuuccgguccaucgacugggaccugcucgagaagaagcaggcccugccgcccuuccagccccagaucaccgacgacuacggccuggacaacuucgacacccaguucacgagcgagcccgugcagcugacccccgacgacgaggacgcgaucaagcgcaucgaccaguccgaguucgagggguucgaguacaucaacccccuccugcugagcaccgaggaguccguguga

SEQ ID NO: 8916 - RNA, 1779 nt, Artificial Sequence
  derived and/or modified sequence opt2 from KPCZ__Homo_sapiens__AAH08058
augcccucccgcaccggccccaagauggagggcuccggcggccgcguccgccucaaggcccacuacggcggcgacaucuucaucaccuccgucgacgccgccaccaccuucgaggagcucugcgaggagguccgcgacaugugccgccuccaccagcagcacccccucacccucaagugggucgacuccgagggcgaccccugcaccgucuccucccagauggagcucgaggaggccuuccgccucgcccgccagugccgcgacgagggccucaucauccacgucuuccccuccacccccgagcagcccggccuccccugccccggcgaggacaaguccaucuaccgccgcggcgcccgccgcuggcgcaagcucuaccgcgccaacggccaccucuuccaggccaagcgcuucaaccgccgcgccuacugcggccagugcuccgagcgcaucuggggccucgcccgccagggcuaccgcugcaucaacugcaagcuccucguccacaagcgcugccacggccucgucccccucaccugccgcaagcacauggacuccgucaugcccucccaggagccccccgucgacgacaagaacgaggacgccgaccuccccuccgaggagaccgacggcaucgccuacaucuccuccucccgcaagcacgacuccaucaaggacgacuccgaggaccucaagcccgucaucgacggcauggacggcaucaagaucucccagggccucggccuccaggacuucgaccucauccgcgucaucggccgcggcuccuacgccaagguccuccucguccgccucaagaagaacgaccagaucuacgccaugaaggucgucaagaaggagcucguccacgacgacgaggacaucgacuggguccagaccgagaagcacgucuucgagcaggccuccuccaaccccuuccucgucggccuccacuccugcuuccagaccaccucccgccucuuccucgucaucgaguacgucaacggcggcgaccucauguuccacaugcagcgccagcgcaagcuccccgaggagcacgcccgcuucuacgccgccgagaucugcaucgcccucaacuuccuccacgagcgcggcaucaucuaccgcgaccucaagcucgacaacguccuccucgacgccgacggccacaucaagcucaccgacuacggcaugugcaaggagggccucggccccggcgacaccaccuccaccuucugcggcacccccaacuacaucgcccccgagauccuccgcggcgaggaguacggcuucuccgucgacuggugggcccucggcguccucauguucgagaugauggccggccgcucccccuucgacaucaucaccgacaaccccgacaugaacaccgaggacuaccucuuccaggucauccucgagaagcccauccgcaucccccgcuuccucuccgucaaggccucccacguccucaagggcuuccucaacaaggaccccaaggagcgccucggcugccgcccccagaccggcuucuccgacaucaagucccacgccuucuuccgcuccaucgacugggaccuccucgagaagaagcaggcccucccccccuuccagccccagaucaccgacgacuacggccucgacaacuucgacacccaguucaccuccgagcccguccagcucacccccgacgacgaggacgccaucaagcgcaucgaccaguccgaguucgagggcuucgaguacaucaacccccuccuccucuccaccgaggaguccgucuga

SEQ ID NO: 8917 - RNA, 1779 nt, Artificial Sequence
  derived and/or modified sequence opt3 from KPCZ__Homo_sapiens__AAH08058
augcccagcagaaccggcccuaagauggagggguccggagguagggugcggcugaaagcccacuacggcggggacaucuucauuacaucugucgaugcugcaacuacguuugaggaacucugcgaagagguucgcgacaugugucgacuucaucagcaacacccacugaccuugaaguggguggauucagaaggagacccgugcacaguaaguagccagauggaguuagaggaagccuuccgucuggcgagacaguguagggaugagggccuaauaauccauguguuucccuccacuccugaacagccaggucuccccugcccuggggaggacaaaucuauuuaucggcgcggagcuagaagguggcggaagcuguaccgcgccaacggccaccuuuuccaagcaaaacgauuuaauagaagggccuauuguggccagugcucggagcggaucugggggcuggcucgucagggauaccgcuguauuaacugcaaguugcucguccauaagagaugucacggucuggugccacugaccugcaggaaacacauggauucaguuaugcccagccaggaaccuccaguggacgauaagaaugaggacgcagaucucccgagugaagagacagacggcaucgccuauauauccucuagccggaaacaugauuccaucaaggacgacucagaagauuuaaaacccgucauugacgggauggauggaaucaagauuagucaaggccugggucuucaggacuucgauuugauccgagugauagggcgcggaagcuacgcuaagguacugcuaguuagacucaaaaagaacgaccagauuuaugccaugaaaguggucaagaaagagcuggugcacgaugacgaggauaucgacugggugcagaccgaaaagcaugucuuugagcaagcgucuuccaauccuuuccuuguuggccugcacucauguuuucagacuacaagcagguuguuccucgugauugaauacguaaacggcggggaucugauguuucacaugcagcggcaacgcaaauuaccagaggaacaugcaagauucuacgccgcugagaucugcaucgcccugaauuuucuccacgagaggggaauuauauaucgugaccuuaagcuggacaacguguugcuagaugcagacggucauaucaagcugaccgauuacggcaugugcaaagaagggcucggacccggcgacacgaccaguacuuucugugguacaccuaauuauauugcuccagagauccugagaggggaagaguacggcuucucugucgauuggugggcccuuggagugcugauguuugaaaugauggcgggccgaucccccuucgacauaauuacugauaacccggacaugaauaccgaggauuauuuguuucagguuauccucgagaagccuauccggauucccagguuccugagcgugaaagccucgcacgucuuaaagggguuucugaacaaagacccaaaggaacgccuaggaugccggccucagacagguuucucugauaucaagucccaugcauuuuucagaucaauugacugggaucuccuggagaaaaagcaggcccuucccccauuucaaccccagauaaccgacgacuacggcuuggauaauuucgacacgcaguuuacaagugaaccugugcagcugacuccagaugacgaggaugcuaucaaaaggauugaccaaagcgaguucgaaggguuugaguauaucaacccgcuccugcuuuccaccgaagagucuguauga

SEQ ID NO: 8918 - RNA, 1779 nt, Artificial Sequence
  derived and/or modified sequence opt4 from KPCZ__Homo_sapiens__AAH08058
augcccagcagaaccggccccaagauggagggcagcggcggcagagugagacugaaggcccacuacggcggcgacaucuucaucaccagcguggacgccgccaccaccuucgaggagcugugcgaggaggugagagacaugugcagacugcaccagcagcacccccugacccugaaguggguggacagcgagggcgaccccugcaccgugagcagccagauggagcuggaggaggccuucagacuggccagacagugcagagacgagggccugaucauccacguguuccccagcacccccgagcagcccggccugcccugccccggcgaggacaagagcaucuacagaagaggcgccagaagauggagaaagcuguacagagccaacggccaccuguuccaggccaagagauucaacagaagagccuacugcggccagugcagcgagagaaucuggggccuggccagacagggcuacagaugcaucaacugcaagcugcuggugcacaagagaugccacggccuggugccccugaccugcagaaagcacauggacagcgugaugcccagccaggagccccccguggacgacaagaacgaggacgccgaccugcccagcgaggagaccgacggcaucgccuacaucagcagcagcagaaagcacgacagcaucaaggacgacagcgaggaccugaagcccgugaucgacggcauggacggcaucaagaucagccagggccugggccugcaggacuucgaccugaucagagugaucggcagaggcagcuacgccaaggugcugcuggugagacugaagaagaacgaccagaucuacgccaugaagguggugaagaaggagcuggugcacgacgacgaggacaucgacugggugcagaccgagaagcacguguucgagcaggccagcagcaaccccuuccuggugggccugcacagcugcuuccagaccaccagcagacuguuccuggugaucgaguacgugaacggcggcgaccugauguuccacaugcagagacagagaaagcugcccgaggagcacgccagauucuacgccgccgagaucugcaucgcccugaacuuccugcacgagagaggcaucaucuacagagaccugaagcuggacaacgugcugcuggacgccgacggccacaucaagcugaccgacuacggcaugugcaaggagggccugggccccggcgacaccaccagcaccuucugcggcacccccaacuacaucgcccccgagauccugagaggcgaggaguacggcuucagcguggacuggugggcccugggcgugcugauguucgagaugauggccggcagaagccccuucgacaucaucaccgacaaccccgacaugaacaccgaggacuaccuguuccaggugauccuggagaagcccaucagaauccccagauuccugagcgugaaggccagccacgugcugaagggcuuccugaacaaggaccccaaggagagacugggcugcagaccccagaccggcuucagcgacaucaagagccacgccuucuucagaagcaucgacugggaccugcuggagaagaagcaggcccugccccccuuccagccccagaucaccgacgacuacggccuggacaacuucgacacccaguucaccagcgagcccgugcagcugacccccgacgacgaggacgccaucaagagaaucgaccagagcgaguucgagggcuucgaguacaucaacccccugcugcugagcaccgaggagagcguguga

SEQ ID NO: 8919 - RNA, 1779 nt, Artificial Sequence
  derived and/or modified sequence opt5 from KPCZ__Homo_sapiens__AAH08058
augcccagcagaaccggcccuaagauggagggguccggaggccgggugcgccugaaagcccacuacgggggagacaucuucauuacaucugucgaugcugccacgaccuuugaggaacucugcgaagagguuagagacaugugucggcugcaucagcaacacccgcuuacacugaaguggguggauagcgaaggcgaccccugcaccguguccucucagauggagcucgaggaagcguuccgccuggcuagacagugucgggaugaggggcuuaucauucaugucuuuccuagcacacccgaacagccuggacugcccugcccuggcgaggacaaauccaucuaucgcagaggcgcccggcgcuggagaaagcucuaccgggccaacgggcaccuguuccaagcuaaacgcuuuaauagacgggccuauuguggacagugcucugagcgcauuuggggccuggcuagacagggguaccgguguaucaacugcaagcuccuggugcauaagagaugucacggacuuguuccgcugaccugccgcaaacacauggauagcgugaugcccucccaggaaccucccgucgacgauaagaaugaggacgccgaucucccuagcgaagagacagacggcaucgcguauauuucuuccagccggaaacaugauucuaucaaggacgacuccgaagaucugaaacccgugauugacgggauggauggaaucaagauuagccaaggccuuggccugcaggacuucgaucucaucagaguuauugggcgcggaucuuacgccaaggugcugcugguccggcucaaaaagaacgaccagaucuaugcuaugaaaguggugaagaaagagcugguccacgaugacgaggauaucgacuggguucagaccgaaaagcauguguuugagcaagccuccagcaauccguuccuugugggccugcacuccuguuuucagacgaccucuagacucuuccuggucauugaauacgugaacgggggagaucuuauguuucacaugcagcgccaacggaaacugccugaggaacaugcuagauucuacgccgcggagaucugcauugcccucaauuuucugcacgagcgcggcaucauuuaucgggaccugaagcucgacaacguucugcuugaugcugacgggcauaucaagcugacagauuacggaaugugcaaagaaggccucggccccggggacaccacaagcaccuucuguggaacgccuaauuauaucgcccccgagauucugagaggcgaagaguacggguucuccguggauuggugggcucuuggaguccugauguuugaaaugauggccggccgcagccccuucgacaucauuacagauaacccugacaugaauaccgaggauuaucucuuucaggugauccuggagaagccgauucggauccccagauuccugucuguuaaagccucccacgugcucaagggguuucugaacaaagacccuaaggaacggcuuggcugccgcccccagacaggauucagcgauaucaagucucaugcguuuuucagaagcauugacugggaucugcucgagaaaaagcaggcucugccucccuuucaaccgcagaucaccgacgacuacggccuggauaauuucgacacccaguuuacauccgaaccuguccagcuuacgcccgaugacgaggaugccauuaaacggaucgaccaaucugaguucgaaggguuugaguauauuaacccucuccugcugagcaccgaagaguccguguga

SEQ ID NO: 8920 - protein, 678 aa, Artificial Sequence
  LGP2__Homo_sapiens__A0A024R1Y5
MELRSYQWEVIMPALEGKNIIIWLPTGAGKTRAAAYVAKRHLETVDGAKVVVLVNRVHLVTQHGEEFRRMLDGRWTVTTLSGDMGPRAGFGHLARCHDLLICTAELLQMALTSPEEEEHVELTVFSLIVVDECHHTHKDTVYNVIMSQYLELKLQRAQPLPQVLGLTASPGTGGASKLDGAINHVLQLCANLDTWCIMSPQNCCPQLQEHSQQPCKQYNLCHRRSQDPFGDLLKKLMDQIHDHLEMPELSRKFGTQMYEQQVVKLSEAAALAGLQEQRVYALHLRRYNDALLIHDTVRAVDALAALQDFYHREHVTKTQILCAERRLLALFDDRKNELAHLATHGPENPKLEMLEKILQRQFSSSNSPRGIIFTRTRQSAHSLLLWLQQQQGLQTVDIRAQLLIGAGNSSQSTHMTQRDQQEVIQKFQDGTLNLLVATSVAEEGLDIPHCNVVVRYGLLTNEISMVQARGRARADQSVYAFVATEGSRELKRELINEALETLMEQAVAAVQKMDQAEYQAKIRDLQQAALTKRAAQAAQRENQRQQFPVEHVQLLCINCMVAVGHGSDLRKVEGTHHVNVNPNFSNYYNVSRDPVVINKVFKDWKPGGVISCRNCGEVWGLQMIYKSVKLPVLKVRSMLLETPQGRIQAKKWSRVPFSVPDFDFLQHCAENLSDLSLD

SEQ ID NO: 8921 - RNA, 2037 nt, Artificial Sequence
  LGP2__Homo_sapiens__EAW60797
auggagcuucgguccuaccaaugggaggugaucaugccugcccuggagggcaagaauaucaucaucuggcugcccacgggugccgggaagacccgggcggcugcuuauguggccaagcggcaccuagagacuguggauggagccaaggugguuguauuggucaacagggugcaccuggugacccagcauggugaagaguucaggcgcaugcuggauggacgcuggaccgugacaacccugaguggggacaugggaccacgugcuggcuuuggccaccuggcccggugccaugaccugcucaucugcacagcagagcuucugcagauggcacugaccagccccgaggaggaggagcacguggagcucacugucuucucccugaucgugguggaugagugccaccacacgcacaaggacaccgucuacaacgucaucaugagccaguaccuagaacuuaaacuccagagggcacagccgcuaccccaggugcugggucucacagccuccccaggcacuggcggggccuccaaacucgauggggccaucaaccacguccugcagcucugugccaacuuggacacguggugcaucaugucaccccagaacugcugcccccagcugcaggagcacagccaacagccuugcaaacaguacaaccucugccacaggcgcagccaggauccguuuggggacuugcugaagaagcucauggaccaaauccaugaccaccuggagaugccugaguugagccggaaauuugggacgcaaauguaugagcagcagguggugaagcugagugaggcugcggcuuuggcugggcuucaggagcaacggguguaugcgcuucaccugaggcgcuacaaugacgcgcugcucauccaugacaccguccgcgccguggaugccuuggcugcgcugcaggauuucuaucacagggagcacgucacuaaaacccagauccugugugccgagcgccggcugcuggcccuguucgaugaccgcaagaaugagcuggcccacuuggcaacucauggcccagagaauccaaaacuggagaugcuggaaaagauccugcaaaggcaguucaguagcucuaacagcccucgggguaucaucuucacccgcacccgccaaagcgcacacucccuccugcucuggcuccagcagcagcagggccugcagacuguggacauccgggcccagcuacugauuggggcugggaacagcagccagagcacccacaugacccagagggaccagcaagaagugauccagaaguuccaagauggaacccugaaccuucugguggccacgaguguggcggaggaggggcuggacaucccacauugcaaugugguggugcguuaugggcucuugaccaaugaaaucuccaugguccaggccaggggccgugcccgggccgaucagaguguauacgcguuuguagcaacugaagguagccgggagcugaagcgggagcugaucaacgaggcgcuggagacgcugauggagcaggcaguggcugcugugcagaaaauggaccaggccgaguaccaggccaagauccgggaucugcagcaggcagccuugaccaagcgggcggcccaggcagcccagcgggagaaccagcggcagcaguucccaguggagcacgugcagcuacucugcaucaacugcaugguggcugugggccauggcagcgaccugcggaagguggagggcacccaccaugucaaugugaaccccaacuucucgaacuacuauaaugucuccagggauccuguggucaucaacaaagucuucaaggacuggaagccugggggugucaucagcugcaggaacuguggggaggucuggggucugcagaugaucuacaagucagugaagcugccagugcucaaaguccgcagcaugcugcuggagaccccucaggggcggauccaggccaaaaaguggucccgcgugcccuucuccgugccugacuuugacuuccugcagcauugugccgagaacuugucggaccucucccuggacuga

SEQ ID NO: 8922 - RNA, 2037 nt, Artificial Sequence
  derived and/or modified sequence opt1 from LGP2__Homo_sapiens__EAW60797
auggagcugcgcagcuaccagugggaggugaucaugcccgcccucgagggcaagaacaucaucaucuggcugccgaccggggccggcaagacccgggcggccgccuacgucgccaagcgccaccuggagacgguggacggggccaagguggucgugcucgugaaccggguccaccuggugacccagcacggcgaggaguuccgccggaugcuggacgggcgcuggaccgugaccacgcucuccggcgacaugggcccccgggcgggguucggccaccuggcccgcugccacgaccugcucaucugcaccgccgagcugcugcagauggcccucaccagccccgaggaggaggagcacgucgagcugaccguguucucccugaucguggucgacgagugccaccacacgcacaaggacaccguguacaacgugaucaugagccaguaccucgagcugaagcugcagcgggcgcagccccucccgcagguccuggggcugaccgccucccccggcaccgggggcgccagcaagcucgacggcgccaucaaccacgugcugcagcugugcgccaaccucgacacguggugcaucaugagcccccagaacugcugcccccagcugcaggagcacucccagcagccgugcaagcaguacaaccugugccaccgccggucccaggaccccuucggggaccuccugaagaagcugauggaccagauccacgaccaccucgagaugcccgagcugagccgcaaguucggcacccagauguacgagcagcaggucgugaagcuguccgaggcggccgcccucgccgggcugcaggagcagcggguguacgcccugcaccuccgccgguacaacgacgcgcugcugauccacgacaccgugcgcgccgucgacgcccucgccgcccugcaggacuucuaccaccgggagcacgugaccaagacgcagauccugugcgcggagcgccggcuccuggcccuguucgacgaccgcaagaacgagcucgcccaccuggccacccacggccccgagaacccgaagcuggagaugcucgagaagauccugcagcggcaguucagcuccagcaacagcccccgcggcaucaucuucacccgcacccggcaguccgcccacucccugcugcucuggcugcagcagcagcaggggcugcagacgguggacauccgcgcgcagcuccugaucggcgccgggaacagcucccagagcacccacaugacccagcgggaccagcaggaggucauccagaaguuccaggacggcacccugaaccuccugguggccacgagcgucgccgaggaggggcuggacaucccccacugcaacguggugguccgcuacggccuccugaccaacgagaucuccauggugcaggcgcggggccgcgcccgggccgaccagagcguguacgccuucgucgccaccgaggggucccgcgagcugaagcgggagcucaucaacgaggcgcuggagacccugauggagcaggccguggccgccgugcagaagauggaccaggccgaguaccaggcgaagauccgcgaccuccagcaggccgcccugacgaagcgggccgcccaggcggcccagcgcgagaaccagcggcagcaguuccccgucgagcacgugcagcugcucugcaucaacugcaugguggccgucggccacgggagcgaccugcgcaagguggagggcacccaccacgugaacgucaacccgaacuucuccaacuacuacaacgugagccgggaccccguggucaucaacaagguguucaaggacuggaagcccgggggcgugaucuccugccgcaacugcggcgaggucugggggcugcagaugaucuacaagagcgugaagcuccccgugcugaagguccgguccaugcugcucgagaccccgcagggccgcauccaggccaagaaguggagccgggugcccuucuccgugcccgacuucgacuuccugcagcacugcgcggagaaccugagcgaccucucccuggacuga

SEQ ID NO: 8923 - RNA, 2037 nt, Artificial Sequence
  derived and/or modified sequence opt2 from LGP2__Homo_sapiens__EAW60797
auggagcuccgcuccuaccagugggaggucaucaugcccgcccucgagggcaagaacaucaucaucuggcuccccaccggcgccggcaagacccgcgccgccgccuacgucgccaagcgccaccucgagaccgucgacggcgccaaggucgucguccucgucaaccgcguccaccucgucacccagcacggcgaggaguuccgccgcaugcucgacggccgcuggaccgucaccacccucuccggcgacaugggcccccgcgccggcuucggccaccucgcccgcugccacgaccuccucaucugcaccgccgagcuccuccagauggcccucaccucccccgaggaggaggagcacgucgagcucaccgucuucucccucaucgucgucgacgagugccaccacacccacaaggacaccgucuacaacgucaucaugucccaguaccucgagcucaagcuccagcgcgcccagccccucccccagguccucggccucaccgccucccccggcaccggcggcgccuccaagcucgacggcgccaucaaccacguccuccagcucugcgccaaccucgacaccuggugcaucauguccccccagaacugcugcccccagcuccaggagcacucccagcagcccugcaagcaguacaaccucugccaccgccgcucccaggaccccuucggcgaccuccucaagaagcucauggaccagauccacgaccaccucgagaugcccgagcucucccgcaaguucggcacccagauguacgagcagcaggucgucaagcucuccgaggccgccgcccucgccggccuccaggagcagcgcgucuacgcccuccaccuccgccgcuacaacgacgcccuccucauccacgacaccguccgcgccgucgacgcccucgccgcccuccaggacuucuaccaccgcgagcacgucaccaagacccagauccucugcgccgagcgccgccuccucgcccucuucgacgaccgcaagaacgagcucgcccaccucgccacccacggccccgagaaccccaagcucgagaugcucgagaagauccuccagcgccaguucuccuccuccaacuccccccgcggcaucaucuucacccgcacccgccaguccgcccacucccuccuccucuggcuccagcagcagcagggccuccagaccgucgacauccgcgcccagcuccucaucggcgccggcaacuccucccaguccacccacaugacccagcgcgaccagcaggaggucauccagaaguuccaggacggcacccucaaccuccucgucgccaccuccgucgccgaggagggccucgacaucccccacugcaacgucgucguccgcuacggccuccucaccaacgagaucuccaugguccaggcccgcggccgcgcccgcgccgaccaguccgucuacgccuucgucgccaccgagggcucccgcgagcucaagcgcgagcucaucaacgaggcccucgagacccucauggagcaggccgucgccgccguccagaagauggaccaggccgaguaccaggccaagauccgcgaccuccagcaggccgcccucaccaagcgcgccgcccaggccgcccagcgcgagaaccagcgccagcaguuccccgucgagcacguccagcuccucugcaucaacugcauggucgccgucggccacggcuccgaccuccgcaaggucgagggcacccaccacgucaacgucaaccccaacuucuccaacuacuacaacgucucccgcgaccccgucgucaucaacaaggucuucaaggacuggaagcccggcggcgucaucuccugccgcaacugcggcgaggucuggggccuccagaugaucuacaaguccgucaagcuccccguccucaagguccgcuccaugcuccucgagaccccccagggccgcauccaggccaagaaguggucccgcguccccuucuccguccccgacuucgacuuccuccagcacugcgccgagaaccucuccgaccucucccucgacuga

SEQ ID NO: 8924 - RNA, 2037 nt, Artificial Sequence
  derived and/or modified sequence opt3 from LGP2__Homo_sapiens__EAW60797
auggagcugagaagcuaccagugggaagugaucaugcccgcccucgagggcaagaacauuauaaucuggcuuccuaccggggcuggaaaaacaagggcagccgcguaugucgcuaagcggcaccuggaaacuguugacggugccaaagugguaguguuggucaaucgcgugcauuuaguuacgcaacacggcgaggaguuccgacguaugcuggaugggagauggaccgugacaacucuauccggagacaugggcccaagggcagguuuugggcaucucgcccggugccacgaucugcuuauuuguaccgcugaacuguugcagauggcacucacaucuccggaggaagaggaacaugucgagcugaccguguucucacugaucguaguugacgagugccaccacacucauaaggauacaguguacaacgucauuaugagucaguaucucgaauuaaaacugcagcgcgcccaaccccuuccucagguguugggacugaccgcuagcccaggcacgggcggggccuccaagcuagacggagcgaucaaucacgugcuccagcugugugcaaaccuugauacuuggugcauaaugucuccccagaauuguugcccucaacugcaggagcauucgcagcagccauguaagcaauacaacuugugccacagaaggucacaggaccccuuuggugaucuccugaaaaaguuaauggaccagauccacgaucaucuggaaaugccugagcucagccggaaauucggcacccaaauguaugaacagcaggucguuaagcugagugaggccgcugcccuggcaggguugcaggagcaacgcguguacgcucuacaccuucgaagauauaaugacgcccuccugauucaugauacaguaagggcgguggacgcccuugcagcucugcaggacuuuuaccaccgggaacaugucacuaaaacccagaucuugugugccgagcgucgccuccuggcuuuauucgaugacagaaagaacgaacuggcccaccuagcaacacacggaccagagaauccgaagcucgaaaugcuggagaaaauucuucagaggcaauuuuccucuagcaacucccccagaggcaucauauucacccgaacgcgccagucagcccauaguuugcugcucuggcugcagcagcaacagggucuucagacuguggauauuagagcucagcuguugaucggggcgggaaauagcucucaauccacacacaugacccagagggaccagcaagagguuauucagaaguuucaggauggcacucucaaccuguuaguggcaacaucagucgccgaagagggccuggacaucccucauugcaaugugguaguucgguacgggcuacucaccaacgaaaucagcauggugcaggcucgcggacgggccagggcagaucaaagugucuaugccuucguggcuacggaggguucucgugaacugaaacgggagcuuauuaaugaggccuuggaaacccugauggagcaggcagucgcggcugugcagaagauggaccaggccgaauaccaagcaaaaauacgagaucuccagcaggccgcucugacaaagagagccgcacaggcugcccaaagggagaaccagcgccagcaauuuccaguugagcacgugcaguuacuguguaucaacugcaugguagcggucggccacggguccgaccuucggaaaguggaaggaacucaucacguuaaugugaaccccaauuucagcaacuauuacaaugucucgagagauccugugguaauuaacaagguguuuaaggacuggaaaccaggcgguguuaucucuugcaggaauuguggggaggucuggggcuugcagaugauauauaaguccgugaaacuccccgugcugaagguccgcucaaugcuacuggaaaccccgcagggacggauucaagccaaaaaguggagucgaguuccuuucagcgugcccgacuucgauuuucuccagcauugcgcugagaaccuguccgaccuuucuuuggauuga

SEQ ID NO: 8925 - RNA, 2037 nt, Artificial Sequence
  derived and/or modified sequence opt4 from LGP2__Homo_sapiens__EAW60797
auggagcugagaagcuaccagugggaggugaucaugcccgcccuggagggcaagaacaucaucaucuggcugcccaccggcgccggcaagaccagagccgccgccuacguggccaagagacaccuggagaccguggacggcgccaaggugguggugcuggugaacagagugcaccuggugacccagcacggcgaggaguucagaagaaugcuggacggcagauggaccgugaccacccugagcggcgacaugggccccagagccggcuucggccaccuggccagaugccacgaccugcugaucugcaccgccgagcugcugcagauggcccugaccagccccgaggaggaggagcacguggagcugaccguguucagccugaucgugguggacgagugccaccacacccacaaggacaccguguacaacgugaucaugagccaguaccuggagcugaagcugcagagagcccagccccugccccaggugcugggccugaccgccagccccggcaccggcggcgccagcaagcuggacggcgccaucaaccacgugcugcagcugugcgccaaccuggacaccuggugcaucaugagcccccagaacugcugcccccagcugcaggagcacagccagcagcccugcaagcaguacaaccugugccacagaagaagccaggaccccuucggcgaccugcugaagaagcugauggaccagauccacgaccaccuggagaugcccgagcugagcagaaaguucggcacccagauguacgagcagcagguggugaagcugagcgaggccgccgcccuggccggccugcaggagcagagaguguacgcccugcaccugagaagauacaacgacgcccugcugauccacgacaccgugagagccguggacgcccuggccgcccugcaggacuucuaccacagagagcacgugaccaagacccagauccugugcgccgagagaagacugcuggcccuguucgacgacagaaagaacgagcuggcccaccuggccacccacggccccgagaaccccaagcuggagaugcuggagaagauccugcagagacaguucagcagcagcaacagccccagaggcaucaucuucaccagaaccagacagagcgcccacagccugcugcuguggcugcagcagcagcagggccugcagaccguggacaucagagcccagcugcugaucggcgccggcaacagcagccagagcacccacaugacccagagagaccagcaggaggugauccagaaguuccaggacggcacccugaaccugcugguggccaccagcguggccgaggagggccuggacaucccccacugcaacgugguggugagauacggccugcugaccaacgagaucagcauggugcaggccagaggcagagccagagccgaccagagcguguacgccuucguggccaccgagggcagcagagagcugaagagagagcugaucaacgaggcccuggagacccugauggagcaggccguggccgccgugcagaagauggaccaggccgaguaccaggccaagaucagagaccugcagcaggccgcccugaccaagagagccgcccaggccgcccagagagagaaccagagacagcaguuccccguggagcacgugcagcugcugugcaucaacugcaugguggccgugggccacggcagcgaccugagaaagguggagggcacccaccacgugaacgugaaccccaacuucagcaacuacuacaacgugagcagagaccccguggugaucaacaagguguucaaggacuggaagcccggcggcgugaucagcugcagaaacugcggcgagguguggggccugcagaugaucuacaagagcgugaagcugcccgugcugaaggugagaagcaugcugcuggagaccccccagggcagaauccaggccaagaaguggagcagagugcccuucagcgugcccgacuucgacuuccugcagcacugcgccgagaaccugagcgaccugagccuggacuga

SEQ ID NO: 8926 - RNA, 2037 nt, Artificial Sequence
  derived and/or modified sequence opt5 from LGP2__Homo_sapiens__EAW60797
auggagcugagaagcuaccagugggaagugaucaugcccgcccucgagggcaagaacauuaucauuuggcugccuaccggggcuggaaaaacacgggccgcggcuuaugucgccaagcgccaccuugaaacgguugacggcgccaaaguggugguccuggugaauagaguucaucucgugacccaacacggggaggaguuccggcgcaugcuggauggaagauggacagucaccacacuuuccggcgacauggggccgcgggcuggauuuggccaucuggcccgcugccacgaucuccugaucuguaccgcugaacugcuccagauggcccugacaucucccgaggaagaggaacauguggagcuuaccguuuucagccugauuguggucgacgagugccaccacacgcauaaggauaccguguacaacgugaucaugucccaguaucucgaacugaaacuucagagagcgcaaccucugccccagguccucggccugacagccucuccugggaccggaggcgcuagcaagcuggacggggccaucaaucacguucuccagcugugugcuaaccuugauacauggugcauuaugucuccccagaauuguugcccucaacugcaggagcauucccagcagccguguaagcaauacaaccucugccaccggcgcagccaggaccccuuuggagaucugcuuaaaaagcugauggaccagauccacgaucaucucgaaaugccugagcuguccagaaaauucggcacccaaauguaugaacaacagguggugaagcugagcgaggccgcggcccucgcugggcugcaggagcagcgggucuacgcccuucaucugcgcagauauaaugacgcucuccugauucacgauacggugcgggccguugacgcccuugcugcgcugcaggacuuuuaccaccgcgaacaugugacaaaaacccagauccucugugccgagagacggcugcuggcucucuucgaugacagaaagaacgaacuggcccaccuugccacacacggacccgagaauccuaagcuggaaaugcucgagaaaauucugcagcgccaauuuucuuccagcaacucuccccggggcaucauuuucaccagaacccgccaguccgcucauagccugcuucucuggcugcagcagcaacagggccugcagacagucgauauccgggcccagcuccugaucggggcgggaaauucuucccaaagcacgcacaugacccagagagaccagcaagaggugauucagaaguuucaggauggcacacuuaaccugcucguugcuaccuccguggccgaagaggggcuggacaucccgcauugcaaugucgugguccgcuacggacugcuuacaaacgaaauuucuauggugcaggcccggggcagagcucgcgccgaucaaagcguuuaugcuuucguggccaccgaggggucccgggaacucaaaagagagcugaucaaugaggcgcuggaaacgcucauggagcaggccgucgcugccgugcagaagauggaccaggcugaauaccaagccaaaauucgcgaucugcagcaggcggcccuuacaaagcgggcugcccaggcugcccaaagagagaaccagcggcagcaauuuccuguugagcacgugcagcugcucuguaucaacugcauggucgccgugggacacggcagcgaccugcgcaaaguggaaggcacccaucacguuaaugucaaccccaauuucucuaacuauuacaauguguccagagauccuguggucaucaacaagguguuuaaggacuggaaacccgggggaguuauuagcugccggaauuguggcgaggugugggggcugcagaugaucuauaagucugucaaacuucccgugcucaagguuagaagcaugcugcuggaaaccccucagggacgcauucaagcuaaaaaguggucccgggugccguucucuguccccgacuucgauuuucuccagcauugcgcggagaaccugagcgaccuuucccuggauuga

SEQ ID NO: 8927 - protein, 678 aa, Artificial Sequence; identical to SEQ ID NO: 8920
  LGP2__Homo_sapiens__Q96C10

SEQ ID NO: 8928 - RNA, 2037 nt, Artificial Sequence; identical to SEQ ID NO: 8921
  LGP2__Homo_sapiens__AAH14949

SEQ ID NO: 8929 - RNA, 2037 nt, Artificial Sequence; identical to SEQ ID NO: 8922
  derived and/or modified sequence opt1 from LGP2__Homo_sapiens__AAH14949

SEQ ID NO: 8930 - RNA, 2037 nt, Artificial Sequence; identical to SEQ ID NO: 8923
  derived and/or modified sequence opt2 from LGP2__Homo_sapiens__AAH14949

SEQ ID NO: 8931 - RNA, 2037 nt, Artificial Sequence; identical to SEQ ID NO: 8924
  derived and/or modified sequence opt3 from LGP2__Homo_sapiens__AAH14949

SEQ ID NO: 8932 - RNA, 2037 nt, Artificial Sequence; identical to SEQ ID NO: 8925
  derived and/or modified sequence opt4 from LGP2__Homo_sapiens__AAH14949

SEQ ID NO: 8933 - RNA, 2037 nt, Artificial Sequence; identical to SEQ ID NO: 8926
  derived and/or modified sequence opt5 from LGP2__Homo_sapiens__AAH14949

SEQ ID NO: 8934 - protein, 1024 aa, Artificial Sequence
  l_IPAF__Homo_sapiens__Q9NPP4
MNFIKDNSRALIQRMGMTVIKQITDDLFVWNVLNREEVNIICCEKVEQDAARGIIHMILKKGSESCNLFLKSLKEWNYPLFQDLNGQSLFHQTSEGDLDDLAQDLKDLYHTPSFLNFYPLGEDIDIIFNLKSTFTEPVLWRKDQHHHRVEQLTLNGLLQALQSPCIIEGESGKGKSTLLQRIAMLWGSGKCKALTKFKFVFFLRLSRAQGGLFETLCDQLLDIPGTIRKQTFMAMLLKLRQRVLFLLDGYNEFKPQNCPEIEALIKENHRFKNMVIVTTTTECLRHIRQFGALTAEVGDMTEDSAQALIREVLIKELAEGLLLQIQKSRCLRNLMKTPLFVVITCAIQMGESEFHSHTQTTLFHTFYDLLIQKNKHKHKGVAASDFIRSLDHCGDLALEGVFSHKFDFELQDVSSVNEDVLLTTGLLCKYTAQRFKPKYKFFHKSFQEYTAGRRLSSLLTSHEPEEVTKGNGYLQKMVSISDITSTYSSLLRYTCGSSVEATRAVMKHLAAVYQHGCLLGLSIAKRPLWRQESLQSVKNTTEQEILKAININSFVECGIHLYQESTSKSALSQEFEAFFQGKSLYINSGNIPDYLFDFFEHLPNCASALDFIKLDFYGGAMASWEKAAEDTGGIHMEEAPETYIPSRAVSLFFNWKQEFRTLEVTLRDFSKLNKQDIRYLGKIFSSATSLRLQIKRCAGVAGSLSLVLSTCKNIYSLMVEASPLTIEDERHITSVTNLKTLSIHDLQNQRLPGGLTDSLGNLKNLTKLIMDNIKMNEEDAIKLAEGLKNLKKMCLFHLTHLSDIGEGMDYIVKSLSSEPCDLEEIQLVSCCLSANAVKILAQNLHNLVKLSILDLSENYLEKDGNEALHELIDRMNVLEQLTALMLPWGCDVQGSLSSLLKHLEEVPQLVKLGLKNWRLTDTEIRILGAFFGKNPLKNFQQLNLAGNRVSSDGWLAFMGVFENLKQLVFFDFSTKEFLPDPALVRKLSQVLSKLTFLQEARLVGWQFDDDDLSVITGAFKLVTA

SEQ ID NO: 8935 - RNA, 3075 nt, Artificial Sequence
  l_IPAF__Homo_sapiens__AAH31555
augaauuucauaaaggacaauagccgagcccuuauucaaagaaugggaaugacuguuauaaagcaaaucacagaugaccuauuuguauggaauguucugaaucgcgaagaaguaaacaucauuugcugcgagaagguggagcaggaugcugcuagagggaucauucacaugauuuugaaaaaggguucagaguccuguaaccucuuucuuaaaucccuuaaggaguggaacuauccucuauuucaggacuugaauggacaaagucuuuuucaucagacaucagaaggagacuuggacgauuuggcucaggauuuaaaggacuuguaccauaccccaucuuuucugaacuuuuauccccuuggugaagauauugacauuauuuuuaacuugaaaagcaccuucacagaaccuguccuguggaggaaggaccaacaccaucaccgcguggagcagcugacccugaauggccuccugcaggcucuucagagccccugcaucauugaaggggaaucuggcaaaggcaaguccacucugcugcagcgaauugccaugcucuggggcuccggaaagugcaaggcucugaccaaguucaaauucgucuucuuccuccgucucagcagggcccaggguggacuuuuugaaacccucugugaucaacuccuggauauaccuggcacaaucaggaagcagacauucauggccaugcugcugaagcugcggcagaggguucuuuuccuucuugauggcuacaaugaauucaagccccagaacugcccagaaaucgaagcccugauaaaggaaaaccaccgcuucaagaacauggucaucgucaccacuaccacugagugccugaggcacauacggcaguuuggugcccugacugcugaggugggggauaugacagaagacagcgcccaggcucucauccgagaagugcugaucaaggagcuugcugaaggcuuguugcuccaaauucagaaauccaggugcuugaggaaucucaugaagaccccucucuuuguggucaucacuugugcaauccagaugggugaaagugaguuccacucucacacacaaacaacgcuguuccauaccuucuaugaucuguugauacagaaaaacaaacacaaacauaaagguguggcugcaagugacuucauucggagccuggaccacuguggagaccuagcucuggaggguguguucucccacaaguuugauuucgaacugcaggauguguccagcgugaaugaggauguccugcugacaacugggcuccucuguaaauauacagcucaaagguucaagccaaaguauaaauucuuucacaagucauuccaggaguacacagcaggacgaagacucagcaguuuauugacgucucaugagccagaggaggugaccaaggggaaugguuacuugcagaaaaugguuuccauuucggacauuacauccacuuauagcagccugcuccgguacaccugugggucaucuguggaagccaccagggcuguuaugaagcaccucgcagcaguguaucaacacggcugccuucucggacuuuccaucgccaagaggccucucuggagacaggaaucuuugcaaagugugaaaaacaccacugagcaagaaauucugaaagccauaaacaucaauuccuuuguagaguguggcauccauuuauaucaagagaguacauccaaaucagcccugagccaagaauuugaagcuuucuuucaagguaaaagcuuauauaucaacucagggaacauccccgauuacuuauuugacuucuuugaacauuugcccaauugugcaagugcccuggacuucauuaaacuggacuuuuaugggggagcuauggcuucaugggaaaaggcugcagaagacacagguggaauccacauggaagaggccccagaaaccuacauucccagcagggcuguaucuuuguucuucaacuggaagcaggaauucaggacucuggaggucacacuccgggauuucagcaaguugaauaagcaagauaucagauaucuggggaaaauauucagcucugccacaagccucaggcugcaaauaaagagaugugcugguguggcuggaagccucaguuugguccucagcaccuguaagaacauuuauucucucaugguggaagccaguccccucaccauagaagaugagaggcacaucacaucuguaacaaaccugaaaaccuugaguauucaugaccuacagaaucaacggcugccggguggucugacugacagcuuggguaacuugaagaaccuuacaaagcucauaauggauaacauaaagaugaaugaagaagaugcuauaaaacuagcugaaggccugaaaaaccugaagaagauguguuuauuucauuugacccacuugucugacauuggagagggaauggauuacauagucaagucucugucaagugaacccugugaccuugaagaaauucaauuagucuccugcugcuugucugcaaaugcagugaaaauccuagcucagaaucuucacaauuuggucaaacugagcauucuugauuuaucagaaaauuaccuggaaaaagauggaaaugaagcucuucaugaacugaucgacaggaugaacgugcuagaacagcucaccgcacugaugcugcccuggggcugugacgugcaaggcagccugagcagccuguugaaacauuuggaggaggucccacaacucgucaagcuuggguugaaaaacuggagacucacagauacagagauuagaauuuuaggugcauuuuuuggaaagaacccucugaaaaacuuccagcaguugaauuuggcgggaaaucgugugagcagugauggauggcuugccuucauggguguauuugagaaucuuaagcaauuaguguuuuuugacuuuaguacuaaagaauuucuaccugauccagcauuagucagaaaacuuagccaaguguuauccaaguuaacuuuucugcaagaagcuaggcuuguuggguggcaauuugaugaugaugaucucaguguuauuacaggugcuuuuaaacuaguaacugcuuaa

SEQ ID NO: 8936 - RNA, 3075 nt, Artificial Sequence
  derived and/or modified sequence opt1 from l_IPAF__Homo_sapiens__AAH31555
augaacuucaucaaggacaacagccgcgcccugauccagcggaugggcaugaccgugaucaagcagaucaccgacgaccucuucgucuggaacgugcugaaccgcgaggaggugaacaucaucugcugcgagaaggucgagcaggacgccgcgcgggggaucauccacaugauccugaagaagggcuccgagagcugcaaccucuuccugaagucccugaaggaguggaacuacccccucuuccaggaccugaacgggcagagccuguuccaccagacguccgagggcgaccucgacgaccuggcccaggaccugaaggaccucuaccacaccccgagcuuccugaacuucuacccccugggggaggacaucgacaucaucuucaaccucaaguccaccuucaccgagcccgugcuguggcgcaaggaccagcaccaccaccggguggagcagcugacgcucaacggccugcugcaggcccuccagagccccugcaucaucgagggcgaguccgggaagggcaagagcacccugcugcagcgcaucgccaugcucuggggguccggcaagugcaaggcccugaccaaguucaaguucgucuucuuccugcggcucagccgcgcgcagggcgggcuguucgagacccugugcgaccagcuccuggacaucccgggcacgauccggaagcagaccuucauggccaugcugcucaagcugcgccagcgggugcuguuccuccuggacggguacaacgaguucaagccccagaacugccccgagaucgaggcccugaucaaggagaaccaccgcuucaagaacauggugaucgucaccaccacgaccgagugccuccggcacauccgccaguucggcgcccugaccgcggaggugggggacaugaccgaggacuccgcccaggcccugauccgggaggugcucaucaaggagcuggccgagggccugcuccugcagauccagaagucccgcugccugcggaaccucaugaagacgccccuguucgucgugaucacgugcgccauccagaugggcgaguccgaguuccacagccacacccagaccacccuguuccacaccuucuacgaccugcucauccagaagaacaagcacaagcacaaggggguggcggccuccgacuucauccgcagccuggaccacugcggcgaccuggcccucgagggggucuucucccacaaguucgacuucgagcugcaggacgugagcagcgugaacgaggacguccugcucaccaccggccugcugugcaaguacacggcccagcgguucaagccgaaguacaaguucuuccacaaguccuuccaggaguacaccgccgggcgccggcucagcucccugcugaccagccacgagcccgaggaggugaccaagggcaacggcuaccuccagaagaugguguccaucagcgacaucacguccaccuacagcucccugcugcgcuacacgugcgggagcuccgucgaggcgacccgcgccgugaugaagcaccucgccgccguguaccagcacggcugccugcuggggcucagcaucgccaagcggccccuguggcgccaggagucccugcagagcgucaagaacaccaccgagcaggagauccucaaggcgaucaacaucaacuccuucguggagugcggcauccaccuguaccaggagagcaccuccaagagcgcccugucccaggaguucgaggccuucuuccagggcaagagccucuacaucaacagcgggaacauccccgacuaccuguucgacuucuucgagcaccucccgaacugcgccuccgcccuggacuucaucaagcuggacuucuacggcggggcgauggccagcugggagaaggccgccgaggacaccggcgggauccacauggaggaggcgcccgagacguacauccccucccgggccgucagccuguucuucaacuggaagcaggaguuccgcacccucgaggugacccugcgggacuucuccaagcugaacaagcaggacauccgcuaccucggcaagaucuucagcuccgccaccagccugcggcugcagaucaagcgcugcgccgggguggccggcucccucagccugguccuguccacgugcaagaacaucuacagccucaugguggaggcgagcccccugaccaucgaggacgagcggcacaucaccagcgugaccaaccugaagacccucuccauccacgaccugcagaaccagcgccugccgggcgggcucacggacagccugggcaaccugaagaaccucaccaagcugaucauggacaacaucaagaugaacgaggaggacgccaucaagcuggccgaggggcucaagaaccugaagaagaugugccuguuccaccucacccaccuguccgacaucggcgagggcauggacuacaucgucaagagccugagcuccgagcccugcgaccucgaggagauccagcuggugagcugcugccuguccgccaacgccgugaagauccucgcgcagaaccugcacaaccuggucaagcucagcauccuggaccuguccgagaacuaccucgagaaggacgggaacgaggcccugcacgagcugaucgaccggaugaacgugcucgagcagcugaccgcccugaugcuccccuggggcugcgacgugcaggggagccuguccagccugcucaagcaccuggaggaggucccccagcuggugaagcucggccugaagaacuggcgccugacggacaccgagauccggauccucggggccuucuucggcaagaacccgcugaagaacuuccagcagcugaaccucgccggcaaccgcguguccagcgacggguggcuggcguucaugggcgucuucgagaaccugaagcagcucguguucuucgacuucuccaccaaggaguuccugcccgaccccgcccuggugcggaagcucagccagguccuguccaagcugaccuuccuccaggaggcccgccuggugggguggcaguucgacgacgacgaccugagcgugaucacgggcgccuucaagcuggucaccgcguga

SEQ ID NO: 8937 - RNA, 3075 nt, Artificial Sequence
  derived and/or modified sequence opt2 from l_IPAF__Homo_sapiens__AAH31555
augaacuucaucaaggacaacucccgcgcccucauccagcgcaugggcaugaccgucaucaagcagaucaccgacgaccucuucgucuggaacguccucaaccgcgaggaggucaacaucaucugcugcgagaaggucgagcaggacgccgcccgcggcaucauccacaugauccucaagaagggcuccgaguccugcaaccucuuccucaagucccucaaggaguggaacuacccccucuuccaggaccucaacggccagucccucuuccaccagaccuccgagggcgaccucgacgaccucgcccaggaccucaaggaccucuaccacacccccuccuuccucaacuucuacccccucggcgaggacaucgacaucaucuucaaccucaaguccaccuucaccgagcccguccucuggcgcaaggaccagcaccaccaccgcgucgagcagcucacccucaacggccuccuccaggcccuccagucccccugcaucaucgagggcgaguccggcaagggcaaguccacccuccuccagcgcaucgccaugcucuggggcuccggcaagugcaaggcccucaccaaguucaaguucgucuucuuccuccgccucucccgcgcccagggcggccucuucgagacccucugcgaccagcuccucgacauccccggcaccauccgcaagcagaccuucauggccaugcuccucaagcuccgccagcgcguccucuuccuccucgacggcuacaacgaguucaagccccagaacugccccgagaucgaggcccucaucaaggagaaccaccgcuucaagaacauggucaucgucaccaccaccaccgagugccuccgccacauccgccaguucggcgcccucaccgccgaggucggcgacaugaccgaggacuccgcccaggcccucauccgcgagguccucaucaaggagcucgccgagggccuccuccuccagauccagaagucccgcugccuccgcaaccucaugaagaccccccucuucgucgucaucaccugcgccauccagaugggcgaguccgaguuccacucccacacccagaccacccucuuccacaccuucuacgaccuccucauccagaagaacaagcacaagcacaagggcgucgccgccuccgacuucauccgcucccucgaccacugcggcgaccucgcccucgagggcgucuucucccacaaguucgacuucgagcuccaggacgucuccuccgucaacgaggacguccuccucaccaccggccuccucugcaaguacaccgcccagcgcuucaagcccaaguacaaguucuuccacaaguccuuccaggaguacaccgccggccgccgccucuccucccuccucaccucccacgagcccgaggaggucaccaagggcaacggcuaccuccagaagauggucuccaucuccgacaucaccuccaccuacuccucccuccuccgcuacaccugcggcuccuccgucgaggccacccgcgccgucaugaagcaccucgccgccgucuaccagcacggcugccuccucggccucuccaucgccaagcgcccccucuggcgccaggagucccuccaguccgucaagaacaccaccgagcaggagauccucaaggccaucaacaucaacuccuucgucgagugcggcauccaccucuaccaggaguccaccuccaaguccgcccucucccaggaguucgaggccuucuuccagggcaagucccucuacaucaacuccggcaacauccccgacuaccucuucgacuucuucgagcaccuccccaacugcgccuccgcccucgacuucaucaagcucgacuucuacggcggcgccauggccuccugggagaaggccgccgaggacaccggcggcauccacauggaggaggcccccgagaccuacauccccucccgcgccgucucccucuucuucaacuggaagcaggaguuccgcacccucgaggucacccuccgcgacuucuccaagcucaacaagcaggacauccgcuaccucggcaagaucuucuccuccgccaccucccuccgccuccagaucaagcgcugcgccggcgucgccggcucccucucccucguccucuccaccugcaagaacaucuacucccucauggucgaggccuccccccucaccaucgaggacgagcgccacaucaccuccgucaccaaccucaagacccucuccauccacgaccuccagaaccagcgccuccccggcggccucaccgacucccucggcaaccucaagaaccucaccaagcucaucauggacaacaucaagaugaacgaggaggacgccaucaagcucgccgagggccucaagaaccucaagaagaugugccucuuccaccucacccaccucuccgacaucggcgagggcauggacuacaucgucaagucccucuccuccgagcccugcgaccucgaggagauccagcucgucuccugcugccucuccgccaacgccgucaagauccucgcccagaaccuccacaaccucgucaagcucuccauccucgaccucuccgagaacuaccucgagaaggacggcaacgaggcccuccacgagcucaucgaccgcaugaacguccucgagcagcucaccgcccucaugcuccccuggggcugcgacguccagggcucccucuccucccuccucaagcaccucgaggaggucccccagcucgucaagcucggccucaagaacuggcgccucaccgacaccgagauccgcauccucggcgccuucuucggcaagaacccccucaagaacuuccagcagcucaaccucgccggcaaccgcgucuccuccgacggcuggcucgccuucaugggcgucuucgagaaccucaagcagcucgucuucuucgacuucuccaccaaggaguuccuccccgaccccgcccucguccgcaagcucucccagguccucuccaagcucaccuuccuccaggaggcccgccucgucggcuggcaguucgacgacgacgaccucuccgucaucaccggcgccuucaagcucgucaccgccuga

SEQ ID NO: 8938 - RNA, 3075 nt, Artificial Sequence
  derived and/or modified sequence opt3 from l_IPAF__Homo_sapiens__AAH31555
augaacuucaucaaggacaauagcagagcccugauucagaggaugggcaugaccgugauaaaacaaaucacagaugaccucuuugucuggaacguucuuaaucgggaggaagugaacauuaucugcugugagaagguagaacaggaugcugcacgcgggauuauccacaugauacugaaaaagggauccgagucuugcaauuuguucuuaaaaucacugaaggaauggaacuacccccuauuucaggaccucaauggucagagucuguuccaucaaacuagcgagggcgaucuugacgaucuggcccaggacuugaaggaucucuaucacacgccuuccuuucugaacuucuacccacugggggaggacaucgauauuaucuuuaaucucaaaucuaccuucacagaaccgguguuauggcgaaaggaccagcaucaccaucgugucgagcagcugacucuuaacggauugcugcaagcgcuacagucgcccuguauuaucgaaggcgagucagguaaaggaaagagcacccuccugcagagaauagcuaugcuuuggggaaguggcaaaugcaaggcccugacaaaguuuaaauucguguuuuucuugaggcucucccgggcacagggcgggcuguuugagaccuuaugugaucaacugcucgacauuccuggaacuauccgcaagcagacauucauggccaugcuucugaaauugagacagaggguucuauuccugcucgacgguuauaaugaauuuaagccacaaaacugccccgagauugaagcucugaucaaagagaaucaccgguucaagaacauggugaucgucaccacgacuaccgaaugucuucgccacauucgacaguuuggcgcacugacagccgaggugggggauaugacugaggacucugcucaggccuugauaagagaaguacucaucaaagagcuggcggaaggauuacugcuacagauucaaaaguccaggugccuccggaaucugaugaagaccccucuuuucguugugaucacaugugcaauacagaugggcgagagcgaauuucauucacacacccagacgacuuuguuccauacauuuuacgaucugcucauucagaaaaacaagcacaaacacaagggugucgccgcuagugacuucauccguagccuggaucauugcggggaccuugcccuggagggaguguuuucucacaaauucgauuuugaguugcaagacguguccucagucaacgaagauguucuccugaccacuggcuuacuguguaaguauacagcacagcgcuucaagccaaaauacaaguuuuuccauaagagcuuccaggaguauaccgcuggcagaaggcuaaguucucuccugacgucccacgaacccgaggaagugaccaaagggaauggauaccuucagaaaaugguaagcaucucggacauuacaucuacuuacuccucauugcugcgguauaccugcgguaguagcguggaggccacacgagcggucaugaagcaucucgccgcaguguaccaacacggcugccuguuagggcuguccaucgcuaagcgcccucuuuggagacaggagucuuugcagagcguuaaaaacacuaccgaacaggagauucucaaggccauaaauaucaacucauuuguggaaugugggauucaccuguaucaagagaguacauccaaaagcgcucuaucucaggaguucgaagccuuuuuccagggcaagucacuguacaucaauagugguaacaucccagauuaucucuuugacuucuuugagcaucugccgaauugcgcaagcgcccuugacuucauuaaauuggauuuuuacgggggcgcuauggcguccugggaaaaggcagccgaggacaccggaggcauacacauggaagaggcucccgagacuuauaucccuucuagggccgucucgcuguucuuuaacuggaagcaagaguuccggacguuagaagugacacuccgcgauuuuagcaaacugaauaagcaggacauuagauaccuugggaaaaucuucuccucagcaaccagucugagguugcagauuaagcguugugccggaguagcugguucucucagccugguucuauccacuugcaaaaacaucuacucacugaugguggaagccagcccacucaccauagaggaugaacggcauaucacaucugucaccaaucugaagacucuuuccauucacgacuugcagaaccaacgacugcccggcggguuaacagauagucucggaaaucugaaaaaccuuacgaagcugaucauggacaauauuaagaugaacgaggaggaugcaaucaaacuagcggaaggccucaagaaccugaaaaagauguguuuguuccaccugacccauuuaagcgacauaggugaggggauggauuauauugugaaaucucucuccucagaaccuugcgaccuggaggaaauccagcuugucaguuguugccugagcgcuaaugccgugaagauuuuggcacagaaccuccacaaucugguuaagcuaucgauccuggaucuuuccgagaacuaccucgagaaagacggcaaugaagcccugcaugaguugauagacagaaugaacgugcuggaacaguuaacugcucucaugcugccauggggaugugauguacaaggcucucuuagcucacuguugaagcaccucgaggaggucccccagcuggugaaacuagggcugaagaauuggaggcuuacagacaccgaaauccgcauucucggagccuuuuucgguaaaaacccgcugaagaauuuucagcaguugaacuuagcaggcaaucggguuaguuccgauggguggcuggcuuucaugggaguguuugagaaccucaagcaacuggucuucuuugacuucucuacaaaagaauuucuuccugaucccgcccuggugagaaaguugagccagguacuauccaaacugacuuuccuccaggaggcgaggcuggugggcuggcaauuugacgaugacgaucuuucaguuaucaccggugccuucaaguuagucacggcuuga

SEQ ID NO: 8939 - RNA, 3075 nt, Artificial Sequence
  derived and/or modified sequence opt4 from l_IPAF__Homo_sapiens__AAH31555
augaacuucaucaaggacaacagcagagcccugauccagagaaugggcaugaccgugaucaagcagaucaccgacgaccuguucguguggaacgugcugaacagagaggaggugaacaucaucugcugcgagaagguggagcaggacgccgccagaggcaucauccacaugauccugaagaagggcagcgagagcugcaaccuguuccugaagagccugaaggaguggaacuacccccuguuccaggaccugaacggccagagccuguuccaccagaccagcgagggcgaccuggacgaccuggcccaggaccugaaggaccuguaccacacccccagcuuccugaacuucuacccccugggcgaggacaucgacaucaucuucaaccugaagagcaccuucaccgagcccgugcuguggagaaaggaccagcaccaccacagaguggagcagcugacccugaacggccugcugcaggcccugcagagccccugcaucaucgagggcgagagcggcaagggcaagagcacccugcugcagagaaucgccaugcuguggggcagcggcaagugcaaggcccugaccaaguucaaguucguguucuuccugagacugagcagagcccagggcggccuguucgagacccugugcgaccagcugcuggacauccccggcaccaucagaaagcagaccuucauggccaugcugcugaagcugagacagagagugcuguuccugcuggacggcuacaacgaguucaagccccagaacugccccgagaucgaggcccugaucaaggagaaccacagauucaagaacauggugaucgugaccaccaccaccgagugccugagacacaucagacaguucggcgcccugaccgccgaggugggcgacaugaccgaggacagcgcccaggcccugaucagagaggugcugaucaaggagcuggccgagggccugcugcugcagauccagaagagcagaugccugagaaaccugaugaagaccccccuguucguggugaucaccugcgccauccagaugggcgagagcgaguuccacagccacacccagaccacccuguuccacaccuucuacgaccugcugauccagaagaacaagcacaagcacaagggcguggccgccagcgacuucaucagaagccuggaccacugcggcgaccuggcccuggagggcguguucagccacaaguucgacuucgagcugcaggacgugagcagcgugaacgaggacgugcugcugaccaccggccugcugugcaaguacaccgcccagagauucaagcccaaguacaaguucuuccacaagagcuuccaggaguacaccgccggcagaagacugagcagccugcugaccagccacgagcccgaggaggugaccaagggcaacggcuaccugcagaagauggugagcaucagcgacaucaccagcaccuacagcagccugcugagauacaccugcggcagcagcguggaggccaccagagccgugaugaagcaccuggccgccguguaccagcacggcugccugcugggccugagcaucgccaagagaccccuguggagacaggagagccugcagagcgugaagaacaccaccgagcaggagauccugaaggccaucaacaucaacagcuucguggagugcggcauccaccuguaccaggagagcaccagcaagagcgcccugagccaggaguucgaggccuucuuccagggcaagagccuguacaucaacagcggcaacauccccgacuaccuguucgacuucuucgagcaccugcccaacugcgccagcgcccuggacuucaucaagcuggacuucuacggcggcgccauggccagcugggagaaggccgccgaggacaccggcggcauccacauggaggaggcccccgagaccuacauccccagcagagccgugagccuguucuucaacuggaagcaggaguucagaacccuggaggugacccugagagacuucagcaagcugaacaagcaggacaucagauaccugggcaagaucuucagcagcgccaccagccugagacugcagaucaagagaugcgccggcguggccggcagccugagccuggugcugagcaccugcaagaacaucuacagccugaugguggaggccagcccccugaccaucgaggacgagagacacaucaccagcgugaccaaccugaagacccugagcauccacgaccugcagaaccagagacugcccggcggccugaccgacagccugggcaaccugaagaaccugaccaagcugaucauggacaacaucaagaugaacgaggaggacgccaucaagcuggccgagggccugaagaaccugaagaagaugugccuguuccaccugacccaccugagcgacaucggcgagggcauggacuacaucgugaagagccugagcagcgagcccugcgaccuggaggagauccagcuggugagcugcugccugagcgccaacgccgugaagauccuggcccagaaccugcacaaccuggugaagcugagcauccuggaccugagcgagaacuaccuggagaaggacggcaacgaggcccugcacgagcugaucgacagaaugaacgugcuggagcagcugaccgcccugaugcugcccuggggcugcgacgugcagggcagccugagcagccugcugaagcaccuggaggaggugccccagcuggugaagcugggccugaagaacuggagacugaccgacaccgagaucagaauccugggcgccuucuucggcaagaacccccugaagaacuuccagcagcugaaccuggccggcaacagagugagcagcgacggcuggcuggccuucaugggcguguucgagaaccugaagcagcugguguucuucgacuucagcaccaaggaguuccugcccgaccccgcccuggugagaaagcugagccaggugcugagcaagcugaccuuccugcaggaggccagacuggugggcuggcaguucgacgacgacgaccugagcgugaucaccggcgccuucaagcuggugaccgccuga

SEQ ID NO: 8940 - RNA, 3075 nt, Artificial Sequence
  derived and/or modified sequence opt5 from l_IPAF__Homo_sapiens__AAH31555
augaacuucaucaaggacaauagcagagcccugauucagcggaugggcaugaccgugaucaaacaaauuacagaugaccucuuugucuggaacguucugaaucgcgaggaagugaacaucauuugcugugagaagguggaacaggaugcugccagagggaucauccacaugauucuuaaaaagggauccgagucuugcaaucuguuccucaaaagccugaaggaauggaacuacccccuuuuucaggaccugaauggccagucccucuuccaucaaacgucugagggggaucuggacgaucuggcgcaggaccucaaggaucuguaucacaccccuagcuuucuuaacuucuacccgcugggagaggacaucgauauuaucuuuaaucucaaauccacauucaccgaacccguccuguggcggaaggaccagcaucaccaucgcguggagcagcuuacacugaacggccuccugcaagcucugcagucuccuuguauuaucgaaggggagagcggaaaaggcaaguccacccuccugcagagaauugccaugcuuuggggcagcgggaaaugcaaggcccugacaaaguuuaaauucguuuucuuccuccggcugucucgcgcucagggaggccuuuuugagacccugugugaucaacuccuggacauccccgggacgaucagaaagcagaccuucauggccaugcugcucaaacugcggcagcgcgugcuuuuccugcucgacggauauaaugaauuuaagccucaaaacugccccgagauugaagcucugaucaaagagaaucacagauucaagaacauggucauugugacaaccacaaccgaaugucuucggcacauccgccaguuuggcgcccugacggcggagguuggggauaugacagaggacuccgcccaggcucucauuagagaagugcugaucaaagagcuggccgaaggacuccugcuucagauccaaaagagccggugccugcgcaaucucaugaagaccccucuguucgucgugauuacaugugcuauccagaugggcgagucugaauuucauucccacacccagaccacacuguuccauacguuuuacgaucuucucauucagaaaaacaagcacaaacacaagggcguggccgcgagcgacuucaucagaucucuggaucauugcggggaccuggcccucgagggagucuuuucccacaaauucgauuuugagcugcaagacguuagcuccgugaacgaagaugugcuucugaccacaggccuccuguguaaguauaccgcucagcgguucaagccgaaauacaaguuuuuccauaaaucuuuccaggaguauacagccgggagacgccugagcucccuucucaccagccacgaacccgaggaagucacgaagggaaauggcuaccugcagaaaauggugucuauuuccgacaucacaagcaccuacucuagccugcuccgguauaccugcggguccucuguugaggcuacaagagccgugaugaagcaucuggccgcugucuaccaacacggaugccuucugggccucagcaucgcgaagcgcccucuguggcggcaggagucccugcagagcgugaaaaacaccacagaacaggagauucuuaaggccaucaauauuaacucuuuuguugaauguggcauccaccucuaucaagaguccacgagcaaaucugcucugucccaggaguucgaagccuuuuuccagggaaagagccuguacauuaauuccgggaacauccccgauuaucucuuugacuucuuugagcaucugccuaauugcgccucugcucuugacuucauuaaacuggauuuuuacggcggggccauggcgagcugggaaaaggcugccgaggacaccggaggcauccacauggaagaggcccccgagacauauaucccguccagagcugugucucucuucuuuaacuggaagcaagaauuucgcacccuggaggucacacugcgggauuuuagcaaacuuaauaagcaggacauuagauaccucgggaaaaucuucuccagcgccaccucucugcgccugcagauuaagcggugugcuggcguggccggaucccucagccugguccuuucuacgugcaaaaacaucuacucccugaugguggaagcgagcccucucaccauugaggaugaaagacauaucacaucuguuaccaaucugaagacacugagcauccacgaccuucagaaccaacgccugcccggcgggcucaccgauucccugggaaaucucaaaaaccugacgaaacuuauuauggacaauaucaagaugaacgaggaggaugccauuaagcuggcugaaggccucaagaaccugaaaaagaugugucuguuccaccuuacacaucugagcgacaucggggagggaauggauuauauugugaaaucucucuccagcgaaccuugcgaccuggaggaaauccagcucgucuccuguugccugucugccaaugcugugaagauccuugcccagaaccugcacaaucucguuaagcugagcauucuggaucuuuccgagaacuaccuggagaaagacggcaaugaagcgcuccaugagcugaucgaccggaugaacgugcucgaacagcugaccgcccuuaugcugcccugggggugugauguccaaggcucucugagcucccuccugaagcaccuugaggaggugccccagcuggugaaacucggacugaagaauuggagacucacagacaccgaaauucggauccugggcgccuuuuucgggaaaaacccucuuaagaauuuucagcagcugaaccuggcuggaaaucgcguuucuagcgauggcuggcucgcuuucaugggggucuuugagaaccugaagcaacuuguguucuuugacuucuccaccaaagaauuucugccggaucccgcccucgugagaaagcugagccagguccucucuaaacugacauuccuucaggaggcccggcuggugggauggcaauuugacgaugacgaucuguccguuauuacgggcgcuuucaagcucgugaccgcguga

SEQ ID NO: 8941 - protein, 1025 aa, Artificial Sequence
  MDA5__Homo_sapiens__Q9BYX4
MSNGYSTDENFRYLISCFRARVKMYIQVEPVLDYLTFLPAEVKEQIQRTVATSGNMQAVELLLSTLEKGVWHLGWTREFVEALRRTGSPLAARYMNPELTDLPSPSFENAHDEYLQLLNLLQPTLVDKLLVRDVLDKCMEEELLTIEDRNRIAAAENNGNESGVRELLKRIVQKENWFSAFLNVLRQTGNNELVQELTGSDCSESNAEIENLSQVDGPQVEEQLLSTTVQPNLEKEVWGMENNSSESSFADSSVVSESDTSLAEGSVSCLDESLGHNSNMGSDSGTMGSDSDEENVAARASPEPELQLRPYQMEVAQPALEGKNIIICLPTGSGKTRVAVYIAKDHLDKKKKASEPGKVIVLVNKVLLVEQLFRKEFQPFLKKWYRVIGLSGDTQLKISFPEVVKSCDIIISTAQILENSLLNLENGEDAGVQLSDFSLIIIDECHHTNKEAVYNNIMRHYLMQKLKNNRLKKENKPVIPLPQILGLTASPGVGGATKQAKAEEHILKLCANLDAFTIKTVKENLDQLKNQIQEPCKKFAIADATREDPFKEKLLEIMTRIQTYCQMSPMSDFGTQPYEQWAIQMEKKAAKEGNRKERVCAEHLRKYNEALQINDTIRMIDAYTHLETFYNEEKDKKFAVIEDDSDEGGDDEYCDGDEDEDDLKKPLKLDETDRFLMTLFFENNKMLKRLAENPEYENEKLTKLRNTIMEQYTRTEESARGIIFTKTRQSAYALSQWITENEKFAEVGVKAHHLIGAGHSSEFKPMTQNEQKEVISKFRTGKINLLIATTVAEEGLDIKECNIVIRYGLVTNEIAMVQARGRARADESTYVLVAHSGSGVIEHETVNDFREKMMYKAIHCVQNMKPEEYAHKILELQMQSIMEKKMKTKRNIAKHYKNNPSLITFLCKNCSVLACSGEDIHVIEKMHHVNMTPEFKELYIVRENKALQKKCADYQINGEIICKCGQAWGTMMVHKGLDLPCLKIRNFVVVFKNNSTKKQYKKWVELPITFPNLDYSECCLFSDED

SEQ ID NO: 8942 - RNA, 3078 nt, Artificial Sequence
  MDA5__Homo_sapiens__CCDS2217.1
augucgaauggguauuccacagacgagaauuuccgcuaucucaucucgugcuucagggccagggugaaaauguacauccagguggagccugugcuggacuaccugaccuuucugccugcagaggugaaggagcagauucagaggacagucgccaccuccgggaacaugcaggcaguugaacugcugcugagcaccuuggagaagggagucuggcaccuugguuggacucgggaauucguggaggcccuccggagaaccggcagcccucuggccgcccgcuacaugaacccugagcucacggacuugcccucuccaucguuugagaacgcucaugaugaauaucuccaacugcugaaccuccuucagcccacucugguggacaagcuucuaguuagagacgucuuggauaagugcauggaggaggaacuguugacaauugaagacagaaaccggauugcugcugcagaaaacaauggaaaugaaucagguguaagagagcuacuaaaaaggauugugcagaaagaaaacugguucucugcauuucugaauguucuucgucaaacaggaaacaaugaacuuguccaagaguuaacaggcucugauugcucagaaagcaaugcagagauugagaauuuaucacaaguugaugguccucaaguggaagagcaacuucuuucaaccacaguucagccaaaucuggagaaggaggucuggggcauggagaauaacucaucagaaucaucuuuugcagauucuucuguaguuucagaaucagacacaaguuuggcagaaggaagugucagcugcuuagaugaaagucuuggacauaacagcaacaugggcagugauucaggcaccaugggaagugauucagaugaagagaauguggcagcaagagcauccccggagccagaacuccagcucaggccuuaccaaauggaaguugcccagccagccuuggaagggaagaauaucaucaucugccucccuacagggaguggaaaaaccagaguggcuguuuacauugccaaggaucacuuagacaagaagaaaaaagcaucugagccuggaaaaguuauaguucuugucaauaagguacugcuaguugaacagcucuuccgcaaggaguuccaaccauuuuugaagaaaugguaucguguuauuggauuaaguggugauacccaacugaaaauaucauuuccagaaguugucaaguccugugauauuauuaucaguacagcucaaauccuugaaaacucccucuuaaacuuggaaaauggagaagaugcugguguucaauugucagacuuuucccucauuaucauugaugaaugucaucacaccaacaaagaagcaguguauaauaacaucaugaggcauuauuugaugcagaaguugaaaaacaauagacucaagaaagaaaacaaaccagugauuccccuuccucagauacugggacuaacagcuucaccugguguuggaggggccacgaagcaagccaaagcugaagaacacauuuuaaaacuaugugccaaucuugaugcauuuacuauuaaaacuguuaaagaaaaccuugaucaacugaaaaaccaaauacaggagccaugcaagaaguuugccauugcagaugcaaccagagaagauccauuuaaagagaaacuucuagaaauaaugacaaggauucaaacuuauugucaaaugaguccaaugucagauuuuggaacucaacccuaugaacaaugggccauucaaauggaaaaaaaagcugcaaaagaaggaaaucgcaaagaacguguuugugcagaacauuugaggaaguacaaugaggcccuacaaauuaaugacacaauucgaaugauagaugcguauacucaucuugaaacuuucuauaaugaagagaaagauaagaaguuugcagucauagaagaugauagugaugaggguggugaugaugaguauugugauggugaugaagaugaggaugauuuaaagaaaccuuugaaacuggaugaaacagauagauuucucaugacuuuauuuuuugaaaacaauaaaauguugaaaaggcuggcugaaaacccagaauaugaaaaugaaaagcugaccaaauuaagaaauaccauaauggagcaauauacuaggacugaggaaucagcacgaggaauaaucuuuacaaaaacacgacagagugcauaugcgcuuucccaguggauuacugaaaaugaaaaauuugcugaaguaggagucaaagcccaccaucugauuggagcuggacacagcagugaguucaaacccaugacacagaaugaacaaaaagaagucauuaguaaauuucgcacuggaaaaauaaaucugcuuaucgcuaccacaguggcagaagaaggucuggauauuaaagaauguaacauuguuauccguuauggucucgucaccaaugaaauagccaugguccaggcccguggucgagccagagcugaugagagcaccuacguccugguugcucacagugguucaggaguuaucgaacaugagacaguuaaugauuuccgagagaagaugauguauaaagcuauacauuguguucaaaauaugaaaccagaggaguaugcucauaagauuuuggaauuacagaugcaaaguauaauggaaaagaaaaugaaaaccaagagaaauauugccaagcauuacaagaauaacccaucacuaauaacuuuccuuugcaaaaacugcagugugcuagccuguucuggggaagauauccauguaauugagaaaaugcaucacgucaauaugaccccagaauucaaggaacuuuacauuguaagagaaaacaaagcacugcaaaagaagugugccgacuaucaaauaaauggugaaaucaucugcaaauguggccaggcuuggggaacaaugauggugcacaaaggcuuagauuugccuugucucaaaauaaggaauuuuguagugguuuucaaaaauaauucaacaaagaaacaauacaaaaaguggguagaauuaccuaucacauuucccaaucuugacuauucagaaugcuguuuauuuagugaugaggauuag

SEQ ID NO: 8943 - RNA, 3078 nt, Artificial Sequence
  derived and/or modified sequence opt1 from MDA5__Homo_sapiens__CCDS2217.1
augagcaacggcuacuccaccgacgagaacuuccgcuaccugaucagcugcuuccgggcccgcgugaagauguacauccaggucgagcccgugcucgacuaccugaccuuccugccggccgaggugaaggagcagauccagcggacggucgcgaccuccgggaacaugcaggccguggagcuccugcugagcacccucgagaagggcguguggcaccugggguggacccgcgaguucgucgaggcccugcggcgcacgggcagcccccucgccgcccgguacaugaaccccgagcugaccgaccugcccuccccguccuucgagaacgcgcacgacgaguaccuccagcugcugaaccuccugcagcccacccugguggacaagcuccuggugcgcgacguccuggacaagugcauggaggaggagcuccugaccaucgaggaccggaaccgcaucgccgccgccgagaacaacgggaacgagagcggcgugcgggagcugcucaagcgcaucgugcagaaggagaacugguucuccgcguuccugaacguccugcggcagacgggcaacaacgagcucgugcaggagcugaccgggagcgacugcuccgagagcaacgccgagaucgagaaccugucccagguggacggcccccaggucgaggagcagcuccugagcaccaccgugcagcccaaccuggagaaggaggugugggggauggagaacaacuccagcgaguccagcuucgccgacuccagcgucgugagcgaguccgacacgagccucgccgagggcuccgugagcugccuggacgagucccuggggcacaacagcaacaugggcuccgacagcggcaccaugggguccgacagcgacgaggagaacgucgccgcgcgcgccuccccggagcccgagcuccagcugcggcccuaccagauggagguggcccagcccgcccuggagggcaagaacaucaucaucugccucccgaccgggagcggcaagacccgcguggccgucuacaucgcgaaggaccaccuggacaagaagaagaaggccuccgagcccggcaaggugaucguccuggugaacaaggugcuccuggucgagcagcuguuccggaaggaguuccagcccuuccucaagaagugguaccgcgugaucgggcugagcggcgacacgcagcugaagaucuccuuccccgagguggucaagagcugcgacaucaucaucuccaccgcccagauccucgagaacagccugcugaaccuggagaacggggaggacgccggcgugcagcucuccgacuucagccugaucaucaucgacgagugccaccacaccaacaaggaggccguguacaacaacaucaugcggcacuaccugaugcagaagcucaagaacaaccgccugaagaaggagaacaagccggucaucccccugccccagauccucgggcugaccgcgagccccggcgugggcggggccacgaagcaggccaaggccgaggagcacauccugaagcucugcgccaaccuggacgcguucaccaucaagaccgugaaggagaaccuggaccagcucaagaaccagauccaggagccgugcaagaaguucgccaucgccgacgccacccgggaggaccccuucaaggagaagcugcuggagaucaugacgcgcauccagaccuacugccagaugucccccaugagcgacuucggcacccagcccuacgagcagugggcgauccagauggagaagaaggccgccaaggaggggaaccgcaaggagcgggucugcgccgagcaccuccgcaaguacaacgaggcccugcagaucaacgacaccauccggaugaucgacgcguacacgcaccuggagaccuucuacaacgaggagaaggacaagaaguucgccgugaucgaggacgacuccgacgagggcggggacgacgaguacugcgacggcgacgaggacgaggacgaccucaagaagccgcugaagcuggacgagaccgaccgcuuccucaugacccuguucuucgagaacaacaagaugcugaagcggcucgccgagaaccccgaguacgagaacgagaagcugacgaagcugcgcaacaccaucauggagcaguacacccggaccgaggagagcgcccgcggcaucaucuucacgaagacccggcaguccgccuacgcgcucagccaguggaucaccgagaacgagaaguucgccgaggugggggucaaggcccaccaccugaucggcgccgggcacuccagcgaguucaagcccaugacccagaacgagcagaaggaggugaucuccaaguuccgcaccggcaagaucaaccugcucaucgccacgaccguggcggaggaggggcuggacaucaaggagugcaacaucgucauccgguacggccuggugaccaacgagaucgccauggugcaggcccgcggccgggcccgcgcggacgagagcaccuacguccucguggcccacuccgggagcggcgugaucgagcacgagacggucaacgacuuccgggagaagaugauguacaaggccauccacugcgugcagaacaugaagcccgaggaguacgcccacaagauccuggagcugcagaugcaguccaucauggagaagaagaugaagaccaagcgcaacaucgccaagcacuacaagaacaacccgagccucaucaccuuccugugcaagaacugcuccgugcuggcgugcagcggggaggacauccacgucaucgagaagaugcaccacgugaacaugacccccgaguucaaggagcucuacaucgugcgggagaacaaggcccugcagaagaagugcgccgacuaccagaucaacggcgagaucaucugcaagugcggccaggccugggggacgaugaugguccacaagggccuggaccuccccugccugaagauccgcaacuucgugguggucuucaagaacaacuccaccaagaagcaguacaagaaguggguggagcugccgaucaccuuccccaaccucgacuacagcgagugcugccuguucagcgacgaggacuga

SEQ ID NO: 8944 - RNA, 3078 nt, Artificial Sequence
  derived and/or modified sequence opt2 from MDA5__Homo_sapiens__CCDS2217.1
auguccaacggcuacuccaccgacgagaacuuccgcuaccucaucuccugcuuccgcgcccgcgucaagauguacauccaggucgagcccguccucgacuaccucaccuuccuccccgccgaggucaaggagcagauccagcgcaccgucgccaccuccggcaacaugcaggccgucgagcuccuccucuccacccucgagaagggcgucuggcaccucggcuggacccgcgaguucgucgaggcccuccgccgcaccggcuccccccucgccgcccgcuacaugaaccccgagcucaccgaccuccccucccccuccuucgagaacgcccacgacgaguaccuccagcuccucaaccuccuccagcccacccucgucgacaagcuccucguccgcgacguccucgacaagugcauggaggaggagcuccucaccaucgaggaccgcaaccgcaucgccgccgccgagaacaacggcaacgaguccggcguccgcgagcuccucaagcgcaucguccagaaggagaacugguucuccgccuuccucaacguccuccgccagaccggcaacaacgagcucguccaggagcucaccggcuccgacugcuccgaguccaacgccgagaucgagaaccucucccaggucgacggcccccaggucgaggagcagcuccucuccaccaccguccagcccaaccucgagaaggaggucuggggcauggagaacaacuccuccgaguccuccuucgccgacuccuccgucgucuccgaguccgacaccucccucgccgagggcuccgucuccugccucgacgagucccucggccacaacuccaacaugggcuccgacuccggcaccaugggcuccgacuccgacgaggagaacgucgccgcccgcgccucccccgagcccgagcuccagcuccgccccuaccagauggaggucgcccagcccgcccucgagggcaagaacaucaucaucugccuccccaccggcuccggcaagacccgcgucgccgucuacaucgccaaggaccaccucgacaagaagaagaaggccuccgagcccggcaaggucaucguccucgucaacaagguccuccucgucgagcagcucuuccgcaaggaguuccagcccuuccucaagaagugguaccgcgucaucggccucuccggcgacacccagcucaagaucuccuuccccgaggucgucaaguccugcgacaucaucaucuccaccgcccagauccucgagaacucccuccucaaccucgagaacggcgaggacgccggcguccagcucuccgacuucucccucaucaucaucgacgagugccaccacaccaacaaggaggccgucuacaacaacaucaugcgccacuaccucaugcagaagcucaagaacaaccgccucaagaaggagaacaagcccgucaucccccucccccagauccucggccucaccgccucccccggcgucggcggcgccaccaagcaggccaaggccgaggagcacauccucaagcucugcgccaaccucgacgccuucaccaucaagaccgucaaggagaaccucgaccagcucaagaaccagauccaggagcccugcaagaaguucgccaucgccgacgccacccgcgaggaccccuucaaggagaagcuccucgagaucaugacccgcauccagaccuacugccagaugucccccauguccgacuucggcacccagcccuacgagcagugggccauccagauggagaagaaggccgccaaggagggcaaccgcaaggagcgcgucugcgccgagcaccuccgcaaguacaacgaggcccuccagaucaacgacaccauccgcaugaucgacgccuacacccaccucgagaccuucuacaacgaggagaaggacaagaaguucgccgucaucgaggacgacuccgacgagggcggcgacgacgaguacugcgacggcgacgaggacgaggacgaccucaagaagccccucaagcucgacgagaccgaccgcuuccucaugacccucuucuucgagaacaacaagaugcucaagcgccucgccgagaaccccgaguacgagaacgagaagcucaccaagcuccgcaacaccaucauggagcaguacacccgcaccgaggaguccgcccgcggcaucaucuucaccaagacccgccaguccgccuacgcccucucccaguggaucaccgagaacgagaaguucgccgaggucggcgucaaggcccaccaccucaucggcgccggccacuccuccgaguucaagcccaugacccagaacgagcagaaggaggucaucuccaaguuccgcaccggcaagaucaaccuccucaucgccaccaccgucgccgaggagggccucgacaucaaggagugcaacaucgucauccgcuacggccucgucaccaacgagaucgccaugguccaggcccgcggccgcgcccgcgccgacgaguccaccuacguccucgucgcccacuccggcuccggcgucaucgagcacgagaccgucaacgacuuccgcgagaagaugauguacaaggccauccacugcguccagaacaugaagcccgaggaguacgcccacaagauccucgagcuccagaugcaguccaucauggagaagaagaugaagaccaagcgcaacaucgccaagcacuacaagaacaaccccucccucaucaccuuccucugcaagaacugcuccguccucgccugcuccggcgaggacauccacgucaucgagaagaugcaccacgucaacaugacccccgaguucaaggagcucuacaucguccgcgagaacaaggcccuccagaagaagugcgccgacuaccagaucaacggcgagaucaucugcaagugcggccaggccuggggcaccaugaugguccacaagggccucgaccuccccugccucaagauccgcaacuucgucgucgucuucaagaacaacuccaccaagaagcaguacaagaagugggucgagcuccccaucaccuuccccaaccucgacuacuccgagugcugccucuucuccgacgaggacuga

SEQ ID NO: 8945 - RNA, 3078 nt, Artificial Sequence
  derived and/or modified sequence opt3 from MDA5__Homo_sapiens__CCDS2217.1
augagcaacggcuacuccaccgacgagaauuucagauaucugaucucuugcuuuagggcccgggugaagauguacauucaggucgaacccguucucgauuaucuuacauuccugccugcugaggugaaagaacaaauacagcgcacuguagcaacgucagggaacaugcaggccguggaguuguuacugaguacccuagaaaagggagucuggcaccucgguuggacacgagaguuuguggaggcgcugcguagaacuggcagcccacuugcugccagguacaugaauccggaacugaccgacuugcccuccccuucuuucgagaacgcacaugaugaauaucuccagcugcugaaucucuuacaaccaacacugguugacaaacuuuuggugcgggauguccuggacaaguguauggaggaggaacuacucaccaucgaggaucgcaacagaauugccgcugcagaaaauaacgggaaugagucgggagugagggaacugcuuaaacggaucguacagaaggagaacugguuuucagccuuccugaauguuuugcgccagacuggcaacaaugagcucgugcaggaacugacagguagcgacugcagugaguccaacgcugaaauugagaauuuaucucaagucgaugggccccagguggaagaacagcugcucagcaccacggugcagccuaaccuugagaaggaagucuggggaauggagaacaauuccucagaaaguagcuuugccgacucuuccguugugucagagagcgauaccagucuggcggaaggcucuguauccuguuuggacgagagccuaggccacaacucgaauauggggucugauuccggaacuauggguucagacagugacgaggaaaacguggcagcccgagcuagcccagagcccgaacugcaacucagaccuuaccagauggaggucgcccagccagcacuggagggcaaaaauaucauaaucugccuuccgacaggguccggaaagacuaggguggcuguuuauauugccaaagaucaucuggacaagaaaaagaaggcgucugaacccggcaaagugaucgucuuggugaacaagguacuccugguugagcaauuauuccggaaagaauuucagccuuuccugaagaaaugguaccgugugauuggucuaagcggggauacccagcucaagaucucauuuccagaggucgugaaaaguugugacauaauuaucuccacagcccagauucuggaaaauagccuuuugaaccuggagaauggagaggaugcaggcguccaacucucugacuucucacugaucaucauugaugaaugccaccauaccaacaaggaggcuguguacaauaacauaaugcgccacuaucuuaugcagaagcugaaaaauaacagauugaagaaagaaaauaagcccguuaucccucucccacagauucugggcuuaacggccagucccggggugggaggugcuacuaaacaggccaaggcagaggaacacauccugaagcuaugugccaaccucgacgcuuuuacaauaaaaaccguaaaggagaaccuggaucaacuuaaaaaucagauucaggagccgugcaagaaauucgcgaucgcagacgccacuagggaagauccuuucaaggagaaguugcuggaaaucaugacacggauucagaccuacugucaaaugagccccauguccgacuuuggcacgcagccauaugagcagugggcuauccagauggagaaaaaggccgcaaaagaggggaaccgaaaggagcgcgucugcgccgaacaucucagaaaauacaaugaggcucugcaaauuaacgacaccauaaggaugaucgaugccuauacacacuuagaaacuuucuacaaugaggagaaggacaagaaauuugcagugauugaagaugacucugaugagggaggcgacgaugaauauugugacggugaugaggacgaagaugaccugaagaaaccucuuaaguuggaugagaccgaccgguuccucaugacacuguuuuucgagaacaauaaaaugcuaaagcgccuggcggaaaaccccgaguacgaaaaugagaaacucacuaagcugagaaacaccaucauggaacaguacacaaggaccgaggagucggcucgugggaucauuuuuacuaagacgcggcagagcgccuaugcacuuucccaauggauaacagaaaaugagaaauucgccgaaguuggcgugaaggcucaucacuugaucggagccggccacucaagugaguuuaaaccaaugacccagaacgaacagaaggaggucauuucuaaauuccgaacugggaagaucaaucuguuaauugcaaccacaguggcugaggaaggacucgacaucaaggagugcaacauaguaaucagauacggucuggugaccaaugaaauugccaugguucaggcgaggggccgcgcccgggcugaugagagcacuuauguccuuguggcacauuccgggucaggagugaucgagcacgaaacagucaacgacuuuagagagaaaaugauguacaaggccauucauugcguucaaaacaugaaacccgaagaguaugcucacaagauccuggaauugcagaugcagagcauaauggagaaaaagaugaagacgaaaaggaauauugccaagcauuacaaaaacaauccuucucucaucaccuuccuguguaagaacugcuccgugcuagcauguaguggcgaggauauucacgugaucgagaaaaugcaccauguaaauaugacuccagaauuuaaggaacuguauauaguccgcgagaacaaggcgcuccagaaaaagugcgccgacuaccaaaucaauggugaaauuaucuguaaaugcgggcaggcuuggggcacaaugauggugcacaagggacuggaucuuccguguuugaaaauucgaaacuucguuguggucuucaagaauaacagcaccaaaaagcaguacaagaaauggguggagcugcccaucacauuuccuaauuuagacuauucugagugcugucucuucuccgaugaagacuga

SEQ ID NO: 8946 - RNA, 3078 nt, Artificial Sequence
  derived and/or modified sequence opt4 from MDA5__Homo_sapiens__CCDS2217.1
augagcaacggcuacagcaccgacgagaacuucagauaccugaucagcugcuucagagccagagugaagauguacauccagguggagcccgugcuggacuaccugaccuuccugcccgccgaggugaaggagcagauccagagaaccguggccaccagcggcaacaugcaggccguggagcugcugcugagcacccuggagaagggcguguggcaccugggcuggaccagagaguucguggaggcccugagaagaaccggcagcccccuggccgccagauacaugaaccccgagcugaccgaccugcccagccccagcuucgagaacgcccacgacgaguaccugcagcugcugaaccugcugcagcccacccugguggacaagcugcuggugagagacgugcuggacaagugcauggaggaggagcugcugaccaucgaggacagaaacagaaucgccgccgccgagaacaacggcaacgagagcggcgugagagagcugcugaagagaaucgugcagaaggagaacugguucagcgccuuccugaacgugcugagacagaccggcaacaacgagcuggugcaggagcugaccggcagcgacugcagcgagagcaacgccgagaucgagaaccugagccagguggacggcccccagguggaggagcagcugcugagcaccaccgugcagcccaaccuggagaaggagguguggggcauggagaacaacagcagcgagagcagcuucgccgacagcagcguggugagcgagagcgacaccagccuggccgagggcagcgugagcugccuggacgagagccugggccacaacagcaacaugggcagcgacagcggcaccaugggcagcgacagcgacgaggagaacguggccgccagagccagccccgagcccgagcugcagcugagacccuaccagauggagguggcccagcccgcccuggagggcaagaacaucaucaucugccugcccaccggcagcggcaagaccagaguggccguguacaucgccaaggaccaccuggacaagaagaagaaggccagcgagcccggcaaggugaucgugcuggugaacaaggugcugcugguggagcagcuguucagaaaggaguuccagcccuuccugaagaagugguacagagugaucggccugagcggcgacacccagcugaagaucagcuuccccgagguggugaagagcugcgacaucaucaucagcaccgcccagauccuggagaacagccugcugaaccuggagaacggcgaggacgccggcgugcagcugagcgacuucagccugaucaucaucgacgagugccaccacaccaacaaggaggccguguacaacaacaucaugagacacuaccugaugcagaagcugaagaacaacagacugaagaaggagaacaagcccgugaucccccugccccagauccugggccugaccgccagccccggcgugggcggcgccaccaagcaggccaaggccgaggagcacauccugaagcugugcgccaaccuggacgccuucaccaucaagaccgugaaggagaaccuggaccagcugaagaaccagauccaggagcccugcaagaaguucgccaucgccgacgccaccagagaggaccccuucaaggagaagcugcuggagaucaugaccagaauccagaccuacugccagaugagccccaugagcgacuucggcacccagcccuacgagcagugggccauccagauggagaagaaggccgccaaggagggcaacagaaaggagagagugugcgccgagcaccugagaaaguacaacgaggcccugcagaucaacgacaccaucagaaugaucgacgccuacacccaccuggagaccuucuacaacgaggagaaggacaagaaguucgccgugaucgaggacgacagcgacgagggcggcgacgacgaguacugcgacggcgacgaggacgaggacgaccugaagaagccccugaagcuggacgagaccgacagauuccugaugacccuguucuucgagaacaacaagaugcugaagagacuggccgagaaccccgaguacgagaacgagaagcugaccaagcugagaaacaccaucauggagcaguacaccagaaccgaggagagcgccagaggcaucaucuucaccaagaccagacagagcgccuacgcccugagccaguggaucaccgagaacgagaaguucgccgaggugggcgugaaggcccaccaccugaucggcgccggccacagcagcgaguucaagcccaugacccagaacgagcagaaggaggugaucagcaaguucagaaccggcaagaucaaccugcugaucgccaccaccguggccgaggagggccuggacaucaaggagugcaacaucgugaucagauacggccuggugaccaacgagaucgccauggugcaggccagaggcagagccagagccgacgagagcaccuacgugcugguggcccacagcggcagcggcgugaucgagcacgagaccgugaacgacuucagagagaagaugauguacaaggccauccacugcgugcagaacaugaagcccgaggaguacgcccacaagauccuggagcugcagaugcagagcaucauggagaagaagaugaagaccaagagaaacaucgccaagcacuacaagaacaaccccagccugaucaccuuccugugcaagaacugcagcgugcuggccugcagcggcgaggacauccacgugaucgagaagaugcaccacgugaacaugacccccgaguucaaggagcuguacaucgugagagagaacaaggcccugcagaagaagugcgccgacuaccagaucaacggcgagaucaucugcaagugcggccaggccuggggcaccaugauggugcacaagggccuggaccugcccugccugaagaucagaaacuucguggugguguucaagaacaacagcaccaagaagcaguacaagaaguggguggagcugcccaucaccuuccccaaccuggacuacagcgagugcugccuguucagcgacgaggacuga

SEQ ID NO: 8947 - RNA, 3078 nt, Artificial Sequence
  derived and/or modified sequence opt5 from MDA5__Homo_sapiens__CCDS2217.1
augagcaacggcuacuccaccgacgagaauuucagauaucugaucucuugcuuucgggcccgcgugaagauguacauucaggucgaacccguucucgauuaucugacauuccuuccugcugaggugaaagaacaaauccagagaacgguggccaccagcgggaacaugcaggcggucgagcugcuccuguccacacuugaaaagggaguguggcaccugggcuggacccgggaguuuguugaggcucuccgcagaacagggucuccgcuggccgcccgguacaugaaucccgaacugaccgaccucccuagccccuccuucgagaacgcucaugaugaauaucugcagcuucugaaucuccugcaaccuacacuuguggacaaacugcucguccgcgaugugcuggacaaguguauggaggaggaacugcucaccauugaggauagaaaccggaucgccgcugccgaaaauaacggaaaugagucuggcguucgcgaacugcuuaaaagaauugugcagaaggagaacugguuuagcgcguuccugaauguccuccggcagacggggaacaaugagcuggugcaggaacuuaccggauccgacugcagcgagucuaacgccgaaaucgagaaucugucccaaguggauggcccccaggucgaagaacagcuccugagcacaaccguucagccuaaccuggagaaggaaguguggggcauggagaacaauucuuccgaaagcucuuuugcugacuccagcguggucuccgagucugauacaagccucgccgaaggguccgugagcugucuggacgagucucuuggacacaacuccaauaugggcagcgauucugggaccaugggaagcgacuccgacgaggaaaacguugcugcccgcgcgucuccggagcccgaacugcaacucagaccuuaccagauggagguggcccagcccgcucuggagggcaaaaauaucauuaucugccuuccuacggggagcggaaagacacgggucgccguguauauugcuaaagaucaucuggacaagaaaaagaaggccuccgaacccggcaaaguuaucgugcucgucaacaaggugcugcuggucgagcaacucuuccgcaaagaauuucagccguuccugaagaaaugguacagagugauuggccuuagcggggauacccagcugaagaucucuuuuccugagguugugaaauccugugacauuaucaucagcacagcccagauucucgaaaauucucugcugaaccuugagaauggagaggaugcuggcguccaacucuccgacuucagccugaucauuaucgaugaaugccaccauaccaacaaggaggcgguguacaauaacauuaugcggcacuaucugaugcagaagcucaaaaauaacagacugaagaaagaaaauaagcccguuaucccucuuccccagauccuggggcucaccgccucccccggagugggcggggcuacaaaacaggccaaggccgaggaacacauucugaagcugugugcuaaccuugacgccuuuacgaucaaaaccgucaaggagaaccucgaucaacugaaaaaucagauucaggagccuugcaagaaauucgcgaucgcugacgccacacgcgaagauccguucaaggagaagcugcucgaaauuaugacccggauccagacauacugucaaaugucucccaugagcgacuuuggaacccagccuuaugagcagugggccauccagauggagaaaaaggcugccaaagagggcaacagaaaggagcgcgugugcgcugaacaucugcggaaauacaaugaggcccuucaaauuaacgacacgaucagaaugauugaugcguauacacaccuggaaaccuucuacaaugaggagaaggacaagaaauuugccgugaucgaagaugacuccgaugagggcggggacgaugaauauugugacggagaugaggacgaagaugaccucaagaaaccccugaagcuggaugagaccgaccgcuuccuuaugacacucuuuuucgagaacaauaaaaugcugaagcggcuggcugaaaacccugaguacgaaaaugagaaacucaccaagcugagaaacacaauuauggaacaguacacgcgcaccgaggagucugcccggggcaucauuuuuacaaagaccagacagagcgcuuaugcccuuucccaauggaucacagaaaaugagaaauucgcggaaguuggggucaaggcccaucaccugaucggagcuggccacagcucugaguuuaaacccaugacccagaacgaacagaaggaggugauuuccaaauuccgcacggggaagaucaaucuccugauugccaccacaguggcugaggaaggccuggacaucaaggagugcaacauugucauccgguacggacuugugaccaaugaaaucgccaugguucaggccagaggccgggcucgcgcggaugagagcacauaugugcucgucgcccauucuggguccggagugauugagcacgaaaccguuaacgacuuuagagagaaaaugauguacaaggcuauccauugcgugcaaaacaugaaaccggaagaguaugcccacaagauucuggaacugcagaugcagagcaucauggagaaaaagaugaagacgaaacggaauauugccaagcauuacaaaaacaauccuucucucaucacauuccuguguaagaacugcagcguccuugcuuguuccggcgaggauauccacgugauugagaaaaugcaccauguuaauaugacccccgaauuuaaggaacuguauaucgugagagagaacaaggcccuccagaaaaagugcgcggacuaccaaauuaauggggaaaucauuuguaaaugcggacaggcuuggggcacaaugaugguccacaaggggcuggaucugccuugucuuaaaauccgcaacuucgugguggucuucaagaauaacagcaccaaaaagcaguacaagaaauggguugagcugcccaucaccuuuccuaaucucgacuauucugagugcugucuguucuccgaugaagacuga

SEQ ID NO: 8948 - protein, 364 aa, Artificial Sequence
  MK11__Homo_sapiens__Q15759
MSGPRAGFYRQELNKTVWEVPQRLQGLRPVGSGAYGSVCSAYDARLRQKVAVKKLSRPFQSLIHARRTYRELRLLKHLKHENVIGLLDVFTPATSIEDFSEVYLVTTLMGADLNNIVKCQALSDEHVQFLVYQLLRGLKYIHSAGIIHRDLKPSNVAVNEDCELRILDFGLARQADEEMTGYVATRWYRAPEIMLNWMHYNQTVDIWSVGCIMAELLQGKALFPGSDYIDQLKRIMEVVGTPSPEVLAKISSEHARTYIQSLPPMPQKDLSSIFRGANPLAIDLLGRMLVLDSDQRVSAAEALAHAYFSQYHDPEDEPEAEPYDESVEAKERTLEEWKELTYQEVLSFKPPEPPKPPGSLEIEQ

SEQ ID NO: 8949 - RNA, 1095 nt, Artificial Sequence
  MK11__Homo_sapiens__AAC12714
augucgggcccucgcgccggcuucuaccggcaggagcugaacaagaccgugugggaggugccgcagcggcugcaggggcugcgcccggugggcuccggcgccuacggcuccgucuguucggccuacgacgcccggcugcgccagaagguggcggugaagaagcugucgcgccccuuccagucgcugauccacgcgcgcagaacguaccgggagcugcggcugcucaagcaccugaagcacgagaacgucaucgggcuucuggacgucuucacgccggccacguccaucgaggacuucagcgaaguguacuuggugaccacccugaugggcgccgaccugaacaacaucgucaagugccaggcgcugagcgacgagcacguucaauuccugguuuaccagcugcugcgcgggcugaaguacauccacucggccgggaucauccaccgggaccugaagcccagcaacguggcugugaacgaggacugugagcucaggauccuggauuucgggcuggcgcgccaggcggacgaggagaugaccggcuauguggccacgcgcugguaccgggcaccugagaucaugcucaacuggaugcauuacaaccaaacaguggauaucugguccgugggcugcaucauggcugagcugcuccagggcaaggcccucuucccgggaagcgacuacauugaccagcugaagcgcaucauggaaguggugggcacacccagcccugagguucuggcaaaaaucuccucggaacacgcccggacauauauccagucccugccccccaugccccagaaggaccugagcagcaucuuccguggagccaacccccuggccauagaccuccuuggaaggaugcuggugcuggacagugaccagagggucagugcagcugaggcacuggcccacgccuacuucagccaguaccacgaccccgaggaugagccagaggccgagccauaugaugagagcguugaggccaaggagcgcacgcuggaggaguggaaggagcucacuuaccaggaaguccuuagcuucaagcccccagagccaccgaagccaccuggcagccuggagauugagcaguga

SEQ ID NO: 8950 - RNA, 1095 nt, Artificial Sequence
  derived and/or modified sequence opt1 from MK11__Homo_sapiens__AAC12714
augagcggcccccgcgccggguucuaccggcaggagcugaacaagaccgugugggaggucccccagcgccuccagggccugcggcccgugggguccggcgccuacgggagcgugugcuccgcguacgacgcccgccugcggcagaaggucgccgugaagaagcucagccgccccuuccagucccugauccacgcccggcgcaccuaccgggagcugcgccuccugaagcaccugaagcacgagaacgugaucggccuccuggacgucuucacgcccgccaccagcaucgaggacuucuccgagguguaccuggugaccacccucaugggcgcggaccugaacaacaucgucaagugccaggcccugagcgacgagcacgugcaguuccucguguaccagcugcugcgggggcucaaguacauccacuccgccggcaucauccaccgcgaccugaagccgagcaacgucgccgugaacgaggacugcgagcugcggauccucgacuucgggcuggcgcgccaggccgacgaggagaugacgggcuacguggccacccggugguaccgcgcccccgagaucaugcugaacuggaugcacuacaaccagaccgucgacaucugguccguggggugcaucauggccgagcuccugcagggcaaggcgcuguuccccggcagcgacuacaucgaccagcucaagcggaucauggagguggucgggacccccuccccggaggugcuggccaagaucagcuccgagcacgcccgcacguacauccagagccugccgcccaugccccagaaggaccucuccagcaucuuccggggcgccaacccccuggccaucgaccugcucgggcgcaugcuggugcuggacuccgaccagcgggucagcgcggccgaggcccucgcccacgccuacuucagccaguaccacgaccccgaggacgagcccgaggcggagcccuacgacgaguccguggaggccaaggagcgcacccuggaggaguggaaggagcugaccuaccaggaggugcucagcuucaagccgcccgagccgcccaagccgcccggcucccuggagaucgagcaguga

SEQ ID NO: 8951 - RNA, 1095 nt, Artificial Sequence
  derived and/or modified sequence opt2 from MK11__Homo_sapiens__AAC12714
auguccggcccccgcgccggcuucuaccgccaggagcucaacaagaccgucugggaggucccccagcgccuccagggccuccgccccgucggcuccggcgccuacggcuccgucugcuccgccuacgacgcccgccuccgccagaaggucgccgucaagaagcucucccgccccuuccagucccucauccacgcccgccgcaccuaccgcgagcuccgccuccucaagcaccucaagcacgagaacgucaucggccuccucgacgucuucacccccgccaccuccaucgaggacuucuccgaggucuaccucgucaccacccucaugggcgccgaccucaacaacaucgucaagugccaggcccucuccgacgagcacguccaguuccucgucuaccagcuccuccgcggccucaaguacauccacuccgccggcaucauccaccgcgaccucaagcccuccaacgucgccgucaacgaggacugcgagcuccgcauccucgacuucggccucgcccgccaggccgacgaggagaugaccggcuacgucgccacccgcugguaccgcgcccccgagaucaugcucaacuggaugcacuacaaccagaccgucgacaucugguccgucggcugcaucauggccgagcuccuccagggcaaggcccucuuccccggcuccgacuacaucgaccagcucaagcgcaucauggaggucgucggcacccccucccccgagguccucgccaagaucuccuccgagcacgcccgcaccuacauccagucccucccccccaugccccagaaggaccucuccuccaucuuccgcggcgccaacccccucgccaucgaccuccucggccgcaugcucguccucgacuccgaccagcgcgucuccgccgccgaggcccucgcccacgccuacuucucccaguaccacgaccccgaggacgagcccgaggccgagcccuacgacgaguccgucgaggccaaggagcgcacccucgaggaguggaaggagcucaccuaccaggagguccucuccuucaagccccccgagccccccaagccccccggcucccucgagaucgagcaguga

SEQ ID NO: 8952 - RNA, 1095 nt, Artificial Sequence
  derived and/or modified sequence opt3 from MK11__Homo_sapiens__AAC12714
augagcggccccagagccggguucuacaggcaggagcugaacaagaccgugugggaagucccucaacggcuccagggacuucgcccaguugguuccggcgcuuaugggucugugugcucagcauacgacgcccgacugcgucagaaaguagcggugaagaaauugaguagaccguuucagagcuuaauccacgcuaggcggacauaucgcgagcugagacuacucaagcaucugaaacacgaaaaugucauuggacuucuggauguguucacucccgccacguccauagaggacuuuucugaaguuuacuuggugaccacacucaugggcgcagaucugaacaauaucgucaagugucaagcccugucggacgagcaugugcaguuccucguauaucaguuacugaggggucuuaaguacauucacucagcugggaucauucaucgggauuugaaaccuagcaacguugcagugaaugaggacugcgaacugcgcauccuagauuuuggacucgcccgacaggcugacgaggaaaugacuggcuaugucgccaccagaugguacagggcgccagagauaaugcugaacuggaugcacuacaaucaaacaguggauaucuggagugugggcuguauuauggcagagcuucugcaggggaaggccuuguuccccggauccgacuauaucgaucagcucaaacggauuauggaagucguugguaccccuucuccagaggugcuggcuaagaucagcuccgaacacgcccguacuuacauacagucauuacccccuaugccacaaaaagaccugaguagcauuuuucgcggcgcaaacccgcucgcuaucgaucuucuggggagaauguugguacuagacucugaccagaggguguccgccgcggaggcccuggcacaugcuuauuucucacaguaccacgaucccgaagacgagccugaggccgaaccauaugaugagagcgucgaagcuaaggagcggacacucgaagaguggaaggagcugaccuaccaagaagugcuuaguuuuaaacccccugagccacccaagccgccuggaucucuggaaauugagcaguga

SEQ ID NO: 8953 - RNA, 1095 nt, Artificial Sequence
  derived and/or modified sequence opt4 from MK11__Homo_sapiens__AAC12714
augagcggccccagagccggcuucuacagacaggagcugaacaagaccgugugggaggugccccagagacugcagggccugagacccgugggcagcggcgccuacggcagcgugugcagcgccuacgacgccagacugagacagaagguggccgugaagaagcugagcagacccuuccagagccugauccacgccagaagaaccuacagagagcugagacugcugaagcaccugaagcacgagaacgugaucggccugcuggacguguucacccccgccaccagcaucgaggacuucagcgagguguaccuggugaccacccugaugggcgccgaccugaacaacaucgugaagugccaggcccugagcgacgagcacgugcaguuccugguguaccagcugcugagaggccugaaguacauccacagcgccggcaucauccacagagaccugaagcccagcaacguggccgugaacgaggacugcgagcugagaauccuggacuucggccuggccagacaggccgacgaggagaugaccggcuacguggccaccagaugguacagagcccccgagaucaugcugaacuggaugcacuacaaccagaccguggacaucuggagcgugggcugcaucauggccgagcugcugcagggcaaggcccuguuccccggcagcgacuacaucgaccagcugaagagaaucauggagguggugggcacccccagccccgaggugcuggccaagaucagcagcgagcacgccagaaccuacauccagagccugccccccaugccccagaaggaccugagcagcaucuucagaggcgccaacccccuggccaucgaccugcugggcagaaugcuggugcuggacagcgaccagagagugagcgccgccgaggcccuggcccacgccuacuucagccaguaccacgaccccgaggacgagcccgaggccgagcccuacgacgagagcguggaggccaaggagagaacccuggaggaguggaaggagcugaccuaccaggaggugcugagcuucaagccccccgagccccccaagccccccggcagccuggagaucgagcaguga

SEQ ID NO: 8954 - RNA, 1095 nt, Artificial Sequence
  derived and/or modified sequence opt5 from MK11__Homo_sapiens__AAC12714
augagcggccccagagccggguucuaccggcaggagcugaacaagaccgugugggaagucccucaacgccuccagggacugagaccgguuggcuccggggcuuauggaucugugugcagcgccuacgacgcgcggcuucgccagaaaguggcugucaagaaacuguccagacccuuucagucucucauccacgcccggcgcacauauagagagcugcggcuucugaagcaucucaaacacgaaaaugugauuggccugcuggauguuuucacgccugccaccagcaucgaggacuuuuccgaaguguaccucgucacaacccugaugggggcugaucuuaacaauauugugaagugucaagcccugucugacgagcauguucaguuccucguguaucagcugcuucgcggacugaaguacauccacagcgcuggcauuauccauagagaucucaaacccuccaacgucgccgugaaugaggacugcgaacugcggauccuggauuuuggccucgcgcgccaggccgacgaggaaaugacaggguauguggcuaccagaugguaccgggccccugagauuaugcugaacuggaugcacuacaaucaaacagucgauaucuggagcguuggauguauuauggcugagcuucugcagggcaaggcccucuuccccgggucugacuauaucgaucagcugaaacgcauuauggaaguggugggaaccccuuccccggagguccuugcgaagaucagcucugaacacgccagaacguacauucagucccugcccccuaugccccaaaaagaccucagcucuaucuuucggggcgcuaacccucuggccaucgaucugcucgggagaaugcuggugcuugacuccgaccagcgcguuagcgcugccgaggcccuggcucaugcguauuucucccaguaccacgaucccgaagacgagccggaggccgaaccuuaugaugagucuguggaagcuaaggagcggacccucgaagaguggaaggagcugacauaccaagaaguccuuagcuuuaaacccccugagccucccaagcccccgggaucccuggaaauugagcaguga

SEQ ID NO: 8955 - protein, 367 aa, Artificial Sequence
  MK12__Homo_sapiens__P53778
MSSPPPARSGFYRQEVTKTAWEVRAVYRDLQPVGSGAYGAVCSAVDGRTGAKVAIKKLYRPFQSELFAKRAYRELRLLKHMRHENVIGLLDVFTPDETLDDFTDFYLVMPFMGTDLGKLMKHEKLGEDRIQFLVYQMLKGLRYIHAAGIIHRDLKPGNLAVNEDCELKILDFGLARQADSEMTGYVVTRWYRAPEVILNWMRYTQTVDIWSVGCIMAEMITGKTLFKGSDHLDQLKEIMKVTGTPPAEFVQRLQSDEAKNYMKGLPELEKKDFASILTNASPLAVNLLEKMLVLDAEQRVTAGEALAHPYFESLHDTEDEPQVQKYDDSFDDVDRTLDEWKRVTYKEVLSFKPPRQLGARVSKETPL

SEQ ID NO: 8956 - RNA, 1104 nt, Artificial Sequence
  MK12__Homo_sapiens__AAH15741
augagcucuccgccgcccgcccgcaguggcuuuuaccgccaggaggugaccaagacggccugggaggugcgcgccguguaccgggaccugcagcccgugggcucgggcgccuacggcgcggugugcucggccguggacggccgcaccggcgcuaagguggccaucaagaagcuguaucggcccuuccaguccgagcuguucgccaagcgcgccuaccgcgagcugcgccugcucaagcacaugcgccacgagaacgugaucgggcugcuggacguauucacuccugaugagacccuggaugacuucacggacuuuuaccuggugaugccguucaugggcaccgaccugggcaagcucaugaaacaugagaagcuaggcgaggaccggauccaguuccucguguaccagaugcugaaggggcugagguauauccacgcugccggcaucauccacagagaccugaagcccggcaaccuggcugugaacgaagacugugagcugaagauccuggacuucggccuggccaggcaggcagacagugagaugacuggguacguggugacccggugguaccgggcucccgaggucaucuugaauuggaugcgcuacacgcagacgguggacaucugguccgugggcugcaucauggcggagaugaucacaggcaagacgcuguucaagggcagcgaccaccuggaccagcugaaggagaucaugaaggugacggggacgccuccggcugaguuugugcagcggcugcagagcgaugaggccaagaacuacaugaagggccuccccgaauuggagaagaaggauuuugccucuauccugaccaaugcaagcccucuggcugugaaccuccuggagaagaugcuggugcuggacgcggagcagcgggugacggcaggcgaggcgcuggcccaucccuacuucgagucccugcacgacacggaagaugagccccagguccagaaguaugaugacuccuuugacgacguugaccgcacacuggaugaauggaagcguguuacuuacaaagaggugcucagcuucaagccuccccggcagcugggggccagggucuccaaggagacgccucuguga

SEQ ID NO: 8957 - RNA, 1104 nt, Artificial Sequence
  derived and/or modified sequence opt1 from MK12__Homo_sapiens__AAH15741
augagcagcccgccgcccgcccgcuccggcuucuaccggcaggaggugaccaagaccgccugggagguccgcgcgguguaccgggaccugcagcccgugggguccggcgccuacggggccgucugcagcgccguggacggccgcaccggggccaagguggcgaucaagaagcucuaccggcccuuccaguccgagcuguucgccaagcgcgccuaccgggagcugcgccuccugaagcacaugcggcacgagaacgucaucggccugcucgacguguucacccccgacgagacccuggacgacuucaccgacuucuaccuggugaugcccuucaugggcacggaccucgggaagcugaugaagcacgagaagcugggcgaggaccgcauccaguuccucgucuaccagaugcugaaggggcugcgguacauccacgccgcgggcaucauccaccgcgaccucaagcccgggaaccuggccgugaacgaggacugcgagcugaagauccucgacuucggccuggcccggcaggccgacagcgagaugaccggcuacguggucacccgcugguaccgggcccccgaggugauccugaacuggaugcgcuacacccagacgguggacaucugguccgucgggugcaucauggcggagaugaucaccggcaagacccucuucaaggggagcgaccaccuggaccagcugaaggagaucaugaaggugaccggcacgccgcccgccgaguucgugcagcggcuccaguccgacgaggccaagaacuacaugaagggccugcccgagcuggagaagaaggacuucgccagcauccucaccaacgccagcccccuggcggucaaccugcucgagaagaugcuggugcuggacgccgagcagcgcgugaccgccggggaggcccucgcccacccguacuucgagucccugcacgacaccgaggacgagccccagguccagaaguacgacgacuccuucgacgacguggaccggacgcuggacgaguggaagcgcgugaccuacaaggagguccucagcuucaagccgccccggcagcugggcgcgcgcguguccaaggagacgccccuguga

SEQ ID NO: 8958 - RNA, 1104 nt, Artificial Sequence
  derived and/or modified sequence opt2 from MK12__Homo_sapiens__AAH15741
auguccucccccccccccgcccgcuccggcuucuaccgccaggaggucaccaagaccgccugggagguccgcgccgucuaccgcgaccuccagcccgucggcuccggcgccuacggcgccgucugcuccgccgucgacggccgcaccggcgccaaggucgccaucaagaagcucuaccgccccuuccaguccgagcucuucgccaagcgcgccuaccgcgagcuccgccuccucaagcacaugcgccacgagaacgucaucggccuccucgacgucuucacccccgacgagacccucgacgacuucaccgacuucuaccucgucaugcccuucaugggcaccgaccucggcaagcucaugaagcacgagaagcucggcgaggaccgcauccaguuccucgucuaccagaugcucaagggccuccgcuacauccacgccgccggcaucauccaccgcgaccucaagcccggcaaccucgccgucaacgaggacugcgagcucaagauccucgacuucggccucgcccgccaggccgacuccgagaugaccggcuacgucgucacccgcugguaccgcgcccccgaggucauccucaacuggaugcgcuacacccagaccgucgacaucugguccgucggcugcaucauggccgagaugaucaccggcaagacccucuucaagggcuccgaccaccucgaccagcucaaggagaucaugaaggucaccggcaccccccccgccgaguucguccagcgccuccaguccgacgaggccaagaacuacaugaagggccuccccgagcucgagaagaaggacuucgccuccauccucaccaacgccuccccccucgccgucaaccuccucgagaagaugcucguccucgacgccgagcagcgcgucaccgccggcgaggcccucgcccaccccuacuucgagucccuccacgacaccgaggacgagccccagguccagaaguacgacgacuccuucgacgacgucgaccgcacccucgacgaguggaagcgcgucaccuacaaggagguccucuccuucaagcccccccgccagcucggcgcccgcgucuccaaggagaccccccucuga

SEQ ID NO: 8959 - RNA, 1104 nt, Artificial Sequence
  derived and/or modified sequence opt3 from MK12__Homo_sapiens__AAH15741
augagcucucccccuccagccagauccggcuucuacaggcaggaggugaccaagaccgcuugggaaguccgggcaguuuaucgcgaccugcaaccgguggggucaggagccuacggugcgguaugcagugcuguggauggccgaacuggggccaaagucgcaaucaagaaacucuaucgucccuuucagagcgagcuuuucgccaagagagcuuacagggaacugcgguuguuaaaacacaugcgccaugagaacgugauuggacugcuagacguuuuuacgccugaugaaacccucgacgauuucacagacuuuuaucuggugaugccauucaugggcacugaucuugguaagcugaugaagcacgagaaauugggggaggacagaauacaguuucucgucuaccagaugcugaagggacugagguauauccaugcagccggcauuauccaccgggaucucaaacccggcaauuuagcugugaacgaagacugugagcugaagauucuugauuucggguuggcccgccaagcggacuccgaaaugaccggauacguaguuacacgaugguacagagcaccugaggugauccugaauuggaugagguauacccagacugucgauauauggucuguggguugcaucauggccgagaugauuacaggcaaaacccuauuuaaggggucggaccaucucgaccagcugaaggaaaucaugaaagugacgggaacuccacccgcugaguucguccagcggcuucaaucagaugaagccaagaacuacaugaaaggccugccugaguuggaaaagaaagacuuugcaagcauucucaccaaugcuaguccacuggccguuaacuuacuggagaagaugcucgugcuugaugcggagcagcguguaacagccggugaagcacuggcucacccguauuucgaguccuugcacgacacugaagaugagccccaggugcagaaauacgacgauucuuuugacgaugucgaccgcacccuagaugaauggaagagagugacauauaaggagguucugagcuucaaaccuccaaggcaacucggggcccggguguccaaggagacaccccuguga

SEQ ID NO: 8960 - RNA, 1104 nt, Artificial Sequence
  derived and/or modified sequence opt4 from MK12__Homo_sapiens__AAH15741
augagcagccccccccccgccagaagcggcuucuacagacaggaggugaccaagaccgccugggaggugagagccguguacagagaccugcagcccgugggcagcggcgccuacggcgccgugugcagcgccguggacggcagaaccggcgccaagguggccaucaagaagcuguacagacccuuccagagcgagcuguucgccaagagagccuacagagagcugagacugcugaagcacaugagacacgagaacgugaucggccugcuggacguguucacccccgacgagacccuggacgacuucaccgacuucuaccuggugaugcccuucaugggcaccgaccugggcaagcugaugaagcacgagaagcugggcgaggacagaauccaguuccugguguaccagaugcugaagggccugagauacauccacgccgccggcaucauccacagagaccugaagcccggcaaccuggccgugaacgaggacugcgagcugaagauccuggacuucggccuggccagacaggccgacagcgagaugaccggcuacguggugaccagaugguacagagcccccgaggugauccugaacuggaugagauacacccagaccguggacaucuggagcgugggcugcaucauggccgagaugaucaccggcaagacccuguucaagggcagcgaccaccuggaccagcugaaggagaucaugaaggugaccggcaccccccccgccgaguucgugcagagacugcagagcgacgaggccaagaacuacaugaagggccugcccgagcuggagaagaaggacuucgccagcauccugaccaacgccagcccccuggccgugaaccugcuggagaagaugcuggugcuggacgccgagcagagagugaccgccggcgaggcccuggcccaccccuacuucgagagccugcacgacaccgaggacgagccccaggugcagaaguacgacgacagcuucgacgacguggacagaacccuggacgaguggaagagagugaccuacaaggaggugcugagcuucaagccccccagacagcugggcgccagagugagcaaggagaccccccuguga

SEQ ID NO: 8961 - RNA, 1104 nt, Artificial Sequence
  derived and/or modified sequence opt5 from MK12__Homo_sapiens__AAH15741
augagcucucccccuccggccagauccggcuucuaccggcaggaggugaccaagaccgcuugggaaguccgcgccguuuauagagaccugcaacccguggggagcggagcguacggcgcugugugcuccgccgucgaugggcggacgggagccaaaguggcuaucaagaaacucuaucgcccuuuucagucugagcuguucgccaagagagcuuaccgggaacuucgccugcucaaacacaugagacaugagaacguuauuggccugcuugacguguuuacccccgaugaaacacuggacgauuucaccgacuuuuaucucgucaugccuuucauggggacagaucugggaaagcugaugaagcacgagaaacucggcgaggaccggauccaguuucugguguaccagaugcuuaagggccugcgcuauauucaugccgcggggaucauucacagagaucucaaacccggaaaucuggccguuaacgaagacugugagcuuaagauccuggauuucggccucgcucggcaagccgacagcgaaaugaccggguacguggucacacgcugguacagagcuccugaggugauccugaauuggaugcgguauacccagacgguggauauuugguccgucggaugcaucauggccgagaugauuaccggcaaaacacuguuuaaggggucugaccaucucgaccagcugaaggaaaucaugaaaguuaccggaacaccgcccgcggaguucgugcagcgccuucaaagcgaugaagccaagaacuacaugaaaggccugccugagcucgaaaagaaagacuuugcuuccauucugaccaaugccagcccccuugcugugaaccugcucgagaagaugcugguccuggaugccgagcagagagugacggccggcgaagcucucgcgcacccuuauuucgagucucugcacgacacagaagaugagccccagguucagaaauacgacgauuccuuugacgauguggaccggacccuugaugaauggaagagagucacauauaaggaggugcugagcuucaaaccgccucgccaacucggggcccggguuucuaaggagacaccccuguga

SEQ ID NO: 8962 - protein, 365 aa, Artificial Sequence
  MK13__Homo_sapiens__O15264
MSLIRKKGFYKQDVNKTAWELPKTYVSPTHVGSGAYGSVCSAIDKRSGEKVAIKKLSRPFQSEIFAKRAYRELLLLKHMQHENVIGLLDVFTPASSLRNFYDFYLVMPFMQTDLQKIMGMEFSEEKIQYLVYQMLKGLKYIHSAGVVHRDLKPGNLAVNEDCELKILDFGLARHADAEMTGYVVTRWYRAPEVILSWMHYNQTVDIWSVGCIMAEMLTGKTLFKGKDYLDQLTQILKVTGVPGTEFVQKLNDKAAKSYIQSLPQTPRKDFTQLFPRASPQAADLLEKMLELDVDKRLTAAQALTHPFFEPFRDPEEETEAQQPFDDSLEHEKLTVDEWKQHIYKEIVNFSPIARKDSRRRSGMKL

SEQ ID NO: 8963 - RNA, 1098 nt, Artificial Sequence
  MK13__Homo_sapiens__AAB87639
augagccucauccggaaaaagggcuucuacaagcaggacgucaacaagacagccugggagcugcccaagaccuacguguccccgacgcacgucggcagcggggccuauggcuccgugugcucggccaucgacaagcggucaggggagaagguggccaucaagaagcugagccgacccuuucaguccgagaucuucgccaagcgcgccuaccgggagcugcugcugcugaagcacaugcagcaugagaacgucauugggcuccuggaugucuucaccccagccuccucccugcgcaacuucuaugacuucuaccuggugaugcccuucaugcagacggaucugcagaagaucauggggauggaguucagugaggagaagauccaguaccugguguaucagaugcucaaaggccuuaaguacauccacucugcuggggucgugcacagggaccugaagccaggcaaccuggcugugaaugaggacugugaacugaagauucuggauuuugggcuggcgcgacaugcagacgccgagaugacuggcuacguggugacccgcugguaccgagcccccgaggugauccucagcuggaugcacuacaaccagacaguggacaucuggucugugggcuguaucauggcagagaugcugacagggaaaacucuguucaaggggaaagauuaccuggaccagcugacccagauccugaaagugaccggggugccuggcacggaguuugugcagaagcugaacgacaaagcggccaaauccuacauccagucccugccacagacccccaggaaggauuucacucagcuguucccacgggccagcccccaggcugcggaccugcuggagaagaugcuggagcuagacguggacaagcgccugacggccgcgcaggcccucacccaucccuuuuuugaacccuuccgggacccugaggaagagacggaggcccagcagccguuugaugauuccuuagaacacgagaaacucacaguggaugaauggaagcagcacaucuacaaggagauugugaacuucagccccauugcccggaaggacucacggcgccggaguggcaugaagcuguag

SEQ ID NO: 8964 - RNA, 1098 nt, Artificial Sequence
  derived and/or modified sequence opt1 from MK13__Homo_sapiens__AAB87639
augagccugauccgcaagaagggcuucuacaagcaggacgugaacaagaccgccugggagcuccccaagaccuacgucuccccgacgcacguggggagcggcgccuacggguccgugugcagcgcgaucgacaagcgguccggcgagaaggucgccaucaagaagcugagccgccccuuccaguccgagaucuucgccaagcgggccuaccgcgagcugcuccugcugaagcacaugcagcacgagaacgugaucgggcuccuggacguguucacccccgccagcucccugcggaacuucuacgacuucuaccucgucaugcccuucaugcagaccgaccugcagaagaucaugggcauggaguucagcgaggagaagauccaguaccugguguaccagaugcucaagggccugaaguacauccacuccgcgggggugguccaccgcgaccugaagccgggcaaccucgccgugaacgaggacugcgagcugaagauccuggacuucgggcucgcccggcacgccgacgcggagaugaccggcuacguggucacgcgcugguaccgggcccccgaggugauccugagcuggaugcacuacaaccagaccguggacaucugguccgucgggugcaucauggccgagaugcugaccggcaagacccucuucaagggcaaggacuaccuggaccagcugacgcagauccucaaggugaccggggugcccggcaccgaguucguccagaagcugaacgacaaggccgccaagagcuacauccagucccugccccagaccccgcgcaaggacuucacgcagcuguucccccgggcgagcccccaggccgccgaccuccuggagaagaugcucgagcuggacguggacaagcgccugaccgccgcccaggcgcucacccaccccuucuucgagccguuccgggaccccgaggaggagaccgaggcccagcagcccuucgacgacucccuggagcacgagaagcugacgguggacgaguggaagcagcacaucuacaaggagaucgucaacuucagccccaucgcccgcaaggacucccggcgccggagcgggaugaagcucuga

SEQ ID NO: 8965 - RNA, 1098 nt, Artificial Sequence
  derived and/or modified sequence opt2 from MK13__Homo_sapiens__AAB87639
augucccucauccgcaagaagggcuucuacaagcaggacgucaacaagaccgccugggagcuccccaagaccuacgucucccccacccacgucggcuccggcgccuacggcuccgucugcuccgccaucgacaagcgcuccggcgagaaggucgccaucaagaagcucucccgccccuuccaguccgagaucuucgccaagcgcgccuaccgcgagcuccuccuccucaagcacaugcagcacgagaacgucaucggccuccucgacgucuucacccccgccuccucccuccgcaacuucuacgacuucuaccucgucaugcccuucaugcagaccgaccuccagaagaucaugggcauggaguucuccgaggagaagauccaguaccucgucuaccagaugcucaagggccucaaguacauccacuccgccggcgucguccaccgcgaccucaagcccggcaaccucgccgucaacgaggacugcgagcucaagauccucgacuucggccucgcccgccacgccgacgccgagaugaccggcuacgucgucacccgcugguaccgcgcccccgaggucauccucuccuggaugcacuacaaccagaccgucgacaucugguccgucggcugcaucauggccgagaugcucaccggcaagacccucuucaagggcaaggacuaccucgaccagcucacccagauccucaaggucaccggcguccccggcaccgaguucguccagaagcucaacgacaaggccgccaaguccuacauccagucccucccccagaccccccgcaaggacuucacccagcucuucccccgcgccuccccccaggccgccgaccuccucgagaagaugcucgagcucgacgucgacaagcgccucaccgccgcccaggcccucacccaccccuucuucgagcccuuccgcgaccccgaggaggagaccgaggcccagcagcccuucgacgacucccucgagcacgagaagcucaccgucgacgaguggaagcagcacaucuacaaggagaucgucaacuucucccccaucgcccgcaaggacucccgccgccgcuccggcaugaagcucuga

SEQ ID NO: 8966 - RNA, 1098 nt, Artificial Sequence
  derived and/or modified sequence opt3 from MK13__Homo_sapiens__AAB87639
augagccugaucagaaagaaaggcuucuacaagcaggacgugaacaaaaccgccugggagcuccccaagacauaugucuccccuacucacguugggucuggagcuuacgguucagugugcagugcaauugauaaaaggagcggcgaaaagguagccauaaagaaacuuucccggccauuucaaucugagaucuucgcgaagcgcgcuuaucgagaacuguuguuacugaaacauaugcagcacgagaaugugauugggcuacucgacgucuuuacgccggccucgucacugcguaacuucuacgauuuuuaucuugugaugcccuucaugcagaccgaccugcagaagaucaugggaauggaauuuagcgaggagaaaauucaauacuugguuuaucagaugcucaagggccugaaguacauccauagugccggugugguccacagagaucugaaaccugggaaucucgcagugaacgaagacugugaguuaaagauacuggauuucggacuugcuaggcaugcagacgccgaaaugacaggcuacguaguuacucggugguaucgcgcuccagaggugaucuuguccuggaugcacuacaaucagaccgucgauauuuggucugugggcugcaucauggccgagaugcugacagggaaaacccuauuuaagggaaaagacuaucucgaucagcugacucaaauucuuaaggugacagguguccccggcaccgaguucguucagaaacugaacgacaaggcggcaaagagcuacauccaguccuugccucagacgccaagaaaagauuuuacucaacucuuccccagggccucaccucaggcugccgaccuguuagaaaagaugcuggaacucgacguggauaaacggcuuaccgcagcucaggcccugacacacccauuuuucgagccguuccgcgaccccgaagaggagacugaagcgcaacagccuuuugaugacaguuuggagcaugaaaagcuaaccguagaugaguggaaacagcacauauauaaggaaauugugaauuucagcccaaucgcccgaaaggacucuagaaggcgguccgggaugaaacuguga

SEQ ID NO: 8967 - RNA, 1098 nt, Artificial Sequence
  derived and/or modified sequence opt4 from MK13__Homo_sapiens__AAB87639
augagccugaucagaaagaagggcuucuacaagcaggacgugaacaagaccgccugggagcugcccaagaccuacgugagccccacccacgugggcagcggcgccuacggcagcgugugcagcgccaucgacaagagaagcggcgagaagguggccaucaagaagcugagcagacccuuccagagcgagaucuucgccaagagagccuacagagagcugcugcugcugaagcacaugcagcacgagaacgugaucggccugcuggacguguucacccccgccagcagccugagaaacuucuacgacuucuaccuggugaugcccuucaugcagaccgaccugcagaagaucaugggcauggaguucagcgaggagaagauccaguaccugguguaccagaugcugaagggccugaaguacauccacagcgccggcguggugcacagagaccugaagcccggcaaccuggccgugaacgaggacugcgagcugaagauccuggacuucggccuggccagacacgccgacgccgagaugaccggcuacguggugaccagaugguacagagcccccgaggugauccugagcuggaugcacuacaaccagaccguggacaucuggagcgugggcugcaucauggccgagaugcugaccggcaagacccuguucaagggcaaggacuaccuggaccagcugacccagauccugaaggugaccggcgugcccggcaccgaguucgugcagaagcugaacgacaaggccgccaagagcuacauccagagccugccccagacccccagaaaggacuucacccagcuguuccccagagccagcccccaggccgccgaccugcuggagaagaugcuggagcuggacguggacaagagacugaccgccgcccaggcccugacccaccccuucuucgagcccuucagagaccccgaggaggagaccgaggcccagcagcccuucgacgacagccuggagcacgagaagcugaccguggacgaguggaagcagcacaucuacaaggagaucgugaacuucagccccaucgccagaaaggacagcagaagaagaagcggcaugaagcuguga

SEQ ID NO: 8968 - RNA, 1098 nt, Artificial Sequence
  derived and/or modified sequence opt5 from MK13__Homo_sapiens__AAB87639
augagccugaucagaaagaaaggcuucuacaagcaggacgugaacaaaaccgccugggagcuccccaagacauaugucuccccuacgcacguugggucuggagcuuacggcagcgugugcuccgccauugauaaacggucuggggaaaagguggcgaucaagaaacugagccgcccguuucaauccgagauuuucgcuaagagagccuaucgggaacuucugcuccugaaacauaugcagcacgagaaugucaucggacuucuggacguguuuacccccgccucuagccuccgcaacuucuacgauuuuuaucugguuaugccuuucaugcagacagaccugcagaagauuaugggcauggaauuuuccgaggagaaaauccaauaccucguguaucagaugcugaaggggcuuaaguacauccauagcgcuggagucgugcacagagaucugaaacccggcaaucucgccguuaacgaagacugugagcugaagauucuugauuucggccuggcucggcaugccgacgcggaaaugaccggguacguggucacacgcugguauagagccccugaggugauccucucuuggaugcacuacaaucagaccguggauauuugguccgucggaugcaucauggcugagaugcugacaggcaaaacccuguuuaaggggaaagacuaucucgaucagcugacgcaaauucuuaagguuaccggagugcccggcacagaguucgugcagaaacugaacgacaaggccgcuaagagcuacauccagucucucccucagaccccgcggaaagauuuuacacaacuguucccccgcgccuccccucaggcggccgaccuucuggaaaagaugcucgaacuggacgucgauaaaagacugaccgcugcccaggcucucacgcaccccuuuuucgagccuuuccgggaccccgaagaggagacagaagcccaacagccguuugaugacagccuggagcaugaaaaacuuaccguggaugaguggaagcagcacauuuauaaggaaaucguuaauuucucuccuaucgcccgcaaggacuccagacggcgcagcgggaugaaacuguga

SEQ ID NO: 8969 - protein, 360 aa, Artificial Sequence
  MK14__Homo_sapiens__Q16539
MSQERPTFYRQELNKTIWEVPERYQNLSPVGSGAYGSVCAAFDTKTGLRVAVKKLSRPFQSIIHAKRTYRELRLLKHMKHENVIGLLDVFTPARSLEEFNDVYLVTHLMGADLNNIVKCQKLTDDHVQFLIYQILRGLKYIHSADIIHRDLKPSNLAVNEDCELKILDFGLARHTDDEMTGYVATRWYRAPEIMLNWMHYNQTVDIWSVGCIMAELLTGRTLFPGTDHIDQLKLILRLVGTPGAELLKKISSESARNYIQSLTQMPKMNFANVFIGANPLAVDLLEKMLVLDSDKRITAAQALAHAYFAQYHDPDDEPVADPYDQSFESRDLLIDEWKSLTYDEVISFVPPPLDQEEMES

SEQ ID NO: 8970 - RNA, 1083 nt, Artificial Sequence
  MK14__Homo_sapiens__AAA57456
augucucaggagaggcccacguucuaccggcaggagcugaacaagacaaucugggaggugcccgagcguuaccagaaccugucuccagugggcucuggcgccuauggcucugugugugcugcuuuugacacaaaaacgggguuacguguggcagugaagaagcucuccagaccauuucaguccaucauucaugcgaaaagaaccuacagagaacugcgguuacuuaaacauaugaaacaugaaaaugugauuggucuguuggacguuuuuacaccugcaaggucucuggaggaauucaaugauguguaucuggugacccaucucaugggggcagaucugaacaacauugugaaaugucagaagcuuacagaugaccauguucaguuccuuaucuaccaaauucuccgaggucuaaaguauauacauucagcugacauaauucacagggaccuaaaaccuaguaaucuagcugugaaugaagacugugagcugaagauucuggauuuuggacuggcucggcacacagaugaugaaaugacaggcuacguggccacuaggugguacagggcuccugagaucaugcugaacuggaugcauuacaaccagacaguugauauuuggucagugggaugcauaauggccgagcuguugacuggaagaacauuguuuccugguacagaccauauugaucaguugaagcucauuuuaagacucguuggaaccccaggggcugagcuuuugaagaaaaucuccucagagucugcaagaaacuauauucagucuuugacucagaugccgaagaugaacuuugcgaauguauuuauuggugccaauccccuggcugucgacuugcuggagaagaugcuuguauuggacucagauaagagaauuacagcggcccaagcccuugcacaugccuacuuugcucaguaccacgauccugaugaugaaccaguggccgauccuuaugaucaguccuuugaaagcagggaccuccuuauagaugaguggaaaagccugaccuaugaugaagucaucagcuuugugccaccaccccuugaccaagaagagauggaguccuga

SEQ ID NO: 8971 - RNA, 1083 nt, Artificial Sequence
  derived and/or modified sequence opt1 from MK14__Homo_sapiens__AAA57456
augagccaggagcgccccaccuucuaccggcaggagcugaacaagaccaucugggaggugcccgagcgcuaccagaaccucucccccgucggcagcggggccuacggcuccgugugcgccgcguucgacacgaagaccgggcugcggguggccgucaagaagcugagccgccccuuccaguccaucauccacgccaagcggaccuaccgcgagcuccggcugcugaagcacaugaagcacgagaacgugaucggccuccuggacguguucacccccgcccgcagccuggaggaguucaacgacgucuaccucgugacgcaccugaugggggccgaccugaacaacaucgugaagugccagaagcucaccgacgaccacguccaguuccugaucuaccagauccugcggggccucaaguacauccacuccgcggacaucauccaccgcgaccugaagccgagcaaccuggccgugaacgaggacugcgagcucaagauccuggacuucggccuggcccggcacaccgacgacgagaugaccggguacguggccacgcgcugguaccgggcgcccgagaucaugcucaacuggaugcacuacaaccagaccgucgacaucugguccgugggcugcaucauggccgagcugcugaccgggcgcacccucuuccccggcacggaccacaucgaccagcugaagcugauccuccggcugguggggacccccggcgccgagcugcucaagaagaucagcuccgagagcgcccgcaacuacauccagucccugacccagaugccgaagaugaacuucgccaacgucuucaucggcgcgaacccccuggccguggaccuccuggagaagaugcuggugcucgacagcgacaagcggaucaccgccgcccaggcccuggcgcacgccuacuucgcccaguaccacgaccccgacgacgagcccgucgccgacccguacgaccaguccuucgagagccgcgaccugcucaucgacgaguggaagucccugacguacgacgaggugaucagcuucgugcccccgccccuggaccaggaggagauggaguccuga

SEQ ID NO: 8972 - RNA, 1083 nt, Artificial Sequence
  derived and/or modified sequence opt2 from MK14__Homo_sapiens__AAA57456
augucccaggagcgccccaccuucuaccgccaggagcucaacaagaccaucugggagguccccgagcgcuaccagaaccucucccccgucggcuccggcgccuacggcuccgucugcgccgccuucgacaccaagaccggccuccgcgucgccgucaagaagcucucccgccccuuccaguccaucauccacgccaagcgcaccuaccgcgagcuccgccuccucaagcacaugaagcacgagaacgucaucggccuccucgacgucuucacccccgcccgcucccucgaggaguucaacgacgucuaccucgucacccaccucaugggcgccgaccucaacaacaucgucaagugccagaagcucaccgacgaccacguccaguuccucaucuaccagauccuccgcggccucaaguacauccacuccgccgacaucauccaccgcgaccucaagcccuccaaccucgccgucaacgaggacugcgagcucaagauccucgacuucggccucgcccgccacaccgacgacgagaugaccggcuacgucgccacccgcugguaccgcgcccccgagaucaugcucaacuggaugcacuacaaccagaccgucgacaucugguccgucggcugcaucauggccgagcuccucaccggccgcacccucuuccccggcaccgaccacaucgaccagcucaagcucauccuccgccucgucggcacccccggcgccgagcuccucaagaagaucuccuccgaguccgcccgcaacuacauccagucccucacccagaugcccaagaugaacuucgccaacgucuucaucggcgccaacccccucgccgucgaccuccucgagaagaugcucguccucgacuccgacaagcgcaucaccgccgcccaggcccucgcccacgccuacuucgcccaguaccacgaccccgacgacgagcccgucgccgaccccuacgaccaguccuucgagucccgcgaccuccucaucgacgaguggaagucccucaccuacgacgaggucaucuccuucgucccccccccccucgaccaggaggagauggaguccuga

SEQ ID NO: 8973 - RNA, 1083 nt, Artificial Sequence
  derived and/or modified sequence opt3 from MK14__Homo_sapiens__AAA57456
augagccaggagagacccaccuucuacaggcaagaacugaacaagacaauaugggaggugccugaacgguaucagaaucucuccccagucggcucuggggccuacggaucaguuugcgcugcauuugacacuaaaacgggucuucgcguggccguaaagaaacugagucgaccguuccagagcauuauacacgcgaagcguaccuauagagaguugagguuacugaaacauaugaagcacgaaaacgugaucggccuacucgaugucuuuacacccgcucggucccuggaggaguucaaugacguguaccuuguuacucaucugaugggggccgauuugaacaauauugugaagugucagaaacucaccgacgaucacguccaauuucugaucuaucagauucugcgcggacucaaguacauccauucugcagacauaauccacagagauuuaaaaccuucgaaccuggccgugaaugaagacugcgagcuuaagauuuuggauuucggccuggcuaggcacacagacgaugaaaugaccgguuauguagcaacucggugguaccgcgccccagagaucaugcuaaacuggaugcauuacaaucagacaguugacauuuggucagugggguguaucauggcugagcuccugaccggacgaacgcuuuuucccggcacugaucacauagaccagcugaaauugauucucagacuggucggcaccccuggggccgaauuacugaagaagaucagcagugaguccgcgaggaacuauauucaaucucucacacagaugccaaaaaugaauuucgcaaacguguuuaucggagccaauccccuugcuguggaccuguuggaaaagaugcuaguccuggauagcgacaaacggaucacugccgcacaggcucucgcccaugcguacuucgcccaguaucacgauccugacgaugagccaguugcagacccguacgaucaauccuuugaaucacgugaccugcuuauugaugaguggaagagucugaccuaugacgaggugaucagcuucguacccccuccauuggaucaggaagagauggaaucuuga

SEQ ID NO: 8974 - RNA, 1083 nt, Artificial Sequence
  derived and/or modified sequence opt4 from MK14__Homo_sapiens__AAA57456
augagccaggagagacccaccuucuacagacaggagcugaacaagaccaucugggaggugcccgagagauaccagaaccugagccccgugggcagcggcgccuacggcagcgugugcgccgccuucgacaccaagaccggccugagaguggccgugaagaagcugagcagacccuuccagagcaucauccacgccaagagaaccuacagagagcugagacugcugaagcacaugaagcacgagaacgugaucggccugcuggacguguucacccccgccagaagccuggaggaguucaacgacguguaccuggugacccaccugaugggcgccgaccugaacaacaucgugaagugccagaagcugaccgacgaccacgugcaguuccugaucuaccagauccugagaggccugaaguacauccacagcgccgacaucauccacagagaccugaagcccagcaaccuggccgugaacgaggacugcgagcugaagauccuggacuucggccuggccagacacaccgacgacgagaugaccggcuacguggccaccagaugguacagagcccccgagaucaugcugaacuggaugcacuacaaccagaccguggacaucuggagcgugggcugcaucauggccgagcugcugaccggcagaacccuguuccccggcaccgaccacaucgaccagcugaagcugauccugagacuggugggcacccccggcgccgagcugcugaagaagaucagcagcgagagcgccagaaacuacauccagagccugacccagaugcccaagaugaacuucgccaacguguucaucggcgccaacccccuggccguggaccugcuggagaagaugcuggugcuggacagcgacaagagaaucaccgccgcccaggcccuggcccacgccuacuucgcccaguaccacgaccccgacgacgagcccguggccgaccccuacgaccagagcuucgagagcagagaccugcugaucgacgaguggaagagccugaccuacgacgaggugaucagcuucgugccccccccccuggaccaggaggagauggagagcuga

SEQ ID NO: 8975 - RNA, 1083 nt, Artificial Sequence
  derived and/or modified sequence opt5 from MK14__Homo_sapiens__AAA57456
augagccaggagagacccaccuucuaccggcaagaacugaacaagacaaucugggaggugccugaacgcuaucagaaucucuccccggucggcucuggggccuacggaagcguuugcgcugccuuugacacgaagaccggccugagaguggcggugaagaaacuuucccggcccuuccagucuauuauccacgcuaagcgcacauauagagagcugcggcuccugaaacauaugaagcacgaaaacgucauugggcuucuggauguguuuaccccugcccgcagccucgaggaguucaaugacguuuaccuggugacacaucugaugggagccgaucucaacaauaucgucaagugucagaaacugaccgacgaucacgugcaauuucuuauuuaucagauccugagaggccucaaguacauccauuccgcugacauuauccaccgggaucugaaacccucuaaccuugccguuaaugaagacugcgagcugaagauucucgauuucgggcuggcucgccacacagacgaugaaaugaccggauauguggccacgagaugguaccgggcgccugagaucaugcugaacuggaugcauuacaaucagaccgucgacauuuggagcgugggcuguaucauggccgagcuccugacaggccgcacccuuuuucccgggacagaucacauugaccagcugaaacucauccugagacuugugggaaccccuggcgcugaacugcucaagaagaucuccagcgagucugcccggaacuauauucaaucccugacgcagaugccgaaaaugaauuucgcuaacgucuuuaucggggccaauccccuggcgguugaccuccuggaaaagaugcuugugcuggauagcgacaaacgcauuacagccgcucaggcccucgcucaugccuacuucgcccaguaucacgauccugacgaugagcccguggcugacccuuacgaucaaucuuuugaauccagagaccugcuuaucgaugaguggaaaagccugaccuaugacgaggucauuucuuucgugcccccgccucucgaucaggaagagauggaauccuga

SEQ ID NO: 8976 - protein, 393 aa, Artificial Sequence [sequence omitted]

SEQ ID NO: 8977 - RNA, 1182 nt, Artificial Sequence
  MKK1__Homo_sapiens__AAA36318
augcccaagaagaagccgacgcccauccagcugaacccggcccccgacggcucugcaguuaacgggaccagcucugcggagaccaacuuggaggccuugcagaagaagcuggaggagcuagagcuugaugagcagcagcgaaagcgccuugaggccuuucuuacccagaagcagaaggugggagaacugaaggaugacgacuuugagaagaucagugagcugggggcuggcaauggcggugugguguucaaggucucccacaagccuucuggccuggucauggccagaaagcuaauucaucuggagaucaaacccgcaauccggaaccagaucauaagggagcugcagguucugcaugagugcaacucuccguacaucgugggcuucuauggugcguucuacagcgauggcgagaucaguaucugcauggagcacauggauggagguucucuggaucaaguccugaagaaagcuggaagaauuccugaacaaauuuuaggaaaaguuagcauugcuguaauaaaaggccugacauaucugagggagaagcacaagaucaugcacagagaugucaagcccuccaacauccuagucaacucccguggggagaucaagcucugugacuuuggggucagcgggcagcucaucgacuccauggccaacuccuucgugggcacaagguccuacaugucgccagaaagacuccaggggacucauuacucugugcagucagacaucuggagcaugggacugucucugguagagauggcgguugggagguaucccaucccuccuccagaugccaaggagcuggagcugauguuugggugccagguggaaggagaugcggcugagaccccacccaggccaaggacccccgggaggccccuuagcucauacggaauggacagccgaccucccauggcaauuuuugaguuguuggauuacauagucaacgagccuccuccaaaacugcccaguggaguguucagucuggaauuucaagauuuugugaauaaaugcuuaauaaaaaaccccgcagagagagcagauuugaagcaacucaugguucaugcuuuuaucaagagaucugaugcugaggaaguggauuuugcagguuggcucugcuccaccaucggccuuaaccagcccagcacaccaacccaugcugcuggcgucuaa

SEQ ID NO: 8978 - RNA, 1182 nt, Artificial Sequence
  derived and/or modified sequence opt1 from MKK1__Homo_sapiens__AAA36318
augcccaagaagaagcccacccccauccagcugaaccccgcccccgacggcagcgccgugaacgggaccuccagcgcggagacgaaccucgaggcccugcagaagaagcuggaggagcucgagcuggacgagcagcagcgcaagcggcuggaggccuuccucacccagaagcagaaggucggcgagcugaaggacgacgacuucgagaagaucuccgagcugggggccggcaacgggggcgugguguucaaggucagccacaagccguccggccucgugauggcccgcaagcugauccaccuggagaucaagcccgcgauccggaaccagaucauccgcgagcuccaggugcugcacgagugcaacagccccuacaucgucggguucuacggcgccuucuacuccgacggggagaucagcaucugcauggagcacauggacggcgggucccuggaccaggugcucaagaaggccggccggauccccgagcagauccugggcaaggugagcaucgccgucaucaaggggcugaccuaccuccgcgagaagcacaagaucaugcaccgggacgugaagccguccaacauccuggugaacagccgcggcgagaucaagcugugcgacuucggggucuccggccagcucaucgacagcauggcgaacuccuucgugggcacccggagcuacaugucccccgagcgccugcaggggacgcacuacagcgugcaguccgacaucuggagcaugggccugagccucgucgagauggccguggggcgguaccccaucccgccgcccgacgccaaggagcuggagcugauguucggcugccagguggagggggacgccgccgagaccccgccccgcccccggacccccggccgcccccucuccagcuacggcauggacucccggccgcccauggcgaucuucgagcugcuggacuacaucgucaacgagcccccgcccaagcuccccagcgggguguucucccuggaguuccaggacuucgugaacaagugccugaucaagaaccccgccgagcgcgccgaccucaagcagcugaugguccacgccuucaucaagcggagcgacgccgaggagguggacuucgcgggcuggcugugcuccaccaucgggcucaaccagcccagcacgcccacccacgccgccggcguguga

SEQ ID NO: 8979 - RNA, 1182 nt, Artificial Sequence
  derived and/or modified sequence opt2 from MKK1__Homo_sapiens__AAA36318
augcccaagaagaagcccacccccauccagcucaaccccgcccccgacggcuccgccgucaacggcaccuccuccgccgagaccaaccucgaggcccuccagaagaagcucgaggagcucgagcucgacgagcagcagcgcaagcgccucgaggccuuccucacccagaagcagaaggucggcgagcucaaggacgacgacuucgagaagaucuccgagcucggcgccggcaacggcggcgucgucuucaaggucucccacaagcccuccggccucgucauggcccgcaagcucauccaccucgagaucaagcccgccauccgcaaccagaucauccgcgagcuccagguccuccacgagugcaacucccccuacaucgucggcuucuacggcgccuucuacuccgacggcgagaucuccaucugcauggagcacauggacggcggcucccucgaccagguccucaagaaggccggccgcauccccgagcagauccucggcaaggucuccaucgccgucaucaagggccucaccuaccuccgcgagaagcacaagaucaugcaccgcgacgucaagcccuccaacauccucgucaacucccgcggcgagaucaagcucugcgacuucggcgucuccggccagcucaucgacuccauggccaacuccuucgucggcacccgcuccuacaugucccccgagcgccuccagggcacccacuacuccguccaguccgacaucugguccaugggccucucccucgucgagauggccgucggccgcuaccccauccccccccccgacgccaaggagcucgagcucauguucggcugccaggucgagggcgacgccgccgagacccccccccgcccccgcacccccggccgcccccucuccuccuacggcauggacucccgcccccccauggccaucuucgagcuccucgacuacaucgucaacgagcccccccccaagcuccccuccggcgucuucucccucgaguuccaggacuucgucaacaagugccucaucaagaaccccgccgagcgcgccgaccucaagcagcucaugguccacgccuucaucaagcgcuccgacgccgaggaggucgacuucgccggcuggcucugcuccaccaucggccucaaccagcccuccacccccacccacgccgccggcgucuga

SEQ ID NO: 8980 - RNA, 1182 nt, Artificial Sequence
  derived and/or modified sequence opt3 from MKK1__Homo_sapiens__AAA36318
augcccaagaaaaagccuaccccaauccagcugaacccggcccccgacggcagcgcugugaaugggacauccucugcagagacuaaccucgaagcccuucagaaaaagcuggaggaauuggaguuagaugaacaacagagaaaaaggcuggaggcguuccuaacgcagaagcaaaaggucggagagcucaaagacgaugacuuugaaaagauuucagagcugggugcuggcaaugggggaguuguguucaaaguaagucacaagccuagcggccuugugauggcccggaaacugauacauuuggaaaucaagccagcaauucgcaaccagaucauucgagagcuccagguccugcacgagugcaauucccccuacaucguggguuuuuauggggccuucuacucugauggagaaauaucgaucuguauggagcauauggacggcggcucacuggaucagguucucaagaaagcugggcguauuccugaacaaaucuuaggaaaggugagcauugcagucaucaaaggucugaccuaucuuagagagaagcacaaaauaaugcauagggacgugaagccaaguaacauuuugguaaauucccggggcgaaaucaaacugugcgauuuugggguuucuggacagcuaauugacagcauggccaacuccuucgugggcacacgcucauacaugagucccgagagacuccaggguacucacuauagcguccagucugauaucugguccauggggcugucacuuguggagauggcugugggaagguacccuaucccaccgcccgacgccaaggaacuggaguugauguuuggcugucaagucgaaggcgaugcggcagagaccccuccacggccccgcacaccugggcgaccacucagcaguuauggaauggacucuagacccccgauggccauuuucgaacuguuagacuacauaguuaaugagccucccccaaagcugccuuccgguguguuuagccucgaguuccaggauuuuguaaacaaaugccuuaucaagaaucccgcugaaagggccgaccugaaacaguugauggugcacgcauucauuaagcggucggaugcugaggaagucgacuuugccggcuggcuauguucuaccaucgggcugaaccaaccauccacucccacacaugcggccggaguguga

SEQ ID NO: 8981 - RNA, 1182 nt, Artificial Sequence
  derived and/or modified sequence opt4 from MKK1__Homo_sapiens__AAA36318
augcccaagaagaagcccacccccauccagcugaaccccgcccccgacggcagcgccgugaacggcaccagcagcgccgagaccaaccuggaggcccugcagaagaagcuggaggagcuggagcuggacgagcagcagagaaagagacuggaggccuuccugacccagaagcagaaggugggcgagcugaaggacgacgacuucgagaagaucagcgagcugggcgccggcaacggcggcgugguguucaaggugagccacaagcccagcggccuggugauggccagaaagcugauccaccuggagaucaagcccgccaucagaaaccagaucaucagagagcugcaggugcugcacgagugcaacagccccuacaucgugggcuucuacggcgccuucuacagcgacggcgagaucagcaucugcauggagcacauggacggcggcagccuggaccaggugcugaagaaggccggcagaauccccgagcagauccugggcaaggugagcaucgccgugaucaagggccugaccuaccugagagagaagcacaagaucaugcacagagacgugaagcccagcaacauccuggugaacagcagaggcgagaucaagcugugcgacuucggcgugagcggccagcugaucgacagcauggccaacagcuucgugggcaccagaagcuacaugagccccgagagacugcagggcacccacuacagcgugcagagcgacaucuggagcaugggccugagccugguggagauggccgugggcagauaccccauccccccccccgacgccaaggagcuggagcugauguucggcugccagguggagggcgacgccgccgagaccccccccagacccagaacccccggcagaccccugagcagcuacggcauggacagcagaccccccauggccaucuucgagcugcuggacuacaucgugaacgagcccccccccaagcugcccagcggcguguucagccuggaguuccaggacuucgugaacaagugccugaucaagaaccccgccgagagagccgaccugaagcagcugauggugcacgccuucaucaagagaagcgacgccgaggagguggacuucgccggcuggcugugcagcaccaucggccugaaccagcccagcacccccacccacgccgccggcguguga

SEQ ID NO: 8982 - RNA, 1182 nt, Artificial Sequence
  derived and/or modified sequence opt5 from MKK1__Homo_sapiens__AAA36318
augcccaagaaaaagccuaccccgauccagcugaaccccgccccugacggcagcgcugugaaugggacauccucugccgagacgaaccucgaagcgcugcaaaagaaacuugaggaacuggagcucgaugaacagcagagaaaacggcuggaggcuuuccuuacccagaagcaaaaggucggagagcugaaagacgaugacuuugaaaagauuagcgagcucggcgccgggaauggaggcguuguguucaaagugucccacaagcccucugggcuggucauggcccgcaaacugauccaucucgaaauuaagccugcuaucagaaaccagauuauccgggagcuucaggugcugcacgagugcaauagccccuacaucguuggauuuuauggcgccuucuacuccgauggcgaaauuucuaucuguauggagcauauggacgggggaagccuggaucaggugcucaagaaagcuggccgcauuccugaacaaauccuggggaaggucuccauugccgugaucaaaggacuuacauaucugagagagaagcacaaaauuaugcaucgggacguuaagccgagcaacauccucgucaauucucgcggcgaaaucaaacugugcgauuuugggguguccggacagcugauugacagcauggcgaacucuuucgugggcaccagauccuacaugagccccgagcggcuccagggcacacacuauucugugcaguccgauaucuggagcauggggcugucccuugucgagauggccguuggacgcuacccuauucccccucccgacgcuaaggaacuggagcucauguuuggcugucaaguggaaggggaugccgcugagaccccgccuagaccccggacaccuggacgcccccugucuagcuauggcauggacuccagacccccuauggccaucuucgaacuucuggacuacauugugaaugagccgcccccuaagcuccccagcggggucuuuucucuggaguuccaggauuuugugaacaaaugccugaucaagaauccugcggaacgggccgaccucaaacagcugaugguucacgcuuucaucaagcgcuccgaugccgaggaaguggacuuugcuggauggcuuuguagcaccauuggccugaaccaacccucuacgccgacccaugccgccggcgucuga

SEQ ID NO: 8983 - protein, 347 aa, Artificial Sequence
  MKK3__Homo_sapiens__P46734
MESPASSQPASMPQSKGKSKRKKDLRISCMSKPPAPNPTPPRNLDSRTFITIGDRNFEVEADDLVTISELGRGAYGVVEKVRHAQSGTIMAVKRIRATVNSQEQKRLLMDLDINMRTVDCFYTVTFYGALFREGDVWICMELMDTSLDKFYRKVLDKNMTIPEDILGEIAVSIVRALEHLHSKLSVIHRDVKPSNVLINKEGHVKMCDFGISGYLVDSVAKTMDAGCKPYMAPERINPELNQKGYNVKSDVWSLGITMIEMAILRFPYESWGTPFQQLKQVVEEPSPQLPADRFSPEFVDFTAQCLRKNPAERMSYLELMEHPFFTLHKTKKTDIAAFVKEILGEDS

SEQ ID NO: 8984 - RNA, 1044 nt, Artificial Sequence
  MKK3__Homo_sapiens__AAH32478
auggagucgcccgccucgagccagcccgccagcaugccccaguccaaaggaaaauccaagaggaagaaggaucuacggauauccugcauguccaagccacccgcacccaaccccacacccccccggaaccuggacucccggaccuucaucaccauuggagacagaaacuuugagguggaggcugaugacuuggugaccaucucagaacugggccguggagccuauggggugguagagaaggugcggcacgcccagagcggcaccaucauggccgugaagcggauccgggccaccgugaacucacaggagcagaagcggcugcucauggaccuggacaucaacaugcgcacggucgacugcuucuacacugucaccuucuacggggcacuauucagagagggagacguguggaucugcauggagcucauggacacauccuuggacaaguucuaccggaaggugcuggauaaaaacaugacaauuccagaggacauccuuggggagauugcugugucuaucgugcgggcccuggagcaucugcacagcaagcugucggugauccacagagaugugaagcccuccaauguccuuaucaacaaggagggccaugugaagaugugugacuuuggcaucaguggcuacuugguggacucuguggccaagacgauggaugccggcugcaagcccuacauggccccugagaggaucaacccagagcugaaccagaagggcuacaaugucaaguccgacgucuggagccugggcaucaccaugauugagauggccauccugcgguucccuuacgaguccugggggaccccguuccagcagcugaagcaggugguggaggagccguccccccagcucccagccgaccguuucucccccgaguuuguggacuucacugcucagugccugaggaagaaccccgcagagcguaugagcuaccuggagcugauggagcaccccuucuucaccuugcacaaaaccaagaagacggacauugcugccuucgugaaggagauccugggagaagacucauag

SEQ ID NO: 8985 - RNA, 1044 nt, Artificial Sequence
  derived and/or modified sequence opt1 from MKK3__Homo_sapiens__AAH32478
auggagagccccgccuccagccagccggccuccaugccccagagcaagggcaaguccaagcgcaagaaggaccugcggaucagcugcauguccaagccgcccgcgcccaaccccaccccgccccgcaaccucgacagccggaccuucaucacgaucggggaccgcaacuucgagguggaggccgacgaccuggucaccaucuccgagcugggccgcggggccuacggcgugguggagaagguccggcacgcccagagcgggaccaucauggccgugaagcggauccgcgcgaccgugaacucccaggagcagaagcggcuccugauggaccuggacaucaacaugcgcacggucgacugcuucuacaccgugaccuucuacggcgcccucuuccgggagggcgacguguggaucugcauggagcugauggacaccagccuggacaaguucuaccgcaagguccucgacaagaacaugacgauccccgaggacauccugggggagaucgccguguccaucgugcgggcccuggagcaccuccacagcaagcuguccgucauccaccgcgacgugaagcccagcaacgugcugaucaacaaggagggccacgucaagaugugcgacuucgggaucuccggcuaccucguggacagcguggcgaagaccauggacgccgggugcaagcccuacauggcccccgagcggaucaacccggagcugaaccagaagggcuacaacgucaaguccgacguguggagccugggcaucaccaugaucgagauggccauccuccgcuuccccuacgagagcugggggacccccuuccagcagcugaagcaggucguggaggagcccuccccgcagcugcccgccgaccgguucagccccgaguucguggacuucacggcgcagugccuccgcaagaaccccgccgagcggauguccuaccuggagcugauggagcacccguucuucacccuccacaagaccaagaagaccgacaucgccgccuucgugaaggagauccugggcgaggacagcuga

SEQ ID NO: 8986 - RNA, 1044 nt, Artificial Sequence
  derived and/or modified sequence opt2 from MKK3__Homo_sapiens__AAH32478
auggagucccccgccuccucccagcccgccuccaugccccaguccaagggcaaguccaagcgcaagaaggaccuccgcaucuccugcauguccaagccccccgcccccaaccccacccccccccgcaaccucgacucccgcaccuucaucaccaucggcgaccgcaacuucgaggucgaggccgacgaccucgucaccaucuccgagcucggccgcggcgccuacggcgucgucgagaagguccgccacgcccaguccggcaccaucauggccgucaagcgcauccgcgccaccgucaacucccaggagcagaagcgccuccucauggaccucgacaucaacaugcgcaccgucgacugcuucuacaccgucaccuucuacggcgcccucuuccgcgagggcgacgucuggaucugcauggagcucauggacaccucccucgacaaguucuaccgcaagguccucgacaagaacaugaccauccccgaggacauccucggcgagaucgccgucuccaucguccgcgcccucgagcaccuccacuccaagcucuccgucauccaccgcgacgucaagcccuccaacguccucaucaacaaggagggccacgucaagaugugcgacuucggcaucuccggcuaccucgucgacuccgucgccaagaccauggacgccggcugcaagcccuacauggcccccgagcgcaucaaccccgagcucaaccagaagggcuacaacgucaaguccgacgucuggucccucggcaucaccaugaucgagauggccauccuccgcuuccccuacgaguccuggggcacccccuuccagcagcucaagcaggucgucgaggagcccuccccccagcuccccgccgaccgcuucucccccgaguucgucgacuucaccgcccagugccuccgcaagaaccccgccgagcgcauguccuaccucgagcucauggagcaccccuucuucacccuccacaagaccaagaagaccgacaucgccgccuucgucaaggagauccucggcgaggacuccuga

SEQ ID NO: 8987 - RNA, 1044 nt, Artificial Sequence
  derived and/or modified sequence opt3 from MKK3__Homo_sapiens__AAH32478
auggagagccccgccuccucucagccugcuucaaugccacaaaguaagggcaaaagcaagaggaaaaaggaccugagaaucuccugcaugucuaaaccgcccgcaccuaacccaacacccccucggaaucucgauucgcgcaccuucauuacuauaggggaccgaaacuuugaaguggaggccgaugaccuugucacgaucucagaacugggacguggugcguacggcguuguggagaagguaagacacgcucagagcgggaccauuauggccgugaagaggauccgggcaacagucaauagucaggaacagaaacgcuuguuaauggaucuggacauuaacaugagaacuguggauuguuucuauaccguuacauuuuacggagcccuauucagggagggcgacguguggaucugcauggagcucauggauaccucccuggacaaguuuuaucggaaaguccuugauaagaauaugacuauaccagaagacauccugggugagauugcugugucuaucguacgcgcauuggaacaucuccacagcaaacuguccguuauucaucgagaugugaagcccucaaacguccugaucaauaaggaggggcacgugaaaaugugugacuucggaauaaguggcuaccucguggacagcgucgccaagacaauggaugcuggcugcaaaccuuauauggccccagagagaauuaacccggaauuaaaucaaaagggguacaacguuaaaucugacguguggucccugggaaucaccaugauugagauggcgauccuuagguuucccuaugaaucaugggguacgccuuuccagcaguugaagcagguaguggaggaaccaagcccccaacugccugcagaucgguuuaguccagaguucgucgacuuuacugcccagugucuacguaaaaaucccgcugagcgcaugucuuaccucgaacugauggagcauccguucuuuacccuucacaagacaaagaaaacugauaucgccgcauucgugaaggaaauucugggcgaggacuccuga

SEQ ID NO: 8988 - RNA, 1044 nt, Artificial Sequence
  derived and/or modified sequence opt4 from MKK3__Homo_sapiens__AAH32478
auggagagccccgccagcagccagcccgccagcaugccccagagcaagggcaagagcaagagaaagaaggaccugagaaucagcugcaugagcaagccccccgcccccaaccccaccccccccagaaaccuggacagcagaaccuucaucaccaucggcgacagaaacuucgagguggaggccgacgaccuggugaccaucagcgagcugggcagaggcgccuacggcgugguggagaaggugagacacgcccagagcggcaccaucauggccgugaagagaaucagagccaccgugaacagccaggagcagaagagacugcugauggaccuggacaucaacaugagaaccguggacugcuucuacaccgugaccuucuacggcgcccuguucagagagggcgacguguggaucugcauggagcugauggacaccagccuggacaaguucuacagaaaggugcuggacaagaacaugaccauccccgaggacauccugggcgagaucgccgugagcaucgugagagcccuggagcaccugcacagcaagcugagcgugauccacagagacgugaagcccagcaacgugcugaucaacaaggagggccacgugaagaugugcgacuucggcaucagcggcuaccugguggacagcguggccaagaccauggacgccggcugcaagcccuacauggcccccgagagaaucaaccccgagcugaaccagaagggcuacaacgugaagagcgacguguggagccugggcaucaccaugaucgagauggccauccugagauuccccuacgagagcuggggcacccccuuccagcagcugaagcaggugguggaggagcccagcccccagcugcccgccgacagauucagccccgaguucguggacuucaccgcccagugccugagaaagaaccccgccgagagaaugagcuaccuggagcugauggagcaccccuucuucacccugcacaagaccaagaagaccgacaucgccgccuucgugaaggagauccugggcgaggacagcuga

SEQ ID NO: 8989 - RNA, 1044 nt, Artificial Sequence
  derived and/or modified sequence opt5 from MKK3__Homo_sapiens__AAH32478
auggagagccccgccuccucucagccugcuagcaugccgcaauccaagggcaaaucuaagagaaagaaggaccugcggaucagcugcauguccaaacccccugcccccaacccuacacccccucgcaaucucgauucuagaaccuucauuacgaucggggaccggaacuuugaaguggaggcggaugaccuggucaccauuagcgaacuuggacgcggcgcuuacgggguuguggagaaggugagacacgcccaguccggaacaaucauggccgucaagcggauucgcgcuaccgugaauagccaggaacagaaaagacugcucauggaucuggacaucaacaugcggacaguugauuguuucuauaccgugacauuuuacggcgcccuuuuccgcgagggggacgucuggaucugcauggagcugauggauaccucucucgacaaguuuuauagaaaagugcuggauaagaauaugacgauuccggaagacauccugggagagauugcuguuuccaucgugcgggcccucgaacaucugcacagcaaacuuucugucauucaucgcgaugugaagcccuccaacgugcugaucaauaaggagggccacgucaaaaugugugacuucggcauuagcggguaccucguugacucuguggcgaagaccauggaugccggaugcaaaccuuauauggcucccgagagaaucaacccugaacugaaucaaaagggcuacaacgugaaauccgacgucuggagccuugggaucacaaugauugagauggccauccugcgguuucccuaugaauccuggggaaccccguuccagcagcucaaacaggugguugaggaaccuucuccccaacugccugcugaucgcuuuagccccgaguucguggacuuuacagcccagugucugcggaaaaaucccgcggagagaauguccuaccucgaacugauggagcauccuuucuuuacccuucacaagacgaagaaaacagauauugccgcuuucgucaaggaaauccugggcgaggacagcuga

SEQ ID NO: 8990 - protein, 399 aa, Artificial Sequence
  MKK4__Homo_sapiens__P45985
MAAPSPSGGGGSGGGSGSGTPGPVGSPAPGHPAVSSMQGKRKALKLNFANPPFKSTARFTLNPNPTGVQNPHIERLRTHSIESSGKLKISPEQHWDFTAEDLKDLGEIGRGAYGSVNKMVHKPSGQIMAVKRIRSTVDEKEQKQLLMDLDVVMRSSDCPYIVQFYGALFREGDCWICMELMSTSFDKFYKYVYSVLDDVIPEEILGKITLATVKALNHLKENLKIIHRDIKPSNILLDRSGNIKLCDFGISGQLVDSIAKTRDAGCRPYMAPERIDPSASRQGYDVRSDVWSLGITLYELATGRFPYPKWNSVFDQLTQVVKGDPPQLSNSEEREFSPSFINFVNLCLTKDESKRPKYKELLKHPFILMYEERAVEVACYVCKILDQMPATPSSPMYVD

SEQ ID NO: 8991 - RNA, 1200 nt, Artificial Sequence
  MKK4__Homo_sapiens__AAC24130
auggcggcuccgagcccgagcggcggcggcggcuccgggggcggcagcggcagcggcacccccggccccguaggguccccggcgccaggccacccggccgucagcagcaugcaggguaaacgcaaagcacugaaguugaauuuugcaaauccaccuuucaaaucuacagcaagguuuacucugaaucccaauccuacaggaguucaaaacccacacauagagagacugagaacacacagcauugagucaucaggaaaacugaagaucuccccugaacaacacugggauuucacugcagaggacuugaaagaccuuggagaaauuggacgaggagcuuaugguucugucaacaaaaugguccacaaaccaagugggcaaauaauggcaguuaaaagaauucggucaacaguggaugaaaaagaacaaaaacaacuucuuauggauuuggauguaguaaugcggaguagugauugcccauacauuguucaguuuuauggugcacucuucagagagggugacuguuggaucuguauggaacucaugucuaccucguuugauaaguuuuacaaauauguauauaguguauuagaugauguuauuccagaagaaauuuuaggcaaaaucacuuuagcaacugugaaagcacuaaaccacuuaaaagaaaacuugaaaauuauucacagagauaucaaaccuuccaauauucuucuggacagaaguggaaauauuaagcucugugacuucggcaucaguggacagcuuguggacucuauugccaagacaagagaugcuggcuguaggccauacauggcaccugaaagaauagacccaagcgcaucacgacaaggauaugauguccgcucugaugucuggaguuuggggaucacauuguaugaguuggccacaggccgauuuccuuauccaaaguggaauaguguauuugaucaacuaacacaagucgugaaaggagauccuccgcagcugaguaauucugaggaaagggaauucuccccgaguuucaucaacuuugucaacuugugccuuacgaaggaugaauccaaaaggccaaaguauaaagagcuucugaaacaucccuuuauuuugauguaugaagaacgugccguugaggucgcaugcuauguuuguaaaauccuggaucaaaugccagcuacucccagcucucccauguaugucgauuga

SEQ ID NO: 8992 - RNA, 1200 nt, Artificial Sequence
  derived and/or modified sequence opt1 from MKK4__Homo_sapiens__AAC24130
auggccgcccccagcccguccggcgggggcgggagcggcgggggcuccggcagcgggacccccggccccguggggucccccgcgccgggccaccccgccgucagcuccaugcaggggaagcgcaaggcccugaagcucaacuucgccaacccgcccuucaagagcaccgcccgguucacgcugaaccccaaccccaccggcgugcagaacccccacaucgagcgccugcggacccacuccaucgagagcuccggcaagcucaagaucagccccgagcagcacugggacuucaccgcggaggaccugaaggaccugggggagaucggccgcggggccuacggcuccgugaacaagaugguccacaagccgagcggccagaucauggccgugaagcggauccgcuccacgguggacgagaaggagcagaagcagcuccugauggaccuggacgucgugaugcggagcuccgacugccccuacaucgugcaguucuacggggcccucuuccgcgagggcgacugcuggaucugcauggagcugaugagcaccuccuucgacaaguucuacaaguacgucuacagcgugcuggacgacgugauccccgaggagauccucgggaagaucacccuggcgaccgucaaggcccugaaccaccucaaggagaaccugaagaucauccaccgggacaucaagcccagcaacauccugcucgaccgcuccggcaacaucaagcugugcgacuucgggaucagcggccagcugguggacuccaucgccaagacgcgggacgccggcugccgcccguacauggcccccgagcggaucgaccccagcgcgucccgccagggguacgacgugcggagcgacgucuggucccucggcaucacccuguacgagcuggccaccgggcgcuuccccuacccgaaguggaacagcguguucgaccagcucacccagguggucaagggcgacccgccccagcuguccaacagcgaggagcgggaguucucccccagcuucaucaacuucgugaaccugugccucacgaaggacgaguccaagcgccccaaguacaaggagcugcugaagcaccccuucauccucauguacgaggagcgggccguggaggucgccugcuacgugugcaagauccuggaccagaugcccgccacccccagcuccccgauguacguggacuga

SEQ ID NO: 8993 - RNA, 1200 nt, Artificial Sequence
  derived and/or modified sequence opt2 from MKK4__Homo_sapiens__AAC24130
auggccgcccccucccccuccggcggcggcggcuccggcggcggcuccggcuccggcacccccggccccgucggcucccccgcccccggccaccccgccgucuccuccaugcagggcaagcgcaaggcccucaagcucaacuucgccaacccccccuucaaguccaccgcccgcuucacccucaaccccaaccccaccggcguccagaacccccacaucgagcgccuccgcacccacuccaucgaguccuccggcaagcucaagaucucccccgagcagcacugggacuucaccgccgaggaccucaaggaccucggcgagaucggccgcggcgccuacggcuccgucaacaagaugguccacaagcccuccggccagaucauggccgucaagcgcauccgcuccaccgucgacgagaaggagcagaagcagcuccucauggaccucgacgucgucaugcgcuccuccgacugccccuacaucguccaguucuacggcgcccucuuccgcgagggcgacugcuggaucugcauggagcucauguccaccuccuucgacaaguucuacaaguacgucuacuccguccucgacgacgucauccccgaggagauccucggcaagaucacccucgccaccgucaaggcccucaaccaccucaaggagaaccucaagaucauccaccgcgacaucaagcccuccaacauccuccucgaccgcuccggcaacaucaagcucugcgacuucggcaucuccggccagcucgucgacuccaucgccaagacccgcgacgccggcugccgccccuacauggcccccgagcgcaucgaccccuccgccucccgccagggcuacgacguccgcuccgacgucuggucccucggcaucacccucuacgagcucgccaccggccgcuuccccuaccccaaguggaacuccgucuucgaccagcucacccaggucgucaagggcgaccccccccagcucuccaacuccgaggagcgcgaguucucccccuccuucaucaacuucgucaaccucugccucaccaaggacgaguccaagcgccccaaguacaaggagcuccucaagcaccccuucauccucauguacgaggagcgcgccgucgaggucgccugcuacgucugcaagauccucgaccagaugcccgccacccccuccucccccauguacgucgacuga

SEQ ID NO: 8994 - RNA, 1200 nt, Artificial Sequence
  derived and/or modified sequence opt3 from MKK4__Homo_sapiens__AAC24130
auggccgcucccagcccuuccggcgggggagguucuggcgggggaucaggcagugguaccccagggccggugggaagccccgcaccuggccacccagccgucuccucuaugcagggcaagagaaaagcgcugaagcucaacuucgcuaaucccccuuuuaaaucgacagccagguucacucuuaacccaaaucccacggggguucaaaacccucauaucgagcggcugcgcacccacucaauugaaagcaguggaaaguugaaaauauccccagagcagcauugggacuuuacagcagaagauuuaaaggaccugggugagaucggccgaggggccuacggaucugugaauaagaugguacacaaaccgagcggccagauuauggcugugaagcguaucagauccacugucgaugaaaaagagcagaagcaacuacucauggaccuggaugugguuaugaggucaagugacugccccuauauugugcaguucuacggugcacuuuuucgggagggggauuguuggaucugcauggaacugaugagcaccucuuucgacaaauuuuauaaguacgucuauuccguguuggaugacguaauaccugaggaaauccucggaaagauuacacuggccaccguuaaagcucugaaccaucucaaggagaauuuaaaaaucauucaccgcgauaucaagccaucaaacauacugcuugacagaagcggcaauauuaaauugugugauuucggcaucagugggcagcugguggacucuauugccaagacuagggacgcgggaugccggcccuacauggcaccugagcgcaucgauccauccgccagccgacaggguuaugacgucagaucggauguguggucucuaggcaucacacucuacgaacuggcuaccgggagguuucccuacccgaaauggaacuccguguucgaccaacuuacgcaggucguuaagggagauccuccccagcugucaaauagugaggaacgggaguuuagcccauccuucauuaacuuugugaauuugugucucacuaaggacgaaucuaaacguccuaaguauaaagagcuguuaaagcaccccuucauacugauguacgaggaacgcgccguagagguggcaugcuaugucuguaaaauccucgaucagaugccagcuacccccagcucaccuauguacguggacuga

SEQ ID NO: 8995 - RNA, 1200 nt, Artificial Sequence
  derived and/or modified sequence opt4 from MKK4__Homo_sapiens__AAC24130
auggccgcccccagccccagcggcggcggcggcagcggcggcggcagcggcagcggcacccccggccccgugggcagccccgcccccggccaccccgccgugagcagcaugcagggcaagagaaaggcccugaagcugaacuucgccaacccccccuucaagagcaccgccagauucacccugaaccccaaccccaccggcgugcagaacccccacaucgagagacugagaacccacagcaucgagagcagcggcaagcugaagaucagccccgagcagcacugggacuucaccgccgaggaccugaaggaccugggcgagaucggcagaggcgccuacggcagcgugaacaagauggugcacaagcccagcggccagaucauggccgugaagagaaucagaagcaccguggacgagaaggagcagaagcagcugcugauggaccuggacguggugaugagaagcagcgacugccccuacaucgugcaguucuacggcgcccuguucagagagggcgacugcuggaucugcauggagcugaugagcaccagcuucgacaaguucuacaaguacguguacagcgugcuggacgacgugauccccgaggagauccugggcaagaucacccuggccaccgugaaggcccugaaccaccugaaggagaaccugaagaucauccacagagacaucaagcccagcaacauccugcuggacagaagcggcaacaucaagcugugcgacuucggcaucagcggccagcugguggacagcaucgccaagaccagagacgccggcugcagacccuacauggcccccgagagaaucgaccccagcgccagcagacagggcuacgacgugagaagcgacguguggagccugggcaucacccuguacgagcuggccaccggcagauuccccuaccccaaguggaacagcguguucgaccagcugacccagguggugaagggcgaccccccccagcugagcaacagcgaggagagagaguucagccccagcuucaucaacuucgugaaccugugccugaccaaggacgagagcaagagacccaaguacaaggagcugcugaagcaccccuucauccugauguacgaggagagagccguggagguggccugcuacgugugcaagauccuggaccagaugcccgccacccccagcagccccauguacguggacuga

SEQ ID NO: 8996 - RNA, 1200 nt, Artificial Sequence
  derived and/or modified sequence opt5 from MKK4__Homo_sapiens__AAC24130
auggccgcucccagcccuuccggcgggggaggcucugggggaggcagcggguccggaaccccgggccccgugggcucuccugcccccgggcacccugcggucagcuccaugcagggaaagagaaaagcucugaagcucaacuucgccaaucccccuuuuaaaucuacagcccgguucacgcugaacccgaaucccaccggcguucaaaacccucauaucgagcgccuuagaacacacagcauugaauccagcgggaagcugaaaaucucucccgagcagcauugggacuuuaccgcugaagaucucaaggaccugggagagauuggccgcggggccuacggauccgugaauaagauggugcacaaaccuagcggccagaucauggcugucaagcggauuagaucuacaguggaugaaaaagagcagaagcaacuucugauggaccucgauguugugaugcgguccagcgacugccccuauaucguccaguucuacggcgcccuguuucgcgagggggauuguuggaucugcauggaacugaugucuaccuccuucgacaaauuuuauaaguacguguauagcguucucgaugacgugauuccggaggaaauccugggaaagauuacacuugcgaccgucaaagcccugaaccaucucaaggagaaucugaaaaucauucacagagauaucaagccuuccaacauucuucuggaccggucuggcaauaucaaacucugugauuucgggaucagcggacagcugguggacuccauugcuaagacgcgcgacgccggcugcagacccuacauggcuccugagcggaucgaucccagcgccucucgccagggguaugacgugagauccgaugucuggagccugggaauuacccucuacgaacuggcgacaggccgguuucccuacccuaaauggaacucuguuuucgaccaacuuacccagguggugaagggcgauccgccccagcugagcaauuccgaggaacgcgaguuuucuccuagcuucaucaacuuugucaaucucugucugacaaaggacgaauccaaaagacccaaguauaaagagcuucugaagcacccuuucauucucauguacgaggaacgggccguggagguugcuugcuauguguguaaaauccuggaucagaugcccgccaccccgagcucuccuauguacgucgacuga

SEQ ID NO: 8997 - protein, 334 aa, Artificial Sequence
  MKK6__Homo_sapiens__P52564
MSQSKGKKRNPGLKIPKEAFEQPQTSSTPPRDLDSKACISIGNQNFEVKADDLEPIMELGRGAYGVVEKMRHVPSGQIMAVKRIRATVNSQEQKRLLMDLDISMRTVDCPFTVTFYGALFREGDVWICMELMDTSLDKFYKQVIDKGQTIPEDILGKIAVSIVKALEHLHSKLSVIHRDVKPSNVLINALGQVKMCDFGISGYLVDSVAKTIDAGCKPYMAPERINPELNQKGYSVKSDIWSLGITMIELAILRFPYDSWGTPFQQLKQVVEEPSPQLPADKFSAEFVDFTSQCLKKNSKERPTYPELMQHPFFTLHESKGTDVASFVKLILGD

SEQ ID NO: 8998 - RNA, 1005 nt, Artificial Sequence
  MKK6__Homo_sapiens__AAB05035
augucucagucgaaaggcaagaagcgaaacccuggccuuaaaauuccaaaagaagcauuugaacaaccucagaccaguuccacaccaccucgagauuuagacuccaaggcuugcauuucuauuggaaaucagaacuuugaggugaaggcagaugaccuggagccuauaauggaacugggacgaggugcguacggggugguggagaagaugcggcacgugcccagcgggcagaucauggcagugaagcggauccgagccacaguaaauagccaggaacagaaacggcuacugauggauuuggauauuuccaugaggacgguggacuguccauucacugucaccuuuuauggcgcacuguuucgggagggugauguguggaucugcauggagcucauggauacaucacuagauaaauucuacaaacaaguuauugauaaaggccagacaauuccagaggacaucuuagggaaaauagcaguuucuauuguaaaagcauuagaacauuuacauaguaagcugucugucauucacagagacgucaagccuucuaauguacucaucaaugcucucggucaagugaagaugugcgauuuuggaaucaguggcuacuugguggacucuguugcuaaaacaauugaugcagguugcaaaccauacauggccccugaaagaauaaacccagagcucaaccagaagggauacagugugaagucugacauuuggagucugggcaucacgaugauugaguuggccauccuucgauuucccuaugauucauggggaacuccauuucagcagcucaaacaggugguagaggagccaucgccacaacucccagcagacaaguucucugcagaguuuguugacuuuaccucacagugcuuaaagaagaauuccaaagaacggccuacauacccagagcuaaugcaacauccauuuuucacccuacaugaauccaaaggaacagauguggcaucuuuuguaaaacugauucuuggagacuaa

SEQ ID NO: 8999 - RNA, 1005 nt, Artificial Sequence
  derived and/or modified sequence opt1 from MKK6__Homo_sapiens__AAB05035
augagccaguccaagggcaagaagcgcaaccccgggcugaagaucccgaaggaggccuucgagcagccccagaccagcuccaccccgccccgggaccucgacagcaaggccugcaucuccaucggcaaccagaacuucgaggugaaggcggacgaccuggagcccaucauggagcuggggcgcggcgccuacggggucguggagaagaugcggcacgugcccagcggccagaucauggccgucaagcgcauccgggccacggugaacucccaggagcagaagcgccuccugauggaccuggacaucagcaugcggaccguggacugccccuucaccgucaccuucuacggcgcccucuuccgcgagggggacguguggaucugcauggagcugauggacacgucccuggacaaguucuacaagcaggucaucgacaagggccagaccauccccgaggacauccucgggaagaucgcggugagcaucgugaaggcccuggagcaccuccacuccaagcugagcgugauccaccgggacgucaagccguccaacgugcugaucaacgcccugggccaggugaagaugugcgacuucgggaucagcggcuaccucgucgacuccguggccaagaccaucgacgcgggcugcaagcccuacauggcccccgagcgcaucaaccccgagcugaaccagaagggguacagcgugaaguccgacaucuggagccugggcaucaccaugaucgagcucgccauccugcgguucccguacgacuccugggggacgcccuuccagcagcugaagcaggucguggaggagcccagcccccagcucccggccgacaaguucagcgccgaguucguggacuucaccucccagugccugaagaagaacagcaaggagcgccccaccuaccccgagcugaugcagcaccccuucuucacccuccacgaguccaagggcacggacgucgcgagcuucgugaagcugauccugggcgacuga

SEQ ID NO: 9000 - RNA, 1005 nt, Artificial Sequence
  derived and/or modified sequence opt2 from MKK6__Homo_sapiens__AAB05035
augucccaguccaagggcaagaagcgcaaccccggccucaagauccccaaggaggccuucgagcagccccagaccuccuccacccccccccgcgaccucgacuccaaggccugcaucuccaucggcaaccagaacuucgaggucaaggccgacgaccucgagcccaucauggagcucggccgcggcgccuacggcgucgucgagaagaugcgccacguccccuccggccagaucauggccgucaagcgcauccgcgccaccgucaacucccaggagcagaagcgccuccucauggaccucgacaucuccaugcgcaccgucgacugccccuucaccgucaccuucuacggcgcccucuuccgcgagggcgacgucuggaucugcauggagcucauggacaccucccucgacaaguucuacaagcaggucaucgacaagggccagaccauccccgaggacauccucggcaagaucgccgucuccaucgucaaggcccucgagcaccuccacuccaagcucuccgucauccaccgcgacgucaagcccuccaacguccucaucaacgcccucggccaggucaagaugugcgacuucggcaucuccggcuaccucgucgacuccgucgccaagaccaucgacgccggcugcaagcccuacauggcccccgagcgcaucaaccccgagcucaaccagaagggcuacuccgucaaguccgacaucuggucccucggcaucaccaugaucgagcucgccauccuccgcuuccccuacgacuccuggggcacccccuuccagcagcucaagcaggucgucgaggagcccuccccccagcuccccgccgacaaguucuccgccgaguucgucgacuucaccucccagugccucaagaagaacuccaaggagcgccccaccuaccccgagcucaugcagcaccccuucuucacccuccacgaguccaagggcaccgacgucgccuccuucgucaagcucauccucggcgacuga

SEQ ID NO: 9001 - RNA, 1005 nt, Artificial Sequence
  derived and/or modified sequence opt3 from MKK6__Homo_sapiens__AAB05035
augagccaguccaagggcaaaaagagaaaccccgggcugaaaaucccuaaggaggccuucgaacaaccacagaccucuucaacaccgcccagggaccucgauaguaaggcuugcauuagcauaggaaaucagaacuuugaggugaaggcagacgaucuugaaccuaucauggagcugggucggggcgccuacggggucguugaaaagaugcgccacgugccauccggacagauuauggcgguaaaacgaauccgugcuacugucaauucucaagagcagaagagauuguuaauggaccuggauauuucgaugaggacgguggacugucccuucaccgugacauuuuauggcgcccuauuccgggagggugauguuuggaucugcauggaacucauggacacuucacuggauaaauuuuacaaacaggugauagacaaagggcagaccaucccugaggauauucuuggaaagaucgcagucagcauugugaaggcccuggaacauuugcacaguaaacucuccguaauccaucgcgacguuaagccaucuaacgugcugauaaaugcucugggccaagucaaaaugugugauuucggcauuagcggguaucucguggacuccguggcaaagacaaucgacgccggaugcaaacccuacauggcuccugagagaauuaacccagaguuaaaucagaaggguuauucagucaaaagugauaucuggagccugggcaucaccaugauugaacuugccauauugagguuuccguacgacucuugggggacucccuuccagcagcugaagcaaguuguggaggaaccuuccccacagcuacccgcggauaaguuuucagcagaguucguagacuuuacaagccagugucucaaaaagaacaguaaagaacggccuaccuauccagagcugaugcaacaccccuucuuuacgcuucaugagucuaagggaacugauguggccuccuucgucaaacugaucuugggcgacuga

SEQ ID NO: 9002 - RNA, 1005 nt, Artificial Sequence
  derived and/or modified sequence opt4 from MKK6__Homo_sapiens__AAB05035
augagccagagcaagggcaagaagagaaaccccggccugaagauccccaaggaggccuucgagcagccccagaccagcagcaccccccccagagaccuggacagcaaggccugcaucagcaucggcaaccagaacuucgaggugaaggccgacgaccuggagcccaucauggagcugggcagaggcgccuacggcgugguggagaagaugagacacgugcccagcggccagaucauggccgugaagagaaucagagccaccgugaacagccaggagcagaagagacugcugauggaccuggacaucagcaugagaaccguggacugccccuucaccgugaccuucuacggcgcccuguucagagagggcgacguguggaucugcauggagcugauggacaccagccuggacaaguucuacaagcaggugaucgacaagggccagaccauccccgaggacauccugggcaagaucgccgugagcaucgugaaggcccuggagcaccugcacagcaagcugagcgugauccacagagacgugaagcccagcaacgugcugaucaacgcccugggccaggugaagaugugcgacuucggcaucagcggcuaccugguggacagcguggccaagaccaucgacgccggcugcaagcccuacauggcccccgagagaaucaaccccgagcugaaccagaagggcuacagcgugaagagcgacaucuggagccugggcaucaccaugaucgagcuggccauccugagauuccccuacgacagcuggggcacccccuuccagcagcugaagcaggugguggaggagcccagcccccagcugcccgccgacaaguucagcgccgaguucguggacuucaccagccagugccugaagaagaacagcaaggagagacccaccuaccccgagcugaugcagcaccccuucuucacccugcacgagagcaagggcaccgacguggccagcuucgugaagcugauccugggcgacuga

SEQ ID NO: 9003 - RNA, 1005 nt, Artificial Sequence
  derived and/or modified sequence opt5 from MKK6__Homo_sapiens__AAB05035
augagccaguccaagggcaaaaagagaaaccccgggcugaaaaucccuaaggaggccuucgaacaaccgcagaccucuagcacacccccucgggaccucgauuccaaggcuugcauuucuaucggaaaucagaacuuugaggugaaagccgacgaucuggaacccauuauggagcuuggccgcggggcguacggagucguugaaaagaugagacacgugccuagcggccagaucauggcugugaaacggauucgcgccacggucaauucccaagagcagaagagacugcucauggaccuggauaucucuaugcggaccguggacugucccuucacaguuaccuuuuauggggcccuuuuccgcgagggagauguguggaucugcauggaacugauggacacaagccucgauaaauuuuacaagcaggucauugacaaaggccagaccaucccugaggauauucugggcaagaucgcuguguccauuguuaaggcccuggaacaucuccacagcaaacugucugugauccauagagacgucaagccguccaacgugcuuauuaaugcucuggggcaagugaaaaugugugauuucggaaucagcggcuaucucgucgacucuguugccaagacaaucgacgcggggugcaaacccuacauggccccugagcggauuaaccccgagcugaaucagaagggauauuccgugaaaagcgauaucuggucucuuggcauuaccaugaucgaacuggcuauucuccgcuuuccuuacgacuccugggggacgcccuuccagcagcugaagcaaguggucgaggaaccgagcccucagcugcccgccgauaaguuuuccgcugaguucguggacuuuaccucucagugucucaaaaagaacagcaaagaaagaccuacauaucccgagcugaugcaacaccccuucuuuacccuucaugaguccaagggaacagauguugccagcuucgugaaacugauccucggcgacuga

SEQ ID NO: 9004 - protein, 419 aa, Artificial Sequence
  MKK7__Homo_sapiens__O14733
MAASSLEQKLSRLEAKLKQENREARRRIDLNLDISPQRPRPTLQLPLANDGGSRSPSSESSPQHPTPPARPRHMLGLPSTLFTPRSMESIEIDQKLQEIMKQTGYLTIGGQRYQAEINDLENLGEMGSGTCGQVWKMRFRKTGHVIAVKQMRRSGNKEENKRILMDLDVVLKSHDCPYIVQCFGTFITNTDVFIAMELMGTCAEKLKKRMQGPIPERILGKMTVAIVKALYYLKEKHGVIHRDVKPSNILLDERGQIKLCDFGISGRLVDSKAKTRSAGCAAYMAPERIDPPDPTKPDYDIRADVWSLGISLVELATGQFPYKNCKTDFEVLTKVLQEEPPLLPGHMGFSGDFQSFVKDCLTKDHRKRPKYNKLLEHSFIKRYETLEVDVASWFKDVMAKTESPRTSGVLSQPHLPFFR

SEQ ID NO: 9005 - RNA, 1260 nt, Artificial Sequence
  MKK7__Homo_sapiens__AAC26142
auggcggcguccucccuggaacagaagcugucccgccuggaagcaaagcugaagcaggagaaccgggaggcccggcggaggaucgaccucaaccuggauaucagcccccagcggcccaggcccacccugcagcucccgcuggccaacgaugggggcagccgcucgccauccucagagagcuccccgcagcaccccacgccccccgcccggccccgccacaugcuggggcucccgucaacccuguucacaccccgcagcauggagagcauugagauugaccagaagcugcaggagaucaugaagcagacgggcuaccugaccaucgggggccagcgcuaccaggcagaaaucaacgaccuggagaacuugggcgagaugggcagcggcaccugcggccagguguggaagaugcgcuuccggaagaccggccacgucauugccguuaagcaaaugcggcgcuccgggaacaaggaggagaacaagcgcauccucauggaccuggauguggugcugaagagccacgacugccccuacaucgugcagugcuuugggacguucaucaccaacacggacgucuucaucgccauggagcucaugggcaccugcgcugagaagcucaagaagcggaugcagggccccauccccgagcgcauucugggcaagaugacaguggcgauugugaaggcgcuguacuaccugaaggagaagcacggugucauccaccgcgacgucaagcccuccaacauccugcuggacgagcggggccagaucaagcucugcgacuucggcaucagcggccgccugguggacuccaaagccaagacgcggagcgccggcugugccgccuacauggcacccgagcgcauugaccccccagaccccaccaagccggacuaugacauccgggccgacguauggagccugggcaucucguugguggagcuggcaacaggacaguuucccuacaagaacugcaagacggacuuugagguccucaccaaaguccuacaggaagagcccccgcuucugcccggacacaugggcuucucgggggacuuccaguccuucgucaaagacugccuuacuaaagaucacaggaagagaccaaaguauaauaagcuacuugaacacagcuucaucaagcgcuacgagacgcuggagguggacguggcguccugguucaaggaugucauggcgaagacugagucaccgcggacuagcggcguccugagccagccccaccugcccuucuucagguag

SEQ ID NO: 9006 - RNA, 1260 nt, Artificial Sequence
  derived and/or modified sequence opt1 from MKK7__Homo_sapiens__AAC26142
auggccgccagcucccuggagcagaagcucagccgccuggaggcgaagcugaagcaggagaaccgggaggcccgccggcgcaucgaccucaaccuggacaucagcccccagcggccgcgccccacccugcagcucccccuggccaacgacggcgggucccggucccccagcuccgagagcuccccgcagcaccccaccccgcccgcccgcccccggcacaugcugggccuccccagcacgcuguucacgccccgcuccauggagagcaucgagaucgaccagaagcugcaggagaucaugaagcagaccggguaccucaccaucggcgggcagcgguaccaggccgagaucaacgaccuggagaaccugggcgagaugggcuccgggaccugcggccagguguggaagaugcgcuuccggaagaccgggcacgucaucgcggugaagcagaugcgccggagcggcaacaaggaggagaacaagcgcauccucauggaccuggacgugguccugaagucccacgacugccccuacaucgugcagugcuucgggaccuucaucaccaacacggacguguucaucgccauggagcucauggggaccugcgccgagaagcugaagaagcggaugcagggcccgauccccgagcgcauccugggcaagaugaccgucgccaucgugaaggcgcucuacuaccugaaggagaagcacggcgugauccaccgggacgucaagcccagcaacauccugcucgacgagcgcgggcagaucaagcugugcgacuucggcaucuccggccggcugguggacagcaaggccaagacccgcuccgccgggugcgccgccuacauggcgcccgagcgcaucgacccgcccgaccccacgaagcccgacuacgacauccgggccgacguguggagccucggcaucagccuggucgagcuggccaccgggcaguucccguacaagaacugcaagaccgacuucgaggugcucaccaaggugcugcaggaggagccgccccugcuccccggccacaugggguucuccggcgacuuccagagcuucgucaaggacugccugacgaaggaccaccgcaagcggcccaaguacaacaagcugcucgagcacuccuucaucaagcgcuacgagacccuggagguggacguggccagcugguucaaggacgucauggccaagaccgagagcccccggaccuccggcgugcugucccagccccaccuccccuucuuccgcuga

SEQ ID NO: 9007 - RNA, 1260 nt, Artificial Sequence
  derived and/or modified sequence opt2 from MKK7__Homo_sapiens__AAC26142
auggccgccuccucccucgagcagaagcucucccgccucgaggccaagcucaagcaggagaaccgcgaggcccgccgccgcaucgaccucaaccucgacaucuccccccagcgcccccgccccacccuccagcucccccucgccaacgacggcggcucccgcucccccuccuccgaguccuccccccagcaccccaccccccccgcccgcccccgccacaugcucggccuccccuccacccucuucaccccccgcuccauggaguccaucgagaucgaccagaagcuccaggagaucaugaagcagaccggcuaccucaccaucggcggccagcgcuaccaggccgagaucaacgaccucgagaaccucggcgagaugggcuccggcaccugcggccaggucuggaagaugcgcuuccgcaagaccggccacgucaucgccgucaagcagaugcgccgcuccggcaacaaggaggagaacaagcgcauccucauggaccucgacgucguccucaagucccacgacugccccuacaucguccagugcuucggcaccuucaucaccaacaccgacgucuucaucgccauggagcucaugggcaccugcgccgagaagcucaagaagcgcaugcagggccccauccccgagcgcauccucggcaagaugaccgucgccaucgucaaggcccucuacuaccucaaggagaagcacggcgucauccaccgcgacgucaagcccuccaacauccuccucgacgagcgcggccagaucaagcucugcgacuucggcaucuccggccgccucgucgacuccaaggccaagacccgcuccgccggcugcgccgccuacauggcccccgagcgcaucgacccccccgaccccaccaagcccgacuacgacauccgcgccgacgucuggucccucggcaucucccucgucgagcucgccaccggccaguuccccuacaagaacugcaagaccgacuucgagguccucaccaagguccuccaggaggagcccccccuccuccccggccacaugggcuucuccggcgacuuccaguccuucgucaaggacugccucaccaaggaccaccgcaagcgccccaaguacaacaagcuccucgagcacuccuucaucaagcgcuacgagacccucgaggucgacgucgccuccugguucaaggacgucauggccaagaccgaguccccccgcaccuccggcguccucucccagccccaccuccccuucuuccgcuga

SEQ ID NO: 9008 - RNA, 1260 nt, Artificial Sequence
  derived and/or modified sequence opt3 from MKK7__Homo_sapiens__AAC26142
auggccgcuagcucccuggagcagaagcucucuagacuugaagcaaaacugaagcaagagaacagggaagcccggcgccgaaucgacuugaauuuagauauuucaccccagcguccuagaccaacccugcagcuaccgcucgcgaacgacggcgggaguaggagccccuccucugagucgucaccucagcacccaacacccccugcucggccacgccauaugcugggacuucccagcacucuguucacgccuagaaguauggaauccauagagaucgaucaaaaauugcaggagauuaugaagcagaccgguuaccucacaaucggcgggcagagguaucaagccgaaauuaaugaccuggagaaccugggagaaaugggcucugguacuugcggacagguguggaaaaugcgguuucgcaagaccgggcacgucaucgcaguuaagcagaugcgaagaagcggcaauaaagaggagaacaagaggauacucauggauuuagacgugguacugaaaucccaugauuguccauacaucgugcagugcuucggcacauuuauuaccaauacugacgucuucaucgccauggaacuuauggggacaugugcugagaaguugaaaaagcggaugcaaggaccgauucccgaacguauccuggguaagaugaccguggcaauaguuaaagcccuauauuaccucaaggagaaacacggcgugauucaucgcgaugucaagccuucaaacauccugcuugacgaaagagggcagauuaaacugugcgauuuuggaaucaguggcagguugguggacagcaaggcuaaaacgcggucugccgguugugcggcauauauggccccagagcgaaucgaucccccugacccaacuaagcccgacuacgauauucgcgcugacguauggucccucgggauaucacugguugaguuagccaccggacaguucccguauaagaauugcaaaacagauuuugaagugcugacuaagguccuccaagaggaaccuccccuucugccaggccacaugggcuucagcggggacuuucagaguuucgugaaagauuguuugaccaaggaccacagaaaaaggccuaaguacaacaagcuacuggagcauucuuuuaucaaacgguacgaaacacucgagguggaugucgcauccugguucaaggacguuauggcuaaaaccgagagcccccgcacgucgggagugcugucucagccacaccuucccuuuuucagauga

SEQ ID NO: 9009 - RNA, 1260 nt, Artificial Sequence
  derived and/or modified sequence opt4 from MKK7__Homo_sapiens__AAC26142
auggccgccagcagccuggagcagaagcugagcagacuggaggccaagcugaagcaggagaacagagaggccagaagaagaaucgaccugaaccuggacaucagcccccagagacccagacccacccugcagcugccccuggccaacgacggcggcagcagaagccccagcagcgagagcagcccccagcaccccaccccccccgccagacccagacacaugcugggccugcccagcacccuguucacccccagaagcauggagagcaucgagaucgaccagaagcugcaggagaucaugaagcagaccggcuaccugaccaucggcggccagagauaccaggccgagaucaacgaccuggagaaccugggcgagaugggcagcggcaccugcggccagguguggaagaugagauucagaaagaccggccacgugaucgccgugaagcagaugagaagaagcggcaacaaggaggagaacaagagaauccugauggaccuggacguggugcugaagagccacgacugccccuacaucgugcagugcuucggcaccuucaucaccaacaccgacguguucaucgccauggagcugaugggcaccugcgccgagaagcugaagaagagaaugcagggccccauccccgagagaauccugggcaagaugaccguggccaucgugaaggcccuguacuaccugaaggagaagcacggcgugauccacagagacgugaagcccagcaacauccugcuggacgagagaggccagaucaagcugugcgacuucggcaucagcggcagacugguggacagcaaggccaagaccagaagcgccggcugcgccgccuacauggcccccgagagaaucgacccccccgaccccaccaagcccgacuacgacaucagagccgacguguggagccugggcaucagccugguggagcuggccaccggccaguuccccuacaagaacugcaagaccgacuucgaggugcugaccaaggugcugcaggaggagcccccccugcugcccggccacaugggcuucagcggcgacuuccagagcuucgugaaggacugccugaccaaggaccacagaaagagacccaaguacaacaagcugcuggagcacagcuucaucaagagauacgagacccuggagguggacguggccagcugguucaaggacgugauggccaagaccgagagccccagaaccagcggcgugcugagccagccccaccugcccuucuucagauga

SEQ ID NO: 9010 - RNA, 1260 nt, Artificial Sequence
  derived and/or modified sequence opt5 from MKK7__Homo_sapiens__AAC26142
auggccgcuagcucccuggagcagaagcucucuagacuggaagccaaacuuaagcaagagaaccgggaagcgcgcagacggaucgaccugaaucucgauauuagcccccagcgcccuagaccgacccugcagcuuccccuggcuaacgacggcgggucccggucuccuagcuccgagucuagcccccagcacccuacacccccugcccgcccgagacauaugcucggacugcccuccacgcuguucaccccucggagcauggaaucuaucgagauugaucaaaaacuccaggagaucaugaagcagacaggcuaccugaccauugggggacagcgcuaucaagccgaaaucaaugaccuugagaaccugggcgaaaugggguccggaacaugcggccagguguggaaaaugagauuucggaagaccggccacgucaucgcuguuaagcagaugcgcagaagcgggaauaaagaggagaacaagcggauucucauggaucuggacguggugcuuaaaucucaugauugucccuacaucguccagugcuucggaacauuuauuaccaauacggacguguucaucgccauggaacugaugggcaccugugcugagaagcucaaaaagcgcaugcaagggccuauucccgaaagaauccugggaaagaugacaguugccauugugaaagcgcuguauuaccucaaggagaaacacggcgucauccaucgggaugugaagccguccaacauccugcuugacgaaagagggcagauuaaacugugcgauuuuggaaucagcggccgccucguugacucuaaggccaaaacccgguccgcuggcugugccgcuuauauggccccugagagaauugaucccccugaccccacaaagcccgacuacgauauccgcgcggacguguggagccuggggauuucccuugucgagcuggccaccggacaguucccuuauaagaauugcaaaacggauuuugaagugcucacaaaggugcugcaagaggaaccgccccugcucccuggccacaugggguucucuggagacuuucagagcuucgucaaagauugucugaccaaggaccaccggaaaagacccaaguacaacaaacuucuggagcauuccuuuaucaagcgcuacgaaacacucgagguugauguggcuagcugguucaaggacgugauggccaaaaccgagucuccucggaccuccggcguccugagccagccccaccuuccguuuuucagauga

SEQ ID NO: 9011 - protein, 181 aa, Artificial Sequence
  MSTP104__Homo_sapiens__Q7Z4D5
MKDGQKILFHGEGDQEPELEPGDVIIVLDQKDHSVFQRRGHDLIMKMKIQLSEALCGFKKTIKTLDNRILVITSKAGEVIKHGDLRCVRDEGMPIYKAPLEKGILIIQFLVIFPEKHWLSLEKLPQLEALLPPRQKVRITDDMDQVELKEFCPNEQNWRQHREAYEEDEDGPQAGVQCQTA

SEQ ID NO: 9012 - RNA, 546 nt, Artificial Sequence
  MSTP104__Homo_sapiens__AAQ13629
augaaagaugggcaaaagauacuauuucauggagaaggagaucaggagccugagcuggagccuggugaugucauaauugugcuugaucagaaggaucauagugucuuucagagacgaggccaugacuugaucaugaaaaugaaaauucagcuuucugaagcucuuuguggcuucaagaagacgauaaaaacauuggacaaucgaauucuuguuauuacauccaaagcaggugaggugauaaagcacggggaccugagaugcgugcgcgaugaaggaaugcccaucuacaaagcaccccuggaaaaagggauucugaucauacaguuuuuaguaaucuuuccugaaaaacacuggcuuucucuggaaaagcuuccucagcuggaagcuuuacucccuccucgacagaaagugaggauuacagaugacauggaucagguggagcugaaggaguuuugucccaaugagcagaacuggcgucagcacagggaggccuacgaggaggacgaagacgggccccaggcuggagugcagugccagacggcauga

SEQ ID NO: 9013 - RNA, 546 nt, Artificial Sequence
  derived and/or modified sequence opt1 from MSTP104__Homo_sapiens__AAQ13629
augaaggacggccagaagauccuguuccacggggagggcgaccaggagcccgagcucgagccgggggacgugaucaucguccuggaccagaaggaccacagcguguuccagcgccggggccacgaccugaucaugaagaugaagauccagcucuccgaggcccugugcggguucaagaagaccaucaagacccuggacaaccgcauccucgugaucacgagcaaggccggcgaggucaucaagcacggcgaccugcggugcgugcgcgacgaggggaugcccaucuacaaggcgccccuggagaagggcauccucaucauccaguuccuggugaucuuccccgagaagcacuggcugucccucgagaagcugccgcagcuggaggcccuccugccgccccggcagaagguccgcaucaccgacgacauggaccagguggagcugaaggaguucugccccaacgagcagaacuggcggcagcaccgcgaggccuacgaggaggacgaggacgggccccaggccggcgugcagugccagaccgccuga

SEQ ID NO: 9014 - RNA, 546 nt, Artificial Sequence
  derived and/or modified sequence opt2 from MSTP104__Homo_sapiens__AAQ13629
augaaggacggccagaagauccucuuccacggcgagggcgaccaggagcccgagcucgagcccggcgacgucaucaucguccucgaccagaaggaccacuccgucuuccagcgccgcggccacgaccucaucaugaagaugaagauccagcucuccgaggcccucugcggcuucaagaagaccaucaagacccucgacaaccgcauccucgucaucaccuccaaggccggcgaggucaucaagcacggcgaccuccgcugcguccgcgacgagggcaugcccaucuacaaggccccccucgagaagggcauccucaucauccaguuccucgucaucuuccccgagaagcacuggcucucccucgagaagcucccccagcucgaggcccuccuccccccccgccagaagguccgcaucaccgacgacauggaccaggucgagcucaaggaguucugccccaacgagcagaacuggcgccagcaccgcgaggccuacgaggaggacgaggacggcccccaggccggcguccagugccagaccgccuga

SEQ ID NO: 9015 - RNA, 546 nt, Artificial Sequence
  derived and/or modified sequence opt3 from MSTP104__Homo_sapiens__AAQ13629
augaaggacggccagaaaauccuguuccacggggagggagaucaagaacccgagcucgaaccuggugacgugauuauaguccuugaucagaaggaccauagcguuuuucagagaaggggccacgaucugaucaugaaaaugaagauucaguuguccgaggccuuaugcggguucaaaaagaccaucaagacacuggacaaccggauucuagugaucacuucuaaagcuggagaaguaauaaagcauggcgaucuccgcugugugcgagacgaggguaugccaaucuacaaagcaccgcuggagaaggggauucuuaucauucaauuucuggucaucuuccccgaaaaacacugguugucacucgagaagcugccucagcuggaagcccucuuaccaccccgucagaaggugagaauaacggaugacauggaucagguugagcugaaagaguuuugcccuaaugaacaaaacuggaggcagcaucgggaggcguaugaagaggacgaagauggaccacaggcuggcgugcagugucaaaccgccuga

SEQ ID NO: 9016 - RNA, 546 nt, Artificial Sequence
  derived and/or modified sequence opt4 from MSTP104__Homo_sapiens__AAQ13629
augaaggacggccagaagauccuguuccacggcgagggcgaccaggagcccgagcuggagcccggcgacgugaucaucgugcuggaccagaaggaccacagcguguuccagagaagaggccacgaccugaucaugaagaugaagauccagcugagcgaggcccugugcggcuucaagaagaccaucaagacccuggacaacagaauccuggugaucaccagcaaggccggcgaggugaucaagcacggcgaccugagaugcgugagagacgagggcaugcccaucuacaaggccccccuggagaagggcauccugaucauccaguuccuggugaucuuccccgagaagcacuggcugagccuggagaagcugccccagcuggaggcccugcugccccccagacagaaggugagaaucaccgacgacauggaccagguggagcugaaggaguucugccccaacgagcagaacuggagacagcacagagaggccuacgaggaggacgaggacggcccccaggccggcgugcagugccagaccgccuga

SEQ ID NO: 9017 - RNA, 546 nt, Artificial Sequence
  derived and/or modified sequence opt5 from MSTP104__Homo_sapiens__AAQ13629
augaaggacggccagaaaauccuguuccacggggagggagaucaagaacccgagcucgaaccuggcgacgugauuaucguccuggaucagaaggaccauagcguuuuucagagacgggggcacgaucuuauuaugaaaaugaagauccagcuguccgaggcccucugcggauucaaaaagaccauuaagacacuggacaaccgcauccuugugaucacgucuaaagcuggcgaagugauuaagcauggggaucugagauguguccgggacgagggaaugccgaucuacaaagcgccccucgagaagggcauucugaucauucaauuucuggugaucuucccugaaaaacacuggcucagccuggagaaacuuccccagcuggaagcccuccugccuccccgccagaagguuagaauuaccgaugacauggaucagguggagcuuaaggaguuuugcccuaaugaacaaaacuggcggcagcaucgcgaggcuuaugaagaggacgaagauggcccgcaggccgggguccagugucaaacagccuga

SEQ ID NO: 9018 - protein, 296 aa, Artificial Sequence
  MyD88__Homo_sapiens__Q99836
MAAGGPGAGSAAPVSSTSSLPLAALNMRVRRRLSLFLNVRTQVAADWTALAEEMDFEYLEIRQLETQADPTGRLLDAWQGRPGASVGRLLELLTKLGRDDVLLELGPSIEEDCQKYILKQQQEEAEKPLQVAAVDSSVPRTAELAGITTLDDPLGHMPERFDAFICYCPSDIQFVQEMIRQLEQTNYRLKLCVSDRDVLPGTCVWSIASELIEKRCRRMVVVVSDDYLQSKECDFQTKFALSLSPGAHQKRLIPIKYKAMKKEFPSILRFITVCDYTNPCTKSWFWTRLAKALSLP

SEQ ID NO: 9019 - RNA, 891 nt, Artificial Sequence
  MyD88__Homo_sapiens__AAC50954
auggcugcaggaggucccggcgcggggucugcggccccggucuccuccacauccucccuuccccuggcugcucucaacaugcgagugcggcgccgccugucucuguucuugaacgugcggacacagguggcggccgacuggaccgcgcuggcggaggagauggacuuugaguacuuggagauccggcaacuggagacacaagcggaccccacuggcaggcugcuggacgccuggcagggacgcccuggcgccucuguaggccgacugcucgagcugcuuaccaagcugggccgcgacgacgugcugcuggagcugggacccagcauugaggaggauugccaaaaguauaucuugaagcagcagcaggaggaggcugagaagccuuuacagguggccgcuguagacagcagugucccacggacagcagagcuggcgggcaucaccacacuugaugacccccuggggcauaugccugagcguuucgaugccuucaucugcuauugccccagcgacauccaguuugugcaggagaugauccggcaacuggaacagacaaacuaucgacugaaguugugugugucugaccgcgauguccugccuggcaccugugucuggucuauugcuagugagcucaucgaaaagaggugccgccggaugguggugguugucucugaugauuaccugcagagcaaggaaugugacuuccagaccaaauuugcacucagccucucuccaggugcccaucagaagcgacugauccccaucaaguacaaggcaaugaagaaagaguuccccagcauccugagguucaucacugucugcgacuacaccaaccccugcaccaaaucuugguucuggacucgccuugccaaggccuugucccugcccuga

SEQ ID NO: 9020 - RNA, 891 nt, Artificial Sequence
  derived and/or modified sequence opt1 from MyD88__Homo_sapiens__AAC50954
auggccgccggcgggcccggcgcggggagcgccgccccgguguccagcaccuccagccugccccucgccgcccugaacaugcgcguccggcgccggcugucccucuuccugaacgugcgcacccagguggcggccgacuggacggcccuggccgaggagauggacuucgaguaccucgagauccggcagcuggagacccaggcggaccccaccggccgccugcucgacgccuggcaggggcggcccggcgccagcgucggccgccugcuggagcuccugaccaagcuggggcgggacgacgugcuccuggagcugggcccguccaucgaggaggacugccagaaguacauccucaagcagcagcaggaggaggccgagaagccccuccagguggccgcggucgacagcuccgugccccgcacggccgagcuggccgggaucaccacccuggacgacccccugggccacaugccggagcgguucgacgccuucaucugcuacugccccagcgacauccaguucgugcaggagaugauccgccagcuggagcagaccaacuaccggcucaagcugugcgucuccgaccgcgacgugcugcccgggacgugcguguggagcaucgccuccgagcucaucgagaagcggugccgccggauggucgugguggucagcgacgacuaccugcaguccaaggagugcgacuuccagaccaaguucgcgcugagccucucccccggcgcccaccagaagcgccugaucccgaucaaguacaaggccaugaagaaggaguuccccagcauccugcgguucaucaccgugugcgacuacaccaaccccugcacgaaguccugguucuggacccgccucgccaaggcccugagccugcccuga

SEQ ID NO: 9021 - RNA, 891 nt, Artificial Sequence
  derived and/or modified sequence opt2 from MyD88__Homo_sapiens__AAC50954
auggccgccggcggccccggcgccggcuccgccgcccccgucuccuccaccuccucccucccccucgccgcccucaacaugcgcguccgccgccgccucucccucuuccucaacguccgcacccaggucgccgccgacuggaccgcccucgccgaggagauggacuucgaguaccucgagauccgccagcucgagacccaggccgaccccaccggccgccuccucgacgccuggcagggccgccccggcgccuccgucggccgccuccucgagcuccucaccaagcucggccgcgacgacguccuccucgagcucggccccuccaucgaggaggacugccagaaguacauccucaagcagcagcaggaggaggccgagaagccccuccaggucgccgccgucgacuccuccgucccccgcaccgccgagcucgccggcaucaccacccucgacgacccccucggccacaugcccgagcgcuucgacgccuucaucugcuacugccccuccgacauccaguucguccaggagaugauccgccagcucgagcagaccaacuaccgccucaagcucugcgucuccgaccgcgacguccuccccggcaccugcgucugguccaucgccuccgagcucaucgagaagcgcugccgccgcauggucgucgucgucuccgacgacuaccuccaguccaaggagugcgacuuccagaccaaguucgcccucucccucucccccggcgcccaccagaagcgccucauccccaucaaguacaaggccaugaagaaggaguuccccuccauccuccgcuucaucaccgucugcgacuacaccaaccccugcaccaaguccugguucuggacccgccucgccaaggcccucucccuccccuga

SEQ ID NO: 9022 - RNA, 891 nt, Artificial Sequence
  derived and/or modified sequence opt3 from MyD88__Homo_sapiens__AAC50954
auggccgcuggcgggcccggagcagguagcgccgcgccuguguccucuaccucaagucugccacucgcugcccuuaacaugagagucaggcggcgccugagcuuguucuuaaauguucgaacacagguggcagccgacuggacugcucuggcagaggaaauggauuuugaguaccuagaaauccgucaacucgagacgcaggccgacccgaccggcagacugcuugaugcuuggcaggggaggcccggagccuccguaggccggcuguuggaacuccugacaaagcugggucgcgacgaugugcucuuagagcuggggccuucuauugaggaagacugccagaaauauauacuuaagcaacagcaggaggaagcggagaaaccauugcaggucgcagccguggauucgucaguucccagaacugcugagcuggccggaaucaccacacuagacgauccucucggccacaugccagaaagguucgacgcauuuauuuguuacugccccagcgauauccaauucgugcaggagaugauucggcagcuggaacagaccaacuaucgccuuaagcugugugucagugaccgagauguguugccuggcacuugcguaugguccaucgcuucugagcucauagagaaaagauguaggcggaugguuguggucgugagcgacgacuaccugcaauccaaggaaugcgauuuucagacaaaguucgccuuaucacugaguccaggggcgcaucagaaacgucucaucccgauuaaguauaaagccaugaagaaagaguuucccagcauccuucgcuucauuaccgugugugacuacacgaauccuugcacuaagucuugguuuuggaccagacuggcaaaggcuuugucccuaccauga

SEQ ID NO: 9023 - RNA, 891 nt, Artificial Sequence
  derived and/or modified sequence opt4 from MyD88__Homo_sapiens__AAC50954
auggccgccggcggccccggcgccggcagcgccgcccccgugagcagcaccagcagccugccccuggccgcccugaacaugagagugagaagaagacugagccuguuccugaacgugagaacccagguggccgccgacuggaccgcccuggccgaggagauggacuucgaguaccuggagaucagacagcuggagacccaggccgaccccaccggcagacugcuggacgccuggcagggcagacccggcgccagcgugggcagacugcuggagcugcugaccaagcugggcagagacgacgugcugcuggagcugggccccagcaucgaggaggacugccagaaguacauccugaagcagcagcaggaggaggccgagaagccccugcagguggccgccguggacagcagcgugcccagaaccgccgagcuggccggcaucaccacccuggacgacccccugggccacaugcccgagagauucgacgccuucaucugcuacugccccagcgacauccaguucgugcaggagaugaucagacagcuggagcagaccaacuacagacugaagcugugcgugagcgacagagacgugcugcccggcaccugcguguggagcaucgccagcgagcugaucgagaagagaugcagaagaaugguggugguggugagcgacgacuaccugcagagcaaggagugcgacuuccagaccaaguucgcccugagccugagccccggcgcccaccagaagagacugauccccaucaaguacaaggccaugaagaaggaguuccccagcauccugagauucaucaccgugugcgacuacaccaaccccugcaccaagagcugguucuggaccagacuggccaaggcccugagccugcccuga

SEQ ID NO: 9024 - RNA, 891 nt, Artificial Sequence
  derived and/or modified sequence opt5 from MyD88__Homo_sapiens__AAC50954
auggccgcuggcgggcccggagccggcagcgcggcuccuguguccucuaccagcucccugccgcucgccgcccugaacaugagaguccggcgcagacuuucucuguuccucaauguucggacacagguggcugccgacuggacggcucuggccgaggaaauggauuuugaguaccuugaaauccgccaacuggagacccaggcggaccccacagggagacuccuggaugccuggcagggacggccuggcgcuagcguggggcgccugcucgaacugcuuaccaagcugggaagagacgauguccuccuggagcuuggccccuccauugaggaagacugccagaaauauauccugaagcaacagcaggaggaagccgagaaaccucuccagguggcugccguugauucuagcgugccccggacagcggagcuggccggcauuaccacacuggacgauccucucgggcacaugccggaacgcuucgacgcuuuuaucuguuacugccccuccgauauucaauucguccaggagaugaucagacagcuggaacagaccaacuaucggcuuaagcugugugugagcgaccgcgauguucucccuggaacgugcguguggucuaucgccuccgagcugauugagaaaagaugucggcgcauggucgugguggucagcgacgacuaccuucaaucuaaggaaugcgauuuucagaccaaguucgcucugucccucagccccggcgcccaucagaaaagacugaucccuauuaaguauaaagccaugaagaaagaguuucccucuauccugcgguucauuacaguuugugacuacaccaauccgugcacaaaguccugguuuuggaccagacucgcuaaggcgcugagccuuccuuga

SEQ ID NO: 9025 - protein, 655 aa, Artificial Sequence
  NALP10__Homo_sapiens__Q86W26
MAMAKARKPREALLWALSDLEENDFKKLKFYLRDMTLSEGQPPLARGELEGLIPVDLAELLISKYGEKEAVKVVLKGLKVMNLLELVDQLSHICLHDYREVYREHVRCLEEWQEAGVNGRYNQVLLVAKPSSESPESLACPFPEQELESVTVEALFDSGEKPSLAPSLVVLQGSAGTGKTTLARKMVLDWATGTLYPGRFDYVFYVSCKEVVLLLESKLEQLLFWCCGDNQAPVTEILRQPERLLFILDGFDELQRPFEEKLKKRGLSPKESLLHLLIRRHTLPTCSLLITTRPLALRNLEPLLKQARHVHILGFSEEERARYFSSYFTDEKQADRAFDIVQKNDILYKACQVPGICWVVCSWLQGQMERGKVVLETPRNSTDIFMAYVSTFLPPDDDGGCSELSRHRVLRSLCSLAAEGIQHQRFLFEEAELRKHNLDGPRLAAFLSSNDYQLGLAIKKFYSFRHISFQDFFHAMSYLVKEDQSRLGKESRREVQRLLEVKEQEGNDEMTLTMQFLLDISKKDSFSNLELKFCFRISPCLAQDLKHFKEQMESMKHNRTWDLEFSLYEAKIKNLVKGIQMNNVSFKIKHSNEKKSQSQNLFSVKSSLSHGPKEEQKCPSVHGQKEGKDNIAGTQKEASTGKGRGTEETPKNTYI

SEQ ID NO: 9026 - RNA, 1968 nt, Artificial Sequence
  NALP10__Homo_sapiens__AAI04958
auggccauggccaaggccagaaagccccgggaggcauugcucugggccuugagugaccuugaggagaacgauuucaagaaguuaaaguucuacuuacgggauaugacccugucugagggccagcccccacuggccagaggggaguuggagggccugauuccgguggaccuggcagaauuacugauuucaaaguauggagaaaaggaggcugugaaaguuguccucaagggcuugaaggucaugaaccuguuggaacuuguggaccagcucagccauauuugucugcaugauuacagagaaguauaccgagagcaugugcgcugccuagaggaauggcaggaagcaggagucaauggcagauacaaccaggugcuccugguggccaagcccagcucagagagcccagaaucacuugccugccccuucccggagcaggagcuggagucugucacgguggaggcucuauuugauucaggggaaaagcccucacuggccccauccuuaguugugcuacaggggucggcuggcacuggaaagacaacucucgccagaaaaaugguguuggacugggccaccgguacucuguacccaggccgguuugauuaugucuuuuauguaagcugcaaagaagugguccugcugcuggagagcaaacuggagcagcuccuuuucuggugcugcggggacaaucaagccccugucacagagauucugaggcagccagagcggcuccuguucauccuggauggcuuugaugagcugcagaggcccuuugaagaaaaguugaagaagagggguuugagucccaaggagagccugcugcaccuucuaauuaggagacauacacuccccacgugcucccuucucaucaccacccggccccuggcuuugaggaaucuggagcccuugcugaaacaagcacgucauguccauauccuaggcuucucugaggaggagagggcgagguacuucagcuccuauuucacggaugagaagcaagcugaccgugccuucgacauuguacagaaaaaugacauucucuacaaagcgugucagguuccaggcauuugcuggguggucugcuccuggcugcaggggcagauggagagaggcaaaguugucuuagagacaccuagaaacagcacugacaucuucauggcuuacgucuccaccuuucugccgcccgaugaugaugggggcugcuccgagcuuucccggcacaggguccugaggagucugugcucccuagcagcugaagggauucagcaccagagguuccuauuugaagaagcugagcucaggaaacauaauuuagauggccccaggcuugccgcuuuccugaguaguaacgacuaccaauugggacuugccaucaagaaguucuacagcuuccgccacaucagcuuccaggacuuuuuucaugccaugucuuaccuggugaaagaggaccaaagccggcuggggaaggagucccgcagagaagugcaaaggcugcuggagguaaaggagcaggaagggaaugaugagaugacccucacuaugcaguuuuuacuggacaucucgaaaaaagacagcuucucgaacuuggagcucaaguucugcuucagaauuucucccuguuuagcgcaggaucugaagcauuuuaaagaacagauggaaucuaugaagcacaacaggaccugggauuuggaauucucccuguaugaagcuaaaauaaagaaucugguaaaagguauucagaugaacaauguaucauucaagauaaaacauucaaaugaaaagaaaucacagagccagaauuuauuuucugucaaaagcagcuugagucauggaccuaaggaggagcaaaaauguccuucuguccauggacagaaggagggcaaagauaauauagcaggaacacaaaaggaagcuucuacuggaaaaggcagagggacagaggaaacaccaaaaaauacuuacauauaa

SEQ ID NO: 9027 - RNA, 1968 nt, Artificial Sequence
  derived and/or modified sequence opt1 from NALP10__Homo_sapiens__AAI04958
auggccauggccaaggcgcgcaagccccgggaggcccugcucugggcccugagcgaccuggaggagaacgacuucaagaagcucaaguucuaccugcgcgacaugacccuguccgagggccagccgccccucgcccgcggggagcuggagggccugauccccguggaccucgccgagcugcugaucagcaaguacggggagaaggaggcggucaagguggugcucaagggccugaaggucaugaaccugcucgagcugguggaccagcugucccacaucugccuccacgacuaccgggagguguaccgggagcacguccgcugccuggaggaguggcaggaggccggggugaacggccgguacaaccaggugcugcucgucgccaagcccagcuccgagagcccggagucccuggccugccccuuccccgagcaggagcuggagagcgugaccguggaggcgcuguucgacuccggcgagaagcccagccuggccccgucccuggucgugcuccaggggagcgccggcacggggaagaccacccuggcccgcaagauggugcuggacugggccaccggcacgcucuaccccgggcgguucgacuacgucuucuacguguccugcaaggaggugguccugcugcucgagagcaagcuggagcagcugcuguucuggugcugcggcgacaaccaggcgcccgugaccgagauccugcgccagcccgagcggcuccucuucauccuggacggcuucgacgagcugcagcgcccguucgaggagaagcucaagaagcgggggcugucccccaaggagagccugcuccaccuccugauccgccggcacacccucccgaccugcucccugcugaucacgacccgcccccuggcccuccggaaccuggagccccugcucaagcaggcccgccacgugcacauccugggcuucagcgaggaggagcgggcccgcuacuucuccagcuacuucaccgacgagaagcaggccgaccgggcguucgacaucguccagaagaacgacauccuguacaaggccugccaggugcccgggaucugcuggguggucugcagcuggcuccagggccagauggagcgcggcaaggugguccuggagacgccccgcaacuccaccgacaucuucauggccuacgugagcaccuuccugcccccggacgacgacgggggcugcuccgagcucagccggcaccgcgugcugcggucccugugcagccucgccgccgaggggauccagcaccagcgcuuccuguucgaggaggcggagcugcggaagcacaaccucgacggcccccgccuggccgccuuccuguccagcaacgacuaccagcucgggcuggccaucaagaaguucuacuccuuccggcacaucagcuuccaggacuucuuccacgccauguccuaccuggucaaggaggaccagagccgccucggcaaggagucccggcgcgaggugcagcggcugcuggaggugaaggagcaggagggcaacgacgagaugacccucaccaugcaguuccugcuggacaucagcaagaaggacuccuucagcaaccucgagcugaaguucugcuuccgcaucucccccugccuggcgcaggaccucaagcacuucaaggagcagauggagagcaugaagcacaaccggacgugggaccuggaguucucccuguacgaggccaagaucaagaaccucgucaaggggauccagaugaacaacgugagcuucaagaucaagcacagcaacgagaagaagucccagagccagaaccuguucuccgucaagagcucccugagccacggccccaaggaggagcagaagugcccguccgugcacgggcagaaggagggcaaggacaacaucgccgggacccagaaggaggccagcaccggcaagggccgcgggaccgaggagacgcccaagaacaccuacaucuga

SEQ ID NO: 9028 - RNA, 1968 nt, Artificial Sequence
  derived and/or modified sequence opt2 from NALP10__Homo_sapiens__AAI04958
auggccauggccaaggcccgcaagccccgcgaggcccuccucugggcccucuccgaccucgaggagaacgacuucaagaagcucaaguucuaccuccgcgacaugacccucuccgagggccagcccccccucgcccgcggcgagcucgagggccucauccccgucgaccucgccgagcuccucaucuccaaguacggcgagaaggaggccgucaaggucguccucaagggccucaaggucaugaaccuccucgagcucgucgaccagcucucccacaucugccuccacgacuaccgcgaggucuaccgcgagcacguccgcugccucgaggaguggcaggaggccggcgucaacggccgcuacaaccagguccuccucgucgccaagcccuccuccgagucccccgagucccucgccugccccuuccccgagcaggagcucgaguccgucaccgucgaggcccucuucgacuccggcgagaagcccucccucgcccccucccucgucguccuccagggcuccgccggcaccggcaagaccacccucgcccgcaagaugguccucgacugggccaccggcacccucuaccccggccgcuucgacuacgucuucuacgucuccugcaaggaggucguccuccuccucgaguccaagcucgagcagcuccucuucuggugcugcggcgacaaccaggcccccgucaccgagauccuccgccagcccgagcgccuccucuucauccucgacggcuucgacgagcuccagcgccccuucgaggagaagcucaagaagcgcggccucucccccaaggagucccuccuccaccuccucauccgccgccacacccuccccaccugcucccuccucaucaccacccgcccccucgcccuccgcaaccucgagccccuccucaagcaggcccgccacguccacauccucggcuucuccgaggaggagcgcgcccgcuacuucuccuccuacuucaccgacgagaagcaggccgaccgcgccuucgacaucguccagaagaacgacauccucuacaaggccugccagguccccggcaucugcugggucgucugcuccuggcuccagggccagauggagcgcggcaaggucguccucgagaccccccgcaacuccaccgacaucuucauggccuacgucuccaccuuccucccccccgacgacgacggcggcugcuccgagcucucccgccaccgcguccuccgcucccucugcucccucgccgccgagggcauccagcaccagcgcuuccucuucgaggaggccgagcuccgcaagcacaaccucgacggcccccgccucgccgccuuccucuccuccaacgacuaccagcucggccucgccaucaagaaguucuacuccuuccgccacaucuccuuccaggacuucuuccacgccauguccuaccucgucaaggaggaccagucccgccucggcaaggagucccgccgcgagguccagcgccuccucgaggucaaggagcaggagggcaacgacgagaugacccucaccaugcaguuccuccucgacaucuccaagaaggacuccuucuccaaccucgagcucaaguucugcuuccgcaucucccccugccucgcccaggaccucaagcacuucaaggagcagauggaguccaugaagcacaaccgcaccugggaccucgaguucucccucuacgaggccaagaucaagaaccucgucaagggcauccagaugaacaacgucuccuucaagaucaagcacuccaacgagaagaagucccagucccagaaccucuucuccgucaaguccucccucucccacggccccaaggaggagcagaagugccccuccguccacggccagaaggagggcaaggacaacaucgccggcacccagaaggaggccuccaccggcaagggccgcggcaccgaggagacccccaagaacaccuacaucuga

SEQ ID NO: 9029 - RNA, 1968 nt, Artificial Sequence
  derived and/or modified sequence opt3 from NALP10__Homo_sapiens__AAI04958
auggccauggcuaaggcaagaaaacccagggaggcccugcucugggcgcuuagcgaccuggaagagaacgauuucaagaaauugaaguuuuacuuacgggacaugacccuguccgaaggccagccuccacuagcucgcggggagcucgaaggacugaucccgguggaucuugccgagcuguugauuucuaaauauggugagaaggaagcagucaagguugugcucaaaggccugaagguaaugaaucugcucgaguuaguggaccaacugucacacauaugccuucaugauuaccgagaagucuaucgugagcacgugagauguuuggaggaauggcaggaggccgggguuaacggaagguacaaucaggugcugcuagucgcuaaacccaguagcgaauccccugagucucucgcaugcccauuccccgaacaggagcuggagucggugacaguagaagcccuuuuugacucaggcgagaagccuagccuggcuccaaguuugguugugcuccaagguuccgccgggacuggaaaaacgacccuggcgcggaagauggucuuagauugggcaacaggcacucuguaucccggccgcuucgacuacguguuuuaugugucuuguaaggaagucguucuccuucuggagagcaaauuggaacagcuacuguucuggugcuguggggauaaccaggccccugugaccgagauccucagacagccagagaggcugcuuuuuauucuggacggauucgaugaauugcaacggccguuugaggaaaagcucaaaaagcgcggucugucccccaaagagucauuacugcaucuacucauccgaagacacacacugccuaccugcagucuuuugauuacuacaaggccacuggcucuccggaaucuggaaccccuucugaagcaggcccgucauguacacaucuugggcuucagcgaggaggaacgcgcaagauacuuuucuuccuacuucaccgacgagaaacaggcugauagggccuuugacauagugcagaagaacgacauccucuauaaggcgugucaagucccugggauuugcugggugguuuguucauggcugcagggacagauggaacggggcaaaguggucuuagagacgccacgaaauagcacugauaucuucauggccuacgugaguaccuuccugcccccggacgaugacggugggugcucugagcuaucccgccacagaguacucaggagccuguguucgcuugcagcugaaggcauucaacaucagcgguuuuuguucgaggaagccgagcugcgcaagcacaaccucgauggaccuagacuggcugccuuuuuaucuuccaaugacuaucagcugggccuugcaaucaaaaaguucuacucauuuaggcauauaaguuuccaggauuucuuccacgccaugagcuauuugguuaaagaagaccaaucccgucucgggaaggagucucggcgagaggugcagagacugcuagaagucaaggagcaggaaggaaacgaugagaugacacugacuaugcaguuucuccuggacauuagcaaaaaggauucauucaguaaucuugaauugaaauuuugcuucaggaucucccccugccuggcucaagacuuaaagcacuuuaaagagcagauggagagcaugaagcauaaccgcaccugggaccucgaauuuucucuguacgaggcgaagauuaaaaaucuugugaaggguauccagaugaacaaugucucauucaaaaucaagcacaguaacgagaaaaagagccagucccaaaaccuguuuucugugaagucgagcuugucccauggcccaaaagaagaacagaaguguccuucaguucacgggcagaaagagggaaaggauaauauugcaggcacacagaaagaggccaguaccgguaaggggcggggcacggaagagacucccaaaaacacauauauauga

SEQ ID NO: 9030 - RNA, 1968 nt, Artificial Sequence
  derived and/or modified sequence opt4 from NALP10__Homo_sapiens__AAI04958
auggccauggccaaggccagaaagcccagagaggcccugcugugggcccugagcgaccuggaggagaacgacuucaagaagcugaaguucuaccugagagacaugacccugagcgagggccagcccccccuggccagaggcgagcuggagggccugauccccguggaccuggccgagcugcugaucagcaaguacggcgagaaggaggccgugaagguggugcugaagggccugaaggugaugaaccugcuggagcugguggaccagcugagccacaucugccugcacgacuacagagagguguacagagagcacgugagaugccuggaggaguggcaggaggccggcgugaacggcagauacaaccaggugcugcugguggccaagcccagcagcgagagccccgagagccuggccugccccuuccccgagcaggagcuggagagcgugaccguggaggcccuguucgacagcggcgagaagcccagccuggcccccagccugguggugcugcagggcagcgccggcaccggcaagaccacccuggccagaaagauggugcuggacugggccaccggcacccuguaccccggcagauucgacuacguguucuacgugagcugcaaggagguggugcugcugcuggagagcaagcuggagcagcugcuguucuggugcugcggcgacaaccaggcccccgugaccgagauccugagacagcccgagagacugcuguucauccuggacggcuucgacgagcugcagagacccuucgaggagaagcugaagaagagaggccugagccccaaggagagccugcugcaccugcugaucagaagacacacccugcccaccugcagccugcugaucaccaccagaccccuggcccugagaaaccuggagccccugcugaagcaggccagacacgugcacauccugggcuucagcgaggaggagagagccagauacuucagcagcuacuucaccgacgagaagcaggccgacagagccuucgacaucgugcagaagaacgacauccuguacaaggccugccaggugcccggcaucugcuggguggugugcagcuggcugcagggccagauggagagaggcaagguggugcuggagacccccagaaacagcaccgacaucuucauggccuacgugagcaccuuccugccccccgacgacgacggcggcugcagcgagcugagcagacacagagugcugagaagccugugcagccuggccgccgagggcauccagcaccagagauuccuguucgaggaggccgagcugagaaagcacaaccuggacggccccagacuggccgccuuccugagcagcaacgacuaccagcugggccuggccaucaagaaguucuacagcuucagacacaucagcuuccaggacuucuuccacgccaugagcuaccuggugaaggaggaccagagcagacugggcaaggagagcagaagagaggugcagagacugcuggaggugaaggagcaggagggcaacgacgagaugacccugaccaugcaguuccugcuggacaucagcaagaaggacagcuucagcaaccuggagcugaaguucugcuucagaaucagccccugccuggcccaggaccugaagcacuucaaggagcagauggagagcaugaagcacaacagaaccugggaccuggaguucagccuguacgaggccaagaucaagaaccuggugaagggcauccagaugaacaacgugagcuucaagaucaagcacagcaacgagaagaagagccagagccagaaccuguucagcgugaagagcagccugagccacggccccaaggaggagcagaagugccccagcgugcacggccagaaggagggcaaggacaacaucgccggcacccagaaggaggccagcaccggcaagggcagaggcaccgaggagacccccaagaacaccuacaucuga

SEQ ID NO: 9031 - RNA, 1968 nt, Artificial Sequence
  derived and/or modified sequence opt5 from NALP10__Homo_sapiens__AAI04958
auggccauggcuaaggccagaaaaccccgggaggcgcugcucugggcucugagcgaccuugaagagaacgauuucaagaaacugaaguuuuaccuccgcgacaugacccuguccgaaggccagccuccgcuugccagaggggagcuggaaggacucauccccguggaucuggccgagcugcucauuucuaaauauggcgagaaggaagcugucaagguugugcugaaagggcuuaaggugaugaaucugcucgagcuggucgaccaacuuagccacaucugccugcaugauuaccgggaaguguaucgcgagcacguuagaugucucgaggaauggcaggaggccggagugaacggccgguacaaucagguccugcugguggcuaaaccuuccucugaaagccccgagucccucgccugcccuuuccccgaacaggagcuggagucuguuacaguggaagcgcuuuuugacagcggggagaagccuucccuggccccgagccucgucgugcugcaaggaucugcuggcacgggcaaaaccacacuugcccgcaagauggugcuggauugggcuaccgggacacucuaucccggaagauucgacuacgucuuuuauguuuccuguaaggaaguggugcugcugcucgagagcaaacuggaacagcuucuguucuggugcuguggcgauaaccaggccccugucaccgagauucuccggcagcccgagcgccugcuuuuuauccuggacggguucgaugaacuccaaagaccuuuugaggaaaagcugaaaaagcggggacugucucccaaagagucccuccugcaucuucugauucgcagacacacacucccgaccugcagccugcugaucacgacccggccucuugcgcuccgcaaucuggaaccccugcucaagcaggccagacaugugcacauccugggcuucucugaggaggaacgggcuagauacuuuuccagcuacuucacagacgagaaacaggccgaucgcgcuuuugacauuguucagaagaacgacauccuuuauaaggccugucaagugccugggauuugcugggucguguguuccuggcugcagggacagauggaacggggcaaaguugugcucgagacccccagaaauucuacagauaucuucauggccuacgucagcaccuuccugcccccugacgaugacggcgggugcuccgagcugagccgccaccgggugcuuagaucucucuguucccuggcugcggaaggcauucaacaucagcgcuuucuguucgaggaagccgagcuccggaagcacaaccuggauggaccgagacuugcugccuuucugagcucuaaugacuaucagcucgggcuggccaucaaaaaguucuacagcuuucgccauauuuccuuccaggauuucuuccacgcuaugucuuaucuggucaaagaagaccaaagccggcuuggaaaggaguccagacgcgaggugcagcggcuccuggaaguuaaggagcaggaaggcaacgaugagaugacgcugacaaugcaguuucuccuggacaucagcaaaaaggauucuuucuccaaucuugaacugaaauuuugcuucagaaucagccccugccucgcccaagaccugaagcacuuuaaagagcagauggagucuaugaagcauaaccggaccugggaccuggaauuuucccuuuacgaggcgaagauuaaaaaucucgugaaggggauccagaugaacaaugucagcuucaaaauuaagcacuccaacgagaaaaagucucagagccaaaaccuguuuuccgugaagucuagccugucccauggaccuaaagaagaacagaagugucccagcguucacggccagaaagagggcaaggauaauaucgcugggacacagaaagaggccucuaccggaaagggccgcgggaccgaagagacaccuaaaaacacguauauuuga

SEQ ID NO: 9032 - protein, 1033 aa, Artificial Sequence
  NALP11__Homo_sapiens__P59045
MAESDSTDFDLLWYLENLSDKEFQSFKKYLARKILDFKLPQFPLIQMTKEELANVLPISYEGQYIWNMLFSIFSMMRKEDLCRKIIGRRNRNQEACKAVMRRKFMLQWESHTFGKFHYKFFRDVSSDVFYILQLAYDSTSYYSANNLNVFLMGERASGKTIVINLAVLRWIKGEMWQNMISYVVHLTAHEINQMTNSSLAELIAKDWPDGQAPIADILSDPKKLLFILEDLDNIRFELNVNESALCSNSTQKVPIPVLLVSLLKRKMAPGCWFLISSRPTRGNNVKTFLKEVDCCTTLQLSNGKREIYFNSFFKDRQRASAALQLVHEDEILVGLCRVAILCWITCTVLKRQMDKGRDFQLCCQTPTDLHAHFLADALTSEAGLTANQYHLGLLKRLCLLAAGGLFLSTLNFSGEDLRCVGFTEADVSVLQAANILLPSNTHKDRYKFIHLNVQEFCTAIAFLMAVPNYLIPSGSREYKEKREQYSDFNQVFTFIFGLLNANRRKILETSFGYQLPMVDSFKWYSVGYMKHLDRDPEKLTHHMPLFYCLYENREEEFVKTIVDALMEVTVYLQSDKDMMVSLYCLDYCCHLRTLKLSVQRIFQNKEPLIRPTASQMKSLVYWREICSLFYTMESLRELHIFDNDLNGISERILSKALEHSSCKLRTLKLSYVSTASGFEDLLKALARNRSLTYLSINCTSISLNMFSLLHDILHEPTCQISHLSLMKCDLRASECEEIASLLISGGSLRKLTLSSNPLRSDGMNILCDALLHPNCTLISLVLVFCCLTENCCSALGRVLLFSPTLRQLDLCVNRLKNYGVLHVTFPLLFPTCQLEELHLSGCFFSSDICQYIAIVIATNEKLRSLEIGSNKIEDAGMQLLCGGLRHPNCMLVNIGLEECMLTSACCRSLASVLTTNKTLERLNLLQNHLGNDGVAKLLESLISPDCVLKVVGLPLTGLNTQTQQLLMTVKERKPSLIFLSETWSLKEGREIGVTPASQPGSIIPNSNLDYMFFKFPRMSAAMRTSNTASRQPL

SEQ ID NO: 9033 - RNA, 3102 nt, Artificial Sequence
  NALP11__Homo_sapiens__CCDS12935.1
auggcagaaucggauucuacugacuuugaccugcugugguaucuagagaaucucagugacaaggaauuucagaguuuuaagaaguaucuggcacgcaagauucuugauuucaaacugccacaguuuccacugauacagaugacaaaagaagaacuggcuaacguguugccaaucucuuaugagggacaguauauauggaauaugcucuucagcauauuuucaaugaugcguaaggaagaucuuuguaggaagaucauuggcagacgaaaccgcaaucaggaggcaugcaaagcugucaugaggagaaaauucaugcugcaaugggaaagucacacuuuuggaaaauuucauuauaaauuuuuucgugacguuucgucagauguguucuacauacuucaauuagccuaugauucuaccagcuauuauucagcaaacaaucucaauguguuccugaugggagagagagcaucuggaaaaacuauuguuauaaaucuggcuguguugagguggaucaagggugagauguggcagaacaugaucucguacgucguucaccucacugcucacgaaauaaaccagaugaccaacagcagcuuggcugagcuaaucgccaaggacuggccugacggccaggcucccauugcagacauccugucugaucccaagaaacuccuuuucauccucgaggacuuggacaacauaagauucgaguuaaaugucaaugaaagugcuuuguguaguaacagcacccagaaaguucccauuccaguucuccuggucaguuugcugaagagaaaaauggcuccaggcugcugguuccucaucuccucaaggcccacacgugggaauaauguaaaaacguucuugaaagagguagauugcugcacgaccuugcagcugucgaaugggaagagggagauauauuuuaacucuuucuuuaaagaccgccagagggcgucggcagcccuccagcuuguacaugaggaugaaauacucgugggucugugccgagucgccaucuuaugcuggaucacguguacuguccugaagcggcagauggacaaggggcgugacuuccagcucugcugccaaacacccacugaucuacaugcccacuuucuugcugaugcguugacaucagaggcuggacuuacugccaaucaguaucaccuaggucuccuaaaacgucuguguuugcuggcugcaggaggacuguuucugagcacccugaauuucaguggugaagaccucagauguguuggguuuacugaggcugaugucucuguguugcaggccgcgaauauucuuuugccgagcaacacucauaaagaccguuacaaguucauacacuugaacguccaggaguuuuguacagccauugcauuucugauggcaguacccaacuaucugauccccucaggcagcagagaguauaaagagaagagagaacaauacucugacuuuaaucaaguguuuacuuucauuuuuggucuucuaaaugcaaacaggagaaagauucuugagacauccuuuggauaccagcuaccgaugguagacagcuucaagugguacucggugggauacaugaaacauuuggaccgugacccggaaaaguugacgcaccauaugccuuuguuuuacugucucuaugagaaucgggaagaagaauuugugaagacgauuguggaugcucucauggagguuacaguuuaccuucaaucagacaaggauaugauggucucauuauacugucuggauuacugcugucaccugaggacacuuaaguugaguguucagcgcaucuuucaaaacaaagagccacuuauaaggccaacugcuagucaaaugaagagccuugucuacuggagagagaucugcucucuuuuuuauacaauggagagccuccgggagcugcauaucuuugacaaugaccuuaaugguauuucagaaaggauucugucuaaagcccuggagcauucuagcuguaaacuucgcacacucaaguuguccuaugucucgacugcuucugguuuugaagacuuacucaaggcuuuggcucguaaucggagccugacauaccugaguaucaacuguacguccauuucccuaaauauguuuucacuucugcaugacauccugcacgagcccacaugccaaauaagucaucugagcuugaugaaaugugauuugcgagccagcgaaugugaagaaaucgccucucuccucaucaguggcgggagucugagaaaacugaccuuauccagcaauccgcugaggagcgacgggaugaacauacugugugaugccuugcuucaucccaacugcacucuuauaucacugguguuagucuucugcugucucacugaaaauugcugcagcgcccuuggaagagugcuucuguucagcccaacucuaagacaacuagaccugugugugaaucgcuuaaaaaauuacggaguguugcaugugacguuucccuugcuguuuccaaccugucaguuagaggagcuucaucugucuggcuguuucuuuagcagcgauaucugucaauauauugccauaguuauugcuacuaaugaaaaacugaggagccuggagauugggagcaacaaaauagaagaugcaggaaugcagcugcuauguggugguuugagacaucccaacugcauguuggugaauauugggcuagaagagugcauguuaaccagugccugcugucgaucucuugccucuguucuuaccaccaacaaaacacuagaaagacucaacuugcuucaaaaucacuugggcaaugauggaguugcaaaacuucuugagagcuugaucagcccagauuguguacuuaagguaguugggcuuccauuaacuggccugaacacacaaacccagcaguugcugaugacuguaaaggaaagaaaacccaguuugaucuuucugucugaaacuuggucuuuaaaggaaggcagagaaauuggugugacaccugcuucucagccagguucaauaauaccuaauucuaauuuggauuacauguuuuucaaauuucccagaaugucugcagccaugagaacgucaaauacagcaucuaggcaaccccuuuga

SEQ ID NO: 9034 - RNA, 3102 nt, Artificial Sequence
  derived and/or modified sequence opt1 from NALP11__Homo_sapiens__CCDS12935.1
auggccgagagcgacuccaccgacuucgaccugcucugguaccuggagaaccugagcgacaaggaguuccaguccuucaagaaguaccucgcccgcaagauccuggacuucaagcugccccaguucccgcucauccagaugaccaaggaggagcuggcgaacgugcugcccaucagcuacgagggccaguacaucuggaacaugcuguucuccaucuucagcaugaugcggaaggaggaccugugccgcaagaucaucgggcggcgcaaccggaaccaggaggccugcaaggccgucaugcgccggaaguucaugcugcagugggagucccacacguucggcaaguuccacuacaaguucuuccgcgacgugagcuccgacguguucuacauccuccagcuggccuacgacagcaccuccuacuacagcgccaacaaccugaacgucuuccucaugggggagcgggcguccggcaagaccaucgugaucaaccuggccgugcugcgcuggaucaagggggagauguggcagaacaugaucagcuacgucgugcaccucaccgcccacgagaucaaccagaugacgaacuccagccuggccgagcugaucgcgaaggacuggcccgacggccaggcccccaucgccgacauccucuccgacccgaagaagcugcuguucauccucgaggaccuggacaacauccgguucgagcugaacgugaacgagagcgcccucugcuccaacagcacccagaagguccccauccccgugcugcuggugagccuccugaagcgcaagauggcccccggcugcugguuccugaucuccagccggccgacccgcgggaacaacgucaagaccuuccucaaggagguggacugcugcacgacccugcagcuguccaacggcaagcgggagaucuacuucaacagcuucuucaaggaccgccagcgggcguccgccgcccuccagcuggugcacgaggacgagauccuggucgggcucugccgcguggccauccugugcuggaucacgugcaccgugcugaagcggcagauggacaagggccgcgacuuccagcucugcugccagacccccaccgaccugcacgcccacuuccuggcggacgcccucaccagcgaggccgggcugaccgccaaccaguaccaccugggccuccugaagcggcugugccugcucgccgcgggcgggcuguuccuguccacgcucaacuucagcggcgaggaccugcgcugcgucggguucaccgaggccgacguguccgugcugcaggccgccaacauccuccugcccagcaacacccacaaggaccgcuacaaguucauccaccugaacguccaggaguucugcaccgccaucgcguuccucauggccgugcccaacuaccugaucccguccggcagccgggaguacaaggagaagcgcgagcaguacuccgacuucaaccagguguucacguucaucuucggccugcucaacgccaaccggcgcaagauccuggagaccagcuucggguaccagcugcccauggucgacuccuucaagugguacagcgugggcuacaugaagcaccucgaccgggaccccgagaagcugacccaccacaugccccuguucuacugccucuacgagaaccgcgaggaggaguucgucaagaccaucguggacgcccugauggaggugacggucuaccugcaguccgacaaggacaugauggugagccucuacugccuggacuacugcugccaccuccggacccucaagcuguccgugcagcgcaucuuccagaacaaggagccgcugauccggcccaccgcgagccagaugaagucccucgucuacuggcgcgagaucugcagccuguucuacaccauggagagccugcgggagcuccacaucuucgacaacgaccugaacgggaucuccgagcgcauccugagcaaggcccucgagcacuccagcugcaagcugcggacgcugaagcucuccuacgugagcaccgccuccggcuucgaggaccugcugaaggcccucgcccgcaaccggagccugaccuaccuguccaucaacugcaccagcaucucccucaacauguucagccugcugcacgacauccuccacgagcccacgugccagaucucccaccugagccugaugaagugcgaccuccgcgcguccgagugcgaggagaucgccagccugcugaucagcgggggcucccuccggaagcugacccugagcuccaacccccuccgcagcgacggcaugaacauccugugcgacgcccugcuccacccgaacugcacccugaucucccuggugcucgucuucugcugccugaccgagaacugcugcagcgcccuggggcgggugcuccuguucucccccacgcugcgccagcucgaccugugcgugaaccgccugaagaacuacggcguccuccacgugaccuucccccugcuguucccgaccugccagcucgaggagcugcaccugagcgggugcuucuucuccagcgacaucugccaguacaucgccaucgugaucgcgaccaacgagaagcuccggucccuggagaucggcagcaacaagaucgaggacgccgggaugcagcugcucugcggcggccugcgccaccccaacugcaugcuggucaacaucgggcucgaggagugcaugcugaccuccgccugcugccggagccuggccuccgugcucacgaccaacaagacccuggagcgccugaaccuccugcagaaccaccugggcaacgacgggguggccaagcuccuggagagccugaucucccccgacugcguccucaagguggugggccugccccugaccgggcugaacacgcagacccagcagcuccugaugaccgucaaggagcggaagcccagccugaucuuccucuccgagaccuggagccugaaggagggccgcgagaucggcgugacgccggcgagccagcccggguccaucauccccaacagcaaccuggacuacauguucuucaaguucccgcggauguccgccgccaugcgcaccagcaacaccgccucccggcagccccucuga

SEQ ID NO: 9035 - RNA, 3102 nt, Artificial Sequence
  derived and/or modified sequence opt2 from NALP11__Homo_sapiens__CCDS12935.1
auggccgaguccgacuccaccgacuucgaccuccucugguaccucgagaaccucuccgacaaggaguuccaguccuucaagaaguaccucgcccgcaagauccucgacuucaagcucccccaguucccccucauccagaugaccaaggaggagcucgccaacguccuccccaucuccuacgagggccaguacaucuggaacaugcucuucuccaucuucuccaugaugcgcaaggaggaccucugccgcaagaucaucggccgccgcaaccgcaaccaggaggccugcaaggccgucaugcgccgcaaguucaugcuccagugggagucccacaccuucggcaaguuccacuacaaguucuuccgcgacgucuccuccgacgucuucuacauccuccagcucgccuacgacuccaccuccuacuacuccgccaacaaccucaacgucuuccucaugggcgagcgcgccuccggcaagaccaucgucaucaaccucgccguccuccgcuggaucaagggcgagauguggcagaacaugaucuccuacgucguccaccucaccgcccacgagaucaaccagaugaccaacuccucccucgccgagcucaucgccaaggacuggcccgacggccaggcccccaucgccgacauccucuccgaccccaagaagcuccucuucauccucgaggaccucgacaacauccgcuucgagcucaacgucaacgaguccgcccucugcuccaacuccacccagaagguccccauccccguccuccucgucucccuccucaagcgcaagauggcccccggcugcugguuccucaucuccucccgccccacccgcggcaacaacgucaagaccuuccucaaggaggucgacugcugcaccacccuccagcucuccaacggcaagcgcgagaucuacuucaacuccuucuucaaggaccgccagcgcgccuccgccgcccuccagcucguccacgaggacgagauccucgucggccucugccgcgucgccauccucugcuggaucaccugcaccguccucaagcgccagauggacaagggccgcgacuuccagcucugcugccagacccccaccgaccuccacgcccacuuccucgccgacgcccucaccuccgaggccggccucaccgccaaccaguaccaccucggccuccucaagcgccucugccuccucgccgccggcggccucuuccucuccacccucaacuucuccggcgaggaccuccgcugcgucggcuucaccgaggccgacgucuccguccuccaggccgccaacauccuccuccccuccaacacccacaaggaccgcuacaaguucauccaccucaacguccaggaguucugcaccgccaucgccuuccucauggccguccccaacuaccucauccccuccggcucccgcgaguacaaggagaagcgcgagcaguacuccgacuucaaccaggucuucaccuucaucuucggccuccucaacgccaaccgccgcaagauccucgagaccuccuucggcuaccagcuccccauggucgacuccuucaagugguacuccgucggcuacaugaagcaccucgaccgcgaccccgagaagcucacccaccacaugccccucuucuacugccucuacgagaaccgcgaggaggaguucgucaagaccaucgucgacgcccucauggaggucaccgucuaccuccaguccgacaaggacaugauggucucccucuacugccucgacuacugcugccaccuccgcacccucaagcucuccguccagcgcaucuuccagaacaaggagccccucauccgccccaccgccucccagaugaagucccucgucuacuggcgcgagaucugcucccucuucuacaccauggagucccuccgcgagcuccacaucuucgacaacgaccucaacggcaucuccgagcgcauccucuccaaggcccucgagcacuccuccugcaagcuccgcacccucaagcucuccuacgucuccaccgccuccggcuucgaggaccuccucaaggcccucgcccgcaaccgcucccucaccuaccucuccaucaacugcaccuccaucucccucaacauguucucccuccuccacgacauccuccacgagcccaccugccagaucucccaccucucccucaugaagugcgaccuccgcgccuccgagugcgaggagaucgccucccuccucaucuccggcggcucccuccgcaagcucacccucuccuccaacccccuccgcuccgacggcaugaacauccucugcgacgcccuccuccaccccaacugcacccucaucucccucguccucgucuucugcugccucaccgagaacugcugcuccgcccucggccgcguccuccucuucucccccacccuccgccagcucgaccucugcgucaaccgccucaagaacuacggcguccuccacgucaccuucccccuccucuuccccaccugccagcucgaggagcuccaccucuccggcugcuucuucuccuccgacaucugccaguacaucgccaucgucaucgccaccaacgagaagcuccgcucccucgagaucggcuccaacaagaucgaggacgccggcaugcagcuccucugcggcggccuccgccaccccaacugcaugcucgucaacaucggccucgaggagugcaugcucaccuccgccugcugccgcucccucgccuccguccucaccaccaacaagacccucgagcgccucaaccuccuccagaaccaccucggcaacgacggcgucgccaagcuccucgagucccucaucucccccgacugcguccucaaggucgucggccucccccucaccggccucaacacccagacccagcagcuccucaugaccgucaaggagcgcaagcccucccucaucuuccucuccgagaccuggucccucaaggagggccgcgagaucggcgucacccccgccucccagcccggcuccaucauccccaacuccaaccucgacuacauguucuucaaguucccccgcauguccgccgccaugcgcaccuccaacaccgccucccgccagccccucuga

SEQ ID NO: 9036 - RNA, 3102 nt, Artificial Sequence
  derived and/or modified sequence opt3 from NALP11__Homo_sapiens__CCDS12935.1
auggccgagagcgacuccaccgauuucgaccugcucugguaccuugaaaaccugucugauaaggaguuucagucauucaaaaaguauuuggcuagaaaaaucuuagacuuuaagcugccccaauucccucuaauucagaugacaaaagaagaacucgcaaaugugcugccaauaaguuacgaaggccaguauaucuggaacaugcuuuuuagcauuuucuccaugaugaggaaggaggaucugugccggaagaucauugggcgccgaaaucguaaccaggaggccuguaaagcggucaugagaaggaaguuuauguugcaaugggaaucucacacuuucggaaaauuucauuacaaguucuuucgggacguuucgucagauguguucuauauccuccagcuggcuuacgacagcacgaguuauuacuccgccaauaaccugaauguauuucucaugggugagcgcgcaucuggcaaaaccauagugaucaacuuagccguccugagauggauuaagggggaaauguggcagaauaugaucagcuacgugguucaccuuacagcucaugagauuaaccagaugacuaauuccucauuggcagagcugaucgccaaggauuggccggacggacaagcucccauagccgauauucuaagugacccuaaaaagcuccuguucauccuugaagaucuggacaacauuagguucgaguugaaugugaacgaaagcgcgcucugcucuaauuccacccagaaagucccaauccccgugcuguuaguaucacugcucaagcggaaaauggcaccuggcuguugguuucuuaucagcagucgcccaacacgagguaacaacguuaagaccuuccugaaagagguggacugcuguacuacauugcagcuaucuaaugggaagagagaaauuuauuuuaacuccuucuuuaaggauaggcagcgggccagcgcugcccugcaacucguccacgaggacgagauacuggugggacuuugccguguggcaauccuguguuggauuaccugcacggucuugaaacgccagauggauaagggcagagacuuccagcucuguugccaaacucccaccgaucugcaugcucacuuuuuagccgacgcgcugacaucggaagccggccuaacugcaaaucaguaccaccucgggcugcuuaaaagguugugucugcucgcugccggaggucuguuccuuucuacccugaacuuuuccggcgaggauuugcggugcguuggguucacagaagcugacgugucaguacuccaggccgcaaauauccuguuaccuaguaacacccauaaggaucgauauaaauuuauacaccugaaugugcaggaguucugcacggccauugcuuuucuaauggcggucccaaacuaccucaucccgagcggaucccgcgaauauaaggagaagagagagcaauacucugacuucaaucagguguucacuuuuaucuucggccugcuuaacgcaaauaggcggaaaauuuuggaaaccagcuuugguuaucagcugcccaugguugauucauucaagugguacagugugggguacaugaaacaucucgaccgcgacccugagaagcugacacaccacaugccauuauuuuauugucuguacgaaaacagagaggaagaguucgucaaaacuaucguggaugcccuuauggagguaacaguuuauuugcaguccgacaaggauaugauggugagccucuacugccuggacuauuguugccaucuaaggacccugaagcucucuguccaacguauuuuucagaauaaagaaccccugauacggccuacggcuucacagaugaagagucuuguguacuggcgagagaucuguagcuuguucuauaccauggaaucccugagagaguuacacauuuuugauaacgaccucaauggaaucucugagaggauccugucgaaagcccuugaacauagcuccugcaagcugcgcacauugaaacucucauacgucaguacugcaucuggcuucgaggaucugcuaaaggcccuggcucggaacagaagccucaccuaccuguccauuaacuguacaucaauaagccuuaauauguuuucuuugcugcacgacaucuuacaugaaccaacuugccagauuucccaccucagucugaugaagugugaucuuagggccagcgagugcgaagagaucgcaucucugcuaauuuccggcgggucacuccgcaaacugaccuugaguagcaacccccugcgaucggacggaaugaauaucuuaugugaugcgcuccugcacccgaacugcacacuuauaucccugguguugguuuucugcugucucaccgagaauugcuguucugcucugggucgggugcuacuguuuagcccuacucuucgucaacucgaccugugcguaaacagauugaagaauuauggcguccugcaugugacguuccccuuacucuucccaacaugucagcuggaggagcuucaccugucagggugcuuuuucaguuccgauaucugucaguacauugccaucguuauugcaaccaacgaaaaauugaggucucucgagaucggaagcaauaagauagaagacgccggcaugcagcugcuaugcggugggcugcgccauccuaacuguaugcuugugaauauuggccucgaggagugcaugcugacuuccgcuuguugccggucauuggccagcgucuuaaccacaaacaaaacccuggaaagacucaaucugcuucaaaaccaccugggaaaugacggcguggcaaaguugcuagagagucugaucucucccgauugcguacucaaagugguugggcugccacuuacuggauuaaacacacagacgcagcaacugcucaugaccgucaaggaaaggaagcccuccuugauuuuucugagcgagacuuggucgcucaaagaaggucgagagaucggcgugaccccugcuucacagccagggucuauaaucccgaacaguaaucuggacuauauguucuuuaaguucccccgcauguccgccgcgaugcggacaagcaacacagccucuagacagccucuuuga

SEQ ID NO: 9037 - RNA, 3102 nt, Artificial Sequence
  derived and/or modified sequence opt4 from NALP11__Homo_sapiens__CCDS12935.1
auggccgagagcgacagcaccgacuucgaccugcugugguaccuggagaaccugagcgacaaggaguuccagagcuucaagaaguaccuggccagaaagauccuggacuucaagcugccccaguucccccugauccagaugaccaaggaggagcuggccaacgugcugcccaucagcuacgagggccaguacaucuggaacaugcuguucagcaucuucagcaugaugagaaaggaggaccugugcagaaagaucaucggcagaagaaacagaaaccaggaggccugcaaggccgugaugagaagaaaguucaugcugcagugggagagccacaccuucggcaaguuccacuacaaguucuucagagacgugagcagcgacguguucuacauccugcagcuggccuacgacagcaccagcuacuacagcgccaacaaccugaacguguuccugaugggcgagagagccagcggcaagaccaucgugaucaaccuggccgugcugagauggaucaagggcgagauguggcagaacaugaucagcuacguggugcaccugaccgcccacgagaucaaccagaugaccaacagcagccuggccgagcugaucgccaaggacuggcccgacggccaggcccccaucgccgacauccugagcgaccccaagaagcugcuguucauccuggaggaccuggacaacaucagauucgagcugaacgugaacgagagcgcccugugcagcaacagcacccagaaggugcccauccccgugcugcuggugagccugcugaagagaaagauggcccccggcugcugguuccugaucagcagcagacccaccagaggcaacaacgugaagaccuuccugaaggagguggacugcugcaccacccugcagcugagcaacggcaagagagagaucuacuucaacagcuucuucaaggacagacagagagccagcgccgcccugcagcuggugcacgaggacgagauccuggugggccugugcagaguggccauccugugcuggaucaccugcaccgugcugaagagacagauggacaagggcagagacuuccagcugugcugccagacccccaccgaccugcacgcccacuuccuggccgacgcccugaccagcgaggccggccugaccgccaaccaguaccaccugggccugcugaagagacugugccugcuggccgccggcggccuguuccugagcacccugaacuucagcggcgaggaccugagaugcgugggcuucaccgaggccgacgugagcgugcugcaggccgccaacauccugcugcccagcaacacccacaaggacagauacaaguucauccaccugaacgugcaggaguucugcaccgccaucgccuuccugauggccgugcccaacuaccugauccccagcggcagcagagaguacaaggagaagagagagcaguacagcgacuucaaccagguguucaccuucaucuucggccugcugaacgccaacagaagaaagauccuggagaccagcuucggcuaccagcugcccaugguggacagcuucaagugguacagcgugggcuacaugaagcaccuggacagagaccccgagaagcugacccaccacaugccccuguucuacugccuguacgagaacagagaggaggaguucgugaagaccaucguggacgcccugauggaggugaccguguaccugcagagcgacaaggacaugauggugagccuguacugccuggacuacugcugccaccugagaacccugaagcugagcgugcagagaaucuuccagaacaaggagccccugaucagacccaccgccagccagaugaagagccugguguacuggagagagaucugcagccuguucuacaccauggagagccugagagagcugcacaucuucgacaacgaccugaacggcaucagcgagagaauccugagcaaggcccuggagcacagcagcugcaagcugagaacccugaagcugagcuacgugagcaccgccagcggcuucgaggaccugcugaaggcccuggccagaaacagaagccugaccuaccugagcaucaacugcaccagcaucagccugaacauguucagccugcugcacgacauccugcacgagcccaccugccagaucagccaccugagccugaugaagugcgaccugagagccagcgagugcgaggagaucgccagccugcugaucagcggcggcagccugagaaagcugacccugagcagcaacccccugagaagcgacggcaugaacauccugugcgacgcccugcugcaccccaacugcacccugaucagccuggugcugguguucugcugccugaccgagaacugcugcagcgcccugggcagagugcugcuguucagccccacccugagacagcuggaccugugcgugaacagacugaagaacuacggcgugcugcacgugaccuucccccugcuguuccccaccugccagcuggaggagcugcaccugagcggcugcuucuucagcagcgacaucugccaguacaucgccaucgugaucgccaccaacgagaagcugagaagccuggagaucggcagcaacaagaucgaggacgccggcaugcagcugcugugcggcggccugagacaccccaacugcaugcuggugaacaucggccuggaggagugcaugcugaccagcgccugcugcagaagccuggccagcgugcugaccaccaacaagacccuggagagacugaaccugcugcagaaccaccugggcaacgacggcguggccaagcugcuggagagccugaucagccccgacugcgugcugaagguggugggccugccccugaccggccugaacacccagacccagcagcugcugaugaccgugaaggagagaaagcccagccugaucuuccugagcgagaccuggagccugaaggagggcagagagaucggcgugacccccgccagccagcccggcagcaucauccccaacagcaaccuggacuacauguucuucaaguuccccagaaugagcgccgccaugagaaccagcaacaccgccagcagacagccccuguga

SEQ ID NO: 9038 - RNA, 3102 nt, Artificial Sequence
  derived and/or modified sequence opt5 from NALP11__Homo_sapiens__CCDS12935.1
auggccgagagcgacuccaccgauuucgaccugcucugguaccuggaaaaccuuucugauaaggaguuucagagcuucaaaaaguaucuggcuagaaaaauccucgacuuuaagcugccccaauucccucuuauucagaugacaaaagaagaacuggccaaugugcucccgaucuccuacgaaggccaguauauuuggaacaugcuguuuucuaucuucagcaugaugcggaaggaggaucugugccgcaagauuaucgggagacggaaucgcaaccaggaggcguguaaagcugucaugagacggaaguuuaugcuccaaugggaaucccacacguucggaaaauuucauuacaaguucuuucgcgacguuucuagcgauguguucuauauccugcagcuugccuacgacuccaccagcuauuacucugccaauaaccugaauguguuucucaugggcgagagagcuuccgggaaaacaauugucaucaaccuggccgugcuucgguggauuaagggagaaauguggcagaauaugaucagcuacguugugcaccugaccgcucaugagauuaaccagaugacaaauucuucccucgccgagcugaucgcgaaggauuggcccgacggccaagccccuauugcugauauccugagcgaccccaaaaagcuccuguucauccuugaagaucuggacaacauucgcuucgagcucaaugucaacgaaucugcccugugcuccaauagcacccagaaagugccuauccccguucuucuggugucccuccugaagagaaaaauggcuccuggguguugguuucugauuucuagccggccgacacgcggaaacaacgucaagaccuuccucaaagagguggacugcuguacgacccugcagcuuuccaauggcaagagagaaaucuauuuuaacagcuucuuuaaggaucggcagcgcgccucugcggcccugcaacucgugcacgaggacgagauucuggucggccuuugcagaguugcuauccuguguuggaucacaugcaccgugcucaaacggcagauggauaaggggagagacuuccagcuguguugccaaacacccaccgaucugcaugcccacuuucucgcugacgcccugacguccgaagccggacuuacagcuaaucaguaccaccugggccuccugaaacgccugugucuucucgcggccgggggacuguuccugagcacccucaacuuuucuggcgaggaucugcggugcgugggguucacagaagcugacgucagcgugcuucaggccgccaauauucugcucccuuccaacacccauaaggauagauauaaauuuauccaccugaauguucaggaguucugcaccgcuauugccuuucugauggcggugcccaacuaccuuaucccuucuggaagccgcgaauauaaggagaagcgggagcaauacuccgacuucaaucaggucuucacauuuauuuucggccuccugaacgcuaauagacgcaaaauccuggaaacgagcuuuggcuaucagcuccccaugguggauucuuucaagugguacuccguuggguacaugaaacaucuggaccgggacccggagaaacuuacccaccacaugccucuguuuuauugucucuacgaaaacagagaggaagaguucgugaagacaaucgucgaugcccugauggaggugaccgucuaucugcagagcgacaaggauaugauggugucucuuuacugccucgacuauuguugccaucugcgcacacugaagcucuccguucaacggauuuuucagaauaaagaaccccugaucagaccuaccgccagccagaugaagucccuuguguacuggcgcgagauuuguucucuguucuauacgauggaaagccuccgggagcugcacaucuuugauaacgaccugaauggaauuuccgagagaauccuuucuaaagcucucgaacauagcuccugcaagcugcggacacugaaacucagcuacgucucuaccgccuccggcuucgaggaucugcuuaaggcucuggcccgcaacagaagccucaccuaccugucuauuaacuguacauccaucagccugaauauguuuucucuucugcacgacauccuccaugaacccacaugccagauuagccaccugucccucaugaagugugaucugcgggcgagcgagugcgaagagaucgccucucuucugauuuccgggggaagccucagaaaacugacacuguccucuaacccccuucgcagcgacggcaugaauauccugugugaugcucuccugcacccuaacugcacgcucauuucccuggugcuuguuuucugcugucugaccgagaauugcuguucugcccucgggcgggugcugcuguuuagcccgacacuuagacaacuggaccucugcgucaaccgccugaagaauuauggagugcuccaugugaccuucccccugcuuuucccuacaugucagcuggaggagcugcaccucuccggcugcuuuuucucuagcgauaucugucaguacaucgcuauuguuaucgccaccaacgaaaaacugagaucccuugagauuggcagcaauaagaucgaagacgcggggaugcagcugcucugcggaggccugcggcaucccaacuguaugcucgucaauauugggcuggaggagugcaugcuuacgucugccuguugccgcucccuggcuagcgugcugaccacaaacaaaacccucgaaagacugaaucuucugcaaaaccaccucggaaaugacggcguggccaagcugcucgagucucugaucuccccugauugcguccuuaaagugguugggcugccccugacaggccucaacacccagacgcagcaacugcuuaugacagugaaggaacggaagccgagccugaucuuucucucugagaccuggucccugaaagaaggacgcgagauuggcgucaccccugcuagccagcccggguccaucauuccuaacagcaaucucgacuauauguucuuuaaguuccccagaaugucugccgccaugcggaccagcaacaccgcuucccgccagccucuguga

SEQ ID NO: 9039 - protein, 1061 aa, Artificial Sequence
  NALP12__Homo_sapiens__P59046
MLRTAGRDGLCRLSTYLEELEAVELKKFKLYLGTATELGEGKIPWGSMEKAGPLEMAQLLITHFGPEEAWRLALSTFERINRKDLWERGQREDLVRDTPPGGPSSLGNQSTCLLEVSLVTPRKDPQETYRDYVRRKFRLMEDRNARLGECVNLSHRYTRLLLVKEHSNPMQVQQQLLDTGRGHARTVGHQASPIKIETLFEPDEERPEPPRTVVMQGAAGIGKSMLAHKVMLDWADGKLFQGRFDYLFYINCREMNQSATECSMQDLIFSCWPEPSAPLQELIRVPERLLFIIDGFDELKPSFHDPQGPWCLCWEEKRPTELLLNSLIRKKLLPELSLLITTRPTALEKLHRLLEHPRHVEILGFSEAERKEYFYKYFHNAEQAGQVFNYVRDNEPLFTMCFVPLVCWVVCTCLQQQLEGGGLLRQTSRTTTAVYMLYLLSLMQPKPGAPRLQPPPNQRGLCSLAADGLWNQKILFEEQDLRKHGLDGEDVSAFLNMNIFQKDINCERYYSFIHLSFQEFFAAMYYILDEGEGGAGPDQDVTRLLTEYAFSERSFLALTSRFLFGLLNEETRSHLEKSLCWKVSPHIKMDLLQWIQSKAQSDGSTLQQGSLEFFSCLYEIQEEEFIQQALSHFQVIVVSNIASKMEHMVSSFCLKRCRSAQVLHLYGATYSADGEDRARCSAGAHTLLVQLPERTVLLDAYSEHLAAALCTNPNLIELSLYRNALGSRGVKLLCQGLRHPNCKLQNLRLKRCRISSSACEDLSAALIANKNLTRMDLSGNGVGFPGMMLLCEGLRHPQCRLQMIQLRKCQLESGACQEMASVLGTNPHLVELDLTGNALEDLGLRLLCQGLRHPVCRLRTLWLKICRLTAAACDELASTLSVNQSLRELDLSLNELGDLGVLLLCEGLRHPTCKLQTLRLGICRLGSAACEGLSVVLQANHNLRELDLSFNDLGDWGLWLLAEGLQHPACRLQKLWLDSCGLTAKACENLYFTLGINQTLTDLYLTNNALGDTGVRLLCKRLSHPGCKLRVLWLFGMDLNKMTHSRLAALRVTKPYLDIGC

SEQ ID NO: 9040 - RNA, 3186 nt, Artificial Sequence
  NALP12__Homo_sapiens__AAH28069
augcuacgaaccgcaggcagggacggccucugucgccuguccaccuacuuggaagaacucgaggcuguggaacugaagaaguucaaguuauaccuggggaccgcgacagagcugggagaaggcaagauccccuggggaagcauggagaaggccgguccccuggaaauggcccagcugcucaucacccacuucgggccagaggaggccuggagguuggcucucagcaccuuugagcggauaaacaggaaggaccugugggagagaggacagagagaggaccuggugagggauaccccaccugguggcccguccucacuugggaaccagucaacaugccuucuggaagucucucuugucacuccaagaaaagauccccaggaaaccuacagggacuauguccgcaggaaauuccggcucauggaagaccgcaaugcgcgccuaggggaaugugucaaccucagccaccgguacacccggcuccugcuggugaaggagcacucaaaccccaugcagguccagcagcagcuucuggacacaggccggggacacgcgaggaccgugggacaccaggcuagccccaucaagauagagacccucuuugagccagacgaggagcgccccgagccaccgcgcaccguggucaugcaaggcgcggcagggauaggcaaguccaugcuggcacacaaggugaugcuggacugggcggacgggaagcucuuccaaggcagauuugauuaucucuucuacaucaacugcagggagaugaaccagagugccacggaaugcagcaugcaagaccucaucuucagcugcuggccugagcccagcgcgccucuccaggagcucauccgaguucccgagcgccuccuuuucaucaucgacggcuucgaugagcucaagccuucuuuccacgauccucagggacccuggugccucugcugggaggagaaacggcccacggagcugcuucuuaacagcuuaauucggaagaagcugcucccugagcuaucuuugcucaucaccacacggcccacggcuuuggagaagcuccaccgucugcuggagcaccccaggcauguggagauccugggcuucucugaggcagaaaggaaggaauacuucuacaaguauuuccacaaugcagagcaggcgggccaagucuucaauuacgugagggacaacgagccucucuucaccaugugcuucgucccccuggugugcugggugguguguaccugccuccagcagcagcuggaggguggggggcuguugagacagacguccaggaccaccacugcaguguacaugcucuaccugcugagucugaugcaacccaagccgggggccccgcgccuccagcccccacccaaccagagaggguugugcuccuuggcggcagaugggcucuggaaucagaaaauccuauuugaggagcaggaccuccggaagcacggccuagacggggaagacgucucugccuuccucaacaugaacaucuuccagaaggacaucaacugugagagguacuacagcuucauccacuugaguuuccaggaauucuuugcagcuauguacuauauccuggacgagggggagggcggggcaggcccagaccaggacgugaccaggcuguugaccgaguacgcguuuucugaaaggagcuuccuggcacucaccagccgcuuccuguuuggacuccugaacgaggagaccaggagccaccuggagaagagucucugcuggaaggucucgccgcacaucaagauggaccuguugcaguggauccaaagcaaagcucagagcgacggcuccacccugcagcagggcuccuuggaguucuucagcugcuuguacgagauccaggaggaggaguuuauccagcaggcccugagccacuuccaggugaucguggucagcaacauugccuccaagauggagcacauggucuccucguucugucugaagcgcugcaggagcgcccaggugcugcacuuguauggcgccaccuacagcgcggacggggaagaccgcgcgaggugcuccgcaggagcgcacacgcuguuggugcagcuaccagagaggaccguucugcuggacgccuacagugaacaucuggcagcggcccugugcaccaauccaaaccugauagagcugucucuguaccgaaaugcccugggcagccggggggugaagcugcucugucaaggacucagacaccccaacugcaaacuucagaaccugaggcugaagaggugccgcaucuccagcucagccugcgaggaccucucugcagcucucauagccaauaagaauuugacaaggauggaucucaguggcaacggcguuggauucccaggcaugaugcugcuuugcgagggccugcggcauccccagugcaggcugcagaugauucaguugaggaagugucagcuggaguccggggcuugucaggagauggcuucugugcucggcaccaacccacaucugguugaguuggaccugacaggaaaugcacuggaggauuugggccugagguuacuaugccagggacugaggcacccagucugcagacuacggacuuuguggcugaagaucugccgccucacugcugcugccugugacgagcuggccucaacucucagugugaaccagagccugagagagcuggaccugagccugaaugagcugggggaccucggggugcugcugcugugugagggccucaggcaucccacgugcaagcuccagacccugcgguugggcaucugccggcugggcucugccgccugugagggucuuucuguggugcuccaggccaaccacaaccuccgggagcuggacuugaguuucaacgaccugggagacuggggccugugguugcuggcugaggggcugcaacaucccgccugcagacuccagaaacuguggcuggauagcuguggccucacagccaaggcuugugagaaucuuuacuucacccuggggaucaaccagaccuugaccgaccuuuaccugaccaacaacgcccuaggggacacagguguccgacugcuuugcaagcggcugagccauccuggcugcaaacuccgaguccucugguuauuugggauggaccugaauaaaaugacccacaguagguuggcagcgcuucgaguaacaaaaccuuauuuggacauuggcugcuga

SEQ ID NO: 9041 - RNA, 3186 nt, Artificial Sequence
  derived and/or modified sequence opt1 from NALP12__Homo_sapiens__AAH28069
augcugcgcaccgccggccgggacgggcucugccgccugagcaccuaccuggaggagcucgaggccguggagcugaagaaguucaagcuguaccucggcacggcgaccgagcugggggagggcaagauccccuggggguccauggagaaggccggcccgcuggagauggcccagcuccugaucacccacuucggccccgaggaggccuggcggcuggcccucagcaccuucgagcgcaucaaccggaaggaccugugggagcgcgggcagcgggaggaccugguccgcgacacgccgcccggcgggcccuccagccucggcaaccaguccacgugccugcuggaggugagccucgugacgccccggaaggacccccaggagaccuaccgcgacuacguccggcgcaaguuccggcugauggaggaccgcaacgcgcggcugggggagugcgugaaccucucccaccgcuacacccggcugcugcucgugaaggagcacagcaaccccaugcagguccagcagcagcugcuggacaccggccgcggccacgcccggaccguggggcaccaggccuccccgaucaagaucgagacccucuucgagcccgacgaggagcgccccgagcccccgcggaccguggucaugcagggcgccgcggggaucggcaagagcaugcuggcccacaaggugaugcuggacugggccgacggcaagcuguuccaggggcgcuucgacuaccuguucuacaucaacugccgcgagaugaaccaguccgccaccgagugcagcaugcaggaccugaucuucuccugcuggcccgagcccagcgcgccccuccaggagcugauccgggugccggagcgccuccucuucaucaucgacggcuucgacgagcugaagcccuccuuccacgacccccaggggcccuggugccugugcugggaggagaagcggccgaccgagcuccugcugaacagccucauccgcaagaagcugcugcccgagcucucccugcugaucaccacgcggcccaccgcccucgagaagcugcaccgccugcuggagcacccccggcacgucgagauccucggcuucagcgaggccgagcgcaaggaguacuucuacaaguacuuccacaacgccgagcaggccggccagguguucaacuacgugcgggacaacgagccgcuguucaccaugugcuucgucccccuggugugcuggguggucugcacgugccuccagcagcagcuggagggcggcgggcugcuccgccagaccucccggaccaccaccgccguguacaugcuguaccugcucagccugaugcagcccaagcccggggcgccgcgccugcagccgccgcccaaccagcgggggcucugcagccuggccgccgacggccuguggaaccagaagauccucuucgaggagcaggaccugcgcaagcacgggcuggacggcgaggacguguccgccuuccucaacaugaacaucuuccagaaggacaucaacugcgagcgguacuacagcuucauccaccuguccuuccaggaguucuucgccgcgauguacuacauccuggacgagggcgagggcggggccgggcccgaccaggacgucacgcgccuccugaccgaguacgccuucagcgagcgguccuuccuggcccucaccagccgcuuccuguucggccugcucaacgaggagacccggucccaccuggagaagucccugugcuggaaggugagcccccacaucaagauggaccuccugcaguggauccagagcaaggcccaguccgacgggagcacgcugcagcagggcucccucgaguucuucagcugccuguacgagauccaggaggaggaguucauccagcaggcgcugucccacuuccaggugaucgucgugagcaacaucgccuccaagauggagcacauggucagcuccuucugccucaagcgcugccgcagcgcccaggugcugcaccuguacggcgccaccuacagcgcggacggggaggaccgggcccgcugcuccgccggcgcccacacccuccuggugcagcugcccgagcggaccguccuccuggacgccuacagcgagcaccuggcggccgcccucugcacgaaccccaaccugaucgagcugucccucuaccgcaacgcccuggggagccggggcgugaagcugcucugccagggccugcgccaccccaacugcaagcugcagaaccuccggcugaagcgcugccggaucuccagcuccgccugcgaggaccugagcgcggcccucaucgccaacaagaaccugacccgcauggaccuguccgggaacggcgugggguuccccggcaugaugcuccugugcgaggggcugcggcacccccagugccgccuccagaugauccagcugcggaagugccagcuggagagcggcgccugccaggagauggccuccguccucggcaccaacccgcaccugguggagcuggaccucaccgggaacgcgcuggaggaccugggccuccgccugcugugccaggggcuccggcaccccgugugccgccugcggacgcuguggcucaagaucugccgccugaccgccgccgccugcgacgagcuggcgagcacccucuccgucaaccagagccugcgggagcuggaccucucccugaacgagcugggcgaccucggggugcugcugcucugcgagggccugcgccacccgaccugcaagcugcagacccuccggcugggcaucugccgccuggggagcgccgccugcgagggccuguccgugguccuccaggccaaccacaaccugcgcgagcuggaccucagcuucaacgaccugggggacuggggccuguggcuccuggccgaggggcugcagcaccccgcgugccggcuccagaagcuguggcuggacagcugcggccucacggccaaggccugcgagaaccuguacuucacccugggcaucaaccagacccucaccgaccuguaccugacgaacaacgcccucggggacaccggcgugcgccugcugugcaagcggcucucccaccccgggugcaagcugcgcgugcuguggcuguucggcauggaccucaacaagaugacccacagccggcuggccgcgcuccgcgucaccaagcccuaccuggacaucgggugcuga

SEQ ID NO: 9042 - RNA, 3186 nt, Artificial Sequence
  derived and/or modified sequence opt2 from NALP12__Homo_sapiens__AAH28069
augcuccgcaccgccggccgcgacggccucugccgccucuccaccuaccucgaggagcucgaggccgucgagcucaagaaguucaagcucuaccucggcaccgccaccgagcucggcgagggcaagauccccuggggcuccauggagaaggccggcccccucgagauggcccagcuccucaucacccacuucggccccgaggaggccuggcgccucgcccucuccaccuucgagcgcaucaaccgcaaggaccucugggagcgcggccagcgcgaggaccucguccgcgacaccccccccggcggccccuccucccucggcaaccaguccaccugccuccucgaggucucccucgucaccccccgcaaggacccccaggagaccuaccgcgacuacguccgccgcaaguuccgccucauggaggaccgcaacgcccgccucggcgagugcgucaaccucucccaccgcuacacccgccuccuccucgucaaggagcacuccaaccccaugcagguccagcagcagcuccucgacaccggccgcggccacgcccgcaccgucggccaccaggccucccccaucaagaucgagacccucuucgagcccgacgaggagcgccccgagcccccccgcaccgucgucaugcagggcgccgccggcaucggcaaguccaugcucgcccacaaggucaugcucgacugggccgacggcaagcucuuccagggccgcuucgacuaccucuucuacaucaacugccgcgagaugaaccaguccgccaccgagugcuccaugcaggaccucaucuucuccugcuggcccgagcccuccgccccccuccaggagcucauccgcguccccgagcgccuccucuucaucaucgacggcuucgacgagcucaagcccuccuuccacgacccccagggccccuggugccucugcugggaggagaagcgccccaccgagcuccuccucaacucccucauccgcaagaagcuccuccccgagcucucccuccucaucaccacccgccccaccgcccucgagaagcuccaccgccuccucgagcacccccgccacgucgagauccucggcuucuccgaggccgagcgcaaggaguacuucuacaaguacuuccacaacgccgagcaggccggccaggucuucaacuacguccgcgacaacgagccccucuucaccaugugcuucgucccccucgucugcugggucgucugcaccugccuccagcagcagcucgagggcggcggccuccuccgccagaccucccgcaccaccaccgccgucuacaugcucuaccuccucucccucaugcagcccaagcccggcgccccccgccuccagcccccccccaaccagcgcggccucugcucccucgccgccgacggccucuggaaccagaagauccucuucgaggagcaggaccuccgcaagcacggccucgacggcgaggacgucuccgccuuccucaacaugaacaucuuccagaaggacaucaacugcgagcgcuacuacuccuucauccaccucuccuuccaggaguucuucgccgccauguacuacauccucgacgagggcgagggcggcgccggccccgaccaggacgucacccgccuccucaccgaguacgccuucuccgagcgcuccuuccucgcccucaccucccgcuuccucuucggccuccucaacgaggagacccgcucccaccucgagaagucccucugcuggaaggucuccccccacaucaagauggaccuccuccaguggauccaguccaaggcccaguccgacggcuccacccuccagcagggcucccucgaguucuucuccugccucuacgagauccaggaggaggaguucauccagcaggcccucucccacuuccaggucaucgucgucuccaacaucgccuccaagauggagcacauggucuccuccuucugccucaagcgcugccgcuccgcccagguccuccaccucuacggcgccaccuacuccgccgacggcgaggaccgcgcccgcugcuccgccggcgcccacacccuccucguccagcuccccgagcgcaccguccuccucgacgccuacuccgagcaccucgccgccgcccucugcaccaaccccaaccucaucgagcucucccucuaccgcaacgcccucggcucccgcggcgucaagcuccucugccagggccuccgccaccccaacugcaagcuccagaaccuccgccucaagcgcugccgcaucuccuccuccgccugcgaggaccucuccgccgcccucaucgccaacaagaaccucacccgcauggaccucuccggcaacggcgucggcuuccccggcaugaugcuccucugcgagggccuccgccacccccagugccgccuccagaugauccagcuccgcaagugccagcucgaguccggcgccugccaggagauggccuccguccucggcaccaacccccaccucgucgagcucgaccucaccggcaacgcccucgaggaccucggccuccgccuccucugccagggccuccgccaccccgucugccgccuccgcacccucuggcucaagaucugccgccucaccgccgccgccugcgacgagcucgccuccacccucuccgucaaccagucccuccgcgagcucgaccucucccucaacgagcucggcgaccucggcguccuccuccucugcgagggccuccgccaccccaccugcaagcuccagacccuccgccucggcaucugccgccucggcuccgccgccugcgagggccucuccgucguccuccaggccaaccacaaccuccgcgagcucgaccucuccuucaacgaccucggcgacuggggccucuggcuccucgccgagggccuccagcaccccgccugccgccuccagaagcucuggcucgacuccugcggccucaccgccaaggccugcgagaaccucuacuucacccucggcaucaaccagacccucaccgaccucuaccucaccaacaacgcccucggcgacaccggcguccgccuccucugcaagcgccucucccaccccggcugcaagcuccgcguccucuggcucuucggcauggaccucaacaagaugacccacucccgccucgccgcccuccgcgucaccaagcccuaccucgacaucggcugcuga

SEQ ID NO: 9043 - RNA, 3186 nt, Artificial Sequence
  derived and/or modified sequence opt3 from NALP12__Homo_sapiens__AAH28069
augcugagaaccgccggcagggacgggcucugccggcuuagcacauaccuggaggaauuggaggcuguggaauuaaagaaauucaagcuguaucuaggaacugcaacggagcucggugaaggcaaaauccccuggggguccauggagaaggccggaccucuggagauggcgcagcuucugauuacccacuuuggcccagaagaggcuuggcgcuuggcccucucuacauucgaacgaauaaaccguaaagaucugugggagagaggucaaagggaggaccugguccgggauacuccgcccgggggaccuucaagucucggcaaucagagcaccuguuuacuggaaguuucccuugugacaccacgcaaggacccccaggagaccuacagagauuauguaaggcggaaguuucgcuugauggaagaccgaaacgcaagacugggcgagugcgugaaucuaucucauagguacacucggcuccugcuugucaaagaacacucgaacccuaugcaagugcaacagcagcuguuggauacagggcguggacaugcccgcaccguuggucaccaggcuucaccaaucaagauugagacguuguucgagcccgacgaagagagaccugaaccaccgaggacuguggucaugcaaggcgcagccgggaucggaaaaagcaugcuggcucauaaggugauguuagauugggccgacggcaaacuguuucagggucgguucgauuaucucuuuuacauuaauugucgagagaugaaccagagugcgaccgaaugcuccaugcaggaccuuaucuucucuuguuggcccgagccuagcgcaccacugcaagaguugauacgcguacccgaaagacuacuguuuaucauugauggguucgacgagcucaagccuuccuuucacgacccacagggacccuggugccuguguugggaagagaagaggccgacagaacuucugcucaauucacucauccggaaaaagcuguuaccugagcugagucuacucauuacuacccgccccacagcccuggagaaacuucacagauugcuggaacauccaaggcacguugagauccucggcuucagcgaagcugagcguaaggaguauuuuuacaaauacuuccauaacgccgaacaggcaggccaaguguucaauuauguccgggauaacgagccucuguuuaccaugugcuucgugccccuuguguguugggucguuugcacgugucugcagcagcaguuggaagggggaggucuccugcgacaaacuucuagaacaaccacugcuguguacauguuauaucugcuaucccucaugcagccaaagcccggcgccccuaggcugcagccaccgcccaaucagcgcgggcuuugcucauuggcggccgacggacuguggaaccagaaaauacucuuugaggaacaggaucugcggaagcacggcuuagacggugaggauguaagcgcauuccugaauaugaacauuuuucagaaggacaucaauugcgagagauacuauaguuucauucaccuuucuuuucaggaguucuuugcugccauguacuauaucuuggaugaaggggaaggcggagcuggcccugaccaagaugugacaaggcuccugaccgaguacgccuucuccgaacgcagcuuucuagcacugacgucgcgauuccucuuugggcugcuuaacgaggagacccggucucauuuggaaaaaucccuguguuggaaggucucaccacacaucaaaauggacuuacuccaguggauucagaguaaggcccagagcgauggauccacacugcaacaggguucucuugaguucuucagcugccuguacgaaauacaggaggaagaguuuauccaacaggcuuugucacauuuccaggugauuguugugaguaacaucgcguccaaaauggagcacauggucagcucuuuuugucucaagcguugcagaucagcacaggugcugcaucuauauggcgccacuuacagugcugacggggaagacagggcccgcuguagcgcaggagcccacacccugcucguacaacugcccgagcggacaguucuuuuggaugcuuauuccgaacaccuggccgcagcguuaugcacuaauccuaaccucauagagcugucucuuuacagaaaugcucugggcucgaggggugugaagcuacucugucaggggcugcgacauccaaacugcaaauugcagaaucugcgcuuaaagcgguguagaauuagcuccucagccugcgaggaccucagugcagcccugaucgcuaacaaaaaucuuaccaggauggaucugucuggcaacggagucggcuuccccgggaugauguugcucugugaaggacugcgucacccgcagugccgccuacaaaugauccagcugcggaagugccagcuugagagcggugccugucaggaaauggcauccgugcucggcacaaauccucaucuggucgaguuggaccugaccgggaacgcuuuagaagaucucggacugagacuucugugccaaggcuugaggcacccagugugucgacuccggacucuguggcuaaaaauuugccgccugacggccgcggccugugacgagcuugcuucaacacucagcguuaaucagucucugagagaguuggauuuaucccugaacgaacucggugaccugggggugcuucuguugugcgagggccuaaggcaccccaccuguaagcugcagacucuccggcugggaaucugccgacuuggcagugcagccugugaaggguuaagcguaguccugcaagcuaaucauaaccucagagaguuggaucugucuuuuaaugaccucggagauuggggccuguggcuucuggccgaagguuugcagcacccugcaugccgccuacagaagcuguggcucgacuccuguggguuaaccgcgaaagccugcgagaaccuguauuucacacuuggaauuaaccagacccugacugaucucuacuugacaaauaacgcucugggcgacacgggugugaggcuccugugcaagcgucuuucacaucccggcuguaaacuacggguucugugguuguuugggauggacuuaaauaagaugacccacaguagacuggccgcacucagggugacuaaaccauaucuggauauaggaugcuga

SEQ ID NO: 9044 - RNA, 3186 nt, Artificial Sequence
  derived and/or modified sequence opt4 from NALP12__Homo_sapiens__AAH28069
augcugagaaccgccggcagagacggccugugcagacugagcaccuaccuggaggagcuggaggccguggagcugaagaaguucaagcuguaccugggcaccgccaccgagcugggcgagggcaagauccccuggggcagcauggagaaggccggcccccuggagauggcccagcugcugaucacccacuucggccccgaggaggccuggagacuggcccugagcaccuucgagagaaucaacagaaaggaccugugggagagaggccagagagaggaccuggugagagacaccccccccggcggccccagcagccugggcaaccagagcaccugccugcuggaggugagccuggugacccccagaaaggacccccaggagaccuacagagacuacgugagaagaaaguucagacugauggaggacagaaacgccagacugggcgagugcgugaaccugagccacagauacaccagacugcugcuggugaaggagcacagcaaccccaugcaggugcagcagcagcugcuggacaccggcagaggccacgccagaaccgugggccaccaggccagccccaucaagaucgagacccuguucgagcccgacgaggagagacccgagccccccagaaccguggugaugcagggcgccgccggcaucggcaagagcaugcuggcccacaaggugaugcuggacugggccgacggcaagcuguuccagggcagauucgacuaccuguucuacaucaacugcagagagaugaaccagagcgccaccgagugcagcaugcaggaccugaucuucagcugcuggcccgagcccagcgccccccugcaggagcugaucagagugcccgagagacugcuguucaucaucgacggcuucgacgagcugaagcccagcuuccacgacccccagggccccuggugccugugcugggaggagaagagacccaccgagcugcugcugaacagccugaucagaaagaagcugcugcccgagcugagccugcugaucaccaccagacccaccgcccuggagaagcugcacagacugcuggagcaccccagacacguggagauccugggcuucagcgaggccgagagaaaggaguacuucuacaaguacuuccacaacgccgagcaggccggccagguguucaacuacgugagagacaacgagccccuguucaccaugugcuucgugccccuggugugcuggguggugugcaccugccugcagcagcagcuggagggcggcggccugcugagacagaccagcagaaccaccaccgccguguacaugcuguaccugcugagccugaugcagcccaagcccggcgcccccagacugcagcccccccccaaccagagaggccugugcagccuggccgccgacggccuguggaaccagaagauccuguucgaggagcaggaccugagaaagcacggccuggacggcgaggacgugagcgccuuccugaacaugaacaucuuccagaaggacaucaacugcgagagauacuacagcuucauccaccugagcuuccaggaguucuucgccgccauguacuacauccuggacgagggcgagggcggcgccggccccgaccaggacgugaccagacugcugaccgaguacgccuucagcgagagaagcuuccuggcccugaccagcagauuccuguucggccugcugaacgaggagaccagaagccaccuggagaagagccugugcuggaaggugagcccccacaucaagauggaccugcugcaguggauccagagcaaggcccagagcgacggcagcacccugcagcagggcagccuggaguucuucagcugccuguacgagauccaggaggaggaguucauccagcaggcccugagccacuuccaggugaucguggugagcaacaucgccagcaagauggagcacauggugagcagcuucugccugaagagaugcagaagcgcccaggugcugcaccuguacggcgccaccuacagcgccgacggcgaggacagagccagaugcagcgccggcgcccacacccugcuggugcagcugcccgagagaaccgugcugcuggacgccuacagcgagcaccuggccgccgcccugugcaccaaccccaaccugaucgagcugagccuguacagaaacgcccugggcagcagaggcgugaagcugcugugccagggccugagacaccccaacugcaagcugcagaaccugagacugaagagaugcagaaucagcagcagcgccugcgaggaccugagcgccgcccugaucgccaacaagaaccugaccagaauggaccugagcggcaacggcgugggcuuccccggcaugaugcugcugugcgagggccugagacacccccagugcagacugcagaugauccagcugagaaagugccagcuggagagcggcgccugccaggagauggccagcgugcugggcaccaacccccaccugguggagcuggaccugaccggcaacgcccuggaggaccugggccugagacugcugugccagggccugagacaccccgugugcagacugagaacccuguggcugaagaucugcagacugaccgccgccgccugcgacgagcuggccagcacccugagcgugaaccagagccugagagagcuggaccugagccugaacgagcugggcgaccugggcgugcugcugcugugcgagggccugagacaccccaccugcaagcugcagacccugagacugggcaucugcagacugggcagcgccgccugcgagggccugagcguggugcugcaggccaaccacaaccugagagagcuggaccugagcuucaacgaccugggcgacuggggccuguggcugcuggccgagggccugcagcaccccgccugcagacugcagaagcuguggcuggacagcugcggccugaccgccaaggccugcgagaaccuguacuucacccugggcaucaaccagacccugaccgaccuguaccugaccaacaacgcccugggcgacaccggcgugagacugcugugcaagagacugagccaccccggcugcaagcugagagugcuguggcuguucggcauggaccugaacaagaugacccacagcagacuggccgcccugagagugaccaagcccuaccuggacaucggcugcuga

SEQ ID NO: 9045 - RNA, 3186 nt, Artificial Sequence
  derived and/or modified sequence opt5 from NALP12__Homo_sapiens__AAH28069
augcugagaaccgccggccgggacgggcucugccgccugagcacauaccuugaggaacuggaggcuguggaacucaagaaauucaagcuguaucuuggaacggccaccgagcugggcgaagggaaaauccccuggggauccauggagaaggcgggcccucucgagauggcucagcugcugauuacacacuuugggccggaagaggccuggagacucgcccugucuaccuucgaacggaucaaccgcaaagaucuuugggagagaggacaacgggaggaccugguccgcgauacacccccuggcggccccagcucccucgggaaucagucuaccugucugcuugaaguuagccuggugacaccuagaaaggacccccaggagaccuaccgggauuaugugcgcagaaaguuucggcucauggaagaccgcaacgcuagacugggagagugcgucaaucugucccaucgguacacgcgccuccugcuugugaaagaacacucuaacccuaugcagguucaacagcagcugcucgauaccggcagagggcaugcccggacagugggacaccaggcuagcccgauuaagaucgagacccuguucgagcccgacgaagagagaccugaacccccucgcacagucgugaugcaaggcgccgcggggauuggaaaauccaugcuugcccauaagguuaugcuggauugggcugacggcaaacucuuucagggccgguucgauuaucuguuuuacaucaauuguagagagaugaaccagagcgccaccgaaugcucuaugcaggaccugaucuucuccuguuggcccgagccgagcgcuccucuccaagagcugauucgcgugcccgaacggcuucuguuuaucauugauggguucgacgagcucaagccuucuuuucacgacccccagggacccuggugccuguguugggaagagaagagaccuacggaacuucugcucaauucccugauccgcaaaaagcugcucccggagcugagccuucugauuacaacccggcccacagcccucgagaaacugcacagacugcuugaacauccucgccacgucgagauccucggcuucucugaagcggagcggaaggaguauuuuuacaaauacuuccauaacgccgaacaggcugggcaaguguucaauuaugugagagauaacgagccccuguuuaccaugugcuucgucccucugguuuguuggguggugugcaccugucuccagcagcagcuggaaggaggcgggcuucugcgccaaacaucccggacgaccacagccgucuacaugcucuaucugcugagccuuaugcagcccaagccgggagcuccuagacuccagcccccucccaaucagcggggccugugcucccuggccgccgacggccucuggaaccagaaaauucuguuugaggaacaagaucuucgcaagcacgggcuggacggagaggaugugucugcuuuccucaauaugaacaucuuucagaaggacaucaauugcgagagauacuauagcuucauucaccuguccuuucaggaguucuuugcggccauguacuauauccuggaugaaggcgaagggggagcuggcccugaccaagauguuacccggcuucucacagaguacgccuucagcgaaagaucuuuucuggcccugaccucccgcuuccucuuugggcugcuuaacgaggagacgcggagccaucuggaaaaaucucucuguuggaaggugagcccccacauuaaaauggaccugcugcaguggauccaguccaaggcucagucugauggcagcacacuucaacagggaucccucgaguucuucagcugccuguacgaaauucaggaggaagaguuuauccaacaggcccugucucauuuccaggucaucgugguuuccaacauugcgagcaaaauggagcacauggugucuuccuuuugucucaagagaugccgcagcgcucagguccugcaucuuuauggcgccaccuacuccgccgacggggaagacagagcucgguguucugccggagcucacacccugcucgugcaacugccggagcgcacaguccugcuugaugccuauagcgaacaccuggcggccgcucucugcaccaauccuaaccugaucgagcucucccuguacagaaaugcccuuggcucucgcggggugaagcugcucugucagggacugcggcaucccaacugcaaacugcagaaucuuagacugaagcggugucgcauuagcuccagcgcuugcgaggaccucucugccgcgcugaucgccaacaaaaaucucacaagaauggaucuguccggcaacgggguuggcuuccccggaaugaugcuucugugugaaggccuccggcacccucagugccgccugcaaaugauucagcugagaaagugccagcuugagagcggggcuugucaggaaauggccucugugcugggaacgaauccgcaucucgucgagcuggaccucaccggcaacgcucuggaagaucuugggcugcggcugcucugccaaggacugagacaccccgugugucgccuucggacacuguggcucaaaaucugcagacugaccgccgccgcuugugacgagcucgcguccacacugagcguuaaucagucucuucgcgagcuggaucugagccucaacgaacugggcgaccuuggggugcugcuccugugcgagggccuccggcacccuaccuguaagcugcagacgcuuagacugggaaucugccgccugggcuccgccgcuugugaagggcucagcgucgugcugcaagccaaucauaaccuucgggagcuggaucucucuuuuaaugaccugggagauuggggccucuggcugcuugccgaagggcugcagcaccccgcuugcagacugcagaagcucuggcuggacuccuguggacuuaccgccaaagcgugcgagaaccuguauuucacacucggcauuaaccagacccugacagaucuguaccucaccaauaacgcucuuggggacacgggcgugcgccugcugugcaagcggcucagccauccuggauguaaacugagaguucuuuggcuguuuggcauggaccucaauaagaugacacacucccggcuggccgcccugcgcgucaccaaacccuaucucgauaucgggugcuga

SEQ ID NO: 9046 - protein, 1043 aa, Artificial Sequence
  NALP13__Homo_sapiens__Q86W25
MNFSVITCPNGGTNQGLLPYLMALDQYQLEEFKLCLEPQQLMDFWSAPQGHFPRIPWANLRAADPLNLSFLLDEHFPKGQAWKVVLGIFQTMNLTSLCEKVRAEMKENVQTQELQDPTQEDLEMLEAAAGNMQTQGCQDPNQEELDELEEETGNVQAQGCQDPNQEEPEMLEEADHRRKYRENMKAELLETWDNISWPKDHVYIRNTSKDEHEELQRLLDPNRTRAQAQTIVLVGRAGVGKTTLAMQAMLHWANGVLFQQRFSYVFYLSCHKIRYMKETTFAELISLDWPDFDAPIEEFMSQPEKLLFIIDGFEEIIISESRSESLDDGSPCTDWYQELPVTKILHSLLKKELVPLATLLITIKTWFVRDLKASLVNPCFVQITGFTGDDLRVYFMRHFDDSSEVEKILQQLRKNETLFHSCSAPMVCWTVCSCLKQPKVRYYDLQSITQTTTSLYAYFFSNLFSTAEVDLADDSWPGQWRALCSLAIEGLWSMNFTFNKEDTEIEGLEVPFIDSLYEFNILQKINDCGGCTTFTHLSFQEFFAAMSFVLEEPREFPPHSTKPQEMKMLLQHVLLDKEAYWTPVVLFFFGLLNKNIARELEDTLHCKISPRVMEELLKWGEELGKAESASLQFHILRLFHCLHESQEEDFTKKMLGRIFEVDLNILEDEELQASSFCLKHCKRLNKLRLSVSSHILERDLEILETSKFDSRMHAWNSICSTLVTNENLHELDLSNSKLHASSVKGLCLALKNPRCKVQKLTCKSVTPEWVLQDLIIALQGNSKLTHLNFSSNKLGMTVPLILKALRHSACNLKYLCLEKCNLSAASCQDLALFLTSIQHVTRLCLGFNRLQDDGIKLLCAALTHPKCALERLELWFCQLAAPACKHLSDALLQNRSLTHLNLSKNSLRDEGVKFLCEALGRPDGNLQSLNLSGCSFTREGCGELANALSHNHNVKILDLGENDLQDDGVKLLCEALKPHRALHTLGLAKCNLTTACCQHLFSVLSSSKSLVNLNLLGNELDTDGVKMLCKALKKSTCRLQKLG

SEQ ID NO: 9047 - RNA, 3132 nt, Artificial Sequence
  NALP13__Homo_sapiens__CCDS33119.1
augaacuuuucuguaaucaccugccccaacggugguaccaaccaagggcuucugccuuaccugauggcccuggaucaguaucagcuggaggaauucaagcuuugcuuggaaccccagcagcugauggacuucuggucggccccccaggggcacuucccgcguauccccugggcaaacuugagagcugccgacccuuugaaucuguccuuucuuuuggaugaacacuucccaaaaggucaggcauggaaagugguccucggcaucuuccagacaaugaaucugaccucacugugugagaaaguuagagccgagaugaaagagaaugugcagacccaagagcugcaagauccaacccaggaagaucuagagaugcuagaagcagcagcagggaauaugcagacccagggaugccaagauccaaaccaagaagaacuagacgagcuagaagaagaaacagggaauguacaggcccagggaugccaagauccaaaccaagaagaaccagagaugcuagaggaagcagaccacagaagaaaauacagagagaacaugaaggcugaacuacuggagacaugggacaacaucaguuggccuaaagaccacguauauauccguaauacaucaaaggacgaacaugaggaacugcagcgccuacuggauccuaauaggacuagagcccaggcccagacgauagucuugguggggagggcagggguugggaagaccaccuuggcaaugcaggcuaugcugcacugggcaaauggaguucucuuucagcaaagguucuccuauguuuucuaucucagcugccauaaaauaagguacaugaaggaaacuaccuuugcugaauugauuucuuuggauuggcccgauuuugaugcccccauugaagaguucaugucucaaccagagaagcuccuguuuauuauugauggcuuugaggaaauaaucauaucugagucacgcucugagagcuuggaugauggcucgccauguacagacugguaccaggagcucccagugaccaaaauccuacacagcuuguugaagaaagaauugguuccccuggcuaccuuacugaucacgaucaagaccugguuugugagagaucuuaaggccucauuagugaauccaugcuuuguacaaauuacaggguucacaggggacgaccuacggguauauuucaugagacacuuugaugacucaagugaaguugagaaaauccugcagcagcuaagaaaaaacgaaacucucuuucauuccugcagugcccccaugguguguuggaccguauguuccugucugaagcagccgaaggugagguauuacgaucuccagucaaucacucagacuaccaccagucuguaugccuauuuuuucuccaacuuguucuccacagcagagguagauuuggcagaugacagcuggccaggacaauggagggcccucugcagucuggccauagaagggcuguggucuaugaacuucacguuuaacaaagaagacacugagaucgagggccuggaagugccuuucauugauucucucuacgaguucaauauucuucaaaagaucaaugacuguggggguugcacuacuuucacccaccuaaguuuccaggaguuuuuugcagccauguccuuugugcuagaggaaccuagagaauucccuccccauuccacaaagccacaagagaugaagauguuacugcaacacgucuugcuugacaaagaagccuacuggacuccagugguucuguucuucuuuggucuuuuaaauaaaaacauagcaagagaacuggaagauacuuugcauuguaaaauaucucccaggguaauggaggaauuauuaaaguggggagaagaguuagguaaggcugaaagugccucucuccaauuucacauucuacgacuuuuucacugccuacacgagucccaggaggaagacuucacaaagaagauguugggucguaucuuugaaguugaccuuaauauuuuggaggacgaagaacuccaagcuucuucauuuugccuaaagcacuguaaaagguuaaauaagcuaaggcuuucuguuagcagucacauccuugaaagggacuuggaaauucuggagacaagcaaguuugauuccaggaugcacgcauggaacagcauuugcucuacguuggucacaaaugagaaucugcaugagcuagaccugaguaacagcaaacuucaugcuuccucugugaagggucucugucuugcacugaaaaauccaagaugcaaaguccagaaacugacgugcaaaucgguaacuccugaguggguucugcaggaccucauuauugcccuucaggguaacagcaagcugacccaucugaacuucagcucuaacaagcugggaaugacugucccccugauucuuaaagcuuugagacacucagcuugcaaccucaaguaucugugccuggagaaaugcaacuugucggcagccagcugucaggaccuagccuuguuucucaccagcauccaacacguaacucgauugugccugggauuuaaucggcuccaagaugauggcauaaagcuauugugugcggcccugacucaccccaagugugccuuagagagacuggagcucugguuuugccagcuggcagcacccgcuugcaagcacuugucagaugcucuccugcagaacaggagccugacacaccugaaucugagcaagaacagccugagagacgagggagucaaguuccugugugaggccuugggucgcccagaugguaaccugcagagccugaauuugucagguuguucuuucacaagagagggcuguggagagcuggcuaaugcccucagccauaaucauaaugugaaaaucuuggauuugggagaaaaugaucuucaggaugauggagugaagcuacugugugaggcucugaaaccacaucgugcauugcacacacuuggguuggcgaaaugcaaucugacaacugcuugcugccagcaucucuucucuguucucagcagcaguaagagccuggucaaucugaaccuucuaggcaaugaauuggauacugauggugucaagaugcuauguaaggcuuugaaaaagucgacaugcaggcugcagaaacucggguaa

SEQ ID NO: 9048 - RNA, 3132 nt, Artificial Sequence
  derived and/or modified sequence opt1 from NALP13__Homo_sapiens__CCDS33119.1
augaacuucagcgugaucacgugccccaacggcgggaccaaccagggccugcucccguaccugauggcccuggaccaguaccagcucgaggaguucaagcugugccuggagccccagcagcucauggacuucuggagcgcgccccaggggcacuucccccgcaucccgugggccaaccugcgggccgccgacccccugaaccucagcuuccugcuggacgagcacuuccccaagggccaggccuggaaggucgugcucgggaucuuccagaccaugaaccugaccucccugugcgagaaggugcgcgccgagaugaaggagaacguccagacccaggagcuccaggaccccacccaggaggaccuggagaugcuggaggcggccgccggcaacaugcagacgcagggcugccaggacccgaaccaggaggagcucgacgagcuggaggaggagaccgggaacgugcaggcccagggcugccaggaccccaaccaggaggagcccgagaugcuggaggaggcggaccaccggcgcaaguaccgggagaacaugaaggccgagcuccuggagaccugggacaacaucagcuggcccaaggaccacguguacauccgcaacaccuccaaggacgagcacgaggagcugcagcggcuccuggacccgaaccgcacgcgggcccaggcccagaccaucguccugguggggcgcgccggcguggggaagaccacccucgcgaugcaggccaugcugcacugggccaacggcguccuguuccagcagcgguucagcuacguguucuaccucuccugccacaagauccgcuacaugaaggagacgaccuucgccgagcugaucagccuggacuggcccgacuucgacgcccccaucgaggaguucaugucccagcccgagaagcuccuguucaucaucgacggcuucgaggagaucaucaucagcgagucccggagcgagucccuggacgacgggagcccgugcaccgacugguaccaggagcuccccgugaccaagauccugcacucccugcucaagaaggagcuggucccccuggcgacgcuccugaucaccaucaagaccugguucgugcgcgaccugaaggccagccucgugaaccccugcuucguccagaucaccggcuucacgggggacgaccugcggguguacuucaugcgccacuucgacgacuccagcgagguggagaagauccugcagcagcuccggaagaacgagacccuguuccacuccugcagcgccccgauggucugcuggaccgugugcagcugccugaagcagcccaaggugcgcuacuacgaccugcaguccaucacccagacgaccaccagccucuacgccuacuucuucuccaaccuguucagcaccgccgaggucgaccuggcggacgacuccuggcccggccaguggcgggcccucugcagccuggccaucgagggccugugguccaugaacuucacguucaacaaggaggacaccgagaucgaggggcucgaggugcccuucaucgacagccuguacgaguucaacauccugcagaagaucaacgacugcggcgggugcaccaccuucacgcaccucuccuuccaggaguucuucgccgccaugagcuucgugcuggaggagccgcgcgaguucccgccccacuccaccaagccccaggagaugaagaugcugcuccagcacguccugcuggacaaggaggcguacuggacccccgugguccucuucuucuucggccugcugaacaagaacaucgcccgggagcucgaggacacccugcacugcaagaucagcccccgcgugauggaggagcugcucaaguggggcgaggagcuggggaaggccgaguccgccagccugcaguuccacauccuccgccuguuccacugccugcacgagucccaggaggaggacuucacgaagaagaugcucggccggaucuucgagguggaccugaacauccuggaggacgaggagcuccaggcgagcuccuucugccugaagcacugcaagcgccugaacaagcuccggcugagcgucuccagccacauccuggagcgcgaccucgagauccuggagaccagcaaguucgacucccggaugcacgccuggaacagcaucugcuccacccuggugaccaacgagaaccuccacgagcuggaccugagcaacuccaagcuccacgccagcuccgugaaggggcugugccuggcccucaagaacccccgcugcaagguccagaagcugaccugcaagagcgugacgccggagugggugcugcaggaccucaucaucgcccugcagggcaacuccaagcugacccaccucaacuucagcuccaacaagcuggggaugaccgucccccugauccucaaggcgcugcggcacagcgccugcaaccugaaguaccucugccuggagaagugcaaccuguccgccgccagcugccaggaccucgcccuguuccugaccuccauccagcacgugacgcgccucugccugggcuucaaccggcugcaggacgacgggaucaagcuccugugcgcggcccugacccaccccaagugcgcccucgagcgccuggagcugugguucugccagcucgccgcccccgcgugcaagcaccugagcgacgcccugcuccagaaccggucccugacccaccugaaccucagcaagaacagccugcgcgacgagggcgugaaguuccugugcgaggcccucggccggccggacgggaaccugcagucccugaaccucagcggcugcuccuucacccgcgaggggugcggcgagcuggccaacgcgcugagccacaaccacaacgucaagauccucgaccugggggagaacgaccugcaggacgacggcgugaagcuccugugcgaggcccugaagccccaccgggcccuccacacgcugggccuggccaagugcaaccugaccaccgccugcugccagcaccucuucuccgugcugagcuccagcaagucccuggucaaccucaaccugcuggggaacgagcucgacaccgacggcgugaagaugcugugcaaggcgcugaagaaguccacgugccgccuccagaagcugggguga

SEQ ID NO: 9049 - RNA, 3132 nt, Artificial Sequence
  derived and/or modified sequence opt2 from NALP13__Homo_sapiens__CCDS33119.1
augaacuucuccgucaucaccugccccaacggcggcaccaaccagggccuccuccccuaccucauggcccucgaccaguaccagcucgaggaguucaagcucugccucgagccccagcagcucauggacuucugguccgccccccagggccacuucccccgcauccccugggccaaccuccgcgccgccgacccccucaaccucuccuuccuccucgacgagcacuuccccaagggccaggccuggaaggucguccucggcaucuuccagaccaugaaccucaccucccucugcgagaagguccgcgccgagaugaaggagaacguccagacccaggagcuccaggaccccacccaggaggaccucgagaugcucgaggccgccgccggcaacaugcagacccagggcugccaggaccccaaccaggaggagcucgacgagcucgaggaggagaccggcaacguccaggcccagggcugccaggaccccaaccaggaggagcccgagaugcucgaggaggccgaccaccgccgcaaguaccgcgagaacaugaaggccgagcuccucgagaccugggacaacaucuccuggcccaaggaccacgucuacauccgcaacaccuccaaggacgagcacgaggagcuccagcgccuccucgaccccaaccgcacccgcgcccaggcccagaccaucguccucgucggccgcgccggcgucggcaagaccacccucgccaugcaggccaugcuccacugggccaacggcguccucuuccagcagcgcuucuccuacgucuucuaccucuccugccacaagauccgcuacaugaaggagaccaccuucgccgagcucaucucccucgacuggcccgacuucgacgcccccaucgaggaguucaugucccagcccgagaagcuccucuucaucaucgacggcuucgaggagaucaucaucuccgagucccgcuccgagucccucgacgacggcucccccugcaccgacugguaccaggagcuccccgucaccaagauccuccacucccuccucaagaaggagcucgucccccucgccacccuccucaucaccaucaagaccugguucguccgcgaccucaaggccucccucgucaaccccugcuucguccagaucaccggcuucaccggcgacgaccuccgcgucuacuucaugcgccacuucgacgacuccuccgaggucgagaagauccuccagcagcuccgcaagaacgagacccucuuccacuccugcuccgcccccauggucugcuggaccgucugcuccugccucaagcagcccaagguccgcuacuacgaccuccaguccaucacccagaccaccaccucccucuacgccuacuucuucuccaaccucuucuccaccgccgaggucgaccucgccgacgacuccuggcccggccaguggcgcgcccucugcucccucgccaucgagggccucugguccaugaacuucaccuucaacaaggaggacaccgagaucgagggccucgagguccccuucaucgacucccucuacgaguucaacauccuccagaagaucaacgacugcggcggcugcaccaccuucacccaccucuccuuccaggaguucuucgccgccauguccuucguccucgaggagccccgcgaguuccccccccacuccaccaagccccaggagaugaagaugcuccuccagcacguccuccucgacaaggaggccuacuggacccccgucguccucuucuucuucggccuccucaacaagaacaucgcccgcgagcucgaggacacccuccacugcaagaucuccccccgcgucauggaggagcuccucaaguggggcgaggagcucggcaaggccgaguccgccucccuccaguuccacauccuccgccucuuccacugccuccacgagucccaggaggaggacuucaccaagaagaugcucggccgcaucuucgaggucgaccucaacauccucgaggacgaggagcuccaggccuccuccuucugccucaagcacugcaagcgccucaacaagcuccgccucuccgucuccucccacauccucgagcgcgaccucgagauccucgagaccuccaaguucgacucccgcaugcacgccuggaacuccaucugcuccacccucgucaccaacgagaaccuccacgagcucgaccucuccaacuccaagcuccacgccuccuccgucaagggccucugccucgcccucaagaacccccgcugcaagguccagaagcucaccugcaaguccgucacccccgaguggguccuccaggaccucaucaucgcccuccagggcaacuccaagcucacccaccucaacuucuccuccaacaagcucggcaugaccgucccccucauccucaaggcccuccgccacuccgccugcaaccucaaguaccucugccucgagaagugcaaccucuccgccgccuccugccaggaccucgcccucuuccucaccuccauccagcacgucacccgccucugccucggcuucaaccgccuccaggacgacggcaucaagcuccucugcgccgcccucacccaccccaagugcgcccucgagcgccucgagcucugguucugccagcucgccgcccccgccugcaagcaccucuccgacgcccuccuccagaaccgcucccucacccaccucaaccucuccaagaacucccuccgcgacgagggcgucaaguuccucugcgaggcccucggccgccccgacggcaaccuccagucccucaaccucuccggcugcuccuucacccgcgagggcugcggcgagcucgccaacgcccucucccacaaccacaacgucaagauccucgaccucggcgagaacgaccuccaggacgacggcgucaagcuccucugcgaggcccucaagccccaccgcgcccuccacacccucggccucgccaagugcaaccucaccaccgccugcugccagcaccucuucuccguccucuccuccuccaagucccucgucaaccucaaccuccucggcaacgagcucgacaccgacggcgucaagaugcucugcaaggcccucaagaaguccaccugccgccuccagaagcucggcuga

SEQ ID NO: 9050 - RNA, 3132 nt, Artificial Sequence
  derived and/or modified sequence opt3 from NALP13__Homo_sapiens__CCDS33119.1
augaacuucagcgugauuaccugccccaauggcgggacaaaccagggacugcucccuuaccuuauggcccuggaccaauaucaguuggaggaauuuaaguuaugucuggagccacagcagcuaauggauuucugguccgcuccgcaaggucacuuucccagaaucccuugggcaaaucucagggccgcggacccacugaaccuuucuuuccuguuggaugaacauuuucccaaaggccaggcuuggaaggucguucucgggauauuccagacuaugaaucugacgucacugugcgagaaagugcgggccgaaaugaaggagaacguacagacccaagagcuccaggacccuacacaggaagauuuagagaugcuggaagcagccgcuggaaauaugcagacucaaggcugucaggacccaaaccaggaggagcuugaugaauuggaggaagagaccgguaaugugcaagcacaggggugccaggaccccaaccaggaagaaccugagaugcuggaagaggccgaucaccgccgaaaauaccgugaaaauaugaaggcugagcuacucgaaacaugggacaacaucaguuggccaaaggaucaugucuauauuagaaauaccagcaaagacgagcacgaggaacugcaaaggcuucuggauccgaaccggacucgcgcccaggcgcagacaaucguguugguuggcagagcaggagugggcaagaccacgcucgccaugcaggcuaugcugcauugggccaauggggucuuauuucaacagagguucuccuacguguuuuaucugucuugucacaaaauucgguacaugaaggagacuaccuucgcagaacucaucucgcuugacuggcccgacuuugaugcuccuauagaggaguucaugucacagccagagaaacuguuguuuaucauugacggauucgaggaaaucauuaucagcgagagucgcuccgaaucucuagaugacgguagccccugcacagauugguaucaggagcugccuguaacuaagauacuccacucccugcuuaagaaagagcugguuccauuggccacccuccugauuacaaucaagaccugguucgugcgagacuuaaaagcgucacuggucaaccccuguuuugugcaaauuacgggcuucacuggggaugaccuaagaguguacuuuaugaggcauuucgaugacaguagcgaagucgagaagauccuccagcagcugcggaaaaacgaaacacuuuuucacucuugcuccgccccgaugguuuguuggaccgugugcucauguuugaagcagccuaaaguacguuacuaugaucugcaaagcaucacucagacaaccacgagucucuacgcauauuucuuuucuaaucuguucuccaccgcugagguggaccuugccgacgauagcuggcccggacaguggcgcgcucugugcucguuggccauugaaggccucuggucuaugaacuuuacauucaauaaggaggacacugagauagaaggucuggaggucccauuuaucgauuccuuauacgaguucaacauucugcaaaagaucaaugacugcgggggauguaccacauuuacucaucuaucauuccaggaguucuuugcagccaugaguuucgugcucgaagaaccuagagaguuucccccacacagcaccaaaccccaggaaaugaagaugcugcuucagcacguuuugcuggauaaagaggcuuauuggacaccugugguccucuucuuuuucggccuguuaaacaagaauauagcgagggaacuggaggacacccuucauugcaaaauuuccccacgggugauggaagaguugcucaaguggggcgaggaacuggggaaggcagagucugccagccuacaauuucacauccugcgacucuuccauugucugcacgaaucacaggaggaggauuuuacuaaaaagaugcuuggacgcaucuucgaaguagacuugaacauucuggaggaugaagaguuacaggcuaguuccuuuugccucaaacauuguaagagacugaauaaacuuaggcugagcguuucuucacacaucuuggaacgggaccucgagauucuggagacgaguaaguucgauagccgcaugcacgccuggaacuccauaugcucuacacuugugaccaaugaaaaccugcaugagcucgaccugucgaauagcaagcuacacgcauccucagucaaagguuugugucuggccuuaaagaacccgagaugcaaagugcagaagcucacuuguaaaagugucacccccgaaugggugcugcaagaucuuaucauugcucugcagggcaauucuaagcuaacacaucucaacuuuagcuccaacaagcuggggaugaccguuccuuugauccugaaagccuuaaggcacucagcaugcaaucucaaguaccugugucuugagaaaugcaaccugagcgcggcuucuugccaggacuuggcccucuuccugacuuccauccagcacgugacacgucuaugucugggauucaaucggcuucaagacgauggcauuaagcuccugugcgcagccuugacgcauccaaaaugugcucuggaacgauuagagcucugguuuugccagcuggccgcacccgcuuguaagcaccuuagugacgcccuguugcagaacagaagccucacccaucugaaucuaucuaaaaacucccugagggaugaggguguaaaguuccuuugcgaagcgcucgggcgcccugacggcaaucugcaaucauugaacuuaaguggauguagcuuuacucgggagggcugcggggaacuggccaaugcucucucgcacaaccauaaugucaagauacuggaucuuggagagaacgaccugcaggaugacggugugaaauugcuaugugaagcacugaagccacacagagcccuccacacacugggccuugcuaaaugcaauuuaaccacagccuguugccagcaucuguucuccguucucucuagcucaaagaguuuggugaaccugaaucuccuggggaacgagcuugauacugacggagucaaaaugcugugcaaggcauugaagaaauccaccuguaggcuacagaagcugggcuga

SEQ ID NO: 9051 - RNA, 3132 nt, Artificial Sequence
  derived and/or modified sequence opt4 from NALP13__Homo_sapiens__CCDS33119.1
augaacuucagcgugaucaccugccccaacggcggcaccaaccagggccugcugcccuaccugauggcccuggaccaguaccagcuggaggaguucaagcugugccuggagccccagcagcugauggacuucuggagcgccccccagggccacuuccccagaauccccugggccaaccugagagccgccgacccccugaaccugagcuuccugcuggacgagcacuuccccaagggccaggccuggaagguggugcugggcaucuuccagaccaugaaccugaccagccugugcgagaaggugagagccgagaugaaggagaacgugcagacccaggagcugcaggaccccacccaggaggaccuggagaugcuggaggccgccgccggcaacaugcagacccagggcugccaggaccccaaccaggaggagcuggacgagcuggaggaggagaccggcaacgugcaggcccagggcugccaggaccccaaccaggaggagcccgagaugcuggaggaggccgaccacagaagaaaguacagagagaacaugaaggccgagcugcuggagaccugggacaacaucagcuggcccaaggaccacguguacaucagaaacaccagcaaggacgagcacgaggagcugcagagacugcuggaccccaacagaaccagagcccaggcccagaccaucgugcuggugggcagagccggcgugggcaagaccacccuggccaugcaggccaugcugcacugggccaacggcgugcuguuccagcagagauucagcuacguguucuaccugagcugccacaagaucagauacaugaaggagaccaccuucgccgagcugaucagccuggacuggcccgacuucgacgcccccaucgaggaguucaugagccagcccgagaagcugcuguucaucaucgacggcuucgaggagaucaucaucagcgagagcagaagcgagagccuggacgacggcagccccugcaccgacugguaccaggagcugcccgugaccaagauccugcacagccugcugaagaaggagcuggugccccuggccacccugcugaucaccaucaagaccugguucgugagagaccugaaggccagccuggugaaccccugcuucgugcagaucaccggcuucaccggcgacgaccugagaguguacuucaugagacacuucgacgacagcagcgagguggagaagauccugcagcagcugagaaagaacgagacccuguuccacagcugcagcgcccccauggugugcuggaccgugugcagcugccugaagcagcccaaggugagauacuacgaccugcagagcaucacccagaccaccaccagccuguacgccuacuucuucagcaaccuguucagcaccgccgagguggaccuggccgacgacagcuggcccggccaguggagagcccugugcagccuggccaucgagggccuguggagcaugaacuucaccuucaacaaggaggacaccgagaucgagggccuggaggugcccuucaucgacagccuguacgaguucaacauccugcagaagaucaacgacugcggcggcugcaccaccuucacccaccugagcuuccaggaguucuucgccgccaugagcuucgugcuggaggagcccagagaguuccccccccacagcaccaagccccaggagaugaagaugcugcugcagcacgugcugcuggacaaggaggccuacuggacccccguggugcuguucuucuucggccugcugaacaagaacaucgccagagagcuggaggacacccugcacugcaagaucagccccagagugauggaggagcugcugaaguggggcgaggagcugggcaaggccgagagcgccagccugcaguuccacauccugagacuguuccacugccugcacgagagccaggaggaggacuucaccaagaagaugcugggcagaaucuucgagguggaccugaacauccuggaggacgaggagcugcaggccagcagcuucugccugaagcacugcaagagacugaacaagcugagacugagcgugagcagccacauccuggagagagaccuggagauccuggagaccagcaaguucgacagcagaaugcacgccuggaacagcaucugcagcacccuggugaccaacgagaaccugcacgagcuggaccugagcaacagcaagcugcacgccagcagcgugaagggccugugccuggcccugaagaaccccagaugcaaggugcagaagcugaccugcaagagcgugacccccgagugggugcugcaggaccugaucaucgcccugcagggcaacagcaagcugacccaccugaacuucagcagcaacaagcugggcaugaccgugccccugauccugaaggcccugagacacagcgccugcaaccugaaguaccugugccuggagaagugcaaccugagcgccgccagcugccaggaccuggcccuguuccugaccagcauccagcacgugaccagacugugccugggcuucaacagacugcaggacgacggcaucaagcugcugugcgccgcccugacccaccccaagugcgcccuggagagacuggagcugugguucugccagcuggccgcccccgccugcaagcaccugagcgacgcccugcugcagaacagaagccugacccaccugaaccugagcaagaacagccugagagacgagggcgugaaguuccugugcgaggcccugggcagacccgacggcaaccugcagagccugaaccugagcggcugcagcuucaccagagagggcugcggcgagcuggccaacgcccugagccacaaccacaacgugaagauccuggaccugggcgagaacgaccugcaggacgacggcgugaagcugcugugcgaggcccugaagccccacagagcccugcacacccugggccuggccaagugcaaccugaccaccgccugcugccagcaccuguucagcgugcugagcagcagcaagagccuggugaaccugaaccugcugggcaacgagcuggacaccgacggcgugaagaugcugugcaaggcccugaagaagagcaccugcagacugcagaagcugggcuga

SEQ ID NO: 9052 - RNA, 3132 nt, Artificial Sequence
  derived and/or modified sequence opt5 from NALP13__Homo_sapiens__CCDS33119.1
augaacuucagcgugauuaccugccccaauggcgggacaaaccagggacugcucccuuaccugauggcccuugaccaauaucagcuggaggaauuuaagcucugucuggagccgcagcagcuuauggauuucugguccgcuccccaaggccacuuuccuagaauccccugggccaaucugcgggcggcugacccucucaaccugucuuuccugcucgaugaacauuuucccaaagggcaggccuggaaggucguucugggaaucuuccagacgaugaaucuuaccagccugugcgagaaagugcgcgccgaaaugaaggagaacgugcagacacaagagcuccaggacccuacccaggaagaucuggagaugcuugaagcugccgcuggcaauaugcagacacaagggugucaggacccgaaccaggaggagcuggaugaacucgaggaagagaccggaaauguccaagcccagggcugccaggaccccaaccaggaagaaccugagaugcuggaagaggcggaucacagacggaaauaccgcgaaaauaugaaggccgagcugcucgaaacaugggacaacauuuccuggcccaaggaucauguguauaucagaaauaccucuaaagacgagcacgaggaacugcaacggcuucuggauccuaaccgcacgagagcucaggcccagaccauuguucucgugggccgggcuggggucggaaagacaacccuggccaugcaggcgaugcuucauugggccaauggcgugcuguuucaacagcgcuucagcuacguuuucuaucucuccugucacaaaaucagauacaugaaggagacaaccuucgcugaacugaucucucuggacuggcccgacuuugaugccccgauugaggaauuuaugagccagccugagaaacuccuguuuaucauugacggguucgaggaaaucauuaucuccgagagccggucugaaucccuugaugacggaagccccugcacggauugguaucaggagcugccugugacaaagauucuccacucucugcuuaagaaagagcuggucccccucgcuacccugcugaucacaaucaagaccugguucgugcgcgaccucaaagccucccuggugaaccccuguuuuguccaaauuaccggcuucacaggggaugaccuuagaguuuacuuuaugcggcauuucgaugacagcucugaaguggagaagauccugcagcagcuccgcaaaaacgaaacgcuguuucacuccugcagcgccccuaugguguguuggaccgucugcuccugucugaagcagccgaaagugagauacuaugaucuucaaucuauuacacagaccacaaccagccucuacgcuuauuucuuuuccaaucuguucagcacggcggagguugaccuggccgacgauucuuggcccggacaguggcgggcucucugcucccuggccaucgaaggccuuuggagcaugaacuuuacauucaauaaggaggacaccgagauugaaggccuggaggugccuuuuaucgauucucucuacgaguucaacauccugcaaaagauuaaugacugcgggggauguaccacauuuacccaucugagcuuccaggaguucuuugccgcuauguccuucguccuugaagaacccagagaguuuccuccccacucuacaaaaccgcaggaaaugaagaugcuccugcagcacgugcugcucgauaaagaggccuauuggacgccuguugugcuguucuuuuucggccuucugaacaagaauaucgcgcgcgaacucgaggacacccugcauugcaaaauuagcccccgggucauggaggagcugcuuaaguggggagaggaacucgggaaggcugaguccgccagccugcaauuucacauccugagacucuuccauugucugcacgaaucucaggaggaggauuuuaccaaaaagaugcuuggccgcauuuucgaaguggaccugaacauccucgaggaugaggaacugcaggccuccagcuuuugccugaaacauuguaagcggcuuaauaaacucagacugucugucuccagccacauccuggaacgcgaccucgagauucuggagacauccaaguucgauucucggaugcacgcuuggaacagcaucugcuccacacuugugaccaaugaaaaccugcaugagcucgaccugucuaauagcaagcugcacgccuccagcguuaaagggcuuugucuggcucucaagaacccuagaugcaaagugcagaagcugacguguaaaucugucacccccgaaugggugcuccaagaucugauuaucgcccuucagggaaauuccaagcugacacaucucaacuuuagcucuaacaagcugggcaugaccguuccucugauucuuaaagcgcugcgccacuccgccugcaaucucaaguaccugugucucgagaaaugcaaccugagcgcugccucuugccaggaccuugcucuguuccucacaagcauccagcacgugacccggcugugucugggcuucaauagacuucaagacgaugggauuaagcugcucugcgccgcgcugacgcaucccaaaugugcccucgaacgccuggagcuuugguuuugccagcuggcugccccggcuuguaagcaccuguccgacgcccuccugcagaaccggagccuuacacaucugaaucucucuaaaaacucccugagagaugagggagucaaguuccucugcgaagcccugggccggccugacgggaaucuucaaagccugaaccuguccggauguucuuuuacccgcgagggcugcggggaacucgcuaaugcgcugagccacaaccauaaugugaagauccuugaucugggcgagaacgaccuccaggaugacggagugaaacugcucugugaagcccugaagccccacagagcccuucacacacugggccuggcuaaaugcaaucucaccaccgccuguugccagcaucuguucuccguucuuucuagcuccaagucucuggucaaccucaaucugcucgggaacgagcuggauacagacggagugaaaaugcuuugcaaggcucugaagaaaagcacgugucggcugcagaagcucggcuga

SEQ ID NO: 9053 - protein, 197 aa, Artificial Sequence
  NALP2__Homo_sapiens__Q8WY49
MSPLSLSVSNPRLKSQRCITAVRTHRFGFAFFLWLISRLWNCDITSDGCCDLTKLLQEKSSLLCLDLGLNHIGVKGMKFLCEALRKPLCNLRCLWLWGCSIPPFSCEDLCSALSCNQSLVTLDLGQNPLGSSGVKMLFETLTCSSGTLRTLRLKIDDFNDELNKLLEEIEEKNPQLIIDTEKHHPWAERPSSHDFMI

SEQ ID NO: 9054 - RNA, 594 nt, Artificial Sequence
  NALP2__Homo_sapiens__AAG23171
augucaccacugucucuaagugugucuaacccacggcucaagagucaaaggugcaucacagcagugagaacucacagguucggguuugcuuucuuccugugguugauuucuaggcuuuggaacugcgacauaacuagcgauggcugcugcgaucucacaaagcuucuccaagaaaaaucaagccuguuguguuuggaucuggggcugaaucacauaggaguuaagggaaugaaguuccugugugaggcuuugaggaaaccacugugcaacuugagaugucugugguuguggggauguuccaucccuccguucaguugugaagaccucugcucugcccucagcugcaaccagagccucgucacucuggaccugggucagaaucccuuggggucuaguggagugaagaugcuguuugaaaccuugacauguuccaguggcacccuccggacacucagguugaaaauagaugacuuuaaugaugaacucaauaagcugcuggaagaaauagaagaaaaaaacccacaacugauuauugauacugagaaacaucaucccugggcagaaaggccuucuucucaugacuucaugaucuga

SEQ ID NO: 9055 - RNA, 594 nt, Artificial Sequence
  derived and/or modified sequence opt1 from NALP2__Homo_sapiens__AAG23171
augagcccccugucccucagcguguccaacccgcgccucaagagccagcggugcaucaccgccguccgcacccaccgguucggcuucgccuucuuccuguggcugaucucccgccuguggaacugcgacaucacgagcgacgggugcugcgaccugaccaagcuccugcaggagaaguccagccugcucugccuggaccugggccucaaccacaucggggugaagggcaugaaguuccugugcgaggcgcugcggaagccccucugcaaccugcgcugccuguggcucugggggugcuccaucccgcccuucagcugcgaggaccugugcuccgcccugagcugcaaccagucccucgugacccuggaccugggccagaacccccucggcagcuccggggucaagaugcuguucgagacccugacgugcagcuccggcacccuccggacccugcgccugaagaucgacgacuucaacgacgagcucaacaagcugcuggaggagaucgaggagaagaacccccagcucaucaucgacaccgagaagcaccaccccugggccgagcggcccagcucccacgacuucaugaucuga

SEQ ID NO: 9056 - RNA, 594 nt, Artificial Sequence
  derived and/or modified sequence opt2 from NALP2__Homo_sapiens__AAG23171
auguccccccucucccucuccgucuccaacccccgccucaagucccagcgcugcaucaccgccguccgcacccaccgcuucggcuucgccuucuuccucuggcucaucucccgccucuggaacugcgacaucaccuccgacggcugcugcgaccucaccaagcuccuccaggagaaguccucccuccucugccucgaccucggccucaaccacaucggcgucaagggcaugaaguuccucugcgaggcccuccgcaagccccucugcaaccuccgcugccucuggcucuggggcugcuccaucccccccuucuccugcgaggaccucugcuccgcccucuccugcaaccagucccucgucacccucgaccucggccagaacccccucggcuccuccggcgucaagaugcucuucgagacccucaccugcuccuccggcacccuccgcacccuccgccucaagaucgacgacuucaacgacgagcucaacaagcuccucgaggagaucgaggagaagaacccccagcucaucaucgacaccgagaagcaccaccccugggccgagcgccccuccucccacgacuucaugaucuga

SEQ ID NO: 9057 - RNA, 594 nt, Artificial Sequence
  derived and/or modified sequence opt3 from NALP2__Homo_sapiens__AAG23171
augagcccccugucccucucugugucaaacccuagacuuaagagucagaggugcaucaccgccguccggacacaccgcuucggcuuugcuuucuuucugugguugauuagccgauuauggaauugugacauaacuuccgaugggugcugugaccugacgaaacuacuccaagagaagucuucgcugcuuugccuggauuugggacucaaccauaucgguguuaaaggcaugaaguuccugugugaagcacugcguaaaccacucugcaauuuaagaugucuguggcuuugggggugcucaauuccgcccuuuagcugugaggacuugugcagugcccuguccuguaaccagucucuagugacccucgaucugggacagaauccucuuggcagcuccgguguaaagaugcuguucgaaacauugacuugcucaagugggacccucaggacacugcgguuaaagaucgacgauuuuaacgacgagcugaauaaacuccuugaagagauugaggaaaagaacccacagcugaucauagauaccgagaaacaccaucccugggcggaacgcccuagcucucacgacuucaugaucuga

SEQ ID NO: 9058 - RNA, 594 nt, Artificial Sequence
  derived and/or modified sequence opt4 from NALP2__Homo_sapiens__AAG23171
augagcccccugagccugagcgugagcaaccccagacugaagagccagagaugcaucaccgccgugagaacccacagauucggcuucgccuucuuccuguggcugaucagcagacuguggaacugcgacaucaccagcgacggcugcugcgaccugaccaagcugcugcaggagaagagcagccugcugugccuggaccugggccugaaccacaucggcgugaagggcaugaaguuccugugcgaggcccugagaaagccccugugcaaccugagaugccuguggcuguggggcugcagcaucccccccuucagcugcgaggaccugugcagcgcccugagcugcaaccagagccuggugacccuggaccugggccagaacccccugggcagcagcggcgugaagaugcuguucgagacccugaccugcagcagcggcacccugagaacccugagacugaagaucgacgacuucaacgacgagcugaacaagcugcuggaggagaucgaggagaagaacccccagcugaucaucgacaccgagaagcaccaccccugggccgagagacccagcagccacgacuucaugaucuga

SEQ ID NO: 9059 - RNA, 594 nt, Artificial Sequence
  derived and/or modified sequence opt5 from NALP2__Homo_sapiens__AAG23171
augagcccccugucccucucugugagcaacccuagacugaagucccagcggugcaucaccgccguccgcacacacagauucggcuuugcuuucuuucuuuggcugauuucucggcucuggaauugugacaucacgagcgaugggugcugugaccugaccaaacuucugcaagagaaguccucucuccugugccuggaucucggacugaaccauauuggcguuaaagggaugaaguuccuuugugaagcccugcgcaaaccgcucugcaaucugagaugucuuuggcuguggggaugcagcauucccccuuuuuccugugaggaccucugcagcgcgcugucuuguaaccagucccuggugacacucgaucugggccagaauccccuugggagcucuggagugaagaugcuguucgaaacccucacaugcuccagcggcacccugcggacacuucgccugaagaucgacgauuuuaacgacgagcucaauaaacugcuggaagagaucgaggaaaagaacccucagcucaucauugauaccgagaaacaccaucccugggcugaaagaccuucuucccacgacuucaugaucuga

SEQ ID NO: 9060 - protein, 1062 aa, Artificial Sequence
  NALP2__Homo_sapiens__Q9NX02
MVSSAQMGFNLQALLEQLSQDELSKFKYLITTFSLAHELQKIPHKEVDKADGKQLVEILTTHCDSYWVEMASLQVFEKMHRMDLSERAKDEVREAALKSFNKRKPLSLGITRKERPPLDVDEMLERFKTEAQAFTETKGNVICLGKEVFKGKKPDKDNRCRYILKTKFREMWKSWPGDSKEVQVMAERYKMLIPFSNPRVLPGPFSYTVVLYGPAGLGKTTLAQKLMLDWAEDNLIHKFKYAFYLSCRELSRLGPCSFAELVFRDWPELQDDIPHILAQARKILFVIDGFDELGAAPGALIEDICGDWEKKKPVPVLLGSLLNRVMLPKAALLVTTRPRALRDLRILAEEPIYIRVEGFLEEDRRAYFLRHFGDEDQAMRAFELMRSNAALFQLGSAPAVCWIVCTTLKLQMEKGEDPVPTCLTRTGLFLRFLCSRFPQGAQLRGALRTLSLLAAQGLWAQTSVLHREDLERLGVQESDLRLFLDGDILRQDRVSKGCYSFIHLSFQQFLTALFYTLEKEEEEDRDGHTWDIGDVQKLLSGVERLRNPDLIQAGYYSFGLANEKRAKELEATFGCRMSPDIKQELLRCDISCKGGHSTVTDLQELLGCLYESQEEELVKEVMAQFKEISLHLNAVDVVPSSFCVKHCRNLQKMSLQVIKENLPENVTASESDAEVERSQDDQHMLPFWTDLCSIFGSNKDLMGLAINDSFLSASLVRILCEQIASDTCHLQRVVFKNISPADAHRNLCLALRGHKTVTYLTLQGNDQDDMFPALCEVLRHPECNLRYLGLVSCSATTQQWADLSLALEVNQSLTCVNLSDNELLDEGAKLLYTTLRHPKCFLQRLSLENCHLTEANCKDLAAVLVVSRELTHLCLAKNPIGNTGVKFLCEGLRYPECKLQTLVLWNCDITSDGCCDLTKLLQEKSSLLCLDLGLNHIGVKGMKFLCEALRKPLCNLRCLWLWGCSIPPFSCEDLCSALSCNQSLVTLDLGQNPLGSSGVKMLFETLTCSSGTLRTLRLKIDDFNDELNKLLEEIEEKNPQLIIDTEKHHPWAERPSSHDFMI

SEQ ID NO: 9061 - RNA, 3189 nt, Artificial Sequence
  NALP2__Homo_sapiens__AAG30289
auggugucuucggcgcagaugggcuucaaccugcaggcucuccuggagcagcucagccaggaugaguugagcaaguucaaguaucugaucacgaccuucucccuggcacacgagcuccagaagaucccccacaaggagguagacaaggcugaugggaagcaacugguagaaauccucaccacccauugugacagcuacuggguggagauggcgagccuccaggucuuugaaaagaugcaccgaauggaucugucugagagagcaaaggaugaagucagagaagcagcuuugaaauccuuuaauaaaaggaaaccucuaucauuagggauaacacggaaagaacgaccaccucuagacguggacgaaaugcuggagcgcuucaaaacagaagcacaagcguuuacagaaacgaaaggaaaugucaucugccuggguaaagaagucuuuaaaggaaaaaagccagacaaagacaauaggugcagguauauauugaagacgaaguuccgggagauguggaagagcuggccuggagauagcaaagagguccagguuauggcugagagauacaagaugcugaucccauucagcaaccccagggugcuucccgggcccuucucauacacgguggugcuguaugguccugcaggccuugggaaaaccacgcuggcccagaaacuaaugcuagacugggcagaggacaaccucauccacaaauucaaauaugcguucuaccucagcugcagggagcucagccgccugggcccgugcaguuuugcagagcuggucuucagggacuggccugaauugcaggaugacauuccacacauccuagcccaagcacggaaaaucuuguucgugauugacggcuuugaugagcugggagccgcaccuggggcgcugaucgaggacaucugcggggacugggagaagaagaagccggugcccguccuccuggggaguuugcugaacagggugauguuacccaaggccgcccugcuggucaccacgcggcccagggcccugagggaccuccggauccuggcggaggagccgaucuacauaaggguggagggcuuccuggaggaggacaggagggccuauuuccugagacacuuuggagacgaggaccaagccaugcgugccuuugagcuaaugaggagcaacgcggcccuguuccagcugggcucggcccccgcggugugcuggaucgugugcacgacucugaagcugcagauggagaagggggaggacccgguccccaccugccucacccgcacggggcuguuccugcguuuccucugcagccgguucccgcagggcgcacagcugcggggcgcgcugcggacgcugagccuccuggccgcgcagggccugugggcgcagacguccgugcuucaccgagaggaucuggaaaggcucggggugcaggaguccgaccuccgucuguuccuggacggagacauccuccgccaggacagagucuccaaaggcugcuacuccuucauccaccucagcuuccagcaguuucucacugcccuguucuacacccuggagaaggaggaggaagaggauagggacggccacaccugggacauuggggacguacagaagcugcuuuccggaguagaaagacucaggaaccccgaccugauccaagcaggcuacuacuccuuuggccucgcuaacgagaagagagccaaggaguuggaggccacuuuuggcugccggaugucaccggacaucaaacaggaauugcugcgaugcgacauaaguuguaaggguggacauucaacggugacagaccugcaggagcuccucggcugucuguacgagucucaggaggaggagcuggugaaggaggugauggcucaguucaaagaaauaucccugcacuuaaaugcaguagacguugugccaucuucauucugcgucaagcacugucgaaaccugcagaaaaugucacugcagguaauaaaggagaaucucccggagaaugucacugcgucugaaucagacgccgagguugagagaucccaggaugaucagcacaugcuuccuuucuggacggaccuuuguuccauauuuggaucaaauaaggaucugaugggucuagcaaucaaugauagcuuucucagugccucccuaguaaggauccugugugaacaaauagccucugacaccugucaucuccagagagugguguucaaaaacauuuccccagcugaugcucaucggaaccucugccuagcucuucgaggucacaagacuguaacguaucugacccuucaaggcaaugaccaggaugauauguuucccgcauugugugaggucuugagacauccagaauguaaccugcgauaucucggguuggugucuuguuccgcuaccacucagcagugggcugaucucuccuuggcccuugaagucaaccagucccugacgugcguaaaccucuccgacaaugagcuucuggaugagggugcuaaguugcuguacacaacuuugagacaccccaagugcuuucugcagagguugucguuggaaaacugucaccuuacagaagccaauugcaaggaccuugcugcuguguugguugucagccgggagcugacacaccugugcuuggccaagaaccccauugggaauacaggggugaaguuucugugugagggcuugagguaccccgaguguaaacugcagaccuuggugcuuuggaacugcgacauaacuagcgauggcugcugcgaucucacaaagcuucuccaagaaaaaucaagccuguuguguuuggaucuggggcugaaucacauaggaguuaagggaaugaaguuccugugugaggcuuugaggaaaccacugugcaacuugagaugucugugguuguggggauguuccaucccuccguucaguugugaagaccucugcucugcccucagcugcaaccagagccucgucacucuggaccugggucagaaucccuuggggucuaguggagugaagaugcuguuugaaaccuugacauguuccaguggcacccuccggacacucagguugaaaauagaugacuuuaaugaugaacucaauaagcugcuggaagaaauagaagaaaaaaacccacaacugauuauugauacugagaaacaucaucccugggcagaaaggccuucuucucaugacuucaugaucuga

SEQ ID NO: 9062 - RNA, 3189 nt, Artificial Sequence
  derived and/or modified sequence opt1 from NALP2__Homo_sapiens__AAG30289
auggugagcuccgcccagaugggcuucaaccugcaggcccuccuggagcagcugagccaggacgagcucuccaaguucaaguaccugaucaccaccuucagccuggcgcacgagcuccagaagaucccccacaaggaggucgacaaggccgacgggaagcagcugguggagauccugacgacccacugcgacuccuacuggguggagauggccagccuccaggucuucgagaagaugcaccgcauggaccuguccgagcgggccaaggacgaggugcgcgaggccgcgcucaagagcuucaacaagcggaagccgcucucccugggcaucacccgcaaggagcggccgccccuggacguggacgagaugcucgagcgcuucaagaccgaggcccaggccuucacggagaccaaggggaacgucaucugccugggcaaggagguguucaaggggaagaagcccgacaaggacaaccggugccgcuacauccugaagaccaaguuccgggagauguggaaguccuggcccggcgacagcaaggaggugcaggucauggccgagcgcuacaagaugcucauccccuucagcaacccccgggugcugcccggcccguucuccuacaccgugguccuguacgggcccgcgggccucgggaagacgacccuggcccagaagcugaugcucgacugggccgaggacaaccugauccacaaguucaaguacgccuucuaccugagcugccgcgagcucucccggcugggccccugcagcuucgccgagcugguguuccgcgacuggcccgagcuccaggacgacaucccgcacauccuggcgcaggcccggaagauccuguucgugaucgacggguucgacgagcucggcgccgcccccggcgcccugaucgaggacaucugcggggacugggagaagaagaagcccguccccgugcugcucggcucccugcugaaccgcgugaugcucccgaaggcggcccugcuggucaccacccggccccgcgcccuccgggaccugcgcauccuggccgaggagcccaucuacauccggguggagggguuccucgaggaggaccgccgcgccuacuuccugcggcacuucggcgacgaggaccaggcgaugcgcgccuucgagcugaugcggagcaacgccgcccucuuccagcugggcuccgcccccgcggugugcuggaucgucugcacgacccugaagcugcagauggagaagggggaggacccggugccgaccugccucacccgcacgggccuguuccugcgguuccucugcagccgcuucccccagggggcccagcugcggggcgcccugcgcacccucagccugcuggccgcgcaggggcucugggcccagaccuccgugcugcaccgggaggaccuggagcgccucggcguccaggagagcgaccugcggcuguuccucgacggcgacauccugcgccaggaccggguguccaaggggugcuacagcuucauccaccuguccuuccagcaguuccucaccgcccuguucuacacgcuggagaaggaggaggaggaggaccgcgacggccacaccugggacaucggggacguccagaagcuccugagcggcguggagcggcugcgcaaccccgaccucauccaggccggguacuacuccuucggccuggccaacgagaagcgggcgaaggagcuggaggccaccuucggcugccgcaugagccccgacaucaagcaggagcuccugcggugcgacaucuccugcaagggcgggcacagcaccgugacggaccugcaggagcuccuggggugccuguacgagucccaggaggaggagcucgucaaggaggugauggcccaguucaaggagaucagccugcaccugaacgccguggacgucgugcccuccagcuucugcgugaagcacugccgcaaccuccagaagaugucccugcaggucaucaaggagaaccugcccgagaacgugaccgccagcgaguccgacgcggagguggagcgcagccaggacgaccagcacaugcuccccuucuggaccgaccugugcuccaucuucggcagcaacaaggaccugauggggcucgccaucaacgacagcuuccuguccgccagccugguccggauccucugcgagcagaucgccuccgacacgugccaccuccagcgcgugguguucaagaacaucagcccggccgacgcgcaccggaaccugugccuggcccugcgcggccacaagaccgucaccuaccugacccuccagggcaacgaccaggacgacauguuccccgcccugugcgaggugcugcggcaccccgagugcaaccuccgcuaccuggggcugguguccugcagcgccaccacgcagcagugggcggaccucucccuggcccuggaggucaaccagagccugaccugcgugaaccuguccgacaacgagcugcucgacgagggcgccaagcugcuguacaccacccuccggcacccgaagugcuuccugcagcgccugagccucgagaacugccaccugacggaggccaacugcaaggaccuggccgcggugcucgucgugucccgggagcugacccaccugugccucgccaagaaccccaucgggaacaccggcgugaaguuccugugcgagggccugcgcuaccccgagugcaagcuccagacccugguccuguggaacugcgacaucaccagcgacgggugcugcgaccucacgaagcugcugcaggagaaguccagccuccugugccuggaccucggccugaaccacaucggggugaagggcaugaaguuccugugcgaggcccuccggaagccccugugcaaccugcgcugccucuggcugugggggugcuccaucccgcccuucagcugcgaggaccugugcuccgcccugagcugcaaccagagccucgugacccuggaccugggccagaacccccucggcuccagcggggucaagaugcuguucgagacccugaccugcuccagcggcacgcuccggacccugcgccugaagaucgacgacuucaacgacgagcucaacaagcugcuggaggagaucgaggagaagaacccccagcucaucaucgacaccgagaagcaccacccgugggccgagcggcccuccagccacgacuucaugaucuga

SEQ ID NO: 9063 - RNA, 3189 nt, Artificial Sequence
  derived and/or modified sequence opt2 from NALP2__Homo_sapiens__AAG30289
auggucuccuccgcccagaugggcuucaaccuccaggcccuccucgagcagcucucccaggacgagcucuccaaguucaaguaccucaucaccaccuucucccucgcccacgagcuccagaagaucccccacaaggaggucgacaaggccgacggcaagcagcucgucgagauccucaccacccacugcgacuccuacugggucgagauggccucccuccaggucuucgagaagaugcaccgcauggaccucuccgagcgcgccaaggacgagguccgcgaggccgcccucaaguccuucaacaagcgcaagccccucucccucggcaucacccgcaaggagcgccccccccucgacgucgacgagaugcucgagcgcuucaagaccgaggcccaggccuucaccgagaccaagggcaacgucaucugccucggcaaggaggucuucaagggcaagaagcccgacaaggacaaccgcugccgcuacauccucaagaccaaguuccgcgagauguggaaguccuggcccggcgacuccaaggagguccaggucauggccgagcgcuacaagaugcucauccccuucuccaacccccgcguccuccccggccccuucuccuacaccgucguccucuacggccccgccggccucggcaagaccacccucgcccagaagcucaugcucgacugggccgaggacaaccucauccacaaguucaaguacgccuucuaccucuccugccgcgagcucucccgccucggccccugcuccuucgccgagcucgucuuccgcgacuggcccgagcuccaggacgacaucccccacauccucgcccaggcccgcaagauccucuucgucaucgacggcuucgacgagcucggcgccgcccccggcgcccucaucgaggacaucugcggcgacugggagaagaagaagcccguccccguccuccucggcucccuccucaaccgcgucaugcuccccaaggccgcccuccucgucaccacccgcccccgcgcccuccgcgaccuccgcauccucgccgaggagcccaucuacauccgcgucgagggcuuccucgaggaggaccgccgcgccuacuuccuccgccacuucggcgacgaggaccaggccaugcgcgccuucgagcucaugcgcuccaacgccgcccucuuccagcucggcuccgcccccgccgucugcuggaucgucugcaccacccucaagcuccagauggagaagggcgaggaccccguccccaccugccucacccgcaccggccucuuccuccgcuuccucugcucccgcuucccccagggcgcccagcuccgcggcgcccuccgcacccucucccuccucgccgcccagggccucugggcccagaccuccguccuccaccgcgaggaccucgagcgccucggcguccaggaguccgaccuccgccucuuccucgacggcgacauccuccgccaggaccgcgucuccaagggcugcuacuccuucauccaccucuccuuccagcaguuccucaccgcccucuucuacacccucgagaaggaggaggaggaggaccgcgacggccacaccugggacaucggcgacguccagaagcuccucuccggcgucgagcgccuccgcaaccccgaccucauccaggccggcuacuacuccuucggccucgccaacgagaagcgcgccaaggagcucgaggccaccuucggcugccgcaugucccccgacaucaagcaggagcuccuccgcugcgacaucuccugcaagggcggccacuccaccgucaccgaccuccaggagcuccucggcugccucuacgagucccaggaggaggagcucgucaaggaggucauggcccaguucaaggagaucucccuccaccucaacgccgucgacgucguccccuccuccuucugcgucaagcacugccgcaaccuccagaagaugucccuccaggucaucaaggagaaccuccccgagaacgucaccgccuccgaguccgacgccgaggucgagcgcucccaggacgaccagcacaugcuccccuucuggaccgaccucugcuccaucuucggcuccaacaaggaccucaugggccucgccaucaacgacuccuuccucuccgccucccucguccgcauccucugcgagcagaucgccuccgacaccugccaccuccagcgcgucgucuucaagaacaucucccccgccgacgcccaccgcaaccucugccucgcccuccgcggccacaagaccgucaccuaccucacccuccagggcaacgaccaggacgacauguuccccgcccucugcgagguccuccgccaccccgagugcaaccuccgcuaccucggccucgucuccugcuccgccaccacccagcagugggccgaccucucccucgcccucgaggucaaccagucccucaccugcgucaaccucuccgacaacgagcuccucgacgagggcgccaagcuccucuacaccacccuccgccaccccaagugcuuccuccagcgccucucccucgagaacugccaccucaccgaggccaacugcaaggaccucgccgccguccucgucgucucccgcgagcucacccaccucugccucgccaagaaccccaucggcaacaccggcgucaaguuccucugcgagggccuccgcuaccccgagugcaagcuccagacccucguccucuggaacugcgacaucaccuccgacggcugcugcgaccucaccaagcuccuccaggagaaguccucccuccucugccucgaccucggccucaaccacaucggcgucaagggcaugaaguuccucugcgaggcccuccgcaagccccucugcaaccuccgcugccucuggcucuggggcugcuccaucccccccuucuccugcgaggaccucugcuccgcccucuccugcaaccagucccucgucacccucgaccucggccagaacccccucggcuccuccggcgucaagaugcucuucgagacccucaccugcuccuccggcacccuccgcacccuccgccucaagaucgacgacuucaacgacgagcucaacaagcuccucgaggagaucgaggagaagaacccccagcucaucaucgacaccgagaagcaccaccccugggccgagcgccccuccucccacgacuucaugaucuga

SEQ ID NO: 9064 - RNA, 3189 nt, Artificial Sequence
  derived and/or modified sequence opt3 from NALP2__Homo_sapiens__AAG30289
auggugagcuccgcccagaugggcuucaaccugcaagcucuccuugagcagcugucucaggacgaauugucaaaguuuaaauacuuaaucaccacauucagucuggcacacgagcuacagaagauuccccauaaagaagucgauaaggccgacgggaaacaacucguugagauacugacuacgcacugcgauagcuauuggguggaaauggcgucccuucagguauuugagaagaugcauagaauggaccugucugagagggcuaaggaugaagugcgggaggccgcauugaaaucguucaauaagcgcaaaccucucucacugggaaucacccgaaaggaacguccaccgcuggacgucgaugagaugcucgagagauuuaaaacagaagcccaggcuuucacugagaccaaggguaacgugauuuguuuaggcaaggaaguuuuuaaagggaagaaacccgacaaggauaauaggugccgguacauccugaaaacaaaguuccgcgagauguggaaaagcuggccuggagacaguaaggaagugcaggucauggcagagagauauaagaugcuuauuccauuuuccaaccccaggguguugccuggcccauucucuuacaccguaguucuguauggucccgccgggcuaggaaaaacuacacucgcucaaaagcugaugcuugauugggccgaggacaaucugauccacaaauuuaaguacgcguucuauuugagcugucgggaacucucccgccugggcccuugcucauuugcagaguuaguguuccgagauuggccagaacugcaggacgacauaccgcauauccucgcccaggcuagaaaaauucuuuucgucaucgauggcuuugacgagcugggggccgcacccggagcuuugauugaagauaucuguggugacugggagaagaagaaaccugugccagugcuacugggcagucuccugaacagggucaugcuucccaaggccgcgcuguugguuaccacgcggccucgugcccuccgcgaucugagaauauuagcagaggaaccaauuuacaucaggguggagggguuccuggaagaggaccggcgagcuuacuuucuacgccacuucggagaugaagaccaggccaugagagcuuuugagcucaugaggagcaaugccgcacuguuccaacuuggcucugcccccgcuguaugcuggauuguguguacuaccuugaaacugcagauggagaagggugaagauccggucccuacaugccucacucggaccgggcuguuucuucgcuuccuguguuccagauuuccccagggagcgcaauugaggggcgcacuccguacacugucauuacuggccgcucagggccuaugggcccagaccagcgugcuccaccgggaggaccuggaacgacuugggguucaggagagugauuugagacuguuccucgacggagacauccugaggcaagaucgcgugucuaaagguugcuauuccuuuauccaucugagcuuccagcaguuuuuaacggcacuuuucuacacuuuggagaaggaagaggaagaggaccgggauggccacacaugggacauuggggauguccagaagcuccugucgggaguggaaagacuaaggaacccagaccugauacaagccggcuauuacucuuucggucucgcuaaugagaaacgcgccaaggagcuggaagcaaccuuugggugucgaauguccccugauaucaaacaggagcuuuugcggugcgacauuucaugcaagggcggacauaguacuguaacagaucugcaggaauuacucggcugucuguaugagagccaggaagaggagcuuguuaaagaagugauggcgcaauucaaggagaucucccugcacuugaacgcugucgacgugguccccucuagcuuuugcgugaagcacugucguaaucuccagaaaaugucacugcagguuauaaaggaaaaccuaccagagaaugugaccgccagugaauccgaugcagagguagagagaagccaggacgaucaacauaugcugcccuucuggacggaccucugcucuauuuuugggucaaacaaagaccugaugggacuugccaucaaugauaguuucuugagcgcuucccuggucaggaucuuaugugaacagauugccucugauaccugccaccuccagcgcgugguuuuuaagaacaucucgccugcagacgcucaucggaaccugugucuugcccugagaggucacaaaacagugacuuaccuaacccuccaaggcaaugaccaggaugacauguucccagcgcugugcgaggucuugaggcauccggaauguaaccugcgauauuuagggcucgugagcugcuccgccacaacucagcagugggcugaucugucacuugcacuggagguaaaucaaaguuugaccugugugaaccucucugacaaugagcugcuagaugaaggagccaagcugcuuuacacaacccuccgccaccccaaaugcuuucugcagcgguugagccuggagaacugccacuuaacugaagcuaauuguaaggaccucgccgcaguucuggucguguccagagagcuuacgcaucugugcuuggcgaagaacccuauuggcaauacaggugugaaauuccucugugaagggcugagguacccagagugcaagcuacagacccugguccuuuggaacugugauauaacuucagacggcugcugugaucucaccaaacuguugcaggaaaagagcucuuuacugugccucgaccugggacuuaaucacaucggcguuaaagggaugaaguuucugugugaggccuugcguaagccccuaugcaaccugcgcugucucuggcuguggggaugcuccauuccuccauucaguugcgaggaccuuuguagcgcuuuaucuugcaaucaaucccuggugacacucgauuugggucagaacccccugggcucaaguggggugaaaaugcucuuugaaacccugacuuguagcucgggaacacuucggacgcugagauugaagaucgacgauuucaaugacgagcuaaacaaacugcucgaagagaucgaggaaaagaacccgcaguuaauuauagauaccgagaaacaucacccuugggccgaaaggccauccucucacgacuucaugaucuga

SEQ ID NO: 9065 - RNA, 3189 nt, Artificial Sequence
  derived and/or modified sequence opt4 from NALP2__Homo_sapiens__AAG30289
auggugagcagcgcccagaugggcuucaaccugcaggcccugcuggagcagcugagccaggacgagcugagcaaguucaaguaccugaucaccaccuucagccuggcccacgagcugcagaagaucccccacaaggagguggacaaggccgacggcaagcagcugguggagauccugaccacccacugcgacagcuacuggguggagauggccagccugcagguguucgagaagaugcacagaauggaccugagcgagagagccaaggacgaggugagagaggccgcccugaagagcuucaacaagagaaagccccugagccugggcaucaccagaaaggagagacccccccuggacguggacgagaugcuggagagauucaagaccgaggcccaggccuucaccgagaccaagggcaacgugaucugccugggcaaggagguguucaagggcaagaagcccgacaaggacaacagaugcagauacauccugaagaccaaguucagagagauguggaagagcuggcccggcgacagcaaggaggugcaggugauggccgagagauacaagaugcugauccccuucagcaaccccagagugcugcccggccccuucagcuacaccguggugcuguacggccccgccggccugggcaagaccacccuggcccagaagcugaugcuggacugggccgaggacaaccugauccacaaguucaaguacgccuucuaccugagcugcagagagcugagcagacugggccccugcagcuucgccgagcugguguucagagacuggcccgagcugcaggacgacaucccccacauccuggcccaggccagaaagauccuguucgugaucgacggcuucgacgagcugggcgccgcccccggcgcccugaucgaggacaucugcggcgacugggagaagaagaagcccgugcccgugcugcugggcagccugcugaacagagugaugcugcccaaggccgcccugcuggugaccaccagacccagagcccugagagaccugagaauccuggccgaggagcccaucuacaucagaguggagggcuuccuggaggaggacagaagagccuacuuccugagacacuucggcgacgaggaccaggccaugagagccuucgagcugaugagaagcaacgccgcccuguuccagcugggcagcgcccccgccgugugcuggaucgugugcaccacccugaagcugcagauggagaagggcgaggaccccgugcccaccugccugaccagaaccggccuguuccugagauuccugugcagcagauucccccagggcgcccagcugagaggcgcccugagaacccugagccugcuggccgcccagggccugugggcccagaccagcgugcugcacagagaggaccuggagagacugggcgugcaggagagcgaccugagacuguuccuggacggcgacauccugagacaggacagagugagcaagggcugcuacagcuucauccaccugagcuuccagcaguuccugaccgcccuguucuacacccuggagaaggaggaggaggaggacagagacggccacaccugggacaucggcgacgugcagaagcugcugagcggcguggagagacugagaaaccccgaccugauccaggccggcuacuacagcuucggccuggccaacgagaagagagccaaggagcuggaggccaccuucggcugcagaaugagccccgacaucaagcaggagcugcugagaugcgacaucagcugcaagggcggccacagcaccgugaccgaccugcaggagcugcugggcugccuguacgagagccaggaggaggagcuggugaaggaggugauggcccaguucaaggagaucagccugcaccugaacgccguggacguggugcccagcagcuucugcgugaagcacugcagaaaccugcagaagaugagccugcaggugaucaaggagaaccugcccgagaacgugaccgccagcgagagcgacgccgagguggagagaagccaggacgaccagcacaugcugcccuucuggaccgaccugugcagcaucuucggcagcaacaaggaccugaugggccuggccaucaacgacagcuuccugagcgccagccuggugagaauccugugcgagcagaucgccagcgacaccugccaccugcagagagugguguucaagaacaucagccccgccgacgcccacagaaaccugugccuggcccugagaggccacaagaccgugaccuaccugacccugcagggcaacgaccaggacgacauguuccccgcccugugcgaggugcugagacaccccgagugcaaccugagauaccugggccuggugagcugcagcgccaccacccagcagugggccgaccugagccuggcccuggaggugaaccagagccugaccugcgugaaccugagcgacaacgagcugcuggacgagggcgccaagcugcuguacaccacccugagacaccccaagugcuuccugcagagacugagccuggagaacugccaccugaccgaggccaacugcaaggaccuggccgccgugcugguggugagcagagagcugacccaccugugccuggccaagaaccccaucggcaacaccggcgugaaguuccugugcgagggccugagauaccccgagugcaagcugcagacccuggugcuguggaacugcgacaucaccagcgacggcugcugcgaccugaccaagcugcugcaggagaagagcagccugcugugccuggaccugggccugaaccacaucggcgugaagggcaugaaguuccugugcgaggcccugagaaagccccugugcaaccugagaugccuguggcuguggggcugcagcaucccccccuucagcugcgaggaccugugcagcgcccugagcugcaaccagagccuggugacccuggaccugggccagaacccccugggcagcagcggcgugaagaugcuguucgagacccugaccugcagcagcggcacccugagaacccugagacugaagaucgacgacuucaacgacgagcugaacaagcugcuggaggagaucgaggagaagaacccccagcugaucaucgacaccgagaagcaccaccccugggccgagagacccagcagccacgacuucaugaucuga

SEQ ID NO: 9066 - RNA, 3189 nt, Artificial Sequence
  derived and/or modified sequence opt5 from NALP2__Homo_sapiens__AAG30289
auggugagcuccgcccagaugggcuucaaccugcaagcucuccuggagcagcuuucucaggacgaacugagcaaguuuaaauaccucaucaccacauucucccuggcccacgagcuucagaagauuccccauaaagaagucgauaaggcggacgggaaacaacugguugagauccucacgacccacugcgauucuuauuggguggaaauggcuagccuucagguguuugagaagaugcauagaauggaccuguccgagcgggccaaggaugaaguccgcgaggccgcucucaaaucuuucaauaagagaaaaccucugagccuuggaauuacacggaaggaacgcccgccccuggacguggaugagaugcucgagagauuuaaaaccgaagcccaggcuuucacagagaccaagggcaacguuaucugucuggggaaggaaguguuuaaaggaaagaaaccugacaaggauaaucggugccgcuacauucuuaaaacaaaguucagagagauguggaaauccuggcccggcgacagcaaggaaguccaggugauggccgagcgguauaagaugcugaucccuuuuucuaacccccgcguucucccugggccguucuccuacaccgugguccuguauggacccgcgggccugggcaaaacgacccucgcccaaaagcugaugcuugauugggcugaggacaaucugauccacaaauuuaaguacgccuucuaucucagcuguagagaacugucucggcuugggccuugcuccuuugcugagcugguguuccgcgauuggcccgaacuccaggacgacauuccucauauccuggcccaggcgagaaaaauucuguucgugaucgauggauuugacgagcucggcgccgcucccggggcccugauugaagauaucuguggagacugggagaagaagaaaccggucccuguucuucugggcagccuccugaaccgggugaugcuucccaaggcugcccugcucgugacaacccgcccuagagcccugcgggaucugcggauucucgcugaggaacccaucuacauccgcgucgagggguuccuggaagaggaccggagagcguacuuucuucgccacuucggagaugaagaccaggccaugcgggcuuuugagcugaugagaucuaaugccgcccucuuccaacugggcuccgcucccgccgugugcuggauuguuuguacaacccugaaacuucagauggagaagggcgaagauccugugccgacgugccucacacgcaccgggcuguuucugcgguuccucuguagcagauuuccccagggagcgcaacugcgcggcgcucuuagaacacugucccuccuggccgcccaggggcugugggcucagaccucuguccuucacagagaggaccucgaacgccugggagugcaggagagcgaucugagacucuuccuggacggcgacauccuuagacaagaucggguuuccaaagggugcuauagcuuuauucaucugucuuuccagcaguuucucaccgcccuguucuacacacuggagaaggaagaggaagaggaccgcgauggacacacgugggacaucggcgaugugcagaagcugcucuccggcgucgaaagacugcggaacccugaccugauucaagcuggguauuacagcuucggacucgccaaugagaaaagagcgaaggagcuggaagccaccuuuggcugucgcaugucucccgauaucaaacaggagcuucugcggugcgacaucagcugcaaagggggacauuccacagugaccgaucuccaggaacugcugggcugucuuuaugagucucaggaagaggagcucgucaaggaagugauggcucaauucaaggagauuagccugcaccugaacgccguugacguggucccuuccagcuuuugcgugaagcacuguagaaaucuccagaaaaugucucugcagguuaucaaggaaaaccuucccgagaaugugacagcuuccgaaagcgaugccgaggucgagcgcucucaggacgaucaacauaugcugccguucuggaccgaccucugcuccauuuuugggagcaacaaagaccugaugggccuggcgaucaaugauuccuuccuuucugccagccuggugcggauucucugugaacagaucgcuuccgacacgugccaucugcagcgggugguuuuuaagaacaucucuccugccgaugcucaccgcaaccucugucuggcccuuagaggacacaaaacagucaccuaccugacccuccaaggcaaugaccaggaugacauguuccccgcccugugcgaggugcugcggcauccugaauguaaccuucgcuaucuggggcucgugagcugcuccgcuacaacccagcagugggcggaucugagccucgcccuggaggucaaucaaucucuuacaugugugaaccuguccgacaaugagcuccuggaugaaggagcuaagcugcuuuacacgacccugagacaccccaaaugcuuucuccagcggcugagccucgagaacugccaccugacagaagccaauuguaaggaccuugccgcuguucugguggucucucgcgagcugacccaucucugccuggccaagaacccuauuggcaauacaggggugaaauuccuuugugaaggacugagauaccccgagugcaagcuccagacccugguucucuggaacugugauaucacguccgacggcugcugugaucugaccaaacuucugcaggaaaagagcucucugcucugccuggaccuugggcugaaucacauuggcgugaaaggaaugaaguuucucugugaggcgcugcggaagccgcucugcaaccugcgcugucuuuggcuguggggcugcagcaucccucccuucuccugcgaggaccuguguagcgcucucucuugcaaucaaucccuggucacacuugaucuggggcagaacccccucggaagcuccggcgugaaaaugcuguuugaaacccucacauguucuagcgggacccugagaacgcuucggcugaagauugacgauuucaaugacgagcugaacaaacuccuggaagagaucgaggaaaagaacccucagcuuauuaucgauacagagaaacaucacccgugggccgaaagacccuccucucacgacuucaugaucuga

SEQ ID NO: 9067 - protein, 1036 aa, Artificial Sequence
  NALP3__Homo_sapiens__Q96P20
MKMASTRCKLARYLEDLEDVDLKKFKMHLEDYPPQKGCIPLPRGQTEKADHVDLATLMIDFNGEEKAWAMAVWIFAAINRRDLYEKAKRDEPKWGSDNARVSNPTVICQEDSIEEEWMGLLEYLSRISICKMKKDYRKKYRKYVRSRFQCIEDRNARLGESVSLNKRYTRLRLIKEHRSQQEREQELLAIGKTKTCESPVSPIKMELLFDPDDEHSEPVHTVVFQGAAGIGKTILARKMMLDWASGTLYQDRFDYLFYIHCREVSLVTQRSLGDLIMSCCPDPNPPIHKIVRKPSRILFLMDGFDELQGAFDEHIGPLCTDWQKAERGDILLSSLIRKKLLPEASLLITTRPVALEKLQHLLDHPRHVEILGFSEAKRKEYFFKYFSDEAQARAAFSLIQENEVLFTMCFIPLVCWIVCTGLKQQMESGKSLAQTSKTTTAVYVFFLSSLLQPRGGSQEHGLCAHLWGLCSLAADGIWNQKILFEESDLRNHGLQKADVSAFLRMNLFQKEVDCEKFYSFIHMTFQEFFAAMYYLLEEEKEGRTNVPGSRLKLPSRDVTVLLENYGKFEKGYLIFVVRFLFGLVNQERTSYLEKKLSCKISQQIRLELLKWIEVKAKAKKLQIQPSQLELFYCLYEMQEEDFVQRAMDYFPKIEINLSTRMDHMVSSFCIENCHRVESLSLGFLHNMPKEEEEEEKEGRHLDMVQCVLPSSSHAACSHGLVNSHLTSSFCRGLFSVLSTSQSLTELDLSDNSLGDPGMRVLCETLQHPGCNIRRLWLGRCGLSHECCFDISLVLSSNQKLVELDLSDNALGDFGIRLLCVGLKHLLCNLKKLWLVSCCLTSACCQDLASVLSTSHSLTRLYVGENALGDSGVAILCEKAKNPQCNLQKLGLVNSGLTSVCCSALSSVLSTNQNLTHLYLRGNTLGDKGIKLLCEGLLHPDCKLQVLELDNCNLTSHCCWDLSTLLTSSQSLRKLSLGNNDLGDLGVMMFCEVLKQQSCLLQNLGLSEMYFNYETKSALETLQEEKPELTVVFEPSW

SEQ ID NO: 9068 - RNA, 3111 nt, Artificial Sequence
  NALP3__Homo_sapiens__AAI43363
augaagauggcaagcacccgcugcaagcuggccagguaccuggaggaccuggaggauguggacuugaagaaauuuaagaugcacuuagaggacuauccuccccagaagggcugcaucccccucccgaggggucagacagagaaggcagaccauguggaucuagccacgcuaaugaucgacuucaauggggaggagaaggcgugggccauggccguguggaucuucgcugcgaucaacaggagagaccuuuaugagaaagcaaaaagagaugagccgaagugggguucagauaaugcacguguuucgaaucccacugugauaugccaggaagacagcauugaagaggaguggauggguuuacuggaguaccuuucgagaaucucuauuuguaaaaugaagaaagauuaccguaagaaguacagaaaguacgugagaagcagauuccagugcauugaagacaggaaugcccgucugggugagagugugagccucaacaaacgcuacacacgacugcgucucaucaaggagcaccggagccagcaggagagggagcaggagcuucuggccaucggcaagaccaagacgugugagagccccgugagucccauuaagauggaguugcuguuugaccccgaugaugagcauucugagccugugcacacugugguguuccagggggcggcagggauugggaaaacaauccuggccaggaagaugauguuggacugggcgucggggacacucuaccaagacagguuugacuaucuguucuauauccacugucgggaggugagccuugugacacagaggagccugggggaccugaucaugagcugcugccccgacccaaacccacccauccacaagaucgugagaaaacccuccagaauccucuuccucauggacggcuucgaugagcugcaaggugccuuugacgagcacauaggaccgcucugcacugacuggcagaaggccgagcggggagacauucuccugagcagccucaucagaaagaagcugcuucccgaggccucucugcucaucaccacgagaccuguggcccuggagaaacugcagcacuugcuggaccauccucggcauguggagauccuggguuucuccgaggccaaaaggaaagaguacuucuucaaguacuucucugaugaggcccaagccagggcagccuucagucugauucaggagaacgagguccucuucaccaugugcuucaucccccuggucugcuggaucgugugcacuggacugaaacagcagauggagaguggcaagagccuugcccagacauccaagaccaccaccgcgguguacgucuucuuccuuuccaguuugcugcagccccggggagggagccaggagcacggccucugcgcccaccucugggggcucugcucuuuggcugcagauggaaucuggaaccagaaaauccuguuugaggaguccgaccucaggaaucauggacugcagaaggcggaugugucugcuuuccugaggaugaaccuguuccaaaaggaaguggacugcgagaaguucuacagcuucauccacaugacuuuccaggaguucuuugccgccauguacuaccugcuggaagaggaaaaggaaggaaggacgaacguuccagggagucguuugaagcuucccagccgagacgugacaguccuucuggaaaacuauggcaaauucgaaaagggguauuugauuuuuguuguacguuuccucuuuggccugguaaaccaggagaggaccuccuacuuggagaagaaauuaaguugcaagaucucucagcaaaucaggcuggagcugcugaaauggauugaagugaaagccaaagcuaaaaagcugcagauccagcccagccagcuggaauuguucuacuguuuguacgagaugcaggaggaggacuucgugcaaagggccauggacuauuuccccaagauugagaucaaucucuccaccagaauggaccacaugguuucuuccuuuugcauugagaacugucaucggguggagucacugucccugggguuucuccauaacaugcccaaggaggaagaggaggaggaaaaggaaggccgacaccuugauauggugcaguguguccucccaagcuccucucaugcugccuguucucauggauuggugaacagccaccucacuuccaguuuuugccggggccucuuuucaguucugagcaccagccagagucuaacugaauuggaccucagugacaauucucugggggacccagggaugagaguguugugugaaacgcuccagcauccuggcuguaacauucggagauugugguuggggcgcuguggccucucgcaugagugcugcuucgacaucuccuugguccucagcagcaaccagaagcugguggagcuggaccugagugacaacgcccucggugacuucggaaucagacuucugugugugggacugaagcaccuguugugcaaucugaagaagcucugguuggucagcugcugccucacaucagcauguugucaggaucuugcaucaguauugagcaccagccauucccugaccagacucuaugugggggagaaugccuugggagacucaggagucgcaauuuuaugugaaaaagccaagaauccacaguguaaccugcagaaacugggguuggugaauucuggccuuacgucagucuguuguucagcuuuguccucgguacucagcacuaaucagaaucucacgcaccuuuaccugcgaggcaacacucucggagacaaggggaucaaacuacucugugagggacucuugcaccccgacugcaagcuucagguguuggaauuagacaacugcaaccucacgucacacugcugcugggaucuuuccacacuucugaccuccagccagagccugcgaaagcugagccugggcaacaaugaccugggcgaccugggggucaugauguucugugaagugcugaaacagcagagcugccuccugcagaaccugggguugucugaaauguauuucaauuaugagacaaaaagugcguuagaaacacuucaagaagaaaagccugagcugaccgucgucuuugagccuucuugguag

SEQ ID NO: 9069 - RNA, 3111 nt, Artificial Sequence
  derived and/or modified sequence opt1 from NALP3__Homo_sapiens__AAI43363
augaagauggccagcacccgcugcaagcuggcccgguaccucgaggaccuggaggacguggaccugaagaaguucaagaugcaccucgaggacuacccgccccagaagggcugcaucccccugccccgcgggcagaccgagaaggcggaccacgucgaccuggccacgcucaugaucgacuucaacggcgaggagaaggccugggccauggccguguggaucuucgcggccaucaaccggcgcgaccuguacgagaaggccaagcgggacgagcccaaguggggguccgacaacgcccgcgugagcaacccgaccgucaucugccaggaggacuccaucgaggaggaguggaugggccugcucgaguaccugagccggaucuccaucugcaagaugaagaaggacuaccgcaagaaguaccggaaguacgugcgcagccgguuccagugcaucgaggaccgcaacgcgcggcugggggaguccgugagccucaacaagcgcuacacccggcugcgccugaucaaggagcaccggucccagcaggagcgcgagcaggagcuccuggccaucggcaagaccaagacgugcgagagccccgucucccccaucaagauggagcugcuguucgaccccgacgacgagcacagcgagccggugcacaccguggucuuccagggcgccgccgggaucggcaagaccauccuggcccggaagaugaugcuggacugggcguccgggacccucuaccaggaccgcuucgacuaccuguucuacauccacugccgggaggugagccuggugacgcagcgcucccucggcgaccugaucaugagcugcugccccgaccccaacccgcccauccacaagaucguccgcaagcccucccggauccuguuccucauggacggguucgacgagcugcagggcgccuucgacgagcacaucggcccccugugcaccgacuggcagaaggccgagcgcggggacauccuccugagcucccugauccggaagaagcuccugcccgaggccagccugcucaucaccacccgcccgguggcccuggagaagcugcagcaccuccuggaccacccccggcacguggagauccugggcuucagcgaggcgaagcgcaaggaguacuucuucaaguacuucuccgacgaggcccaggcccgggccgccuucagccucauccaggagaacgagguccuguucacgaugugcuucaucccccuggugugcuggaucgugugcaccgggcucaagcagcagauggaguccggcaagagccuggcgcagaccuccaagaccacgaccgccgucuacguguucuuccugagcucccuccugcagccccgcggcgggagccaggagcacggccugugcgcccaccugugggggcucugcucccuggccgccgacggcaucuggaaccagaagauccuguucgaggagagcgaccuccggaaccacgggcugcagaaggcggacguguccgccuuccugcgcaugaaccucuuccagaaggaggucgacugcgagaaguucuacagcuucauccacaugaccuuccaggaguucuucgccgccauguacuaccugcuggaggaggagaaggagggccggaccaacgugccgggcucccgccucaagcugcccagccgggacgugacgguccugcucgagaacuacgggaaguucgagaagggcuaccugaucuucgugguccgcuuccuguucgggcucgugaaccaggagcggaccuccuaccuggagaagaagcugagcugcaagaucucccagcagauccgccucgagcugcugaaguggaucgaggugaaggcgaaggccaagaagcuccagauccagcccagccagcuggagcuguucuacugccucuacgagaugcaggaggaggacuucguccagcgggccauggacuacuuccccaagaucgagaucaaccuguccacccgcauggaccacauggugagcagcuucugcaucgagaacugccaccggguggagucccugagccucggcuuccugcacaacaugccgaaggaggaggaggaggaggagaaggaggggcgccaccuggacaugguccagugcgugcuccccuccagcucccacgccgccugcagccacggccuggugaacucccaccugaccagcuccuucugccgcggccucuucagcguccuguccacgagccagucccugaccgagcucgaccugagcgacaacucccugggggaccccggcaugcgggugcucugcgagacccugcagcaccccgggugcaacauccgccggcuguggcucggccgcugcgggcugagccacgagugcugcuucgacaucucccuggugcucagcagcaaccagaagcuggucgagcuggaccucuccgacaacgcgcugggcgacuucggcauccggcugcucugcguggggcugaagcaccuccucugcaaccugaagaagcuguggcucgugagcugcugccugaccuccgccugcugccaggaccuggccagcguccucuccacgagccacucccugacccgccuguacgugggcgagaacgcccucggggacagcggcguggccauccugugcgagaaggcgaagaacccgcagugcaaccugcagaagcucggccuggucaacuccgggcugaccagcgugugcugcuccgcccucagcuccgugcugagcaccaaccagaaccugacgcaccucuaccugcggggcaacacccugggggacaagggcaucaagcuccugugcgaggggcugcuccaccccgacugcaagcugcagguccuggagcucgacaacugcaaccugaccucccacugcugcugggaccugagcacccuccugacguccagccagucccugcgcaagcucagccugggcaacaacgaccugggcgaccucggggugaugauguucugcgaggugcugaagcagcagagcugccugcuccagaaccugggccuguccgagauguacuucaacuacgagaccaagagcgcccuggagacccuccaggaggagaagcccgagcugaccgucguguucgagccguccugguga

SEQ ID NO: 9070 - RNA, 3111 nt, Artificial Sequence
  derived and/or modified sequence opt2 from NALP3__Homo_sapiens__AAI43363
augaagauggccuccacccgcugcaagcucgcccgcuaccucgaggaccucgaggacgucgaccucaagaaguucaagaugcaccucgaggacuaccccccccagaagggcugcaucccccucccccgcggccagaccgagaaggccgaccacgucgaccucgccacccucaugaucgacuucaacggcgaggagaaggccugggccauggccgucuggaucuucgccgccaucaaccgccgcgaccucuacgagaaggccaagcgcgacgagcccaaguggggcuccgacaacgcccgcgucuccaaccccaccgucaucugccaggaggacuccaucgaggaggaguggaugggccuccucgaguaccucucccgcaucuccaucugcaagaugaagaaggacuaccgcaagaaguaccgcaaguacguccgcucccgcuuccagugcaucgaggaccgcaacgcccgccucggcgaguccgucucccucaacaagcgcuacacccgccuccgccucaucaaggagcaccgcucccagcaggagcgcgagcaggagcuccucgccaucggcaagaccaagaccugcgagucccccgucucccccaucaagauggagcuccucuucgaccccgacgacgagcacuccgagcccguccacaccgucgucuuccagggcgccgccggcaucggcaagaccauccucgcccgcaagaugaugcucgacugggccuccggcacccucuaccaggaccgcuucgacuaccucuucuacauccacugccgcgaggucucccucgucacccagcgcucccucggcgaccucaucauguccugcugccccgaccccaacccccccauccacaagaucguccgcaagcccucccgcauccucuuccucauggacggcuucgacgagcuccagggcgccuucgacgagcacaucggcccccucugcaccgacuggcagaaggccgagcgcggcgacauccuccucuccucccucauccgcaagaagcuccuccccgaggccucccuccucaucaccacccgccccgucgcccucgagaagcuccagcaccuccucgaccacccccgccacgucgagauccucggcuucuccgaggccaagcgcaaggaguacuucuucaaguacuucuccgacgaggcccaggcccgcgccgccuucucccucauccaggagaacgagguccucuucaccaugugcuucaucccccucgucugcuggaucgucugcaccggccucaagcagcagauggaguccggcaagucccucgcccagaccuccaagaccaccaccgccgucuacgucuucuuccucuccucccuccuccagccccgcggcggcucccaggagcacggccucugcgcccaccucuggggccucugcucccucgccgccgacggcaucuggaaccagaagauccucuucgaggaguccgaccuccgcaaccacggccuccagaaggccgacgucuccgccuuccuccgcaugaaccucuuccagaaggaggucgacugcgagaaguucuacuccuucauccacaugaccuuccaggaguucuucgccgccauguacuaccuccucgaggaggagaaggagggccgcaccaacguccccggcucccgccucaagcuccccucccgcgacgucaccguccuccucgagaacuacggcaaguucgagaagggcuaccucaucuucgucguccgcuuccucuucggccucgucaaccaggagcgcaccuccuaccucgagaagaagcucuccugcaagaucucccagcagauccgccucgagcuccucaaguggaucgaggucaaggccaaggccaagaagcuccagauccagcccucccagcucgagcucuucuacugccucuacgagaugcaggaggaggacuucguccagcgcgccauggacuacuuccccaagaucgagaucaaccucuccacccgcauggaccacauggucuccuccuucugcaucgagaacugccaccgcgucgagucccucucccucggcuuccuccacaacaugcccaaggaggaggaggaggaggagaaggagggccgccaccucgacaugguccagugcguccuccccuccuccucccacgccgccugcucccacggccucgucaacucccaccucaccuccuccuucugccgcggccucuucuccguccucuccaccucccagucccucaccgagcucgaccucuccgacaacucccucggcgaccccggcaugcgcguccucugcgagacccuccagcaccccggcugcaacauccgccgccucuggcucggccgcugcggccucucccacgagugcugcuucgacaucucccucguccucuccuccaaccagaagcucgucgagcucgaccucuccgacaacgcccucggcgacuucggcauccgccuccucugcgucggccucaagcaccuccucugcaaccucaagaagcucuggcucgucuccugcugccucaccuccgccugcugccaggaccucgccuccguccucuccaccucccacucccucacccgccucuacgucggcgagaacgcccucggcgacuccggcgucgccauccucugcgagaaggccaagaacccccagugcaaccuccagaagcucggccucgucaacuccggccucaccuccgucugcugcuccgcccucuccuccguccucuccaccaaccagaaccucacccaccucuaccuccgcggcaacacccucggcgacaagggcaucaagcuccucugcgagggccuccuccaccccgacugcaagcuccagguccucgagcucgacaacugcaaccucaccucccacugcugcugggaccucuccacccuccucaccuccucccagucccuccgcaagcucucccucggcaacaacgaccucggcgaccucggcgucaugauguucugcgagguccucaagcagcaguccugccuccuccagaaccucggccucuccgagauguacuucaacuacgagaccaaguccgcccucgagacccuccaggaggagaagcccgagcucaccgucgucuucgagcccuccugguga

SEQ ID NO: 9071 - RNA, 3111 nt, Artificial Sequence
  derived and/or modified sequence opt3 from NALP3__Homo_sapiens__AAI43363
augaagauggccagcaccagaugcaaacuggcuagguaccucgaggaccuugaagauguggaccugaagaaauucaagaugcacuuggaggauuaucccccucagaaaggcuguaucccauuaccgcgggggcaaacagaaaaggcagaccaugucgaucuggccacucuaaugauugacuuuaacggagaggaaaaggcgugggcuauggccguuuggauauucgcagccaucaaucgccgagaucucuacgagaaagcuaagcgugacgagcccaaaugggguuccgauaacgcaagagugucuaauccuacgguaauuugccaggaagacucaaucgaggaagaguggaugggccugcuugaguaucugaguaggauuagcaucuguaagaugaaaaaggauuaccggaagaaauaucgcaaguacgugagauccagguuucagugcauagaagaccggaacgcccgcuugggggagucugucucgcucaauaaacgauauaccagacugaggcugaucaaggaacaccggucacagcaagagcgugaacaggagcucuuagcuauuggaaaaacaaagacuugugagagcccagugagucccaucaaaauggaacugcuuuucgauccugacgacgagcauuccgaaccaguucacaccguggucuuucagggcgccgcggguauugggaagacaaucuuggcacgcaagaugaugcuggauugggccucuggaacccuauaccaggacagauucgauuaccucuuuuauauacauugcagggaggugagccugguaacucaacggucccuuggcgaccugauuaugucauguugccccgauccuaacccaccgauccacaaaauuguucgaaagcccagucgcaucuuguuccucauggacggcuuugaugaacugcagggggcuuucgacgagcacaucggaccuuuauguacagauuggcagaaagccgagagaggugacauucugcucagcucucuuauaaggaagaaacuguugccagaagcaucccuacugaucaccacgcggcccguggcucucgagaagcugcagcaucuucuggaucacccucgccaugucgaaauuuugggcuuuucagaggccaagagaaaagaauacuucuuuaaguauuucagcgacgaggcgcaagccagggcagcuuucagucucauccaggagaaugaagugcuguuuacuaugugcuucauaccauuaguguguuggauugucugcaccgggcugaaacagcaaauggagucuggaaagucccuagcccagacaagcaaaacuaccacagcuguuuacguguuuuuccucucgucucugcuucagccccguggcgguucccaggaacacggguugugcgcccaccuguggggacucuguucacuggcagccgacggcaucuggaaccaaaagauccuuuuugaggagagugaucugcggaaucauggcuugcagaaggcugacguaagcgcguuccuccgaaugaaccuguuucagaaagaaguggauugcgagaaguucuauuccuuuauucacaugaccuuccaggaauuuuucgcagccauguacuauuuacuggaggaagagaaagaggggagaacgaaugucccgggaucuaggcuaaagcucccuagccgcgacgugacuguucugcuugaaaacuacgguaaauuugagaagggcuacuugaucuucgugguccgguuccuguuugggcucgugaaucaagaaagaacaucauaucuggagaagaaauuaaguuguaagauuucccagcagauaaggcuggaacuuuugaaauggaucgagguaaaggcuaaagccaagaaacuccagauucaacccagccagcuggagcuauucuacugccuguaugaaaugcaggaggaagauuuuguucagcgcgcaauggacuacuucccaaagaucgagaucaaccucucuacccgaauggaucauauggugucaaguuuuuguauugaaaauugccaccgggucgagagccugucccuuggauucuugcauaacaugccuaaggaggaagaggaagaggagaaagaaggccgucaccuggacauggugcaaugugucuuacccucuucgagccacgccgcuugcucccauggucucgugaacucacaccugacaaguucuuuuuguagagggcuuuucagcguucuguccacuucacagagcuugaccgagcucgaucugucugacaauucccuaggcgauccaggaaugagggugcugugcgaaacgcuccagcaucccggcuguaacauacgccggcuguggcuugggagaugcggauugagucacgagugcuguuuugacaucagccugguauuaucuuccaaucaaaagcucgucgaacuggaucuuucagacaacgcccugggugacuucggcauuaggcuacucugcguggggcugaaacacuugcuguguaauuuaaagaaacucuggcugguuaguugcugucuuaccagcgcaugcugucaggaucuggcgucgguguuguccacaucucauagccucacucgacuguaugucggagagaacgcucuaggcgacucagguguggccauccugugcgagaaggcaaagaauccucaguguaaccuucagaaacucgggcugguaaauaguggcuugaccuccgugugcuguucugcccugagcuccguuuuaucaacaaaccaaaaucucacucaccuguaccuucgcggaaacacccugggcgauaaggggauuaaauugcucugcgaaggacugcuacauccagacugcaagcugcagguccuugagcucgauaauuguaaccugacaagccacugcuguugggacuugaguaccuuacugacuucuucccagagccuccggaaacugucgcuugguaauaacgaucugggcgacuugggggugaugauguuuugcgaagugcuaaagcagcaaucaugucugcuccagaaccugggacuuucugagauguauuucaauuacgaaacgaagagugcuuuagagacacugcaggaggaaaaaccggagcucaccgucguuuuugaacccuccugguga

SEQ ID NO: 9072 - RNA, 3111 nt, Artificial Sequence
  derived and/or modified sequence opt4 from NALP3__Homo_sapiens__AAI43363
augaagauggccagcaccagaugcaagcuggccagauaccuggaggaccuggaggacguggaccugaagaaguucaagaugcaccuggaggacuaccccccccagaagggcugcaucccccugcccagaggccagaccgagaaggccgaccacguggaccuggccacccugaugaucgacuucaacggcgaggagaaggccugggccauggccguguggaucuucgccgccaucaacagaagagaccuguacgagaaggccaagagagacgagcccaaguggggcagcgacaacgccagagugagcaaccccaccgugaucugccaggaggacagcaucgaggaggaguggaugggccugcuggaguaccugagcagaaucagcaucugcaagaugaagaaggacuacagaaagaaguacagaaaguacgugagaagcagauuccagugcaucgaggacagaaacgccagacugggcgagagcgugagccugaacaagagauacaccagacugagacugaucaaggagcacagaagccagcaggagagagagcaggagcugcuggccaucggcaagaccaagaccugcgagagccccgugagccccaucaagauggagcugcuguucgaccccgacgacgagcacagcgagcccgugcacaccgugguguuccagggcgccgccggcaucggcaagaccauccuggccagaaagaugaugcuggacugggccagcggcacccuguaccaggacagauucgacuaccuguucuacauccacugcagagaggugagccuggugacccagagaagccugggcgaccugaucaugagcugcugccccgaccccaacccccccauccacaagaucgugagaaagcccagcagaauccuguuccugauggacggcuucgacgagcugcagggcgccuucgacgagcacaucggcccccugugcaccgacuggcagaaggccgagagaggcgacauccugcugagcagccugaucagaaagaagcugcugcccgaggccagccugcugaucaccaccagacccguggcccuggagaagcugcagcaccugcuggaccaccccagacacguggagauccugggcuucagcgaggccaagagaaaggaguacuucuucaaguacuucagcgacgaggcccaggccagagccgccuucagccugauccaggagaacgaggugcuguucaccaugugcuucaucccccuggugugcuggaucgugugcaccggccugaagcagcagauggagagcggcaagagccuggcccagaccagcaagaccaccaccgccguguacguguucuuccugagcagccugcugcagcccagaggcggcagccaggagcacggccugugcgcccaccuguggggccugugcagccuggccgccgacggcaucuggaaccagaagauccuguucgaggagagcgaccugagaaaccacggccugcagaaggccgacgugagcgccuuccugagaaugaaccuguuccagaaggagguggacugcgagaaguucuacagcuucauccacaugaccuuccaggaguucuucgccgccauguacuaccugcuggaggaggagaaggagggcagaaccaacgugcccggcagcagacugaagcugcccagcagagacgugaccgugcugcuggagaacuacggcaaguucgagaagggcuaccugaucuucguggugagauuccuguucggccuggugaaccaggagagaaccagcuaccuggagaagaagcugagcugcaagaucagccagcagaucagacuggagcugcugaaguggaucgaggugaaggccaaggccaagaagcugcagauccagcccagccagcuggagcuguucuacugccuguacgagaugcaggaggaggacuucgugcagagagccauggacuacuuccccaagaucgagaucaaccugagcaccagaauggaccacauggugagcagcuucugcaucgagaacugccacagaguggagagccugagccugggcuuccugcacaacaugcccaaggaggaggaggaggaggagaaggagggcagacaccuggacauggugcagugcgugcugcccagcagcagccacgccgccugcagccacggccuggugaacagccaccugaccagcagcuucugcagaggccuguucagcgugcugagcaccagccagagccugaccgagcuggaccugagcgacaacagccugggcgaccccggcaugagagugcugugcgagacccugcagcaccccggcugcaacaucagaagacuguggcugggcagaugcggccugagccacgagugcugcuucgacaucagccuggugcugagcagcaaccagaagcugguggagcuggaccugagcgacaacgcccugggcgacuucggcaucagacugcugugcgugggccugaagcaccugcugugcaaccugaagaagcuguggcuggugagcugcugccugaccagcgccugcugccaggaccuggccagcgugcugagcaccagccacagccugaccagacuguacgugggcgagaacgcccugggcgacagcggcguggccauccugugcgagaaggccaagaacccccagugcaaccugcagaagcugggccuggugaacagcggccugaccagcgugugcugcagcgcccugagcagcgugcugagcaccaaccagaaccugacccaccuguaccugagaggcaacacccugggcgacaagggcaucaagcugcugugcgagggccugcugcaccccgacugcaagcugcaggugcuggagcuggacaacugcaaccugaccagccacugcugcugggaccugagcacccugcugaccagcagccagagccugagaaagcugagccugggcaacaacgaccugggcgaccugggcgugaugauguucugcgaggugcugaagcagcagagcugccugcugcagaaccugggccugagcgagauguacuucaacuacgagaccaagagcgcccuggagacccugcaggaggagaagcccgagcugaccgugguguucgagcccagcugguga

SEQ ID NO: 9073 - RNA, 3111 nt, Artificial Sequence
  derived and/or modified sequence opt5 from NALP3__Homo_sapiens__AAI43363
augaagauggccagcaccagaugcaaacuggcucgguaccucgaggaccuggaagauguggaccuuaagaaauucaagaugcaccuggaggauuaucccccucagaaaggcuguaucccgcucccccgcgggcaaacagaaaaggccgaccaugucgaucuggcgacgcuuaugauugacuuuaacggagaggaaaaggcuugggccauggccguuuggaucuucgcugccauuaauagacgggaucuguacgagaaagcuaagcgcgacgagccuaaauggggcuccgauaacgccagagugucuaaucccaccgugaucugccaggaagacagcauugaggaagaguggauggggcuccuggaguaucugucccggaucucuaucuguaagaugaaaaaggauuaccgcaagaaauauagaaaguacguccggagccgcuuucagugcauugaagacagaaacgcgcggcucggagaguccgugucucugaauaaacgcuauacaagacuucggcugaucaaggaacaccgcagccagcaagagagagaacaggagcuccuggccauuggcaaaaccaagacaugugaguccccuguuagccccaucaaaauggaacuucuguucgauccugacgacgagcauucugaaccggugcacaccgucguguuucagggggcugccggaauuggcaagacaauccucgcucggaagaugaugcuggauugggccuccggcacccuguaccaggacagauucgauuaccucuuuuauauucauugccgcgagguuagccuggugacgcaacggucucuuggggaccugaucauguccuguugccccgauccuaaucccccuauccacaaaauugucagaaagcccagccgcauccucuuccugauggacggauuugaugaacuucagggcgcguucgacgagcacauugggccgcuguguaccgauuggcagaaagccgagcggggagacauccuccugucuucccugauuagaaagaaacuccugccugaagcuagccuucugaucacaacccgccccguggcccucgagaagcugcagcaucuucuggaucacccucggcauguggaaauccucggcuuuuccgaggcuaagagaaaagaauacuucuuuaaguauuucucugacgaggcccaagcccgcgcugcguucagccugauucaggagaacgaaguccuguuuacaaugugcuucaucccccucguuuguuggauugugugcaccgggcugaaacagcaaauggaguccggaaagagccuugcccagacgucuaaaacaaccacagcuguguacgucuuuuuccuguccagccuccugcagccccggggcggcucucaggaacacgggcugugcgcccaccuuuggggacucuguagccuggccgcugacggcaucuggaaccaaaagauucuguuugaggaguccgaucucagaaaucaugggcugcagaaggccgacgugucugcguuccuucgcaugaaccuguuucagaaagaaguugauugcgagaaguucuauagcuuuauccacaugaccuuccaggaauuuuucgcugccauguacuaucuccuggaggaagagaaagagggacggaccaaugugccuggcuccagacugaagcugccgagccgggacgucacagugcuccuggaaaacuacgggaaauuugagaagggauaccugaucuucguugugcgcuuccucuuuggccuggucaaucaagaaagaacgucuuaucuugagaagaaacuguccuguaagauuagccagcagauccggcucgaacugcugaaauggauugaggugaaggccaaagcuaagaaacuucagauccaacccucucagcucgagcuguucuacugccuguaugaaaugcaggaggaagauuuuguccagagagccauggacuacuucccuaagauugagaucaaccucuccacccgcauggaucauauggugagcuccuuuuguauugaaaauugccaccggguugagucucugagccuuggcuuccugcauaacaugcccaaggaggaagaggaagaggagaaagaagggagacaccucgacauggugcaauguguccugccuuccucuagccacgcugccugcucccauggacuggugaacagccaccuuacaucuuccuuuugucgcggccucuucagcguucugucuaccucccagagccugacagagcucgaucugucugacaauagccuuggggaucccggaaugagagugcugugcgaaacccuccagcauccgggcuguaacauccggcgccuguggcuggggagaugcggccuuucccacgagugcuguuuugacaucagccugguccucucuuccaaucaaaagcugguggaacucgaucugagcgacaacgcgcuuggagacuucggcauucggcugcucugcguggggcugaaacaccuucuuuguaaucugaagaaacucuggcugguuuccugcugucucacgucugccugcugucaggaucuggcuagcguccuuuccacaucucauagccugacccgccucuaugugggagagaacgcccugggcgacuccgggguggcuauccugugcgagaaggccaagaauccucaguguaaccuucagaaacugggacucgucaauucuggccugaccagcgugugcuguuccgcgcucagcucuguucuguccacaaaccaaaaucuuacccaccuguaccugagagggaacacacucggcgauaagggaauuaaacugcuuugcgaaggccugcuccaucccgacugcaagcuccaggugcuggagcuggauaauuguaaccuuacgagccacugcuguugggaccugucuacccugcucacauccagccagucucugcggaaacuuucccuggggaauaacgaucucggagaccugggcgucaugauguuuugcgaagugcucaagcagcaaagcugucugcuucagaaccuggggcuguccgagauguauuucaauuacgaaaccaagagcgcccucgagacacugcaggaggaaaaaccugagcuuaccguuguguuugaacccucuugguga

SEQ ID NO: 9074 - protein, 994 aa, Artificial Sequence
  NALP4__Homo_sapiens__Q96MN2
MAASFFSDFGLMWYLEELKKEEFRKFKEHLKQMTLQLELKQIPWTEVKKASREELANLLIKHYEEQQAWNITLRIFQKMDRKDLCMKVMRERTGYTKTYQAHAKQKFSRLWSSKSVTEIHLYFEEEVKQEECDHLDRLFAPKEAGKQPRTVIIQGPQGIGKTTLLMKLMMAWSDNKIFRDRFLYTFYFCCRELRELPPTSLADLISREWPDPAAPITEIVSQPERLLFVIDSFEELQGGLNEPDSDLCGDLMEKRPVQVLLSSLLRKKMLPEASLLIAIKPVCPKELRDQVTISEIYQPRGFNESDRLVYFCCFFKDPKRAMEAFNLVRESEQLFSICQIPLLCWILCTSLKQEMQKGKDLALTCQSTTSVYSSFVFNLFTPEGAEGPTPQTQHQLKALCSLAAEGMWTDTFEFCEDDLRRNGVVDADIPALLGTKILLKYGERESSYVFLHVCIQEFCAALFYLLKSHLDHPHPAVRCVQELLVANFEKARRAHWIFLGCFLTGLLNKKEQEKLDAFFGFQLSQEIKQQIHQCLKSLGERGNPQGQVDSLAIFYCLFEMQDPAFVKQAVNLLQEANFHIIDNVDLVVSAYCLKYCSSLRKLCFSVQNVFKKEDEHSSTSDYSLICWHHICSVLTTSGHLRELQVQDSTLSESTFVTWCNQLRHPSCRLQKLGINNVSFSGQSVLLFEVLFYQPDLKYLSFTLTKLSRDDIRSLCDALNYPAGNVKELALVNCHLSPIDCEVLAGLLTNNKKLTYLNVSCNQLDTGVPLLCEALCSPDTVLVYLMLAFCHLSEQCCEYISEMLLRNKSVRYLDLSANVLKDEGLKTLCEALKHPDCCLDSLCLVKCFITAAGCEDLASALISNQNLKILQIGCNEIGDVGVQLLCRALTHTDCRLEILGLEECGLTSTCCKDLASVLTCSKTLQQLNLTLNTLDHTGVVVLCEALRHPECALQVLGLRKTDFDEETQALLTAEEERNPNLTITDDCDTITRVEI

SEQ ID NO: 9075 - RNA, 2985 nt, Artificial Sequence
  NALP4__Homo_sapiens__CCDS12936.1
auggcagccucuuucuucucugauuuuggucuuaugugguaucuggaggagcucaaaaaggaggaguucaggaaauuuaaagaacaucucaagcaaaugacuuugcagcuugaacucaagcagauucccuggacugaggucaaaaaagcaucccgggaagaacuugcaaaccucuugaucaagcacuaugaagaacaacaagcuuggaacauaaccuuaagaaucuuucaaaagauggauagaaaggaucucugcaugaaggucaugagggagagaacaggauacacaaagaccuaucaagcucacgcaaagcagaaauucagccgcuuaugguccagcaagucugucacugagauucaccuauacuuugaggaggaagucaagcaagaagaaugugaccauuuggaccgccuuuuugcucccaaggaagcugggaaacagccacguacagugaucauucaaggaccacaaggaauuggaaaaacgacacuccugaugaagcugaugauggccuggucggacaacaagaucuuucgggauagguuccuguacacguucuauuucugcugcagagaacugagggaguugccgccaacgaguuuggcugacuugauuuccagagaguggccugaccccgcugcuccuauaacagagaucgugucucaaccggagagacucuuguucgucaucgacagcuucgaagagcugcagggcggcuugaacgaacccgauucggaucuguguggugacuugauggagaaacggccggugcaggugcuucugagcaguuugcugaggaagaagaugcucccggaggccucccugcucaucgcuaucaaacccgugugcccgaaggagcuccgggaucaggugacgaucucagaaaucuaccagccccggggauucaacgagagugauagguuaguguauuucugcuguuucuucaaagacccgaaaagagccauggaagccuucaaucuuguaagagaaagugaacagcuguuuuccauaugccaaaucccgcuccucugcuggauccuguguaccagucugaagcaagagaugcagaaaggaaaagaccuggcccugaccugccagagcacuaccucuguguacuccucuuucgucuuuaaccuguucacaccugagggugccgagggcccgacuccgcaaacccagcaccagcugaaggcccugugcucccuggcugcagaggguauguggacagacacauuugaguuuugugaagacgaccuccggagaaaugggguuguugacgcugacaucccugcgcugcugggcaccaagauacuucugaaguacggggagcgugagagcuccuacguguuccuccacguguguauccaggaguucugugccgccuuguucuauuugcucaagagccaccuugaucauccucacccagcugugagauguguacaggaauugcuaguugccaauuuugaaaaagcaaggagagcacauuggauuuuuuugggguguuuucuaacuggccuuuuaaauaaaaaggaacaagaaaaacuggaugcguuuuuuggcuuccaacugucccaagagauaaagcagcaaauucaccagugccugaagagcuuaggggagcguggcaauccucagggacagguggauuccuuggcgauauuuuacugucucuuugaaaugcaggauccugccuuugugaagcaggcagugaaccuccuccaagaagcuaacuuucauauuauugacaacguggacuuggugguuucugccuacugcuuaaaauacugcuccagcuugaggaaacucuguuuuuccguucaaaaugucuuuaagaaagaggaugaacacagcucuacgucggauuacagccucaucuguuggcaucacaucugcucugugcucaccaccagcgggcaccucagagagcuccaggugcaggacagcacccucagcgagucgaccuuugugaccugguguaaccagcugaggcaucccagcugucgccuucagaagcuuggaauaaauaacguuuccuuuucuggccagaguguucugcucuuugaggugcucuuuuaucagccagacuugaaauaccugagcuucacccucacgaaacucucucgugaugacaucaggucccucugugaugccuugaacuacccagcaggcaacgucaaagagcuagcgcugguaaauugucaccucucacccauugauugugaaguccuugcuggccuucuaaccaacaacaagaagcugacguaucugaauguauccugcaaccaguuagacacaggcgugccccuuuugugugaagcccugugcagcccagacacgguccugguauaccugauguuggcuuucugccaccucagcgagcagugcugcgaauacaucucugaaaugcuucugcguaacaagagcgugcgcuaucuagaccucagugccaauguccugaaggacgaaggacugaaaacucucugcgaggccuugaaacauccggacugcugccuggauucacuguguuugguaaaauguuuuaucacugcugcuggcugugaagaccucgccucugcucucaucagcaaucaaaaccugaagauucugcaaauugggugcaaugaaaucggagaugugggugugcagcuguugugucgggcucugacgcauacggauugccgcuuagagauucuuggguuggaagaauguggguuaacgagcaccugcuguaaggaucucgcgucuguucucaccugcaguaagacccugcagcagcucaaccugaccuugaacaccuuggaccacacaggggugguuguacucugugaggcccugagacacccagagugugcccugcaggugcucgggcugagaaaaacugauuuugaugaggaaacccaggcacuucugacggcugaggaagagagaaauccuaaccugaccaucacagacgacugugacacaaucacaaggguagagaucuga

SEQ ID NO: 9076 - RNA, 2985 nt, Artificial Sequence
  derived and/or modified sequence opt1 from NALP4__Homo_sapiens__CCDS12936.1
auggccgccagcuucuucuccgacuucggccugaugugguaccucgaggagcugaagaaggaggaguuccgcaaguucaaggagcaccugaagcagaugacccuccagcuggagcugaagcagauccccuggaccgaggugaagaaggcgagccgggaggagcucgccaaccugcugaucaagcacuacgaggagcagcaggccuggaacaucacgcuccgcaucuuccagaagauggaccggaaggaccugugcaugaaggucaugcgcgagcggaccggguacaccaagaccuaccaggcccacgccaagcagaaguucucccgccuguggagcuccaagagcgugacggagauccaccucuacuucgaggaggaggugaagcaggaggagugcgaccaccuggaccggcuguucgcgccgaaggaggccggcaagcagccccgcaccgucaucauccaggggccccagggcaucgggaagaccacccuccugaugaagcugaugauggccugguccgacaacaagaucuuccgggaccgcuuccucuacacguucuacuucugcugccgggagcugcgcgagcugcccccgaccagccucgccgaccugaucucccgggaguggcccgaccccgcggcccccaucaccgagaucgugagccagccggagcgccuccucuucgugaucgacuccuucgaggagcugcagggcggccugaacgagcccgacagcgaccucugcggggaccugauggagaagcggcccguccaggugcugcucuccagccugcugcgcaagaagaugcuccccgaggccucccugcugaucgccaucaagccggugugccccaaggagcuccgggaccaggucaccaucagcgagaucuaccagccccgcggcuucaacgaguccgaccggcugguguacuucugcugcuucuucaaggaccccaagcgcgccauggaggcguucaaccuggugcgggagagcgagcagcuguucuccaucugccagaucccgcugcugugcuggauccucugcacgagccugaagcaggagaugcagaaggggaaggaccuggcccugaccugccagagcaccaccuccgucuacagcuccuucguguucaaccuguucacgcccgagggcgccgaggggcccacgccccagacccagcaccagcugaaggcccucugcagccuggccgcggagggcauguggaccgacaccuucgaguucugcgaggacgaccugcgccgcaacggcguggucgacgccgacaucccggcccugcucgggaccaagauccugcugaaguacggcgagcgggaguccagcuacguguuccuccacgugugcauccaggaguucugcgccgcccuguucuaccugcucaagucccaccuggaccacccccaccccgcgguccgcugcgugcaggagcugcucguggccaacuucgagaaggcccggcgcgcccacuggaucuuccuggggugcuuccugaccggccuccugaacaagaaggagcaggagaagcuggacgccuucuucggcuuccagcucagccaggagaucaagcagcagauccaccagugccugaagucccugggggagcggggcaacccccaggggcaggucgacagccucgcgaucuucuacugccuguucgagaugcaggacccggccuucgugaagcaggccgugaaccugcuccaggaggccaacuuccacaucaucgacaacgucgaccugguggucuccgcguacugccugaaguacugcagcucccuccgcaagcugugcuucagcgugcagaacguguucaagaaggaggacgagcacuccagcaccuccgacuacagccugaucugcuggcaccacaucugcuccguccucacgaccagcggccaccuccgggagcuccaggugcaggacagcacccucuccgagagcaccuucgugacguggugcaaccagcugcgccaccccuccugccggcugcagaagcucgggaucaacaacgucagcuucuccggccagagcgugcugcuguucgaggugcuguucuaccagcccgaccugaaguaccuguccuucacccucaccaagcugagccgcgacgacauccggucccugugcgacgcccucaacuaccccgccggcaacgucaaggagcuggcccuggugaacugccaccucagcccgaucgacugcgaggugcuggccgggcugcucaccaacaacaagaagcugacguaccugaacgucuccugcaaccagcucgacaccggcgugccccugcugugcgaggcgcucugcagccccgacaccgugcuggucuaccugaugcucgccuucugccaccuguccgagcagugcugcgaguacaucagcgagaugcugcuccgcaacaaguccgugcgguaccuggaccugagcgccaacgugcucaaggacgaggggcugaagacccugugcgaggcccucaagcacccggacugcugccuggacucccugugccucgucaagugcuucaucacggccgcgggcugcgaggaccuggccagcgcccugaucagcaaccagaaccucaagauccugcagaucgggugcaacgagaucggcgacgugggcgugcagcugcucugccgcgcccugacccacaccgacugccggcuggagauccucgggcuggaggagugcggccugaccuccacgugcugcaaggaccucgccagcguccugaccugcuccaagacccugcagcagcucaaccugacccugaacacccucgaccacacggggguggugguccugugcgaggcgcugcgccaccccgagugcgcccuccaggugcugggccugcggaagaccgacuucgacgaggagacccaggcccuccugaccgccgaggaggagcgcaaccccaaccugacgaucaccgacgacugcgacaccaucacccggguggagaucuga

SEQ ID NO: 9077 - RNA, 2985 nt, Artificial Sequence
  derived and/or modified sequence opt2 from NALP4__Homo_sapiens__CCDS12936.1
auggccgccuccuucuucuccgacuucggccucaugugguaccucgaggagcucaagaaggaggaguuccgcaaguucaaggagcaccucaagcagaugacccuccagcucgagcucaagcagauccccuggaccgaggucaagaaggccucccgcgaggagcucgccaaccuccucaucaagcacuacgaggagcagcaggccuggaacaucacccuccgcaucuuccagaagauggaccgcaaggaccucugcaugaaggucaugcgcgagcgcaccggcuacaccaagaccuaccaggcccacgccaagcagaaguucucccgccucugguccuccaaguccgucaccgagauccaccucuacuucgaggaggaggucaagcaggaggagugcgaccaccucgaccgccucuucgcccccaaggaggccggcaagcagccccgcaccgucaucauccagggcccccagggcaucggcaagaccacccuccucaugaagcucaugauggccugguccgacaacaagaucuuccgcgaccgcuuccucuacaccuucuacuucugcugccgcgagcuccgcgagcucccccccaccucccucgccgaccucaucucccgcgaguggcccgaccccgccgcccccaucaccgagaucgucucccagcccgagcgccuccucuucgucaucgacuccuucgaggagcuccagggcggccucaacgagcccgacuccgaccucugcggcgaccucauggagaagcgccccguccagguccuccucuccucccuccuccgcaagaagaugcuccccgaggccucccuccucaucgccaucaagcccgucugccccaaggagcuccgcgaccaggucaccaucuccgagaucuaccagccccgcggcuucaacgaguccgaccgccucgucuacuucugcugcuucuucaaggaccccaagcgcgccauggaggccuucaaccucguccgcgaguccgagcagcucuucuccaucugccagaucccccuccucugcuggauccucugcaccucccucaagcaggagaugcagaagggcaaggaccucgcccucaccugccaguccaccaccuccgucuacuccuccuucgucuucaaccucuucacccccgagggcgccgagggccccaccccccagacccagcaccagcucaaggcccucugcucccucgccgccgagggcauguggaccgacaccuucgaguucugcgaggacgaccuccgccgcaacggcgucgucgacgccgacauccccgcccuccucggcaccaagauccuccucaaguacggcgagcgcgaguccuccuacgucuuccuccacgucugcauccaggaguucugcgccgcccucuucuaccuccucaagucccaccucgaccacccccaccccgccguccgcugcguccaggagcuccucgucgccaacuucgagaaggcccgccgcgcccacuggaucuuccucggcugcuuccucaccggccuccucaacaagaaggagcaggagaagcucgacgccuucuucggcuuccagcucucccaggagaucaagcagcagauccaccagugccucaagucccucggcgagcgcggcaacccccagggccaggucgacucccucgccaucuucuacugccucuucgagaugcaggaccccgccuucgucaagcaggccgucaaccuccuccaggaggccaacuuccacaucaucgacaacgucgaccucgucgucuccgccuacugccucaaguacugcuccucccuccgcaagcucugcuucuccguccagaacgucuucaagaaggaggacgagcacuccuccaccuccgacuacucccucaucugcuggcaccacaucugcuccguccucaccaccuccggccaccuccgcgagcuccagguccaggacuccacccucuccgaguccaccuucgucaccuggugcaaccagcuccgccaccccuccugccgccuccagaagcucggcaucaacaacgucuccuucuccggccaguccguccuccucuucgagguccucuucuaccagcccgaccucaaguaccucuccuucacccucaccaagcucucccgcgacgacauccgcucccucugcgacgcccucaacuaccccgccggcaacgucaaggagcucgcccucgucaacugccaccucucccccaucgacugcgagguccucgccggccuccucaccaacaacaagaagcucaccuaccucaacgucuccugcaaccagcucgacaccggcgucccccuccucugcgaggcccucugcucccccgacaccguccucgucuaccucaugcucgccuucugccaccucuccgagcagugcugcgaguacaucuccgagaugcuccuccgcaacaaguccguccgcuaccucgaccucuccgccaacguccucaaggacgagggccucaagacccucugcgaggcccucaagcaccccgacugcugccucgacucccucugccucgucaagugcuucaucaccgccgccggcugcgaggaccucgccuccgcccucaucuccaaccagaaccucaagauccuccagaucggcugcaacgagaucggcgacgucggcguccagcuccucugccgcgcccucacccacaccgacugccgccucgagauccucggccucgaggagugcggccucaccuccaccugcugcaaggaccucgccuccguccucaccugcuccaagacccuccagcagcucaaccucacccucaacacccucgaccacaccggcgucgucguccucugcgaggcccuccgccaccccgagugcgcccuccagguccucggccuccgcaagaccgacuucgacgaggagacccaggcccuccucaccgccgaggaggagcgcaaccccaaccucaccaucaccgacgacugcgacaccaucacccgcgucgagaucuga
